United States Patent Application Publication US 2004/0253606 A1 - sequence listing, part 2

SEQ ID NO: 1062 - DNA, 376 bp, Homo sapiens
  misc_feature (273)..(273): n is a, c, g, or t
  misc_feature (306)..(306): n is a, c, g, or t
  misc_feature (369)..(369): n is a, c, g, or t
  misc_feature (374)..(374): n is a, c, g, or t
ttttcttaatcaaccatttatcttttccttttaaaatgtaaggcatcaaacttggaagatctataactattttattagacggtaatatataaacaaatgacagttcagataatatttttaaagtgctatgatcattgtaactttaatcagataaaacgtaattattattaacatttttacattatagctgatttgtctaaattctaattacaataaaatatatcgttttatcttatcaaatagtttttatattgagagtgaaagaaacagtanaatagtcagaggaaaaactagtgccatacccanaagtattacttcagaaatttactttaatatcatatttatattaaaatattttatttgtctccntgggnat

SEQ ID NO: 1063 - DNA, 662 bp, Homo sapiens
ccagaggttttacaaaagtgcactcttctacatctacctatcactagaagacctggctggcttcaaagagctcttccagacaccaggtccctctgaggaatcaatgactgatgagaaaactaccaaaatagcctgcaaatctccaccaccagaatcagtggacactccaacaagcactaagcaatggcctaagagaagtctcaggaaagcagatgtagaggaagaattcttagcactcaggaaactaacaccatcagcagggaaagccatgcttacgcccaaaccagcaggaggtgatgagaaagacattaaagcatttatgggaactccagtgcagaaactggacctggcaggaactttacctggcagcaaaagacagatacaaactcctaaggaaaaggcccaggctctagaagacctggctggctttaaagagctcttccagactcctggtcacaccgaggaattagtggctgctggtaaaaccactaaaataccctgcgactctccacagtcagacccagtggacaccccaaaaagcacaaagcaacgacccaagagaagtatcaggaaagcagatgtagagggagaactcttagcgtgcagggaatctaatgccatcagcaggcaaagccatgcacacgcctataacatcagtagat

SEQ ID NO: 1064 - DNA, 10558 bp, Homo sapiens
cagtttggagctcagtcttccaccaaaggccgttcagttctcctgggctccagcctcctgcaaggactgcaagagttttcctccgcagctctgagtctccacttttttggtggagaaaggctgcaaaaagaaaaagagacgcagtgagtgggaaaagtatgcatcctattcaaacctaattgaatcgaggagcccagggacacacgccttcaggtttgctcaggggttcatatttggtgcttagacaaattcaaaatgaggaaacatcggcacttgcccttagtggccgtcttttgcctctttctctcaggctttcctacaactcatgcccagcagcagcaagcagatgtcaaaaatggtgcggctgctgatataatatttctagtggattcctcttggaccattggagaggaacatttccaacttgttcgagagtttctatatgatgttgtaaaatccttagctgtgggagaaaatgatttccattttgctctggtccagttcaacggaaacccacataccgagttcctgttaaatacgtatcgtactaaacaagaagtcctttctcatatttccaacatgtcttatattgggggaaccaatcagactggaaaaggattagaatacataatgcaaagccacctcaccaaggctgctggaagccgggccggtgacggagtccctcaggttatcgtagtgttaactgatggacactcgaaggatggccttgctctgccctcagcggaacttaagtctgctgatgttaacgtgtttgcaattggagttgaggatgcagatgaaggagcgttaaaagaaatagcaagtgaaccgctcaatatgcatatgttcaacctagagaattttacctcacttcatgacatagtaggaaacttagtgtcctgtgtgcattcatccgtgagtccagaaagggctggggacacggaaacccttaaagacatcacagcacaagactctgctgacattattttccttattgatggatcaaacaacaccggaagtgtcaatttcgcagtcattctcgacttccttgtaaatctccttgagaaactcccaattggaactcagcagatccgagtgggggtggtccagtttagcgatgagcccagaaccatgttttccttggacacctactccaccaaggcccaggttctgggtgcagtgaaagccctcgggtttgctggtggggagttggccaatatcggcctcgcccttgatttcgtggtggagaaccacttcacccgggcagggggcagccgcgtggaggaaggggttccccaggtgctggtcctcataagtgccgggccttctagtgacgagattcgctacggggtggtagcactgaagcaggctagcgtgttctcattcggccttggagcccaggccgcctccagggcagagcttcagcacatagctaccgatgacaacttggtgtttactgtcccggaattccgtagctttggggacctccaggagaaattactgccgtacattgttggcgtggcccaaaggcacattgtcttgaaaccgccaaccattgtcacacaagtcattgaagtcaacaagagagacatagtcttcctggtggatggctcatctgcactgggactggccaacttcaatgccatccgagacttcattgctaaagtcatccagaggctggaaatcggacaggatcttatccaggtggcagtggcccagtatgcagacactgtgaggcctgaattttatttcaatacccatccaacaaaaagggaagtcataaccgctgtgcggaaaatgaagcccctggacggctcggccctgtacacgggctctgctctagactttgttcgtaacaacctattcacgagttcagccggctaccgggctgccgaggggattcctaagcttttggtgctgatcacaggtggtaagtccctagatgaaatcagccagcctgcccaggagctgaagagaagcagcataatggcctttgccattgggaacaagggtgccgatcaggctgagctggaagagatcgctttcgactcctccctggtgttcatcccagctgagttccgagccgccccattgcaaggcatgctgcctggcttgctggcacctctcaggaccctctctggaacccctgaagttcactcaaacaaaagagatatcatctttcttttggatggatcagccaacgttggaaaaaccaatttcccttatgtgcgcgactttgtaatgaacctagttaacagccttgatattggaaatgacaatattcgtgttggtttagtgcaatttagtgacactcctgtaacggagttctctttaaacacataccagaccaagtcagatatccttggtcatctgaggcagctgcagctccagggaggttcgggcctgaacacaggctcagccctaagctatgtctatgccaaccacttcacggaagctggcggcagcaggatccgtgaacacgtgccgcagctcctgcttctgctcacagctgggcagtctgaggactcctatttgcaagctgccaacgccttgacacgcgcgggcatcctgactttttgtgtgggagctagccaggcgaataaggcagagcttgagcagattgcttttaacccaagcctggtgtatctcatggatgatttcagctccctgccagctttgcctcagcagctgattcagcccctaaccacatatgttagtggaggtgtggaggaagtaccactcgctcagccagagagcaagcgagacattctgttcctctttgacggctcagccaatcttgtgggccagttccctgttgtccgtgactttctctacaagattatcgatgagctcaatgtgaagccagaggggacccgaattgcggtggctcagtacagcgatgatgtcaaggtggagtcccgttttgatgagcaccagagtaagcctgagatcctgaatcttgtgaagagaatgaagatcaagacgggcaaagccctcaacctgggctacgcgctggactatgcacagaggtacatttttgtgaagtctgctggcagccggatcgaggatggagtgcttcagttcctggtgctgctggtcgcaggaaggtcatctgaccgtgtggatgggccagcaagtaacctgaagcagagtggggttgtgcctttcatcttccaagccaagaacgcagaccctgctgagttagagcagatcgtgctgtctccagcgtttatcctggctgcagagtcgcttcccaagattggagatcttcatccacagatagtgaatctcttaaaatcagtgcacaacggagcaccagcaccagtttcaggtgaaaaggacgtggtgtttctgcttgatggctctgagggcgtcaggagcggcttccctctgttgaaagagtttgtccagagagtggtggaaagcctggatgtgggccaggaccgggtccgcgtggccgtggtgcagtacagcgaccggaccaggcccgagttctacctgaattcatacatgaacaagcaggacgtcgtcaacgctgtccgccagctgaccctgctgggagggccgacccccaacaccggggccgccctggagtttgtcctgaggaacatcctggtcagctctgcgggaagcaggataacagaaggtgtgccccagctgctgatcgtcctcacggccgacaggtctggggatgatgtgcggaacccctccgtggtcgtgaagaggggtggggctgtgcccattggcattggcatcgggaacgctgacatcacagagatgcagaccatctccttcatcccggactttgccgtggccattcccacctttcgccagctggggaccgtccaacaggtcatctctgagagggtgacccagctcacccgcgaggagctgagcaggctgcagccggtgttgcagcctctaccgagcccaggtgttggtggcaagagggacgtggtctttctcatcgatgggtcccaaagtgccgggcctgagttccagtacgttcgcaccctcatagagaggctggttgactacctggacgtgggctttgacaccacccgggtggctgtcatccagttcagcgatgaccccaaggcggagttcctgctgaacgcccattccagcaaggatgaagtgcagaacgcggtgcagcggctgaggcccaagggagggcggcagatcaacgtgggcaatgccctggagtacgtgtccaggaacatcttcaagaggcccctggggagccgcattgaagagggcgtcccacagttcctggtcctcatctcgtctggaaagtctgacgatgaggtggtcgtcccggcggtggagctcaagcagtttggcgtggcccctttcacgatcgccaggaacgcagaccaggaggagctggtgaagatctcgctgagccccgaatatgtgttctcggtgagcaccttccgggagctgcccagcctggagcagaaactgctgacgcccatcacgaccctgacctcagagcagatccagaagctcttagccagcactcgctatccacctccagcagttgagagtgatgctgcagacattgtctttctgatcgacagctctgagggagttaggccagatggctttgcacatattcgagattttgttagcaggattgttcgaagactcaacatcggccccagtaaagtgagagttggggtcgtgcagttcagcaatgatgtcttcccagaattctatctgaaaacctacagatcccaggccccggtgctggacgccatacggcgcctgaggctcagaggggggtccccactgaacactggcaaggctctcgaatttgtggcaagaaacctctttgttaagtctgcggggagtcgcatagaagacggggtgccccaacacctggtcctggtcctgggtggaaaatcccaggacgatgtgtccaggttcgcccaggtgatccgttcctcgggcattgtgagtttaggggtaggagaccggaacatcgacagaacagagctgcagaccatcaccaatgaccccagactggtcttcacagtgcgagagttcagagagcttcccaacatagaagaaagaatcatgaactcgtttggaccctccgcagccactcctgcacctccaggggtggacacccctcctccttcacggccagagaagaagaaagcagacattgtgttcctgttggatggttccatcaacttcaggagggacagtttccaggaagtgcttcgttttgtgtctgaaatagtggacacagtttatgaagatggcgactccatccaagtggggcttgtccagtacaactctgaccccactgacgaattcttcctgaaggacttctctaccaagaggcagattattgacgccatcaacaaagtggtctacaaagggggaagacacgccaacactaaggtgggccttgagcacctgcgggtaaaccactttgtgcctgaggcaggcagccgcctggaccagcgggtccctcagattgcctttgtgatcacgggaggaaagtcggtggaagatgcacaggatgtgagcctggccctcacccagaggggggtcaaagtgtttgctgttggagtgaggaatatcgactcggaggaggttggaaagatagcgtccaacagcgccacagcgttccgcgtgggcaacgtccaggagctgtccgaactgagcgagcaagttttggaaactttgcatgatgcgatgcatgaaaccctttgccctggtgtaactgatgctgccaaagcttgtaatctggatgtgattctggggtttgatggttctagagaccagaatgtttttgtggcccagaagggcttcgagtccaaggtggacgccatcttgaacagaatcagccagatgcacagggtcagctgcagcggtggccgctcgcccaccgtgcgtgtgtcagtggtggccaacacgccctcgggcccggtggaggcctttgactttgacgagtaccagccagagatgctcgagaagttccggaacatgcgcagccagcacccctacgtcctcacggaggacaccctgaaggtctacctgaacaagttcagacagtcctcgccggacagcgtgaaggtggtcattcattttactgatggagcagacggagatctggctgatttacacagagcatctgagaacctccgccaagaaggagtccgtgccttgatcctggtgggccttgaacgagtggtcaacttggagcggctaatgcatctggagtttgggcgagggtttatgtatgacaggcccctgaggcttaacttgctggacttggattatgaactagcggagcagcttgacaacattgccgagaaagcttgctgtggggttccctgcaagtgctctgggcagaggggagaccgcgggcccatcggcagcatcgggccaaagggtattcctggagaagacggctaccgaggctatcctggtgatgagggtggacccggtgagcgtggtccgcctggtgtgaacggcactcaaggtttccagggctgcccgggccagagaggagtaaagggctctcggggattcccaggagagaagggcgaagtaggagaaattggactggatggtctggatggtgaagatggagacaaaggattgcctggttcttctggagagaaagggaatcctggaagaaggggtgataaaggacctcgaggagagaaaggagaaagaggagatgttgggattcgaggggacccgggtaacccaggacaagacagccaggagagaggacccaaaggagaaaccggtgacctcggccccatgggtgtcccagggagagatggagtacctggaggacctggagaaactgggaagaatggtggctttggccgaaggggaccccccggagctaagggcaacaagggcggtcctggccagccgggctttgagggagagcaggggaccagaggtgcacagggcccagctggtcctgctggtcctccagggctgataggagaacaaggcatttctggacctaggggaagcggaggtgcccgtggcgctcctggagaacgaggcagaaccggtccactgggaagaaagggtgagcccggagagccaggaccaaaaggaggaatcgggaacccgggccctcgtggggagacgggagatgacgggagagacggagttggcagtgaaggacgcagaggcaaaaaaggagaaagaggatttcctggatacccaggaccaaagggtaacccaggtgaacctgggctaaatggaacaacaggacccaaaggcatcagaggccgaaggggaaattcgggacctccagggatagttggacagaaggggagacctggctacccaggaccagctggtccaaggggcaacaggggcgactccatcgatcaatgtgccctcatccaaagcatcaaagataaatgcccttgctgttacgggcccctggagtgccccgtcttcccaacagaactagcctttgctttagacacctctgagggagtcaaccaagacactttcggccggatgcgagatgtggtcttgagtattgtgaatgtcctgaccattgctgagagcaactgcccgacgggggcccgggtggctgtggtcacctacaacaacgaggtgaccacggagatccggtttgctgactccaagaggaagtcggtcctcctggacaagattaagaaccttcaggtggctctgacatccaaacagcagagtctggagactgccatgtcgtttgtggccaggaacacatttaagcgtgtgaggaacggattcctaatgaggaaagtggctgttttcttcagcaacacacccacaagagcatccccacagctcagagaggctgtgctcaaactctcagatgcggggatcacccccttgttccttacaaggcaggaagaccggcagctcatcaacgctttgcagatcaataacacagcagtggggcatgcgcttgtcctgcctgcagggagagacctcacagacttcctggagaatgtcctcacgtgtcatgtttgcttggacatctgcaacatcgacccatcctgtggatttggcagttggaggccttccttcagggacaggagagcggcagggagtgatgtggacatcgacatggctttcatcttagacagcgctgagaccaccaccctgttccagttcaatgagatgaagaagtacatagcgtacctggtcagacaactggacatgagcccagatcccaaggcctcccagcacttcgccagagtggcagttgtgcagcacgcgccctctgagtccgtggacaatgccagcatgccacctgtgaaggtggaattctccctgactgactatggctccaaggagaagctggtggacttcctcagcaggggaatgacacagttgcagggaaccagggccttaggcagtgccattgaatacaccatagagaatgtctttgaaagtgccccaaacccacgggacctgaaaattgtggtcctgatgctgacgggcgaggtgccggagcagcagctggaggaggcccagagagtcatcctgcaggccaaatgcaagggctacttcttcgtggtcctgggcattggcaggaaggtgaacatcaaggaggtatacaccttcgccagtgagccaaacgacgtcttcttcaaattagtggacaagtccaccgagctcaacgaggagcctttgatgcgcttcgggaggctgttgccgtccttcgtcagcagtgaaaatgctttttacttgtccccagatatcaggaaacagtgtgattggttccaaggggaccaacccacaaagaaccttgtgaagtttggtcacaaacaagtaaatgttccgaataacgttacttcaagtcctacatccaacccagtgacgacaacgaagccggtgactacgacgaagccggtgaccaccacaacaaagcctgtaaccaccacaacaaagcctgtgactattataaatcagccatctgtgaagccagccgctgcaaagccggcccctgcgaaacctgtggctgccaagcctgtggccacaaagacggccactgttagacccccagtggcggtgaagccagcaacagcagcgaagcctgtagcagcaaagccagcagctgtaagaccccccgctgctgctgcaaaaccagtggcgaccaagcctgaggtccctaggccacaggcagccaaaccagctgccaccaagccagccaccactaagcccgtggttaagatgctccgtgaagtccaggtgtttgagataacagagaacagcgccaaactccactgggagaggcctgagccccccggtccttatttttatgacctcaccgtcacctcagcccatgatcagtccctggttctgaagcagaacctcacggtcacggaccgcgtcattggaggcctgctcgctgggcagacataccatgtggctgtggtctgctacctgaggtctcaggtcagagccacctaccacggaagtttcagtacaaagaaatctcagcccccacctccacagccagcaaggtcagcttctagttcaaccatcaatctaatggtgagcacagaaccattggctctcactgaaacagatatatgcaagttgccgaaagacgaaggaacttgcagggatttcatattaaaatggtactatgatccaaacaccaaaagctgtgcaagattctggtatggaggttgtggtggaaacgaaaacaaatttggatcacagaaagaatgtgaaaaggtttgcgctcctgtgctcgccaaacccggagtcatcagtgtgatgggaacctaagcgtgggtggccaacatcatatacctcttgaagaagaaggagtcagccatcgccaacttgtctctgtagaagctccgggtgtagattcccttgcactgtatcatttcatgctttgatttacactcgaactcgggagggaacatcctgctgcatgacctatcagtatggtgctaatgtgtctgtggaccctcgctctctgtctccagcagttctctcgaatactttgaatgttgtgtaacagttagccactgctggtgtttatgtgaacattcctatcaatccaaattccctctggagtttcatgttatgcctgttgcaggcaaatgtaaagtctagaaaataatgcaaatgtcacggctactctatatacttttgcttggttcattttttttcccttttagttaagcatgactttagatgggaagcctgtgtatcgtggagaaacaagagaccaactttttcattccctgcccccaatttcccagactagatttcaagctaattttctttttctgaagcctctaacaaatgatctagttcagaaggaagcaaaatcccttaatctatgtgcaccgttgggaccaatgccttaattaaagaatttaaaaaagttgtaatagagaatatttttggcattcctctcaatgttgtgtgttttttttttttgtgtgctggagggaggggatttaattttaattttaaaatgtttaggaaatttatacaaagaaactttttaataaagtatattgaaagtttaaaaaaaaaaaaaaaa

SEQ ID NO: 1065 - protein, 3176 aa, Homo sapiens
MRKHRHLPLVAVFCLFLSGFPTTHAQQQQADVKNGAAADIIFLVDSSWTIGEEHFQLVREFLYDVVKSLAVGENDFHFALVQFNGNPHTEFLLNTYRTKQEVLSHISNMSYIGGTNQTGKGLEYIMQSHLTKAAGSRAGDGVPQVIVVLTDGHSKDGLALPSAELKSADVNVFAIGVEDADEGALKEIASEPLNMHMFNLENFTSLHDIVGNLVSCVHSSVSPERAGDTETLKDITAQDSADIIFLIDGSNNTGSVNFAVILDFLVNLLEKLPIGTQQIRVGVVQFSDEPRTMFSLDTYSTKAQVLGAVKALGFAGGELANIGLALDFVVENHFTRAGGSRVEEGVPQVLVLISAGPSSDEIRYGVVALKQASVFSFGLGAQAASRAELQHIATDDNLVFTVPEFRSFGDLQEKLLPYIVGVAQRHIVLKPPTIVTQVIEVNKRDIVFLVDGSSALGLANFNAIRDFIAKVIQRLEIGQDLIQVAVAQYADTVRPEFYFNTHPTKREVITAVRKMKPLDGSALYTGSALDFVRNNLFTSSAGYRAAEGIPKLLVLITGGKSLDEISQPAQELKRSSIMAFAIGNKGADQAELEEIAFDSSLVFIPAEFRAAPLQGMLPGLLAPLRTLSGTPEVHSNKRDIIFLLDGSANVGKTNFPYVRDFVMNLVNSLDIGNDNIRVGLVQFSDTPVTEFSLNTYQTKSDILGHLRQLQLQGGSGLNTGSALSYVYANHFTEAGGSRIREHVPQLLLLLTAGQSEDSYLQAANALTRAGILTFCVGASQANKAELEQIAFNPSLVYLMDDFSSLPALPQQLIQPLTTYVSGGVEEVPLAQPESKRDILFLFDGSANLVGQFPVVRDFLYKIIDELNVKPEGTRIAVAQYSDDVKVESRFDEHQSKPEILNLVKRMKIKTGKALNLGYALDYAQRYIFVKSAGSRIEDGVLQFLVLLVAGRSSDRVDGPASNLKQSGVVPFIFQAKNADPAELEQIVLSPAFILAAESLPKIGDLHPQIVNLLKSVHNGAPAPVSGEKDVVFLLDGSEGVRSGFPLLKEFVQRVVESLDVGQDRVRVAVVQYSDRTRPEFYLNSYMNKQDVVNAVRQLTLLGGPTPNTGAALEFVLRNILVSSAGSRITEGVPQLLIVLTADRSGDDVRNPSVVVKRGGAVPIGIGIGNADITEMQTISFIPDFAVAIPTFRQLGTVQQVISERVTQLTREELSRLQPVLQPLPSPGVGGKRDVVFLIDGSQSAGPEFQYVRTLIERLVDYLDVGFDTTRVAVIQFSDDPKAEFLLNAHSSKDEVQNAVQRLRPKGGRQINVGNALEYVSRNIFKRPLGSRIEEGVPQFLVLISSGKSDDEVVVPAVELKQFGVAPFTIARNADQEELVKISLSPEYVFSVSTFRELPSLEQKLLTPITTLTSEQIQKLLASTRYPPPAVESDAADIVFLIDSSEGVRPDGFAHIRDFVSRIVRRLNIGPSKVRVGVVQFSNDVFPEFYLKTYRSQAPVLDAIRRLRLRGGSPLNTGKALEFVARNLFVKSAGSRIEDGVPQHLVLVLGGKSQDDVSRFAQVIRSSGIVSLGVGDRNIDRTELQTITNDPRLVFTVREFRELPNIEERIMNSFGPSAATPAPPGVDTPPPSRPEKKKADIVFLLDGSINFRRDSFQEVLRFVSEIVDTVYEDGDSIQVGLVQYNSDPTDEFFLKDFSTKRQIIDAINKVVYKGGRHANTKVGLEHLRVNHFVPEAGSRLDQRVPQIAFVITGGKSVEDAQDVSLALTQRGVKVFAVGVRNIDSEEVGKIASNSATAFRVGNVQELSELSEQVLETLHDAMHETLCPGVTDAAKACNLDVILGFDGSRDQNVFVAQKGFESKVDAILNRISQMHRVSCSGGRSPTVRVSVVANTPSGPVEAFDFDEYQPEMLEKFRNMRSQHPYVLTEDTLKVYLNKFRQSSPDSVKVVIHFTDGADGDLADLHRASENLRQEGVRALILVGLERVVNLERLMHLEFGRGFMYDRPLRLNLLDLDYELAEQLDNIAEKACCGVPCKCSGQRGDRGPIGSIGPKGIPGEDGYRGYPGDEGGPGERGPPGVNGTQGFQGCPGQRGVKGSRGFPGEKGEVGEIGLDGLDGEDGDKGLPGSSGEKGNPGRRGDKGPRGEKGERGDVGIRGDPGNPGQDSQERGPKGETGDLGPMGVPGRDGVPGGPGETGKNGGFGRRGPPGAKGNKGGPGQPGFEGEQGTRGAQGPAGPAGPPGLIGEQGISGPRGSGGARGAPGERGRTGPLGRKGEPGEPGPKGGIGNPGPRGETGDDGRDGVGSEGRRGKKGERGFPGYPGPKGNPGEPGLNGTTGPKGIRGRRGNSGPPGIVGQKGRPGYPGPAGPRGNRGDSIDQCALIQSIKDKCPCCYGPLECPVFPTELAFALDTSEGVNQDTFGRMRDVVLSIVNVLTIAESNCPTGARVAVVTYNNEVTTEIRFADSKRKSVLLDKIKNLQVALTSKQQSLETAMSFVARNTFKRVRNGFLMRKVAVFFSNTPTRASPQLREAVLKLSDAGITPLFLTRQEDRQLINALQINNTAVGHALVLPAGRDLTDFLENVLTCHVCLDICNIDPSCGFGSWRPSFRDRRAAGSDVDIDMAFILDSAETTTLFQFNEMKKYIAYLVRQLDMSPDPKASQHFARVAVVQHAPSESVDNASMPPVKVEFSLTDYGSKEKLVDFLSRGMTQLQGTRALGSAIEYTIENVFESAPNPRDLKIVVLMLTGEVPEQQLEEAQRVILQAKCKGYFFVVLGIGRKVNIKEVYTFASEPNDVFFKLVDKSTELNEEPLMRFGRLLPSFVSSENAFYLSPDIRKQCDWFQGDQPTKNLVKFGHKQVNVPNNVTSSPTSNPVTTTKPVTTTKPVTTTTKPVTTTTKPVTIINQPSVKPAAAKPAPAKPVAAKPVATKTATVRPPVAVKPATAAKPVAAKPAAVRPPAAAAKPVATKPEVPRPQAAKPAATKPATTKPVVKMLREVQVFEITENSAKLHWERPEPPGPYFYDLTVTSAHDQSLVLKQNLTVTDRVIGGLLAGQTYHVAVVCYLRSQVRATYHGSFSTKKSQPPPPQPARSASSSTINLMVSTEPLALTETDICKLPKDEGTCRDFILKWYYDPNTKSCARFWYGGCGGNENKFGSQKECEKVCAPVLAKPGVISVMGT

SEQ ID NO: 1066 - DNA, 287 bp, Homo sapiens
  misc_feature (244)..(244): n is a, c, g, or t
ccaacacacacacacacacacacacacacacacacacacacacgatcatcaacacatacttagcctttttagatccataaagtccagaaggcagtagggatcccaagacgacctcacccaaagggctccctggctctcctctgatggaggggcactgcttgcttggcccggtcccctccgtgccagttcccaggcgcactctactccagcccttctccctctctcccttcctccctctcctggnccaccctgctcttccctcgccctgcaaattaggtgggtgtggc

SEQ ID NO: 1067 - DNA, 696 bp, Homo sapiens
  misc_feature (10)..(10): n is a, c, g, or t
  misc_feature (19)..(19): n is a, c, g, or t
  misc_feature (533)..(533): n is a, c, g, or t
  misc_feature (586)..(586): n is a, c, g, or t
  misc_feature (595)..(595): n is a, c, g, or t
  misc_feature (635)..(635): n is a, c, g, or t
  misc_feature (660)..(660): n is a, c, g, or t
  misc_feature (672)..(672): n is a, c, g, or t
  misc_feature (675)..(675): n is a, c, g, or t
  misc_feature (693)..(693): n is a, c, g, or t
tggactaccnctactactntgctgcgagaagacgacagaagggggagtcatggcaggaagctggggagggcgggagatcacaccagacaattataaaagaagagctggtcctgaagctcacaaccgtaacagccaccagacaagcttcagtggccggcccttcacatccagacttgcctgagaggacccacctctgagtgtccagtggtcagttgccccaggatggggaccacagccagagctgccttggtcttgacctatttggctgttgcttctgctgcctctgagggaggcttcacggctacaggacagaggcagctgaggccagagcactttcaagaagttggctacgcagctcccccctccccacccctatcccgaagcctccccatggatcaccctgactcctctcagcatggccctccctttgagggacagagtcaagtgcagccccctccctctcaggaggccacccctttccaacaggaaaagctgctacctgcccaactccctgctgaaaagggaagtgggtncccctttccctcaaggaagctgttccccttcaaaaagagctgccctttttcangcaccccantgaacagaaggaaggaacgccagctccatttggggaccanagccattcagaacctgagtcctggnatgcagtcccancanctgtcaacaggaccggtnccc

SEQ ID NO: 1068 - DNA, 292 bp, Homo sapiens
agtgtttgtttttgtttttttcctttccgctgggtttcttttattctttttctttgtcctccctttcctgaccaaccagatccaaataacctttactggctgctaaatttctcttgagaaatcaagcaactctctagaattgcagtaataaacgacaatttcttagaaaaacatgtgtaaagtaactacagaatgaagtattcaaccatagaaaggaactgctaacacatgtaacacggaaaatagctgataaaagtctctttggtgccattcaattatggcatccgcagaa

SEQ ID NO: 1069 - DNA, 375 bp, Homo sapiens
ttttttttttttccattcacaaggatttattggctgcccctccacaccgagctgaggtggacaagcaagaggatgaaacctccccaggacccacctaactcccaggcatcacaggaacaaggcaattttccaacagcctggcaacgtctgggactccaacgaggtctgggcccaaacctcacctgagactggccacgccgtcccatgcacccacccctctcagacatcctggtgacctaggctgagatgagggtgaccaggagggacccttcagctataatatcatccacctcgctcacactgaagcaggctcctggcccgcccagcagcagcacaaggctgaccacagagcaggtaagcatctgtatgtttgtt

SEQ ID NO: 1070 - DNA, 316 bp, Homo sapiens
  misc_feature (316)..(316): n is a, c, g, or t
cctaaatttgtagaatgctccttcctttaatcctgtcacaacaagctttgttcctctcacttctttatctttacccttttcccattcttcttttccttcttctttatattcaacgatgtatccagttactttggatccaccatcttttagtgggggagaccactccagatctgcagatgatttagtccaatctgtcactttgggaaatggaggaccaggaggggcaattggatctctagcagtcgctgggtctgatggcagacttgctggaccacgcagcagattgattgatataccggaattgatagtcggaacn

SEQ ID NO: 1071 - DNA, 993 bp, Homo sapiens
cggcggcgcgcgatcgaggtcgggtcgccgtccagcctgcagcatgagcgcccccagcgcgacccccatcttcgcgcccggcgagaactgcagccccgcgtggggggcggcgcccgcggcctacgacgcagcggacacgcacctgcgcatcctgggcaagccggtgatggagcgctgggagaccccctatatgcacgcgctggccgccgccgcctcctccaaagggggccgggtcctggaggtgggctttggcatggccatcgcagcgtcaaaggtgcaggaggcgcccattgatgagcattggatcatcgagtgcaatgacggcgtcttccagcggctccgggactgggccccacggcagacacacaaggtcatccccttgaaaggcctgtgggaggatgtggcacccaccctgcctgacggtcactttgatgggatcctgtacgacacgtacccactctcggaggagacctggcacacacaccagttcaacttcatcaagaaccacgcctttcgcctgctgaagccggggggcgtcctcacctactgcaacctcacctcctggggggagctgatgaagtccaagtactcagacatcaccatcatgtttgaggagacgcaggtgcccgcgctgctggaggccggcttccggagggagaacatccgtacggaggtgatggcgctggtcccaccggccgactgccgctactacgccttcccacagatgatcacgcccctggtgaccaaaggctgagcccccaccccggcccggccacacccatgccctccgccgtgccttcctggccgggagtccagggtgtcgcaccagccctgggctgatcccagctgtgtgtcaccagaagctttcccggcttctctgtgaggggtcccaccagcccagggctgatcccagctgtgtgtcaccagcagctttcccagcttgctctgtgagggtcactgctgcccactgcagggtgccctgaggtgaagccg

SEQ ID NO: 1072 - protein, 236 aa, Homo sapiens
MSAPSATPIFAPGENCSPAWGAAPAAYDAADTHLRILGKPVMERWETPYMHALAAAASSKGGRVLEVGFGMAIAASKVQEAPIDEHWIIECNDGVFQRLRDWAPRQTHKVIPLKGLWEDVAPTLPDGHFDGILYDTYPLSEETWHTHQFNFIKNHAFRLLKPGGVLTYCNLTSWGELMKSKYSDITIMFEETQVPALLEAGFRRENIRTEVMALVPPADCRYYAFPQMITPLVTKG

SEQ ID NO: 1073 - DNA, 33414 bp, Homo sapiens
gatcttggctcactgcaacctccacctccccagttcaagtgattctcctgcctcagcctcccaagtagctgggattacaggtgtgcgttatcacacgcggctaattttgtatttttagtagagacagggtttctccatgttggtcaggctggtctcgaactcccgaactcaggtgatctgcccacctcggtctcccaaagtgctgggattacaggtgtgagccaccgtgccccgcccgagactttttttcttaaggagattgtcttagtcacctcagactgccataacaaaataccacaggctgggtggcttaaccaacaggaagaatgtatttgctcccagttctggaggctgtgatcaagtctcagatcatccacttgctggctggcagacagctaccttctcactgtggcctttccttggtgtctgtgcaggcacggggacagtgagagctctctggtgtctctacctcttcttataaggacaccaattctattgtgttagggccccacccttatttaacctcaattactttcttataggctctatcttcaaatacagccacactgggagttaggactttgatatgtggattgtggagggattcagttcacacagagctattgcaatggtttggacaagcagctctaattggggaagggggaagcctgtaggcatgggaaggagaggtcaggcgtgtcacgtgcgtctgtgtgaaaagaccaccaaacaggctttgtgtgagcaacaaggctgtttatttcacctgggtgcaggtgggctgagtctgaaagagagtcagcgaagggagatggggtggggaggtttttataggatttgggtaggtagtggaaaattacagtcaaagggggtttctctctttgggcaggcgtgggggtcacaaggtgctcagtgggggaggttctgagccaggaaaaggaatttcacaaggttaatcgctcagttaaggtggggcaggaataaatcacaatggtggaatgtcatcagttaaggcaggaactggccattttcacttcttttgtgattcttcacttgcttcaggccatctggatgtatatgtgcaggtcacagggcatacattggcttagcttgggctcagaggcctgacaaggcacagaaggagctgggatagaggtgcaaagtactcatgctgacctgacatcccatgcccacggcagacatgactacttgatcggacaatactttcttggaatcaaagacacaacttcacagtcctcagcatcaatagttcaggcagcctgtatcagtagatcagagtggcacatggcctggtgctatcactccatcctgtgaggggagatgggattggaatggaggtggaggagtcacaggtggtcctgatatcacaggcctgggagtctgaaagaagtgcagtaggtagtattatggccctcaaagacatctgtgtcctactgtctagagtcaattaaagtgttacctaacatagaaaaaaggattttgcaggtgggattaaactaaggatctcaagatagaaagactctcctggagtatccagttgtgtccaatgtaagaacaagcgttctcaaaatgggacacaggagattgaattgcaaaggagatgtgctgataaacggagaggttggagtgatgccgccatgaggcaaggaatgtgggtggcctctagcagctagcaatgattcggaaatggattctcccccagagtccagaaagatcacagcagtgctgacaccttgatttgagcccagtgtcacctctgtcagacttctgccctatagaactgtaagaggataaatttgtgttttaaggcacaaagtttatgggtaatttgttatagcagcaatgggaaactaatacaagaaggttgtgttatcaacagaaatacagcaatcagaagaaagatggttggggagagcagagggtgggtgggaaggtgatggattctgtttgggacattctgggtgtcatatgaatattattggggaactgtccatcgaaaaggctcagacttcaaagaaagaaaggaaggagcaacaatattttgaaagggagaaagtaggtaatattcaatatgtgttgagtacctacaaggtttttagttctttcaccaagttattttatttaatttttatggcatcaaggggtagttttttttttttctaaaccaaattttctcagttaagcatcccatgtaagtggccagggttaagagatgtgactaagactagacagagtgattttcatcattacatggtactatggttctactgaagcactgaggaaggaagtcaagagagttcctgagaaatgtctggagtcttagtaacatgcaaagtgaggcagaggtattgtcagtgttagctggtcactttgaaaggttagaggtaaataaagttcagggcaatggtacttggagaggagtgaatctttggtaacctggaggagatgcttctcagaggaaaatttcttcacagcatgaagtcaccagctctaagactagtgggtgttctgggggatgttagcagtgactcactgactgttggcccagtgaggggagggatgaaaggctgggtagtgggtagagaatctgactcctcctgcccccacatgtctattcctgggccttctcatggtgggggcaaaaggtatgcaaagggatttccgcagtgtctgagtgctcccaggagacggaaaagtaactgatgacttggagttggagtcttgttggctcaggcagctggggcgttttgggatttcaacagctccctttagtttctatgtatggtgctgagcaagtagtcaaagactttggtcttgctttaccccagtagcccacaagcctgagtacatggctaacatttattgggcacttagtgtgtgccaaagagctttatgagacaggttctttttgagtcccattatactgctaatgggaactgataagaaacagaaggtcagaaagggccagtaacttgggcaaggtcatgtagctagtaagtggtccagctgaaatttaaaaccaggtttatccaactccaaagtcccacatctgatttattttgccatgaattaaaacatagttctgattttgagaaactcccagtcccagtggaaaacagatggaatcacaaattaccataacacagtgtagtgatgtagatataaaaacaaagacatgggaaccctgaaaggaagttgtaacaccaatagaggaatgcacggaggagatctttcagaggaggtagcctcgtagctgggctcaggggtggatgagtttctggctagaagcgcattgtgggtagagggagaacatatatagaaaggcatgaagatggtggacatgtttggaaagagtgagtactagactgatgaacacgatgagtcaggagcttatgacgtcaggggctactgctagcctagctaatgactgaagattctgtgaaaagaaaaccctaacatttccagctgagtactagggccatggtgattatatatcatctctcatgacaacacaaatgtttgggcttacttatcatcctgctcagtaatcattatgtcactcattaaagatgtatcagggaaattttaggtgaggaatttgatttagacatgtaaactctatatatgtagattacaggcttcacagtttgccactcaaacaatatggtcatccaatcatgagggcacaaccttctgctcagactttttatattggggaagaagtgacatccgagttccatctcttctgagaactgtgcagctcagaaatcttcttcccttttttgatcccccagttgggtgagatgacattaacagtgtgttataagcacttttcatgtttactaccccatattcaaaattaagcatttcaaacaactgtataattgtctataaatgtagcattattagttaattttccttttaacacattgaggttacctctaatgttttgctatttttaactatgttgaaataatcatgtggtttttattctttgaattattttatattgtaatgttccctgaaatgaaattagttgatcaaaagatgagtaatcttttcatgacttttgatacatgtcactcaatcaccttctggaagagttggaacaagagcctattgctggcatcccatttcatagccatctcaccaatgttggaaaatgggcttttcctattttctgctaattcattagttgttaatggcttattttaactattaatcccttgttattgatgaaagttaagcattttctgtatttttattttctgtctaaattctactttttgcacaatttcctttgctcacttcttcactggaatttagatttttctttccaatttgtatgactcaaaatcagtgataaaataagcaaagggtctttcttagaggctaaacaagggaatgaataaggaacaagaacagcaaagggatagtgaataaagatacaaaataataacttatttttatttttgaagctttccccaggcagtaattcttgacctttttaagattataaattattttgagatatgcattcttatcctcaaaatgaattagtacataaaatttaaatgggttgatagatcccctgaagtgtatccacaaaatgctctcaggttaagcaacattgttctataataactgctttaaccaaaatgtttaattattgcttgtgtttacctgtcctagcaaagagctaattgttaaattttgtgttagagggtcaatattataaataacttaatgtggcctctctttcctttcctttttttgagagttttgaggctatcactaagtgggctttagagtaccaggtgggaatctgacctcactgctcaaactttcaacttcaggcatgaagtggtcccagtgatgtgggaacctcagagtctaaaacaaaaatagtagactgaggccctcagaaaccagacttatcagattcagaatttaatataactatgtttgaaagatttaaagaaaataaatcaaattaaaaagtgagcaagaagcaagaataacaaatgaactggcatatttgagaaagaattttgagcttttagaaataatacatacagttattgaagtaaaaactcaagtcaataggtttaaacagcaaaatgaatatagttaaagaaaactattgtgctgaaagatttaaaaaactattacacagaatgcaaaatgatgaaatagggtaatttaatatatggcagatatgttaagacactatgaggatagtatgagaagacctgatagacatctaatcacagcaccttaaggtgaaaatagagagagtgcaccaatattgagggagttaatgtctgagactattccagaactgataaatagatgaatctacagatctcagaaacacagcttttacaaaggataaatgaagagaaattcaccagagatacattgtaatgaatctgtaaatcaccaaagctaaagatattatttcacaagtggaatgacagctgacttctcaacaacaacgaaagcaaggagacagttgaaagacatcttgaaaatggtgagagaaaaactaactgttaatataaaattgtgtacctatcaaaaatatcttttggccaggcgtggtggctcacgcctataatcctagcactttgggaagccaaggaacgtggatcacttgaggtcaggagtttgagaccgtcctggccaacatggtgaaaccccatctctactaaaaatacaaaaaaaaaaaaaaatagccatgtgtggtggtgtgcacctgtaatcccagctacttgggaggctgaggcaggagaatcgcttgaacccaggaggtagaggttgcagtgagctgagatcatgctgctgcactccagtctgggtgacagagtgagactggctcaaaaccaaaccaaaccaaaccaaaccaatctttcaagaagtacaccataaagacatttctggataaacagtgaatgagattacttcctaaacgaatatgtaaggatgtttctttttaaaattttttttgggtgtattcatcacctcaagcatttattcttttgtgttgttacaactgataagaatatctaaggatgtttcaaaaggaagaaaaatgatccctaaagtctggtatattagtttcttattagttgctctaagaaattactgcaaacttagtggctttaaaaaacacgaaattatctttcagttctgtaggtcagaaatttaacctcctgatttctggtcagaagtcttactgggctaaaatcagggtatcagcagggctgctggaggctctggagatgatgtttctctaatttctagaggcatttttgcattccttagctagtggcttcttcccacatcttcaaagctaacagtggcagtcgagtccttctcttatcttttttttttggggggggttataaatttttttttattattattatactttaagttttagggtacatgtgcacaaacgtgcaggtttagttacatatgtatacatgtgccacattggtgtgctcacccattaactcatcatttagcattaggtatatctcctaatgctatccgtcccccctcccccaccccacaacagtccccagtgtgcgatgttccccttcccttctcttatcttatcactctgacctcttctgcctcctttctctacttttaaggacccttgtgattagattgggtccacctaaataatccaggataatctctttattttaaggttagctgattagcaacctcaattccatctgtaaccttaatttcttttttgccatgtaacctaacatagtcacaggcccaagggaataataggatgtgggaattgcgggtggtcggagtaggggcattatctgcttaccacaggggaccttggatgtcagtaaaaaatggtgaggaagaaaacaggaaacgtagaataatctaaacaaatctttgaaaaataagtcgaaatgtggggttagaaaaaagggcagaactaaaatgttaagacaaattaaaatgttaagcctataagttgagagggagatgatcaaggttaaaaatactcataaatcatatttttttgggtagggggttagatatttattaattttagaccctgagaagtaaaatagtcatgacaaaaatttaatagtaaccactaaaacaagagaaacagagtatataacttctaaatcaatatgggaaggggaatggaataagaaaacaatagcaaccaccaacaccccacccaaaataaataaaaggtgagagagaaaaagcattgaaaaggggctaaaataaaataaaaaattagtcatgcccgtaatcccagcactttgagaggccaagatgggtggatcacctgaggtcaggagttcgagaccagcctgaccaacatgggaaaccccatctctactaaaaattcaaaattagctgggtgtgggggtgcatgcctgtaatcccagctactctggaggctgaggcaggagaatcgcttgaacccaggaggcagaggttgtggtgagcagagattgtgccattgcattccagcctgggcagcaagacgaaacgccatctaaaaaaaaaaaaaaaaaaattaagatagtaaaacaaatccaaatacattaaagattacaaaaaatgaaaatgaactaaacttcctagttagaagagatattgtcagattggattttaaaatctggcaatatatttccaggacacagtcctaaaatattaaacacagaaaagttgaaagtaaagggatggaagaacacagtcaaactaactagaagagagctgggttcacccttttatatcagagcagaatttcactgagaaaacactaacaggaagggggaaaggcacaacatagtgatgaagcacttaattctcaacaaatgtatgacacttctaaactattatgactgcaaaaaaaaaaaaaacctcagcatatataaaattttggaagagccatggctatcagctgacatgcacttaccatatttcgattgtcctactacaaactttacccatatgaccaaggtgctgtcttcatccccattttacagatggggaaatttccccatagagaaaaagattgggccatgcctttggtttcttcttgactctgcttcctgctgattgatcctcacacctcacctggagacctacttcacattatccatcaggatgagaactggtgtgcctttaccaaaggaccacagtcaccttcaaaacgtgtttagatagatctggatggagacttatgtggttgcagatgaaaaaaaagtcccatggtatatctgactccatgtcattcactgcatgaacactcacacacatgcacacgtacacaggcaaacacaatcctgttctggtccggcagtagtgccaacactcaaatcccaggtcctactctgaagcctttgaggaaaccattgtcattctggggtttatgggaatatttcttcttggtgccccttgttcctcacagaagctttttttctgtgctgtgggcttgctatcctagctttccaagctatcctagttttgcaaatttctctgatcaatcacatcaggttcttggatcatcccaaaattaaagaggacgttttgctgcaaagagacaaagacattcacctctcacacaagttttgaattcctgggtagaaacagatttcacatgcttggccagcctctgtagctcccagttgccccctcaaattatgaactcccgaggcattggaagcaaggatctcaccttgcgtcaaagataattaggtgtgctgaagaaagcccagacactgctctttcttagctctgcatccttaaaaagttaccactactccttctctttgaacctttgacttgtcaatggtaaagtgcctatgattcttaaagggataaaaacgcaacctatataaagcacctggcatagtgcctggcacaggtgggtgtttaacaaatgttaactcctttctatcccactgtgggtgtccatatcctcttgggtaggctgcctctggtttccattgtgtcatcagagccatactaaatcgatgtgttggacatggatcccaagaactaatttctggaatgagttatgcctaccaacttccctgatacttacttctgtctctccatttatcaaatggaaatgtttgcatttggcctctgccagttggagtaaccaaaaggcttagaggttttggagaggtcctacactgccatctgtttgaccacatactgcctttcacgtgtaataagcattgtttcttacatttgtctaggaattagcagttcacaaagcacattcgcatataagggcttgttttgaattgatcttggcagcaattctatagacaagtaaaaggtaggtcaacgattataatcctcattttaaatctgggaaaactgaatctcaaaaaggttgaaagacttgtctaggggacagtgtgtgggtaaatgagagttaagatttgctgaactggcaatttcctgactacatatctagtgtttatttatggagaaggcactacggtggccaagtggctcagagtcacacagctctgtgcctcagtttatttgtctgtaaaatgaagattaataatatattctgaatactgttgtggaatttcattgagatagttcacataatggcatggatactgtagtacaccgcctagattcacaaccccacgactatccatgagaatggcccatagtctcaagaggtcacattctttccccaggtgaagcccgcatccaatgactgctcagtgtgggtatataaaggcctggctcccttgccagtgccaccctacctcctggcgaatggactgaggcttgcattatgactgcattgcagctcaactgttctttccattcagtctttcctttacactcacacaggtgaggacccagccattaaatgcctcacatgataacctctattgcatgctaggcttcgtgtgcacacacaaaaaccatcctctatcagtcaggtcccttacttgcagaggcaaagaggccagtctgggttagatgtgcaccctgtttttacaacagaacgagacaaacaggtcctccttaggtgtaagttcatggccttggcccaccccctgaaactacgccatctgagacagttttaggccctgaggcaaccccagactttgggttgttgtttgctgggcacagcctccttttgccaaatgttgcaatcctttgtaagagaccacaggttgatcaccccgttcctgttactgagcacagagaggtttgtaggccagtctctccaggaattctgacgcactgcaaaatcccatggtctgaatgcttctaccttccctgtgaaagccctggcctcagaaaaggaagctggtttaagtgaccaacatttggggcggagcttccgagggcccagccaccgtgttacatgcaacactcaacagagatattctttggctagagttgtttttctgggtatagaccctataattaaaatcagctctccaacttcccttcctccaaaaagtatacaatgtaaggaggaaaatgcaaattgaaaagttgctagtccttcccgccagaatgccacctcaagcctcccctgcaggaagttctggagtccccaactctgccccaagcctgaggcccttgataaggtaaagggatgtgagtgtggaggccggagcccccctcgccctgtaggctgctccccttgcttttccctttgaatgttacagtttagttctgtgacttacttataattgcctgaattccccgcccacgctttctcttactttggggcttctcaccgttcctcttcctccatcttcctcctctgaccccactcccaagcctgaaatggggtgttcctcttccgtgctcccacaaaaccctgtgcctctttcatcgttgcatatattatgctgtaatgtagttttctggaggtgtgaagactatgaatcctatgaagacaaatacacacctaccttgctgaccgttgtatcctcagaatctaatactgcacttggcacacagtggttgggagtaaatattcatgaggcaaacacacaggaaggactcttttgttatggttgtttgttgttgttgcaagtaacataaccccaccttgatctagctgactgacggctctaccaccttgtcttttgcagcacaagaggaataggaactgcacctcttcccttcagtttcagcttgaataatatcaggaagattcgtatcggtctgagttgggtcacgtacccgacgtgctatagctgaggatggggtaagctgattggagtttgcaacactgttcacatagccaagatatggaaagaacctaaatgtcaactggtggatgaatggataaagaaattgtggtatatacatacactggaatattattcaaccttaaaaagaaggaaatcctaacatttgtgacaacatggatggacctggagggaattatgctgagtgaaataagacagacacaaaaagacatttcttgcaggagctcacttatatgtggaatctaaaatagtcaagcttaaagaagagagtagactactggttgtcaggagcaggagaaaagtggaaatgaagaggtgatagttaaagggtacaaagtttcagttatacaagataaataagttctggaggtttactattaatatatcacatagtacctataagtaacaatactgtattgtatacttaaaattgctaagagggtatatcttatatgttcttaccaataataataataatggtaataattaaggggcaggaggacacttcaaaaggtgatggatatgttattggccttgatggtggtgatggtttcatgagagtatacttatccccaaactaattgagatgtaaatattaaatatgtacagctttttgtatgtcaatcgtacctcagtaaagtagtttaaaaatggttggactgagaaaaggaggagctgctcagcaacatgaggctgggtgctgggcagacaaaacctcacacatgcattactgaacccacggactcatgtctgtgagctttgtggctgtggatgcaccatgccaatgtagtcaaggattcttcaatgtgtaccttactggattagttccctctgtttatttgtattgactcctcagttcccttatgggttgcttgttggctcttgtggaattatttaagtaaggctttggttgcaggagtcagacatgcttaagctggttttggctgtaatggggaatttgtgagatgtgacacagtgacaggaagtgcagccagacgttgtgagaggcagtaactgggaataggaaagttatgagaagttaaggcagtagtaattgtttctctatcagaaggccataatgttatcattcctgcctctatctgtttgcttgttcttctctctcagcagaatggtcttctctgcttctctgtgcacctgcagaaggtgaccaccctaaggcttatggattcaggagtcctcagtttgagagcagttaccaaatgcctcgcccctgtgaactctagtcccagtttcttattcctggtactggcttagtttgaggcagctgcccaccgttaagtccagtgagccatggcctggggacaaggtcaggtacatgtgtaatcagctgggtctgtgagttgtggtggtggcgatggaggtagctcccagaaaaatggattacaggttaagaagagtctatatatcttgaccacatttgatgtgacttggaagtttcaatgtgtgaccacttacaaagttaggatcaggtgtctcatttatttatggtgatgtatgagtccgtgtgtgagtgtgtgtgtgtcctgtgttttgtgtgtgtgtgtgagagagagagagagaatgagaatatgagtggtggtttcccatttatttttctatgggccaaatcctgggctatgagctggagatataagagtaaacaaaatagacacggtgcttgctgtgacctgccctgggagacagatattacacggaggatcacataaatgcagagtctgagctgaggtcttaaagggtgaggataagtaactagtcagtggagcaggggagggaagggtgttccatgcctgtgtcaaggtcctgaggtgagagaaagaggtgaatttgaggaccaaaaggagttcagggaacaagaggggctgtttcacaagctgagtctggaagctgagcaggctgagcagattcttaggaactctgcaaaaacttaagggcttgtctatgaccgtaaacaactacggtcgtagataaacaagttggcaaacaactcaaggatttacagtcatcagaattgtaaaactgatcccatgtattttcaaacctcaaatcccttgctctgaccttgtgtgtctaagctagaaggaagcaggatcgacctctcccctggctggaatgaagggattcacccaagctctcagtcttctcacggcatccagggcccccctgcttgtgtgtggtctagatttccattcccatagtaggaattcctttgggagccttggggtctctcctgctagagggcttcacctgtgactgtctcaattcaagggaggggttctaataacattaaacctcaatatcttgctcctccattcctgatgcctccctttccttctacccttcccctacctccttctttcctatgccacaggctggcaggttagtgccagagcaagtggccagtcaccatcattggggttgtggatcctcagggttcttcagaacgcccttcaccatgatcaagagtctccagtcactcagaattccacggttcccaaatgccagctctcccactactcccagcgttctccatctctgggatgttgggctccaggcttctcagatgcactgagtaccctaggctaagccactgatccatcagaacttcatagcctgagaggagagggagacaggcttgcaaaggagagttctgactagacactggggtgctacagatgccctgtaagttgtcctttaccctcgatgtcccagtgttgggaccacctgggaatgcccagccttgtgtgctgattgacttgtagtcccctggccctgactggaagcctagttttctctctcatgacccagctaggcccctagctccccagggaagaaatccaatctatttcctctgatagtaatggctaatacttaaataatgccaaccacatgccaagcactttacagttgttagcccagtcttcacaagcaccttgtgaggtgggcaagagtcttatcttactctcattttatagatgtggcccaggatcccacagctatagttcatggtgctgggatttgaacctctggccaccagagcccaccttaatgtgtcctcctcctgttgtcataacagaaaagtacaacaccatgatgacacatcaggctatcctggcaggttcccaggctgccccaatgcccaactttctaggtttacaaagttgacatttacgaagtttccaggtttacaaatctagtttctgattctttagtcagcaggaatttctctacaaaagctgcttcgaaaatttccagccaaaccttacacaccttggcattacatcttggtgagccaagcgaagagaacaggaagtgaaggccccatgggaagtcctgcggtcgggagcacccaggcggggcggggggtggggggctttcctgtggccggctccctgcccctcccacccccattcaggccctgtgagttgaatgaagagaccctgggaatgagtccaggtctgcagggttagaggaaattgaaggcccttaccagatccctgttgagaagtttatgaattatgagcccttctgcaaatgagagggttcttccctgtcaggagggacagattgtaggtggcaagattggtggcagccagtaggctggtctgctccttcctctctatttcatatgtgtatgaaggcattacctgcagcaagggcctgtgtaaatgcatgtgatttacagagcattttatgtactgcgtgtcattcatgcttccggtgagccctaagtctaagataggggcagatagcatcaggtccattttgcagctgtcaaaatgaggtctgaagggcagaagtggtgtgcccacacacacacaactggttggctgcagacctggggactagacccgggacttcgtcctgcccaggggtctcttgccactgctccccatcaacttggatggctttaagcatttgtgagttgtctgctccctgatggcagaatgcagagacatgaagctacaagcaggttcgctcccaacggcaaaaaggaggagggtgttcagaacatcaggtgcttctagagaaagcagggagagagtatctggccttgtggacaatgtcacggcagaggccaggtatagggcatgggggtaactggaagcgggatggaccctgttattccctaagacatggcttccacgtagtgctcaaacaaggcctttgcccttgctgttccctccacctggaatattcttccccttccttgacattgctcaggtctccactcttatgtcaccctctcagagagggcttccctggccactttccctaaaatagccacccactcctaggtccctcaaaagcatatcctgctttggattttccctatagcaatatgccctatgaagttattttatttgctaacttgtttcttgtctgttttcctttgttagagcgttggggaccttgtctggcttgttcccaatgcctggaagagtgcctggcacacaggattaagccaacacatatgttttgaatgaatgtgtgcacacatgcatgagctggcggcagtcggggttggggtaagcacgaaggcccagctcagttctctgcatgtgacctcccatcttacgcagataagaaccagtttggtttctgctagcctgagtcaccctcctggaaactgggcctgcttggcatcaagtcagccatcagccggcccatctcctcatgctggccaaccctctgtgagtgtgtgggaggggaggctgggctcctccttgtactctctgaggtgctctggaaggaggggcagctccaccctgggagggactgtggcccaggtactgcccgggtgctactttatgggcagcagctcagttgagttagagtctggaagacctcagaagacctcctgtcctatgaggccctccccatggctttaggtaagctccttccactctcattttttcacctgagaaatgagagaggaaaatgtctacaattggtgtttatcaaatgctttcaggctctggtgagcaagcgtccaggaaaatgtcaagcgcatggagctccaggcctgtctgggggatctgggcacggggaggcatccatgggagaccatgcaggcactctgaggcaggggctgcaagcctagtgcctgctggggcagcaggtgaacagagaggtgtaactgctgtgacagaagtcatggagtccttggagtgtgagggtcattttccactgttgatagaatagggaaattggtgaaatagccctgttaaatgagagaaagaacagtgtgagctcaatgagaaatactaatagaatgtggcactgagccacaaggtctgagggttgattgataaggaagggtggggactgtggagaattaagggcttggcacaggtcagttccaccagttgtcacaagagaatgcaggctcaggtggccagaacttctcgcttttccagaagagtccgatattctgatttcattatatatagtattctgattaaaccagacaataaagcaagcagataaaatatttaaattataagctgccagtttgcaacctccggttaggatttgtgtggggcaaagaaaaaaactctcaggatcattggtatgtagactctaattttaagtttctaatttaaaattggcccctgaggctgggcgtggtggctcacacctgtaatcccagcattttgggaggccaaggtgggtggatctcttgaggtcaagagttcaaggcctgcctggccaacatggtgaaaccctgtctctattaaaaatacaaaaattagctgggcatggtggtgcatgtctgcaatcttagctacttgggtagctaaggcaggagaattgctggaacccgggaggtagaggttgcagtgaatggagatcacaccactgcactccagtctgggcaatagagagagacgctctctctaaaaaaaaatatgtaaagataaataaaatgaaataaaataggcctctaatgagcaggccattctcctttctgggtcttactttccttgcactcctttctgggtgttaagaggaggtctagaggaagctggacaactcttagcttgtagtaagcacagtggaagtgtcagctcttaatgggtcatggacacgttacaagctaggagccgcgctgagactttacatggtttatcccactgaaccctctcaataaccctatgaggaagggctattattgctcacattttcagaagaggaaatggatatagagagattagataatttgcccatggccagacagctagtataagaggaggaggtggattgactgcagacattctgtcttcaaaccactacactatgctatgggggcacagagacttaatgaaatcatggagaggggaattgctttgtcaaccacaagcagttattccgggggcagcagatcctcccctgtcccccagtgggtacaatggtccctggtgggttgtgctacaatgttagcccatggtcttatgtgtttttcaaatgtgtaaagtaggatgctggaaccactcttagaaccagataccaatacattgtgaagaaataaatctctgtgcttaaaactggttcatcccaaaatattttgaactgacacacaataggtgctaaataaatgtgtgttaacttgaattggattgaattcgggaaaaaagtgcaataagcttagtgaagacaccatgttccctgggtagaggaaccacattctccatctaaggccaggagtatgggaggtatcaatgtttgcccagcacagaacagggtgccaagaagagaaaagttgacggggtgcatactcggactggaaactggaagggtgagaacagagggtaaaggatagagatggaaccatgtgcatacactttgtgttaccttggacaagtcattcatttctctggacctctgcttctctctacacaatgggtcccaccacttcccttacagctgacttgtatgaagaaggaggtggaggaggaggagaaggtgaagacaatgctgactcaaagggtaaattatttttaggatccaagtttgaaaacaattttaggctactagatatgaacaacatcttgattatgtagttgaaggaaattaaagatgaatggtttaattaaaaattaatcagaatgaaaacgattgattactaatatatctgcaatggtttattttcctgagtggcagactcactaaggtttttgaatactcctgtgtgattgctctatgtatgtatgtatgtatgtatgtatgcatgtatctatctatctgttgtctaataaaatggatcacatctctgctaataaaaacactacactggcagggtacaattataatcattaactgtgcctggaatttgcagcagcagccaccagaggtaccagtgccctttaagggttcataatttagaataatccaattatctgagtttttcagggactgaggggtttggcaaggtgtagaactttcagtaataaagtcaagaaagtcctggacaaaccaaggtagttggtcactctagtccataaccaggtaaagagctttccctgtaacctgtgtaaggttttagaatcatttctttccttattaccaaaaatcctccccaaattttcaagaaattatgaactaaatagttactctatgagataggagttcagcccaaaagaaacaccataagaacaaatataattcttgcttatgttaaccatgcaatgaagcagagagaaaaagtcagtggcctctttaggaggactgtagtgtgggaagaaataactaaactgggtttcaatcctggcctggccaggatctggagcaagtgagttaatctttctaagccttgagtagtttcttcttcttcttcttcttcttcctcccccttctcctcttcttcttcctcctccttctcctcttcttcttcttcttcttcttcttcttcctcttcttcttcttcctcctcctcctcctcttcttcttcttcttcttcctcttcctcttcctcttcttcctcttcctcttattcttcttcgtcgtcttcgtcttcgtcttctttttattttcaaagtgaaagcaagtttattaagaaagtaaaggaataaaagaatggccactccatagacagagtagcctgaaccttgagttcttctataaagtcactatgaatttatactcattttgaaagtgggtgtcaatatgtctgtccactttgcacagctgttatgtggacaaaaggagatctgtgtgaaagtgtaacacagagcctaaactataacaggtaagcaacacagttgtccccttccccatggtgtctgttcttctccatttcctcctgtctgcagggggattataaaactaatcatcaaagccaagaaggcaagagcaagcatgtaccgctgaaaacacaagataactgcataagtaatgactttcagtgcagattcatagctaacccataaactgctggggcaaaaatcatcttggaaggctctgaacctcagaaaggattcacagtaagttaaccatgtagatctgagaggagagtagcttcttgtagataacagttggattatataccatgtcctgatccccttcatcatccaggagagcagaggtggtcaccctgatagcagcaagcctgggggctgcagcttggtgggtagaggtactcaggggtacagatgtctccaaacctgtcctgctgccttagggagcttctaataagttgatggatttggttaaaattaacttggctacttggcaggactgggtcagtgaggaccaacaaaaagaagacatcagattataccctgggggtttgtatttcttgtgtttctttctcttctttgtactaaaatatttacccatgactgggaaagagcaactggagtctttgtagcattatcttagcaaaaatttacaaagtttggaaaacaatattgcccatattgtgtggtgtgtcctgtgacactcaggattcaagtgttggccgaagccactaaatgtgagatgaagccattacaaggcagtgtgcacatctgtccacccaaactggatgccaacatttcacaaatagtgcttgcgtgacacaaatgcagttccaggaggcccaaatgaaaatgtttgtactgaaatttgttaaagcttcccgacaaactagatttatcagtaaggattgttttctgcaagggggatgaaacttgtggggtgagccatttgggctgaggaggagggaggttggagctgagaaatgtggagacaatttccctttagaaggactgaatctccctgcctctctggggtgcggcagccagcaggatccaatggtgtatatgtctccccagctccccattcagtgatatcatgtcagtagcttgaaattatccgtggtgggagtattatgtcatggaaattggcaaatggaaacttttattggagattcaattgttaaacttttaccagcacaacactgccctgccttcagagtcaatgaccctatccaagtttaatccatctgtccactgtctccaacacgatctttataaaactctcctgacaacattacccttttattcagttttttaaaagataagtttccagctcatcgggctggctttaaaggccatttctcctctggacctcacccaacttttcaaatcacttttcctacccctacctctaaatgctactcaaactccagccatcctgaataataagacttttgaaaagtagattatgggctgggcacagtggctcacacctgtaatcccagcactttgggaggccaagatgggtggatcacctgaggtcgggagttcgagaccagcctgactaacatagtgaaaccctgtctctactaaaaatacaaaattagttgggggtggtggcacaagcctgtaatcccagctactcaggaggttgaggcaggggaattgcttgaacctgggaggcggaggttgcggtgagcctagattgctccactgcactccagcctgggcaacaagagcgaaactccatctcaaaaaaataaataaataaataaagtagattacatcagatacctctggcctaggttgtttatgaccaactctcctgctgagaataactagaaaagctagacaaaacatatttccaaaagatctctttggaggcatcagagaatggccaaggctgtaaggaactgcctgagcccagagaggtggagcccagcactggtgccctttactcctggggacatgtgctggtttcaaaaacttcagctgagtttttgagcattcatggaacttggtgggggagatgaaatttgtaccttaaatcctgcctacagggagggtccctgataatccccacccaatttggaaatctgggtcagccttcacaggtactgaagccctcctctgaatgatctcaagtcctgctagggtagaggttacctgcttttgaaaggctcctggcctacctgtgcagcaggagcaaaagtgaaccatctcagggtacagataacaatcatccagagccttgaatgacctctactgtgcttaatatatagtattcagcagtcagtaaaaaggatttaggcacatgcaagatgacctgtgtatcagggagaaataggcaataaattgagatccagcagggatttgaatcatggatttgaatcaggggcagccttcgaaagaactatggagaatatactcagatttaaaacataagattggaatttttggcagagaactaacaactgtacaaaaaaggaaccaaatggaaatcctagaactgaaagatgcaattaaccgatgttgagaaatagccaacatctattgaacacttcccatgtggacagctgtgctaaacactttacaggcatcaacataagatgtgtccccttacagcagtgcagtgtccctcctaagacatggacagcctggtttccctatctctctgcttcatcaaaacccctttacgtggggcttagacactcctgttgtctctagtgtctagtagcacagggctcagcacatggaagccactagatacaatttgatgaccaggacctccgatgaaagccatgggtgctgactctgggaaggcattgtcttttatgtgctatcggtccttaaagcttcatccaggaagcagaactcggggggtgctgaggacccagaaccgagaataagattagtcagagatttcctgtgggcagaaatcataaggacgccaactgtttgggtgagataagacgaaaccaagagtggacttgtggccagaagcgtgaggaagagggagagagcttcccttgtcccctttcttcctctccctaagccacagtgattgacagcccccccctttggagtcagagcaggcttgagactggactgggaaaggagggtgggtcaggatacagagcaggaaggctgggagtgcagggcaggagcaaggggctggggcattcattgtgcctgatctctcccactttacctggggtaaagaagcatatgcaaaagccacggtgtgagtatttcccaagtgccagggtcagggcatgattcatcacgtgcagcatttcattcaatccttatagtaaccgatgatgtggccttctattattagctctatcagataatgaaactgagaccaagacaggctctgcacattgtgtggggtaatgacacagggggattcagacctagactccataactcctgccccagggaccacccccaccctcaccctgtgcatgtcgacaaaggacagactgggcccacttctcaggacacagcggggaaatgacacagagcagggaggttccaggagccccgagcgtcttttctccaggagaatactctctgaattcagactgggtcagagaaacatttacccaggagccgcagtgtgggcggggctttttacttgaaacgctgtctgaaggcagtggccaggatggaactctccaccctaccttggcaagccacttctcttctgcaatctgtaaggacattgttgagagaattatggtcttccaattccggagggttgaagaaagacaaataggagagaacctatcatagtcaggtgctagctgccttctctttcagagagtgtgagaataaagtgatacacttgattattagcaaatactttggaaattttaaacgctaatattcaacacactctggaagaggcaaataagtagacaggttcatatacatcatctccttcagctagtcctcacaaaaacaaacaaatgaataaacaaaattcttctttggccctcataggaagacactgtttcttgaacgtgtttcaaaaaggatgggtgactcactcaaggtcacactgtttatgaggacagtacaggaatacagacatgccattttgcctgaaaaaatccatcacccagggaggtgacacaattttgcagaaatgttctatttcctctgaaggatacattctttaaacctttgggaaattcattcatagtcttcctcctttgaaggattaactctctggacacaaagtgtttgattctgatttgttggttggaagatgtgttggttgagagaaagattctgatttgttggttgaaaatagactcatcaagatcaactgctgtagtagtaaatattttgacattttgtctgtattcctgtgctgccctcacaagctgcatcaccttgagtgagtcattcatacttttttgtttgtttttgttttggagatggagtcttactctgttgcctaggctggagtgcggtggcgtgatcttggctcactgcgacctccatctcctgggttcaagtgatcctcctgcctcagcctcccgagtagctgggattacaggcacatgccaccatccctgctaatttttgcattttcagtagagacggagtttcaccatgttggtcaggttggtcttgaactcctgacctcaggtgatccgcccacctcagcctccccaagtgctgggattacaggtgtgagccaccgtgcccagcccagccatcatttttgaaacacgtttgagaaatagtgtcttcctttgagggccaaggagacattttttttgtttatttgtttgtttttgtgaggactagctgaagggggtgatgtatattaacctgcctacttatttgcctcttcccagagtgtgatgaatattagggtttaaagtttctgaagcatttgttaataaagcccggggctggaggtcagaagacctggatttctctgcatacttttgccatcagcaagctgtgtgaccttggacagatcccttttttgtctaaatctttctgagtcttcttgaaaacaatgccaggttgggacaggatgattgccaagctcccgtccagctctaaaacactgcaacgtatgcttctgcaccagcactgtccatcctgtagatcatgcagaaattctcttcaactttttcctacccataaaataggagcatgcttacctttttcctaatgttccaggccccgggtctagaatattgtaagtaaggaagttaatgcgtatcagagcccattatgggccagaagttctcctcttccttcctacacctgcttcctccctccctccctccctctttcccttccttccttccatccatttgtgaagaagacatgatcaccctcattctgagagtgaagagacagaggctcaactaatgaaatgatttgttcaaggtcacacgggtggcacaaggcaagtggcagaagttgaatttagacccattcctgtccaaatgctgagtttatgtcatcgtcccgagaccataactttaaagatgtaagatagtgggaaaagagttgatttcaaagcacctctcagaaggactcactttacatcaggggtcagcagactcaggccaaatccggtccattccccgcttttgcaaagaaagttgtagtggaacacagctaggcttattgatttatggattgccaacgtccttttgtgaaacagacagctgagctgagtaatcgtggcgcacaaaacctaaaatatttactatctcgtcctttacagaatgtttgccaatctatggtccggagtccaaggctgtccatttttcaaagaacacaaagtgacatgagactgtcccatgtgcagggagccctatcattttattatgaaaaaacggcctttctgctcaaatctgttttttaaaaagtcaacaaacagactctgggtacctgtcaggaacagtagggagtttggtttccattgtgctcttcttcccaggaactcaatgaaggggaaatagaaatcttaattttggggaaattgcacaggggaaaaaggggagggaatcagttacaacactccattgcgacacttagtggggttgaaagtgacaacagcaagggtttctctttttggaaatgcgaggagggtatttccgcttctcgcagtggggcagggtggcagacgcctagcttgggtgagtgactatttctttataaaccacaactctgggcccgcaatggcagtccactgccttgctgcagtcacagaatggaaatctgcagaggcctccgcagtcacctaatcactctcctcctcttcctgttccattcagagacgatctgccgaccctctgggagaaaatccagcaagatgcaagccttcaggtaaggctaccccaaggaggagaaggtgagggtggatcagctggagactggaaacatatcacagctgccaggggctgccagcccagagggctgagaactgggtttgggctggagaggatgtccattattcaagaaagaggctgttacatgcatgggcttcaggacttgtgtttcaaaatatcccagatgtggatagtgcgaccggagggctgtcttactttcccagagactcaggaacccagtgagtaatagatgcatgccaaggagtgggactgcgattcaggcctagttgaatgtgctgacagagaagcagagaggggcaccagggcacagccgaaggcccagactgatatgggcaaggcctgtctgtgctgacatgtcggagggtcccactctccagggaccttggtttccccgtctgtgacatctgtgacatgagagtcacgataactccttgtgtgccttacagggttgttgtgaaaattaaatgcacagataatagcataacagtattccgtgcattgtaaagagcctgaaaaccattatgatttgaaaatggaatcagggctttgtgagaccatcactattgtaaagatgtgatgctgatagaatgacaggactgcttgtgcatgccctctgcagtgtgacatccagcagtgaaatcatgtggggtgacttctccccactctgacctttatgtttgtctgggccgaggctgcaagtcgggctctgtgggtgtatgagtgacaagtctctcccttccagatatggggactgtctgcttccctaggttgcctctccctgctctgatcagctagaagctccaggagatcctcctggaggccccagcaggtgatgtttatccctccagactgaggctaaatctagaaactaggataatcacaaacaggccaatgctgccatatgcaaagcactttggtttgcctggccacccctcgtcgagcatgtgggctcttcagagcacctgatgaggtgggtacagttagccacacattcacaggtgaggaggtgaggcacaggtcccaggtcaggctggccagagctctgtttattacgtctcacagctttgagtcctgctctcaaccagagaggccctttaccaagaagaaaggattgggacccagaatcaggtcactggctgaggtagagaggaagccaggttgttcccaagggtagctgctcctgcaggactctgagcaggtcaccagctaatggaggaaaggctctagggaaagacccttctggtctcagactcagagcgagttagctgcaaggtgttccgtctcttgaaacttctacctaggtgctatggtagccactagtctcaggtggctatttaaatttatacttaaatgaatgaaaatagaagaaaatttaaaatccagacccttggtcacactatccacatttaaagaggtcaatagccacacgtggttagtggccaccctattgggcagtgcagctacagaacatttttgcatcccagaaagttcttttggatgttgctgctctacagcatgctttgctgaaacagaagtgccttccctgggaatctcagatgggaagcaagtaaggaggggagtcaaatgtgggctcactgctcaccagctgtgagggttgggcctgcctcttaaccattgtcagcctcagtcttctcatccatgcatgccgtgggtatactaaaatactatacccctggaagagctggatgcaaatttgacaagttctgggggacacaggaaggtgccaagcacaaggctgggcacatggtggctgtgcactacagctgagtccttttccttttcagaatctgggatgttaaccagaagaccttctatctgaggaacaaccaactagttgccggatacttgcaaggaccaaatgtcaatttagaaggtgagtggttgccaggaaagtcaatgtatgtaggcatcacgtcactttgcccctctgtctgcagcagcatggcctgcctgcacaaaccctaggtgccatgtcctaatccttgttgggtctttgtattcaagtttgaagctgggagggcctggctactaaagggcacatatgagggcagcctgaagagggtgtggagaggtagagtctaggtcagagttcagtgcctataggcacagtggtcccagggccacagctgggaagggcaaataccagaaggcaaggttgaccattcccttcctcaagtgcctattaaggctccatgttcctatgttgttcaaaccctaactcaatcccaaattaatccaccatgtataaggttgagctatgtctcttattcctggacaccatactcagccatattctggtccacgcattaaacaagctggatgaccttgaagaagcttcacccactctgttcctcagctttcccttcagtgggatgatatcaactggacaacaggatgtgcgattcttttagttccagccttccaggatgttttcgctcccctgtttgttgttgtaggatggtattacctccaccttcccaccttccctatgccctggttctgtctcctgtgcctcgctctgaaagtggatgagacctacaattcctgtcctggtagttctcctaatgaacacactgaagcacgaggaagctgagatttttgttgctacatgagagcatggaggcctcttagggagagaggaggttcagagactcctaggctcctgtggagccccactcatggccttgttcattttccctgcccctcagcaacactcctattgacctggagcacaggtatcctggggaaagtgagggaaatatggaaatcacatggaacaacatccaggagactcaggcctctaggagtaactgggtagtgtgcatcctggggaaagtgagggaaatatggacatcacatggaacaacatccaggagactcaggcctctaggagtaactgggtagtgtgcttggtttaatcttctgtttagctgcagaccaggaagatgagacctctctgcccttctgacctcgggattttagttttgtggggaccaggggagatagaaaaatacccagggtctcttcattattgctgcctcctcttctattaacctgaccctcccctctgttcttccccagaaaagatagatgtggtacccattgagcctcatgctctgttcttgggaatccatggagggaagatgtgcctgtcctgtgtcaagtctggtgatgagaccagactccagctggaggtaaaaacatgctttggatctcaaatcaccccaaaacccagtggcttgaaacaaccaatattttttcttatgattctgtgggttgaccaggattagctgggtagttctgttccatgtggtggaacatgctggggtcactttggaagctgcattcagcagagtgccaggcttgcgctgggcatccaaggtggtccctcatcctccaggctctctttccatgtgatctctcagtgtttaagagttagttggagcttccttacagcatggcggcggacttccaaaagggattattccaaaaagagcctcaacatgcaggcgcttattataacttctgcttgcatcatcctattggccaaagccagtcacgtggctaagtctagccccctgtgagaggagactgcataagagtgtgaacaccaggagacacggtcactgggggccaccactgtaaccatctaccacaggacctgaatctctgtgtgctactcccttgctcaagggcccccctacccacgcagacctgctgtcttctagcaaagcccatcctcaggacctttctcttccaatccttattgactcaaattgattagttggtgctccacccagagccctgtgctcctttatctcatgtaatgttaatgggtttcccagccctgggaaaacatggctttgtctcaggggcttgctggatgcaaccttaacctcaatgtgagtggccatactgtggcactgtcacatccctcaccagggacactgttctggagggtgactgcctgttctgtgaggagtggggatggctaggacattgcatggaacacaccaccaccccatcttctcagagctcaaaccctgacagaacaccagctccacaggccttggcttctgctgatggtgccatgtatttaccagacttagtggtccaaggccagagtggccagatttcccaaagtcaaggtgtgacagtgggacagcctctttgtgtctttgctgtcctaagaaacctgggccaggccaggcgcagtggctcacgcctgtaatcccagcactttgagaggccaaggtgggcagatcacgaggtcaggagtttgagaccagcctggccaacatggtgaaaccctgtctctattaaaaatagaaaacattagacaggtgtggtggtgcatgcctgtaatcccagctactcaggaggctgaggcaggagaatcgcttgaacccaggaggtggaggttgcagtgagccgagattgtgccactgcactccagcctaggcgacagagcaagactccgtctcgggaaaattaattaataaataaataaacctaggtcccagagtcccacagaatggcagacaggagcacctgggggcttttagggtatggcatttcccctgtactaactctgggctgtccagagggccatttcatggcgtggagtggagagggaggcagcacaggacttcctaggcctcagctctcacctgcccatcttttgatttccaggcagttaacatcactgacctgagcgagaacagaaagcaggacaagcgcttcgccttcatccgctcagacagtggccccaccaccagttttgagtctgccgcctgccccggttggttcctctgcacagcgatggaagctgaccagcccgtcagcctcaccaatatgcctgacgaaggcgtcatggtcaccaaattctacttccaggaggacgagtagtactgcccaggcctgcctgttcccattcttgcatggcaaggactgcagggactgccagtccccctgccccagggctcccggctatgggggcactgaggaccagccattgaggggtggaccctcagaaggcgtcacaacaacctggtcacaggactctgcctcctcttcaactgaccagcctccatgctgcctccagaatggtctttctaatgtgtgaatcagagcacagcagcccctgcacaaagcccttccatgtcgcctctgcattcaggatcaaaccccgaccacctgcccaacctgctctcctcttgccactgcctcttcctccctcattccaccttcccatgccctggatccatcaggccacttgatgacccccaaccaagtggctcccacaccctgttttacaaaaaagaaaagaccagtccatgagggaggtttttaagggtttgtggaaaatgaaaattaggatttcatgatttttttttttcagtccccgtgaaggagagcccttcatttggagattatgttctttcggggagaggctgaggacttaaaatattcctgcatttgtgaaatgatggtgaaagtaagtggtagcttttcccttctttttcttctttttttgtgatgtcccaacttgtaaaaattaaaagttatggtactatgttagccccataattttttttttccttttaaaacacttccataatctggactcctctgtccaggcactgctgcccagcctccaagctccatctccactccagattttttacagctgcctgcagtactttacctcctatcagaagtttctcagctcccaaggctctgagcaaatgtggctcctgggggttctttcttcctctgctgaaggaataaattgctccttgacattgtagagcttctggcacttggagacttgtatgaaagatggctgtgcctctgcctgtctcccccaccaggctgggagctctgcagagcaggaaacatgactcgtatatgtctcaggtccctgcagggccaagcacctagcctcgctcttggcaggtactcagcgaatgaatgctgtatatgttgggtgcaaagttccctacttcctgtgacttcagctctgttttacaataaaatcttgaaaatgcctatattgttgactatgtccttggccttgacaggctttgggtatagagtgctgaggaaactgaaagaccaatgtgtctttcttaccccagaggctggcgcctggcctcttctctgagagttcttttcttccttcagcctcactctccctggataacatgagagcaaatctctctgcaaaaaagacatggggcagcactgtccacaacagcctctactggaaacaacccaagcacccatcacagaatgaattagtacatcatgtatctgcacacaacacagtgctccttggcaaagaaaatgaatgaattacagccagctgcacctcacaagacagataatcttacaaacatcatgtgggtacaagaatcacaaaagcatgcatagagtgtgattccatttctacaaagttcaaaacgggcaacatggggctgttgtgtggagggctgtggaaacaggtggtgcagagagaagcaaggccatgctctgtctgaaggcccagtgacacttggcccctgcgagagagagtggcaggcaggagcacctgggggactttagggtccagacaacattctatttcttggcatggatgcagttaggcggttttctgtatgtatattttatttcacaatacctagaaaataaaaagacttcccccccaacaaccagggtgtaaagaaaggagcatctgggaaattatgagattagtgaatggagtattgaatttgtccccataggtgggagtgcaagaccatgagtgaccacttatcaaacacacctcagtaaacagtcaggagagtgaggagtgtggtcctttcacctgcccaggttgtttctgttagattctgggcttggtctctggagtccaagaggcaggccccagtgaggtcatgcacttgctgtctgattttggccaagtcacctccctttgtggggactgttcctcatttgtttgaggggaatgttgatttggatggggattttccaaacagagctccttggacccttccctctaaggtctctggaaatgggaaaccctgcagaggggaggataaatgggccaggattcatcccttgaaccctgttcccaacagagccctctgtttttctcttctttacaacttggacctcccatgggactttgtttgaaagggagacttcattgctaaaagcaaactaaactaagtaggctaaaaggcaacaaactggagaaaatgtttaaggtcttctctagatctaagatcctatgacgttgaggaggtcatccaacatctctgagttttctctttcttgtatataaaatggaagtagctggcagggcagggcatgtgtcgttgatatatttttaatcctggtaaaaggaggaggttcaaggcagaaaactcatcaaagctt

SEQ ID NO: 1074 - protein, 180 aa, Homo sapiens
MALADLYEEGGGGGGEGEDNADSKETICRPSGRKSSKMQAFRIWDVNQKTFYLRNNQLVAGYLQGPNVNLEEKIDVVPIEPHALFLGIHGGKMCLSCVKSGDETRLQLEAVNITDLSENRKQDKRFAFIRSDSGPTTSFESAACPGWFLCTAMEADQPVSLTNMPDEGVMVTKFYFQEDE

SEQ ID NO: 1075 - DNA, 419 bp, Homo sapiens
ggggttccgccggtggtcgtcgctggctgtgcgcgtcatttccgggcgtcacgtaacggagtggccaacggcctgcagagcaacatgcccaagttttattgtgactactgcgatacatacctcacccatgactctccatctgtgagaaagacacactgcagtggaaggaaacacaaagagaatgtgaaagactattatcagaaatggatggaagagcaggctcagagcctgattgacaaaacaacggctgcatttcaacaaggaaagatacctcctactccattctctgctcctcctcctgcagggcgatgataccacctccccccagccttccgggtcctcctcgccctggtatgatgccagcaccccatatggggggccctcccatgatgccaatgatgggccctcctcctcctggg

SEQ ID NO: 1076 - DNA, 494 bp, Homo sapiens
  misc_feature (98)..(98): n is a, c, g, or t
  misc_feature (393)..(393): n is a, c, g, or t
  misc_feature (430)..(430): n is a, c, g, or t
  misc_feature (449)..(449): n is a, c, g, or t
  misc_feature (458)..(458): n is a, c, g, or t
  misc_feature (471)..(471): n is a, c, g, or t
  misc_feature (485)..(485): n is a, c, g, or t
  misc_feature (493)..(493): n is a, c, g, or t
actgcaccaacaatcatttatcaatggttctaagttactcattgccagttcaagccaaaggtcatgttgttaagggggtgcttctagtagcacttgtnattctgagttgaatgaagctgtgcaaacccaccctttaaaccattccacccggcagtattcagcttcttaaccagtcgctatttaggaaaaaaaacccactagttaggccatcaacaagcattctttttatatttcttccagtataataaattattgatatcattgctgacttttatattatggggagggaaaaaataacattaattaaaaaggtgataaaaaaggcactgtttctatttttttctttttttccaaaaaaaggaaagtaataaaaactttaaattctttgtaccngtttaaaaaaaatgtattaaattttacatctgtggcngtgggagttgtttaggttntgggaaacngtccttgggaggntttggttttaggcncggtgggnt

SEQ ID NO: 1077 - DNA, 405 bp, Homo sapiens
  misc_feature (344)..(344): n is a, c, g, or t
ggaaggaaagccatcccacacccctacaacatatgttctggcatttataaactgcttgattgtgtgcctcaaggggagaaaaagtcaagcaatgcttcaaaggccaggctttctaagcaaatgagtggttcaaagcagtgtttggctcaagggcagtctggttttatggatagggccgacccaagacatctgctcatgaagaaatgtggcatctgttgccatttcctaaactataaggtttagatagattgtcttgaattttgatagcaaatttttttaaatttatatttctgcctcctcgtacatccttatatatggaaaaaaaagtaagagttcctcagatncagagctcagtagctgtgtccaattttgaagtttcattcagtgttagttgtccgggggtga

SEQ ID NO: 1078 - DNA, 3851 bp, Homo sapiens
ctctcccaaccgcctcgtcgcactcctcaggctgagagcaccgctgcactcgcggccggcgatgcgggaccccggcgcggccgctccgctttcgtccctgggcctctgtgccctggtgctggcgctgctgggcgcactgtccgcgggcgccggggcgcagccgtaccacggagagaagggcatctccgtgccggaccacggcttctgccagcccatctccatcccgctgtgcacggacatcgcctacaaccagaccatcctgcccaacctgctgggccacacgaaccaagaggacgcgggcctcgaggtgcaccagttctacccgctggtgaaggtgcagtgttctcccgaactccgctttttcttatgctccatgtatgcgcccgtgtgcaccgtgctcgatcaggccatcccgccgtgtcgttctctgtgcgagcgcgcccgccagggctgcgaggcgctcatgaacaagttcggcttccagtggcccgagcggctgcgctgcgagaacttcccggtgcacggtgcgggcgagatctgcgtgggccagaacacgtcggacggctccgggggcccaggcggcggccccactgcctaccctaccgcgccctacctgccggacctgcccttcaccgcgctgcccccgggggcctcagatggcagggggcgtcccgccttccccttctcatgcccccgtcagctcaaggtgcccccgtacctgggctaccgcttcctgggtgagcgcgattgtggcgccccgtgcgaaccgggccgtgccaacggcctgatgtactttaaggaggaggagaggcgcttcgcccgcctctgggtgggcgtgtggtccgtgctgtgctgcgcctcgacgctctttaccgttctcacctacctggtggacatgcggcgcttcagctacccagagcggcccatcatcttcctgtcgggctgctacttcatggtggccgtggcgcacgtggccggcttccttctagaggaccgcgccgtgtgcgtggagcgcttctcggacgatggctaccgcacggtggcgcagggcaccaagaaggagggctgcaccatcctcttcatggtgctctacttcttcggcatggccagctccatctggtgggtcattctgtctctcacttggttcctggcggccggcatgaagtggggccacgaggccatcgaggccaactcgcagtacttccacctggccgcgtgggccgtgcccgccgtcaagaccatcactatcctggccatgggccaggtagacggggacctgctgagcggggtgtgctacgttggcctctccagtgtggacgcgctgcggggcttcgtgctggcgcctctgttcgtctacctcttcataggcacgtccttcttgctggccggcttcgtgtccctcttccgtatccgcaccatcatgaaacacgacggcaccaagaccgagaagctggagaagctcatggtgcgcatcggcgtcttcagcgtgctctacacagtgcccgccaccatcgtcctggcctgctacttctacgagcaggccttccgcgagcactgggagcgcacctggctcctgcagacgtgcaagagctatgccgtgccctgcccgcccggccacttcccgcccatgagccccgacttcaccgtcttcatgatcaagtacctgatgaccatgatcgtcggcatcaccactggcttctggatctggtcgggcaagaccctgcagtcgtggcgccgcttctaccacagacttagccacagcagcaagggggagactgcggtatgagccccggcccctccccacctttcccaccccagccctcttgcaagaggagaggcacggtagggaaaagaactgctgggtgggggcctgtttctgtaactttctccccctctactgagaagtgacctggaagtgagaagttctttgcagatttggggcgaggggtgatttggaaaagaagacctgggtggaaagcggtttggatgaaaagatttcaggcaaagacttgcaggaagatgatgataacggcgatgtgaatcgtcaaaggtacgggccagcttgtgcctaatagaaggttgagaccagcagagactgctgtgagtttctcccggctccgaggctgaacggggactgtgagcgatccccctgctgcagggcgagtggcctgtccagacccctgtgaggccccgggaaaggtacagccctgtctgcggtggctgctttgttggaaagagggagggcctcctgcggtgtgcttgtcaagcagtggtcaaaccataatctcttttcactggggccaaactggagcccagatgggttaatttccagggtcagacattacggtctctcctcccctgccccctcccgcctgtttttcctcccgtactgctttcaggtcttgtaaaataagcatttggaagtcttgggaggcctgcctgctagaatcctaatgtgaggatgcaaaagaaatgatgataacattttgagataaggccaaggagacgtggagtaggtatttttgctactttttcattttctggggaaggcaggaggcagaaagacgggtgttttatttggtctaataccctgaaaagaagtgatgacttgttgcttttcaaaacaggaatgcatttttccccttgtctttgttgtaagagacaaaagaggaaacaaaagtgtctccctgtggaaaggcataactgtgacgaaagcaacttttataggcaaagcagcgcaaatctgaggtttcccgttggttgttaatttggttgagataaacattcctttttaaggaaaagtgaagagcagtgtgctgtcacacaccgttaagccagaggttctgacttcgctaaaggaaatgtaagaggttttgttgtctgttttaaataaatttaattcggaacacatgatccaacagactatgttaaaatattcagggaaatctctcccttcatttactttttcttgctataagcctatatttaggtttcttttctatttttttctcccatttggatcctttgaggtaaaaaaacataatgtcttcagcctcataataaaggaaagttaattaaaaaaaaaaagcaaagagccattttgtcctgttttcttggttccatcaatctgtttattaaacatcatccatatgctgaccctgtctctgtgtggttgggttgggaggcgatcagcagataccatagtgaacgaagaggaaggtttgaaccatgggccccatctttaaagaaagtcattaaaagaaggtaaacttcaaagtgattctggagttctttgaaatgtgctggaagacttaaatttattaatcttaaatcatgtactttttttctgtaatagaactcggattcttttgcatgatggggtaaagcttagcagagaatcatgggagctaacctttatcccacctttgacactaccctccaatcttgcaacactatcctgtttctcagaacagtttttaaatgccaatcatagagggtactgtaaagtgtacaagttactttatatatgtaatgttcacttgagtggaactgctttttacattaaagttaaaatcgatcttgtgtttcttcaaccttcaaaactatctcatctgtcagatttttaaaactccaacacaggttttggcatcttttgtgctgtatcttttaagtgcatgtgaaatttgtaaaatagagataagtacagtatgtatattttgtaaatctcccatttttgtaagaaaatatatattgtatttatacatttttactttggatttttgttttgttggctttaaaggtctaccccactttatcacatgtacagatcacaaataaatttttttaaatac

SEQ ID NO: 1079 - protein, 574 aa, Homo sapiens
MRDPGAAAPLSSLGLCALVLALLGALSAGAGAQPYHGEKGISVPDHGFCQPISIPLCTDIAYNQTILPNLLGHTNQEDAGLEVHQFYPLVKVQCSPELRFFLCSMYAPVCTVLDQAIPPCRSLCERARQGCEALMNKFGFQWPERLRCENFPVHGAGEICVGQNTSDGSGGPGGGPTAYPTAPYLPDLPFTALPPGASDGRGRPAFPFSCPRQLKVPPYLGYRFLGERDCGAPCEPGRANGLMYFKEEERRFARLWVGVWSVLCCASTLFTVLTYLVDMRRFSYPERPIIFLSGCYFMVAVAHVAGFLLEDRAVCVERFSDDGYRTVAQGTKKEGCTILFMVLYFFGMASSIWWVILSLTWFLAAGMKWGHEAIEANSQYFHLAAWAVPAVKTITILAMGQVDGDLLSGVCYVGLSSVDALRGFVLAPLFVYLFIGTSFLLAGFVSLFRIRTIMKHDGTKTEKLEKLMVRIGVFSVLYTVPATIVLACYFYEQAFREHWERTWLLQTCKSYAVPCPPGHFPPMSPDFTVFMIKYLMTMIVGITTGFWIWSGKTLQSWRRFYHRLSHSSKGETAV

SEQ ID NO: 1080 - DNA, 626 bp, Homo sapiens
  misc_feature (614)..(614): n is a, c, g, or t
gtggggtaggcagtgaaatccgtaaataggaaacgcaattctgcaaagtatctaaatagacagaaacaacacaaatatttttgctggagtcaggagcactgtgaggcacagaacatctcccagaaagcagattttttttttctgccgaaaaaccaatatatatatgtatgatcccaattaaaagacaaaagcaaatgagccccaaactgcctgtcttcagcatttgcctgggagctgctacctttgctcttctagcatcttctaggtaccaaggatattagccacttgagggtgttgggcatatttgtttcattgtaggcaaaatcctcttgtggtttcccctccccaggtattgttgagtctgttcaaagctgggtgtgttgaaacactgcacaaatcctgccactcttgatgtgccgcttgtctcagccttggagaggctgagtctgttcctgtgcccacctgtccagcaggttttgatgttggctcctgaaagagtttgtattaatttaattttgcactagtcacagttggttgtaaactgtatcaaatgttttgggagattaattgcctgagatggaagagagatggatgattaatgcctcaatggtttnaattaaagcatc

SEQ ID NO: 1081 - DNA, 564 bp, Homo sapiens
atacaaacaatcccatagtatttattgccatcttgtagtaacacgagggtaatcaaaacaatatgaataaatgttcacattggacaaaggacatctaaaaacaaactgtatccttctcaacaatttctcacttcattgatcatttctagttggagacactttgtagcagagtaatattatctccttttagcatgatccgacccaattgttttcttgactttgttttagaatgaatctcttctgcatcatctaatacaaggttcatatactcatcaaaaccaatgatacagccttctatccgcatattcacttgctcatagagccacacctgaatccgcgatctattttgtaagtatctgaagatgaggttgatgggctgcaccataaccttctgcactttctgaccctggccacggtacgccatggtggaatttcacaaagagcacacccgtacgctgcctttggggggggcccggttcccaattcgccctatagtgagtcgtattacgcgcgctcactgcccctcgttttacaaacttttgactgggaaaacccttgcgttct

SEQ ID NO: 1082 - DNA, 344 bp, Homo sapiens
gtataagcttttttttttttttttttttttttttttgtgatcaaagatgtttatttaaatgcagattttacaacctcaacttgtccctttacaacaggtcttcccagagcttttaatgtgcagacaggcatgtgaacctctgataaagagagggaaaatggagaggcatcttcctctgacttaatacaaccctttttacttttggtagaaaatcataaggcatgagtgtttaaggagcacactttgggaaatgtggttctactagccttactaggcaaatatgcttctaatatgtataactaacacatgttaagcactaattatattaataatgccatgagtcc

SEQ ID NO: 1083 - DNA, 418 bp, Homo sapiens
tttttattaataaaattttttaatgcagatgactttttaaattttgaacatgttcatcaaaattattttgaacatctttaagtcacgttttgattgttttatgtaatcagactcttgattagaaagaataacagaaggaaccgtagatgcactcaaactcctaaagtaattatttacaagaaataaactttttgcaagatctaatgacattttatacaatgaaaatgtataatattttcaaagtaacagcaataaaataataagtaatggtcaaaataaatttcaaaatataaagcataaatgtcagaatcaatattggttttgccgcattagcttgaaaatttactggcggaaaaatagtaatggttaaacacacagaaaagataagtcataaatgtcagccagcccttattaactg

SEQ ID NO: 1084 - DNA, 6885 bp, Homo sapiens
cagatgtattctacaaaaaaaaaaaaaaaaaaaaaatcctctctgaaatcatctctgcaaattactagagccactatggagatcaaatgctctgtctggccaatccacgaattaattcctcctctgccaccgacaccttgtcttctccttagaagacttctatgtatgtggtcttcagtgtggagaaagctctgccagctagtggggagactgcaggggcagaggctccctctttgagttatggaacattggtggtagtttcctctctgctattacctctcttggagttgaccttaattcagaagcaaaataataggagagggaagggctaggctttgggagttctagtggggacgggtggagacagagccccatgtatctgcactgtagtgggtggttattataaactcccagttgatccagtgctggtggatgatatatgtgcaggtgaccccttcccagcattcatacagatgtcctatcaccctgcagagtgtgagtggggacgcttgtgtaggtttttgggtagctcttgctgtccccttcctgctgaagtacagaaggccgtggcaagggaagtgacaagctgcctttccttaacacttcaccaacactggctccctaatgtgcaccatgcccagatcctttctgaggggcccgtgtgagtgaagtgttgattgcctttactattttgctactgtgaaggagaggttattgactgggatggcacaggctatgatgctccgatgctcttcataactcatatgccttgcagtttttgtgtttttatttgtgcttgcttcaacgagacccagctctaatgtaagacctttctaactacctaactcaacctctgggagggcttggggttcgggaacggctccctaccctgtggggggaagagagactgaatctgtgctttccttcttgtggctgattagatcttgagctcttcattgcctttttgtgctgcccttgctcctttcttttgcatgctgcctgctttttgaataacaaagcctgggtcacctccattcctcatgggacctcagcaaccccaggccacagtggccctaacaccccaacagaggggttcagtggagtcacaggaaggccgccttccttgattgtgtcctttactgttgatctaatgagtgtttgagtgacaacaataggtatttttccaatctcaagattcttaccttcttcttctctatattttttccttgcagggcaaccaggaccaaaggtaagggctttcttctttttcttttttcatatttttttggctttatattttctgcttcaaaagcaatgctatgttaatccagtctgtgattttttagacatcagaagatatctgtttcagagggtacctcaacacaggggctgctggcagggttttagactaggggcttagtgggcttactcggcttaatcctgtgaatgtttcatgtttcagggacagaaaggagaacctggagacatcaaggatgtaagtgcaaattattctcacccggtattcgacgtcgtcgtctaaatgggtcatttccttgtgctctcctctaacttaccatcctgtggggctctctctcacagattgtaggacccaaaggacctcctgggcctcaggtaagagagggagaaaatctctttctccgtcccttcctcgctgcgcaagttactgatctgtaactcctggccttgctgtcatcttaccatgttcttcaccttcagggacctgcaggggaacaaggacccagaggggatcgtggtgacaaaggtgaaaaagtgagtaaaaagcaatgctgcttgaccctggtggacttcccaggtcccccaaggccccaccatgtgtttaagggcctggtcacctcttaaagagcagccaagggacagatggctcttggagaaacactgcttcccattgatgcctttttctctttatgccaagggtgcccctggacctcgtggcagagatggagaacctgggacccctggaaatcctggcccccctggtcctcccggcccccctggtccccctggtcttggtggagtaagtatccttacttcccattccttcaggctgtccctccagaaatgtggcttttaaattgctgcttgcacttacctggctggctcccagggctgccagcagtgtgtacatagcctgtccatgggctttgctcaggcctgtaatttagaagagtcacatattaggcatgagactgtggtgctaagggctggcttttttcactaactgggattctataaagaaagtcctcagttacctggcttcctggcatctgtaccacgtagttgatgctggggggtgggtgtaagggataggaggaaggatgactgggcacttgtatttccctggaagacgagtgaccactgtccttggaagacatttatccttggttcttgccaagtacattccaagcaactattcactctcatgaaagagctccactgagtgaaggtgtgtggctaaagtcaattctggaatcaaaccaatcaacaaattatatgattgcctagtttttgcaggtttgctattttgatgtttgctgtattttaaattcttaaactcaaatgggatcacagatgcctactacatctcttgctgaaatattccaagactgttgattttagtcttttgctgggcactaaagtctaaagaataaagaacacccttagaaggtttggttatgtttctccatatacgttaaataacatctgtcatattttagagcataaaaataattttataaaatgaaatgcaaggaactgatacttcctcaaataacactttcccttccagtgaaatgattttgccactgtcatctaataatccattcccaaaattactttccaggcatcagtggtaattctgatcaatgataggttagtctccaacaatcagagtttatctcagtagagttctttgtatccatatagagacttacctagccaagtagggaagacctagtgcctttcaacctcctaacgttgttgggtttctttgcagaactttgctgcccagatggctggaggatttgatgaaaaggctggtggcgcccagttgggagtaatgcaaggaccaatggtaagaaaagacactagttctttgcagccaaaatggcaggaggtggcccttagcagagccagagagtctgacaacctctgctttacagataattgcttagagtggctctcctccgtagttatgtaacctcccattcagctagcccaaagcatttggtttttaatggcaatggatgccacttttaatgatgcgctggagtgactaagaagaatgaagatgggagatgcatataggctgatctgttagaaggccagttgctattgctcttggaatgagaactgaagaatgcagacagcagctactgttctccagcatccacagacttccagcaggccctctcagcccgcagctctgacttggcacatgctaaatgaaactcagcctttagtaaacatggctgctgtccaggagaaagcaaggccagcttttctgtccaaatggtgcctataaataaaaatagagtgttgcgtggggagtgggaaatgagagggagcagccactctaggccccttgcccacagagtaacttcttgtcctttgcccgggctgttggctgggagaagatggcacactggaggccactgaggaagcatgtgtagtaaacccctcattttctgttccgatgcagggccccatgggacctcgaggacctccaggccctgcaggtgctcctgtaagtatctgcaagtctttttgcctccatcgtgtcgcagatgattcccaagcactatgatgttttagcagtttatagggattgacctggtatcctcattttactttttaggggcctcaaggatttcaaggcaatcctggtgaacctggtgaacctggtgtctctgtgagtaccagcacggccctgtcccttctctgggggagcctctaatgatagaccactaggacgcagctgctgtccctcccagctctgcccagctctttcccacagtcggtggccccaaggaaattcggatgtcacttcctagctgtggaggaactctcacagacagcccaatgtggcaaggaccaccaggactctgtcctaacagccccctttccgggtcaccccagcctgtgctatctgctgcatcccactatgatctctgcacctttgctctgaccttcccatctttcttcttcatagaagaactggcttccaaaactacaatgtcaaagttttgtccattgcttaggtgtcttcccactataaccatctcttaaactatcttcctttgtttgtagggtcccatgggtccccgtggtcctcctggtccccctggaaagcctggtgatgatgtggtatacacgagtagacaatgagagctgcctcctttgaaagggcctggagaggtgtgtgcttggggagtgacagggaggcacccagggtggaggtatcttgaggagcaagagtgggcagtcccaaaccctgacgccatcacctatctatatggccactgtgactgtgctggcaagttccctggggaccgctttggatccaaggggaagacaaataattaaaacatcattagccccaggaagggaaattgagaaatgagagaagggagagaaaaaatacaaggcagaaagatgtagagaaggaaaaacaaagaaagaagcgttcaacaacccagcattatcttaattgtaaatgagttagaaaaagcacagcctgagtcaggatgtctacaaaggatgcaaacgaaatgaagagagaagaattggcactcttgtgctatttttatgaattgcattagacagtaaaagtctcttgaggttagagagagcacatacagtcagcagaacctaggagaggagagaaaaagcctctcaggggttgttggaggctggtgaggacagaggagcttgcccatgggctatgcatgtgtccaaaagaataaatggtgacccatgaaaggcatccacggacgtggagtctgaaggaggtgagggagatgagtgagccggtaggcaaaggcatggagggctggaaggagggaagcctctggtgcccccactatgctactgcgtctctgaggaagctgggatatctctctctctcccttcagggtgaagctggaaaacctggaaaagctggtgaaaggggtccgcctggtcctcaggtaaacgccaccgttcccagcctcaggcatctttcctagcgtctccctccctgtggccttaaacacagtgcatccagttcaatgaggtcacttctgagatgaaacgccagtagcccctatatttatcacgaccatgtttgtaatttccactcaggctctcatgagggaggctgggcagttgttatttataccactttgcataaaatggggggtacggggaggggtggtctgggttttacagaaagagctgtccaagtgtggggattcgagacaacgccctggtggcccaagggaactggaggccctcctgcagcccagggcagctttccactgttattttactctgtgctctgaatacctccactttggattgcagggtgctcgtggtttcccaggaaccccaggccttcctggtgtcaaaggtcacagagtaagtatcacgggtgagaaggttggaaggaagagatgcctggtgggagagaaaagcactttggggtgcgtgcatttcttccaacttgggtttcccagaagtctgattgaacattttctcttgttccctagggttatccaggcctggacggtgctaagggagaggcgggtgctcctggtgtgaaggtgagaggccagaaagtacaatgggatggggaggagggagacaatgaggagcccctcttcctagccagggagacactgtggagctcagtggaactagctcctcagaacagccttgctgggaacaccagccctacatcctgatgggccaacagcaggcctggagagctcagggcattgtccctcacaggactgaagtttgtatcagtgcgagctgagatgaccagggcttttggcgtcttccctaggagtttgctggcggccaagaatggggtcccagacactgaccttgtgcatcatttttccagggtgagagtggttccccgggtgagaacggatctccgggcccaatggtaagtatggacaccctccaggaaggtttatcaaagactcttcagactatcagatggctgcaaagagctccctttgtgcaaagttcatattctgtgttgtagatttcatctgattgtgagcaaaaagcaaaatgtattagacagatgatttgttcaagatttcaccaacatttccttaagatagccatcttatcacactaaagatgctcccattttaaaaaattctgttgagtctcaacattttgtcaagctcatctactgcaaggagcaaggtgtgcttgtaacaaaggttcccaataggtagcaacaggaacattcgtcggttccgcctgtggagaaaactgttgggtgtgatctgaggcatcctggctagtcaaggagccagcccatcaggaggtccttgttttcctgggtgtgggcatcctccctctcctctggtaccgcaaagggcctgcaggtagaaatggtcaccctgagcaccgtaaagccaactcatgcttaggctgtcctggtgtgtgttccagggtcctcgtggcctgcctggtgaaagaggacggactggccctgctggcgctgcggtgagtaattgacaaagccaaacaccaccatttgccgagcactttagagtttcaggtttgtttctcttgaccctcgaaacaaacctgtgaggcatagggagtattgctatcccttaa

SEQ ID NO: 1085 - protein, 243 aa, Homo sapiens
QPGPKGQKGEPGDIKDIVGPKGPPGPQGPAGEQGPRGDRGDKGEKGAPGPRGRDGEPGTPGNPGPPGPPGPPGPPGLGGNFAAQMAGGFDEKAGGAQLGVMQGPMGPMGPRGPPGPAGAPGPQGFQGNPGEPGEPGVSGPMGPRGPPGPPGKPGDDGEAGKPGKAGERGPPGPQGARGFPGTPGLPGVKGHRGYPGLDGAKGEAGAPGVKGESGSPGENGSPGPMGPRGLPGERGRTGPAGAA

SEQ ID NO: 1086 - DNA, 271 bp, Homo sapiens
  misc_feature (20)..(21): n is a, c, g, or t
  misc_feature (25)..(25): n is a, c, g, or t
  misc_feature (196)..(196): n is a, c, g, or t
  misc_feature (204)..(204): n is a, c, g, or t
tatgtagatacagtttttanngtancacaatgagcaacaaacatacttgatgaactatttccagaagaataagttcaaataccatctacaataaacatcatttcaactatgacaacaggtctgtgacaaaataaaaaaaagttttcaaaaccatgttatttaccgtaatacggtgcatttgagacttcaaacattncagtaacnaaaaactaatggggacctactctctatatttaaaacatcaataacatttttgggttaggttatttta

SEQ ID NO: 1087 - DNA, 327 bp, Homo sapiens
  misc_feature (53)..(53): n is a, c, g, or t
  misc_feature (161)..(161): n is a, c, g, or t
  misc_feature (217)..(217): n is a, c, g, or t
agggagtactttggcgagtttggggagattgaggccattgaattgccaatggntccaaagttgaacaaaagacgaggttttgtgtttatcacctttaaagaagaagaacccgtgaagaaggttctggagaaaaagttccatactgtcagtggaagcaagtntgagatcaaggtggcccagcccaaagaagtctatcagcagcagcagtatggctctnggggccgtggaaaccgcaaccgagggaaccgaggcagcggaggtggtggtggaggttgaggtcagggtagtacaaactacggcaagagccagcgacgttgtggccatcag

SEQ ID NO: 1088 - DNA, 397 bp, Homo sapiens
tttacagtaacaaataatttatttaggaggtcctttacagctagtctagcttcctaaaaatggttgcatttatctttatttcaatttccagtgtgtaagagtcaaggattcctccattcttgcttcatgaaatgagcagttttaaagttgtagaagtatcagcatcgaacatcgacatgttatactttagggtattctattatattttagaacagtctgcttgcccaaaccagtctgggtaaatctcaatacacacacacacacacacacgcacgcacgcacacaagcaaatggaatgttctagctcctcgatgatcagcactaaagaattgggatgttttgatatgtaaccatgtgaaaccattggcttaaaatgttgcatttgtcttttattgct

SEQ ID NO: 1089 - DNA, 436 bp, Homo sapiens
  misc_feature (23)..(23): n is a, c, g, or t
  misc_feature (27)..(27): n is a, c, g, or t
  misc_feature (76)..(76): n is a, c, g, or t
  misc_feature (85)..(85): n is a, c, g, or t
  misc_feature (90)..(90): n is a, c, g, or t
  misc_feature (109)..(109): n is a, c, g, or t
  misc_feature (117)..(117): n is a, c, g, or t
  misc_feature (146)..(146): n is a, c, g, or t
  misc_feature (169)..(169): n is a, c, g, or t
  misc_feature (176)..(176): n is a, c, g, or t
  misc_feature (191)..(191): n is a, c, g, or t
  misc_feature (227)..(227): n is a, c, g, or t
  misc_feature (233)..(233): n is a, c, g, or t
  misc_feature (243)..(243): n is a, c, g, or t
  misc_feature (280)..(280): n is a, c, g, or t
  misc_feature (283)..(283): n is a, c, g, or t
  misc_feature (300)..(301): n is a, c, g, or t
  misc_feature (315)..(315): n is a, c, g, or t
  misc_feature (318)..(318): n is a, c, g, or t
  misc_feature (320)..(320): n is a, c, g, or t
  misc_feature (324)..(324): n is a, c, g, or t
  misc_feature (352)..(352): n is a, c, g, or t
  misc_feature (354)..(354): n is a, c, g, or t
  misc_feature (356)..(357): n is a, c, g, or t
  misc_feature (362)..(363): n is a, c, g, or t
  misc_feature (370)..(370): n is a, c, g, or t
  misc_feature (373)..(374): n is a, c, g, or t
  misc_feature (388)..(388): n is a, c, g, or t
  misc_feature (392)..(392): n is a, c, g, or t
  misc_feature (399)..(400): n is a, c, g, or t
  misc_feature (404)..(404): n is a, c, g, or t
  misc_feature (410)..(411): n is a, c, g, or t
  misc_feature (417)..(419): n is a, c, g, or t
  misc_feature (424)..(425): n is a, c, g, or t
  misc_feature (430)..(430): n is a, c, g, or t
  misc_feature (432)..(432): n is a, c, g, or t
gcaggaatttggacgtggcctcnactngtgcaggccaccttgccaggtaggagccctgcccaagccttcaggggtnctcggagtnacctnttggaatggactaaaaggncccttgtntgggaacaggtgctccccaaacaccctgntgctggctgccaggcaggccctntggaagngaaggggcaggactnatcaggacctccctggacctctgaagggaaggcagnttgggnccgagcccangtatttggactctgctgcccccaaggggacaggaagnctnttgggcctcttaccttnntgggtcaaggcccnctncntttngcctcacataaactgtacagtattttcncntnntttannatttgtnggnntttttgatattatngccntagtccnnttgntctttnnatatannntttanngggtnantttt

SEQ ID NO: 1090 - DNA, 179 bp, Homo sapiens
  misc_feature (32)..(32): n is a, c, g, or t
  misc_feature (36)..(36): n is a, c, g, or t
  misc_feature (38)..(38): n is a, c, g, or t
  misc_feature (44)..(44): n is a, c, g, or t
  misc_feature (117)..(117): n is a, c, g, or t
  misc_feature (146)..(146): n is a, c, g, or t
tttttttttttttttttttttttttttttttnaaantnccaggntttattaagataattggcaaaatttcaacatacaccttacctgaatgaacacttttaataaaatatgaaggancactcatgactacaactgaactcaaaagngagatgtagagcagatttgtaaattgataaatt

SEQ ID NO: 1091 - DNA, 432 bp, Homo sapiens
  misc_feature (3)..(3): n is a, c, g, or t
tancaatatttccaatccttggttgccttaacggatgtagaacccaaggaataagttctggtgtcctattgcatagtaggatgagtatagttaacaataacatattatatatttgaaaatagccagaagagtagattttgaattttctccctacagaaaaatcattatgcaaattaccctgatttgatcattacacattgagtacatgtattaaaacatcacattctaccccatatatatgtacagttattatgtgtccataaaaatttaatgtcaatgtgtgaaataaaatgaaaaaataaaaatttttaaagctgtaattatctccatctggtaggaatatatacaatctggaaataaaaaatatatttgtaattgttaggaccaaaatagattatacattaagtctgcaaattataaattataaaattc

SEQ ID NO: 1092 - DNA, 335 bp, Homo sapiens
ctagacgatccgcgttaagcacaccccaaccttaatagtaacccatgcgctacataaagtcaaagtgggaaaaagcccaccggtgaggggctccctctctggaaaagtcagcctaccttgtcatttttcaacgatgcctactttgccacccagttacaacaccagtgaatttctccgcatcaaatggtctaagattgaagtggacaaaaatggaaaagatttgaaagagactactgtccttgtggcccaaaatggaaatatcaagattggtcaggactacaaagggagagtgtctgtgcccacacatcccgaggctgtgggcgatgcctccctca

SEQ ID NO: 1093 - DNA, 303 bp, Homo sapiens
ggaatttataaccaaaattttaaaactatttttatatttttttaaatctttaaaaattttaattactgtgatattgattatacaccttttttatagatgatttgtttaaattatatctggaaaatagagttgatttactttcagacatgaactatacaaacaggatatatttatatggcttgaggtatgttttgtaatagcgttgttctttaagtgtacatcgtaatttgacctaatttaaaaataatatatttccgaagtagtagattctcagatctttattctaacaattacatgatttga

SEQ ID NO: 1094 - DNA, 465 bp, Homo sapiens
  misc_feature (443)..(443): n is a, c, g, or t
taaatttacattctagaataccagggtaaacaaggagacgttattcaaagatgaatgagaaagttctattctttttcatcatttgtgtgatcaggttgcaaaggacatgcttttctctttgcttttcctaagccactgcttcctgcctcttcaggaatctgattctctttttcagaatctttaggggacaacctaaagaattctccaattcctttttgccacttgggagttgggcgcacgcaaacggggttccctcctgcatatttattttcagctttcctcgatgaaactgatgtcgaattagtgggcagaggtgggaaggaaccaaggcacctttctgggggctcgaggcaggccaccacttttctgtaaggtgccggggaacactgtctggtttagtccgcacctgtttcaaacaggagagaggagaggggagaacgaantgacctcgtggccgattttttt

SEQ ID NO: 1095 - DNA, 409 bp, Homo sapiens
gtgtggccacgcccatcctgggtccggtgctgcattactctctgcttttcttaaatcttgtcgctgcctctgattttaattcctagacttttgggaacctgtcatcctacgtttttggtactagctggcgtctacaaaagtcataatgttaaaaagatcaacaagagatacagcatttttcatgacataacggcagcaaatataagtcaaaatctagaggttcataaacattttgcttgctgttgggcaaggaagcttaaacctgagggacaataggagttcaacattattggttactattagcttgggcgttttcttatccaccacgtcagacacagacaaagcaggggactttccttatcccagttgattgtgcagaatacactgcctgtcgcttgtcttctattca

SEQ ID NO: 1096 - DNA, 574 bp, Homo sapiens
agggaatttaattcctattttgtccatgttggtgatgtactgtacttcccttccttttctctgcatcccccatcacctcatagaagactctttgttgatcattgtatgttaataatgtataaaatggctatcttgtaagcgtgctgtcctggtactagtgtagcgactttttttctcctctttcttctagtacatattgataggtataacataattaaggtttaaaaaaaattagacatagttattcagatttaggaccagtaaggatagaactttctcttatttatgaaaaaaaatgctaataattttggggcagttttttcctttaattatttttttcaatttcaagtttaattttattttagctgatctgatgtggtttcaactaacccaaggtctcaccatgttaaaatgccggcggactctacggcgttttgtagatcccccccccccacccactgtgaaggggtgccatactaccttaaatgctaatgctagatatgcaaaactggattttttaatttattttttaaaagagggaggcatggtatattaaaatgattttactaagaga

SEQ ID NO: 1097 - DNA, 210 bp, Homo sapiens
  misc_feature (67)..(67): n is a, c, g, or t
  misc_feature (179)..(179): n is a, c, g, or t
  misc_feature (191)..(191): n is a, c, g, or t
cccgaacacatttcccctcccgtcgctgggtccctgcgatcgcccccagctggtggggctcgcggantcacacgttgagggggagttaccaagcccaggcagcaaaaacatcctggcacattcctggggagtcctcagctgccagcatctgattagaaccatatctctcgccgggagtngccgcgcggctngcgaagctcccggccggcg

SEQ ID NO: 1098 - DNA, 420 bp, Homo sapiens
tttttttttttttttttaatctcatcactcttagattaacaggaaggttttgcctttctggtgtaggatgcagtaagttttcttggggagagaaatgagttcaggctttggaattattcatagtgaccagggacattgccagcactcccgggtcctgcataatctaagataatgctcctgtggccatgaagtctccctttacaaaatctgagggggaaaagagatcctggtgtctaggaacactggcctgggcctttcccaaggcagccttgggtctggtgaggagctggaatcccctctggcttttgtagcctgtcatatcagaacattccaagtcagcctgaggaagaaaaggctgctgctgggatttggtggggcctgtagatcaggagaacactggagctttctgtgtatgtcgat

SEQ ID NO: 1099 - DNA, 572 bp, Homo sapiens
tagagggtggggggcaggaatgcttatgtaggatagaaagaatgtgggggtagctgtttggttatggtgatccagtcctttggaaccttacaaggctcctgtgggcatgtcaatgttaccattacagcctctacgacccacccacctttgaaaagtcagtacaagtagaccacagtttaaagtagttagtataattctactaaggtttaatcattatacttgttcacttcctggtgcatatttcctaaatatgcttggggtgtggggtggggggttgagttttcactgttccattgcgtgtcatcttatatttttctccatcctgtgactttggcatcttactcgactttctattttcttttcccttggcttattgcagtagtctgctggtgcaggtagagagctcagtgcacctattcccctgttactgctaattatcttgaatattgtcagaggttattttgatgttctaagaatataaagtcattttttacaaaatcatcttttccaagttaaaagcaaaataaaaaaatcccctgtgctagggtgcccatttcagcttttgacattgc

SEQ ID NO: 1100 - DNA, 2972 bp, Homo sapiens
ttttgtacagtcatgcttatgctgctggtgccagtcatttgaagaaaaacagtccttggaggaaaagcagtcgtgcttaaagttcaaagctaatgatcacggatatgacaacttccgttccagtaataaatacagctcatcttgaaagaagaactattcactgtatttcattttctttatattggaccgaagtcattaaaacaaaatgaaacatttgccaaaacaaaacaaaaaactatgtatttgcacagcacactattaaaatattaagtgtaattattttaacactcacagctacatatgacattttatgagctgtttacggcatggaaagaaaatcagtgggaattaagaaagcctcgtcgtgaaagcacttaattttttacagttagcacttcaacatagctcttaacaacttccaggatattcacacaacacttaggcttaaaaatgagctcactcagaatttctattctttctaaaaagagatttatttttaaatcaatgggactctgatataaaggaagaataagtcactgtaaaacagaacttttaaatgaagcttaaattactcaatttaaaattttaaaatcctttaaaacaacttttcaattaatattatcacactattatcagattgtaattagatgcaaatgagagagcagtttagttgttgcatttttcggacactggaaacatttaaatgatcaggagggagtaacagaaagagcaaggctgtttttgaaaatcattacactttcactagaagcccaaacctcagcattctgcaatatgtaaccaacatgtcacaaacaagcagcatgtaacagactggcacatgtgccagctgaatttaaaatataatacttttaaaaagaaaattattacatcctttacattcagttaagatcaaacctcacaaagagaaatagaatgtttgaaaggctatcccaaaagacttttttgaatctgtcattcacataccctgtgaagacaatactatctacaattttttcaggattattaaaatcttcttttttcactatcgtagcttaaactctgtttggttttgtcatctgtaaatacttacctacatacactgcatgtagatgattaaatgagggcaggccctgtgctcatagctttacgatggagagatgccagtgacctcataataaagactgtgaactgcctggtgcagtgtccacatgacaaaggggcaggtagcaccctctctcacccatgctgtggttaaaatggtttctagcatatgtataatgctatagttaaaatactatttttcaaaatcatacagattagtacatttaacagctacctgtaaagcttattactaatttttgtattatttttgtaaatagccaatagaaaagtttgcttgacatggtgcttttctttcatctagaggcaaaactgctttttgagaccgtaagaacctcttagctttgtgcgttcctgcctaatttttatatcttctaagcaaagtgccttaggatagcttgggatgagatgtgtgtgaaagtatgtacaagagaaaacggaagagagaggaaatgaggtggggttggaggaaacccatggggacagattcccattcttagcctaacgttcgtcattgcctcgtcacatcaatgcaaaaggtcctgattttgttccagcaaaacacagtgcaatgttctcagagtgactttcgaaataaattgggcccaagagctttaactcggtcttaaaatatgcccaaatttttactttgtttttcttttaataggctgggccacatgttggaaataagctagtaatgttgttttctgtcaatattgaatgtgatggtacagtaaaccaaaacccaacaatgtggccagaaagaaagagcaataataattaattcacacaccatatggattctatttataaatcacccacaaacttgttctttaatttcatcccaatcactttttcagaggcctgttatcatagaagtcattttagactctcaattttaaattaattttgaatcactaatattttcacagtttattaatatatttaatttctatttaaattttagattatttttattaccatgtactgaatttttacatcctgataccctttccttctccatgtcagtatcatgttctctaattatcttgccaaattttgaaactacacacaaaaagcatacttgcattatttataataaaattgcattcagtggctttttaaaaaaaatgtttgattcaaaactttaacatactgataagtaagaaacaattataatttctttacatactcaaaaccaagatagaaaaaggtgctatcgttcaacttcaaaacatgtttcctagtattaaggactttaatatagcaacagacaaaattattgttaacatggatgttacagctcaaaagatttataaaagattttaacctattttctcccttattatccactgctaatgtggatgtatgttcaaacaccttttagtattgatagcttacatatggccaaaggaatacagtttatagcaaaacatgggtatgctgtagctaactttataaaagtgtaatataacaatgtaaaaaattatatatctgggaggattttttggttgcctaaagtggctatagttactgattttttattatgtaagcaaaaccaataaaaatttaagtttttttaacaactaccttatttttcactgtacagacactaattcattaaatactaattgattgtttaaaagaaatataaatgtgacaagtggacattatttatgttaaatatacaattatcaagcaagtatgaagttattcaattaaaatgccacatttctggtctctgggctggactgtgtgtttcattgttgtgaagaaacagatatacagacatgcaacttcccaaggttgattttccgggtaatagtttccaatggcctctttggtcttccttt

SEQ ID NO: 1101 - protein, 442 aa, Homo sapiens
MQPPPSLCGRALVALVLACGLSRIWGEERGFPPDRATPLLQTAEIMTPPTKTLWPKGSNASLARSLAPAEVPKGDRTAGSPPRTISPPPCQGPIEIKETFKYINTVVSCLVFVLGIIGNSTLLRIIYKNKCMRNGPNILIASLALGDLLHIVIDIPINVYKLLAEDWPFGAEMCKLVPFIQKASVGITVLSLCALSIDRYRAVASWSRIKGIGVPKWTAVEIVLIWVVSVVLAVPEAIGFDIITMDYKGSYLRICLLHPVQKTAFMQFYKTAKDWWLFSFYFCLPLAITAFFYTLMTCEMLRKKSGMQIALNDHLKQRREVAKTVFCLVLVFALCWLPLHLSRILKLTLYNQNDPNRCELLSFLLVLDYIGINMASLNSCINPIALYLVSKRFKNCFKSCLCCWCQSFEEKQSLEEKQSCLKFKANDHGYDNFRSSNKYSSS

SEQ ID NO: 1102 - DNA, 2671 bp, Homo sapiens
ggcgctcttccagcgggcaggcagcatggcggccgtggagacgcgggtgtgcgagacagacggctgcagcagtgaggccaagctccagtgtcccacttgcatcaagctgggcatccagggctcgtacttctgctcgcaggaatgttttaaaggaagttgggctactcacaagttactacataagaaagcaaaagatgaaaaggcgaagcgagaagtgtcttcctggactgtggaaggtgatattaatactgacccatgggcaggttatcgatatactggtaaactcagaccacattatccactgatgccaacaaggccagtgccaagttatattcaaagaccagattatgctgatcatcccttaggaatgtctgaatctgaacaggctcttaaaggtacttctcagattaaattactctcatctgaagatatagaagggatgcgacttgtatgtaggcttgctagagaagttttggatgttgctgccggcatgattaaaccaggtgtaactactgaagaaatagatcacgctgtacacttagcatgtattgcaagaaattgctacccttctcccctgaattattataatttcccaaagtcttgttgtacctcagtgaatgaagtcatttgccatggaataccagacagaaggcccttacaagaaggtgacattgttaatgtggatatcactctttatcgcaatggttatcatggggacctgaatgagacattttttgttggagaagtggatgatggagcacggaaacttgttcagaccacatatgagtgcctgatgcaagccattgatgcagtgaagcctggtgttcggtacagagaattgggaaacattatccagaagcatgcccaagcaaatgggttttcagttgttcgaagctattgtgggcatggaatccacaagctttttcatacagctcccaatgtaccccactatgctaaaaataaagcagttggagtgatgaagtcgggccatgtatttacaattgagccaatgatttgtgaaggcggatggcaggatgaaacctggccagatggttggactgcggtgacaagagacggaaagcggtctgctcagtttgagcacaccctcctggtcacagacactggctgtgaaatcctaacccggcgacttgacagtgcacggcctcacttcatgtctcaattttaatttctcccaagatggcacatctcagtaccttcttactgtgctatgcattttattgagagtacagaaaggaagaggaacctttttttaatcacttgttttgttttgactatagataagaaaggactacagcatttgatgtgtgtcctcaagaacttgtcttgggtctgaaaaagctgagaagaataaaggaaacattgctcaactcttcagccccctccccctgcacacctgttttctcatttgccctttgagcacttttacttaaacttgcttgtagttgcttttatcactgccgcaaaacagccatcaagagccatctgctttccaggtgaacattggaaatgagaatctttgaaacttagcaatatgtgttgcaccagattttttaaattatatatatggaaatatatatgtatacattttaagttctgtatacataattaccaaacactatgtgacctggagtttgtgttgtttctgctctgacaggtttatatgttcttacaaatggatccatagtttgcagtgatttaattcctggttgggatttggcctcccctctcccccatgctaattatttacccttgtaattgtgcatagggaagcactcacccaatgagactttctccaatgtggactctgtgtgtcagtgaatgaatgtagtaaaattcactttggaaggttatcaggcttttaaaaatctagtttatggcaaaaatagccattttccaagtggtggctgactgttgcagggaatgagaatttcataatacactgctatttcagacctctgtttggtcagaaatggaaaagaaaaagccccctttcttcccttttctgttttacttcaagggcataccttggaggtgctcagagaagcgtgaagtttgcactatggtggaggatggggaaagagttctaaagtgtctccagctgtgaacccaggaggtcaagtgggctattaaaatctaacgttgagtaaatgtgatagtgatgagaaaggaattttgtgtactgtaaccttgcagtagagatgcagctgtccttcgtgtgtggaaacacacctctcctttacatagttgggaacctcattagaaatgacctcagctgccccatatctacgttcctttcagcagttgtccaagtaggagtgtatccagtgaagacatatcaaatcacaaagtcattgtcattagagtgtacttgattactgggcatccttgtaatataatttcataccactgacacattatacttgtaagagaacatctttcccagagtgcctcagaccttattgctttaaaatataataatgttttcattacttttattatttgaatgatttagtaaagttgactgaatctggtatagactttgggagtatgtgtgtgaagtttttatcaaactgtaatatttgtgaatggaatgccttgcaatatgaatgttaatataatgtgtaaagggagattaaaaagtttgaatgat

SEQ ID NO: 1103 - protein, 394 aa, Homo sapiens
ALFQRAGSMAAVETRVCETDGCSSEAKLQCPTCIKLGIQGSYFCSQECFKGSWATHKLLHKKAKDEKAKREVSSWTVEGDINTDPWAGYRYTGKLRPHYPLMPTRPVPSYIQRPDYADHPLGMSESEQALKGTSQIKLLSSEDIEGMRLVCRLAREVLDVAAGMIKPGVTTEEIDHAVHLACIARNCYPSPLNYYNFPKSCCTSVNEVICHGIPDRRPLQEGDIVNVDITLYRNGYHGDLNETFFVGEVDDGARKLVQTTYECLMQAIDAVKPGVRYRELGNIIQKHAQANGFSVVRSYCGHGIHKLFHTAPNVPHYAKNKAVGVMKSGHVFTIEPMICEGGWQDETWPDGWTAVTRDGKRSAQFEHTLLVTDTGCEILTRRLDSARPHFMSQF

SEQ ID NO: 1104 - DNA, 345 bp, Homo sapiens
actacatacttccgactacatactccggactacatactttcgagtcctaagggaccatacagagtattcctaggtgcacaccaggaccagccactgttgcagcatgagttcccagcagcggaagcagccctgcatcccaccccttaagtttaagcagcggcaggtgaaacagccttgccagcctccacctaaggaaccatgcatccccaaaaccaaggagccctgccacccaagggtgcctgagccctgccacccaaaagggccggagccctgccagcccaaggttccagagccatgccaccccaaggggcctgagccctgcccttcaatagtcactccagcacc

SEQ ID NO: 1105 - DNA, 265 bp, Homo sapiens
  misc_feature (113)..(113): n is a, c, g, or t
  misc_feature (135)..(135): n is a, c, g, or t
  misc_feature (216)..(216): n is a, c, g, or t
  misc_feature (228)..(228): n is a, c, g, or t
aaacccttagctgaatgcagggtggggagaacgaaagacaaaagcatcttttttcagaagggaaactgaaagaaagaggggaagagtattaaagaccatttctggctgggcanggcactctcagcagctcaactncccagcgtgaccagtggccacctctgcagtgtcttccacaacctggtcttgactcgtctgctgaacaaatcctctgacctnaggccggctgtnaacgtagttcctttagagatagcaaacatgcccaaca

SEQ ID NO: 1106 - DNA, 261 bp, Homo sapiens
  misc_feature (145)..(145): n is a, c, g, or t
  misc_feature (191)..(191): n is a, c, g, or t
  misc_feature (200)..(200): n is a, c, g, or t
  misc_feature (224)..(224): n is a, c, g, or t
  misc_feature (235)..(235): n is a, c, g, or t
  misc_feature (238)..(238): n is a, c, g, or t
  misc_feature (245)..(245): n is a, c, g, or t
  misc_feature (247)..(247): n is a, c, g, or t
gttaatggaagagtttcagaaaggaatgagaatgcctcaggagttgttctgtgatggaaattggtctgttgttctgttaatgctgatggaaagaaacttacaacgcttaataaaaatctattcttttagtaaaaaaaattgtganataaaaaaaaaaaaaaaaaaaaaaaaaaaaagggattcccgacagnatctggganacacggacgtttcaagtccatggnggacatccctnttntaaaaantnctcaggtctggaga

SEQ ID NO: 1107 - DNA, 259 bp, Homo sapiens
tttttttttgtcagagaattgtttattttacccagttatactgtaataagtcctggatggcactgtgtctagcctcaaggaaacagaacaagtacaaagctaagttaaaggcaactttattacaatacttttccaaacttcaaaatgcatttattactaaatttagctctaatatataatacactatattacaaggcagaaagcatttctggtcatatatttagcttccatgtattgcccaaaacacagcttcctagga

SEQ ID NO: 1108 - DNA, 535 bp, Homo sapiens
gcacgaggagagagagagggaccagttggtgttgcccaatcagcactccaaggctgtgtgtgcaccagccagagagcgcacggtggtagcagagtcgaggctgtcttgtatcctggtttcatgtgttgttttgaactgataggaggatgttctcttctgacaagttacccttgtgtatcctgcagacatgtaaaataaaatacaagttcatttttttcaccttttttagatttttttaaaaaataaaatgtgtaatcctttttttaaaagaaacacatgtaaatacatttaagtattgtaggcatagcgttcagatgtgactggcccaggcgttcctcggacaagcctgcattccccgtgatcacgcccacctcaagcccaggggctgcagcccagccacagatgaactctacctttgctttcagaaccacttagtccttttgtaacaaagaaaaaaaaatgtttcttacaatgtcaataaaaaattctttgtatggaaaaaaaaaaaaaaaactcgagggggggcccggtaccc

SEQ ID NO: 1109 - DNA, 680 bp, Homo sapiens
gcgaccgggtcccagactccccccagcacagcagagcgcttccctgcccacccgcggaaaccgccccaggatgcagcaccgaggcttcctcctcctcaccctcctcgccctgctggcgctcacctccgcggtcgccaaaaagaaagataaggtgaagaagggcggcccggggagcgagtgcgctgagtgggcctgggggccctgcacccccagcagcaaggattgcggcgtgggtttccgcgagggcacctgcggggcccagacccagcgcatccggtgcagggtgccctgcaactggaagaaggagtttggagccgactgcaagtacaagtttgagaactggggtgcgtgtgatgggggcacaggcaccaaagtccgccaaggcaccctgaagaaggcgcgctacaatgctcagtgccaggagaccatccgcgtcaccaagccctgcacccccaagaccaaagcaaaggccaaagccaagaaagggaagggaaaggactagacgccaagccttggatgccaatggagccccctggtgtcacatggggcctggcccacgccctccctctcccaggcccgagatgtgacccaccagtgccttctgtctgctcgttagctttaatcatcatgcctgcttgtcctcctcactccccagcccaccctaagtgccaaagtgggga

SEQ ID NO: 1110 - DNA, 1412 bp, Homo sapiens
ctccttgggcgatcgcctgggtagaggagaggagtttccggggctcgggtccgggtcgccttccaggggaacgagcgcggaagcaagtgggcggcgagaggcggagcaagagacgctggagggcgtggacgcagcgggctttggaaaggccccaagttaatgaggcgtgcgccggctgccgagcgcctcttggagctgggctttcccccgcggtgcgggcgccaggagccgccttttccgctgggtgtcactcgggggtggggaagatggcccattcaaaagcgccgcgagggggcccggccagtgcccttcagtgagcgctcgcaagaggacggcagaggcccggcagctcggagctccgggaccttgtggcgcatcaggacgcggctgtccctctgccgggacccagagccgccgccgccgctctgcctcctgcgtgttagcctcctctgcgcgctccgggcaggcggccgtgggagccgctggggcgaggacggcgcgaggctgctgctgctgcccccggcccgcgcggctggaaacggagaggccgagccaagcggcggcccctcttatgctgggaggatgctggagagtagcggctgcaaagcgctgaaggagggcgtgctggagaagcgcagcgacgggttgttgcagctctggaagaaaaagtgttgcatcctcaccgaggaagggctgctgcttatcccgcccaagcagctgcaacaccagcagcagcagcaacagcagcagcagcagcagcaacaacagcccgggcaggggccggccgagccgtcccaacccagtggccccgctgtcgccagcctcgagccgccggtcaagctcaaggaactgcacttctccaacatgaagaccgtggactgtgtggagcgcaagggcaagtacatgtacttcactgtggtgatggcagagggcaaggagatcgactttcggtgcccgcaagaccagggctggaacgccgagatcacgctgcagatggtgcagtacaagaatcgtcaggccatcctggcggtcaaatccacgcggcagaagcagcagcacctggtccagcagcagcccccctcgcagccgcagccgcagccgcagctccagccccaaccccagcctcagcctcagccgcaaccccagccccaatcacaaccccagcctcagccccaacccaagcctcagccccagcagctccacccgtatccgcatccacatccacatccacactctcatcctcactcgcacccacaccctcacccgcacccgcatccgcaccaaataccgcacccacacccacagccgcactcgcagccgcacgggcaccggcttctccgcagcacctccaactctgcctgaaaggggcagctcccgggcaagacaaggttttgaggacttgaggaagtggg

SEQ ID NO: 1111 - protein, 400 aa, Homo sapiens
MRRAPAAERLLELGFPPRCGRQEPPFPLGVTRGWGRWPIQKRREGARPVPFSERSQEDGRGPAARSSGTLWRIRTRLSLCRDPEPPPPLCLLRVSLLCALRAGGRGSRWGEDGARLLLLPPARAAGNGEAEPSGGPSYAGRMLESSGCKALKEGVLEKRSDGLLQLWKKKCCILTEEGLLLIPPKQLQHQQQQQQQQQQQQQQPGQGPAEPSQPSGPAVASLEPPVKLKELHFSNMKTVDCVERKGKYMYFTVVMAEGKEIDFRCPQDQGWNAEITLQMVQYKNRQAILAVKSTRQKQQHLVQQQPPSQPQPQPQLQPQPQPQPQPQPQPQSQPQPQPQPKPQPQQLHPYPHPHPHPHSHPHSHPHPHPHPHPHQIPHPHPQPHSQPHGHRLLRSTSNSA

SEQ ID NO: 1112 - DNA, 490 bp, Homo sapiens
  misc_feature (269)..(269): n is a, c, g, or t
  misc_feature (357)..(357): n is a, c, g, or t
  misc_feature (390)..(390): n is a, c, g, or t
  misc_feature (392)..(392): n is a, c, g, or t
  misc_feature (406)..(406): n is a, c, g, or t
  misc_feature (409)..(409): n is a, c, g, or t
  misc_feature (411)..(411): n is a, c, g, or t
  misc_feature (437)..(437): n is a, c, g, or t
  misc_feature (441)..(441): n is a, c, g, or t
  misc_feature (446)..(447): n is a, c, g, or t
  misc_feature (458)..(458): n is a, c, g, or t
  misc_feature (460)..(460): n is a, c, g, or t
  misc_feature (478)..(478): n is a, c, g, or t
  misc_feature (480)..(480): n is a, c, g, or t
caggagctgcagaatgaagggcgggctcttccattggtggccctcaagggtagaagggagcaggggtccagggcaggggcttcactctgttctgggagaggccaggcctgaaggagctgagctcactcacaactcccccacgcataccccctcgatctgtgtgaaatgagctcactaagaaggcacccctgttcccatggagacaagcccagagctcacaaaaactgcaggctcagcccagcatgggcactgcctccaccaccccttgncccactggggaacccagaactagggctgggaaagagaagtgggtggtcctcggcccccagccttgcgaagcttccatctgaatcctgncacttgtgtctgtattctctcaccccccacaangnctggtttggtcggnggntntttcatatcacctccaaaagtgtcanaggngatgnnaagtctccagntncctgacttaacaaccatngngtaggattca

SEQ ID NO: 1113 - DNA, 524 bp, Homo sapiens
ataaggcggagctcggcgggagaggtgcgggccgaatccgagccgagcggagaggaatccggcagtagagagcggactccagccggcggaccctgcagccctcgcctgggacagcggcgcgctggtgcaggcgcccaagagagcatcgagcagctggaaccctgcgaagccggccctgcagccgctgacccgcgcagcctgccgctctcccgccgccggtcctgggcagcatgaggcgcgcggcgctctggctctggctgtgcgcgctggcgctgagcctgcagccggccctgccgcaaattgtggctactaatttgccccctgaagatcaagatggctctggggatgactctgacaacttctccggctcaggtgcaggtgctttgcaagatatcaccttgtcacagcagaccccctccacttggaaggacacgcagctcctgacggctattcccacgtctccagaacccaccggcctggaggctacagctgcctccacctccaccctgccggctggagagggg

SEQ ID NO: 1114 - DNA, 3377 bp, Homo sapiens
gggagccgcgcgggagcagcgcagctacggcggcggcagcggcggcgcggttgcgattccgagccgttgagacgcctctgcggcagctggtggcgcaggtggcttgcgtggacgcgggtagaggcgaccggccagcaaccgcagcgtcggcgcccgcggccccggcagcaggcgcgtcgggacgccccgaggcatcctcccccgcccgcgggcccggtagctgggcccgcgtccgccgcccgcatccccgcgccgccgcatctcctcgccgcctcccgggcttcggacccccggtctcgcccccggaaacatgactcgcgatttcaaacctggagacctcatcttcgccaagatgaaaggttatccccattggccagctcgagtagacgaagttcctgatggagctgtaaagccacccacaaacaaactacccattttcttttttggaactcatgagactgcttttttaggaccaaaggatatatttccttactcagaaaataaggaaaagtatggcaaaccaaataaaagaaaaggttttaatgaaggtttatgggagatagataacaatccaaaagtgaaattttcaagtcaacaggcagcaactaaacaatcaaatgcatcatctgatgttgaagttgaagaaaaggaaactagtgtttcaaaggaagataccgaccatgaagaaaaagccagcaatgaggatgtgactaaagcagttgacataactactccaaaagctgccagaagggggagaaagagaaaggcagaaaaacaagtagaaactgaggaggcaggagtagtgacaacagcaacagcatctgttaatctaaaagtgagtcctaaaagaggacgacctgcagctacagaagtcaagattccaaaaccaagaggcagacccaaaatggtaaaacagccctgtccttcagagagtgacatcattactgaagaggacaaaagtaagaaaaaggggcaagaggaaaaacaacctaaaaagcagcctaagaaggatgaagagggccagaaggaagaagataagccaagaaaagagccggataaaaaagaggggaagaaagaagttgaatcaaaaaggaaaaatttagctaaaacaggggttacttcaacctccgattctgaagaagaaggagatgatcaagaaggtgaaaagaagagaaaaggtgggaggaactttcagactgctcacagaaggaatatgctgaaaggccaacatgagaaagaagcagcagatcgaaaacgcaagcaagaggaacaaatggaaactgagcagcagaataaagatgaaggaaagaagccagaagttaagaaagtggagaagaagcgagaaacatcaatggattctcgacttcaaaggatacatgctgagattaaaaattcactcaaaattgataatcttgatgtgaacagatgcattgaggccttggatgaacttgcttcacttcaggtcacaatgcaacaagctcagaaacacacagagatgattactacactgaaaaaaatacggcgattcaaagttagtcaggtaatcatggaaaagtctacaatgttgtataacaagtttaagaacatgttcttggttggtgaaggagattccgtgatcacccaagtgctgaataaatctcttgctgaacaaagacagcatgaggaagcgaataaaaccaaagatcaagggaagaaagggccaaacaaaaagctagagaaggaacaaacagggtcaaagactctaaatggaggatctgatgctcaagatggtaatcagccacaacataacggggagagcaatgaagacagcaaagacaaccatgaagccagcacgaagaaaaagccatccagtgaagagagagagactgaaatatctctgaaggattctacactagataactaggttgacatacctggaatatagagaacacttgagaagtttgtaatggttttcatttgaaatagactgctggaagtttaaatttttataagcataggtttgatgttgaaaacttgttttgagggagaaaatccctttgttttaaagtaaagtaaacattatcgctaagtgtaacttgtgcagtattaacagctacattatacagtaaatgtgggataaaatccatttagaaaatgttaaactgcttttccagacatggttgtagcatattttcaattagtgtgtgtatgttaatgtgtaattgatagtagaacaaagttacatttttaaaactgctacttgtataaaccttgcctcttttcccaaatactgtgggttttgtgcatagtttttacaaaccttggatttaccagactgtcttttcactgtttgtgggttttgtagaagttacacatttttatggtagataaaatgttacttctatacaagtactcactccctttttatcaaaagttaattttaatctcacagtctacattgtgctacattatccagcttctttggaacaatgtgtgctctgtatggttttttttggtatgacaactaattaagcaactgacattgaactgagaattctacaaactataaaacattaatttttgaaggtaatttagttttgtggctgggcattcagtgaagtcttaggacttctttgcagacaactgactgggtatatataggaatgaatctggctttagggttaaatcatttaaggtccttttataggcaggcactagtaactaaaactgaaaactaagtaagtttatttttgaggaatgttgttaaaaatgtctttaggaagtcactaaaacttaattggaagaaaaaatcatgatgcttatacaataaatatgaataaatgttatataaggaaactcacctatttgaaatcatggctatattgtttttattttctagattccaaaaatacaaacactagttgttccagcattgtactttgataagtctgtacattgacgtgtatggactaaatccagggtaaaatcaatgttacaaaatttaagggtatgttaactaaaggatagcatttctaagatattttgaatattagggtcatttggcacttctcagcaagtaggatacttctcatgtttttgaaattatatgaatatggaaaaaaatggcttaagaccagcgtctctgtatgacattgtgtggttgaccctctgagataactgttttcatctacagaattgcatttttgcttttaaagaggtcttataatggaactaggaatcaccgttttgagagaacctgcatatataccagtcattatctgtttggtccttatacagttttaacttacttagatttattctagttaagccataagttcaacgtgtaaacttgttttcattaaagaatttttctatcaaaaaaaaaaaaaaaaaaaaaa

SEQ ID NO: 1115 - protein, 530 aa, Homo sapiens
MTRDFKPGDLIFAKMKGYPHWPARVDEVPDGAVKPPTNKLPIFFFGTHETAFLGPKDIFPYSENKEKYGKPNKRKGFNEGLWEIDNNPKVKFSSQQAATKQSNASSDVEVEEKETSVSKEDTDHEEKASNEDVTKAVDITTPKAARRGRKRKAEKQVETEEAGVVTTATASVNLKVSPKRGRPAATEVKIPKPRGRPKMVKQPCPSESDIITEEDKSKKKGQEEKQPKKQPKKDEEGQKEEDKPRKEPDKKEGKKEVESKRKNLAKTGVTSTSDSEEEGDDQEGEKKRKGGRNFQTAHRRNMLKGQHEKEAADRKRKQEEQMETEQQNKDEGKKPEVKKVEKKRETSMDSRLQRIHAEIKNSLKIDNLDVNRCIEALDELASLQVTMQQAQKHTEMITTLKKIRRFKVSQVIMEKSTMLYNKFKNMFLVGEGDSVITQVLNKSLAEQRQHEEANKTKDQGKKGPNKKLEKEQTGSKTLNGGSDAQDGNQPQHNGESNEDSKDNHEASTKKKPSSEERETEISLKDSTLDN

SEQ ID NO: 1116 - DNA, 2156 bp, Homo sapiens
gccggagccgactcggagcgcgcggcgcggccgggaggagccgagcgcgccgggcgcggcgtgggggcgccggctgccccgcgcgcccagggagcggcaggaatgtgacaatcgcgcgcccgcaccgtagcactcctcgctcggctcctagggctctcgccctctgagctgagccgggttccgcccgggctgggatcccatcaccctccacggccgtccgtccaggtagacgcaccctctgaagatggtgactccctcctgagaagctggaccccttggtaaaagacaaggccttctccaagaagaatatgaaagtgttactcagacttatttgtttcatagctctactgatttcttctctggaggctgataaatgcaaggaacgtgaagaaaaaataattttagtgtcatctgcaaatgaaattgatgttcgtccctgtcctcttaacccaaatgaacacaaaggcactataacttggtataaagatgacagcaagacacctgtatctacagaacaagcctccaggattcatcaacacaaagagaaactttggtttgttcctgctaaggtggaggattcaggacattactattgcgtggtaagaaattcatcttactgcctcagaattaaaataagtgcaaaatttgtggagaatgagcctaacttatgttataatgcacaagccatatttaagcagaaactacccgttgcaggagacggaggacttgtgtgcccttatatggagttttttaaaaatgaaaataatgagttacctaaattacagtggtataaggattgcaaacctctacttcttgacaatatacactttagtggagtcaaagataggctcatcgtgatgaatgtggctgaaaagcatagagggaactatacttgtcatgcatcctacacatacttgggcaagcaatatcctattacccgggtaatagaatttattactctagaggaaaacaaacccacaaggcctgtgattgtgagcccagctaatgagacaatggaagtagacttgggatcccagatacaattgatctgtaatgtcaccggccagttgagtgacattgcttactggaagtggaatgggtcagtaattgatgaagatgacccagtgctaggggaagactattacagtgtggaaaatcctgcaaacaaaagaaggagtaccctcatcacagtgcttaatatatcggaaattgaaagtagattttataaacatccatttacctgttttgccaagaatacacatggtatagatgcagcatatatccagttaatatatccagtcactaatttccagaagcacatgattggtatatgtgtcacgttgacagtcataattgtgtgttctgttttcatctataaaatcttcaagattgacattgtgctttggtacagggattcctgctatgattttctcccaataaaagcttcagatggaaagacctatgacgcatatatactgtatccaaagactgttggggaagggtctacctctgactgtgatatttttgtgtttaaagtcttgcctgaggtcttggaaaaacagtgtggatataagctgttcatttatggaagggatgactacgttggggaagacattgttgaggtcattaatgaaaacgtaaagaaaagcagaagactgattatcattttagtcagagaaacatcaggcttcagctggctgggtggttcatctgaagagcaaatagccatgtataatgctcttgttcaggatggaattaaagttgtcctgcttgagctggagaaaatccaagactatgagaaaatgccagaatcgattaaattcattaagcagaaacatggggctatccgctggtcaggggactttacacagggaccacagtctgcaaagacaaggttctggaagaatgtcaggtaccacatgccagtccagcgacggtcaccttcatctaaacaccagttactgtcaccagccactaaggagaaactgcaaagagaggctcacgtgcctctcgggtagcatggagaagttgccaagagttctttaggtgcctcctgtcttatggcgttgcaggccaggttatgcctcatgctgacttgcagagttcatggaatgtaactatatcatcctttatccctgaggtcaccaggaatcagg

SEQ ID NO: 1117 - protein, 569 aa, Homo sapiens
MKVLLRLICFIALLISSLEADKCKEREEKIILVSSANEIDVRPCPLNPNEHKGTITWYKDDSKTPVSTEQASRIHQHKEKLWFVPAKVEDSGHYYCVVRNSSYCLRIKISAKFVENEPNLCYNAQAIFKQKLPVAGDGGLVCPYMEFFKNENNELPKLQWYKDCKPLLLDNIHFSGVKDRLIVMNVAEKHRGNYTCHASYTYLGKQYPITRVIEFITLEENKPTRPVIVSPANETMEVDLGSQIQLICNVTGQLSDIAYWKWNGSVIDEDDPVLGEDYYSVENPANKRRSTLITVLNISEIESRFYKHPFTCFAKNTHGIDAAYIQLIYPVTNFQKHMIGICVTLTVIIVCSVFIYKIFKIDIVLWYRDSCYDFLPIKASDGKTYDAYILYPKTVGEGSTSDCDIFVFKVLPEVLEKQCGYKLFIYGRDDYVGEDIVEVINENVKKSRRLIIILVRETSGFSWLGGSSEEQIAMYNALVQDGIKVVLLELEKIQDYEKMPESIKFIKQKHGAIRWSGDFTQGPQSAKTRFWKNVRYHMPVQRRSPSSKHQLLSPATKEKLQREAHVPLG

SEQ ID NO: 1118 - DNA, 505 bp, Homo sapiens
gattggcggccagggccagtccgcccggcggctcgcgcacggctccgcggtcccttttgcctgtccagccggccgcctgtccctgctccctccctccgtgaggtgtccgggttcccttcgcccagctctcccacccctacccgaccccggcgcccgggctcccagagggaactgcacttcggcagagttgaatgaatgaagagagacgcggagaactcctaaggaggagattggacaggctggactccccattgcttttctaaaaatcttggaaactttgtccttcattgaattacgacactgtccacctttaatttcctcgaaaacgcctgtaactcggctgaagccatgccttgtgttcaggcgcagtatgggtcctcgcctcaaggagccagccccgcttctcagagctacagttaccactcttcgggagaatacagctccgatttcttaactccagagtttgtcaagtttagcatggacctcaccaacactgaaatcactg

SEQ ID NO: 1119 - DNA, 5831 bp, Homo sapiens
gggacctggaagcgccccagccccgcagcgatcgcagattcggctttcaaacaaaagaggcgccccggggggtgggaccgggacctcacccggtcctcgcagagttgcggccgcccgccccttcagccccggctctccgtatgcgcatgagcagaggcgcctccctctgttcctcccaaggctaaactttctaattcccttctttgggctcgggggctcccggagcagggcgagagctcgcgtcgccggaaaggaagacgggaagaaagggcaggcggctcggcgggcgtcttctccactcctctgccgcgtccccgtggctgcagggagccggcatggggcttctccagttgctagctttcagtttcttagccctgtgcagagcccgagtgcgcgctcaggaacccgagttcagctacggctgcgcagaaggcagctgctatcccgccacgggcgaccttctcatcggccgagcacagaagctttcggtgacctcgacgtgcgggctgcacaagcccgaaccctactgtatcgtcagccacttgcaggaggacaaaaaatgcttcatatgcaattcccaagatccttatcatgagaccctgaatcctgacagccatctcattgaaaatgtggtcactacatttgctccaaaccgccttaagatttggtggcaatctgaaaatggtgtggaaaatgtaactatccaactggatttggaagcagaattccattttactcatctcataatgactttcaagacattccgtccagctgctatgctgatagaacgatcgtccgactttgggaaaacctggggtgtgtatagatacttcgcctatgactgtgaggcctcgtttccaggcatttcaactggccccatgaaaaaagtcgatgacataatttgtgattctcgatattctgacattgaaccctcaactgaaggagaggtgatatttcgtgctttagatcctgctttcaaaatagaagatccttatagcccaaggatacagaatttattaaaaattaccaacttgagaatcaagtttgtgaaactgcatactttgggagataaccttctggattccaggatggaaatcagagaaaagtattattatgcagtttatgatatggtggttcgaggaaattgcttctgctatggtcatgccagcgaatgtgcccctgtggatggattcaatgaagaagtggaaggaatggttcacggacactgcatgtgcaggcataacaccaagggcttaaactgtgaactctgcatggatttctaccatgatttaccttggagacctgctgaaggccgaaacagcaacgcctgtaaaaaatgtaactgcaatgaacattccatctcttgtcactttgacatggctgtttacctggccacggggaacgtcagcggaggcgtgtgtgatgactgtcagcacaacaccatggggcgcaactgtgagcagtgcaagccgttttactaccagcacccagagagggacatccgagatcctaatttctgtgaacgatgtacgtgtgacccagctggctctcaaaatgagggaatttgtgacagctatactgatttttctactggtctcattgctggccagtgtcggtgtaaattaaatgtggaaggagaacattgtgatgtttgcaaagaaggcttctatgatttaagcagtgaagatccatttggttgtaaatcttgtgcttgcaatcctctgggaacaattcctggagggaatccttgtgattccgagacaggtcactgctactgcaagcgtctggtgacaggacagcattgtgaccagtgcctgccagagcactggggcttaagcaatgatttggatggatgtcgaccatgtgactgtgaccttgggggagccttaaacaacagttgctttgcggagtcaggccagtgctcatgccggcctcacatgattggacgtcagtgcaacgaagtggaacctggttactactttgccaccctggatcactacctctatgaagcggaggaagccaacttggggcctggggttagcatagtggagcggcaatatatccaggaccggattccctcctggactggagccggcttcgtccgagtgcctgaaggggcttatttggagtttttcattgacaacataccatattccatggagtacgacatcctaattcgctacgagccacagctacccgaccactgggaaaaagctgtcatcacagtgcagcgacctggaaggattccaaccagcagccgatgtggtaataccatccccgatgatgacaaccaggtggtgtcattatcaccaggctcaagatatgtcgtccttcctcggccggtgtgctttgagaagggaacaaactacacggtgaggttggagctgcctcagtacacctcctctgatagcgacgtggagagcccctacacgctgatcgattctcttgttctcatgccatactgtaaatcactggacatcttcaccgtgggaggttcaggagatggggtggtcaccaacagtgcctgggaaacctttcagagataccgatgtctagagaacagcagaagcgttgtgaaaacaccgatgacagatgtttgcagaaacatcatctttagcatttctgccctgttacaccagacaggcctggcttgtgaatgcgaccctcagggttcgttaagttccgtgtgtgatcccaacggaggccagtgccagtgccggcccaacgtggttggaagaacctgcaacagatgtgcacctggaacttttggctttggccccagtggatgcaaaccttgtgagtgccatctgcaaggatctgtcaatgccttctgcaatcccgtcactggccagtgccactgtttccagggagtgtatgctcggcagtgtgatcggtgcttacctgggcactggggctttccaagttgccagccctgccagtgcaatggccacgccgatgactgcgacccagtgactggggagtgcttgaactgccaggactacaccatgggtcataactgtgaaaggtgcttggctggttactatggcgaccccatcattgggtcaggtgatcactgccgcccttgcccttgcccagatggtcccgacagtggacgccagtttgccaggagctgctaccaagatcctgttactttacagcttgcctgtgtttgtgatcctggatacattggttccagatgtgacgactgtgcctcaggatactttggcaatccatcagaagttggggggtcgtgtcagccttgccagtgtcacaacaacattgacacgacagacccagaagcctgtgacaaggagactgggaggtgtctcaagtgcctgtaccacacggaaggggaacactgtcagttctgccggtttggatactatggtgatgccctccggcaggactgtcgaaagtgtgtctgtaattacctgggcaccgtgcaagagcactgtaacggctctgactgccagtgcgacaaagccactggtcagtgcttgtgtcttcctaatgtgatcgggcagaactgtgaccgctgtgcgcccaatacctggcagctggccagtggcactggctgtgacccatgcaactgcaatgctgctcattccttcgggccatcttgcaatgagttcacggggcagtgccagtgcatgcctgggtttggaggccgcacctgcagcgagtgccaggaactcttctggggagaccccgacgtggagtgccgagcctgtgactgtgaccccaggggcattgagacgccacagtgtgaccagtccacgggccagtgtgtctgcgttgagggtgttgagggtccacgctgtgacaagtgcacgcgagggtactcgggggtcttccctgactgcacaccctgccaccagtgctttgctctctgggatgtgatcattgccgagctgaccaacaggacacacagattcctggagaaagccaaggccttgaagatcagtggtgtgatcgggccttaccgtgagactgtggactcggtggagaggaaagtcagcgagataaaagacatcctggcgcagagccccgcagcagagccactgaaaaacattgggaatctctttgaggaagcagagaaactgattaaagatgttacagaaatgatggctcaagtagaagtgaaattatctgacacaacttcccaaagcaacagcacagccaaagaactggattctctacagacagaagccgaaagcctagacaacactgtgaaagaacttgctgaacaactggaatttatcaaaaactcagatattcggggtgccttggatagcattaccaagtatttccagatgtctcttgaggcagaggagagggtgaatgcctccaccacagaacccaacagcactgtggagcagtcagccctcatgagagacagagtagaagacgtgatgatggagcgagaatcccagttcaaggaaaaacaagaggagcaggctcgcctccttgatgaactggcaggcaagctacaaagcctagacctttcagccgctgccgaaatgacctgtggaacacccccaggggcctcctgttccgagactgaatgtggcgggccaaactgcagaactgacgaaggagagaggaagtgtggggggcctggctgtggtggtctggttactgttgcacacaacgcctggcagaaagccatggacttggaccaagatgtcctgagtgccctggctgaagtggaacagctctccaagatggtctctgaagcaaaactgagggcagatgaggcaaaacaaagtgctgaagacattctgttgaagacaaatgctaccaaagaaaaaatggacaagagcaatgaggagctgagaaatctaatcaagcaaatcagaaactttttgacccaggatagtgctgatttggacagcattgaagcagttgctaatgaagtattgaaaatggagatgcctagcaccccacagcagttacagaacttgacagaagatatacgtgaacgagttgaaagcctttctcaagtagaggttattcttcagcatagtgctgctgacattgccagagctgagatgttgttagaagaagctaaaagagcaagcaaaagtgcaacagatgttaaagtcactgcagatatggtaaaggaagctctggaagaagcagaaaaggcccaggtcgcagcagagaaggcaattaaacaagcagatgaagacattcaaggaacccagaacctgttaacttcgattgagtctgaaacagcagcttctgaggaaaccttgttcaacgcgtcccagcgcatcagcgagttagagaggaatgtggaagaacttaagcggaaagctgcccaaaactccggggaggcagaatatattgaaaaagtagtatatactgtgaagcaaagtgcagaagatgttaagaagactttagatggtgaacttgatgaaaagtataaaaaagtagaaaatttaattgccaaaaaaactgaagagtcagctgatgccagaaggaaagccgaaatgctacaaaatgaagcaaaaactcttttagctcaagcaaatagcaagctgcaactgctcaaagatttagaaagaaaatatgaagacaatcaaagatacttagaagataaagctcaagaattagcaagactggaaggagaagtccgttcactcctaaaggatataagccagaaagttgctgtgtatagcacatgcttgtaacagaggagaataaaaaatggctgaggtgaacaaggtaaaacaactacattttaaaaactgacttaatgctcttcaaaataaaacatcacctatttaatgtttttaatcacattttgtatgagttaaataaagccc

SEQ ID NO: 1120 - protein, 1786 aa, Homo sapiens
MGLLQLLAFSFLALCRARVRAQEPEFSYGCAEGSCYPATGDLLIGRAQKLSVTSTCGLHKPEPYCIVSHLQEDKKCFICNSQDPYHETLNPDSHLIENVVTTFAPNRLKIWWQSENGVENVTIQLDLEAEFHFTHLIMTFKTFRPAAMLIERSSDFGKTWGVYRYFAYDCEASFPGISTGPMKKVDDIICDSRYSDIEPSTEGEVIFRALDPAFKIEDPYSPRIQNLLKITNLRIKFVKLHTLGDNLLDSRMEIREKYYYAVYDMVVRGNCFCYGHASECAPVDGFNEEVEGMVHGHCMCRHNTKGLNCELCMDFYHDLPWRPAEGRNSNACKKCNCNEHSISCHFDMAVYLATGNVSGGVCDDCQHNTMGRNCEQCKPFYYQHPERDIRDPNFCERCTCDPAGSQNEGICDSYTDFSTGLIAGQCRCKLNVEGEHCDVCKEGFYDLSSEDPFGCKSCACNPLGTIPGGNPCDSETGHCYCKRLVTGQHCDQCLPEHWGLSNDLDGCRPCDCDLGGALNNSCFAESGQCSCRPHMIGRQCNEVEPGYYFATLDHYLYEAEEANLGPGVSIVERQYIQDRIPSWTGAGFVRVPEGAYLEFFIDNIPYSMEYDILIRYEPQLPDHWEKAVITVQRPGRIPTSSRCGNTIPDDDNQVVSLSPGSRYVVLPRPVCFEKGTNYTVRLELPQYTSSDSDVESPYTLIDSLVLMPYCKSLDIFTVGGSGDGVVTNSAWETFQRYRCLENSRSVVKTPMTDVCRNIIFSISALLHQTGLACECDPQGSLSSVCDPNGGQCQCRPNVVGRTCNRCAPGTFGFGPSGCKPCECHLQGSVNAFCNPVTGQCHCFQGVYARQCDRCLPGHWGFPSCQPCQCNGHADDCDPVTGECLNCQDYTMGHNCERCLAGYYGDPIIGSGDHCRPCPCPDGPDSGRQFARSCYQDPVTLQLACVCDPGYIGSRCDDCASGYFGNPSEVGGSCQPCQCHNNIDTTDPEACDKETGRCLKCLYHTEGEHCQFCRFGYYGDALRQDCRKCVCNYLGTVQEHCNGSDCQCDKATGQCLCLPNVIGQNCDRCAPNTWQLASGTGCDPCNCNAAHSFGPSCNEFTGQCQCMPGFGGRTCSECQELFWGDPDVECRACDCDPRGIETPQCDQSTGQCVCVEGVEGPRCDKCTRGYSGVFPDCTPCHQCFALWDVIIAELTNRTHRFLEKAKALKISGVIGPYRETVDSVERKVSEIKDILAQSPAAEPLKNIGNLFEEAEKLIKDVTEMMAQVEVKLSDTTSQSNSTAKELDSLQTEAESLDNTVKELAEQLEFIKNSDIRGALDSITKYFQMSLEAEERVNASTTEPNSTVEQSALMRDRVEDVMMERESQFKEKQEEQARLLDELAGKLQSLDLSAAAEMTCGTPPGASCSETECGGPNCRTDEGERKCGGPGCGGLVTVAHNAWQKAMDLDQDVLSALAEVEQLSKMVSEAKLRADEAKQSAEDILLKTNATKEKMDKSNEELRNLIKQIRNFLTQDSADLDSIEAVANEVLKMEMPSTPQQLQNLTEDIRERVESLSQVEVILQHSAADIARAEMLLEEAKRASKSATDVKVTADMVKEALEEAEKAQVAAEKAIKQADEDIQGTQNLLTSIESETAASEETLFNASQRISELERNVEELKRKAAQNSGEAEYIEKVVYTVKQSAEDVKKTLDGELDEKYKKVENLIAKKTEESADARRKAEMLQNEAKTLLAQANSKLQLLKDLERKYEDNQRYLEDKAQELARLEGEVRSLLKDISQKVAVYSTCL

SEQ ID NO: 1121 - DNA, 2357 bp, Homo sapiens
tccggaccctttcttcccatcctttgctcctaggattttacatgttgcctgcaaagggagtcaaacttagggggcaggcaaacaaacgagttctttccagcctctgtaaccggatcgctagagcgaaataaactcgcacaagtgtccagagatcgtagccagacagccagcctgcgcttgaacgaacttttaagtgaggctgcaagagccgccgggatgtagattttagttcgtggccaagcacaactacgacgatcctgtccctgccccaccccatccccaagaatgcatggaggaaggagagaggaagcaggtgagggccgcctgcatttctgcacgtcggcgccggttagaaaccctgcagttttgagagagaagaagaggagatggaggggccaggagccacgactcccgggagagcgcagggaggggcgtgggtgccccttcgcccacctccgcccccgtcacctcgacagctgtcccgctcttggaattcattggcttcctctacccggcctcccaaacaccaccccaatctagtttagccccccgccccaccctcgctgacctaataaggccatgcaagtgtgcgggggagctacataaaagcgcgggctcgcgccgactctgcaccacgcaggggaagagaaagcaggagccgtccagcacggaggaaggcgaccatggccaaggagtggggctacgccagtcacaacggtcctgaccactggcatgaacttttcccaaatgccaagggggaaaaccagtcgcccgttgagctgcatactaaagacatcaggcatgacccttctctgcagccatggtctgtgtcttatgatggtggctctgccaagaccatcctgaataatgggaagacctgccgagttgtatttgatgatacttatgataggtcaatgctgagagggggtcctctccctggaccctaccgacttcgccagtttcatcttcactggggctcttcggatgatcatggctctgagcacaccgtggatggagtcaagtatgcagcggagcttcatttggttcactggaacccgaagtataacacttttaaagaagccctgaagcagcgcgatgggatcgctgtgattggcatttttctgaagataggacatgagaatggcgagttccagattttccttgatgcattggacaagattaagacaaagggcaaggaggcgcccttcacaaagtttgacccatcctgcctgttcccggcatgccgggactactggacctaccagggctcattcaccacgccgccctgcgaggaatgcattgtgtggctgctgctgaaggagcccatgaccgtgagctctgaccagatggccaagctgcggagcctcctctccagtgctgagaacgagcccccagtgcctcttgtgagcaactggcgacctccacagcctatcaataacagggtggtgagagcttccttcaaatgaggctgctggatcttgccctcttcaggaaaggaaacctaccattggagagcttggttccttgcctccttctggtgctcttactccaagtctatttcatttttccacactgagcaatgaatgtgagagatgtggtcaccaagatctaagttacttgttgaaagaaagttactttcgacaagatctaatatgaaagcatagatttcacatttgatctctgtaataatcatctttcctataaaagtagcatttttggtaaagtttcaaagaagaagaaacagagatggaagagtaaagatatttttaaaatggctagctattgggcaccagtttttctgttatctaaaatttcacacaacttcatgtttttatttttatattatgagttgtccatcttaaagaaatatgagtaattctacatgtagtagaggtgtatgaagatcatataacaattaaacataagccagaaattaaaatgactatagacagcaagaattgagctaataatatgttttaactcttaacaccagcaagaagtcagtcatttattgaagttttagctactaagattacttggttttgattaccagtgaaaagaaaacacaatacaatcaggagttttcaaatttttgattcagtatttgaatttcttcttcataaatgtagttggaatttatcctagtatttttctttacctgaaggagggccatttatttttaatttcactacatttttctttgcatgattattaaaataaaaactgcctctgttgtgtttctcactggaggctggaatgaatgatcactagaacacaaaagagtgaatgatgacacttgaagtcaaagcagttgtactgatcaccagaaccaataaagacataaatggaaaacgttg

SEQ ID NO: 1122 - protein, 260 aa, Homo sapiens
MAKEWGYASHNGPDHWHELFPNAKGENQSPVELHTKDIRHDPSLQPWSVSYDGGSAKTILNNGKTCRVVFDDTYDRSMLRGGPLPGPYRLRQFHLHWGSSDDHGSEHTVDGVKYAAELHLVHWNPKYNTFKEALKQRDGIAVIGIFLKIGHENGEFQIFLDALDKIKTKGKEAPFTKFDPSCLFPACRDYWTYQGSFTTPPCEECIVWLLLKEPMTVSSDQMAKLRSLLSSAENEPPVPLVSNWRPPQPINNRVVRASFK

SEQ ID NO: 1123 - DNA, 5320 bp, Homo sapiens
acctcgcactctcagtttcaccgctcgatcttgggacccaccgctgccctcagctccgagtccagggcgagtgcagagcagagcgggcggaggaccccgggcgcgggcgcggacggcacgcgggcatgaacctggagggcggcggccgaggcggagagttcggcatgagcgcggtgagctgcggcaacgggaagctccgccagtggctgatcgaccagatcgacagcggcaagtaccccgggctggtgtgggagaacgaggagaagagcatcttccgcatcccctggaagcacgcgggcaagcaggactacaaccgcgaggaggacgccgcgctcttcaaggcttgggcactgtttaaaggaaagttccgagaaggcatcgacaagccggaccctcccacctggaagacgcgcctgcggtgcgctttgaacaagagcaatgactttgaggaactggttgagcggagccagctggacatctcagacccgtacaaagtgtacaggattgttcctgagggagccaaaaaaggagccaagcagctcaccctggaggacccgcagatgtccatgagccacccctacaccatgacaacgccttacccttcgctcccagcccaggttcacaactacatgatgccacccctcgaccgaagctggagggactacgtcccggatcagccacacccggaaatcccgtaccaatgtcccatgacgtttggaccccgcggccaccactggcaaggcccagcttgtgaaaatggttgccaggtgacaggaaccttttatgcttgtgccccacctgagtcccaggctcccggagtccccacagagccaagcataaggtctgccgaagccttggcgttctcagactgccggctgcacatctgcctgtactaccgggaaatcctcgtgaaggagctgaccacgtccagccccgagggctgccggatctcccatggacatacgtatgacgccagcaacctggaccaggtcctgttcccctacccagaggacaatggccagaggaaaaacattgagaagctgctgagccacctggagaggggcgtggtcctctggatggcccccgacgggctctatgcgaaaagactgtgccagagcaggatctactgggacgggcccctggcgctgtgcaacgaccggcccaacaaactggagagagaccagacctgcaagctctttgacacacagcagttcttgtcagagctgcaagcgtttgctcaccacggccgctccctgccaagattccaggtgactctatgctttggagaggagtttccagaccctcagaggcaaagaaagctcatcacagctcacgtagaacctctgctagccagacaactatattattttgctcaacaaaacagtggacatttcctgaggggctacgatttaccagaacacatcagcaatccagaagattaccacagatctatccgccattcctctattcaagaatgaaaaatgtcaagatgagtggttttctttttccttttttttttttttttttgatacggggatacggggtcttgctctgtctcccaggctggagtgcagtgacacaatctcagctcactgtgacctccgcctcctgggttcaagagactctcctgcctcagcctccctggtagctgggattacaggtgtgagccactgcacccacccaagacaagtgattttcattgtaaatatttgactttagtgaaagcgtccaattgactgccctcttactgttttgaggaactcagaagtggagatttcagttcagcggttgaggagaattgcggcgagacaagcatggaaaatcagtgacatctgattggcagatgagcttatttcaaaaggaagggtggctttgcatttcttgtgttctatagactgccatcattgatgatcactgtgaaaattgaccaagtgatgtgtttacatttactgaaatgtgctctttaatttgttgtagattaggtcttgctggaagacagagaaaacttgcctttcagtattgacactgactagagtgatgactgcttgtaggtatgtctgtgccatttctcagggaagtaagatgtaaattgaagaagcctcacacgtaaaagaaatgtattaatgtatgtaggagctgcagttcttgtggaagacacttgctgagtgaaggaaatgaatctttgactgaagccgtgcctgtagccttggggaggcccatcccccacctgccagcggtttcctggtgtgggtccctctgccccaccctccttcccattggctttctctccttggcctttcctggaagccagttagtaaacttcctattttcttgagtcaaaaaacatgagcgctactcttggatgggacatttttgtctgtcctacaatctagtaatgtctaagtaatggttaagttttcttgtttctgcatctttttgaccctcattctttagagatgctaaaattcttcgcataaagaagaagaaattaaggaacataaatcttaatacttgaactgttgcccttctgtccaagtacttaactatctgttcccttcctctgtgccacgctcctctgtttgcttggctgtccagcgatcagccatggcgacactaaaggaggaggagccggggactcccaggctggagagcactgccaggacccaccactggaagcaggatggagctgactacggaactgcacactcagtgggctgtttctgcttatttcatctgttctatgcttcctcgtgccaattatagtttgacagggccttaaaattacttggctttttccaaatgcttctatttatagaatcccaaagacctccacttgcttaagtatacctatcacttacatttttgtggttttgagaaagtacagcagtagactggggcgtcacctccaggccgtttctcatactacaggatatttactattactcccaggatcagcagaagattgcgtagctctcaaatgtgtgttcctgcttttctaatggatattttaaattcattcaacaagcacctagtaagtgcctgctgtatccctacattacacagttcagcctttatcaagcttagtgagcagtgagcactgaaacattattttttaatgtttaaaaagtttctaatattaaagtcagaatattaatacaattaatattaatattaactacagaaaagacaaacagtagagaacagcaaaaaaataaaaaggatctccttttttcccagcccaaattctcctctctaaaagtgtccacaagaaggggtgtttattcttccaacacatttcacttttctgtaaatatacataaacttaaaaagaaaacctcatggagtcatcttgcacacactttcatgcagtgctctttgtagctaacagtgaagatttacctcgttctgctcagaggccttgctgtggagctccactgccatgtacccagtagggtttgacatttcattagccatgcaacatggatatgtattgggcagcagactgtgtttcgtgaactgcagtgatgtatacatcttatagatgcaaagtattttggggtatattatcctaagggaagataaagatgatattaagaactgctgtttcacggggcccttacctgtgaccctctttgctgaagaatatttaaccccacacagcacttcaaagaagctgtcttggaagtctgtctcaggagcaccctgtcttcttaattctccaagcggatgctccatttcaattgctttgtgacttcttcttctttgtttttttaaatattatgctgctttaacagtggagctgaattttctggaaaatgcttcttggctggggccactacctcctttcctatctttacatctatgtgtatgttgactttttaaaattctgagtgatccagggtatgacctagggaatgaactagctatgaaatactcagggttaggaatcctagcacttgtctcaggactctgaaaaggaacggcttcctcattccttgtcttgataaagtggaattggcaaactagaatttagtttgtactcagtggacagtgctgttgaagatttgaggacttgttaaagagcactgggtcatatggaaaaaatgtatgtgtctcccaggtgcatttcttggtttatgtcttgttcttgagattttgtatatttaggaaaacctcaagcagtaattaatatctcctggaacactatagagaaccaagtgaccgactcatttacaactgaaacctaggaagcccctgagtcctgagcgaaaacaggagagttagtcgccctacaggaaacccagctagactattgggtatgaactaaaaagagactgtgccatggtgagaaaaatgtaaaatcctacagtggaatgagcagcccttacagtgttgttaccaccaagggcaggtaggtattagtgtttgaaaaagctggtctttgagcgagggcataaatacagctagccccaggggtggaacaactgtgggagtcttgggtactcgcacctcttggctttgttgatgctccgccaggaaggccacttgtgtgtgcgtgtcagttacttttttagtaacaattcagatccagtgtaaacttccgttcattgctctccagtcacatgcccccacttccccacaggtgaaagtttttctgaaagtgttgggattggttaaggtctttatttgtattacgtatctccccaagtcctctgtggccagctgcatctgtctgaatggtgcgtgaaggctctcagaccttacacaccattttgtaagttatgttttacatgccccgtttttgagactgatctcgatgcaggtggatctccttgagatcctgatagcctgttacaggaatgaagtaaaggtcagttttttttgtattgattttcacagctttgaggaacatgcataagaaatgtagctgaagtagaggggacgtgagagaagggccaggccggcaggccaaccctcctccaatggaaattcccgtgttgcttcaaactgagacagatgggacttaacaggcaatggggtccacttccccctcttcagcatcccccgtaccccactttttgctgaaagaactgccagcaggtaggaccccagaggcccccaaatgaaagcttgaatttcccctactggctctgcgttttgctgagatctgtaggaaaggatgcttcacaaactgaggtagataatgctatgctgtcgttggtatacatcatgaatttttatgtaaattgctctgcaaagcaaattgatatgtttgataaatttatgtttttaggtaaataaaaacttttaaaaagttgtt

SEQ ID NO: 1124 - protein, 450 aa, Homo sapiens
MNLEGGGRGGEFGMSAVSCGNGKLRQWLIDQIDSGKYPGLVWENEEKSIFRIPWKHAGKQDYNREEDAALFKAWALFKGKFREGIDKPDPPTWKTRLRCALNKSNDFEELVERSQLDISDPYKVYRIVPEGAKKGAKQLTLEDPQMSMSHPYTMTTPYPSLPAQVHNYMMPPLDRSWRDYVPDQPHPEIPYQCPMTFGPRGHHWQGPACENGCQVTGTFYACAPPESQAPGVPTEPSIRSAEALAFSDCRLHICLYYREILVKELTTSSPEGCRISHGHTYDASNLDQVLFPYPEDNGQRKNIEKLLSHLERGVVLWMAPDGLYAKRLCQSRIYWDGPLALCNDRPNKLERDQTCKLFDTQQFLSELQAFAHHGRSLPRFQVTLCFGEEFPDPQRQRKLITAHVEPLLARQLYYFAQQNSGHFLRGYDLPEHISNPEDYHRSIRHSSIQE

SEQ ID NO: 1125 - DNA, 121600 bp, Homo sapiens
gatctcaagttgtgtgctggcagaaccactactctcttcaaagctgtcagacagggacatttaggtctgcagaggtttctgctgccttttgtttggctatgccctgcccccagaggtggagtctacagaggcaggcaggcctccttgagctgcggtgggctccacccagttcgagcttcccagccactttgtttacctactcaagcctgggcaatggcaggtgcccctcccccagcctcactgccgccttgcagtttaatctcagactgctgtgctagcaatgagtgagggtccatgggcataggacccaccaaaccaggtgtgggatataatctcctcatgtgccatttgctaagattgtcagaaaagcacactattagggtgggagtgacccgattttccaggtgccatctgtcacccctttccttagctaggaaagagaattccctgaccccttgcacttcctgggtgaggtgatacctcgccctgcttcggctcaggctcagtgcactgcacccactgtcctgcacccactgtctgacaatccctagtgagatgcacccagtacctcagttggaaatgcagaagtcattcatcttctgcgtcgctcacactgggagctgtagactggagctgttcctatttggctgtcttggctccaccccttatgtacctttttctatttctcctactttaaactggattaattttaatttatttctatgtagccaattaatgtgtaagtatcctaaaatgaattagtcaactactggtacagccaagtaagcttctatcagattcaaccctcttgaaaataacagagtaaggtttggcaaaccatggaccacaggccaaatttgcttgtcacttgtctttgtaaataaggctttattggaatacagccacacccattcatttatatatgcatttctgctctcatgttatagtggcagaattgggtagttatgacagactgtatggtccacaaagcttaaaaatatttattatctggccctttatagaaaaagtttgccatcaactgctctgaagaaaatacaataaataatgacacaaaggactgctgagtgagcaaaaaccatggacatgaaaaaaaagaagtgagggagagagtttcccatgttttactccttttagcctgagggtaggccaatgtttggattgtgggaatcgattaacactctgacagatagccagtagtctttctgaactgaagaaccagaagacagagctctggacaaccacagccactggaaagtgagaggataattccagaaaagacagactcagagatggggccatcaaattcctctcaagtccattacttacccctgaaccatgtatatgtgggacagatgcaaagcagccgggctaaataattagaattggcagcttcagtccaatcatgttaatttactgctaaaacaaaaatatcaatattctttaagagaatgcatgagaatctcagagcctctaaaacctagcattcataatgtccaagctgtaatacaaaattgcttgacgtatgaagaaccaggaaaatatgatcgtgtttcaagaaaaaaagacaaccattgaaaccagccaagagatatcatgatgttggaattagtggatgctctagactgaatgtttgtgtctcttccaaattgacagcaggttgaaacttgatccccaatgtgttggtatgtggaagtggggcttttggcaggtaataaggtcatgatatgagggtagagcccttgtcaataggattagttctcctatgaaagagacctcagagagcttgttcattccttccaccatttgaggacacagctaaaagatgctttctatgaatcagaaaacaggccttcaccagacactgaatctgctggcaacttccccttggactatctagccttcagacttgtgagaaataaatttctgttgtgtataagctacccagttttggtattttgttatagcagccgagttgggctaagacagttgacaaggaatataaagcagcaattacaactgtgctcaattaagtgacaaaaatatgcttgtaaccaatgaaataatagcatatatcagcagggaaataaacatttttttgaagagagcaaaatggaaatttaaaactgaaaaacactacataagaaatacaaattcactgcataagcttaatagcagaaagcaaatgacagaggaaagaactagtaaacttgaagattgtgtaataaaaattatccagtgtgatgcaaagagagaaataagatgggaaaaaacctatagtcttagggacccataggacactaccttaaggcctaacacaaatgtaactggagtcccaggagagaatagaatgagtggaaaaaatacgtttgaagatataatggccaaaaatacaacaaatttggtgaaggattccagaaactcagtgaacctgaagtaggataaatagaaagaaaatcatgcatagatacatcatagtcatatttctaaaaaccaaagataatatcttgaagagaatagaaaataataccagaataaacttgaattttcaaggatgaaggaagaacaagagaaatggtacctatgtgggtaaatataactattattcttctctttagttttaaaaatctcttataatgtttgaaaacaaaaattataacactgtcggatggggtttttgatgtatgtaaatgtaatacagacatatctcagaaatattgtaggttcagttccacaccacttcaatgaagcaaatatcacaaattgttttgtttcccagcatatataaaagttacttttctattatactgtagtctattaagtgtgcaatataattatgcctaaaacataccttcatttaaaaatactttattgttaaaaaatgctaacaatcacctgagccctcaccaagtcatttgctttttgctgatggagggtcttccctcaatgctgatggctgctaactgatcagggtggtggttgattaaggctggggtgactatggccatgacaacaatgaaatttgctgcatcaatggactctttcacaaaagatttctttgtgagtgtaatgctgttttgtagcattttacccacagtagaacttcttccaaaattggagtcaattctctcaagccctgctgctgctttatcaattaagtttatataatattctaaatccacattccagcaatattcacagcatcttcaccaggagtagactccgtctcaagaaaccacactctgctcatccataagaagcaactcgtcattcattcagttttatgagattatagcaattcaaacatatcttcaggctccatttctaattcaggttctcttgctattttcaccacatctgtggtgacttcctccactgaagccttgaacccctcaaagtcatccatgagggttggaatcaacttcttccaaactgctattaatgtttatattttgacctcctcccatgaatcacaaatgttcttaatggcatctagaatggagatttatttccagaaggttttagatgtactttgctcagatccatcagagtaatcactatcaatggaagctagaggctcacaaaatgtattccttaaataataatacttgaaagtagaaatgactccatgatccatgggctgaagaatagatattgcattagcaggcatgaaaacaacattaatctcctcataaatcttcatcagaactcttgaatggtcaggtgtattgccaatgagcagtaacattttgaaaggaatccttttctctcagcagtaggtctcagaagtgggcttaaaatattcaataaaccacattgtaaacagacgtgctgtcattcaggctttgcccttccattggtagagtatgggcagagtatatttagcataattcttaaatatactctgcctgtactacaatttttggaatggttaaataagcactggctttaacttaaagtaacaagttgcattagcccctaacaagagaatcttcctgtcctttgaagcattgaaaccaggcattcattgactttttctttccagctatgaaagtcctagatggcatcttcttctgatataagtctgtactgtctatattgaaaatttgttgtgtgtaactatcctaatcaataatcttagtcaggtcttttattttaaaatttgctttagattcagaagcacatgtgcatgtttgttacatgggcacattacatagtatcttacatagtggtggggatttggcttctagtggacccataaaccaaatattgaacattgtacccaataggtaattttttaaccctcattcctctcccaccctaccctgttttggagtcccctgtgtctactatttccatctttatgcccatgtgttcccattgtctagctcccacttataagtaagaatatgtgatatttgattttctttttctgagttagttcacttaggataatggcctccagctccatccatgttgctgcaaaggacatgatttcattccttcttatggctgcataatattccatggggtatatatactaaattttctttatccaatcaaccattgatggacacttaggctggttccatgactttgctattgtgtatagtgtggcaataaaagtacaagtgcagataaatttttactgtaatgatttattttcctttgggaaaggaaaagaacccagtagtcgaattgttggcttgaatagtcctatttttagttctttgagatatatctaccctgttttccatagaagttgaactaatttacattccctccaagtctctaacctttcccttttctcgcatctataccaccatccattgttttttgactttttaataatagacaatatgatgatgtaagataatatctaagtgtggttttaatgtgaatttttctgatgattagtgatgttgaacattttttatgtgtttttggctgcttgtatttcttcttttaagaaatgtctattcatgtaatgtgcccattttgtaatggggttgtttttttcttgttgagttgtttgagttccttgtatattctggatattagtcctttgccagaggtataatttgcaaatattttcttccattatgtaggttgtctgttcactcggtaaattgtttcttttgttgtacagaaacattttagtttaattaaatcccatttgtctatttttgttttgtcgtatttgcttttcgggtcttcatcataatttctttgcctaggcctatgcgcagtagagtttttctttagctattaatagatattgtggatagcttgctacagcttctgcattagcacttgctgcttcatcttacatttttacgttgtagagttggcttctttccttaaaccccatgaaccaacctctgctaacttcaaacttttcttctgcagcttcttcacctctctcagccttcatagaattgaagagagttagggccttactctggaataggatttggtttaagagaatgtcttagctgggtctgatcttttatccagacaagtgaaactttctctgtatcagcaataaggctattttaatttcttatcatttatatgctcactgaagtagcacttttaatttccttcgagaactttttctttgcatacaacttggctaattgttttgctcaagaggcccaacttatgacctatctcagcttttggcataccttcctcactaagcttaatcttttctagcttttgacttaaagtgagagatatgtgactcttccttttacttgaacacttagagaccattgtgggtttattaattggcctaatttcaatattgctgtgcctcaggaaataggaaggcctgaggagagagggagagagatgggaggaaagttggtaagtgtagcagtcagaacacacacagcatttctcgattaagttttccatcttatatgggcatggtttgtggtgccccaaaacaattacaatagtaacatcaaatatcagtgatcactgatcaccataatagatgtaagaaagaaaaggtttgaaatattgtgagaattataaaaatgtggcacacaaagtgagcacatgttgttggaaaaatgggcatcgatatacttgttaatacagggtttccacagatcttcaatttgtaaaaaacacattatctgtgaactgcaataatgtgaagcacaataaaacaaagttcgtctgtatatatatgtaatgactacaacatacagagagagtgtaaggggatccatacagtggaaagatttctatagtacacttgaaatgataaaatattaattttacaattaaaattttggaaagttaactgtgtatattttaatatctacaggaattactaaaaatatacaaatatatttattaaaagtccaatggacaaattaaaatggaatactgaaaaatattcaaatgattacaaaagaaagcaagagagtagaaacagaggaacaaccacagaaaataataaaatcatggacttaaattcttccatattactaattgcatttaatgtaagtggtgcaaaacacacttatcaaaagacagagaaccaagaaagtgaaatatctgtaccctggaaactataaaaaattgatgaaagaaactgaagaagacaaatagatggaaaaatatttgtgttcatgaattggaagaattaatattgttaaaatgtccatattactgaaagtgacttacagattcaaaataatctctatcaaaataccaaaggcattttccacagaaatagaaaaaacaatcctaaagtttgtgtggaaccacaaaagagccaaaatatccaagcaatcttgagcaaagagaacaaagctggaggcatcacactacttgttctcaaaatctacttcaaagctatagtaatcaaaacagcatggtactgacataaaaacagacatacagaccaatgaaatagaatagagagcacagaaattagtccatacattttacatccaactgatttttgacaaaggtaccaataatatgcaatgagaaaagaatagtaccttcaacaattggtgttggaaaaactaaatatccacatgcaaaaaaaaaaaaaaaagaaagaaagaaagaaaaagaaattggacttttatctaagaccacacacaaaaatcaactcaaaatggattaaagatttagacataagacctgatgctgtaaaactactagaagaaaatacaggtgaaaagtttcttgacattaatttgggcaatgatttcttggctatcacaccaaaagcacaggcaaaaaaagcaaaaatatacaaatggcactgcatcaaactaaaatgcttctgcatagccaaggagacagtcaagagagcaaagagacagccaacagaatgggagaaaatatttgcatatattggataagaggttaatatccaaaatatataaaaaaactcaaacaacttagcagcaagaaaaatcacccgattaaagaatgataattgagtagacatttctcaaaagaagacatacaaatggccaacaggtgtataaaaaatgctcagcatcactaatcatcaggaaatacaaatgaaaaccacaatgagatatcacctcacacctgcttttatcaaaatgacaaaagataacaattgctggtgaggaagtggagaaaagggaacccttacacactgttggtgggaatgtaaattagcatattcactatggagaacattacagagattcctaaaaaataaatctaccatatgatccagcaatctcacttttgggcatatatccaaaagaaaggaaatcagtatgtcgaggagatatctgtactcccatgttcattgcagaattgtttaccatagtcaaaatttggaagcaatctaagtgtccattggcagatgaataggtaaagaaaatgtaatacacacacgtatatacacacggtggaaaactattcagcctttaaaaaaagaaagaaagcctatcatttgtgaatacatggatgaacctggaaaatattaggctaagtaaaataaagtaggcacagaaagacaaatactgtatgatctcatttatatgtggaatctaaatcaaagagtacagtgtttcaattagacagggtgaataagttctggagatccattgtacagagtggtaactccagtgaataatgtattgtacacttgaaaattgttaagagagtagatcttaaatatcctcaccacaaaaaaagataagtatgtgagctgaatatctaaattagcttgatttaaccatttcatagtgtatacacacacataccaaaacaatcacattgtgcaccataaatatatacaatttctatttgtcaaaaaaggagattttcagaatgcaaagaaacacaagagtcaactatgtgctgtctatatgaaacccagtttaatataaaaacacaggttaaaaagtaaaaggatggaagatcatatacatgtaaacactaaacaaaataaatctggaagtttcaaagaggacctggtaccatttcttctgaaactattccaaacaattaaaaagaagggactcccccctaactcattttatgaggccagcatcatcctgataccaaaacctggcagagatacaacaaaaaaagaaaactttaggtcaatatgcctgatgaacattgatgcaaaaattctcaataaaatactggcaaactgaatccagaaacacaacaaaaagcttatccaccacaatcaagttggcttcatccctgagatgcaagtctggttcaacatatgcaaatcaataaacataatccatcacataaacagaaccaatgacaaaaaacatatggttatctcaatatatgcagaaaaggcctttgataaagttcaacatcccttcatgttaaaaactctcaataaactaggtattgaaggaagatacctgaaaataataagagccatatatgacaaacccacagctaatatgctgaatgtgcaaaagctggaagcattccccttgaagacctgcacaagacaaggatgtcctctcttactacacttattcaacatagtattggaagttctggccagggcaatcaggcaagggaaagaaataaagcatattcaaataggaagtgagggagtcaaattgtctttgtttgcagatgacatgatcctatatctagaaaaccccattgcttcagcccaaaagcttcttaagctgataaacaactgcagtaaagtctcagggtacaaaatcaatgtgcagaaacaacaagcattcctatacactaacaatagacaagcagagagccaaattatgaatgaactctcattcacaattgctacaaagataatacaatacctaggaatacagctaatgagggatgtgaagaacctcttcaagaagaactacaaaccacacctcaaggaaatcagataggacacaaacaaatggaaaaacatttcatgcacattgataggaagaatcaatatcgtgaaaatggccatacagtccaaagtaatttatagattcaatgctattcccatgaaactaccattgacattttgcacataattagaaaaaaactattttaaaattcatatggaactaaaaaagagctcgtatagccaagacaatcctaagcaaaaagaacagacctgaaggcatcacactacctgacttcaaactatactacagggctacagtaaccaaaacagcatggtactggtacaaaaacagagacatagaccaatggaatagaatggagaactcagaaataagactgcacatctacaaacatctgatctttgacaaacctgacaaaaacaagcaatggggaagagattccctatttaataaatggtgctgggagaactggttagccttatgcagaaaattgaaactagacccttccttacaccatacacaaaaattaactcaagatggaataaagacttaaatgtcaaactcaaaactataaaaaacctagaagaaaatctaggcaataccattgaggacgtatgtatgggcaaatatttcatgacaaaatcgccaaaagcaattgcaacaaaagcaaaaatcgacaaatgggatttaattaaactaaagagcacagcaaaagaaactatcatcagagtgaacagacaacctacgtagtgggttgtgcaatctatccatctggcatctgtgcatagtggatagtgcaatctatccatctggcaaaggtctaatacccagaatctacaaggaacttaagcaaatttacaagaaaaaaaacaaccccattaaaaagtagacatgaacagacacttctcaaaataagacacttatgcagccaaaaaaaatatgaaaaaaagctcaacatcattcatcattaaagaaacgcaaatcaaaaccacaatgagataccatctcacaccagtcagaatggcgattattaaaaggtcaagaaacaacagatgctggtgagattgcagagaaatagggacacttttacattattggcgagagtgtaaattagtttaaccattgtagcagacagttggtgattcctcaaagatttagaacaagaagtaccatttgactcagcaatctcattactgggtatatacccagaggaatttaaatcattctattttaaagatagatgcatgcatatgctcattgtaacactattcacaacagcaaagacatggattcaacccaaatgcccatcagtgatagactggataaagaaaatgtggtacatatacaccatggaatactatgaatactatgcagccatagaaaggaacatgatcatgagttttgcagggacttggatggagctggaagccattatcctcagcaaactaacgcaggaacagaaaaacaaacactgcatgttatcatttataagtgggagctgaacaatgagaacacatggacacaggagaggaacaacacacactggggcctgttagggggacagggggaggtggagcatcaggaaaagtagctaatggatgctgggcttaatatctaggtaattggatgatctgtgcagcaaaacaccatggcacatgtttacctgtgtaacaaacaggcacatcctgtacatcctgcacatgtatcccagaacttaaaatttaaaaaaaatctggaatattgataccagataaagtagacttcagatcaaggaatattattagagatactgagagacattctgtaattataaaggggtcaattctccctgaagatataacaatttaaaatatgtatgcatctaacacagaagtttaaatacttgagcaaaaattgatagaaataaagataaatagacaattatttttggaaacttcaatattcctctctcagtaactgatagaacaagtatactgaatgtcattaaagatacagaagactggagggcatttccaagatggccgaataggaacagttccagtctgcagttcccagcgagactgatgccgaagacgggtgattcctgcatttccaactgaggtacctggtttatctcattgggagtggttggacagtgggtgcagcccacagagggcaagctgaagcagggcagggcgtggtctcacccaggaagtgcaaggggtctggaaatatccctttcccagccaagggaagctgtgatagactgtacctggagaacggtacactcctgaccaattattgtgctttttctgcagtcttagcaactggcagagcaggagatacccttgtgtgcctggctcggcgagtcccacgcccacacgttgctcactgctagcacagcagtctgagatcgatctgcaatgctgcagattagtggggggaggggtgtccaccattgctgaggcttgagtagcttacagtgtaaacaaagagacctggaagcacaaacttggcagagcccaccacagctcagcaaggcctactggctctatagattccacttctgggggcaatgcatagtagaacaaaaggcagcagacagcttctgcagacttaaacgtccctgtctgacagctctgaagagagcagtggttctctcaccactgcatttgagctctgagaatggatagactgcctcctcaagtgggtccctgacccccatgtagcctgactgggaaacacctcccagtaggggctgacagacacctcaaacaagcgggtgcccctctgggatgaagcttccggaggaaggattaggcagcaatatatgctgttctgcagcctctgctggtgttacccaggcaaatagggtctggagtggacctccagcaaactccaacagacctgcagctgaggggtctgactgttagaaggaaaagtaacaaacagaaaggaatagcatcaacatcaacaaaaggacatccacaccaaaatcccatctgtaggtcaacaacatcaaagaccaaaggtagataaaaccacaaagatggggagaaaccagaggagaaaagctgaaaattccaaaaaaccgagcacctcttctcctccaaaggattgcagctcctcgccaccaagggaacacaactggctggagaatgtgtttgacaagttgacagaagtaggcttcagaaggtcggtaataacaaacttcactgagctaaaggagcatgttctaacccatcacaaggaagctaaaatcttgaaaaaagttagacgaatggctaactagaatgaacagtgcagagaagaccttaaatgacctgatggagctgaaaaccacagcacgagaacttcgtgatgcatgcacaagcttcactagctgattcgatcaagtggaagaaaggatatcagtgattgaagatcaaactaatgaaataaagcaagaagacaagattagagaaaaaagagtgaaaggaaatgaacaaagcctccaagaaatatgcgactatgtgaaaagatcaaatatacgtttgattggtgtactggaaagtgatgaggagaatggaaccaagttagaaaacactcttcaagatattatccaagagagcttccctaaactagcaaggcaagccaacattcaaattcaggaaatacagagaacaccacaaagatactcctcgagaagagcaaccccaagacacataattgtcagattcaccaaggttgaaatgaaggaaaaaatgttaagggcagccagaaagaaaggtcaggttacccacaaagggaagcccatcagactaacagcggaactcttggcagaaactctacaagccagaagagaatgggggccaaattcaacattcttaaagaaaagaattttcaacccagaatctcatatccagccaaactaagcttcataagtgaaggggaaataaaatcctttacagataagcaaatgctgagagattttgtcaccaccaggcttgccttacaagagctcctgaaggaagcactaaacatggaaaggaacaacaggtaccagccactgcaaaaacatgccaaatggtacagaacattgaccctataaagaaactgcatcaactaatgggcaaaacagccggcaaacatcataatgacaggatcaaattcaaacataacaatattaaccttaaatgtaaatgggctaaatgccccaattaaaagacacagactggcaaactggataatgagtcaagacccattggtgtgctgtattcaggagacctatctcacatgcaaagatgcacataggctcaaaataaagggatggaggaatattcaccaagcaaatggaaagaaaaaactcaggggttgcaatcctggtctctgataaaacagactttaaaccaacaaagatcaaaagagacaaagaaggccattacataatggtaaagagatcaattaaacaagaagagctaactatcctaaatatatatgcacccaatacaggagcacccagattcataaagcaagtccttagagtcctacaaagagacttagactcccacacaataataatgggagactttaacactccactgtgaatattagacagatcaatgagacagatggttgacaaggatatccaggaattgatctcagctctgcaccaagtagacctaacagacatctacagaactctccacaccaaatcaacagaatatacattcttctcagcaccacattgcacttattctaaaattgaccacgtaatttgtagtaaaacactcctcagcaaatgtaaaagaacagaaattacaacaaactgtctctcagaccacagtacaatcaaattagaactcaggattaagaaacacactcaaaactgcacaactacatggaaactgaacaacctgctcctgaatgactactgggtaaataacaaaatgaaggcagaattaaagatgttctttgaaaccaatgagaacaaagacacaatgcaccagaatctctgggacacatttaaagcagtgtgtagagggaaatttatagcactaaatgcccacaagagaaagcaggaaagatctaaaatcaactccctaacatccaaactaaaagaattagagaagcaagagcaaacaaattcaaaagtgagcagaaggcaagaaataactaagatcagagcagaactgaaggaaataagagacgcaaaaaacccttcaaaaaatcaatgaatccaggagctggttttttgaaaagatcaaaaaaattgatagaccactagctagactaataaagaagaaagcagagaagaatcaaatagacgcaataaaaaatgataaaggggatctcaccaccaaacccacagaaatgcaaactatcatcagcgaatactatgaacacctctatgcaaataaactagaaaatctagaagaaattgataaatttctggacaaatacaccctcccaagactaaaccaggaagaagttgaatccctgaatagaccaataacaggctctgaaattgaggcaataagtaatagcctaccaacaacaatagtccaggaccagatggattcacagccgaattctaccagaggtacgaagaggagctggtactattccttctgaaaatatttcaatcaatacaaaaagagggaatcctccctaactcattttatgaggctagaaccatcctgataccaaagcctggtagagacacaacaaaaaaagagaattttaggccaatatccttgatgaactttgatgcgaaaatcctcaataaaatactggcaaactgaatccagtagcacatcaaaaagcttatccaacatgatcaagtcagctccatccctgggatgaaaggctggttcaacacacacaaatcagtaaacgtaatccatcacataaacagagccaatgacaaaacccacatgattatctcaatagatgcagaaaaggcctttgacaaaattcaacaggctttcatgctaaaaactctcaataaactaggtattgatggaacgtagctcaaaataataagagctatttatgacaaaccctcagccaatatcatactgaatgggcaaaaactggaagcattctctttgaaaactggcataagacaaggatgccctctctcaccactcctattcaacatagtgttgggagttctggctggggcaatcaggcaggagaaagaaataaagggtattcaattaggaaatgaggaagtcaaactgtctctgtttgcagatgacataattgtatatttagaaaacttcatcatctcagcccaaaatctccttaaactgataagcaacttcagcaaagtctcaggatacaaaatcaatgtgcaaaaatcacaagcattcctatacaccaataccagacaaacagagaacaaaatcatgagtgaactcccattcacaattactacaaagagaataaaatacctaggaatccaactaacaggggatatgaaggacctcttcaaggagaactacaaaccactgctcaaggaaataaaagaggacataaataaatggtagaacattccatgctcttggataggaagaatctatatgttgaaaatggccatactgcccaaggtaaattattgattcaatgctatccccatcaatctacccctgactttcttcacagaattggataaaactgctttaaagttcatatagaaccaaaaaagagcctgcaaagccaagacaatcctaagcaaaaaggacaaagctggaggcatcatgctacctgacttcaacgtatactacaaggctacagtaaccaaaacagaatggtactagtatcaaaacagatatatagaccagtggaatagaacagaggcctcagaaataccaccacacatctacaaccatctgatctttgacaaacctgacaaaaacaggaaatgggaaaatgattccctatttaataaatggtgctgggaaaactggctagccatatgtagaaagctgaaactggatcccttccttacatcatatacaaaaactaactcaagatggattaaagacttaaatgtaagacccaacactataaaaaccctagaagaaaacctaggcaacaccattcaggacataggcatgggcaaagacttcatgactaaaacaccaaaaacaacatcaacaaaagccaaaatagacaaatgagatctaattaaactaaagggcttctgcacagttaaagaaactaccatcagagtgaacaggtaacctacagaacgggagaaaatctttgcaatctacccgtctgacaaagggctaatatccagaatctacaaagaacttaaacaaatttacaagaaaaaaataaacaaccccatcaaaaagtgggtgaaggatatgaacagacacttctcaaaagaagacatttatgcagccaacaaacatatgaaaaaaaccctcatcatcactggtcgtctgagaaatgcaaatcaaaaccacaatgaaataccatctcatgccagttagaatggcaatcattaaaaagtcaggaaacaacagatgctggaaaggatgtggagaaataggaacacttttacactgttggtgggagtgtaaattagttcaaccattgtggaagacagtgtggtgattcctcaaggatctagaactagaaataccatttgacccagcaatcccattactgagtatatacccaaaggattataaatcatgctactataaagacacatgcacacatatgtttattgtggcactattcacaatagcaaagacttggaaccaacccaaatgtccatcaatgatagactggattaagaaaatgtggcacatatacaccatggaatactatgcagccataaaaaggatgagttcatgtcctttgcagggacatggatgaagctggaaactatcattcgaagcaaactatcacaaggacagaaaaccaaacaccacatgttctcactcataggtgggagttgaacaacgagaacacatggacacagggcaggaatcatcacacaccagggcctgtcaggtggtggggggctgggggagggatggcattaggagaaatgcctaatgtaaatgatgagttgatgggtgcagcaaaccaacatggcacatgtatacctatgtaacaaacctgcatgttgtgcacatgtaccctaggacttaaagtataataaaataaataaataaataaaatataaaaataaaaaaaaatacagaaaaccaaaacagcactatcaaccacttgacctaactttcatttgtaaaaaacttcacccaacaacaggagaatatgcattctttccaagtgtatatggaacacatatacccaagagagggcatattgtgggacctgcatatgtacccctgaatctaaaatgaaaactatatagatatagataaagtagcaaaaaagaagacatttaaaggaatagaaatcattcaatgatattcatagaataaattaaaattcaataacaaagatatctagaaaatattcaaatattcagagatgaaagaaaacacttctatataaagcaatgtcaggaggcaggagcaagcaatgtgataaaacacattgatttaaaatatgaagctcacagagatgcattgacatacccaaagtcacacagcaaggacagggaaccaggctgactgatttcagtgttggtgttttaacccctccactctcctttactatctgatgtttttcatcatcatcatctcctctcagaatatacaaaggcagatagacaatatcagtaagagtcaaccttctgcggagctgaggatagcctaaattcacaggccctggatattggaggtacaaggtgctcagatatggggaacttaatattggcaagtgtgttgaactaagtgctcctgatgatactcattttgtttttaaaataacacttttattgagcataattcatatgtcatacaatttaccccttcaaagtgttcaattaagcgggtttttgtatattcacagagttgtgtgggttttctccattagccctgtttggggaaattgattcttttgtatttgtgatggtagccaaactttaatgaatggcctattgtttggcaatctctacttccaaaagttaaaccctgaatgttccaccagcttcattggtctctgtggaagttattcacatgagcacttagggtggctccctgaaacaggaacattactttatttttattttgttagctattaactagccctgcccagacctcctacagaaaatacatctgtgaggtactggggagaggctctatcctaccctcctgacattaaagtatcttcagtatgaagctttaaaagagatttaaagtttctgcttcaatcatttttgttctcgttcagacagtggttcttaatctggggccacaacactctggggagccaaggagttatgtgagaaacctgcaaatcagcttgtgaacgaggcttttattttgattaaatatatcttacacacgtttgctactatttctcaatcatacatgggtactgttgtgattaataaaggaaaaaaatcttctgcatatgtaacttttttattatatagtaacctttttcattatatattttctcaatcagcagacactaggagtgcaactactgtcatgggataatcagatagttttgattgataaaataagttatatggacccaaaatgtttaggaaccactaaattaaacaaagacctttcttcatagggtacaaatgtttcatttagtagggcatcaacgtattagcagtcattaacacattagcctgaattaatcagcttgcttcagggtagggcattgaacactttcatcctaaaagcagagtggggatcagcaatggctccaagcaggtctagtgggttagaattagtcttttgggtgccatgtgtgcttcaggaattcgacagtttttatacttataatagtagtcaaactttgatagatgaattattgcttggttagtaccactccaaagagccaaaccccaaatgttctccaacttctaccaatgttggaaaacactccaagggaaaaaagagggcgctgagcaccagagatgggagctaaaaggtaggaggggacagcaaaatatgtggccaagaccaaatttgtctacttcttagtttgttgggaggacaaggagatagtcatatctaccccaaaactttagcagactacaatcttgaaaagacgtttagaattcctttacttttgaggtcctcccttccttttgctctgtcccagaacctccttcgcctatacttgctgacaaactttcccctctcatccaacacagagtcccattttgtatccaaagccattcaatcagctcgaattgtctgtgtttttctggaggggttccctctccaaacttgccagaatgtctcaatattcttggagcttgtcctcagtttccgaaacttcagggcatcccataggccacagttttgacttcaaatgcaaactgaccttttcctttcacccaaacaccctcctccttacccactgcattgcatcagagcattctcaagcctgttgtcttgctccagacatccccttgtctgtggcttggggttaatatctggtcctttccaatcctaccccatgtgattatgcctttgtttcagatccaggagagtaatcatactcagactaggtctccactaaccaaagcaaaagggacatttgagaaaacaatcagttagtccttgcagaaggggtttttggttgcctgacaaccagatagttgcctaaattctcccctctgcctgacatgagttcagggccataagtggctactttcccctgcacaaacacggcaagtgtacaataatgacttcagctgtttgagaagaggccatatcccaagaggtactccagagagctgattttcttagaattgcagagcaaagggctccggaaaactgggctgaatactactagtgtttgcctttctccaacttctgtgtgactgccatctagtggcatgcagggtggtggtggggggtggtggagagtgctccaacagggttcagtcaataagcaggtgcattgtttatgaataatttaaaaacaatattaaaactgactaaagttggtcagacttttattataaccacatgctggcaattctaaacagtcattgataaaatacttctcactttggtataccactgcccccaccccagcacctaagtgattccctcatctccccttggagagccatatttaagcctgacttttcaggtaatacttcagatttatatcccttccctctatcaaaatgttcctgtcttgtgctctaaccccctaaggctgtgctttttattttccttggtggaatttatttatagggaaatatttataggggttaccagctgtctctaccaggggcacctatgttataacagaagttacctgaagaatcaacgctttagtccaatggtgttctaactcttttaaggcagtgaaacactgttttcaaacaaaatatggtatggaaccccatctcctaactcttctttaagtctcaccttcagtgtcatttcctctggaaggtcttccttgtctctccatgatgaggacaagtccccatgacttagtcacagcaccttggactcgccctttcatactacccatcacacgtgttataacttgtctagtgtctgtattccttagtagactgtaacctccatgtgggcagatactgcatctatcttgttcaccattggaaccccagaagcaagtgttgtgcttggcccactgtatgtggtccgtaaatagctgatgaatgaatgaaagcccttctgttattatagcctatgagtaaatgaacattggaaataaccatgtcacgtgttatattgtgggtttttattgaaattatggtcaaaaacaaccccaagatcattttttttttttggaaaaaaagtgtggttaaccagttttcccaccttgtagtcatgtgagtaaaactaaatgcaacagccacaactcccaatttctagtgtgtagatttttcctcctctctttggcactaaagtcaggttcttcttcttactaagttttggctgaagctctgcagggacagtctcctcttctgttttataccaggaccccccaaaaggcttctcctagttggccatctcaggttggcacttccttcaaagacgtgcttaagttccactgtctgattgaagttaacccagcctgagactgctttcctttttcttttaactactagagatcatgaacaaagtgttcacctagttttttaaatttatttttatttattattatttttttagagacagcgtcttgttccgtccttcaggctggagtgcagtgggcatgatcactgcagccttgaacttctgggctcaagtgatcctcctgcctcagcctccaagtagctgggactacagacatgtgccaccatacacagctaatttatttttaacttttttagagatggggttttgctatgttgcccaggctggtctctaagtgattttcctgccttggcctcccaaattgctgggattacaagcataagctatcacacctggtctaatttttttaaaaggcatttactgtgcatttatacatcagtcactctcatgaacactttattaactcatttaagcctgacaagaaacctatgggatagagattattcttatccttattttacagatgagggaacgaagattaagagatgtaggaaacaagaaatacgaattgtttgcgtgtattaactctgtcttctcctgattccctgattggagtgaacctctcaatagttttgaccccaaagttattttgttattaattttggtgataagttgaacagaggtaaacaggtttattgaaggactgaaaagggccaatgcccttctgcagcgtttccttcccctcccccacttacctcttgaggaagagggctccctatgcggatgcattccagagcttcagaattcctctctgagctgctccctcctatggcaacgcccacgtgaatgccagaggacaatggcacagacagttttcaggaacacgtgtagaccatcagccccttcctcctcaccagggcctctggctgccatgcaagctgctacatctcacaataaacccaaacccctggcattttagagaagtagcaggttcagaagtgaaagaaagagaaagtcggaagagcaggaataacattagcactctttgtaaggggagaaggcctggattacattacagatgcttaggaaggacaggtatggcctatttagttggtgctgcctacttctatcatcacccaaaatctcatccctctcattcccaaaactcccttctattgcttccactgccagaaggttttcactcactttagccctctgcctttatttttgtaattggggaatgcattttgagggtaataaagaataataaagtatttaaaagtgaaaaggtatctgagggttaagcaattatcatttatttcacttaagttgcttccttcctaatgccagacagctgccctggagggatttaggttttgattgttgtgtgaggtggttaatggcggagcctgaggttctttgtggaacaaggcaggtgggatagctggatctgaagggaggaatgagggcactgagaatccagagagtgcatgatgacatggagagaggaagctgtcaagtacaaactttgtcttctttgaggttttgcctaggacctgtgccttgcctccctcccatccatcccatccagaaaagtgagaggaaactccctgctcactcctctcctcaccacctgcccctgcccccaggatggagcttaagcgggtactaattagtactatatataacttggctacattcagggttcaagagacttgtgtggactggcctgggaatctgaggatcaaatagaatgatatttcaataagaaaatgcatactgaattctaaacttttggccaatatgttattcttacattggggactgcttatactgggaggcaatttagaattccttctgtctacattaacttgaagtcaggcattgggtctcttgtgtgggccattttgtgaaggctccatacacaccacgttggagcgtaagtattcatacacacagagagaaagatataaagatatataagtattgttttatatatatatatatttatatatatatttatatatatatatatatatatatatatatatatatatatgaaacaggagcttgctctgtcacccaggttggagtgcagtggcatgatcggcatgatcatagataactgcagccttgaactcctgggttcaagtgatccttctgcttcagtcttctgagtagctgggactataggcatgtgcaccatgctcagctattttttaaatttttggtagagatgggtgtcccactatgtttcccttacaggcataagctaacatgtccagcctgtaatatatattatagctattataaatattatatattatagatagcatatgtagaaatatagatattacttatccacaatattgaagtcttagcaaaaatccttcacagcttagtattactgtgaagcctatgccacacatgcaaggacattttgctttaagcatttagaaaaatcgatgtataaatctaatatttatcatttattttgaaagacatcttatggcaaatcagtttacaaagcaaataagacctttttttcatttgtacttattaacacaggttttattagttttctttggagtagggtacagagaaaatgtcctgaaaatctgcctagcctctgcatatttatgtattccctgaactgcttgctctcccaaatggagaaagaatctcaccagatggactcttcacttggcaaatatttactgaatgtctggacgtgctggacattgggtccctaacttctcagagccttccaatctaatcatggagaccatgactgagcaaacatttcatgtttttacatataatggcatgtaaaaggtgaatgccttcaatgttctcaagtctaaaatagggtcaataatgatacttcccacacagggctatggtgaggattaaatgaaaaaacatgaatgtcaattgattactatagtggttggcacaggaaaaatactttggtgattatttcctggaagcatggggtagggaagaactaactaacctgcctgaaggaggtggacaagttttcagagctgagcaatatgagcttttaacaattagtaggtgtttgttaagtagagacatcagggaataaacattccaggcaaagggagctgtatatgaaggctcagaagtcctgagaatgtggtaagttccaggatcccggagttgcctgccatggttggaagatacagtatataaggagaaagggaacatggtggcaaaccaggaggtgagcaggcaaggttccacaggggcagtgatgtttgaaggatgagtagaagtttgccagtcacagaagaagaaagaacactgtagtggtggaaagagcatatacaaaggcacaaagttgtacacgcatatgaaatatttgggggacagtgttctgtaggtggagctctgcattcaagaagctacctctcccatgtggagctttcaaaggtgtctgggcatgtttgctaggctggtggggtgggccccttgatgtcaaattatgtgaggatttcagaggggaatggaagcagtacatgtacccacaaaagaagaggaatttggaaaacagtaatatgtctgtcttggaggcttgtactcagcacagactctgcatactggcaagcgagccctgataaaagggataaaagtagaatctgaatgacttgtttgcacaaaaaactgtgagactctgggacacaggaagaccctgctttggtgcacacaatacacactcaagaactatttgttaactggtttcatgtaaggtgataaagtgtaacatcacaggttgggaggaaagagggtactctctctacttgtgcacaggatctggtgccatttgggaacgctgaggattccagagcatcaccactgtggtggcatctctagaccagcagaaagagcccctaccaggaatagcacagttggcagcagtggtgatatgtgtagccatacaggcagtcaatggactttttttttttttttctagcagagcccatcatggaagtaggtgttggggaggaaaaacttttcctctactctcttaggttcagtaactaggagcctgtggattaaactaacaaaacacagattaatagaagggaaggcacacaatttttgttaatatttacatgtacagaaattcataaaaaggaagtgaaactcaagtggttacacttggggcctttacatccttttaacaaaggaaaggtttgggattcaagggaggataaaatgtaggaaagtgactagaaaatatacaggggaactaatggagggtaagggctagtttggtaaggttggtgtcttagtctgtgttgctataaaggaatacctaaggttgggtaatttataaagaaaagaggttgatttggttcatggttatgcaggctgtacaaaaaacatggcaccagcaaccgtttctggtgagggcttccagtagcttccactcatggtggaagaagggaagctggcgtgtgcagattacatggtgaaacaggaagcaagagacagaggaggagaggccaggctttttaactaccagttctcgaaggaaccaagagtgagaactcactcattaccacaaggacagcaccaagccatttatgagtcatctgttccatcacccaaacacctcccattaggtcccacttccaacactggggatcaaatttcaacatgagacttggtgaggccaaaccatatccaaaccatagcagtctgtttctgcaaactcttcttgttgttgacttccaatcttcaatgattagagtcactcttctctccctggtatgaatgggggtgtattagtccattcttgcactgccataaagatatacatgaaactaggtaatttatattcaaaaaaagaggtttaattggcatatggttccacaggctgtacagaaagcatgatggcttctggggaggtctcaggaaacttacaatcatggtagaaggcaaaagagaagcaggcatctcttccatgaccacagcaggaggaacagacagaggagggggggggggctacacacttttaaacaaccagatatcatgagaagtcattcactatcacaagaacagcaaggaggaaatctgtccccaagatccaatcatttcccaccaggcccctcctccaacattggggattacaattcgacatgagatttgggtggggacacaaacccaaaccatattaggggagcacctttctcaaagggaaattcatccccctgcttttaggcagataaggggaaggcagagaactgtttctacatctgttggttctcaatttcctgcaggtcaaaataatccttctgccaaagtgtcacattttggggtgtcatattctgatcttcttcaagggtcaaagcaagaaaggaatgaaagggtggtaacatgtggtaacagacaggacttgtcagtgcttcctgggaatcacagtgggggcagataagtggagactatagggaagaaaaacctgtaaacattttctacatctaggagaccaaattgacaggactgggtgaaattctgatgtggctaagcagagaaagagggccaagctctctggtttgagttatttgcagtttcctcaatggaggtggagcaatactgggatctatagcccaaagttccagaagaaagtgtgctgggtgtaaagagggactacgcgtagctcagcatgagtgttggcaaccagaggccaaaattccatccagggtgtgggtcaagaattgttgtgagttccaggggtgcagcatggaggcatggcttcttatgcatctcacatgacaggataatctctttttcctcaatattttcaatcctttctataggaccctgccccccacccaatattcagatatggccaaagagctcccacctttaagacaaaatggctttcctttgacctcatatccttctccagctccttccttcaccatatctctccagactctgcagtagaacttttctaaacagttgtctttagctgctgtctccaattcctcatctccccacacacttcttacagtccactcccatgtggtttctgttccaatcactacaccaacacttttcttctgtgttgctaacaccaatgtatacttttctgtctctatattatttgacatctcagcaggacatgacacgtttgactactctcttgaagcactctcatattttggcttctgtgatagcacaaatttagctagtattgggtgcttgagggaatttggtttggatcaacatatgtgacaaaactcttactctgatccctatacaaatgcctgtaaaaaaataatgtgagcagcagaccaaaattgaggccacattgaaaccttctgtacccaatggccttctgtacccaatctcttaagtatcttgacctaaagggaggtcagaaaacaatagccattttcagtgccacgacatccatgaatgtccatggtcataaatgaatacttactatgcgccagacactattctaatcactttatatgcaatgactaaattaaaactcactgcaagattgcaggcaaagggaaataatatcactgttattccattttatagttggaaagactgacaaatacggctggtaagtacagagctgggcttaaaaatctaaatagtctgactgcaaagttcacactcttaaccaccatgctatagtataagaatgtcaaggttattgtgaaaccaccgcacccatccatgacttgttaccctgtccaaggtcagcactgaccagagagtcaattacttatgcaacaagactacagatgatttttcaaaattaacttttttattaatttaaaaatccagaaatacagtgactacataaataagtaccataattaggtacatgtcctgtgagaacagtgaaagggtaatactgttatgttactcttacttgtttacatgagttaactagaaaatggctacaactgctaaatgatgcttatggtctttgttgttccaagtgtttatgatacaaataaatacacaagaagaaccacatccattcttctctactaactacaggcagcttggcctctttaccctatgtcctattctctacacaacaccaaacactggagggtttctactttgacttaacacagctccccagctcctgcttcccacagcattttgcaaaggtgtgtcccagcacctggaggcaggagtatatctagggaaactctctgcgtgttctcttaaggctaagctttcagagaacacctgggtgggaaggctttgggatgaatcatccagaaggagaaacacctctttgccttaggatctagttactagtctccacattatggaatcactgccacctctgggacggagggagcagccgcataacaccttcccccctttaccacacacacacacacacacacacacacacacacacacacacacacacaaactaatgctttgtgacctctcaaccgggatgtactgcttctctcttccaaggagaacgtgtgtgatgtgctggtgagagtcttgtcccaagaaaccctggccataaggcccttgtgtctctttcataagaattgactcctttatgccaggttgtcataaagactgaacattttacattttcccctattggtatcaaaccctcttaggaaagaattctctcacctatagtcatggaatgagacatatggggtttctgggtccttaaaacatttctacagttcattcctgcccctcagagggaacaaatctagaaggcatgcctgagatccttgctgtgaagaattaggtcttcccacaaagatgatttctaaagccagaccccagaatggatagtttatgctctggtattgggctgcaagtagacattttaggagcagccttctctggaattcttgactaaaatatctgcttgatgaataagacaaggatagtaggaaggtttaggataaagatcttcatcagaatatccacctccctaaatgaacaacaattttcttaactgaagagtcaacatgcagatgctcatgaggaccgagccactttgcaaagtaaaaatcaactcctataattggagaagaaggaaaacttcccttttaaagagcttctagaatttactaatttaatataatttttctgaccagacaactatggtctcaaaaatattagtgagtactgatctattacttggtaaattttattgatgtgaaagcaaaaagatggcctttttgaattctatcaacttctttcttcaacaattattttttcttacatggattcagtttctgatgattttactcaatttaacttctttctggaagtcccataggtacagggggaaaagaaaagtggtatcattagggaaaaattattaccacttctaagtgaatgaatgaggctatgaaagtgtttttattctttaccctgactctattgttggtgacttaaacagccacaaagacctaagggcagagcctcttgttcacagttatttactctcctgggcacaaaaacttccaagctacttgggatccagtcaagggaaaagtaacgtagaatcttggctagctttgcttcaaataaagctttcgtttaatgtgagtgtggacgtgcgtgtgtgtgtgtgtgtgtgtgtgtgtgtgtgtgtctgtgagagagggagggagagagagagagagagagaaggagggagggagggagtgaggagggaggatggggagctaatttttttaaaagaacacatgacattctaaaattcaaaggtataatttcatacaagtaattgttctatactgcagaactcctactaagcaattcccttctctttctttcacttgaataactttctagataaaaaccctggggtcttgtttgtctttaacctgtaaagaaatgtgattctccaagaaactagagcagtgttgtgatgttctatccctcctcctcccacatataatttaagactcttctagtctctttggaggagatgttcaagggctgacacaccactccacacaaaggagcaaattatgctgtgcatggcgtgaataattgactgcatttgagtttggagttttagggcactgttgacttaagcaaaataagcctgcagtccagctgcagcttgagttttcttgctttaccctatccaatactgtctgtcttgcctaacagtggcccttttcagatctctccaggtacaaaaccttgactaaatcttcaagctctgttctgcatacacgacttgaacacatctggctgatctgagcttctccttcggtgaagatcttccactggcctaaaaggcaaacaaacgcaaagtggccgggagtgtgtaagaggaaagcagagcaaattaggaatagaaccaatataccccatgcttacccacttactcatggacctaccagggaatttggaatacaaatatcacttggtttcaaaaaatggccccaaaacacttttctagtagcagatatggaaaatgggaaatgaagttttcatttcaacacatagcatttgtaagaatcccaagaataatatagaactgcccctcctcaagagcaaaacctaagtgttattcttggaatttttacagtatatttagcatttacaaaatgcttcaatatctgcttgttagctatttaggcagcttacttggcaccaggtcaaaaaggcactttggaaaacggcacctactgtattactggggctttgcttacccttagggtccccaaatattggtttgggttacttgattactatttgattatatatcactctttcctctattcctgctatcttttgttaaaaacttctcgacgttgctttctcctacgtccacatgctgtccttatacccccttagcaccctaaatcccttcccatggttcctcatccattctcatataccccatggaatccctttccacgcagagtaaacttggctgtagcccttccatcccctgttgtctctgcccaccctggatactgtgttttgtcttctttttattcctgtgctcatggtactgcaacctggagaactcctagtccaagttaagccaactcctcttaagcccaaacctgtcttgaacctctttttcttttccttagccacaagagaataatgacccaccttccctatgggcctgatttctctgctcctttctcccttggatttctcccttttccccattctctatgactcaatgggaagatagaaggaaaaacaaaaaaacaagaagaggatttgggcaaggaaccagctattactgaagccctataatgtgctgggctctgctaggcacattatataaaagagttgggtttgttcttctttgctcctaggtgaccctgtaggatcataccaacttctttcagctacacacagtttgaggcacataccttctactccattatataccccaaatcctgccatgggcacagagtatatctaaatcatcttttaagtcccctggaacctagaacaaagccttgttcacagtatgaactaaaacatgtaacttcagaagtcccataattgatcctaggatcttacactctgcctcctttcttactcacatgtaaggactcccaacttttccatttgaattctcatactgtcctgttattttctatgagtcctgccaaagacaagcaactgactgccttggctctttttctagctgcctattggaccctaactctgctcagatggctcttaagcatattaatttaaacatgttccaagtgaaactctttttcaccaatacctgcttattcttcacagtttccctgttggtgaatggtattactattcacccagtcgagttattaatatcggacccattccaaactcgtttctctctttgatgctgatcttgttgatttaacctcagaaatgtttctcacagtgacgtctcctcccgtctcattgatttaatatagtataattagttcctaattcagactatcccacttctcttaataagggtccacctttcactccacacagcgaggacctctttctaaaaaaataaaaaaataaataaagcagatctgaatgcaccattcacttgcttaaaaacctccactggcattctctggcctggagatcaagtccaatgtcctagcatgataaattgggcacttcataatctggcttcgtcaaagtgtgtgcttaatgtaatatatgcatctgatagccgaaagacatctttccaaagcaccatgttgatatctctatgctatttgcagcaactacagatgctacttgccttacatttgaacattttactggctttttttcaggccctatgactactttctacctccaaatcttctaatcttttagtgcaccttctgtggcctttgtgatcattcctctcccctacccacatttcctgtttgctcctgtctgagtcttctcttaggctgcactcttttcctggactgatttcctgacccattgcccagtcatacccttctctttcaaaacacacctcctccccgaagccttccccgactaagcccacctggctctcatctcattgttctttgcagattcccctgagcactttgatatttaactcctcagaactatactaattcatactgaagtcattttcatgttctgtctcatccattataattccctgtggatagaaactgtgtgccttttatcccattagaagtgctcaacacccgccccaatgcctagaagtatcttagtccctaggctccatctagtgtggaaagtgggagagctgcaagtgtttttgagtgcctgaatgcttttaaggaaacatgaccacccaggggcagttccccaggagtaaaagtgctttcatataacacaggaattgatatgcctttaatttctctttgcctctcatacccaccaccagaggatacacccttccagatgtgaagtctccataaatataccagacctggaatcttatgagctttctccaaccctcttgagactctgtgcttagcagtttcattaaagacattcaggaagccttgacctgaggtatcctatgctcagactacatctgggtttgtattcaccatgtccaagctcttcagattacattcagacaccccattcactgctaagtcacccagaagagagatggaacatcctttagtgttgatactgagcagtgctaatgttcactgagattgcggagggactttagctgtggctatgctaaattgaaaactgaatgtgtttttcagggagcagtcaagagaagtactacttactcagggttgttctggtcaccagcttgaagtgaggaagctcctcaaacatcctcttggagatcttctcaatatggaagtgctggagaatgcctagggccaagcaaaaagtggagcaaatggtcaggcactcaatctggaaccatcaactcctttttttctgctcaggctcagcatatcatttcattactagggcttaagagtatcgagttgggctgtgtaatgtgcttaaccaggaacttggatggctcaagggttataattgactccatttgtttccttggcttactggcttcccctcggcttctccagtggatggagataagggagatagtgctgctgaccatgggactctctcctagggaaagccacatggaatctagcataagtgcttactggagcttctgcagccataggcagtattagaaattctgcacttgcccccaacctggatagactgtgtccatgccaaaccgctgggctgccctcctggctaagcactgagagcctgcagtgggattgcaggcaggttggttttgtaaatggagaagccacccttgttcttgaactcactgaaaagcatattttcctttgggaaatattcacagatcctttagccttccttattcataaatggggagagttaaaatagagtgctctccacagtctcaaccttgcctgaatagcttttatcacaataacaggtagacaactgacaactgccttatactgaaggagcaacatattaccagcccacttaaatgggcgaagtagattaagcctctttttctgtgtccaccaagcatagaccttgataacccagaactgtgaacaagaggatatttagacgctacattagcaagttgaaattcatctgcacacctctgagaggcgaaagatgtgggatgacgaatagtgggcccactgctggggaaacgcaacaaaccagtgcctagtcctaggtgtcctgttatggatgagctagggagttaaagatggcaaatcaacactccaaggcatagaccaaaaataagcatgagtgaatatatacatgttcaagcatcttttttttagggagaaatgcattctttagataaaggctgttgtctaaagggagagaaaaaaagcctcataaatactgagcagtctttttcaaagcatggtccaagtgccacctgcattagaatcatctggctatttgttaaacactcaaatgtttggactctacccaaggtctactgaattcctatctctgggatggggccaggtatctgcatttaaaaccagctccctgtgtaatggtgatgcatacagaagttcgagtactcttgagccttatgtgagagccaatagcaaaaagatgtgtatattttccagctgaaatctcacttatccacttggattgtgaggaaccttgaccacactaaataagcactagtcttgagcctacaaaaagttagaagagctgtaggatcacaatgaacagaatgtggcttgctgtggtagtcactgtgagtaatcagaaaaggaattgaacattgtgactggggtttctccagtaagactataaccttcttgagggcagggatgatgttttaaatttgttttaccccagaagacacatcgtgatattagggacttagctttgccctgaatgaatgggttttcatggttgttgagctttattctggaaagaatgacagactacagtttgacagtttgtaatcctggctacatattacaatcacctgagaagcattatgaacaaacactgatgcccatgccccactccagaccaactaatcagaatctctgggggtagggcccagatatttggtatttaaaggaaaccaaaactctccctgatgattctgatgggcagccagggttgagaaccgcttctccagcttttggtggtgtgaaataggcagctttggaaacccaagggtcagtacttgatctttagcacaggccatcgttaaatttgaaaggccataatgacaatagtgttagatatgtcagtttctaagcaatcaaaaagaacttttaatccaaatgagggaacaggttgaagcaaaattaaagtgagtcctctcatccttttctgtgcccccttacaaagatgagaaattaatgttgtcttgctcaccctttcgaatagtccaaacgtggacctctacctgaggtggtctctcagtctccagtgctatttttctggttgtctccccatcctccatgaatacagactcatacacaggcatcgtttcttccccgcagaagtagcctttattgtcaaagctttggcctggaagttcttctggaatcaggaagcaagtagaattttgtcatggttttctaaagctagaagtgaacttctgcatttatgtatctcattgttcataacatctcacacttatcaaaagtggacaattaacaagaacattcttcgagagacagaaattccacccatacttcattagcccagcttaggctgccactgcaacaagccacagattaagccacaaatcacaaaggagcacgtaactttgattgaagtccatgtgttgacagaatccatagttcttcggaacactagacccctactactgtcactgagaagtggactttcatgaggaaaaatgtagccaggtacaaatctcctaggcacttaagagaacataggaatttccatacagggtcaggatcatgctctgtccagctcagtgttgccaggagaggcccagggaatgggctgaaaaagggccttggttaacatcccctgacatcattttggtatacttagaaaacattcatgacactcatttatgtgcatatacttgcccaaaggatccatccaaattggcttgacatttctgaatgctctttgatttgtttgtaaggggaacaataataccggatcagcaccagtgccaaaatctagatgtcagattagccatatgtatgctatgccaaatgaatggttgggagacacaaaaaattggtcaagtccctcagcgatggatcatttaatgtgtaaactaaactgttgaatttcagctcgcaggcataaaggcacaagctctacatttcactccaccctccctcctctttcctcagtcccctgttttaaaaagtttcttcttgttggttatcagtgagttaagtttgcttgctggccttgtaatcagtactctcttgaactgcgtacttaaagcatacactcaaatcagaacaacagaagccatctgtaagaatatctgaattgttgaggatgaaaccactgagtgttgagtgctttggatctgtgactctaattagggagactcactgttagccaatcagacacatttggactagaagttgtaatcaaattgctattgtatgtctcttggtaacctgattagctttcccacccccaccaccatttggcattgtaaggacaaaaccatagtcttctcttgattccagactgaattactcaatttgtggattattgtggaatcaagctttttgttttcctccttttgtccttctttttagctatttatttacttggtgggccagtctttttggtgataggtaattaagggccacgtgctagcactttttaaatgggttggagagagggaagaggtcactgagtgtacagagacttctgtgtattcaattatcacctttagaatgacagccaaattcatttctcaaactttgctcaccagcttaatattggctacagctatagctgacatgaaatccatgatggcactggcagtacctgtaatatgctaaaagttcttccagtagcctgaagagtcatcttgcaccactacctccttccctacaagagcttaatttacttgaccgaagggatctacaaacaacaaaactcattattgacttaactctggctggtacttgaaaatgctaagaaaagcaaagtttgtctttagaactacctacttagcaacatccgccgtttttcacactctgcacttcaaggtgctttctgatcactatagttcacctactctcattttcttttggggaagacaatgtgcttgatgtcatttctggccatttccacagcccaagagaatgttcccatcctgagccttccagaattccttgcagaagtggtaatgaaggagaagtattattccagctgggacaacttttaagtcttaatagggacttttaatgccataacctaaaaggagtatgtaattatggaaattcaaggtattgggatggtattgtggttgtatgtacagtaaatgctcatgatagcaataacttaagtgtacccttagaatgaccctgtatggcagacgtatctgaatgtgtgttctgagcttgggaatccaggcgtggccaactgggagattatttccttgtctgtgaggaccatctgaaccccaggctcatccctggggctgcacaggggatagaggccttgagttttgggttagatgaaggttgccaggtcgttaaggggagagtgttcagtgaaaatgctatataaactgcatgatgtttgcaagtggttgcagttttcctgcccaacctgctgccactggactgtttctatatgtaaggtggttctcctgtccagcccacctccactggactctctcccctgtatgtcagcccctaataaaaccccatgtcttgtttgctggctctggatcttttcttcggcctcttaaatctggtgccttccctactgaggttaataggagtttggcacgacagtgtgagaagtgagttggggaatcttcaggaagtggacatcttacccaaccctgtaggtggccattgatatgcaaagcaaggtcagcctctaccagagcaaagggaagagagagatgaaactcacatctttaatattggtcctagtttgttattgtaggaggctgcaatcacttgttacaatgaaacttttggctggattatcagtgaattttatttatctcttttcccttttcaacataactgaatttaccattctttcttccttccatctacttctctcctcactgccttgttccttttcttctgtgtcatgtgtcattttttaagaggccagtaatgtcatgatcatcccatttctcaccccttcacgtcattcaggactctattcaaatatctttagagaagccttccctgactactcctttaaaagtgcttcctgccccattcactctctcttgatcctgtttggtttttcttcacagcactcatcacaatctaaaattaccttattgatttgggttcactgtctttcttttctgctagaatgtaaagagcatgctggcaagtagcctttgtcttgttcacatctctgtcctcagtgcatgtaaccgtgtcttgcacacagtaggtacttaaaacaaatttccagattgaatgcatgagcaagtgcatgcctcctgatgctctgcagttgcagagtacctggagcaggtgcccttggctatgtggctattgactctcaggcaatgtgactaaggagtgattcaacatgcagacacccatgtctggctcactgagaggcagatacacagaatgagacagaaattctcttcttccatgttgctcaatcaatcgtctatctccacaaacttgagcagagtgggaaagtgggaaaagcagctcttccagaaaaatcggtttaatcattcagacttcaatatactgccaactgggatactggagggcagttttttacatgataaattttattatgttttctaaatacaaaagtaacacatatttactatagaaaatttggaaaatacaaataaataaataagaaaataagagttacccataattcagtcacaagaaaatggtcactgttaacattttgccgtatgctcctccagtctttttgtttcttttttttgtcttagcatatataaacactttctttctttctttttttgagacagggtctggctgttgcccaggccagagtgcaatggcgcgatcttggctcactgcaacctccacctcccgggctcaacccatcctcccacctcagcctcccaagtaggagtagttgggactatgggcacatgccaccacacctggctaatttttgtatttttggtagagacatggttttgccatgttgtccaggctggtcttgaactcctgggctcaagcaatctgtccgcctcggactcccaaagtgctgggattacaagcatgggccaccgcacctggtcaacgctttcttttttaacacaaaaagttggatcataatatacatattgttctttagcttgctatttttacttaacaaatacattgcaaacatctttctctgccattcaatcttggtctataatgagttttaatggctatattaatattccacggtacagatacaccataatttgtttaatcattcccatattcgtgaactttcagattatttccaatttttcagtattgtaaacagcattgcagcaaaaattcttatttgtatatctttgtgcatgtctgtggttactttcttaggattcctagaagtggaattttttagccaattttttttttttttttttttttgagatagggtctcgctctgttccaggctggaaagtactggtgtgatcgtggctcgctgcagccattgctcccaggcaatgatcctctcacttcagccctcagcctcccaagtagctgggactacaggaggtacgtgccaccatacctggctaattttcttttatttttgtagagatggaggtctcatcacattgcccaggctggtctcaaactcctgggctcaagagatcttcctgccttggccacccaaaatgctggtattacaggtgtgagtcactgcacccggccaccaaatgttttaataaacattaccaacctgagaggacaattgttttaaaagcaatgactgttgtttgtcttgttctcacagctttttgattatttaattttttaattgaatcatctgcatcaataaaattttaagcacacaatgaaataagacttggtctgaaggcctgagattcaaattggaatattatacaatgagagggtttatgttatcatgggtaatttgtgtaaatattagtttttgtctgaaattatcttgttgcattactttttaaactattaagtgttagacccctgacagaagagaaaattgtgttcatgaaactaccactatgtgatactaaaaggtttgaggatccagtgagaccacagacttggaagtcataataggtcattgttgctgggtggcccggatgtccatatcatccttagaatgtgctctctccattggccggatacagtggctcacgcttgtaatcccagcactttgggaggctgaggcgagtgggtcacttgagctcaggagtttgaatagctgggtgtggtggtgcgtgcctatagtcccagctactcgggaggctgaggcgggagaataacttgaaccgggaggtggaggttgcaaggttgcagtgagccgagatcatgccactgcactccagcctgggcgacagagctagactctgtctcaaaaaaacaaaaaataaaaaaaaaaataaaaagaatgtgttctctctgtattcgtaataaatacattttctcataaatttcaatgccccagttctctacaccttatcaaatagctcctgtccttcctgtccacacgctgccccctgtgtactctggaagatgggggttgttacattgaggaagattttgtgtcataaatcagtgcttctcaagctgtaatgtgcattagaatcacctgaggttcttgttaaaatgcagattatgatgcagtaggtcttgagtgggggcctgagagtcaacatttttaaccagctcctagctgttgccagtccataaaccacactttgagtagcaagaccataaatgaccctgggcctacagcagtagttctcaaacttttctgcacacaatgttcacctggggatcttttaaaaatgccacagcccaggccacacctcaaatcaattaaattatagtctctggggatgggacacaggtatatgtagaagctcgccaaggggttctaatgttcagacaagtttgagtaccactggcctgcaggaaaatgctcaataaatacacattgattcagggcatgtttgcctactagtcatgagggactaagttgaagaagtatataatttagctctctacctactttttaaaatgtttgaattttcatctgtgtttataaaaatgctttgcagaagcataagaaatgataaattcatgtgcctgggattgactaaatcatcgactcttcgaatgttggagctgtaagggccccccaaaaaatctactctaaccctctcattctgcaaagaaggaaactgaagctcagaggggtgaagtgacttgttatagatcacacaggaaacctgtggcaagacagagatagaatgcttgattacccatcctatattctgtcaaccccaatattagggactatatttttatttagctcatgttttaaaaactaccatttaaataattaacttgtcttttttatcagtcaatattttctactggcatagaaaaaacgatgggctggaagtgacttgggttataggccttggttttatgattgattagttgaatgaatctgggcaagtcctttgatttttgtacttcaattttcttatctttaaaaaataaataataatataattataggattatagtgttagaagggagcttagagataatttttctaaactttcaattgtacagataaggctgatgaggctcagaatggatatggcacatttccaagatcactcaacatcttaggcttggatcagaacctggtctccttccactataactcacctgcctctcgtcctgtcttaaaagggcaatggatgtgattgtactttgatgggtttaatagtgatataaatgaaagctgctactattcttccttatcatcatgatagcctaaattctctactatttagaaaagcataggtaagttcaacactcagggatacatgagaggtgtggtagacacaagcatatttctgggtagtaaatttcttccaagcaactgccttttcagtctttcaagagaagagagaatgaaattcattattattagaaatattatcattacaattatatgaaaggttatgtttctgatgcctaaagaaagtttagaaagactaggtgagaatctcagtcaaccaaaagcagggcctccaaccaacgcaccttttgcttttttacctggacacaccttgcagcattttccgtctattttttgaggatacttgcaggggtatcgattggggcagtggattttcttacactcttgcttggtgacattacaagtacatagcacacactccacaatgccaaatgcccggaggtttgggtgccaggactcgccatgagaataggtctttccattggaaacacacactgaaagagaatgcagaattagcaattaaaagctaaggagctaaaatggaaccctatattcagaacccaagccctgaactacttaacatatcaagcatcctttgttcttgtcatagccatggggctatgtttaccgagtagtatctgtgaccaaaaaacagcttgggccatattctactctcaggagcttctccagattcttcagcagcagcttctggatgcttataaatggcctcagacatagtaggcagtccataaatatatatatgtatatatatatatatatatatatatatatatatatatatattttaagaccggatcttgctctgtcacccaggttgcagtggtgtgattgtggctcactgtagccttgacttcccgggctcaggcaatccttctacatcagccacccgagtagctgggactaacatgcaccaccatgccgtgcttttttttttttttttaatttttgtagagatggggtctccctatgttgcccaggctggtctgaaactctaagactcaagagatccacttgcctcagcctcctaaagtgctgagattacaggcatgagccaccgcacccagcctatatatatctatatatctatatatatctatatatctatatatctatatatatctatatatctatatatatctatatatctatatatctatatctctatatatctatatatctatatctctatatatctatctatatatctctatatctctatatatctatatatctatatatatctatatatctatatatctatatatctatatatatctatatatctatatatctatatatctatatatctatatatatctatatatcatctatatatctatatatctatatatctatatatctatatatctatatatctatatatatatctatatatatctatatatctatatatatctatatatctatatatctatatatatctatatatctatatatatctatacatctatatatctatatatatctatatatctatatatctatatatatctatatatctatatatatctatatatctatatatatctatatatctatatatctatatatatctatatatctatatatatctatatatctatatatatctatatatctatatatatctatatatctatatatatctatatatctatatatatctatatatctatatatatctatatatctgtatatctatatatatctatatatatatatattttttttttgagatggagtctcgctctgtcgcccagactggagtgcagtggcgctatctcggctcactgcaagctccgcctcccaagttcacgccattctcctgcctcagcctccagagtagctgggactacaggtgcccgccaccacgcccggctaacttttttttggatttttagtagagacggggtttcactgtgttagccaggatggtctcgatctcctgacctcgtgatccgcctgcctcggcctcccaaagtgcttggattacaggcgcgagccactgcgcccagccacatatatatatattctcatatatatatatgagaataaatgaatgcatgaaagcagagttctatctctagtagaatgtaatgttaatattttcagttctatagaaaatttgtatgcctcaagtggatgtgcttccaggcatgaaaatttccttgggagatttgctttccatggaggctagatgcaaaaattactgctcttcccaaagggacagtttcttccggatcctgaagcaaatccattcagaatgtcaaatgctatgagtctgtctgatccaccaacatatataagtatggagcttaatggtgttcggcactgtttggtgtaggaaggaaagtgataagtcaagattgagagggaaaggaccaagccctcctgggtaacttgtgaagggatagccttttatgcctctaatttcaggcaatttcctcagtctcccacctcatactggctatagatatttggctacagctgatcactgcttgcttcacagatatcctttggcagtctgacatttgttaagtgggaagttaagtcattggccccatgtcttctgaaggaccttaaaagagcaagcatctggctgggtgtggtggctcctgcctgtaatcccaacactttgggaggccgaggcaggaagatcctttgagcccaagagttcaagaccagctggcaaacaaagggagaccccagtctctacaaaaataataatacgaaagtcgccaggtgtggtagtgcatgcctgtagtcctagctacttgggaggctgaggtgggaggatcacttgggcccgggaagtcgaggctgcagtaagccgtgatggcgccattacaccccagcctgggtgacagagtgagaccctgttccctccccagacccacccaaaaaaggagcaagcatctaggatgcaggctgaggggcctataaagggaaggggccacaggagtatctttctatgcaaatcaacaccaaatatatctggctcctactataaggcatggagctaggctccaagataactgcacaaggctgcagatggggaagtccgaggatgagttatctccctttttgagagtgctgagacattgtggagatttcaagtcatgactaggactgggtgtgtttcttattattcccatcacctcatcacacccagggaaacctgttggcatcccaatcaacaacatctctagggtgggttgtatcacttcaggctgggctgttggggagaaatagtcccacttgatgcatttctaggaattggctgatttggctgcaagacaatggcctcagaaggatgaatcactgggctagttctttctcatcaagtccactgagtcacattaagaaataagaataatgttagctgccttttcctgtcctttgcaagagctgctagaatactggacactctaactggtcaacccacgtaaagatttccaataacctaaactggagtggctcacaatgttacaatgagacaaaatggagagctgacacctcaactgtgaggtcagggctgtggacaggatcacacaagacaggccagatgtgctgttcactctcctgcccttacctctttttttttttttctccccaaacagtaacgttcccttctagacaatgtgatcaagtggacacacagtatgcttcaagaaaatttaggctggattcaagttcaaaatggtggattcctatcatttctcttatttgatgctaacaaggagccaagtagatatatcagaggaccacattattagcaagagatgtaaggaaaagaacgatccatgatgagcagggcaggcaggattcccagtgttatatagctaggctccatctcccctgaacatttggactaaaggaatagtctagactggatgagactctgcagtggaatggggtgaagttaattctggacagggaaacatagccctctccttaccccaaaaattatcgagatgattttgaatcatccagcttgggagttgggggtggggacaagtgattcctcagtgagctatattagaaaggtcagaacagaactgttgcatccaaatcagtgggggcaaatgaataaatgtaaaccagctggggtttttgtaggacatggagaaaatcaagggatgagcctctgccctgaaattaaagagaccttgtggaaattatgggatttaggattttcaaaatccatttccctacacttttaaaaggctttgaaatactttcacagcaaatggaatctattggaggcaatttagaattgaaaatcaagctatctttacctttcttcctgatttcataagcttttatcagaaatccttggaacttaaaaataataaaatacaaatcaaacacagatcgatagtaagtatttccaattcttctactacatcaccattttccattaatggttttatttcgaatgtttttttaagcctgcaaatttcaaaagcaatttaatttttttatctgtaatctgaaatatacatctaactagtaacagatgtgatcaactagctttggcttgactagctttgttgagatttatggtaggagttctttgtaacggattgtttttcacccatgttattcaatcatttggtttaataatttattacttttaacccattcagaaaactgcttttgatttgttttccctttaaacgaaacaaaacatgtttgtggtttcataaaaggaaacagctgagcccttgctccaacgagctggttgacaggaggcctaaaaaagtaagaagcagtcaattgtttgattgagtttctcctccctgactcctgctactggtgtgtgtgggggtgggggcagggggcgggtggaggccagaaaatgctgtgtaagaagacattggaagctatggaagtctatgggtgcctgctgtagccagttgatcaactaagtggacagcatgtcagtcttaacctgatcagtcttcctggtgctcagccaggtggttttgggatttctcactggattactctttttcctttttaaaatttttaatttagagatagggtcttactttgtcccccaggatggagtgtaatggcacaatcatagctcactgtaaccctgaactcctgggctcaagtgatcctcctgtcttagcctcccaagtagctaggactacaggcactcactaccatacttggctaatattttttcattaaatttttttttgtagagtcttattatgttgcccagcctggtttgaacccctggcctcgagtgatcctcctgcctcgacctcccaaagtgctgtgaggcatgagccactgcacctggattactcgtttctaaggatagtctcatatgctacacatttaaccagaatctgagtgtggggctaggaatatgtatctttaacgagagccccagggtaatctggggtgcattgaggtgtgagaattgctatttctaaggtatagataagagcttcagtgatgtttggcactgagtacctttgaatgttgggtcccctactaaaacacagacaatcactcattctgttaaagacccaagaaattttcccaaatgacctacaatccccagggataattgagaaaatacaagaggctgtttacaaaagggaccggactatgctcttttggctgcatttaaggaagtccaaagagtctcctggagtcacctgactatacccacagacttgatgctaagtgagccacaagtgaatatgggctattcctgggagaaagggtcctttcccagctccagccctgcaaagaccagggctgctgaagccttgttgtggaagtatacaaaagaaggatgccccttaccttgtccatgcttgtgtttgttattgatgacaatttgcacaatggttcctgatgcttgctgggaatccataagagctccccggtgacttctggccccaggaaagcgggacagacctccagcctgtcggcttggtggaggatcatagtgagagcggtggtaagaatgtctctgtaaaataacaagaacaaatttagtccaaaagccaccaatgagatcacagagattaagttatatactagaagtcattcaataattttgatttatagtggtgagctctgatttcagctgcatgcttacctacaccaatagaaatagggatgtggtcatgtacaagcagctgacatttttttcattaaaatttttttttaatgacaacttgccaaggtttatctctcttcttctaaaagataggactagatttacaggcaaacttctcagggagaaaagagccaaaaaggctaaagcgtccttcctgctgccaagactctcacatttcagtttaagagttaagacagtagtctgcacgcaaggcagaatgtgaatagaggctgcagaagaagtaagcagtcctgtgcaaatcagaaggagaaagagagagcttctagttggggagggcttgtgacctgggccacgaaggatgggtagacttttttacaggcagaagttaagtggaatagtccaggcagaggtttacaagttgagaaggtgaagaagagaacatcgagtccataaaagggaacagttgcagaataacattccaaaagtgggttgaagccagatcatggaagactttaaatgacaggctaaggggtgaagactttatttggtaagcaatagaggtgagggcatagaaggctttgagggatttttttttttaaagttagagaaataatgtaatcagaactgtttcaaagcattgaatcctgatcatgcatagggtgaactggataggaggaaaagatgagattcgagtatagtcttgataagatgtacttagactctaaagacaggtaatggcataagatcatacaatgcagtacaaataccctaggtattttataggtagaagaattgatagtacatgacagtattggcatgtaagctctacgaaatcaaggactttttgttcactgctatatctccagtgcctagattttagtgtcaggcatctagaaggtgttcatcaaatacttgttgagtgaacaaaactctggtacctaagaaaagcttagagtcttgtcatacaagtaatctttcagcaagggttcaacacacgtgatgaccagactattgtgctacccacccctctcccaggagctaaagtaggctgggggtacaagaagatgaaatgaatgaagaatggaaccttaaggcttaaagccaagtaagattaattgtattttataggcaattgttaggggtgaaggagggggaacccattaaaaaactctttcacaggcaattgaaaaggaaggtctttatattcagtgacagaaatagtgaggaaccttgggaagatagttatggggtcccctgaccatatcccataaaacactgtttaaagttatgggccacagacaggcatgttgcaaatttcactttgggaagtattattgccctcttggcaggaaggggccactggtaggggaaagggagagtaaacaggagctgaagtaagaggaccttttttagccttttgaaagacaatgttattctatctaagaagagcctatgttggtgcattgctatcaaaattcacacaaataaaaatttgcatcagtttgttttcatgcacatggataggattctcagttcaaatatttctcattcccacaatggctcatatgtccttttctgccataatcactcacattccacaaaggccattataggttgctctgtcctttttgaagtttggcaaagttttgccaaaggaacacatagaggacagtttggctggttggtgtcccactgatcctaaaaagaagcagttggactgggatagaattagagagggaaggttgttgacccaggataagctgcaagtacgagaagttctctgactcatgatggtgaacacaaaatgaaaagccattctttagcaccaacgtctcagacctgggacatataataatggtaggaaaatgatcatgatgaaaaaacaaaatcctcaagaattttgatcacaggccctattgtagaccagtcagtcccccagaacctaatcttgttgaagtcttttgttttacagacagagaaactgaggccaaggaggagaggcagtttactcatggtgataatgaagattgagtttttggagatggtaggagtgtaggagtagggggaagatgaatagaaggaggaagagaaggagaagaaggagaaagtggaagaaagaatgtccaatcaaactcagtggtctataaccatttgactaaaagctggtgcaaagagaagttctttcagatacaaaagttcattcagctacaatgttcacaaccacatataccacatactccactttggctatacactaaaatcacccggtgagctgtaaaaaatactcatacctgggtcccgctctgaggtatccttatgtaagtggtttgggggaaggcctgggcattaggattttatatactccccaagagactctggtttgaagccaaggttgggaatcactgacataaaggattttctgtttgggggctggagtgggtggtggtggtgtgtgattttgatttaagggtaatggttcttttagagttcctcccctaaacaaatgaaagagacttatgaggggccattctgaccttgtaactcagagcaaaggagaaaaaggttattaacgccctgaagttgtaagtgaaattggagcttatcttaaaaattagctgcaactagcctgcttgagagagcgggtcaaaaccagttagaaatgaccatatagctatgatcttttattttgctcagtattttggtattttttgatttacttacttgaaagactgaaaaatatttcaggctttagaggtggctctaaaacagttcttttccagtgttgaaaaatccccactattgtagaggacccccaagaatttcatgttctaaagtctaaaatataagagttttattggtgtagacaagaaaacatcagggtccagaaagggccctcatgtttgtgatactgtactatagattttcaagatgttaccatttggggaaactgggcaaagggaatatgggatctctctgtattttctgctacaactgcaagtgaatctatagttatctcaaaataaaaaaagtttaatttaaaaagcggcttcagaatatattctaatccatacagccattaaaacattgtatcttaatcactaccaacctaggactatctctggctggaagacacttaggccaatttccttcccaaaccattgttctgacagtacaaatgagacatggatttttatctgtttcatgtcgtttctatcccaaacgctttcactttttttaatggtaaatttcaacgtaatctacagggggcaaaaatcagggcttggctgttgtccaaaacaaaattatgcatgctttcatgttttggctttctagtctgcacctacttcttcctccccacataccacaccactccacacacacacacacacacacacacacacacacacacacacacacacacacacacacacacacacgcagacacactccccaccaatggcacgaggaccaattcatgagaaattacaacttagaaatcaaacaaaaactgtttcaggtttttacaaaggagtcatatttgaaccactggttcctcttcctgtgcacttcataaaacttgctaagccgatggttttcagaccacctggcaaaagaaaccagtcagctgtatttctgttgaacagaggttttgctggttcccggtaaataggaacagtttacgaaaaggacagtctcctggataagaaatctgttgttagggctgccttttcttcttgccctgaggaagttgggcctgcaaaggatattcagaagggattctcctattttctcattttaggctggtcaagagcaaacaacaaatttgaagagtttatctctgatttgagacaaattcctgtgcattaaaattaatgaggaaccccctccccactccaccatcacacacattttacgccacctcccacacccattcattcaatgtttatttattgggtgactactatgtgccaggtatatatttttccattactacagatgctatttattattcaaatcatatcccacaatatctatcccttttagaacaaagggaaatatttatttataataaagtgaaaccatatggccattttggtctaccaggcacaaatgtttgtttctaaagataggtcttgaactcctttgaaaatcaataactatttcaagggcccacattctgtacccgaccttttttgctacaggaagtactggattaagtccaggcctatcactaggcctgtcaatgaagctgaaagataagggctggaattgagggcagtgtaaaatgaagtcaagaagaaaggctaattcatggcattaccagcaagactgctaaggtggccatagtgcttagtgtgggggcctctcagggaataagtcacatagcttaaggtgactaaactctaaatttggtttagaatgacatctggttgacagccactaattcagccactctcaactacctaccacaataaaaaataggggctgagaaaaagaggaacagacaacacagaaaactgagactgacatcatctcctgtcaggctctggaaggaatctcacttactataaagcagatagagttgggtggagaaaatctttcctcagggtttatattaaccagcaaacagggaagcctaccctctcttgcaggatgctgattttttgagatgtccagagtactgttctccaaacccctttccccaattcttctgcaactattcagaaacagcagtgttcagaaaataatactgatagagagtaagacaaatagaaatggttccatctcactgctgaagctttgggttgggtgttggcaagctgggagcatgcaagttagaagtggcccatgtgatgaccaggaagcccagcctcagcagcactgtgatgtttgtatgagtcattctactgcatcccctatcaacatcttcctcacatgctcaatatcctcaggcttgccctgtaattccctggactcctgcctcatattcaatccttgctgagatttttctagggttttagaaaatcaaatatattttattacaaaactaattgatgcttataggaaaacatcaaattatacagaaaatataaagtaaaaagtcaaaatctacctttcctcctgcccacttctactcctttaagattagcacacctgacatgttggtatgtgaccttccagattggtttatatgcatttatatacatgcacatacaatttttacataaagaagtgatagtgtacaatttcattctgcaccttgttttgttacttaacatatcttggagctcaattcactttactacatttagatgtaccgtattcttttaacaactgcacagtgtcccattaattggatgtacacaccaagtccctagtagacatttaggttgtctccatttgttttgtttttatgaaaacaacaacgcagtgaatgtccttgcatactttttttgtacaaggatgtgatgaacacctatttatgtgcaatggtcaccactgtgcattttgtatgatagattctttgaatcggaacatctccttttcagattttaagaaatttgtagtgtaaagcttcttagacatatatttttagagaggaatgctattttataaattccttcaaaatacaaaagaacaaaagatgctattacttacatagacagatgcctacttgtgaggcttattctgagattagtgcagagaacagaagggagacatcaccaggctgaagagaggagaatccagactgctacctttcctcttttccaactgtatgactgagagcctaaggcttgggaaagagtttatgtggacatgtctgaagtacctaccaaatcccaccaaaaagatggttgtatcctacaaccctacagaaggtcctcactgttgaggataggagtgacctagcttccttagagaacacataaagacttggcaagtcatcctgaaagagtaccaacttctgacctagacaaagggctggggctatggtttctttgtgcacatttcctgcctccagttaccaattttacagtgtacttaaatggtttccagttggtgatgacattaaaaactttgagaaaagggaagaaaaatggtgttagaaatcgggccttttttttggatttgctagaatagtagccacgaggagaggaaagcttggcctgatgctgtggagtgttgaattatttgagctattcacacttactgcttctctgttggcaggttgccggaagatatcaccatcagaatgttcccatgacagttctccatctcctgtttattaaaaagaaataaggagaaaatcatacattcataaaagggaaagttatcacccttgtgacccagcaacatttttggtactatgatcccaaagttcttgaagtgtttttgcttttgtggctgtccttcaaaaagcggctgtgaaagatttctctgggtgtgcctcatttttcaaaacaactctgaagaaagttgccactttctaaatagatgtcctagcaacattatgcagaatttggaaaataaaaggaaaataatcactttccacctaatttaaccatcactgtcacttttgctcattttacttcgtgacagttaagtgttttgcaggtcataattcacttctgtttaaactaccattaaaataatgagttttgaggatttgatctgtcataatttcttatgacacacctttctctaggtctacatgacccactctttggacagagaactccttatcattatcttctaaagtaactgcttataggaagaatattctactttcagcctctagagcaacaaacacacaagagctgtggatatacctcaactgattaaaaaacaagaggatcatttccaagaatattgcccttgtgttacctctgaccaagcaagcgaatgggaagagccttgtcttagagatgtttgcatcacttgaaatgagtactatttaaattatatatatggctgaagataaacctaatattcaacatatattttataagataaccagaaacacaaaaaagtgtaagtactaagaattttctattctgattactctctcaagccttcataagagtaacacgccgggtgcagtgggtcatgcctttaatcccagcactctgggaggccgaagtaggcagatcacttgagctcaggagtttgagaccagcctgggcaacacagggagaccctgtctctacagaaaatacgaaaactagctgggcatggtggtgtgcacctgtagtcccagctacttgggaggctgaggtagaagaactgcttgagcttggcaggtggaggttgcagtgagccgagatgatgctactgcattccagcctgggcaacagagccagaccctgtcacacacacacacaaaaagagtaacatgttaccagttcaagcatgtagtagtagtgttaggggaaattaggtagtatcataggcttttaagggcttgaaaacgacctaaaaattagtttgatagcaatattagaatcaggcagtgacttataacagagtatgactgtaaatcttcataattcaaatattatctgatgaaaaataatgaattttgaggatttaactatttgctaggttaatcttcataaaacagtaaaacaccactttgattgtataatcgtgtcattccctgatcaaaaccctcagtgggttcccaaccaagactctctacaatcaccccctactgcctacccaatgatctcagctactcttcaatgggaaccctttgagctacttgctcttcactgaatactggactcccattgttgcttccgtgctgtagctcatgttattcttcttctgaaattaccttccatctcccacaccccatagctcccccatgcctgtgaaaaccatttaagttttctctcctctgcaaagtcttcttcaaacactcttacatatttctgattgcctaaaagactaagcatcctgaagttttagaagtatagaggacgtcaagcataactttgtccaactgctccatttaacagatgaagaaaccatggctgagaggggaagtagccattcagagtctaataatgagtttgtgagaattaacaccaaaactctaggttacctggctcccaaataggtatgtccattccataagaaaagggttcattacctgtgttactatatcaccatcatctataacagtgcctgatacatagtagtcgctcaataaatacttgtcaaatgatggaactgggaggccttctctgaccaccctatctatagttccaacccccatctgatatttatgcctgctctttgctttttctccttagcagttattactatcttatatttcttatattttatttattttgtttattgtctgctttcccatattagaatccccccatgacagcagggatttttgtctattgtgtttactgatgtaactccagcatctggggcagtgctgggcacatagtacttattcaatatttgtcgaatcaataaatactaaaacactgtacaatatttattactgttaaatgttttctgggccttccttgtctccctagagagtctgtaaattccttggaatgagagattatgtcttagaccacctctgtatctcctagaccactgcttctcaaaatgtgcttcctggactagcagtatcagcattacctggaaacttgttagaaatgccaaatttcagatcccaacccatacctactaagtcagaaactcaggatgggggctggtgatcctgggttttgacaagccttccaggggattctgatggatgcaggagtttgtgaataaccaggctggagcacttagcatattgctgcgtacacatcaggtgctcaatatatgtattgaattgaactgcagtaaaacatacagaattaagtgcttggtcaatagtatatatactcttttctgcctgttttattccatgtctgagtaaagattgtagactgcaagctgaactctgtggaaaccctgactgactactgtaaaacaaagatgatttcaactatgtttataactagaaaattatgcccaagagtcagttaacatgctttgaacacttcttgggtgaagagcctgatactacagcagaaagaggagaaaatcaggctgggctcttgccctcaggatatttacacccaggttggaggtgatgggaaatcaatataggaaacagcctaaaaacacacaaaaaaagcaaatacaaatgaaatacacatgcttaggagacactgaatgggatgagtgagcagtcagatgtaatcgtagaaagcttcctgaaagaaccattaagtcacatttttagaagtagatactgcacagcataaaccgacagtgataagggcagagagtacctcaaccaaagggagtgacattggcaaaggaccagagctttgtaaacagcaagtcacatactggagacagcaagcaaggtgtggcttgagtagaaacttcagatatgaaaacaagagaaattacgctggtaattgaacttgtagagagaaagggaggagagggagagcgaaggagggagggagaatgacagtggggtgtgttgttgaggtaaataggggtagtaaataatgtgctactatttgatagcacaatagggtgactatagtcaataataacttacttgtacattttaaaataacttaaagagtgtaattggatcatttgtaacttaaaagataaatgcttgaggggatcgataccctattctccatgatgtgttcatttcatattgcatgcctgtatcaaaacatatcatgtacctcataaatatatatgcctattatgtacccacacaattttaagaaaataattaaattgtaaaaagtaaacagtaaaaattcaaaaaaatataaaattttgtaaaaggctgaagaattcacatttgattatgttgccaatttttctgtaggggttcctatgataaaactgatatttgtggaagcctattctggcaatggggtatagactagttggggagtaactcgaatgcaggaggccatacaggaagctgctatagtaatatgtaataggccatgagcatctgtgcaataacacacaagaaggattgaatgagactcctacagatgaaaagaaactgataagaccctgaaggaagatttgatgatggggaaggaaggcaaaggggaaatcagtatctgacaactcttgggttgcaaatctggagagctggggacagtgattgagcagggatgagcttagatttacttgtcccccttgtttcagtgggcagtagtgggtctgggccaaataaaatatgggactagagagacgaatagaaaccagtaaagatttaccagcaaatggcaaaacaaaatgtaaaagctatataatgtggtttcaagcctaatttaagtagtcaaaagggagaaaacaagttgcaaaagaaaaatgatagactagttctcttcatcaaatgtccttttaaaatgtagatttaatgattggtattgacataaaatgtttacttagctggccttctgaaaagttcagtttatttaatttataccctagagtttttaaaaggattttaattaaagagtgtcattaaatacttatagtccagtcagaatctcaaagcattatagaagcacatagcgcctcttacaaatgagcagagaggtaagatggaaaatcaaggaggcaagtcactatcaggcataggagaagaatactaataccctgtaacacaaatcagatgagtgtgtcgtgatgtgtatttgatgagcatttgcagacaagaatgcatacctaaatttcagcacttcattaaaaagtaatggagactatatatatatatatatatatatacacacacacatatatatatacacacatatatatacacatatatatatatacacacacacatatatatatacacacagacacatatatataccatctgatctttgacaaacctgacaaaaacaagtaatgggggaatactaaacctgtattacatatatatatcatctatatcatactaaaactgtatgatatatatatatatatcatctatatcatactaaaactgtatgttatatatatcatacaggttttagtattcctagtctaaaatgctccagaagtttttgagtgctgatgatgctcaaaggaaattctcactggagcatttttggatttggggtttttggattagagatgctcaactggtaagtacaatgcaaatattccaaaatccaaaaacatcggaaatctgaaatacttccagtcccaagcattttggacaagggatatttaacctgtatataaatacacacatatatgtatatatacactatatttatatataagatatactatgtacattataaattatatacattaaatatataaatactaggaactgttagcatttctggtgcctctgagctttcaaagtcatcaaaattgcattctctaaacttcaatgttctattaagtctattaagtagctgctaaacgttttaacatttgaattattctatttaatttaacccataattaaactggaattatcttcttagatgttgacattttataaggctataagtggttctctagacctgggtacagtctgtctggatagctgaaaataggtatgtccatttgcaaccttagatatcatactttgaaaaaaagtaggcaccaataccctaaaaaacctgtttctttgctctttttgtctgatcactggaaagattatctgaatgagatggaggctttttcattcagccaagtctttttgtaaaaaacaaaacaaaacaaaaaacagagattctaatggattcagatggattctaattaattttgagaagcaacaagatataattttaaccaattttttgaactgaaataaaaacaagtgtagtgtactgtatgtcaaacaatattcatttaaccctaaaagccacatgtattgtttattcaaacctcagtcatactctctctgagtggtaccctatgaagctgtaatgggttggctttctagtagtgggagaaagggagaacaagtatttgaaaaatggccaaaagctaggctgaaattcagactgtttataactcctgtggcttccattaatctctggtggcttgagcaggtcagagaggtaaactgtcctctcaaaaggactaagtgtacaatgagattccgagatacccatgaagataagcctcagagagcaaaactatgccagcatgtggccacttttgaaccatacatcataaatagggtagccatagagcagatttatctcagacaactcagttttattgcctgtttttctggcaggcataattattaagattgcagctcttgctttcaaaatgtgcctcggttgagatagtaaattacatagtcactctaatcataaggcaaagggacatgagacaaatccctgagacaggggaaatgttctctgtattttttgaggcagaagttgaaatgagcagaatcagggcaaagtggaagagagcagggaggaataaacccattgtgaagtctctccttaccatgagctgggttccatgggggagcactttaatgccagtgctccataccgaagctagagatgaagaagtgagtagaagcagatgactttagggagcctctgccaaacatctaattctataaattctgctgggagggagcaagtgtgctgaaatttgagagaagctttaaaaggaaactagtataaggattctccactgataggcatttgagcttccaatgatgatatacaacaatacaagaaatctgcaagttttataaagcacaaaattagaaaaaactactttaaatttcaaatggaaccaaaaaagagcccatatagccaggacaatcctaagcaaaaggaacaaagctggaggcatcacactatctgacttcaaactatactacaaggctacagtaaccaaaacagcatggtactggtaccaaaacagatatatagaccaatggaacagaacagaggcctcagaaataatgccacttatctgtaaccatctgatctttgacaaacctgagaaaaacaagcaatggaggaaaagattccctatttaataaatggtgttgggaaaacctggctagccatatgcagaaaaatgaaactggaccccttccttacacctcatgcaagaattaactcaagatggattaaaggcttaaacgtaagacctaaaaccataaaaaccctagaagaaaacctaggcaacaccattcagggcataggcatgggcaaagactccatgactaaaacaccaaaagcaatggcaacaaaagccaaactagacaaatgggatctaattaaactaacgagcttcttcacagcaaaagaaactatcatcagagtgcacaggcaacctacagaatgggagaaaatttgtgcaatctatctatctgacaaagagctaatatccagaacctacaaagaacttaaacaaatttacaagaaaaaaaaaccaaccccatcaaaaagtgagcaaaggatatgaacagacacttctcaaaagaagacatttatatggcccacaaacatatgaaaaagagctcatcatcactggtcattagagaagtgcaaatcaaaaccacaatgagataccatctcatgccagttagaatggtgatccttaaaaagtcaggaaacaacagatgctggaaaggatgagaaattggaacacttttacactcttggtgggagtgtaaattagttcaaccattgtggaagacagtgcggtgatttctcaaggatctagaaccagaaataccatttgacctagcaatcccattactgagtatatacccaaaggattataaatcatgctactataaagacacatgcaccggtatgtttattgcagcaccattcacaatagcaagacttggaaccaacccaaatgcccatcaatgatagatgggataaagaaaatgtgacacatatacaccatggaatactatacagccataaaaaggatcagacagttattttcttaaaaaatacttctttgtcaaatgaagtactttattgtttgggctgtcaatataagatcttagtatttttaacaaaatagctccttgagaaataccaaaacacacacaacggggggaattcctgccaacagtagcaagccaaatctgaagaagagtacaaaattatttgtccagaaaaatcataaatacttactttttaaaaagtgcattgtgagaatgcatgcgtttccaggaggaaatcagaagagagtgaatacagaaactacgagctggatggtacccaccatccacactctgctctttcaatggagatgtggctaaacagatccaagtttatggtgagaaacagaatctttgcttctcagagcagtcccaatgcatctgctggattgttaccatatctggcccctggaaagatggtcatcacacagtctgttcctcccggtagcctcagaaataagagttcccaaatttgctttgcttccccaagttgagaggcagtataatataatggctaagagaacagattggagccaaacagtttggattcaaattctggctctgctccttcctacttatgtgactttgggcaaatgaattaacttctctgtgcctcagtttccttattgctaaaatggagacaataatgcctaccttatagggttgtgaagattaaatgaattagtatatgcaaagcatttagaattgtgcttggcacactgtgtcagctaaatgttagctgctattcctaatcccctttcttcccattctttgcctccacttctttttcctccttctcctcaagggtagcttacacatgggggaatacccggcttaagggactcccacaagtgtgctgtgtatttaacaaagaaaagggcttggatcaaacaaacaaacaaacaaacaagcaaacaaagcctagcaaagataactgcatgcctgcacattgaaaaggaatcatttcatctctaaatcattggaagacagggtcctggagatatttttaaaaatggctagagagatttcttcggctcacaccttctaaactggcttagaatttctcataattatgctagtcctctatttccaattttttaaaaaagagtttgcatcttaattaaaatctcttttctctcttggctaaaaatgaggcttgacaggaaagatatctgcttcattggtaggagtacaatttacaaagttataaagtgaagtcttaaaaatccaagtgcccactgagcgcggtgactcatgcctgtaatctcagcactttgggaggctgaggcgggtagatcatctgaggtaaggagtttgagaccagcctagacaacatcgggaaaccccgtctctactaaaaatacaaaagttagccagatgtggtgagcgcctgtagtctgagctacttgggaggctgaggcgggaggatcacttgaacccaggaggcagaggttgcagtgagctgaggtcatgccactgcactccagcctgggcaacagagactctgtcttaaaaaaaaaaatccaagtatccaaataaagtagagttctgtgctaccacatccatgaactgaaaataaaaagcaggacagagaggagaaactcaatgacctacccatgctgactgtctggtcaacctgaaaatgaaaagcagtcagttgtatacactgctcttccttctcatgtatcttttacctctgtttgcactgtcagtcaacaaaccaggttgatttctataaattgttggagtctaagctcataaagactattataatgtgagtaatgggcacatccaatggtgtttctgggcagctatggaattccttgaaggagttagaaagaataaggttgaagaaagagtggctttaaccacccatgaagaaataattgctctgaaatgcttcactgggaattccttatttttattatagaaacagattcatatacacacaaaaaagtcctccaatcccagaaacagaatggggtattactgaccctgacaggacaacccagatggccgattaggaatcagtgctattaatttgttaaactcaatgtgaaagtcaacgctgtcccatccactgtctgaatgactttctattcaagaagaaatattctagacgtaagaaacatgccaagaaggaacatgatgaccttagagggacggggtcctgggacagtcagcaagtacgtggggatgaattttgagcacaagagatggagagaaagcaaaaacaatctggaacatttccatggaaggagatccagttgggatttagatgaggagaggtaggtgaggatggcaaatctctaaaatggtcccatacacatgaacataaatgattcacttttgaaaaggtattattaatgacagcgagactcttctatagctatgaaaatatcagagtatatcaatacacagtcgtccctcagtatctatgcggaattggttccacgaccccccacagatgccaaaatccacagatgctcaagtccctgataaaaaatggcatagtgtttgcatataacttacacacatactcccatatactttaaataatctctagattacttataaaacttaatacaatgtaaatgctatgtaaatagtcattttactatattggtttctaaaatttgtaatttttagattgttgtactgttacttttaacgtgtttttaaaaattattttctatctgcagttggttgaatccatggatgtgcaaccagtgaatatagagggcggactgtattttgaagtttaggtgagaatgtataaactcaaaaattactgagttaattttaattttttttattttattgtggtaaggacacttaacgagatttacccttttaacaaacttaagtatacaatactatatggttaactatacacacacaatgttgtactgcagatctttagaacttgttcaccttggagggggaagtggggagctgctaatcaacaggcataaggtttcagttatacaagatgaattttcattttttaaagtagtgtttctcattaacaatgtttctttcctatcatcatgaccaggagatggtggtgtttctgcagaaaatgtgggccaaaacataaacaacttgagactaatttgtgagaatctatatttggatttgctgttattttcttcagttttctttgattttgaaaactttgaaaaactggtcaatttttatgatgtttaaaatcaatgaagtatctcacataccacttccctgaagatcccggattctagctgagatgggatctgaggtgcaattttgctgctctttcggaaagagaaatcaagtgtcttaggtaaaatggcacttatcttgaacactgactaatatacttttaaacaattgcttccagtttcatttaccttgaaggagttagcagaaatatcaaaatttcataaaaagtgacttccattttctccctgggctcatttgagatatgttggatgaacgggcttgggttgagcaaattgtaagttccaccatttctcctgcctccctactgcatctgtacttggaatgctgtcaagagctttttgtgactgtggctctttttgtattaaataaaccagtcagcatgatatatgattaatattatgttatgccaggggaaacaggaagacacaaagcaataacagtgcaagaatatatttctgaatgcttatttttgaaccagattaagtcctgaaggtggtcaaagaagatcaatgagaactagagtgattgggcaaaactattagaagaggtgcaacttcaactggacccttgaaagatgagtaggatgcgaataggtagaagaggagcgggggctattccaagcttgtgaaaaataacagtttaagtgaagcacataacaggagggaaggtaggaagaaacatagcatgtaacagaacaaagagatcagccagccagcctaaaggagatgtgtgtgttggtgtcagagaaatgaggctggaaagtaggttaaggaaggatcagactgtttcacagagggtctttaaaaacaagctgaaaaattcagattggataatatggtaagaaatggtagcatgatcaagtagtttctcaaaaagaaaattcctaggctgggctcatgtctgtaatcccagcactttgggaggccgaggcaggagaatcatttgtgaccaggagtttgagaccaacctgggcaacatagcgagaccatgtctctaaaaaaaaaaaaaaattggttgggcacggtggtgcacgcctgtagtcccagctactcaggaggctgagacagaagggtagcttgtagtttgaggctgcagtgagctataattgtgccagtgcactacagcctggatgacagagtgagaccctgtctctgaaaaacaggaaacagccaaaagaaagaagagtaaaagaaaattcctagattagggtattatgtagcatgtataatgtagaaagaacattatagacccctacagcctggggagggactggattcatggtgggatcagaagttggggatcccaggagtgtatgactgccaccagttatctccctaatttttgagccaatctttcctcaccctggagtgcagagaacaaggagggatgtggtgcgagttgaggctggagagacagtctcagaagtcttccttcacctccctgactaggtcaacccctctcaattattggcttttataacaactttcctttgtggcatgtggcacagttgcaattttataattacttatatcatgacgtggtgtctatcttccctactaaaactccatgaaggcaggttccatgtccatttttgttcaccattgtatctctagcactggtgcagtgccaggctcttagtgattgcttaacaatgtttgctgaatgaaagaaagtagacatttacactcaagacactttaagcctagagtgagagaagggtaagttaaggccttgatgggaaaacatgggcagtgtggtaagatactctcttaggagtatctgcacacaacaatgtgccatgcatgtcccgtcttcccctttactcccctgtactaggagatatccttgtcatactcctatgaatgggtcccaacaggtagtatagaagttaagagcttgaaactctgaagccagactgaccaggttaaaattctagctctgccacttactaccatttgtccttggacaaatcactcaacttttctgccttagcttccgcatctgtagaatggggatataaatagttgctactatttttgccaggatcaaatgagctattccacacataagtgcttagaacattgtctggcacattgtacgtgctacatttagacaccatttactaaatgcatacttggctttcaatacagttaatacctaccccaaatacctttcccttgtctagagtccaagtacatagccttccctgttgttttggcaagatgagcaggggacaggaagtggaaatgatcaatggtggagggaagctgggtgtgggtttgggtttgaagcctgccttcccagaatgtggcagtagtataatctctgaagagatttaaaaaaaaaaaaacttttattttaggtttgaggatacctatgaaagtctgttacataggtaaactcctgtcatgagggtttgttgtacagattctttcctgcttctctccctcctctcaccctccatcctcaagaagaccccagtgtctgttacttccttctttgtgttcgtaagttctcatcatttagctcccacttataagtgagaacatgcagtatttggggaaaaaaaaagacacatgcacgcaaatgttcattgcagcagtattcacaattctgaagacacagaatcaacctaaatgcccatcaatgacagactggataaagaaaatgtggtatatatacaccatggaatactatgcagccataaaaatgaatgagagcatgtcttttgcaggaagatagatggagttggaggctatcatccttagcaaactaacacaggatctgaagagattttttcttctgataaaatttcccttaaggttccagtggctgtttgcactatgcttccagtcctaatgaggtttgctgaagtgctagcaatgacacacattctgccaacgctctccttgactgtcccagcctcaaagacacgtctagccaatgaaggctaggtctgagattcaatccgcgtctaggattgctgtctgacccaggaagaaagacacacattagtgtttggggacagtgcagagaggctatttcaatgccctttatatgaaggtttgcaagttcagcagtcaaaagattatttcttcttcagtatttggcctgcagtcagggtggccagcataggggagaggtttctgggttccctgctgtatgagtaatacgcttatataagatacagtattgtaaaaacgtcatttccatgggaaaaaataactaggtgcttcaaaagttagaacttcaaaggagtttcaaccacattatatacagctgaaagatgcaaagaaactggaggcaatgaaagaacaacaatttttacaaaagtgtaggatttagtctttataaaggaagatgaaagaaaattgtgcatttaggctggatgagaggttgcaaagaaagaacttaatgaattatcaagtatataaagggacaatacatggccagtaataactagcttttatctgttgcttctgaggacataaaaaagaaaagaaatttaaattgtaacgatagaacagtacataaaatagctagttccaggatctgttaccacaagaagaactagaactaaagttctgtctatggagattacattttaaaaaggcaaaactatcaaagatagaggagaaggtgcaatgatacttaactcgggggtaataaatatagtaattactatataaaatatagtaattgttacttataaaccaataactctgtattaggccatctcctagcactctacgccatctcagttaatctacacaacccatttcatacgtagtaagcataatctccatttttacacctgagaaaaccaaggttttgagtggttaaatagtttgtccaagataacagcactcgtaggtggtagccctgcaatgtcaaatctatgaccttctggcttcagagcctctgtcctttgcattataccgtattgcccctaggttgcagtgacatgtcttttcactgttgcctttcctttctattatcaattgttttccagtttagatttcacatatccttttccccaaagggaataatatcagcctaacagctggattatagtgaccaactggttatattagcaaccacatgtacacctctgctcagtatggactttcttttgagccacactgaaattaagttggggccaagacaagaaaggaggtgaggaacaaaatatccatctttcttgactgaaatgtaacagctacactgtagtacagacatatacacacacacattgtgagaaacatgtatggaaagatccagggccttaccaaagcataaatcaaattaggctgtaactaaatccatattgacttatgagggctgatgcaaatagcatattaaaagggatgagcatacactggtagtccaaacaagctcagtccttccaaaaagcaatgttaactgtagtttcctaaagtggtataggggaagaaaacaacttggagatcaggaatgagaccaagtaatttcctattgacgaggaatcaatgtatagtcaacaccatctaccacagtcaatcagtaattcagggggaaaaatgcacaacaaccatattcttttttggtagcacctaattcaaatcctgactaaatttctagtaatcattccaatctagtgtgcattcatttaaagagcacctactctgcctggcacagtgggagaaataaagataaatgaaaaagagtatctgtcttgaagagcttatgcattaatagggatgataatacatgggcacaaataataaaaaacagaagttgacaaggtgataaatgctccagaagaagcacaggttaagtgctgaggagtcctagagtagagacaggtttacttctagtttgcaggatttaaaaacatttcatggaagaagtggcaattaggctggattttgaaggataagcaggatttatgggtggagaaattagggatggaagtgggaaggcagaaaagaaaggccttccaactactacttatcaaaatgcgacctgaggacggcctgcaatagaatctgaggaagctgcatttgtgctaggtcttgaaggactagcaggacttccacaggcagggatggagaaaaagaattttccagaaagaggaaacattttctccatccaacctgtacatgtgcagttgttacttagacagcccttttgtctccttttcatcccagttccttatcatgaaatggccaccactcattcatctcaaattggttgccatatggtcggacttagatgctttaaccaatcaggaactgaaattggttgcttttccactggttcactcaggtttcagaattttaatgtgctcaatttaagtgcactaaactcagattttttaaaacaaatccttggttccaggttatctacatggtctcaggaatggtttctcaaagtgacagtccacagaccaccattctgcatcagaatgaacgatggggtctgcttaaatgcagattcctgggtcccactccaaggccactaaatcagaatctctgcaggtgtgatccaggaatctgaacttcaacaagttctctgagcaattctgaagcacactaaagtgtgagaaacactgacaggaagaggactgagcaaaggtaaaaaggtaagagagcacaggaacaatgcagtgggccctgaggtgcatgaatggaagaatattgacctataaaggtaacttgaggttagaccatgaaaggccttcactatcagagtcgggggttgacatgtatttgagtggcgacagggagtcatccctttcagtggcagaacactgtggttagagcctgaaatatggagccaggctgccaggattcaaatcttagctcctcaactcactagctacctgaccttggataagattcttaaccgctctctgcctcagtttcctcatccataaaacagggagaacaatagtactcctcacatagggttgtcatgagattaagtgagttcatatctgtaaaatgcttagttagaactgggactgacatatagtaagtccaaatacatgttggcataaaaatttttgaacaggggtgtaacacggtgatggattgctttttggaagattaaaatggcagtaatgtatagaagtcacctacacatcccccaccagcaaatcctataatttttttcctctaactcagtggttcacaaccttagctgcatattggaatcacatcctcctccttctgatctggtataaatctaccaaggtaattccaatatgcacccatagttgagaaccacggctccaaatgtatttcaaatttgtccacttttaattattgggtcctcagtatatacaagacactgtgccaggtccttctcttatattatctcattgaaatctcacaaacatcttgaaggtaggagctaacattatcctcactttaaagattggtagaaaggttgaataaggtcattcaactacaaagtagcaaggctgggattagaaccaaggcagtttggctccaaaggctccactctgaaccactactgtgttctcagtccaagcaccctttttctcacactggaaagagtactaccctaaccatcttgctagtctctccacttgcattattgcctccctccagtctagtctggaaataatagccagtgagatcttttaatatgttaattggatcacttcatactctttctcacaaccttccaatagcttcccaatgtattaaaaatggaaatccaaaatccttcccatggccttcagaatcctgcatggtctaattcctagttacctcttcagcctcatcccatgtcagtttcaaccacaatcactacatttcagctacactggtccttaggctctttgaatgctttaagctcttccctgcctggggcctttgaactttcttttctctctacttagaatgttcttctttgggatctttgcatgggtgacttctttttatctttcaggtctcagcttaaatgtcaccttctcagagaggccttcctgacaactcaacctaaataaactacttatttttaatctcagtcctatgtttattttctgcatagtacttgcattatctgtatttccacgtttgcttattatttgtcttttctggtgagttccataagagcaaagaacatatcttggctgctatgtatgctatatatattgttgtgtaggttgtgtgctgcaaaaggatgccacagctacaaaggtgctttccctgggattttctgaaaaatggcaataaagtatcttatgtaagggaatcctttttgtaactcacataaagatgccatatggtctagcaccaccctatatatctactgtatttatcaatataaataccccaattctagcacaatgctgagcatacagtagatggtcaaaaaatatgttgactggatagaaggaaaaaggacaaaataaggatattgccagtgggaaagtgggaaaagggagagatacagataactgctgaaagatttggtaatctgagaagaggtaacaaaggagaaattaaaggggattacacttgatcccaggaacctagcgaaaaaactggtgccattataaaaaaaataaaacctaaagaaaaaaagactaatgtgagaagacaattcaattttgaatataatttgagaaaatgctttctgttttgcttttattgagtttgtcaccatcttattatggggtttaaaaagtatacctaaatttgccctgcacagtcttcaaaatggccacatcaattccttgcaaggtccattcttccttctaaggctatgaatgaaaatagtctgtgttttatgatacaataatttaagggccaagctagaagggattaaggatggagaaataaatatattcactttcacatttgatgactctttcccatcctcccctgaagcacagcactccatcctgtagttttttttttttttttaaaggctgtggcctttaaaatcaatgctttatttatttttccctttgttaattaaaccacctttaaaaactaaggctaccataaaaattacctttccctaggacattagacaggtattttcctcctttctaaattctactacacaggatagcagcacccaggggtcttgggatataacacacctacctctgcatacccggcagcaggaatctggaacagagactgggaaggcacaggttaatttggggcaagtcttgagaccacaatacacgtttccctcctgccaaggagaaacagaattaagattagaagcatctaggataagtgtaaaggcttcacttaatacctgaaatagagcagggactcaaaacacggcatgtccttccccccagctctcccatcgtcagttctcggtacttcctacattttattacgcattattttttttctcctacaattcctccatgccagagactaagccacagaaaagttagcaatcctagtcgagcatcatggtctaaggtggtacaaagtagtctgtcagggatgccatgagcctctgaaccatgaattatagtcttgtttctttcttctctgttcatggtacccttggtcccccagctggattgggggtttaaaggaatgaagatttatttcatagcttccatttgtaatattcactagactctcccttccaaaccaaaggaacaagctctctggggtaatacaaaactatacaagatgatctgatggccacagctcagtctagcacaaggcaagggagaggataaaatttacttgctggttacatctgtctttgcaataatcctgatttcctaaatttctatctttcaaatgttattccttaaaccttgttcttagttcttagaagcacattcttttggggctagaatgattcctggaaggccattaagaaagcaaggccacacgaaaattctcctaaactactgagatactatattcttactaaaagtcctaaagggaagagattctatagcttcccttgacaatccagtgcttaatgccacttgcaggcagaaaagttgttactacatctaacttcattccttcctgcttcagtttaaacactcattttactccattttctagttctattgattatattctccggactgcatattagataagatgtaattagtatacgttgtttgtaaagtaaatgcagttcttctgacaagtaatgtcctggtagtcatcatgaccaagcatttatagagagttttctcattgcagggcactaggaattaactggttagtaaaatacttcagatatgggaactaacagacaactcattttcttgttaattggagtgagtggccctagatagtcaaagtgacttttccacccatagcattcccaaagcttcaaataattgtgagtccttcagatggaggctttggtggtataattattatgaaaaggagcgccgatcaacacaaacagctcacctttgcccatttaagcagtcctacagctttaagactgggatatgattgggcctgagcccttcaacagagttgttcagggtgggtgaagatcagggagtttggattgtcaaggaggcttatgatttaatgcaagtcatgttttattcaaacaccttacagtgcaggcacaaatgaaagtacaagtacagaggaagctcttgtatttgagtagggcctagcaggaatgttaagatgtagggtcttaccgaacagctgcactgggtgcattgattgggttgccgattctgaaagagcccttcagctacgaacagctctccatgttggtaagttgtcccattgtactcgcaagacttgctggtcaccttattgttcactgggggtaaggagtcttctagaacagggtggagaaaaaccacactgagtattggcatcattgacaagaatttcataaatcccaacagcagacggggctgtactacatagagggagttttaagacagtccccgctccagtgaccaatgattttgaataatgttaaaacagccagacaagtacagcagctgacattatgatctatccatccatccatccatccatccgtccatccatccatccatccattcttttatttgttgaccatttactgagcacctactatgtgccaggaattgtaatatgtgttagagagggatcagagaacatggacaaggtccctgcctagatggagctaatattcctagatgaataagatattatctttcctgaaaggaaggagtccatgctatctcatttaatcttttcccccagttgcttcagaaggggacccatctattatactgccctggtaactttattccctcccacatttatttatttagagactgagtctcactctgttgcccaggctggagtgcatggtgcgagctctgctcactgcaacctctgcctcctgggttcaagcaattctcgtgcctcagcctcccaagtagctgggactacaggcgcctgccaccacgcctggctattttttttttttaagtagagatggggtttcaccatgttgaccaggctgctctcaaactcctgacctcaattgatccgcctgccccatcttcccaaagtgctgggattacaggcgtgagccatggcgcccggccaccgcctacattttaaatcacttttgtgcttatctgtttgttccagcctctgtggttttgcttttttttaatccctccaccgagactgcccactccctgactcttttccacccattgaggtcctatctgatcttgaaggttcagcttatgccgcctttcctccacgaagcattctctaaataactccagccacaatctggatctctcaaggcatctaatgtctgaagcacacaatatgacatttgaatattattgaaactcatatttgtgaattatagtaacccagcagaccatttacaaagagatttcacatatattattacaatggagcttcataacaaccctgtgaatcaagtagggtaaattcttaccttcattttcatttgagggaaataggattgctgaggttatgtgaattatttgaagtcacaaagctagtgagtggtgaaaaaaggaattgaaaccaacaaaagatacaaccagagcttggaaagtgcctgccataagacagtggaaggagagaaatcaggggagctgtgtgtttcattagggagaggcttagagagttgaaccatcctttcttttccatcagtcaaaactgtaatgaatatgagtctattttgtggtgggtaagttatacctcaatacaactgtttaaaaaaaaacagaatgggccaggcgcggtggctcatgcctgtaatcccagcactttgggaggccgaggcgggcggatcacgaggtcaggagattgagaccatcctggctaacacagtgaaaccccgtctctactaaaaaatacaaaaaattagccaggcatggtggcgagtgcctgcagtcccagctaatcgggaggctgaggcaggagaatggcgtgaactcgggagacagagcttgcagtgagccgtgatcacgccactgcactccagcctgggcgacagagcgagactccatctcaaaaaacaaacaaacagacaaacaaacaaacaagcaaaaagaatgaaattattctcagtatgtagtgaaaatgataaggctaacaataataacatccataataataataataatacacgaatagataccatttatcaagccctagctatgtgccaggcaggaatgagtgcttttacatacataatctcattggctcttactaataatgttctgatgtagacatgattatgcccattttgcagatgaagaaactaaggcttaagagattgacttgcccaaggtgacacaacttgcaagtggcagcactaagatataacttgatgtctgactgattctagaaccttccctcataaccactatcaaaaaaagtgccaatcacttcaaacctataataaggaagggaccatttaattaaaaaccaaaacccaaaccactagaacatgaaggctatgctgtccctaatgttgtggcctaaaatacccagaaaacagacaatgcacttcttttggcttcagcgatttgggtaactaactcaattctatactttgctatataagtcgatctaacatcaatttctgagtaattcactctcagggtgttaactacttattaatgaccctttagaggatataaagaaagttccttacttttgccttataaagacagccttagctcctagaaagagtttaactcatactaattaactctgtctgggctaagaggccctgcccctgcccacaagcgtatacaatcagacagctgcagctggcagacatgagtgaaacccatcagagaaaggacagaagcaggcccatttgccccctgggctctaattattccaaatctcagcattttgtggtgaaggaaatctacagtgacctacaaaataatatttgtcacggctcttatgggagctggcagatgtttggaataccaaacaaacaacaacaacaaaaaagaagtttggaattattttgcctcaaaagaatgtggcttgatttttgaaccgggccttctaccaaggaatcaatggcaaggcaactgcagggtgagattttccagtggaagaatgatcttgagaatcttccttgcaatagtcttctgagtaacctggcactggagtctattattctactcaacaggagatagggagaaagagaaagagaggaagacacagtagaatcaaagaaaaagaaaccaattatggtcatgcttaaggctagttttatgcaataaaattcttaacatctcattcttatttcattcttgcaacacccttaatggtgtgtatctcgggggtggggggcgaattactgaaaatgaggctactagtactccaaaagatttgtcccatgtcacacagctgtttaacaagagagccaactcagaaatatagctttcctgctttcaaatttgtgctcttcacagaatgggtgttaaagcttcagagcaggatcactgagtcacaatcccaactcaatggtactgactccccacaatcttgtacaaggcactttacctctttaagcttcaatatttctaggaatgcgatatggactcaaatctccccttgcatctttagagggccaacacagcatgcttcctaactgcagaaggaagaaaaaccacctcatattttaccttctcctctcccagattttccaaggtggctgggctagtaaacaaatatccttggaacacattcagtgttcctgactgaaaactagcagaaaatcagttcaaagcaaagctggctacagggcccctcagggaatgctacaataggaatgaccaggctgcgtggcttctaacctcccccatctcttctgtttccagtcaaattcccacctagcactaagaggaggactggagaaaaaaccattgtagggtgagcagacaagcactaagtcatgtgaccacagatgtgttgggaaagaggaggtttcttctccccaagtgagggatgatctcatatgtaagcagaactatgatttccgggatgctcagaaaatacccccttatcccaaatgtctcttaccaccttttctcacactgatgcttaaaatgccactattggaagtccattcctctaggttaaatggctaccttttgcaatcagattttgtaatcccaagaattatatgagagggtacacttacaccttgtcactaactaacacctcagtctgaataactgccacaggcctttttttttttgtccttcagagcaactggcaaattttaccaagaagcctgtggttccacttcacttctttttgtacgccttccctcctctcctggtgttacccttcttcccacactctggaaccaagtcctcatgctgactgctctcttccccactctccccaccctataaaatgatcatttccatagtaggacagttcttggatagtcagaaaagcagcttgtatgtcaggagacaaatctgctcccagtgttataaatacaaacctccccagagctttcagagatcagttgctaatctccttgacgccaagccatcttttcttttgccattgctgccattactttggttcctacttttcttctgatggctgagcctgatgctagcatttctttggttctctgtcattctactgatagagtcctagaacatttgcaggctattgggaggtggctggagaagggacatggaaatgaaggtaaagactagaaagaagaggttatagtccctttaattgcccatgacacacagagagacatacacatccaacaaagtaaaactacatcatctaaagggctttaccccaagtctcagaaatatatgggaagagagaatgacaaaaaggccttgaaagaaacccctagaataggatgctgtttctatgtgcgtatctcacagtgatgcaagagaagataactgagcctggtctctggggtctgcaaacattggtctctggggtcccagctgctatgatctgaatatttgtgtgcctctgaaattcatatgttgaaatcgtaacccccaaggtgatggcttttaggagatggggcctttgggaggtgattaagttataagggcaacatcctcatgaatgagattagtgcttttaatagaagaggcctgtgggagcttgttcgccccttctactatataggctcacagggagaaggtatcatcactgaaccagaagccaagccctcaccagagaacaaatctgatggtaccttgatcttggatttccaccttccagaactgtgagaaataaatttctgttgtttataagctactcagtttgtggtgttttgttataccagttcaaacagactaagacaccagctttggcatgtcttggttctgtgatcttaggaaggcttgagtatgccttctactttacgtggctgtgaggttcagcgataattaattttaaaaagcccaaaggtatctggtacataacattcacaataaatggtagatgatcttgctctagaaagaggtcacagagaggaaagcagtaaagttgaagaatatgaaggaattttcccaatttccatagatgataactaactgaaaggcatttgctttgcactgatgtgtatggtaggtgctatggagacatgagtcaaaacactatttctctcttgttttcttattcattcaacaagcacttgtggaggtctttgactatacctggcactaatagatccttgactatacattgacaatacctggcattatgttaccttaaagctacaaagataaataggacattcccctgacttcaagtaaaatcctgctttcattggaggggaaggcacaaaaaggtgttaaatgataatgtatttaaataacacataaaggttcataatggaagagaggtcaaataatcacaaattgccaatgttaagtggggaggagtatcaactgcatcaataaggattcaggttagatactaaaaaagattccttgctgaaagagttattagaaactggaaccacaggccaactaggcatgtagggaaattattttcaaactaggttctgtgctgctttaggattcttcagaggtacttgagggatgtgaaaaaaaaaatcccttccccatttctacttcaacagaatacctcttactttgttagtgaaatgtgtttttattagcttttttaaatttcatttgaagaaagagtttgctgccataagacactgtaaaacactggaatagaatctcttcacatatttgctgtttggggattaaaatcctatttgtccctaatatataaagagcttctataaattgacaagaaacagattcataacccaatggtaaaaatggaaaaaggatataaatagacagttgacagaaatggaactacaagtggcccttagacatgaaaaaatcaacctcattcattagagaaatataaattaaaactgcaatgaaataccatttttcttagcagatttagaaaaatccaaaagtttgaataaaacactctcttggtaagtctgtgaagacttgattaaaacatgatgaagggcaatttagcaatatctgttcatttaaaaatacatatatatttgacccaacaatcctatttttaagaattcattctacagatatacttgcacatgtgtgaaacatataaaaattattcattgcagcattgtttgtaatggctgaatatggaaacaacttctatgtccattgatagaaatctggttaaataaatgatggctcattattataacaaaatattatgtagttctataaaagaataagttctctgtgcactaatacagaaagatatattattaaatgatgaaaacaaggggtaaaatgatgtgcacaatagactaccttttatgtaaatgaaaaaatatttttaaaatatatatatatattcatatttgcttacattttcataaaaatctggaaagatatataaccactaaaagttatgggggggaactacatgttgtagggagaagataagaattgggtgagtgtgggacggggtgaataagatattctattgcattcttttatatgtatacctagatatataatcatatatacatgtacatatacatatgcattcatattcttgaatgatataaatgtattcctcattaaatttgaagactacgtttgaaaaaacttctacttgaaggccgtagactagactaggtgaacattttgggtccattccaaccatagaaaatcaatcctacaaagctggtcatcagaagcccggctgtattcctactagtgggagagatcctagctatgactttgtgttcccagtcttattccaataatgggttctctccaccgacatcattgagcccgtccatctgggcaaagtggaggttgttacattgctttcttaaacaatgttaaagtaattgtgtaaatctgagctggcttttagtccttggcccaaatggaaggaacatagacaaataaggttgctagtgggaaatcacccatggccttctaccagagcactgctgtaatggagggaggagcagctgggagctagctgcatctcagtcaggcaaagtaagagcatacatccaggatgcaacacatcttgcaggatgaatgtatcaaaaacagtgggctgggcacagtggctcacacctctaatcccagcactttgggaggcgacggcagtggatcacctgaggtcaggagtccaagtccagcctagtcaacatggtgaaaccccgtttctacaaaaaattagccaggcgtggtggcgggagcctgttatcccagctactctggaggctgaggcaggagaatcgcttgaacctgggaggtggaagttgcagtgagctgagcttgcgccactgcactccagcctgggcaacaagagcaaatctctatctcaaaacaaaaacaaaaacaaagaagagtgggtgtctgcagcctccccccacctccaaaaagtaacaatgctcatattctgaggctatgtggattcagacgacattttccttgggatgctccctgagatcagaggtactgcttcaaatgggcccatcagttgaatcaatgatgcctacctttagatttctttttttttttcagcacttcaactgccatcacttctttttcccctgggcctcttgatgtgatgacttaactagatctgctttcctcgggtagagtccaacgatttctagattttccccaaactctcctcccccataagaacttaactctcctgtggcccatcacattgaggtcatgctggcaggccttaatactaatcccgttaagtaattcatactgaaatgaaaatggtagataatgttttaaaacagggtccttttctagataattatattgtaacataggcctttgatgttttattcataatgaggctgtagagcaccgggtaaagagtgtgaaactttctagaacttaagacctgaatgagggaacttgctaaaaatgcagcttccaagacctgtcctagggagaggagaagccttacttcagagtgtcccatttggattcaaattaaagctccattgctaattattgcttattagctgagcaaattcttagcatctctgagtctcagtttctccatctataaaattgggatgataatggtacctaccccataggttgttgggatgatcaaacaaggtaagacataatctgttcagcatagtaccaggaacatattaatgcccaataaatgcaattgttgttcttttactactagctataaatgatagggtttctggagggcagaaagcaggctggtagggaaagagatgtggggctacttaacccttacagtggccatcctcttaccacactggcagaccctgcctctgtataaggcttatgctgaactccaaagtagcagtgacatttacttttcaatcagtattatatactgtaaattttagaaattctcaacacctgtaatgtaatgacaaggtttgtttttacccctgtgcagtctttcacagccctgtagaacttctcaaaaactgtcagatcccaagtggtaactagagattcacttctgagccatcacatccactaagaatccttttatgccccagctcctgggcaaacactatctgccccattttcccatctcagtgggaagaccgtcaggtgtgatttagccaagcagttgctttctagccagagccatttaccaagcacatagactctactttggacttattgagcaccccagacaggtggatttacgctcagaagggtcacaaatgtatttgtgattatgagtagtcctaaagggcatggaatagagagaaaaagtgaactccttggccaacactcccattgtattttattttattattattatttttagagttggggtctcactctgttgcccaggctggagtgcagtggtgtgatcatggctcactgcagcctcaaagtcctgggatcaactgatcttcttgcctcagcctcctgaggtgctaggattacaggcttgaactgccatggctcccaccgtattttaaccatcatttccagtgtcctctcctgcaacatgttttccagaattgctaaacaaaagtaattgttgattggtttgactttcatctttgttttaggtcactactgaaggtgcttttcagaaaggatttaatattttttagtttaggaagcctctccatttcccccttcatacatcctttggcctcccacccttcgttgcccagctcttgtcttgccttttcaagaaaacttcacttgattacttctgcacttgatggtctctttgtgggaagggaaagcaatcaatagagcagattgcttctgcgatggtagagcttccaaaggtggcaagttcaccatgtccctaaactctcttcctctccaccctgccagaatgcctgatatgcccccagattcaatcattagttagagaagggccctatctttcccagaggtttaatatcttcacagtgatgaatacacaagactggaactattccccagtaaagagaaaggcgctattggggggaatcctacaatgagataccatttcacatccactaggatggctataataaaaaagacaataataacaagggttagcaagtaggtggagaaattggaacccttatacagtgctggtgagaatgtaaaaaaaaataataatagtacagctgctttggaagataatctagcagtctctcaaaaagttgagcatagagttaccaatataagccaccaattccactcccaggtatatacacaaaaaaattgaaagaaggaactgaaacagatatgtgtatatgaaagtttatagcagcattattcataatagttaaaagatggaaacaatgcaaatgtccatcagtagatgaatggatgaacaaaatatggtatatccataaaatgtaatattattgctataatggatgaaacttgaaaaattctgctaagtgaaaaaaaaggccagtgacaaaacaccacatactgtataattccatttacattaaatgtccaaaataggcaaatccatagagagagaaagaagaacactggatgccaggagctgggggaaggggagaatgggagtgactactagtaggtatgggattcttttagagatgacgaaaatattctggagttagatagtggtgatggatgcaacatcttgtaaatatactaaaaccaactttacaacataaaagggtgaattttacagtatgtaaacctcagtatgaggtatgtatacctcaataaagcgttaccaaaaaaaaaaaataacctccaaacgttatacaatacaaacacaaagactgggtatcagagcggagcgggcctgaaaaaaatgaaggtgttttgtaggtgataggcagttgaagaagagaaaggtaaattaaaaagaaagggagaatcacaaatgggtagagggagtcaatctcaagtcataattttgcctagtgtccccagccgtggtgtatccactttgggagatggagtgggtcagccagacagctcagctaaaggagggggtgatggggggaagattttcctgcttgaaagcttccaggagactctgtgggaccacaccttcaacaagactagtggcctccctacttctacccttggcccaacccccagtgaggtcccaggccaggaaattcttgtagcagattcaacagatcactctgcagctaaacagacagacacaacactctgtcccaaccaagaaggtgccgagtgagaggaaacagtcatctgctgctccagctggcgagaagagagtggaagagggcgctgaaagctcacatcctagtctaatcccagctctccccctcctcatccggaccccatctgcaggctgtttttcatcccacttccgtcagtgtttcagctgctgtcagtcagtagctgaccctgcctgaatatgccgtcttgtcagacagatggctaggaaggatggcttgaggagagagtgtgcaagaaagggccatgtctctgtgaagcaaagagtgcttgcaaatggcatagatttgggggttttttggggggcagggggagggcccatgtattcttagctaagttgtactatttgtttgctgtgtgatggaactgctatcactttgcatctctaggcttcagtttctaaagaactttctgtgtggatatgtgtatgtgtgtgtcagaggtaatcatttcacctgcttctctttcacagggatatattataaagaacaaaaatgattatgtttttcaaaaagattcagggagtaaagaagcaacatacaacaaagtcaactgattatgattatctccctgcttaccaaatgcattctacctgaaggcaaaaagagatgtataattttgtctgctttgatggtccagtgtccagagttactacatcccatagaagttagaaaagtcccttcagcttgtgatgtgctgccttataggtagcaactctagtcttgcagtgtcagtcaactgcttgtgagtaagcacaccccaaagactggagttccatgtacggacccacaccacagcatggcccagccagggtcatgaagttcatgtcaaagatgtatcccctgaggatgtgccacttggctaaagaatgctctacctctgattggccaattctgccctgactcatgctagccccaactgcccccacagactactctttgcttactcatatccagcccccagggcccatcaaacacactctgattttctgcagcaactctcatggtctgcctgtttgcatcctaccatctagcacctaatataaagtgtgccgctttttaagtgatcaataagtgcaaaggagacagggtctatgccttctacttctctatctcctgctggctctagcattagaacacagcatgctggctgggcgcagtggctcatgactgtaatcccagcactttgggaggctgaggtgggtggatcacctgaggtcaggagttcgagaccagcctggccaacatggtgaaaccctgtctctactaaaaatataaaaattagcctggtgtagtggcaggtgcctgtaatcccagctagtcaggaggctaaggcaggatcattggttgagcccaggaggcggaggttgcattgagccgagattgcactgctgcagtgcacagcctgtgctgtagatcgcacagcctgggcaacaagagcaaaactctgtctcaaaaaaaaaaaaaaaaaaaaaaaaaaggaacagagcatggcaagaaggaacaaatattcaaatagtgatacatgctaattttaagagtctggtattaatttcattaacatataaatatgcatatctagaggcaaggtgattcttcatttaagggcagatagctggagagaaataagtatgattttcaaaagtgattcagaagtgagttacagaatcgatttcttctgggaaaagggtctgtgggttcaatcagattctcaggatttcatgacccaaaagaagtaccctctctattgccatacaaagcaggggggctgaggatttcacttcagcagtatgagatctctgcaaacaactctgtccagattctgtggctctaaggttatgcacacttgttttcagctttctgtgtgctgagagtacttacttgtggaagtttctcataatccagtcttcagaggcaacctctatgttctttcctgtcaaaatttcttcttccactttactgaacagctttatcatcagctccattattcagctcatggaccattccaatctcattacataagcctcctagggttctatctccaagaggaaactggaaatggccttctcttttgacaggtggaaatgaggcccagagatgccaaggggacactgctatttagtgccaaagcaaagattcaaatttaggtctcttcattttacctagagcagcaaaacgtgagggctagagaagcccactaaaatccagtctaataattgcggaagataaaacacaaatccctctgttttcagaggctaattcctcaacctcaaatcttcatgtgaacttggattatgtagcccaacaaaaagaatcccttccatggtgaatctgatagatttgtattattcctttgctactgtactatgggttttaaaaacctctaattaccaggaggtgtaatgttaaatcaatgattcttcacgatgcctcattgttaataacaggttatgtggtaatgttgtcactcactgccttcctcttctccctgaataaattaagaatgagttctactattacttggttagttctaatcctttgagaactagatttttttttgaaggtcaatgaccctttgaaatggacaaattagtcattaccctcaagcagcatttacagaaacaatgtgaggcatctggatgagacagtggggagttcagtcaagcattcctttgtattgcctacaccagcatttcccaagtctgctctgcagagcactactagtccacaagatgctctgtgaaaacaaaattctgtgcttaaataaagttgggaaaagatccacattcaacattcagtgtccctttcaatatgttaaaaggatctcacaagtcccatagtaaagaaacctgtttaatgataactcagcattttctctgactttacttatccaccagactctttttttcacctaggtaacaactatgaatgccccagaaacactccttggaaagcactgccctgcaccacatcaaaacctagatattttgaggatctggatattcgccatctcatggacactattatctgctgaatccagaaccgcactcccaacttcagtcacactcaaccttcagctaagacctaacacgttactcctagatggctgatagcatctccagtatcttttctttcattagcaagccctataaatcaagagaaaatgctcccctgtgaaatactgtatagtgctaataaccagaaccacttgcaacaacagcccaatgacatcaggcacctggagacacaaagaagtcaagtccagggggtggtatttttcctgtatatgatgagaagccagggaagttatttaagtagtgaaatgatttgatgagatttacatttttgaaaaactattctgagatgactggaaaagagataatgagctcggggacaggatatgtcaggaggtgactgaaagagcccattgctatcacattaggcataaaggaagaaaagaggcatttggtacttgaagattaattgagaaaagttatcccccaatgcacatattattttgtttggaaaactgttagcagctggcttcagaaagtggtccctggaggccactggcagagggtgcaaggaaagtggtggcacacaaggctccaggctgctggagcagtgggaacgctgttaggaaaatccagtctacctcttcctgacgaccaaggaggcagctcatctgccatgtcatggaactactagaggaaaagacaaagtatcattttgcttctcctaggaaattctttaagaacccagaccaaaattcctgatgtggggagagttatttagttaagactacacaatacacagaaaggaaagggaaggtgttaggaaatctggattctaaagaactccaccattgattgccatgggatggtgacaattccttaggaaagaaaggtgtgaaaagtaaaaatatgtcaaatattaataaaaatttccagtttgaaactgggcttcttttggcagccagatgctcatattaaagtgattagagtgaaaagtgatgataggggtcagagatcaaacaaataaataaggtatattatcatctttggacttaccaaggctggaaaaacaatatgagattcagtcattgcttagaccaataaccctcaaaagaggaacaaggagaccatggtgtctggtgggagtggtttcaaactccacataccacctcatccctgattgagaatcactgcacatgatgaaagatgtcactgataggagtacaatatatgcaaacaatttagaggcaaaaagagtctgaggatcccagttccaataatgacaataaccacaccaataagattaggaactaatatttactggctcatgcttacactgagctggttctgtgctcagggcttcaggttgatattcattagttcttttctccctatgtccaccctctaaggtgattattgctattatctacaattatagatgaggaaacaaaggctaggaagtggccaaccagaagtgatcccagaagtggagctatactacattgttctagagatggattttccattatctgaaactccagctaggataaaatagccacctatttctgacactgtaatggcttttccgaagttatccccactatttcctctggaaaggaaactactctctctcttacacacggacacacagaaggtccaaaaaatataaggtagctaatcaaaaggaagtacttgactagcttacctcatattagccttaaatggctgcagagaatgaaagagagagcagggagactatcactgtgggttgtaccttcttgagaggagaaggagggaatgtttaagaactgcagattacttcactacttactgggccaatggaataatcttggaaagaacaattccttctgcagaacctaaaaatagtgtctagttagccagctcctcttctccagagaccaccaaccctctactcaaagtgtggtatgggaaccagcagcattaataccacctgagagctagttagaaatgcagaatctcacacccacactccagacctactgaaacatcatctgcacttcaggaagattcccagtgattcagattctaagagttcatcttattcagaaccttcaataatgctgtagaaacaagtcagcttctcaaaggttaatgagtattgagaagcctttttactgcccgtactggacaaacatatgtcatatttgttccatatggcctgagtccacaccccagggaggtataaatgcaggcaatcttagaactgagctccctgacatccataacctttgtttccaactcccatctctgcaagaaatgtcaaatacagaacaggattctgggaaagtgagggtatctacccccaattaaaaaaaaatttacaactacagtagttctcaactggggccaacttttccccaggggacatttggcaatgtctggagacatttttggttgtcacgagttgagaagggtactctggcatctagtgggtagaggtcagagaagctgctaaacatcccacaatgcacaggatagacgatatgacaaagaattatctggccccaaagtgtttgcgaagctctggactagaaaaaataatagatacaaatcatctaatccctaaatgtttgaaatatagctagggagaaaaggaacataaaagtgctttctccattctggtgaacagctttagattagacagcaaagatctagctgtccttgaagaggtgatgcactcctttggctcacatcaaacttagagttgagcctttctttcagctgaagttcatctccaaaactacaccatataaaaccaactgctcaggaagtcacgatagacacagaaaaatctttttcacaaatgccagtcttcaaaccgagcctaaataaaacaagaagaagccatgccttatttttttctcctgttctcaacaaacaacatatatcatgaagtaattgaaaatagaaaacacctgaaccgagaagtagctataagaaataccacacctgtaatcccagcactttgggaggctgaggcgggtggatcacaaggtcaagagatcgagaccatcctggctaacacggtgaaaccccatctctcctaaaaatacaaaaaattagctcggcgtggtggcgggcgcctgtagtcccagctacgtgggaggctgaggcaggagaatggcgtgaacccgggaggtggagcttgtagtgagccgacactgcgccactacactccagcctgggtgacagagtgagactccttcaaaaaaaaaaaaaaacaatgaataggattaacataattattctatgtattctatgtgagtgtgttaaaggactctgaatgccctggtagccaggccaaaaatggaacaaagattagttatgtagttccaattttaatggtttccttttactttttaagaatggtttacgcccagtttaggattcagaatgaatttcctaggatcattgctcacgataccattgaatgtcatctatttcacgttcctgccccaggatacatatcccaaacctgtaccaatgagaatgcaagtgctcttacatatctgtccagaggccatgtgaattatgaagtaaaatgtaaggactggcaaaattgcatttatctaaggcctctgcagtcaggactagtcttctgttcaaccaaggccgacagtgctctgtaaggggaaaacatttcaatattgagagtatgttgatgaagacttcagttaagactcagtcagactgaacccttcctacaaaaaatcacccttgctcaagacaagtatgcagcggaatacacaatgttgtgtgctcattaaacccatctccatcctccactcctggcacccagctacactacattccatagtctcgcctgcagttaggtggagccatgtgaatgagttccagtcaattgaatgtgggaagaaatgataaacatgccttagaagactgacctataaaacgtcctgcaaaactctccttgctttcttttccctaaactaaggaccacataccagaggctccagtgatgaactgtgagactctagaggaaagaaagaccactagagtgaaaggggcctgggtccctgaatgactgcatggagcaaaagccctccctctccataggcccctccactcccacattcattgtctttagtcactaagatttggggattgttagagcaatgggcttatcccaactaattattttgtctttgcagatatattccttcttctaaaatcatgggccatatgtttcactttagcccataatactgcattaatatcacctatactttctacctttcacattccatattcctcttccctcttgataactgctctccatagcactaagggaaggcactgcctaaagtcaatatgcttagaacttcctctctgattcaaattctcattaaaagtaaactaaagtgaaatcaaaaccagagttatgggaggtccaatttttctcaggcttgctgcccaatggcaatcaacccttggatccaacggcatgtaagacctggctctgaggcctgacttcatgttcatgctggtctacacagcattttagggaataattactgtcccaatgctttagtccctaagttgtccctcccccatgtatcaatgtcaatgaccagcatgtctgaggaaggccaggtagggttggacaaaagatacaactaggccagataacctaaaggtaggcaaggaatgacatgaagaagaaactgaaaaggagttcttagagtgtgtgattgtcattagggctttccatcaatattcaaattctcctccttccaggcacatggtagtattgcatttccctgtcctgtagaagtcaagtcatggtagtgtgacttgctctggccaatgccagatgagcagaagtaatctgtatcactcctggccaaaagtcttaaacagccagaccacagtgtgttatattcccttcccatagtgctggaactaaattcccgatggtgcggcactgtcagccagagtctgttggtgataatgacaggcaccaacctaagacaaagaggtagtatgagtaagaaataaatctttgttgttttaagtcctgaactttgtaggttgctactgcatcatactttagccaattctgattactatggagtatgtaatatttgatgaggaatgggctttgatattcaaaatgggaaagatgaaaatattcctgcaatttctacctctcttccccaaaagaatggaggataagagtgattttttccccaatgtgatatgcttaagcactctagcagctgaaactaagtctcagctactaatttgacttagcctattgtgtctagaacaggggttataggccagatatgacctgcaacttgtttttgtaaataaagttttattggaacatattcatgcccatttatttacatactgcctatgactgctttcacattacaatgcaagagttgctacagcagagacttcaaggcctgctaatgctagcatatatactatttggccctttacagaaaaaaagaaatgctggcccctagtctagaagaagccaaaggaaaacagatccatggagggtctggaaaagaaatccaatgtgcactgccactccaggtaaagagtacatactcttgatagctatgtaaccaaaagcatacacaaatcaaaagttggtaccagcaggatttctcttagtgcttcaggccctgttagagtcagtagggcaaagggaaccctaatacaaatgacttctaatgagcacatccttaaagttctgttgtttataacccctctcctccaatatcaggatgggtataggatctgaacaaagggtatacacagtatatatcaggattagcaaacctgacagtcctcagaatgactcagtggaaagttgcttaagtgcttgctcaaaatgattcactgcctggagagtccatggcaagtcagattcttaggctaaagtgggaggtacagtttgtccacctccctgaactcagcacagtgcaagcaggcaggccctaagtaaggaagtaggctcttggagggtctgatgagggtctcagcctgctgggtaaggcctctgctgtggccactggctgccctctgggggtgggggtgtatatggtgtggccggaattctaggaatcctgtgctgtcctagcaggcactccaattggcttggtgttctacatgctccaaagactttctccagtgtccttggcatctgatgactacacttgggcttaagatttttagggctgggagggtccctggaagccttctatcttagtaccagatcactccttcatttggtggcaccagcaaaccatctggccattctactgcagataggccacaggctatttacccccttgcctctgcctggcttttgaagggctgcctggaggagctatctgcttggccgaaactcagcctttggtgactgttaacaggttttgcttcaattcagctattgctgtgttaccataggttggctctgggttgagggcaaaggcctggggtggaaaacagagaaaggagaagagagatgaaaggatactttacttggacctacaagttgaattattctttcttttagcaggtgattctgaggttagtttctactgggtattttctcttactttctaaagtaaccagtaagatatggccctagactcctccctgaagcatctttagttctaggttactatgaaaatgtggtgaagggagggcgctatgtctgatggcatccttgtctaccatcaagtctagagaatttagaagacagaggggcccaggtcccaaactgctacagcttttttatcagcctgccaggctgttgcacaggcttctctaatgtatacctgagcacctgcacaggccagggccacatctacagaggccccatctccctgggctgaaacagcataagtaatggttgtctcaaacacactgaggcagaaaaagattttctttaaaaatatagaagataacagacaacagaaagacctcagagaattttcaccccacagacatttgtccagagcctattttgtgccttggcagatgaggagataaatgtagacttgagatccaaattatttccaagtatcaggggctgaatctcagatataaacagtgaagaaagtggagaggaagaaaactcttcctctttcgaaaacttgtctgcaagggagatgtggtagaagcacagtccgggaggcaaggagacctgggttccaggctcaggtaatgttactaatgagtgctgtcacttcaagaaagttacagagtctttcgcagtctccctatttgtcaaatatggggagaggcagctgaaaaaaaatatcttttcaaggtataactttctgtagttgtacaatatatgattcctgccctcaaaaagtttatgatgtagttgcaagacactgaacagagaggaggtacaaaattaaattcactgccgcacagaagtatccagcgaatgggataaagctgtgccatacaccacagtaaccactagtcacatatgtctattcatatttaaaccgattaacattaaatccaatttaaaatgcagcttctcagtctcacaccagtcacatttcaaatgttcaacagccacctatactaatggctgccacattggaaagtgcagatatagaatgtttccatcattgcaaaaagttctattggacagtgctggtatagacaacatgtatcacagatgtccagagaacacagaacttcccttccatgcctcctaggcttgtgctcatgatggctgttcagcctgaccaatgctgactttgggtgggggcttagtgtttggtcagattattgccttgctctgggagctgagcagttccacactttccacattgtctctgctcctttgatttttccccagggcctttgggaaagccatagctatccagtcctgccttaaaaaatttccttttaagcagactcatgaataatctagataatcccagaattcaggcatcttttagagctccctgagctatttgcccatgaggtattgtatgcaaagtctgacaaagatcagtttgattgatcaatgagagtcagcattgtatttggggaagcaagcatggccaggactgaggaggaagtccttacatgctccctgcacagcactattaataacatgaaaaaattatccaatgtaatcccaaagactgatttcaaatcaaaacaaagcaaatacaggaaagcaaaacaaaagaacagcaagacaagcacaagggctccctagggttcctctagcttgtgggatgggtgtgggtgtgagcctgtgagagtgtatgtgaaagtgtgtgtgttccagatgtacatgagagtcacgtgtgtgtgtttgtggggatggtggtgaggcgggtaggcagacttggaggttttcagggttagggctgggcaaacgtgcctctgactcagaggaggaatctcagtttcttttggtggggagaggagaattaaacttttgtcaaacaacctcatgcctgattcctctaaagtggggtaggaaggacagtgtcataacacagagagtgttaatggctgctattttaacaatctaaactcactgccccagggcgccagtagaaactaaacagtcttactgcaaagggtgcatttttaaaaaatcaaataaatagctgcaggcgcactcacattgaacttgtgcccaattcagtgtcaatcaacaagtttccattgaattctggacaagccaactcctcttccaaagagaacacagaaaacattgtaagttcagtttgggggcagctggatgatcttatgtatcctgtccttttagtgatttttttccccctttttgcttcttccttccttctctggctagtacttttgttccctaattcagatcctcccaagttaattcctttctaatgcatctccctggctctggccctagtgctgtggttcttctattttatgttgctatacatgaggacagatcagctgatctgggcctcaagacaggtccacgtcatttgtaaaacaacagctttctacctgccatgtgttccatgagtagagatggagaaagtacccaaatatatacagtgtaatgctatggctccacttgggaacatgtacattctgataagccaacatgctgaaaaattatattatcccagtgatagaatgtgtcctaggcacatatttgaaactagccagacgtagccactaagccttagtgtaaaatcttcatctccatcttggtagtaagcatgttcccccttctccagactgaattctggccctgcattctaaaataataccaacaataccttgcatttattgagggtatactatgggcagggcactatgctaactcctttagataccttaattcagttaatcctcacaacagtcctttgagataggaactatcattgtcccatttctccctctctctcattcacacacacacacacacacacacacacacacacatacataccacacaatgtcacccactccaacatacatgctcacccacacgcttacatacacttacacttacatcaagtgtgtgtaaactgaacaaagctcctctgccctatctccatagtgctcagttcttccaggttctctgcccaaagactctccctttgacatccagaaatctatccttagtgaattcttacagttaagctaagcattgacctttctgctggaaggagtctcatcagctgcctttgtaagtggctgggagagagatgaggatatgagggactgcaagagaggaaaggggatgcaaaaagacatccaagaacactaaagacaaactgcacctcctccctacttttgcagtgggctggctctgcaaaataatgtctacccacaggatgtacaaggtcctttgagactgggcctccatcaatctgacatttccagcctcctccctcctacacagaccatactcaactgcagtcacggatcccacacatgcctctgcacgtgccctccccacctccctcttctacatctggcaaagtgccattcatctgtcagaacccagctcaaatgtccactcccctctgggactgtgcctgattcctggctcttggagagtgcctatcttctcccctctctgcctgcacagcccttgtccacacttctaccagagtactcatcacattacattttaataatcttgttatgcgtgtctcctccactagattgtgaactcgtcgaggcaggaactctgaaacctcagcaccatacatgggctatgtctcaaagcttatactctgtaaatgtttgtgaaattaatatgagtgagtgagtgaattaatgaatgtgtggactcataccaccaacttctggttaggaagagacgcccttcactaggcttctctgactaaggctgctgtccagtatttctcaatagagccaccactggaattttgtgtgggacacttcttccatgcgttgtgttcctacttattgtggaacattttgcatctcttgttgctgcccactaaatgccaatgacatcctcccattactgtgacgaacaaaacagttcccagacatttctaaagccctggagaagttggtgggggcagaaagggtgtgtgtgtgtgctgatcctccctggtttggaagtaacactacagcaatggctcatttccctgatcccagtggtctgagaggccccctgcagtacggacacactgtgctcctgcaagaggcgccagatgacagcctctagcaagaccacggattagcagaaggtaggaaccaaacaggagtaaggcagcctaatcaacacataatggtgaatcttgctctctctttttatgatttaggagggaggaggtatcagttctagccctcccccagaaaaatccccttcaatttctcaaggcagtctagagatttttaccttgtctctgagtgcattctcagcactaccttatgtttctgttaagagctcactcagctttgagaacatcagcattattgtgcggcatactcacacaggcacctctgaaaatctaatcagaaggaaatagaaaggcaaggcagaggtgatgccattaatttaatgccttttgcctgacagtcattaaacctgtcacttgtttcctttagactcccctcatcttttccctgaggctggagacacatggtcaatgcctggttatgaggctgctatcattgggatctagaggaacacgtaccaaaatgctatggtttcaggctttgcccatattgagatatgcccagatgaaatctggggacccaggatttaaataccttcttttcattgctgatcactgccttgattatatatacctccttatacttttcaaagcaatttcccatatcaactttcttgttcactgtcaatgcaaactttaagagaaggcaggaattatcatctcattttacaagctgagaaaataggtacaaagaggttaatcagctctgtgaatgtcccacagtgaactggaaggacagcagagcgaggccccatctctttattggccccccctgccttcctccccccatgataacacaataaaacctcactttgagggaaggcaggcatactccacaggtccaaagcccttcttccttcccaaaggggttcctgaccagcctgacttcctggaagccaaacatgccctctggccctctggtcagtgataaaatcctggagccagatggcttcatccagatgccaatacactgtgcactctacagcttagaaatcaatgcctcaaatgcctacttactaattccaagagcccacttagaggacaaggagcacacctttctctaggttttggtactgctattctttgtgacaaaaagacccaaaaaccaaaaaccaaaaaaaaaaaaatcaaaacaaaacacacacacacacacacacacacacaaaaccaaacatcaagaagaccaaaacaatgcaaacaagtagacaaatataacagtcccccaaattgccatatgcacatacagaatcctatgcttggttgtaatcttgcaaggtcttctggtacttttgcctccaatcagaaccatcaagaacaaatgaaaatgtaatcccactttatattatactgggaaatataacttacatacgtacaacataaatgtagagttgtactgatgctttcaaagcaaacacccatgtgactaccacgtggatcaagaaagagtgcattgccaacaccccagaagcaccaccccccaatggaggtcaactcaccaccatgctgactattgtgataatcatttcttcactttccattgtagttttatcacatttatgcacatccataatcaatatagtttacttttccctattttgaacttgatattaatggaatcatattgtatgcgtttgtgcatttatgtgtgtcttgtgtttactcagcattgagcctgagctattaatataatatattgactgtaaaatgacttcagcttcccttatctatgcctggaactacttttttgtgcctaagttttttatactgaagctcacttctactctttctccccctttggaagtggaaggagaaagctgatcagcctcctctaagacccatttatgtttctgaaacttggtgaaggcccctgtctttctttcaccagtttcagtaattacagttttccttcaacatcacctcataggtttcatactctaatcctttaataatctttctaataaagctatgttgaatggctccagacacaatttccctcagaaagcaatcgcagaagaggcccttttggaaaagtacttctccagataaagagaaacaggggtactgttctattcctatggatttctccaaaagcagatgacaaaacttgccagtaatcagctcctaatagatgacactctctgaagttccctggggaacattaataaggaacacgtctttcaaaacctagcatttcacacaggcagtaatactagttactgcttgtcaggcctgtcattttcaaagacagtgtggtctctggagtcttccagaaaaaatgtgttctgaaaagcaacatttgctagattcctctaagactctttggttgtctcctgacttcacttcctcatttctaccaccagcctcttctcaaatttcttctctctcttccccatttgaaaaagagacacactacatcctggatgaaccttaaagacattatgctaagcaaaaaaagcccatcacaaaaggataaatacggcataatgccattcatatgaggtactgagagtagtcaaattcatagagacaggaagtagaaagtgaggagttagtgtttaatgggtatagagattcagtttggggagatgaaaatgttctggagatggatggtggagatggttgtgcaacagtgtgaatgcacttaatgttactgaactgtacacataaaaatggttaaaatggtaaattttatgttatggatttttagcacaagaaaataatcacaaattaaacaaaaaagagaatgaaaataaaaaggaaggaatgagggaaggaaagaagggaaacaaagaaagaaaacaaggaagaaagcatgccacatttccttgtcctctccttctcaatatccatttctctattaaaataataaaagaatatattatataaaaggtatgatagtgagtgtggactctgatttggccttagatccctgagggcacaatcttgtgaatgtgaagaaatcaaaacaggatgaatttattgaagaaaagaaaaagagcttgtggggacacttacattatcttcatgttccaaaaaataacctcaactcccaagtttgacgtatttctctgtcttctcaattaaactaaaatccaagcagccctcttcctccccctcctgcagacagctttgatttagccctttactgagagatacagtacatatatttcttagcctatctccaattctgggagcataactctagaaaacactttgtaagtagccatacatatatttgctgaaccacttcccagtctctgtgtcttagagtatatgtggcaaagacaaaagacaacacatcaagacatttataaaatagactactttgatggccaaaaatggagtcctgtgaggaggcggattttggaacagatttcaataactgacaccctaagtctgccagttcctaaaatcacttttagggaatagctgatggtataaaattctaaacacaaaaatcagacaaaaatcattctaataaagacaattgcttatcttagtggctgcaaataatctggcaaaccttttgggttacagtcattttaagtccaaaaccctgaagtaaaactctttggctctaggcaacagatagcaaggatatctggttactttgagaacatattggttttaaattaacaacactaaagtgaaaaacttgagagctggcaactcattctagaaaccactgtgtcctctgctacaaataaagaacttatcctaaatactactggtgttctgcaggactttggggtaggtaaagcttgactccttaggcccttccttcaacaggcccctctccctttgtaactcttcaggtgcccagctgagcttagtggcctcgggatcttccccccgcaacacctgtctcctctttctacaatcaaaatctgctttctaaatcctgtgttcagacgaaagtaaaaatgattaataagagttaatttactaccttcaaagattggtgaatttatcaggacaaggcctaaatttaaaagattaagctgtaatgacaatttcaggtgtcaggcaacttggcagggaagtgggggtgggcttgggcaaagctgatccgatggctggacaggtctcagaatcacaggtcacaggaaatcaaggtaataattgcctcttctgcttactcaagaagaaaacaggccctggttcaagggtcagtctggcaactcagatgaaaagcccactacaggacattttgctaatcctttccttaaaataccctagatgtgactcttatttcaaactaagttaaaaacagactaagctgaaaacactgattttatttcaaactatgttgattgcttttccctttgagagtttcatttgtttatcagcagaaattcctgggctaattccgagaaatgccattcatttctcgccaacaacaagtcatgaacaatgggcggggtagagggggaagctccccacggagggtcttgctttctggacatgacagccaaggactctgaatgtggaagatggcagaagaggcagcctttgggtgggagctctgggaaagcagaggggcaggccagatggcacattgtgcacatgttactgcagggttagtcctggggaaatgtcacacaaggaaaatgtgtttccagagtgtctatgtgctccattatcagcgaaacaatgttgtcatgttgcccacagccctctggagatcccactgctgcaagatcttacccagaacggctttctgtgggcagttctcttgacctcctttctcaaaatctcccctgggccctattactgtagtgcagtcctcaatccgactgcatcagaattaactgggatgcttgtgtgaaatgcatgacacccactgcagcctaaatgattcaggatttttggtgtagggtctgggagtctgcattttatcaaatctcccaaggtgatccttaagcatgttaaaatttgagtagtactagtttagggtcttgtgctaaaattgcctactaccctaacaaacttctccaaactaagatactgtatataccaatagcttattgctataacatacattgctcctagaaattgaatggcaaaatacaacacttcttgaagcacataacaaagaaccctaattctgcaaagtgcctccaaaaaatgggtattatggctgaataaatttagacaatgttacatcccatatacctctctggtagattcataatgggtactaatgtatcaaggctctgtcatataaatagacaacaagtatataaaaatgctcaacatcactaatcatcagaaaaatacaaatcaaagccacaatgaggtatcatctcagcccagttagaatggttatgttcaaaaagacaaaatgtaatagattctagtgaggatgtggagaaaagggaactcatatgctgttggtgggaatgtaaatcagtacagctactatggaaaacagtatggaggcttcttaaaaaagctacaaataaaactactatatgatccagcaatcctactactgggtatatatccaaaaaaagggaaatcagtgtattaaagggatagctacatccctatgtttatcgcaggaccacacacaacagcaagatatggaatcaacgtaagtttccatcaacggaagaatggataaagaaaatgtggtatatatacacaatggagtattattcagccataaaaaataaagaaatcctgtcattcacagcaacatgaatgagacttgaaaatactaagttaagcaaaataagtcaggaacagtaagataaacaccgtgtgttctcactcatatgtggaagctaaaaaagttgatctcatagaaacagaaagtagaatagtggttactagaggctgggaagggtaggcacgatcttgtctcactgcaacctccacctcctgggttcaagcgatcctcctgcctcagccttctgagtagctgggactacaggcatgcaccaccacacccagctaatttttttgtattttaaatagagacagagtttcaccatgttgaccaggatggtctcaatctcttgacttcgtgatctgcctgcctcggcctcccaaagtgctgggattacaggcgtgagccagtgcacccagcaaatgctactttcttgaagaaggttttaaccccttgtactgtgtcaagtgtccaaggaccaacagtatgagaaaaatagtggaaataaggcatggaagatggttaaaggggtctaagagaacagtcagtatggacatggagggtctagtgatcaaaagtgaacatctcctttggcagcccctctgtaacctaaaatagtaataataataataaagcaaaatatctgctattcagacaccaacatttcagaatcctcaggcttttggataactctggacccatatatatatatatgtaattattatgtgtaatatatataccaatcttttgcaggcaaaggagtggctcctggttgatcatcttgcacactacagctattgtagtcaccttactagggaaaacaatatgctaattggctgttactgttaaaaaggaattgatctgttttgataaaatccaagagacaaacgaatatagaattcagaagagaatagaagagagaagagagcaatggagatcagatatggatggtggcaaaagcagcaaatcagcagcaaccatgaggatggctggcagtaggtactcaaagaaatgaactaaaagaagatggggcaaccttaaaatttaagagagattcctcaataaattaaaaataaaattaccataagacccagaatttccactcctaggtatatacaaaataattgaaaacatatgccacacaaaaacttgtatataaatgtccgtagcagcgttattcacaatggccaaaaggtggaaacaacccaaatgactaccaacagatgaatggataacgaaagtggtctatgcataataatggaagattattcagccctaaaaagaaatgtcatactgatacatgctacaacatgggtgaaccttgaaaacactatgctaagtgaatgaaactagatgcaaaaggccacaaattgtatgattccacttatgtgaaatgtccagaataggcaaatccatagagaagtagattcatggttaccaggggctaggggaaaaggggaatggagagtgactgtgtaataggtttccttttggggtggtgaaaaatttcagaaactagattagtggtaaatgttcttaccacttgtacaatattgtaaatgttcttaatgccactgaattatacactaaaatgatacattttatgttatgcatcttttaccacaataataaataaataaatctctcttttgaaccttccctagaaaaaaactggaggaaacacaaaaggcctgtctacttgattactgtaactgtggaagtcacagatatagacagacatagtcatagacctagactctagactcctttttaatataaatacatgggatgggagaaaaggggaacacaagggcagataggtcagtgattaaagacaaaaaaaagcagattcagagtaaacaagtgattttcaactcttactctaaacttgtctacagtcaaatgccatgtacccacctcatcttacacagtctgtgctatagtgtggatttgtgtaacacaagtggttcatatgtgagtgctaaataagggaatgaagttggtataaaatagaaattgcattagttcatacatgattacccagcaaattaatattttgcactaccaagtgacagcagctaaaagccaagtacactaactcaactgaaatcaggaagccatttgccctacattcttcctcttgcctcagttgggccacatgctctgtcttgtaagtgcttattacatgattctccgtgatctttgtgcaatttactgttgtctctataacttagcagcttcaatccttccttaaacactgttccttcaagctaatgttaccattttaaaaggtgaagtctagaagtctatatttactgtaatattttattagaaatgtaagatgcctttttaaactgtgttagtatttcattagtatagttgctttgttaatattctggttacaaagttgcctaagttttgagtggttttctctaatgctactttttccttaagccctgtgatttttcagtgtacaattttgtagaatgtgaggattttcagatatgtgcatattgtattgtggcagaaatgcctgtgtttgctagctcactcacaacccaactattgttgaaagagaaatgacacagggcttcccacattctccttatgggaacacatactatagtgcaacactggtaaggtcttttccctaacctaccttgaatatctaagactggggtgtctctcttggcaaaccacactgtcactattcctattaaaaccattcatagtgccaaactttttcacacctagccaaaaggaaacactgtggattaggtctctgttaaccagatcaaatcagttattttggcaattttataagagctctttaataacccaggaatgctggaatacctccaggaaaacccaaatttattaattctgaatagcaaattctcagtggaatgaccattttaaaaagccctcttagataatatcatgatttagactcctgatcactataaaattcttctttttgtgataaaattctctctctgtgcatatatataaaataaaatatatatattatgaaatatatacatacacatattatgaaaataagtcatgttgttttactttcccttccagcattaccacttcattcccccaaaagagaagatagggaatttaattccttcaaatcactaaaatctcttaattatcagggactccacagagtcttgcttagagaccaggatgaatttaatgacgttcatgagtcctatgcagtcttgacttttccattaagaatgttccagcctccatgtagcctctttgggcccagtagagcactgtggtatgtgactaagacttgacctctgccaagacttggacaagtgctgatgaaaaaaaatttatttgctctttgtgggaatcagtatagatttctctctggtatttctggaagagctgcctgcatactctgatttccacggtttagcaggagctgtaggagacaatttcaaatacaggtgggctccttggaaattttaggggtaacgagtttagaaagcaagagccatgggaaatacataaacaaatgaaatgagatggctcctctgtctccttcaatggaaactaagctctaagcatgataggtaggacacttccactgagtctgttaccacctaggcaaaagcttctctaaatcaatactgctataggacagtatgtaaagccagtatctggggtatacagtttgcttatttgtcgtctttttatacggagcttattcatcatcttggctttaaatattttcttcttaaatgaggacattttcatcacagtgccttccattgggttaagatggaaaaccagagcccttttctttgaccaaacatttctgtggccctgaaggcatgagtttcctcatgcctaataatcactggggtggaaggaacacagaggagtcatcacatccattgccctgtctcaaagcaggactgtgccaactctatctcagatgggtgggtacctttttatttctagaaatattaagtaaagagactaaaattatccttagtcatttattctaggatttaacagccacggtgttcaaagttcttccttttgtcaagctccactcctctctgctatgatttaaagctatttactcttgttttatcttcagtagaaagaaagaatagctggttgcattctggttcaatatggcaaagagaacacatgagaaatctccctgttattttcaaaacaaagagagatgaaatgtggaactagaaaaataaataaataaaacgtgaaaactgcaaaattatattcagaaacacaaaaaaactcttcgtggaataaaatatagaaggaaagtacagcaataaatgggagccaaagccatatggtccatcagcagctgggactgaatatggatagtttggatccaaatggctgaggagaaactacagcttgcaagtggcttcccatgtgaagttggggactagggtcacactactcgcatgtaaacaggggctgacatagctctccccactcagtgttccctaaaaaacactgattgtccaagttaggcagttgtagatgaggcagttgtagatcagtccatgatcattatcagagactagtagtgcacaagaaaacagaggtagaaatagaccattcaggcatgaggcagcccaaaccgagtcattaatatatgacctggtttagagcaaagtgaactataaagcctgcaacaaccatcccacaaagaagggctcatgtaagaaaaaacaaaaacaaaaacaaacaaacaaaacaaacccaaaacacccatggataatgagctttgaaagaaaaagtagaaaaccaaggaaaattcagaactaagaaaagctgtcaagaaacccaacaaaggtgacaattcacatctaaaaatatttagatatttgaacaatctgaaatggacttcaaataaacttttaaatactttaaagaagtaaaaaagagaataagattccccaaaacaataacaggttataaattagcatcatgtagatgtctttttaaataacttgaaaacctgaggggaaacaaggttattgaaaataaacaaagaaacaaacaaaacccaacacatggcctaaatagtatgcatggaaagaattcatgaattggagaacagagttgaagtaatatatcattttagggagaatatcaggagggaaaaataaaggagacattaggagacataaaggataaattaaatgagatgcaataatatacaccaaagacaattttgagaatgagaaaaaataagaaggtgaagagataattttcaaaaaaaaaactgactaaaaattgaagagaaatttgactcctttggctgaaaaaatcatgtgctgagcaggctgaagagaataatcaaacttacacatctcattgtgtgcatcaatgaaaagaagaaagttttaaaagctagaagaaaaaaaaaacgaagaacccgcaaaagaactacaaatagcagaattcttaaccacaaacaaataaacaaacataaagccaacaaaccatttagtaatatcttcaaagtgctgaggggagatgaacatgcacctataatttcatacccagccaaattatcattcaagaatggttgtaaaataaatacacttttttgtatataaggactaaggaattttagaactactacccacagaaagagctgttaaaggttatagttaacaagaagaaaaatgaactcatggagaagtgagctgcaagagcaagaaggaaaagaaaaggaatagtttatttctatcctccataccataaaatgagctttttaagtcttaaccataatggtgtttatttctttcaacgctttcacctctggaatttttgagctcagttcttttaacactttatttttctctcaaaataactgctagcttatactttccctttttctcaatacttgcttcctgttaggcagctggggtaggtgcagccatattctattctatgttgttttgccccatgctctgggtctgggtcatgcctcaaccttcttcccagggaagaacaatctttacacagaagtttagataagttcctatgacattagaccacttttggagacttctgaggaataaaaagcttttataaggctgtctgacaggctacctggcaggttaaccaaaaaacaaaaacaaaaaacaaaaaacaaaaaaacaaaaaaaaaaaaaacaaagaagctctccagagtggcaactttatcagaaacattgttcccatttaccagagcgcccccacccccacccataccacattcttgcaatccagtttaggaagaagaagcaaataaacacatacagaaacagtaagcctggcttagggacttattccaaaaaaaacccaacaacttttaggttggtcatatgccaagtcaatctctgacatctcaaagcatatactatcagcaccaacactcagaatttaaaaacctgtgatatggcatgatattctgccatctggaaatgaatcacctgtgttcattagggtgtatttactgatgcaggaaaatatattttataaaggtagtgacaaaaagagtttgggtgtttcttctccattaaaaaaaaattctccactcttggaacatttcagttgactgggttttcattgaaccccattcccagccttattcctaacatttttgcctggatacatttggtttctctcttataagttctggaagttcctcaccacttaaaaagcaccgtctataccttagctggggtagtggttcttcctgtacacccctttgggactgacaataaagctgcggatgttctctaaaggaatttacaaatatacatagttacaccaaaaactgcaagcaattttaaagggttctctgaccctcaaaagcccatccaggaaccctagttcaagaatttctaccctaaagggaaatggaatcaacttacaggatgataaggcttctacttcacaaagcccaagagtgtcaagtagctttttctaggattgccactgggcccacaggcattctctgaatcactccacacgcttttggggtgggaatcgggccccagtcagacatgaacaaagtgtcattgagggagcccctgcctcagacaaataccgtagctgcaaatcgtgaaagtagatgtcctaacagttgtgtgaaaaattctctgcctggctgccccttagaattacacttaacaatgtgtacataataactgcagtctggaggaggtgactattcagcaggcaggcagctttatactgtcataaacctcactgggtcagctcctttgatttatgaatggccccctcataatttagaagctatgctcggatgcaattccagcactaattgtataagacacatgccgccatgctgcaactctcctggtgcctgctgcccatggcaggaagaggctgcttatagcagaaaatctctgggccacaatttccatctccgattgacacccaccttcaaatgattaaaagcccaataaaaatctgttactgggtacccaataacttattagagcctagaatgtaccccatttgggctataaaaagtatttagaggccagtttggactgcctaaaggttcctattgttatctgtctggaagtttcccttctggggaattatggagatgagttgagttgggtgaagagggaaatggagaaccacagctaggaaagaaagagacaaattgctttacctgggcagcgagggcagcacagatgaggaatatgcacaggagaaaggcaatgaacatttggacatctgactcggctgcaaagcacattcccattctgaaaaagagaaggcaatgagaaaaaataaatgtctttcaaaggtcgctgggatcaagccagtttgggaaacagtcatgcagggactcacccaggcagtgaataatgcattcccaagaagctgaatgcattcaacattttctttccttttctcatcaccagcacctctgctgggttggttgatagtttattggcatatttttctaaggctgagatcaccactcctccaattttcaaagcttcccattaattgtgggaggcttcttctggcctggctccatggcatttctaccattccccagctctagctgcatgtcttttccaagaacctactctgatttcataatcacctgtccaataacatgaaagacacaatgagcaatgggtcccctgagctgctacccagccctgggcaaggaggcatccctagcaggtggatcctggattccatataaatctgccttggcccagtgggccaagtgattcttctcatttcctttttagccaaaattcttctgaggacgagctagagtttggaatttagctgattaggtagtatgcctgggtggggcgactgggtccctgcctgatttacaattacaagacccctcgctctgacagctcacaaccatttctagaacaaagacatagtctggaaataaatttttcatttacattttccatccataaatcatttgcagcaagggctacttgtatttgtcaggctgttgtgggggaagaaagtagtgaagaggatatagaaatagaaaatgccttgtgcttgagctgttggcattgggatcattttaacattttgactgcgttgcagacatcaaagcctcagctcccaatggttagctgtccatctccaacgtgtcgaaatgtgtcgcgtcaagaatccgacaaaatcaggccatcccaggcagttaatcaatccccaaatgatctatttaatacatgccctaaccatttaaagaggcgggcttcttttatccaaattggaattgccttatcccaaccttttccttttcttgtgtactttctagaataattttttttggagtgttgcatttggcaacaccacagaagctcctcaggtatcacactcctcagaggcaggtggtataatcttgaattgagatcactgaagcacatcagaaaccacacctcccagctgaggtctaaagtgaatcctcattaatgctatatactgaattctgttctagagctaatagattaataataataacgatgatgatgataaccacaatgataaggacaacaatgatgacaataacagctgttaacatttcttgaatgtttaccaagactaagtattgttttaaatgatttaaatggatttgtaaatttaatccttatcagaaccatatgaaatggtaatatcattatcccatttataaaaagaggaagatgaatgaatatcacagaggtcaggtaacttgtccagtggctcataagtggcagaggcagggctggaaacttggtctgtctttattctagaacctcatagcctcttaatactgcctgatgttacctgataattatgtttccacatgctcaaaattctgacagcccaaaattatgttcaaatggtaaatggatcaggcttgcaagtgattgttcctgctctagctgggcatgagggaagaggtgcagtccttacaaaaggtctcaggtaagaagctggtcttgaaaattctttgtgtaagttcagaattctcaatgcctagtacaaggcctccctttccaattagcctagtgcaccacttctctaccaggggtgatttttgctccccaggcaacttggccatgtctggagacatttttggttattaggattggggttggtgctcttgttgtctaatgggtagaggccagggatactgcttaacatcccacaatgcgcaggacagcccccaaacaaatatctatagtgcaaacaagaaactctagcctaacatataatggcagaggtttgttgagaaagatggaccacagctgtgctcctgggtcaagaccatgggaagaagatggaacaacctgctttatctattgcaaagatggcatttatgccaaccaaaatcctttctaaatgactggacaagagccaaggctaagccaagggagctctaatccttaagaggtacaggccaacgtttcacaaactcagtcttaattacagttattggctgagacaacatagaatccactctcccaatgaaccagtttataatttgtcctaatattctccctaaaggtcagccttaaaataattttcaaaaactactttgtcttacaatctaaacattctattgagcttttgcctccactcccactatcaggctcttctgccttctctaaccatgccctatatcattaggctaagagatcataaatatctgtccatagtaaatattcagagaacccatgaaaatcaagccaaaaagcaagagaggacagaagacagaaaatgtttatttttcttgcaatcgtcttcttactttcttcttttattttatgagatagggtcttgttctgtcaaccatgctggagtgcagtggtataatctcggttcacttcagcctagaagtccccagctcaagtgatcctcccacctcagcctcccaactagctgagacaacaggcatgtgccaccatgcccagctaatttttgtactttttgtagagatggggttttgccatgttacccatgctggtctagaactcccgggctgaagtgatccacatgcctcagcctcacaaagtgctgggattataggcgtgagacagtgcgatcggtctgcttctttactttctttaaggattttatcatccatggtccctggccatttgggcactgaaagcctctcggcatgctgaggagcaaactgggaaatcacatgtcatgagagattgtacctctgagcagatgcagttcacgcagtaaaccaacccataaggttccaggtaaggatgccatctctcacccactctgtacttcttgtcttgaaacatgcaatatgtctctgaatctgtgaagaaggagatggagaatatgcctgttaggaaacatcaaccaagtcacaaaattcaaaagcaatcacaagttccatccattttattatacatcaagagaagtggcatagcaagtatttatagaattcctattaggggattagtgttatacatactttgctcactggatcctcaccacaatgacccataaggtagatattattattagtctcattttatagataaggaaaatcaagagtcatataaccagtaagaagctgagatggaactcaaacccaggtttgtctgacaatgatgtacaaaatctttttaaatttaattttatttttccataagttattggggtacaggtggtatttggttacatgagtaagttctttagtggtgatttgtgagaccctggtgcatccatcaccctagcagtatacactgcaccatatttgttgtcttttatctcttgtccccctcccactcttccccccaagtgcccaaagtccactgtatcattcttatgcctttacatcctcatagcttagctcccacatatcagtgagatcatacgatgttcggtttccatttctgagttacttcacttagaataatagtctccaatctcatctaggtcattgcaaatgctgttaattcattcctttttgtggctgagtagtattcatatatatacacacacacatatatatatacacacatatatataatcaatagaaacatatatatatatatatatatacacacacatactgactctctgtctctgtctctctatctatctatctatttatctatatgtttctttatccactcattgattgatgggcatttgggttggttctacaattatgcaattgtgcattgtgctgctataaacatgcgtgtgcaagtatctttttcgaataatgacttcttttcctctgcatagatacccaacactgggatttctggatcaaatggtagttctacttttaattatttaaggaatctccacactgttttccatagcggatgtactagtttacattccctgcatccacaccaacatctactgttttttcgttttttgattatggtcattcttgaaggagtatggtggtattgcatttgattatggtcattcttgaaggagtaaggtggtattgcattctggttttgatttgcatttccctgatctttagtgatgttgatcattttttcatatgtttgttgggcatttgtatatcttcttttgagaattgtctattcatgtccttggcccactttttgataggatttttttttcttactgatttgttcattgtaaattctggatattagtcctttgtcagatgtatagattgtgaagattttctcccactctgtgggttgtttgtttactctgttgactgttccttttgccatgcaaaagctctttagtttaattaggtcacagctatttatctttgtttttattgcatttgcttttgggtttttggtcatgaaatccttgtctaagccaatgtctgttgcgggaagtcagggaccccgaacagagggactggctggagccgtggcagaggaacataaattgtgaagatttcatggacattaaccagttcccaaacaatactttcataatttcttacacttgtcttactttgatctcttaatcctgttatcttcgtaagctaaggatgtacatcacctcagtgccactatgataattgtgttaactgtacaaattgactgtaaaacatgtgggtttgaacaatatgaaatcagtgcatcttgaaaaagaacagaataacagcaattttagggaacaagggaagacgaccataatgtctgactgcctgtagggtcaggcaaaaagagccatatttttcttcttgcagagagcctataaatggacatgcaagtagggaagatatctctaaattattttcctagcaaggattactctgggaaaggaatgcattcctggggggaggtctataaatggctgctctgggagtgtctgtcttatgtggttgagataaggactgaaatgcaccctggtctcctgcagtaccctcaggcttactagggtggggaaaaaccccgctctgggaaatttgaggtcacactggttctctgctctcgaaccctgttttctgttgtttaagatgtttatcaagacaataagtgcaccgctgaacatagacccttatcagtaattctgcttttgccctttgagttgtgatctttgttggacccttatcaggagtttctgattttgcccttgtcctgtttcctcagaagcatgtgatctttgttctcttttttgtcctttgaagcatgtgatcttgtgacctactccctgttcttgcaccccctccccttttgaaatccttaataaaacttgctggttttgtggctcaggtgggcatcaccatcctaccgatatgtgatttcacccccagcggcccagctgtaaaattcctctctttgtactctttctctttatttcttagccggttgacatttatggaaaatagaaagaacctacgttgaaatattggtggcatgtttccccagtaaatgtctagaagggtttttccaatgttatcttctagagtttttatagtttcaggtcttaggtttaagtccttaatccatcttgagttgatttttgtataaggtgagagacgaggatccagtttcattctcttacatgtggcttgccagttatcccagcactatttgttgaaaaggacccccacatttatgtttttgtttgctttgctgaagatcagttggctgtaagtatttgggtttatttctgggttctctattctgttccattggtctatatgcctatttttataccagtaccatgatcccaaatttataaaacaattactaacagacctaagaaatgaaatagacagcaacacagtaatagtaggggacttcaatattccactgacagcactagacagatcatcaagacacaaagtcaacaaagaaacaatggatttaaactataccttggaacaaatggacttacaagatatatatagaatatttcatccaacaaccacagaatacacattctattcaacagagcatggaactttctgcaaaatagaccatatgataggtcataaaacaagcctcaataaatttaagaaaatcgaaattgtatcaagcactctctcagaccacagtggaataaaactggaaatcaactccaaaaggaaccttcaaaaccacacaaataaatggaaattaaataacctgctcccgaatgagcattgggtgaaaaacaaaatcaagatagaaatttaaaaattcttcaaactgaatgataataatgacagaaccttatcaaaatctctgggataaggctaaggcagtgctaagaggaaagtgcataaccctaaacacctacatcgaaaagtctgaaagagcacaaatagacaatctaaggtcacacctcaaggaactagagaaacaagaacaaaccaaacccaaacccagcagaagaaaggaaataaccaagatcagagtagaactaaatgaaattgaaacaaaaaaaagacacaaaagataagtgaaacaaaaagctggttctttgaaaagataaataaaatcgatagaccattagcaagattaaccaagaaaagagagaaaattcaaataacctcactgagaaacaaaacaggagtatcttcaaatactgaaatacgaaagatcattcaagactactatgaacacctttacacacataaactaggaaacctagaagagatggataaattcctggaaaaatacaaccctcctagcttaaatcaagaagaattagataccctgaacaaaccaataacaagcagagagattgaaatggtaatttaaaaattaccaacaaaaaaaagtccaggaccaggtggattcacagcagaattctgccagacattcaaagaagaattggtaccaatccttttgacactactccataagacagagcaagaaggaaccctccttaattcattctatgaagccagcatcaccctaacaccaaaaccaggaaaggccacaaccaaaaaaggaaactacagaccaatatctttgatgaacatagatgctaaaatcattaacaaaatactatctaactgaatccaacaacctatcaaaaagacaatccaccacgatcaagtaggtttcataccagggatgcaaggatggtttaacatatgtaagtcaataaatgtggtacaccacataaacagaattaaaaacaaaaatcacatgatc

SEQ ID NO: 1126 - protein, 448 aa, Homo sapiens
SETYCMFQDKKYRVGERWHPYLEPYGLVYCVNCICSENGNVLCSRVRCPNVHCLSPVHIPHLCCPRCPEDSLPPVNNKVTSKSCEYNGTTYQHGELFVAEGLFQNRQPNQCTQCSCSVLSEAFTLILDASNLNSVSPWQEGNVYCGLKTCPKLTCAFPVSVPDSCCRVCRGDGELSWEHSDGDIFRQPANREARHSYHRSHYDPPPSRQAGGLSRFPGARSHRGALMDSQQASGTIVQIVINNKHKHGQVCVSNGKTYSHGESWHPNLRAFGIVECVLCTCNVTKQECKKIHCPNRYPCKYPQKIDGKCCKVCPGKKAKEELPGQSFDNKGYFCGEETMPVYESVFMEDGETTRKIALETERPPQVEVHVWTIRKGILQHFHIEKISKRMFEELPHFKLVTRTTLSQWKIFTEGEAQISQMCSSRVCRTELEDLVKVLYLERSEKGHC

SEQ ID NO: 1127 - DNA, 2669 bp, Homo sapiens
cagatgccagaagaacactgttgctcttggtggacgggcccagaggaattcagagttaaaccttgagtgcctgcgtccgtgagaattcagcatggaatgtctctactatttcctgggatttctgctcctggctgcaagattgccacttgatgccgccaaacgatttcatgatgtgctgggcaatgaaagaccttctgcttacatgagggagcacaatcaattaaatggctggtcttctgatgaaaatgactggaatgaaaaactctacccagtgtggaagcggggagacatgaggtggaaaaactcctggaagggaggccgtgtgcaggcggtcctgaccagtgactcaccagccctcgtgggctcaaatataacatttgcggtgaacctgatattccctagatgccaaaaggaagatgccaatggcaacatagtctatgagaagaactgcagaaatgaggctggtttatctgctgatccatatgtttacaactggacagcatggtcagaggacagtgacggggaaaatggcaccggccaaagccatcataacgtcttccctgatgggaaaccttttcctcaccaccccggatggagaagatggaatttcatctacgtcttccacacacttggtcagtatttccagaaattgggacgatgttcagtgagagtttctgtgaacacagccaatgtgacacttgggcctcaactcatggaagtgactgtctacagaagacatggacgggcatatgttcccatcgcacaagtgaaagatgtgtacgtggtaacagatcagattcctgtgtttgtgactatgttccagaagaacgatcgaaattcatccgacgaaaccttcctcaaagatctccccattatgtttgatgtcctgattcatgatcctagccacttcctcaattattctaccattaactacaagtggagcttcggggataatactggcctgtttgtttccaccaatcatactgtgaatcacacgtatgtgctcaatggaaccttcagccttaacctcactgtgaaagctgcagcaccaggaccttgtccgccaccgccaccaccacccagaccttcaaaacccaccccttctttaggacctgctggtgacaaccccctggagctgagtaggattcctgatgaaaactgccagattaacagatatggccactttcaagccaccatcacaattgtagagggaatcttagaggttaacatcatccagatgacagacgtcctgatgccggtgccatggcctgaaagctccctaatagactttgtcgtgacctgccaagggagcattcccacggaggtctgtaccatcatttctgaccccacctgcgagatcacccagaacacagtctgcagccctgtggatgtggatgagatgtgtctgctgactgtgagacgaaccttcaatgggtctgggacgtactgtgtgaacctcaccctgggggatgacacaagcctggctctcacgagcaccctgatttctgttcctgacagagacccagcctcgcctttaaggatggcaaacagtgccctgatctccgttggctgcttggccatatttgtcactgtgatctccctcttggtgtacaaaaaacacaaggaatacaacccaatagaaaatagtcctgggaatgtggtcagaagcaaaggcctgagtgtctttctcaaccgtgcaaaagccgtgttcttcccgggaaaccaggaaaaggatccgctactcaaaaaccaagaatttaaaggagtttcttaaatttcgaccttgtttctgaagctcacttttcagtgccattgatgtgagatgtgctggagtggctattaacctttttttcctaaagattattgttaaatagatattgtggtttggggaagttgaattttttataggttaaatgtcattttagagatggggagagggattatactgcaggcagcttcagccatgttgtgaaactgataaaagcaacttagcaaggcttcttttcattattttttatgtttcacttataaagtcttaggtaactagtaggatagaaacactgtgtcccgagagtaaggagagaagctactattgattagagcctaacccaggttaactgcaagaagaggcgggatactttcagctttccatgtaactgtatgcataaagccaatgtagtccagtttctaagatcatgttccaagctaactgaatcccacttcaatacacactcatgaactcctgatggaacaataacaggcccaagcctgtggtatgatgtgcacacttgctagactcagaaaaaatactactctcataaatgggtgggagtattttggtgacaacctactttgcttggctgagtgaaggaatgatattcatatattcatttattccatggacatttagttagtgctttttatataccaggcatgatgctgagtgacactcttgtgtatatttccaaatttttgtatagtcgctgcacatatttgaaatcatatattaagactttccaaagatgaggtccctggtttttcatggcaacttgatcagtaaggatttcacctctgtttgtaactaaaaccatctactatatgttagacatgacattctttttctctccttcctgaaaaataaagtgtgggaagagacaaaaaaaaaaaaa

SEQ ID NO: 1128 - protein, 560 aa, Homo sapiens
MECLYYFLGFLLLAARLPLDAAKRFHDVLGNERPSAYMREHNQLNGWSSDENDWNEKLYPVWKRGDMRWKNSWKGGRVQAVLTSDSPALVGSNITFAVNLIFPRCQKEDANGNIVYEKNCRNEAGLSADPYVYNWTAWSEDSDGENGTGQSHHNVFPDGKPFPHHPGWRRWNFIYVFHTLGQYFQKLGRCSVRVSVNTANVTLGPQLMEVTVYRRHGRAYVPIAQVKDVYVVTDQIPVFVTMFQKNDRNSSDETFLKDLPIMFDVLIHDPSHFLNYSTINYKWSFGDNTGLFVSTNHTVNHTYVLNGTFSLNLTVKAAAPGPCPPPPPPPRPSKPTPSLGPAGDNPLELSRIPDENCQINRYGHFQATITIVEGILEVNIIQMTDVLMPVPWPESSLIDFVVTCQGSIPTEVCTIISDPTCEITQNTVCSPVDVDEMCLLTVRRTFNGSGTYCVNLTLGDDTSLALTSTLISVPDRDPASPLRMANSALISVGCLAIFVTVISLLVYKKHKEYNPIENSPGNVVRSKGLSVFLNRAKAVFFPGNQEKDPLLKNQEFKGVS

SEQ ID NO: 1129 - DNA, 3018 bp, Homo sapiens
ctcctcacaggtgtgtctctagtcctcgtggttgcctgccccactccctgccgagacgcctgccagaaaggtcacctatcctgaaccccagcaagcctgaaacagctcagccaagcaccctgcgatggaagctgcagatgcctccaggagcaacgggtcgagcccagaagccagggatgcccggagcccgtcgggccccagtggcagcctggagaatggcaccaaggctgacggcaaggatgccaagaccaccaacgggcacggcggggaggcagctgagggcaagagcctgggcagcgccctgaagccaggggaaggtaggagcgccctgttcgcgggcaatgagtggcggcgacccatcatccagtttgtcgagtccggggacgacaagaactccaactacttcagcatggactctatggaaggcaagaggtcgccgtacgcagggctccagctgggggctgccaagaagccacccgttacctttgccgaaaagggcgacgtgcgcaagtccattttctcggagtcccggaagcccacggtgtccatcatggagcccggggagacccggcggaacagctacccccgggccgacacgggccttttttcacggtccaagtccggctccgaggaggtgctgtgcgactcctgcatcggcaacaagcagaaggcggtcaagtcctgcctggtgtgccaggcctccttctgcgagctgcatctcaagccccacctggagggcgccgccttccgagaccaccagctgctcgagcccatccgggactttgaggcccgcaagtgtcccgtgcatggcaagacgatggagctcttctgccagaccgaccagacctgcatctgctacctttgcatgttccaggagcacaagaatcatagcaccgtgacagtggaggaggccaaggccgagaaggagacggagctgtcactgcaaaaggagcagctgcagctcaagatcattgagattgaggatgaagctgagaagtggcagaaggagaaggaccgcatcaagagcttcaccaccaatgagaaggccatcctggagcagaacttccgggacctggtgcgggacctggagaagcaaaaggaggaagtgagggctgcgctggagcagcgggagcaggatgctgtggaccaagtgaaggtgatcatggatgctctggatgagagagccaaggtgctgcatgaggacaagcagacccgggagcagctgcatagcatcagcgactctgtgttgtttctgcaggaatttggtgcattgatgagcaattactctctccccccacccctgcccacctatcatgtcctgctggagggggagggcctgggacagtcactaggcaacttcaaggacgacctgctcaatgtatgcatgcgccacgttgagaagatgtgcaaggcggacctgagccgtaacttcattgagaggaaccacatggagaacggtggtgaccatcgctatgtgaacaactacacgaacagcttcgggggtgagtggagtgcaccggacaccatgaagagatactccatgtacctgacacccaaaggtggggtccggacatcataccagccctcgtctcctggccgcttcaccaaggagaccacccagaagaatttcaacaatctctatggcaccaaaggtaactacacctcccgggtctgggagtactcctccagcattcagaactctgacaatgacctgcccgtcgtccaaggcagctcctccttctccctgaaaggctatccctccctcatgcggagccaaagccccaaggcccagccccagacttggaaatctggcaagcagactatgctgtctcactaccggccattctacgtcaacaaaggcaacgggattgggtccaacgaagccccatgagctcctggcggaaggaacgaggcgccacacccctgctcttcctcctgaccctgctgctcttgccttctaagctactgtgcttgtctgggtgggagggagcctggtcctgcacctgccctctgcagccctctgccagcctcttgggggcagttccggcctctccgacttccccactggccacactccattcagactcctttcctgccttgtgacctcagatggtcaccatcattcctgtgctcagaggccaacccatcacaggggtgagataggttggggcctgccctaacccgccagcctcctcctctcgggctggatctgggggctagcagtgagtacccgcatggtatcagcctgcctctcccgcccacgccctgctgtctccaggcctatagacgtttctctccaaggccctatcccccaatgttgtcagcagatgcctggacagcacagccacccatctcccattcacatggcccacctcctgcttcccagaggactggccctacgtgctctctctcgtcctacctatcaatgcccagcatggcagaacctgcagtggccaagggctgcagatggaaacctctcagtgtcttgacatcaccctacccaggcggtgggtctccaccacagccactttgagtctgtggtccctggagggtggcttctcctgactggcaggatgaccttagccaagatattcctctgttccctctgctgagataaagaattcccttaacatgatataatccacccatgcaaatagctactggcccagctaccatttaccatttgcctacagaatttcattcagtctacactttggcattctctctggcgatggagtgtggctgggctgaccgcaaaaggtgccttacacactgcccccaccctcagccgttgccccatcagaggctgcctcctccttctgattaccccccatgttgcatatcagggtgctcaaggattggagaggagacaaaaccaggagcagcacagtggggacatctcccgtctcaacagccccaggcctatgggggctctggaaggatgggccagcttgcaggggttggggagggagacatccagcttgggctttcccctttggaataaaccattggtctgtc

SEQ ID NO: 1130 - protein, 588 aa, Homo sapiens [sequence omitted]

SEQ ID NO: 1131 - DNA, 4666 bp, Homo sapiens
cgagactcagccagaggagtacggattaaggggccgaagaaagaggagtgaggcaggggagcgaggcggacgctccgagcgcatcggactcacctgggccggcggcgagcggcgagtacgagtggactcttgccctccgcagcatgcgccccgcctgctaagtcgccgccgtctcgccctcacctagcaccgccaatcccgcctggatggagtcccctctagggttcccattggctcctgtgagtgcttgggtgttcgggagcctgtttttggcggaggggaaccaacttttgaagttcgcccagaagactgcgttccagccccagttccccggcagcgggacccggcgaagacgcgaccgcggcgcgagtcaccatgggaagcaaaggtgtctaccagtaccactggcaaagccacaatgtcaagcacagtggtgtggacgacatggtgctactgtccaagatcacagagaactccatcgtggagaatctgaagaagagatacatggatgactacatttttacatatataggatctgtattaatctcagtcaaccctttcaagcagatgccatattttggggaaaaggaaattgaaatgtaccaaggagcggcacagtatgaaaacccaccacatatctatgcccttgcagataatatgtacagaaacatgatcattgacagagagaaccagtgcgtcattatcagtggtgaaagtggtgctggaaaaacagtggctgccaaatatatcatgagctacatctccagagtgtctggaggagggaccaaagtccagcacgtgaaggacattatcctgcagtccaacccgctgctggaggccttcgggaacgccaagaccgtccggaacaacaactccagccgatttggaaaatactttgaaatccagttcagtccaggtggggaaccagatggtggaaagatctccaacttccttctggaaaaatctagggtggtgatgaggaacccaggagagcggagttttcacatattttaccagctcatcgagggcgcctctgcagagcagaaacacagccttggcatcaccagcatggactattattactacctgagcctctcgggctcatacaaggttgatgacattgacgacaggcgggagtttcaggaaactctgcacgccatgaatgtgattgggatctttgcagaagagcaaacgctggtgttgcagatagtggcgggtattctccacctgggaaacatcagcttcaaagaagttggcaactacgcggctgtggagagtgaagagtttttagcttttcctgcatatctgctagggataaaccaggaccggttgaaagaaaagctaacaagccggcagatggatagcaagtggggaggcaaatccgaatccatccacgtgaccctcaacgtagagcaggcctgttacacccgggatgcgctcgccaaggccctgcacgcccgggtctttgatttcttggtagattccatcaataaagccatggagaaagaccatgaagaatacaacattggcgtcctagacatctatggctttgaaatattccagaaaaatggctttgaacagttttgtatcaattttgttaatgaaaaactgcagcagatttttattgaactgacattaaaggcagaacaggaagaatatgttcaagagggaataagatggacacccattgagtactttaataataaaatcgtatgtgacctcatagagaacaaagtgaaccctcctggcatcatgagcatcctggatgacgtgtgcgccacgatgcatgcggtgggtgagggggcagatcagacgctgctccagaaacttcagatgcagattgggagtcatgagcacttcaacagttggaaccaaggcttcatcattcatcattatgctgggaaggtatcctatgacatggatggcttttgtgaaaggaaccgggatgtgctttttatggatctcatcgagcttatgcagagcagcgagctgcctttcataaagtctttatttccggaaaatctgcaggctgacaagaaagggcgcccaactactgccggaagcaaaataaagaaacaagccaatgaccttgtgagcaccctgatgaaatgtacgccccactacattcgctgcatcaagccaaacgaaaccaagaagcccagagactgggaggaaagcagggtaaagcatcaagtcgaatatttgggtctgaaagagaacattcgagtgagaagagctggctatgcctatcggcgcatcttccaaaaattcctacagaggtatgccattctgaccaaagccacctggccttcttggcagggagaggagaagcaaggcgtcctgcacctgctgcagtcggtcaacatggacagcgaccagttccagctggggaggagtaaagtgttcatcaaagcccccgagtctctatttcttttagaagagatgagagagagaaagtatgatgggtatgctcgagtgatacagaaatcatggaggaaattcgtggcccggaagaaatacgttcaaatgagagaagaagcctcagacctcttattgaacaagaaggagagaaggagaaacagtattaacaggaactttataggggattatattgggatggaagagcacccagaactccagcagttcgtgggcaagagggagaagattgatttcgcagacacagtcaccaagtatgacaggaggttcaagggtgtaaagcgagacctgctccttaccccaaagtgcttgtacttaatcggacgagaaaaagtcaaacagggcccagacaagggcctggtgaaagaagtcctgaagcggaaaatcgagatagaacggatcttgtctgtgtccctcagtactatgcaggatgacatttttattctccatgagcaagagtatgacagtttgcttgaatctgtcttcaaaactgaattcctaagcctcttagcaaagcgttacgaggagaagacccagaagcaactacctctgaaattcagcaatacgcttgaactgaagttgaaaaaggaaaactggggccctggagtgcagggtgcgggctcccggcaagtgcagttccaccaagggtttggggacctggctgtcctcaagcccagtaacaaagtgctgcaggtcagcatcggacctggactgcccaagaactcccgtcctaccagaaggaacactacccaaaatacaggttattccagtgggactcaaaatgccaactacccagtgagagctgcccctcctcccccaggataccatcagaacggagtcatcagaaaccagtatgtgccatatccccatgctcctggaagccagaggtccattcagaaaagcctgtacacctccatggcccgcccgcccttgcctcggcagcagtctaccagttcagaccgagtgtcacagacgccagagagcctggatttcctcaaggtcccggaccagggagctgcaggggtcaggagacaaacaaccagtcggcctcccccagctgggggcagacccaagccccagcccaagcccaagcctcaggttccacagtgcaaggctttgtatgcctatgacgctcaggacacagacgaactcagctttaatgccaatgacattattgatattatcaaagaagatccttctggctggtggacgggtcgactacgaggcaagccagggctgttccccaacaactatgtgaccaagatctgaggtgcccgtgactctgacacatggggcagaggagctccaggcacagaccaggtgaggggatatttaggtgctccccttacaatccacaatgagcaattgcttctccaaggcctggagctattctggtaccttccccatggaggacactgaaaaggctgggttggggacagggagtatcactccataagtgatcctaaaaggtagcctcttcataggaaccaggaggacaaaaccaccatgcattaagatttatttattgtatttaaacctggtgagaggacaagtgaggtctgctcagaccttgtaggcttctatcaaaacagcaccctgcttgctcaccaggcctagagaatggctgtaggtggcggctgagaagtgcctttagttgaagagcacatttctttcatctctcttgtctatacctgatagacacattcctctctgccaccttccttcagggaggacccgccctctgcagactgggcttagcgtgagcaggcacttcccatgtacgtgccaagggtaagctggcctgctgagcccagggcgacagaggggcactggtttacactttgccgggaccatcagggccgccaagcaggtcaggggctgggggctggtcctgctggctttgatttctctgggtcttcaattagaatgtggctgggcccatattggtttgtgttaaatgctgtacttactacaagaatcttttttcaagcatgtacatttataaaaacaggatcatatactgtatatataaaaatcttgagatggtagaaacatgtatgaatgtactaagtagtattccactgtactcattcataaggtaggttttcttacaaaactcacaccaggtacttaaagatgtgctctgcttttttccaactacggagtgtcactgctttctaggtcagtccctgcagactcttctcaactctttccctataggaaacttact

SEQ ID NO: 1132 - protein, 1109 aa, Homo sapiens
MGSKGVYQYHWQSHNVKHSGVDDMVLLSKITENSIVENLKKRYMDDYIFTYIGSVLISVNPFKQMPYFGEKEIEMYQGAAQYENPPHIYALADNMYRNMIIDRENQCVIISGESGAGKTVAAKYIMSYISRVSGGGTKVQHVKDIILQSNPLLEAFGNAKTVRNNNSSRFGKYFEIQFSPGGEPDGGKISNFLLEKSRVVMRNPGERSFHIFYQLIEGASAEQKHSLGITSMDYYYYLSLSGSYKVDDIDDRREFQETLHAMNVIGIFAEEQTLVLQIVAGILHLGNISFKEVGNYAAVESEEFLAFPAYLLGINQDRLKEKLTSRQMDSKWGGKSESIHVTLNVEQACYTRDALAKALHARVFDFLVDSINKAMEKDHEEYNIGVLDIYGFEIFQKNGFEQFCINFVNEKLQQIFIELTLKAEQEEYVQEGIRWTPIEYFNNKIVCDLIENKVNPPGIMSILDDVCATMHAVGEGADQTLLQKLQMQIGSHEHFNSWNQGFIIHHYAGKVSYDMDGFCERNRDVLFMDLIELMQSSELPFIKSLFPENLQADKKGRPTTAGSKIKKQANDLVSTLMKCTPHYIRCIKPNETKKPRDWEESRVKHQVEYLGLKENIRVRRAGYAYRRIFQKFLQRYAILTKATWPSWQGEEKQGVLHLLQSVNMDSDQFQLGRSKVFIKAPESLFLLEEMRERKYDGYARVIQKSWRKFVARKKYVQMREEASDLLLNKKERRRNSINRNFIGDYIGMEEHPELQQFVGKREKIDFADTVTKYDRRFKGVKRDLLLTPKCLYLIGREKVKQGPDKGLVKEVLKRKIEIERILSVSLSTMQDDIFILHEQEYDSLLESVFKTEFLSLLAKRYEEKTQKQLPLKFSNTLELKLKKENWGPGVQGAGSRQVQFHQGFGDLAVLKPSNKVLQVSIGPGLPKNSRPTRRNTTQNTGYSSGTQNANYPVRAAPPPPGYHQNGVIRNQYVPYPHAPGSQRSIQKSLYTSMARPPLPRQQSTSSDRVSQTPESLDFLKVPDQGAAGVRRQTTSRPPPAGGRPKPQPKPKPQVPQCKALYAYDAQDTDELSFNANDIIDIIKEDPSGWWTGRLRGKPGLFPNNYVTKI

SEQ ID NO: 1133 - DNA, 892 bp, Homo sapiens
  misc_feature (633)..(633): n is a, c, g, or t
  misc_feature (670)..(670): n is a, c, g, or t
tttcctattttatttagcaggcattttctttactgaggtttatattgtctgccaaaactaggaggaaaagaaaatattaacaaccctgaaagctctttcattctgaattattccttaatgtttttaatgatttattataaccacacaaatgtgatcttggggccatttggaagttattgagtttccttggagatgggacttggcattttccaaaccagagtttgcttttgtggcctggaagttgcaaggcatatatatttggaagactaaagattattccccaccaagaagttttgtcaacctgaccttctctactcttatgacgctgcacacacagcagtaatctctgcagaggagagcaaataaagtgaagaaatatagcggtacgtgttatttttacatcctaaagtaaattctccagcattaaggctgactgggaatttccatctcagagttctcatgaatgctgctccactttggtgttgtctcttgaatgctttttattataggtctttgaaggaggtatttcttggtatttattcagccagagagagtagttgatgtggaatttgggaacacaggggtgtgggagcgctctctgggtgacctgtctctccgttgaccttcaggttntttatgtgcctcaccagtcaggtgaggctagtcaccnattagaacaatgtactagtctggtatgatctttgccagtctaatacttggaatggctcttaacctatgtccgggcaagatggggccccccttgaagccttaacctcggtaaagagagtttctctccgtggttgaggttcccaacgcttcaacccgcctcgcagttctgggtttgggttccccccccaaaaaaaaccgttggggcgtcttccaaaccttgtct

SEQ ID NO: 1134 - DNA, 272 bp, Homo sapiens
  misc_feature (129)..(129): n is a, c, g, or t
  misc_feature (201)..(201): n is a, c, g, or t
cggtcccggtgggccgacttccggcgagcgggcaagcgggaaccaggtggccacccggtgtcggtttcattttcctttggaatttctgctttacagacagaacaatggcagcccgagtacttataattngcagtggaggaagggaacatacgctggcctggaaacttgcacagtctcatcatgtcaaacaagtgttggttnccccaggaaacgcaggcactcctcttctgaaaagatttcaaataccgccatctcaatcagtgaccacactg

SEQ ID NO: 1135 - DNA, 298 bp, Homo sapiens
  misc_feature (35)..(36): n is a, c, g, or t
  misc_feature (157)..(157): n is a, c, g, or t
cagagtcctggccctgagcgggactcgcagtggcnnaggctgagcggcaggtagaaggggcgtctccggggcttcacagggaacacagggggttcggccaaccacaagtacgcattgcacatgccctacttttgcccattctttgcaaatcccctanggaacgaacgcgcctcggtgcgggcctttctaatcttcgcttgtcccttcacttccacagctggaggtcgaattcaccacgtcacgtagagaaaaggggcggtgtctcgggtctccccgtgtggcatcaaggcgggctccc

SEQ ID NO: 1136 - DNA, 4935 bp, Homo sapiens
atacaatagtgctccgcgccgcctcagccgccgccgccgcccaaccgcctgcccagcgctgaggcctgacgggccgggcggacgagggccgagggcgggagctgaggcgcggggggcggccccggcggggggcgggggcgaggaggggattaaggggcaggtgcgagggagggaagagaagaaagcgagcggttaggggggcggttaccactccgaccggactcacccggcacattgccgggccgcggcgtggagccgggcaggagccgcgagccagctgcgcgaaggatgctccaggatgaaacgccataggcctgtcagcagcagtgacagttcagacgaaagtccttccacttcctttacttctggctcaatgtataggatcaagtcaaaaattccaaatgaacacaagaaacctgctgaggtattccggaaggacctcatcagtgccatgaaacttccagattctcaccacattaatcctgatagctattacctctttgctgatacatggaaggaagaatgggaaaagggagtccaggtaccagccagtccagacaccgttccacagccttctctcaggattatagctgagaaggtaaaggacgttctgtttatccgaccccggaagtatattcactgctccagcccagacaccacagagcctggctacatcaacatcatggagttggcagcatctgtttgccgctatgacctagatgacatggacatcttctggcttcaggaactcaatgaagaccttgcagaaatgggttgtgggccagttgatgagaatcttatggaaaagacagtagaagtcctggaacgccattgccatgaaaatatgaaccatgctattgagacagaggaagggctaggcatagagtatgatgaagatgtgatctgtgatgtgtgccggtctccagacagtgaagaagggaatgatatggtgttctgtgataagtgtaacgtctgtgtgcatcaggcctgctatggcatcctcaaggtcccagaaggcagctggctgtgtcgctcctgtgtcctgggcatttatccgcaatgtgtgttatgtccaaagaaaggtggagccctgaagaccaccaagacagggactaaatgggctcatgtcagctgtgccctgtggatcccagaggtcagcattgcttgtcctgagaggatggaaccgatcacgaagatctcccacatcccacccagtcggtgggccttagtctgcaacttgtgcaagttgaagacgggggcttgtattcagtgctctataaaaagctgcatcactgccttccacgtcacctgtgcctttgagcacggcctagagatgaagaccatcctagatgagggagacgaagtgaagttcaagtcatattgcctcaagcatagccaaaacaggcagaaacttggagaagctgagtacccccaccacagggctaaagagcagagccaggccaaaagtgagaaaaccagcctgcgggcacagaagcttcgggagctggaggaggagttctattccttggtacgagtggaagatgtggccgcagagctgggtatgcccacgctagctgtggactttatctataactactggaaactgaagcggaaaagtaacttcaataagccattatttcctccaaaggaggatgaagaaaatgggctggtgcagccaaaagaggaaagcattcacactcgaatgagaatgtttatgcatctacgccaggacctggagagggtccgaaatctgtgctatatgataagcagacgagagaagctgaagctgtcacacaacaaaatacaggaacagatcttcggtttgcaagtccagcttcttaaccaagaaattgatgcagggcttcctttgacaaatgcacttgaaaactcactgttttacccaccaccaagaattaccttgaagttaaaaatgcccaaatcaaccccagaagaccacagaaacagctccacagaaaccgatcagcagccccactctcctgacagcagctcatctgttcacagtataaggaacatgcaggtgcctcaggagtcactagaaatgagaacaaaatcgtatccgagatacccactagagagcaagaataaccgtttgctggccagtctcagccattctaggagtgaagcaaaggagtccagtcctgcttggagaaccccgtcctcggagtgctatcatgggcagtcactgggaaagcctctggtccttcaggctgccctccatggacagtcttccattgggaatgggaaaagtcagcctaactccaagtttgccaaatccaatggcctggagggcagctggtctgggaatgtcacccaaaaagacagctcgagtgagatgttctgtgaccaggagcctgtgttcagcccccacttggtcagtcagggcagctttagaaaatccactgtagaacactttagtaggtcctttaaagagaccaccaataggtgggtgaagaacacagaggacctccagtgctatgtgaagccaaccaagaatatgagccccaaggagcagttctggggtagacaggttctcaggcggtctgcagggagagctccatatcaggaaaatgatggctattgcccagatttggagctgagtgattcagaggcagaaagtgatgggaataaagaaaaagtcagggtaaggaaagatagctcagacagggaaaatcctccccatgactctagacgggattgccatggtaaaagcaagacacatcccctttcccacagttcaatgcaaaggtgattagaaacttccaaggatgacccaacctttgcctttgccccatatattggggaaaacccatacaccaaaaggattttagcatatgttaagaggaattgcagtgaaaaggataacatttttccatagtaaattgtcttgcagtttttgaaaatgtttcaagtctagtttttacaagcacattacagtaattgcaggttgtccagaggttggtttgtcagaggctattgggaacagctgggcccagggtatttgctcagtaaatattttggggcagctttccggttatataacacattgacaagtatatgtattaagagtccttgcattgttaactgatttgcaagagaccatgattatcagacactaaaactacttatcttttgaagctacagcatgtgactccccagagctcctgtctgtaggaagtttctaattccactggtatctataaacccttttcaggggagagaccaggagaccaccatcttagatactgtcaaactcactactgtcttcctttgttctgcacaaggttgagtttctttcacagtatcttaacttactgagtcaatactcctcatgcttatcagtgtccagtgcctgttcctaaacttgcttgttggggacacactcataactatttcacctgactgacaagcataaaaggctaacttgtggatagtgtttacaaaagtacaaaagtactacttccaaggaaaatgctctgattctctgtttaggcatttgtgaaggattccagagcctttcccaaagtgagaccatttctggggtatttgtaccaggtcagggtttttgtgttgttttcaaataagtttgactaaaataagtttggctgacagtttttgtatacctgctttaatgtttataaaatttttattgaggtataattaaaatatagtaaaatgcacagaggttaagtattcttacctgctttaattttgaaacagatttttattgtcaaacagaatttgaaagcatgtgtttaacacatggatataatttagctttgtgtcacctttgaatctgaggcagtttcccaaacaaaaaggctggagccatttttcagaagttgcttataccctgttcccaaactatcagccttgattaatttctagtaggaagagaataattacatttgcggggggggggggtggataaaaacatgtctgcttctcatttaaataagagagaaatgatgccgttttttaaatgtgaagcagactataattctcagctctcttttcttcttagccttaaattaatattctctttcttctagttttggaaagtgtagtgggaatattcagacaaaagaggccattttccatttttaaagcttcttactggtgaaacagcccagttgtagtaggtgccagtcagtcaaggcaggggccctctctccgtcaatatggaaaactcagcagttttcctctcccccagttgtgttcttgtaacgttgttaatgggttcctttgctttttgctttctccttttctgaaaatgtatgtgttttgcctctcttttggctacatcttcaaaatatttcttttgtgcctatgtacatgtgtaaacatgccatagcatgtgtggtaggtgtcctgtattttgtttgggaaaaaaactatcaaaatgaggaagagaatttcccctatttatgcactaggtttctgtgctttttctttgagttctctggagtagatattaatttgataccttcatggtaatgaaattatgatggagctgtgttataaattccttatgtcagaggccagtgcggtagcctttgtcccttcatgcctttcaattctgagtgggaggaaaagcaaacatcaaaacagtgcttcagccaaattccatatgtaatgccattgggagagtattgactaaaatatcattcgtcagggaaatatagttgtaatatttttacaggatattcctaggtaaatgaaggagccttcagttgtaaatttcaattaccccaaaatgtatttgctacattttgttgtttgaagtattacctcttaaccttctttgttaatttttttcattttgtcttatatagtccagttttccaagataagctcagtcctttttcaaatgtcccctttttaccaatactttttcattaaattatgaaaactgct

SEQ ID NO: 1137 - protein, 823 aa, Homo sapiens
MKRHRPVSSSDSSDESPSTSFTSGSMYRIKSKIPNEHKKPAEVFRKDLISAMKLPDSHHINPDSYYLFADTWKEEWEKGVQVPASPDTVPQPSLRIIAEKVKDVLFIRPRKYIHCSSPDTTEPGYINIMELAASVCRYDLDDMDIFWLQELNEDLAEMGCGPVDENLMEKTVEVLERHCHENMNHAIETEEGLGIEYDEDVICDVCRSPDSEEGNDMVFCDKCNVCVHQACYGILKVPEGSWLCRSCVLGIYPQCVLCPKKGGALKTTKTGTKWAHVSCALWIPEVSIACPERMEPITKISHIPPSRWALVCNLCKLKTGACIQCSIKSCITAFHVTCAFEHGLEMKTILDEGDEVKFKSYCLKHSQNRQKLGEAEYPHHRAKEQSQAKSEKTSLRAQKLRELEEEFYSLVRVEDVAAELGMPTLAVDFIYNYWKLKRKSNFNKPLFPPKEDEENGLVQPKEESIHTRMRMFMHLRQDLERVRNLCYMISRREKLKLSHNKIQEQIFGLQVQLLNQEIDAGLPLTNALENSLFYPPPRITLKLKMPKSTPEDHRNSSTETDQQPHSPDSSSSVHSIRNMQVPQESLEMRTKSYPRYPLESKNNRLLASLSHSRSEAKESSPAWRTPSSECYHGQSLGKPLVLQAALHGQSSIGNGKSQPNSKFAKSNGLEGSWSGNVTQKDSSSEMFCDQEPVFSPHLVSQGSFRKSTVEHFSRSFKETTNRWVKNTEDLQCYVKPTKNMSPKEQFWGRQVLRRSAGRAPYQENDGYCPDLELSDSEAESDGNKEKVRVRKDSSDRENPPHDSRRDCHGKSKTHPLSHSSMQR

SEQ ID NO: 1138 - DNA, 520 bp, Homo sapiens
ttctcggctgatctctctgggtaggtgccctctgggggcagtacccctgcctgagtggcacttcccctcctggctttgtttggtttggcctcgatttagaacagggttggcagaggcaggctgacttgcatttctggttttgggtttgttgctgcactttccccaaggggtgggcgggctctgactgacagtcaccactgggacaggcctgggccccaccctcaccacccaggaaaggggaaatgcggcccgctccccactcagtgccactctgtgccactccgtgccaggccctgagggcacccggttgctgcttccttccgtctttccccaaggactatcagagatgccagcgtgacccctgacacgtgtgtgcagcagcctgcagctgccccaagccatggctgaacactgactcccagctgtggggcttcaccattacagactccccagggcttcaaagacttctcagcttcgagcatggcttttggctgtcagggcagctgtacaatagtggatg

SEQ ID NO: 1139 - protein, 1 aa, Homo sapiens
M

SEQ ID NO: 1140 - DNA, 586 bp, Homo sapiens
  misc_feature (586)..(586): n is a, c, g, or t
gctatccagacagagcagctaccctcagctctagctgatactacagacagtacaacagatcaagaagtatggcagtgacaactcgtttgacatggttgcacgaaaagatcctgcaaaatcattttggagggaagcggcttagccttctctataagggtagtgtccatggattccgtaatggagttttgcttgacagatgttgtaatcaagggcctactctaacagtgatttatagtgaagatcatattattggagcatatgcagaagagagttaccaggaaggaaagtatgcttccatcatcctttttgcacttcaagatactaaaatttcagaatggaaactaggactatgtacaccagaaacactgttttgttgtgatgttacaaaatataactccccaactaatttccagatagatggaagaaatagaaaagtgattatggacttaaagacaatggaaaatcttggacttgctcaaaattgtactatctctattcaggattatgaagtttttcgatgcgaagattcactggatgaaagaaagataccatatggatccctggtttaacaaatacgaattctgtn

SEQ ID NO: 1141 - DNA, 292 bp, Homo sapiens
  misc_feature (270)..(270): n is a, c, g, or t
  misc_feature (278)..(278): n is a, c, g, or t
aattaaccttcgcccctttaaagtcaagtctgtctaatctaactagcgcctcgctttgccttctcacaatgctcactagccatcatgctcacccttctcttccagatccacttcctcatgatactgtcttctaactgggcttacttaaaggatgcgagcaaaatgcaggcttaccaggatatcaaagcaaaggaagaacaggaactgcaagatatccagtctcggtcaaaagaacaactcaattcttacacataaatgtttgccagagtntttcgggncgacgtatttacag

SEQ ID NO: 1142 - DNA, 454 bp, Homo sapiens
  misc_feature (131)..(131): n is a, c, g, or t
  misc_feature (349)..(349): n is a, c, g, or t
  misc_feature (452)..(452): n is a, c, g, or t
taactttttggtatccaagtaaaagtcagtccaaactttagtacaatacttgcttgtaaagcaggctggcattcctcatcccactggatacacacatttaccctatgggtgtcaggatgataatcccaggntacccaacgctccagagagtccagtggggtttaggaacagccctgggactcgaagctggaaatggtttctagctccagctctgctgcctacttgctgtgccactttgggcaagccccatccactctctggggcctttgtttttcatctctaggagcaaagagggacaggctgcctgattgcttgggagtcttaaccatttactgggtttgctccacancctggggtggggcggggttggtaggaaggtgtcttggtcctctttctcgtacccccccacagcctcttcaggggctagggcaatttaaccttgcacacaaatnca

SEQ ID NO: 1143 - DNA, 140 bp, Homo sapiens
  misc_feature (80)..(80): n is a, c, g, or t
  misc_feature (91)..(91): n is a, c, g, or t
  misc_feature (128)..(128): n is a, c, g, or t
aaataacactttataagcctctccctcctcccatctcctggcctccttccatcctcctctgcccagactccgcccctccnagacggtcctnacttcttttttccctagactgcagccagcggagccgnagccggcccgag

SEQ ID NO: 1144 - DNA, 483 bp, Homo sapiens
tttttttgactataattcaaaatgcatttttccttataaaagaggtccacatactcactgtgtctactctacagaatttgtccattttattacaccacgtgtcaattcaagtttatctggtcactgcaaaaactcgtggctaatatgtgtaatacaacacaggaggaggtattgctcagttcaactactcttatttacttaaaaaaaatacagaaatgtttttgtccacttgaactggagtccagacataaaagttacatgaaagttttagaaaatggagttattttatttggttgccacagtaccccttgaagccagttacttaaaatgctgaagttgtacatatttccattggtcaggagcagcattggtgaagcttaaacttctctctcgaaagtaatctttttttacttttttgtttgtttgtttgttttgttttgtttttagcacaactgcagtctttcgcttttttttttttttttg

SEQ ID NO: 1145 - DNA, 1481 bp, Homo sapiens
attaagggtcagctagaggaggaagaaaaaggtttattgaggcagcagggttacagttctgtgactgtccctgcagagcaggccaccccataggcagtgctggagagcagcagctcggggcacttctatagtcacattcatacccacttttaaatacgtgcaaattaagggcaggttattcagaaatttctagaagaagggtggtaactgggtcattgccagggaatgagtaaactgttcatggtgctggtgctcatgccagccagtcttcaatctggccctgagtcaagccccacctcctatctcaaaactattctgcatggtgctgtaatggtggatacatgacatgttatgtttgccaaatccatagaactgtaggacacaagagtgaaccttaatgtaaaccttaatgtaaatggacttttgttaattatgatgtattaatatcaattcatcaattgtaacaaatgtatcacagtactgttaataatagaggaacttattggcaggagagagagcttatggaactctctgcacattcagctcaatatttctgtaagcctaaaactgctgtgagaaataaaatccaacctgggaacatagcaagaccttgtctctacaaaaaataaaaaatgagctgggtgcagtaacgcatgcctgtagtcccaggtattcaggaggctggggcaggaggatcgcttgaacccaggaagttgaggttgcacgagtcatgatcatgcccctgcactccagcctggataacaaagcaagatcctgtctccaaaaaataataaaataaaataaaaatctactcaattgaaagggaaaaaagcatagtataataccattcttaacaaaaagaaaagagacctgtgtttgtgtgtgtgttaacatttgaaaaaatctggaaagctctatatcaaaaggtttatagaggcaattttgtagtgttagaatcatagatgatctttccacttcctggtttttctgactttttttctttttgcactgggcatgtattgctggaaaataccacagacaactgtgaaaggatttcatcaacaacaaaaaaaagataaagaaggaaacacaaaatctgttaaataagatttatgttggctggaggttaaaatgcatttccagagcagagttcagagaaaggctgggctgcttgttgctggctaaaggacaaagggtaagtttcaggaagcagaagagtgagcagctgaaattcagcactgggatcaggggagtgtctgatttgcaaaaggaaagtgcaaagacagctcctcccttctgaggaaacgaaaccaacagcagtccaagctcagtcagcagaagagataaaagcaaacaggtctgggaggcagttctgttgccactctctctcctgtcaatgatggatctcagaaataccccagccaaatctctggacaagttcattgaagactatctcttgccagacacgtgtttccgcatgc

SEQ ID NO: 1146 - protein, 28 aa, Homo sapiens
MMDLRNTPAKSLDKFIEDYLLPDTCFRM

SEQ ID NO: 1147 - DNA, 476 bp, Homo sapiens
agcggccgcccttttttttttttttttttgaaagatttgaattttttttattatcccagcaaacattacactagagaaaatgattgggaaaatacaaataagttcattaaaaacacaggctgattattcatatctattacattcagaattatgcgaaacaattagttatattgcaaagctgtaattctttttctaacaaagcatgattttataaaactttaatgttgccactgattcaattttaatacaaaatacttatatacacaatacaatataaaagtaaactgtgtagtgccttccacaaagggatatattaaggcgctttacaaatataccaatattttgacccaaattactttttgctttagattaaaatgaacaggctaaatgttccactttaaataccaaagggatgtttattaaaaattttttatctaaaataccttgggtaacagcagcagcaatgtctaaaaatc

SEQ ID NO: 1148 - DNA, 490 bp, Homo sapiens
ttttttttttttttttttttttagcatttctttgaattttattgaaaattgacatggacattagaaaggtatcaggctaaacagtgctggttctgggatgtttctcctggagaatgaaagccccagaggaaatagactggtcacacctttgagcaaaaagaacaaaggagaagaaaggaaaaacacacacagattctggaaaacatgcaaagaggctctctcaagagacactgaacagcagaatggtggtgatggtggtaggggatatatgagaatgagcacactcacatggtattttgatgcaagttaaaccaatgaattcaaggcagatttaccaacatcaaagctctccctccagatcccaggttgagcagaaacctctctcaaaaccctaactggtctcggaaggtggaatggagtaattttgccctcactaagctaaaccccctcccttctctacctaagtgttagatagtggatacattttccc

SEQ ID NO: 1149 - DNA, 5338 bp, Homo sapiens
ccgaagccggcgaccgccccacctcctccctccctcccgcccgcttcctctgcccacagcgccggccagagcgagctagacaagggcacgcggggcctcgcctagacccgagaagactgcgggcgcgcgcaagcggcggcgtggaagctgtgagcgcccccatcccggaggtctccgccggctcccgggtgaatcagctcccggccgactttaggattcttctggattttaaattttttctttttaaaaaaacttggacggataaaagatgtgccatggcaggatagcaccaaagagcacctcagtgtttgccgtggcctccgtgggacatggagtgttccttccgctagtgatcctttgcaccctgcttggagacggacttgcttccgtgtgccccctaccaccggagccagagaatggtggctacatctgccacccccggccctgcagagaccccctgacagcaggcagtgtcatcgaatacctgtgtgctgaaggctacatgttgaagggcgattacaaatacctgacgtgtaagaatggcgagtggaaaccagccatggagattagctgccgtctcaacgaggataaagacacccacacatcacttggggtccccacgctgtctatagtggcttctactgccagctccgtggcgctcattctcctcctcgtggtgctgtttgtgctgctgcagccaaagctgaagtctttccatcatagcaggcgtgaccagggggtatctggggaccaggtctccatcatggtggatggagtccaggttgcactaccatcatacgaggaggctgtatatggcagttctggtcactgtgtgccacctgctgaccccagagtacagattgtgctgtcagaagggtctgggcccagtgggaggagcgtgccaagggagcaacagctgccggaccaaggggcctgctcctctgcaggtggagaagatgaggccccaggccagtctggactatgtgaagcctggggctctcgggcctcagagactgtgatggtgcatcaggcaaccacctcttcctgggtggccggctcagggaaccgccaactggcacacaaagaaactgcagattcagagaacagtgacatacaaagccttttatccctcacgtcagaggagtacacagatgatattccactgttgaaagaagcatgagggcagcggccagcctttcctctctgcgaggttctctcagcccttcctccctctccctgtgggattgagcaccctgtactctccagccaccttacctggatacctgagctgccacctgtgtatctgtgtatctctgagggccctataggcccaccttgctggaaactcaaggaagattctcgccatctgcctgttggacagctggaggagctggctctttgcctggccccgccttcccatctgtcagagacatatttgaatgtgctggatcaaaccctcccttttcctaagcctctgggtcccctccagccagctctttggcggcagcccccaccagctcctgtgggcctgagtgctgctgtgtttacttgtgcctttcccccaccctgtccagtttccctgtcatgcagacttgttgctgtccacaagccttagtggctgcactgctgccccctgccacacagggggccgggcctgggtctgtcctgtttcctttgagggttgcccctactgccctttgcaggaacagatccaggtgtgagagctcttgagtcaagagtggcagaagtggctctaattggggtgagagtgtagtccctgggcttgccctgggttgaccctggtggcatatttccttggccgaggatggaagatttggagaatcatgtccatgctggcccaggacccagccatctggcccaaaggcacaagctcctggccctgttgagttgagagtttccaagaagcatccagaagatcccaagggagagaaggaaaatggctgataatgattgtcttcctaatatgcaagttctcacttcctacttccagcatcggccttcctggccttgtcttttttttgtttccctggagtataatgggaagttgcatgctgcctcctgggttttatcccagatagctctggctttcttgctgcccacaggggcctggggcaggaaggagacttgctgagatgccatggagtgcccatctggtcactggcagtctgggcaggttgcccctttctgggtttgtggtgacggaggggaggccgagaggcacagaccaagtccccgggtggctgcaggcagctccagcccggtcctgaggatcctcctcaccatggtcacgtgccttagtaactgtgcccaggaagtggcctgctgcttgctgtgctgctgcttttcctacttctgcccttccctgccacccctcgcatgtcacagctgacaagcaattccttgtcttccctggccccctgggggaagggctgagaaacagtccatgtgcaccccaaccttaatggcctgaggtgggcagaggggtgtggagcagcctggagtacagggccctgggggaggagcccactgatgaggggcgctctcccatagccatgtgttgaatgctaactaggctggggtggacgaactctgccaactgctgtcatcttagaagatagatgcagcagtaaggaatgtttgttttgcttttttctgaaattttctgaagcactgtggctgggaaacttcgaagcggaccctgtgctgcatgtctgctcctcccctgagcctgtctgcttgggggtggtaaaaataaaaatcccagtttattttcagtaccttacctaacagggttggctccaggcgtgggtggcctagaagatgaggggagtggtcttctcccagccttttaccctcttgcctcctgcctccgcgcttacacacgcactttaccacccggtcattccctggcctcttgctgccacttgtagtcttccttccttcctctcagggtaagggcagtgcctgctgtgcctgttggccactcccacacttcccctcccccaggagccctcatctgctgtgctgagtccaggaaagcatagttaggtagggagctggttggagaaggtgctagaactagaaggcagatgagactagcatgggcccacctggagggctgtccctaatggccccagtcgccttacctcacccacagcagtgcccttgtcttcctccaaaacagaaagcagtgacaaaagggggaggggtggtaatctgaagtctcactgctgagccttcagcttttatttttcactgtttcaaaacccgcattctattctagaatggtttttaaaatggaagatcttacctttttctatcttgttactctggggttttgtccccctaagagattgcactttttgtttggggtttattcagctgcatagatgaccagcttgatccctggtgaaatgaaaagccttccttctcctgaagcctctttccgccctgccctccactaacaacactgaggagcacaagcccaggcttgcccacctggtaggaaaggaagaaattagaacaatgggagccttggctcccctctcgtctcctcccctccttcttgtcactggctttgatgaggcccacttcccagaggctcctgggcctgtgagtgcaggagctcattctcccctcactgctgaagtctgtgacagcttcttcctccagttatgtctttcttccaaagcaatttcttaaccatcagccatgtgctgctatttctagggcttctgggctttgtcccttactgagagattagggactccacagctgccttgaggtagggcctggctgagagacaagggtagcagcaggtggcaggctgttaaaagacaggctgcctgaggagcctggagcaggtggaaacaggtggaagaaaccggccacagccctgctttaccgggctcacctctagggcattccagcaagaggctgatgcaggagaatggccagcaccaaaggacatttaaaagagtttttgggtttttttgtttgtttgttgttggtgtttgtttttttttttttttttttggcacacttgagctgactcagtgcaggtttaatatcctggtgacttgcagtcacattctaatgactttcaagggccagaatatggtgaaaatcacttaaaatatccgtcccttccatgccttagtttagcaggtaggctctatcttttgccatttctgtattttatgtgctgtgttcccgtttcactgggtatgaactgtgaaatggactgaatcctggccactttatgagtttgtttggttttataaggcatttcaatgtacattctataaatacaagcactccatttgcaaacagatcttaagctaatattttctttcccattcatcttgccctccccctcctcccaccagctttaaagttcagtggagaagccagatggcaattcagacaaaggtatactcttcctgcttcatgggtggtggcacgggaatagatagcccttagccctttccctcccagtcccagctgagccctcagaccacttgcttcccacataacaatgtcgcctccatttccgaggaacatccttgcgtagagaatgaaatatgctgcaatcatttctgcatccttactcctcacccccaaagaaaaaaaaaaggcctagcagggaagcagcatgcaggcttcacagcttaatgccaaggacagcgagtgaggctgggagcttctcttgggcctgctgggtctgtcagctctcggaatagggacagtccttactggtgccccaaggtgggacttggagaatattttgcttggcatatgtttggtctgaatggtgtagttgctggttccctagagaggaaaaggtggcaggcccagctttgctgggaaatggctcttaatttccagttgaaaccctagtagaattgtgaatgaaaacctcaaggttgagcccctctgccaagcagcagagctagtagaaggggatgcaggggcaaagcactcagttgccaagcaaggaggagagatgtacgtgggctgtgtggcagtccccacaccctgccctggcttcttcaggttatcgcaccactatggaatcctttgcagaatggtactcatataatggtttaaaacaacacattcataattgactctgtgcaggatgtcactcaatcagtttgggtttgctttattttattttatatatatattttttggtatcctgtacattgcagtgggtgtgaagatagtattttaatatttgtacaaagtttaatttaattttaattgttctatgtatataactgcatttctaaataattaaaaaaaagttcttatg

SEQ ID NO: 1150 - protein, 303 aa, Homo sapiens
MCHGRIAPKSTSVFAVASVGHGVFLPLVILCTLLGDGLASVCPLPPEPENGGYICHPRPCRDPLTAGSVIEYLCAEGYMLKGDYKYLTCKNGEWKPAMEISCRLNEDKDTHTSLGVPTLSIVASTASSVALILLLVVLFVLLQPKLKSFHHSRRDQGVSGDQVSIMVDGVQVALPSYEEAVYGSSGHCVPPADPRVQIVLSEGSGPSGRSVPREQQLPDQGACSSAGGEDEAPGQSGLCEAWGSRASETVMVHQATTSSWVAGSGNRQLAHKETADSENSDIQSLLSLTSEEYTDDIPLLKEA

SEQ ID NO: 1151 - DNA, 393 bp, Homo sapiens
tttttttttttttttttaatgggccattgcatacagtttatttcactagattgcaattttatacacagtatgaaggggtttcctgatagcacatatatagtttactttctgtactgctgaagaaccaattgttttttacattgtatcataataccctatcattaaaacattattcagtgaattttttccaactacatataaacggagatttaccacacacattctttaccatggtgcaagaatgcctttataacatatttgaatcacaaaatgtgagtctaaaatacatcactgtaattaaaacactactttaaagttacaatgccccatgttatagtagccagatttgattaatccctgtataaatcacaaagcaatttggtggataatgtc

SEQ ID NO: 1152 - DNA, 3430 bp, Homo sapiens
agacgtttcccgccggcgggagctgtggctgtgattgagagaggggttagaggcgggtcccagcgctgccgcaccatggcggaccagctttatctggaaaatatagacgagttcgtcacggaccaaaacaagatcgtgacatacaaatggctgagctatacactaggggttcatgttaaccaggccaaacagatgctgtatgattatgttgaaaggaaacgaaaagaaaattcaggagcccaactgcatgttacctacttggtgtctggcagtctcattcagaatggacattcctgccacaaggttgcagtagtgagagaagataaattggaagcagtgaagtccaagctagctgtgactgccagcatccatgtgtacagcatccagaaagccatgctaaaggacagtgggcctctgttcaatactgactatgacatccttaaaagcaacttgcagaactgcagcaaatttagtgctatacaatgtgcagctgccgtccctagagctcctgctgaatcctcttcgtcttccaaaaagtttgagcagtcacatcttcacatgtcaagtgagacacaagccaacaatgagctgaccaccaatggtcatggcccacctgcatccaagcaggtttcccagcagcccaaaggaattatgggaatgtttgcctccaaagctgctgctaaaacccaagaaaccaacaaggaaacgaaaacagaggctaaagaagtaacaaatgcatctgcagcaggcaacaaggcaccagggaaagggaatatgatgagcaacttttttggaaaagctgctatgaataaatttaaagtcaatttggactcagaacaagcagtgaaagaagaaaaaatagtggagcagcctacagtgtctgtcacggaaccaaagctggcaactcctgcaggcctgaaaaaatccagcaaaaaagcagagcctgttaaggtgctgcagaaggaaaaaaaaagggggaagcgagtagcattatctgatgatgagacaaaggaaactgaaaacatgaggaaaaagaggagaagaatcaaacttcctgaatctgatagcagtgaagatgaagtctttccagactctcctggggcttatgaagctgagtcaccatccccacctcctcctccgtctccacctcttgaaccagtgccaaagactgagcctgaacctccttctgtcaagagctcaagtggagaaaacaaaagaaaacgaaaacgcgtactaaaatctaaaacttacctggatggggaaggctgcatagtgactgaaaaagtctacgagagtgaatcctgcacagatagtgaagaggagcttaacatgaagacatcctcagtacacagaccccctgccatgactgtgaaaaaagaacccagagaggaacgaaagggccccaagaaagggactgctgctctgggcaaagccaacagacaggtgtccattactggcttcttccagaggaaataaactgccatctctggtagatcagagacttggagtggtcaagggagaagaccaagaaatgtactcctcacttactatgtaagttcatctagatctccacctcacctgtatcaaaagactgttctttcatcctgtgaggtttatactatttctggtttttaaccaaaaggaaatcatctggaagcaggaggcaaaaagctgttaccttctaatgacatttaaaaagcacagtctttgacctgtccaggagaaggatttactccaaaattatactggaacagttttcagaattctcactgaagccatttagtggctaacccactgtgctccactcaccctatgccctggtccgcatatggcacaggaattattccttcttgttcctctgtattctaagaattcatgtgggtgtttcttatccttacattctgctggatacgtttacccctcttgtcttcctgcagtaccacacttctgtcccctaacctcctgaggctgttctctgtaagtcttttaagttttggttggactaaaggctgaagtgaaaatctccctgtaatcctcttcctccattatgcagtacacggacacctggctacagaccaggacgtggcttgtgttctgttcctttcacaaaagctctctgggaccttcacttgcaattagtggttagggaaaagcctcaggcagaacacaaatagaaatttaatgatgtgttcaactccaccagaaattacctcgagtcagcattgacgatattggaggagctgccgtgctgctgatacggggtgtgctttatgctgctctttgcggtttgttgatcccctcctcccccactctcaatacctagagagtgaaacccgtacaatgagataaagactaaaaagagaaatcccttcctatatacagtgtgctacatttacaaaaaatttctccttaagaaaacagaatattcaaaaacagcacttttccaggaagttagtgaggaagataaggcacacatttatttataaatggatgttgctcctttgtatttttagcttccctatttgcttaaaagtacaggctccctaagagaggatggagagggagagactgaattgttagtaggtctaaacatcaaagaaaacatttttattagttacttatggaaaatcatctattacaatgataaccttcaagtgacttccattatggctggacaggcggtgagctcagtggattgcagtggtgtgctggtgattttgcacagtgagctctgcggaaggggtcaggctcaactgctgatgtgtctcacacgtagcagacaaggggtgtctgactggcttcttttgcctcaagatggtgtatgtcgtaagtgatgcaatcagctgtctgctttttaaggttgggattgtgctgactttgggattaacatgagcttctttagcaaccaagcatgaacttgattaagaccagaagtttgggagatgagtcctggcattatgtctaggactaaagcagtggctttgtatagcaagctgagtaaaggttgacatattccaaaacccttctttttaaaatgaaaaaggatggagagaaggatggaaagcctggacttaaacctttagaaaaaacttctggagagaaatcccttttaaacagttacttttgtcattgcctctggtcatttgtctaaataggaatggaaaattaaaagaaaagcaacaatccaatcttttttctaaaaattatgctggggtctcgactaaaactgaatttgaattggaaaattctggtgttggttggagttccatcttgcaagggataatacaaatcctatgatctctatgcccaatatgctgcctcaactctgagctgtctgcaaggcttagtaagtattgagtggtgttttttttttctttttatacaataccatgttaaccacatgagttaaataaatttgagaagttgtttt

SEQ ID NO: 1153 - protein, 491 aa, Homo sapiens
RRFPPAGAVAVIERGVRGGSQRCRTMADQLYLENIDEFVTDQNKIVTYKWLSYTLGVHVNQAKQMLYDYVERKRKENSGAQLHVTYLVSGSLIQNGHSCHKVAVVREDKLEAVKSKLAVTASIHVYSIQKAMLKDSGPLFNTDYDILKSNLQNCSKFSAIQCAAAVPRAPAESSSSSKKFEQSHLHMSSETQANNELTTNGHGPPASKQVSQQPKGIMGMFASKAAAKTQETNKETKTEAKEVTNASAAGNKAPGKGNMMSNFFGKAAMNKFKVNLDSEQAVKEEKIVEQPTVSVTEPKLATPAGLKKSSKKAEPVKVLQKEKKRGKRVALSDDETKETENMRKKRRRIKLPESDSSEDEVFPDSPGAYEAESPSPPPPPSPPLEPVPKTEPEPPSVKSSSGENKRKRKRVLKSKTYLDGEGCIVTEKVYESESCTDSEEELNMKTSSVHRPPAMTVKKEPREERKGPKKGTAALGKANRQVSITGFFQRK

SEQ ID NO: 1154 - DNA, 285 bp, Homo sapiens
ttagcgtggtcgcggccgaggtactttttttttttttttttttttttttagccaagaacttccagtttttattttttaaacatcatttaacaagaaaaaacattcaaccaaattaaaaagaactaggttggattaatttacaataaaataatcaacttaaaatatcggcccttccatttagggccaaggaggccaatagttcctgtttaaacagcagaattgcacaattatttttacctatatttgatggcacaaaaaaataaaagtcttacaacttccacggac

SEQ ID NO: 1155 - DNA, 247 bp, Homo sapiens
  misc_feature (81)..(82): n is a, c, g, or t
  misc_feature (86)..(86): n is a, c, g, or t
  misc_feature (234)..(234): n is a, c, g, or t
  misc_feature (238)..(246): n is a, c, g, or t
gatgcacactaacttcactgagccagggagcacggaagttgtgccactgtgcaacttgggttttctttatcctgcagtctnnatcncagcagaaccgcacaccacagactccctccagctctttgtgtgtggctctctcagggtccaacaagagcaagctgtgggtctgtgagtgtttatgtgtgcttttattcacttcacacttattgaaaagtgtgtatgtgagagggtggngtgnnnnnnnnnt

SEQ ID NO: 1156 - DNA, 555 bp, Homo sapiens
ttctttttgggggttttttttttttaacataaataaataaatttattttgagtctgaaatactgaagaacaagcatacagataaatagtacaaagaacaaaaattagaacatgagtaatgacttaagacacaggcatttttctagctattgcatacagacacatttttacacacaaacatattttttaaagacatctctccaacattctcaaaaggcaagagctgtatttgtgacatttgtaataaatgcaacagcttttgaaacatccagtttctttcctaagtcatttgattaaaattcacacaagtgatgattacctattccattttctgaaaatacgacatacagtcatgtttcgatcaacaattgaccacatatgacagagatcctataagattataatggaactgaaaaattcctatcacctagtgatgccacagccattgttacattgtagcacaatgtattatctgttctatgtttagattacacagataccattgtgttacagttgcctacagtattcaatacagtaccatgctgtacaggtctgt

SEQ ID NO: 1157 - DNA, 502 bp, Homo sapiens
atgctttttttttttttttttttctgataatcaaagaccaagtgcttttatcagttatatagtgacacactgcttggatcaagtggaaaatatctcaaaaatacactcataacgaagtatcaaaagccttaaaattttgcatatttggtaacccagcaattcaaagaatttaagaaaacagtcatggatgtacatgggattcagtgaagtgctgtttataactgtgaaaagatgtaaatagtcaaaatatccaatagaagattaaatgaattatgattgagtcatacagcagaataataaaccaataaaaatgatgcagaagactatgcatgacctggaaaagatgttcccaatatattgttaagtgaaaaaagcaggttacaaaatggtatgcacaatatgagcccatttttataaaaatatacatatttagcaaagtaaaaggacaaatgatatttatcaaaatattaacattggttctttcaacatagtaggatgactg

SEQ ID NO: 1158 - DNA, 554 bp, Homo sapiens
ataatgagataaatggtcatactaatgaaacaaatactgaaatgcaaagaaataaacaggatcttcctggcttatcttctgagtctgccagagaacctaatgcagagtgcatgaatcaaattgaggataatgatgactttcaattgcagaaaactgtgtatgatgctgacatggatttaactgctagtgaagtcagcaaaattgtcacagtctcaacaggcattaaaaagaaaagtaataaaaaaacaaatgaacatggaatgaaaactttcagaaaagtgaaagattccagctctgaaaaaaagagagaaagatcaaagagacagtttaaaaatagttcagatgtcgatattggggaaaagattgaaaacaggacagaaagatctgatgtcctggatggcaaaaggggtgcagaggatcccggttttaatttcaataatgaaccgttgggcttagatgaatgaacagcttggcttaggtgaatgaacctaaggaaattgaccctttaaaccggctttgaaacagggtgaccgaagaaaaatggactgtgtaaa

SEQ ID NO: 1159 - DNA, 526 bp, Homo sapiens
ttttttttttcagaaaggtagttttgttatttattaagtgtttattaaatgcctccctaaaggtcctggatgccactagaacctttagttaggactgagatgtatatgcaagagtggcacatatcaaaatatctgctcattggttcagatccaacgtaagttttccttgaaccagaacctcatattaacttaaagtactcaatggcacagcatcctctaatttaaagattttaaaacaaaaacataaccagaagacccagttttcaaaattgctgttaaaggccaacaaattagtgggagggaaggaataaaaaggaataacctctcttaaaataacaaatctacaaagtcctctgccacaaaagcagatctttgtcatttcccatgagataatcatcaccttgccgaaaaatgagaaaggcaccccccgcaggcaggggggaaaaaacccactcgctgaaaacaggcttccacctggtttttaccatatattccagggggttatggtgtgtggaggggttggttt

SEQ ID NO: 1160 - DNA, 406 bp, Homo sapiens
tttttttaaccaaactgttacatgtggctggccccagtaagctgacctggttgccatcttgagaccagacttaaatccccaaaaccaaatccacatttcaagtatcagtgaacaggtaatttttctgagaattttgaaaggagttagaagagagcttttccttggagtcacacaaaattacttaataaaacatcctaattagacgtttctgtcctgccccctagttcctaaagtcccctacagaatccagaagccccctcccacatctctagggtcctgcctctctccttcccttatgctgagcaaatcaacttctggcaggcagagaacaaggttgacagatggtacttgctggataaatacttttctcctgtcacagtattagggctcagaaaatgatacccca

SEQ ID NO: 1161 - DNA, 392 bp, Homo sapiens
  misc_feature (15)..(15): n is a, c, g, or t
cggccgctgccttanaaaagttaacgagaaccagatgtggtggccactgccgaactttctcagagccggtgattggtccccagccgagggcctcagccaattagcttgctgggtgggcctggagtcccgccccgcccaggcgcccgcggagatccaggttcgaggctggcgcggcgcggagagtgggctggaggccggggcgggacgcgttgtgcagcgggtaagcgcacggccgagcgagcatggagggggaccgggtggccgggcggccggtgctgtcgtcgttaccagtgctactgctgctgcagttgctaatgttgcgggccgcggcgctgcacccagacgagctcttcccacacggggagtcgtggggggaccagctcctgcaggaa

SEQ ID NO: 1162 - DNA, 377 bp, Homo sapiens
ggcacgaggttggtggaagcccctcatctgccttcattctgaaggcagggcccggcagaggaaggatcagagggtcgcggccggagggtcccggccggtggggccaactcagagggagaggaaagggctagagacacgaagaacgcaaaccatcaaatttagaagaaaaagccctttgactttttccccctctccctccccaatggctgtgtagcaaacatccctggcgataccttggaaaggacgaagttggtctgcagtcgcaatttcgtgggttgagttcacagttgtgagtgcggggctcggagatggagcccgtggtcctctaggtggaaaacgaaaacggtggcttctgggatttcacccgtaacaaccct

SEQ ID NO: 1163 - DNA, 532 bp, Homo sapiens
  misc_feature (525)..(525): n is a, c, g, or t
tttttttttttttttttttttcttttttttctttctttttttttttttttcctggtcagggctctgcctgatgaaatattttaaatggtatacttgaaaagagtagctatatttttgaagaattttcatcacaaagttatttgttagtcttgatccaataaactcttaacaataagccaagccaagccaagccaagagctggtcccaactgctatacagtgctctttgcaatcaaatctaaaattaattacccaagtaatatatttaaggaaataaataaaactgtatttaaatgcttatgaagtataatcacagtctgtagagatatgtttgttttaccggcaaaatttaagtttcctttcacaggtcattctgtgtgcatgcctcaacacccacatatttatgatttctccttctataagaactatcttgtttgaaaaatttggcttagaaatttattatagtgactacagggtcctcaaaatataaggaggcaccgcggtttagttatgaatcatgctgcantatcaat

SEQ ID NO: 1164 - DNA, 390 bp, Homo sapiens
  misc_feature (25)..(25): n is a, c, g, or t
  misc_feature (110)..(110): n is a, c, g, or t
  misc_feature (115)..(115): n is a, c, g, or t
  misc_feature (289)..(289): n is a, c, g, or t
ggaagccagagaaaaaggtagaatnggacaagtgacactgtggacaatgaacacatgggccgccgctcatccaaatgctgctgtatttatgagaaacctcgggcctttgngagantccacggaaagtgatgaggaggaagaagagggctgtggtcatacacactgtgtacgtggccaccgcaaaggacggcgtcgtgcaaccctaggaccgacccccaccacccctccccagcctcctgacccttcccagccccctccagggccaatgcaagcactaaatccctctctnctccagcattcctgtgtctgtctggccctaaatgtatccatgtggctacttctccaagccccctccttccctctcttcttgcctgatagagggaagaggaa

SEQ ID NO: 1165 - DNA, 973 bp, Homo sapiens
aggctaggacgaggccgggttaaatcggccgagggttaacgccggtcgtaactgctccggagggcacgggctccgtaggcaccaactgcaatgacccctccccctgcgggcgctcgcgatggcacagttcgcgttcgagagtgacctgcactcgctgcttcagtctggatgcacccatccccaatgcaccccctgcgcgctggctgcgcaaagccaaggaagccgcaggcccggcccctcacccatgcgggccgccaaccgatcccaccatgctgccggctagggaactccgtggccgaacgtccgtggccaaagtccagttccaatggtttcagaccacttcctagcaaaccttgtgcggtgaccgcgtatatccccgcatcgcagtgctgcccagatggaggtggccaagcttcctcctgagccaaggagaaccatcctgaaaacagccagatcgcccagccagagaagggaatcatcagaaagcctgggctttgaacctgaacggttttgatgtagaggaagccaagatccttcggctcagtgtgaaaagccatcaaaatgcgccagagggttatcagaacaagactgaaagtactctagcagccaaaaggccactcctggctccagccggaagacctgccgttacattccttccctgccagaccgtatcctggatgcgcctgaaatccgacaatgactattacctgaccctctgtggatgggagttcctgggaatgtactggccggtgggcccttggaccacaaggtgttgtacctgtgggaggttgcaagctcttggtgacacttcctgcaagcttttgcaaatgggagcagcctggggaatatatatctctggtggctggatacaagaggccactacttgggttggggcccccagagtgctgaggtgaacattgggatgtgcacgcaaaacggtttcgaatataccgtcctctcccgatggccccag

SEQ ID NO: 1166 - DNA, 371 bp, Homo sapiens
  misc_feature (9)..(9): n is a, c, g, or t
  misc_feature (140)..(140): n is a, c, g, or t
  misc_feature (164)..(164): n is a, c, g, or t
  misc_feature (168)..(168): n is a, c, g, or t
ctcgtgccncggatagttcctcccggccacgccgcgccggctctgggcactcagcatcgtttccttttcctccgctggagcagctatggcggcggtgaagaccctgaaccccaaggccgaggtggcccgagcgcaggcgncgctggcggtcaacatcagcgcancggngggtctgcaggacgtgctaaggaccaacctggggcccaagggcaccatgaagatgctcgtttctggcgctggagacatcaaacttactaaagacggcaatgtgctgcttcacgaaatgcaaatttcaacacccaacagcttccttaaatagcaaaggttagcaacagccccagggttgatataactggtgatggttacgattt

SEQ ID NO: 1167 - DNA, 3359 bp, Homo sapiens
cgccgaggtatcacctggcaccacccgcaccctcaccccgtgtctccatgccctgcctctgctccccacacccctcacctcaagctgtcccctcacctcacgcttggctgtctcctgatcctcagcctctcccaggtaccccagactctgtaggagagtgcccgagggcggagggccagccatgctgaccttccttccctccccccaggagctgttcacccgctcactggctgagagcgagctccgtagtgccccgtatgagttccccgaggagagccccattgaacagctggaggagcggcggcagcggctggagcggcagatcagccaggatgtcaagctggagccagacatcctgcttcgggccaagcaagatttcctgaagacggacagtgactcggacctacagctctacaaggaacagggtgaggggcagggtgacgggagcctgcgggagcgtgatgtgctggaacgggagtttcagcgggtcaccatctctggggaggagaagtgtggggtgccgttcacagacctgctggatgcagccaagagtgtggtgcgggcgctcttcatccgggagaagtacatggccctgtccctgcagagcttctgccccaccacccgccgctacctgcagcagctggctgaaaagcctctggagacccggacctatgaacagggccccgacacccctgtgtctgctgatgccccggtgcacccccctgcgctggagcagcacccgtatgagcactgtgagccaagcaccatgcctggggacctgggcttgggtctgcgcatggtgcggggtgtggtgcacgtctacacccgcagggaacccgacgagcattgctcagaggtggagctgccataccctgacctgcaggaatttgtggctgacgtcaatgtgctgatggccctgattatcaatggccccataaagtcattctgctaccgccggctgcagtacctgagctccaagttccagatgcatgtgctactcaatgagatgaaggagctggccgcccagaagaaagtgccacaccgagatttctacaacatccgcaaggtggacacccacatccatgcctcgtcctgcatgaaccagaagcatctgctgcgcttcatcaagcgggcaatgaagcggcacctggaggagatcgtgcacgtggagcagggccgtgaacagacgctgcgggaggtctttgagagcatgaatctcacggcctacgacctgagtgtggacacgctggatgtgcatgcggacaggaacactttccatcgctttgacaagtttaatgccaaatacaaccctattggggagtccgtcctccgagagatcttcatcaagacggacaacagggtatctgggaagtactttgctcacatcatcaaggaggtgatgtcagacctggaggagagcaaataccagaatgcagagctgcggctctccatttacgggcgctcgagggatgagtgggacaagctggcgcgctgggccgtcatgcaccgcgtgcactcccccaacgtgcgctggctggtgcaggtgccccgcctctttgatgtgtaccgtaccaagggccagctggccaacttccaggagatgctggagaacatcttcctgccactgttcgaggccactgtgcaccctgccagccacccggaactgcatctcttcttagagcacgtggatggttttgacagcgtggatgatgagtccaagcctgaaaaccatgtcttcaacctggagagccccctgcctgaggcgtgggtggaggaggacaacccaccctatgcctactacctgtactacacctttgccaacatggccatgttgaaccacctgcgcaggcagaggggcttccacacgtttgtgctgaggccacactgtggggaggctgggcccatccaccacctggtgtcagccttcatgctggctgagaacatttcccacgggctccttctgcgcaaggcccccgtcctgcagtacctgtactacctggcccagatcggcatcgccatgtctccgctcagcaacaacagcctcttcctcagctatcaccggaatccgctaccggagtacctgtcccgcggcctcatggtctccctgtccactgatgatcccttgcagttccacttcaccaaggagccgctgatggaggagtacagcatcgccacccaggtgtggaagctcagctcctgcgatatgtgtgagctggcccgcaacagcgtgctcatgagcggcttctcgcacaaggtaaagagccactggctgggacccaactataccaaggaaggccctgaggggaatgacatccgccggaccaatgtgccagacatccgcgtgggctaccgctacgagaccctgtgccaggagctggcgctcatcacgcaggcagtccagagtgagatgctggagaccattccagaggaggcgggtatcaccatgagcccagggcctcaatgagcctggtccatgaagtgcccaccacatcgcagcacttttaccacgttttgtcctcagaccccgcccatgctgtgtggtctctgcatgtctccattcttctctgtctctgtcttgcatgtctcctaccatgtcactgtccctgggccacccagtgaaagcaaagcctgggaatctgctcattgttgtttgggctcaggtattgagcctgatggcccaggtattgagggcctcccctgctggtggccctgtcctgggatcctcagaagcctgactgtcctatgggcttctccagtgtccacaggggcttgggatggttgtggggggctggcccctctagcctttccggtccttcctgggcaaatctaagccttggccagggcgaagtttaggcccctgtcttgttcatgtagccgaggggcaggcgggggacctctacacctctgctgtgggcacggggctgctgagggtctgtggaactccagcagctctgcactgggtagagctgggcctagagctcagtcacaggcctgggcttcctggcctgagtgggtagacgcaggcggcagaggtgctggaccacatctccgccaagtcactgcccagcagccttctccgtcctgtccccagcccacgtgctccttgggtgtcagcttcctgtgcctctgtgggagaggcagctgccttgtgttatgtctggggccacagttgctgcaaagtcctggatctgccactcaaccccgggagtggtgttcccagtgtggctcccagagctttgaccagattgtgatcccagctggcccctatgttgtgttctggactgaggcctttgctgtgaactgcagtgtttcatacgaaccatctttcctagtgcatgagaaataaagattatttaagt

SEQ ID NO: 1168 - protein, 760 aa, Homo sapiens
MLTFLPSPQELFTRSLAESELRSAPYEFPEESPIEQLEERRQRLERQISQDVKLEPDILLRAKQDFLKTDSDSDLQLYKEQGEGQGDGSLRERDVLEREFQRVTISGEEKCGVPFTDLLDAAKSVVRALFIREKYMALSLQSFCPTTRRYLQQLAEKPLETRTYEQGPDTPVSADAPVHPPALEQHPYEHCEPSTMPGDLGLGLRMVRGVVHVYTRREPDEHCSEVELPYPDLQEFVADVNVLMALIINGPIKSFCYRRLQYLSSKFQMHVLLNEMKELAAQKKVPHRDFYNIRKVDTHIHASSCMNQKHLLRFIKRAMKRHLEEIVHVEQGREQTLREVFESMNLTAYDLSVDTLDVHADRNTFHRFDKFNAKYNPIGESVLREIFIKTDNRVSGKYFAHIIKEVMSDLEESKYQNAELRLSIYGRSRDEWDKLARWAVMHRVHSPNVRWLVQVPRLFDVYRTKGQLANFQEMLENIFLPLFEATVHPASHPELHLFLEHVDGFDSVDDESKPENHVFNLESPLPEAWVEEDNPPYAYYLYYTFANMAMLNHLRRQRGFHTFVLRPHCGEAGPIHHLVSAFMLAENISHGLLLRKAPVLQYLYYLAQIGIAMSPLSNNSLFLSYHRNPLPEYLSRGLMVSLSTDDPLQFHFTKEPLMEEYSIATQVWKLSSCDMCELARNSVLMSGFSHKVKSHWLGPNYTKEGPEGNDIRRTNVPDIRVGYRYETLCQELALITQAVQSEMLETIPEEAGITMSPGPQ

SEQ ID NO: 1169 - DNA, 429 bp, Homo sapiens
  misc_feature (278)..(278): n is a, c, g, or t
  misc_feature (295)..(295): n is a, c, g, or t
  misc_feature (336)..(336): n is a, c, g, or t
  misc_feature (352)..(352): n is a, c, g, or t
  misc_feature (357)..(357): n is a, c, g, or t
  misc_feature (371)..(371): n is a, c, g, or t
  misc_feature (387)..(387): n is a, c, g, or t
  misc_feature (399)..(399): n is a, c, g, or t
  misc_feature (408)..(408): n is a, c, g, or t
attcggcacaggagggcactgggcagaccccagccaagcaggccgtacgcttccgggcctggaatggacagatttttgaagctgggggtcagttccggcccgaggtgtccatggatggctgcaaggtccaagatggccgctggatcagacactcttcaccttccggacccaagacccccaacagctgcccatcatcagtgtggacaacctccctcctgcctcatcagggaagcagtaccgcctgggaagttggacctgcgtgcttcctctgacctctngacctcgtgggccactnttagggcttcacggaggagggaagaggaagaggcaaggggnagggtattgagggggnagatnggttccagggaganggcagtttccccttgnccaaagggttcnttggggaanaagcccagttgtttgtttttg

SEQ ID NO: 1170 - DNA, 1536 bp, Homo sapiens
ggggggggggggaccacttggcctgcctccgtcccgccgcgccacttggcctgcctccgtcccgccgcgccacttcgcctgcctccgtcccccgcccgccgcgccatgcctgtggccggctcggagctgccgcgccggcccttgccccccgccgcacaggagcgggacgccgagccgcgtccgccgcacggggagctgcagtacctggggcagatccaacacatcctccgctgcggcgtcaggaaggacgaccgcacgggcaccggcaccctgtcggtattcggcatgcaggcgcgctacagcctgagagatgaattccctctgctgacaaccaaacgtgtgttctggaagggtgttttggaggagttgctgtggtttatcaagggatccacaaatgctaaagagctgtcttccaagggagtgaaaatctgggatgccaatggatcccgagactttttggacagcctgggattctccaccagagaagaaggggacttgggcccagtttatggcttccagtggaggcattttggggcagaatacagagatatggaatcagattattcaggacagggagttgaccaactgcaaagagtgattgacaccatcaaaaccaaccctgacgacagaagaatcatcatgtgcgcttggaatccaagagatcttcctctgatggcgctgcctccatgccatgccctctgccagttctatgtggtgaacagtgagctgtcctgccagctgtaccagagatcgggagacatgggcctcggtgtgcctttcaacatcgccagctacgccctgctcacgtacatgattgcgcacatcacgggcctgaagccaggtgactttatacacactttgggagatgcacatatttacctgaatcacatcgagccactgaaaattcagcttcagcgagaacccagacctttcccaaagctcaggattcttcgaaaagttgagaaaattgatgacttcaaagctgaagactttcagattgaagggtacaatccgcatccaactattaaaatggaaatggctgtttagggtgctttcaaaggagcttgaaggatattgtcagtctttaggggttgggctggatgccgaggtaaaagttctttttgctctaaaagaaaaaggaactaggtcaaaaatctgtccgtgacctatcagttattaatttttaaggatgttgccactggcaaatgtaactgtgccagttctttccataataaaaggctttgagttaactcactgagggtatctgacaatgctgaggttatgaacaaagtgaggagaatgaaatgtatgtgctcttagcaaaaacatgtatgtgcatttcaatcccacgtacttataaagaaggttggtgaatttcacaagctatttttggaatatttttagaatattttaagaatttcacaagctattccctcaaatctgagggagctgagtaacaccatcgatcatgatgtagagtgtggttatgaactttatagttgttttatatgttgctataataaagaagtgttctgc

SEQ ID NO: 1171 - protein, 313 aa, Homo sapiens
MPVAGSELPRRPLPPAAQERDAEPRPPHGELQYLGQIQHILRCGVRKDDRTGTGTLSVFGMQARYSLRDEFPLLTTKRVFWKGVLEELLWFIKGSTNAKELSSKGVKIWDANGSRDFLDSLGFSTREEGDLGPVYGFQWRHFGAEYRDMESDYSGQGVDQLQRVIDTIKTNPDDRRIIMCAWNPRDLPLMALPPCHALCQFYVVNSELSCQLYQRSGDMGLGVPFNIASYALLTYMIAHITGLKPGDFIHTLGDAHIYLNHIEPLKIQLQREPRPFPKLRILRKVEKIDDFKAEDFQIEGYNPHPTIKMEMAV

SEQ ID NO: 1172 - DNA, 251 bp, Homo sapiens
  misc_feature (88)..(88): n is a, c, g, or t
agcattcttcctatttaaagctgcatcgcttgaaaaaagttttcgcagactgtgctggagctggtgctgaaaaagggggtttgcagangctgccctggggctggtgctgaaagaagagcccacagctgacttcatggtgctacaataacctcagaatctacttttcactctcaggagaacccacatgtctaatatttagacatgatggcaaactgggcggaagcaagacctctcctcattcttattgtttt

SEQ ID NO: 1173 - DNA, 524 bp, Homo sapiens
gccgaaatgatcttttcaagttaaattttatgccttttatttcttaaacaaatgtatgattacatcaaggcttcaaaaatactcacatggctatgttttagccagtgatgctaaaggttgtattgcatatatacatatatatatatatatatatatatatatatatattttaatttgatagtattgtgcatagagccacgtatgtttttgtgtatttgttaatggtttgaatataaacactatatggcagtgtctttccaccttgggtcccagggaagttttgtggaggagctcaggacactaatacaccaggtagaacacaaggtcatttgctaactagcttggaaactggatgaggtcatagcagtgcttgattgcgtggaattgtgctgagttggtgttgacatgtgctttggggcttttacaccagttcctttcaatggtttgcaaggaagccacagctggtggtatctgagttgacttgacagaacactgtcttgaagacaatggcttactccaggaga

SEQ ID NO: 1174 - DNA, 2827 bp, Homo sapiens
tggcgatgctactgtttaattgcaggaggtgggggtgtgtgtaccatgtaccagggctattagaagcaagaaggaaggagggagggcagagcgccctgctgagcaacaaaggactcctgcagccttctctgtctgtctcttggcacaggcacatggggaggcctcccgcaggtggggggccaccagtccaggggtgggagcactacagggcacgagttggtttgggagctgccagtctcctgggaggatcgcagtcagcagagcagggctgaggcctgggggtaggagcagagcctgcgcatctggaggcagcatgtccaagaaagggagtggaggtgcagcgaaggacccaggggcagagcccacgctggggatggaccccttcgaggacacactgcggcggctgcgtgaggccttcaactgagggcgcacgcggccggccgagttccgggctgcgcagctccagggcctgggccacttccttcaagaaaacaagcagcttctgcgcgacgtgctggcccaggacctgcataagccagctttcgaggcagacatatctgagctcatcctttgccagaacgaggttgactacgctctcaagaaccttcaggcctggatgaaggatgaaccacggtccacgaacctgttcatgaagctggactcggtcttcatctggaaggaaccctttggcctggtcctcatcatcgcaccctggaactacccattgaacctgaccctggtgctcctggtgggcaccctccccgcagggaattgcgtggtgctgaagccgtcagaaatcagccagggcacagagaaggtcctggctgaggtgctgccccagtacctggaccagagctgctttgccgtggtgctgggcggaccccaggagacagggcagctgctagagcacaagttggactacatcttcttcacagggagccctcgtgtgggcaagattgtcatgactgctgccaccaagcacctgacgcctgtcaccctggagctggggggcaagaacccctgctacgtggacgacaactgcgacccccagaccgtggccaaccgcgtggcctggttctgctacttcaatgccggccagacctgcgtggcccctgactacgtcctgtgcagccccgagatgcaggagaggctgctgcccgccctgcagagcaccatcacccgtttctatggcgacgacccccagagctccccaaacctgggccgcatcatcaaccagaaacagttccagcggctgcgggcattgctgggctgcggccgcgtggccattgggggccagagcaacgagagcgatcgctacatcgcccccacggtgctggtggacgtgcaggagacggagcctgtgatgcaggaggagatcttcgggcccatcctgcccatcgtgaacgtgcagagcgtggacgaggccatcaagttcatcaaccggcaggagaagcccctggccctgtacgccttctccaacagcagacaggttgtgaaccagatgctggagcggaccagcagcggcagctttggaggcaatgagggcttcacctacatatctctgctgtccgtgccattcgggggagtcggccacagtgggatgggccggtaccacggcaagttcaccttcgacaccttctcccaccaccgcacctgcctgctcgccccctccggcctggagaaattaaaggagatccgctacccaccctataccgactggaaccagcagctgttacgctggggcatgggctcccagagctgcaccctcctgtgagcgtcccacccgcctccaacgggtcacacagagaaacctgagtctagccatgaggggcttatgctcccaactcacattgttcctccagaccgcaggctcccccagcctcaggttgctggagctgtcacatgactgcatcctgcctgccagggctgcaaagcaaggtcttgcttctatctgggggacgctgctcgagagaggccgagaggccgcagaacatgccaggtgtcctcactcaccccaccctccccaattccagccctttgccctctcggtcagggttggccaggcccagtcacaggggcagtgtcaccctggaaaatacagtgccctgccttcttaggggcatcagccctgaacggttgagagcgtggagccctccaggcctttgctctcccctctaggcacacgcgcacttccacctctgccccatcccaactgcaccagcactgcctcccccagggatcctctcacatcccacactggtctctgcaccacccctctggttcacaccgcaccctgcactcacccacagcagctccatccactgggaaaactggggtttgcatcactccactgcacagtgttagtgggacctgggggcaagtcccttgacttctctgagcctcagtttccttatgtgaaagttgctggaaccaaaatggagtcacttatgccaaactctaataaaatggagtcgggggggcacatagaagccctcacacacacatgcccgtaacaggatttatcaccaagacacgcctgcatgtaagaccagacacagggcgtatggaaaagcacgtcctcaaagactgtagtattccagatgagctgcagatgcttacctaccacggccgtctccaccagaaaaccatcgccaactcctgcgatcagcttgtgacttacaaaccttgtttaaaagctgcttacatggacttctgtcctttaaaacgttccccttggctgtggccctctgtgtatgcctgggatccttccaagcactcatagcccagataggaatcctctgctcctcccaaataaattcatctgttc

SEQ ID NO: 1175 - protein, 385 aa, Homo sapiens
MKDEPRSTNLFMKLDSVFIWKEPFGLVLIIAPWNYPLNLTLVLLVGTLPAGNCVVLKPSEISQGTEKVLAEVLPQYLDQSCFAVVLGGPQETGQLLEHKLDYIFFTGSPRVGKIVMTAATKHLTPVTLELGGKNPCYVDDNCDPQTVANRVAWFCYFNAGQTCVAPDYVLCSPEMQERLLPALQSTITRFYGDDPQSSPNLGRIINQKQFQRLRALLGCGRVAIGGQSNESDRYIAPTVLVDVQETEPVMQEEIFGPILPIVNVQSVDEAIKFINRQEKPLALYAFSNSRQVVNQMLERTSSGSFGGNEGFTYISLLSVPFGGVGHSGMGRYHGKFTFDTFSHHRTCLLAPSGLEKLKEIRYPPYTDWNQQLLRWGMGSQSCTLL

SEQ ID NO: 1176 - DNA, 396 bp, Homo sapiens
tttttttttttttttttttttttttccaggacattaaaaacttttattaggattatctctgctgcatttagttgtatgtatcccttatggcccccaggcaggtccactcctgggcattcaagtcggtccatgtgtcaggcgtgcagggtgggtcacagcatctaggagctcagtgcagcttgggactttgggacatacgctccacctttttgagcctcagtctccttgtccatcatataaggaaatcactgattccagccttcctgggctgtggagaggattccctcagcggctgtgaaagagtgctttcttgcgggtcagccccgacaggacagacttaagggcgggagggagcccatcccgcttgccccaacgaacgcgggcgcggggctttcc

SEQ ID NO: 1177 - DNA, 1970 bp, Homo sapiens
atattggagcagcaagaggctgggaagccatcacttaccttgcactgagaaagaagacaaaggccagtatgcacagctttcctccactgctgctgctgctgttctggggtgtggtgtctcacagcttcccagcgactctagaaacacaagagcaagatgtggacttagtccagaaatacctggaaaaatactacaacctgaagaatgatgggaggcaagttgaaaagcggagaaatagtggcccagtggttgaaaaattgaagcaaatgcaggaattctttgggctgaaagtgactgggaaaccagatgctgaaaccctgaaggtgatgaagcagcccagatgtggagtgcctgatgtggctcagtttgtcctcactgagggaaaccctcgctgggagcaaacacatctgaggtacaggattgaaaattacacgccagatttgccaagagcagatgtggaccatgccattgagaaagccttccaactctggagtaatgtcacacctctgacattcaccaaggtctctgagggtcaagcagacatcatgatatcttttgtcaggggagatcatcgggacaactctccttttgatggacctggaggaaatcttgctcatgcttttcaaccaggcccaggtattggaggggatgctcattttgatgaagatgaaaggtggaccaacaatttcagagagtacaacttacatcgtgttgcggctcatgaactcggccattctcttggactctcccattctactgatatcggggctttgatgtaccctagctacaccttcagtggtgatgttcagctagctcaggatgacattgatggcatccaagccatatatggacgttcccaaaatcctgtccagcccatcggcccacaaaccccaaaagcgtgtgacagtaagctaacctttgatgctataactacgattcggggagaagtgatgttctttaaagacagattctacatgcgcacaaatcccttctacccggaagttgagctcaatttcatttctgttttctggccacaactgccaaatgggcttgaagctgcttacgaatttgccgacagagatgaagtccggtttttcaaagggaataagtactgggctgttcagggacagaatgtgctacacggataccccaaggacatctacagctcctttggcttccctagaactgtgaagcatatcgatgctgctctttctgaggaaaacactggaaaaacctacttctttgttgctaacaaatactggaggtatgatgaatataaacgatctatggatccaagttatcccaaaatgatagcacatgactttcctggaattggccacaaagttgatgcagttttcatgaaagatggatttttctatttctttcatggaacaagacaatacaaatttgatcctaaaacgaagagaattttgactctccagaaagctaatagctggttcaactgcaggaaaaattgaacattactaatttgaatggaaaacacatggtgtgagtccaaagaaggtgttttcctgaagaactgtctattttctcagtcatttttaacctctagagtcactgatacacagaatataatcttatttatacctcagtttgcatatttttttactatttagaatgtagccctttttgtactgatataatttagttccacaaatggtgggtacaaaaagtcaagtttgtggcttatggattcatataggccagagttgcaaagatcttttccagagtatgcaactctgacgttgatcccagagagcagcttcagtgacaaacatatcctttcaagacagaaagagacaggagacatgagtctttgccggaggaaaagcagctcaagaacacatgtgcagtcactggtgtcaccctagataggcaagggataactcttctaacacaaaataagtgttttatgtttggaataaagtcaaccttgtttctactgtttt

SEQ ID NO: 1178 - protein, 469 aa, Homo sapiens [sequence omitted]

SEQ ID NO: 1179 - DNA, 750 bp, Homo sapiens
tgggcgaaaatttattgcttgctaaatcatggaaaacaacaatatctttttgaacaatatatcccacagaatgttgtagagttcaatgcgaacttcagtccaggtcaacgtcccttggcttatgctctctcataaactctcgatggaagtgacgcctttcatgacgcattccaccaccagtttatcatcctctcgttttctctattatggtggttgattttccatcccatttctgcacatgtaccaggacacccccatactaaggttatggtgctcttgactttcctgtcatctgcagtgacttcgtcaaattcctggcccagtatgaaggaaatctcagtatttttaaaggtactttcagatttaatggtgatcacatcccacattcaaccacttagatgatacatgttaggtttggccatgccagccactttcctggtggcaaagcccactcctacttctttcatataatcatcaaaagttttcactgggagacaaggtttccaggtaccctacaaaaagcatcacacattattgtgagtattctaggattaattcttcaggtgagaaggaagctgcaagttttcaggagggtgctgtcaccaggccgtaatggccgaattcccgggcatatgtccggtaacgtcgactgatacttcgtatacatgtatgctatacgaagttatagcggccgccttcctcgctcactgactcgctgagctcggtcgtacggttggctaaagctaacga

SEQ ID NO: 1180 - DNA, 7000 bp, Homo sapiens
aagaactgatccccccggtaatgagggggctgagctgtccctccgaggagggggcctggtgtggataaaagagacgaaaaagccgggggaggtttccaaaaataaaaccgtccgggtccccttcagacggctgcaggcacagggaggaggcgcgaaggtgcagcagccgtgcgagcccagctggagtaggagcgcggactcgaggctcggggcgcgcagccctcgttccgccgagagccgggcccccagtcggccgcttcagggccccctagactcagagaagctggccgccgggcggggccgggagaacagcccgcgggcgtccagcgtgccgaccacaaagctcttcgcggtgcccgcgcgcaccactctccagccgccccgcgccatgaggccgcggaccaaagcccgcagcccggggcgcgccctgcggaacccctggagaggcttcctgccgctcaccctggctctcttcgtgggcgcgggtcatgcccaaagggaccccgtagggagatacgagccggctggtggagacgcgaatcgactgcggcgccctgggggcagctacccggcagcggctgcagccaaggtgtacagtctgttccgggagcaggacgcgcctgtcgcgggcttgcagcccgtggagcgggcccagccgggctgggggagccccaggaggcccaccgaggcggaggccaggaggccgtcccgcgcgcagcagtcgcggcgtgtccagccacctgcgcagacccggagaagcactcccctgggccagcagcaaccagcaccccggacccgggccgcgccggctctcccacgcctggggaccccacagcggtctggggctgcgcccccaaccccgccgcgagggcggctcacggggaggaacgtctgcgggggacagtgctgcccaggatggacaacagcaaacagcaccaaccactgtatcaaacccgtttgcgagccgccgtgccagaaccggggctcctgcagccgcccgcagctctgtgtctgccgctctggtttccgtggagcccgctgcgaggaggtcattcccgatgaggaatttgacccccagaactccaggctggcacctcgacgctgggccgagcgttcacccaacctgcgcaggagcagtgcggctggagagggcaccttggccagagcacagccgccagcaccacagtcgccgcccgcaccacagtcgccaccagctgggaccctgagtggcctcagccagacccacccttcccagcagcacgtggggttgtcccgcactgtccgacttcacccgactgccacggccagtagccagctctcttccaacgccctgcccccgggaccaggccttgagcagagagatggcacccaacaggcggtacctctggagcacccctcatccccctgggggctgaacctcacggagaaaatcaagaagatcaagatcgtcttcactcccaccatctgcaagcagacctgtgcccgtggacactgtgccaacagctgtgagaggggcgacaccaccaccctgtacagccagggcggccatgggcacgatcccaagtctggcttccgcatctatttctgccagatcccctgcctgaacggaggccgctgcatcggcagggacgaatgctggtgccccgccaactccaccgggaagttctgccacctgcctatcccgcagccggacagggagcctccagggagggggtcccgccccagggccttgctggaagccccactgaagcagtccactttcacactgccgctctccaaccagctggcctccgtgaacccctccctggtgaaggtgcacattcaccacccacccgaggcctcagtgcagatccaccaggtggcccaggtgcggggcggggtggaggaggccctagtggagaacagcgtggagaccagacccccgccctggctgcctgccagccctggccacagcctctgggacagcaacaacatccctgctcggtctggagagccccctcggccactgcccccagcagcacccaggcctcgaggactgctgggccggtgttacctgaacactgtgaacggacagtgtgccaaccctctgctggagctgactacccaggaggactgctgtggcagtgtgggagccttctggggggtgactttgtgtgccccatgcccacccagaccagcctccccggtgattgagaatggccagctggagtgtcctcaggggtacaagagactgaacctcactcactgccaagatatcaacgagtgcttgaccctgggcctgtgcaaggacgcggagtgtgtgaataccaggggcagctacctgtgcacatgcagacctggcctcatgctggatccatcgcggagccgctgtgtgtcggacaaggcaatctccatgctgcagggactgtgctaccggtcgctggggcccggcacctgcaccctgcctttggcccagcggatcaccaagcagatatgctgctgcagccgcgtgggcaaagcatggggcagcgagtgtgagaaatgccctctgcctggcacagaggccttcagagagatctgccctgccggccacggctacacctacgcgagctccgacatccgcctgtccatgaggaaagccgaggaggaggaactggcaaggcccccaagggagcaagggcagaggagcagcggggcactgcccgggccagcagagaggcagcccctccgggtcgtcacggacacctggcttgaggccgggaccatccctgacaagggtgactctcaggctggccaggtcacgaccagtgtcacccatgcacctgcctgggtcacagggaatgccacaaccccaccaatgcctgaacaggggattgcagagatacaggaagaacaagtgaccccctccaccgatgtgctggtgaccctgagcaccccaggcattgacagatgcgctgctggagccaccaacgtctgtggccctggaacctgcgtgaacctccccgatggatacagatgtgtctgcagccctggctaccagctgcaccccagccaggcctactgcacagatgacaacgagtgtctgagggacccctgtcaaggaaaagggcgctgcatcaaccgcgtggggtcctactcctgcttctgctaccctggctacactctggccacctcaggggcgacacaggagtgtcaagatatcaatgagtgtgagcagccaggggtgtgcagcggggggcagtgcaccaacaccgagggctcgtaccactgcgagtgtgatcagggctacatcatggtcaggaaaggacactgccaagatatcaacgaatgccgtcaccccggtacctgccctgatgggagatgcgtcaattcccctggctcctacacttgtctggcctgtgaggagggctaccggggccagagtgggagctgtgtagatgtgaatgagtgtctgactcccggggtctgtgcccatggaaagtgcaccaacctagaaggctccttcagatgctcttgtgagcagggctatgaggtcacctcagatgagaagggctgccaagatgtggatgagtgtgccagccgggcctcatgccccacaggcctctgcctcaacacggagggctccttcgcctgctctgcctgtgagaacgggtactgggtgaatgaagacggcactgcctgtgaagacctagatgagtgtgccttcccgggagtctgcccctccggagtctgcaccaacacggctggctccttctcctgcaaggactgcgatgggggctaccggcccagccccctgggtgactcctgtgaagatgtggatgaatgtgaagacccccagagcagctgcctgggaggcgagtgcaagaacactgtgggctcctaccagtgcctctgtccccagggcttccagctggccaatggcaccgtgtgtgaggatgtgaatgagtgcatgggggaggagcactgcgcaccccacggcgagtgcctcaacagccacgggtctttcttctgtctgtgcgcgcctggcttcgtcagcgcagaggggggcaccagctgccaggatgtggacgagtgtgccaccacagacccgtgtgtgggagggcactgtgtcaacaccgagggctccttcaactgtctatgtgagactggcttccagccctccccagagagtggagagtgtgtggatattgacgagtgtgaggactatggagacccggtgtgtggcacctggaagtgtgaaaacagccctggctcctaccgctgtgttctgggctgccagcctggcttccacatggccccgaacggagactgcattgacatagacgagtgcgccaacgacaccatgtgtggcagccacggcttctgtgacaacactgatggctccttccgctgcctctgtgaccagggcttcgagatctctccctcaggctgggactgtgtggatgtgaacgagtgtgagcttatgctggcggtatgtggggccgcgctctgtgagaacgtggagggctccttcctgtgcctctgtgccagtgacctggaggagtacgatgcccaggaggggcactgccgcccacggggggctggaggtcagagtatgtctgaggccccaacgggggaccatgccccggcccccacccgcatggactgctactccgggcagaagggccatgcgccctgctccagtgtcctgggccggaacaccacacaggctgaatgctgctgcacccagggcgctacgtggggagatgcctgtgacctctgcccgtctgaggactcagctgaattcagcgagatctgccctagtggaaaaggctacattcctgtggaaggagcctggacgtttggacagaccatgtacacagatgcggatgagtgtgtgatattcgggcctggtctctgcccgaacggccggtgcctcaacaccgtgcctggttatgtctgcctgtgcaatcccggcttccactacgatgcttcccacaagaagtgtgaggatcacgatgagtgccaggacctggcctgtgagaatggcgagtgcgtcaacacggagggctccttccactgcttctgcagccccccgctcaccctggacctcagccagcagcgctgcatgaacagcaccagcagcacggaggacctccctgaccacgacatccacatggacatctgctggaaaaaagtcaccaatgatgtgtgcagcgaacccctgcgtgggcaccgcaccacctacacggaatgctgctgccaggacggcaaggcctggagccagcagtgtgctctgtgtcccccgaggagctctgaggtctatgctcagctgtgcaacgtggctcgcattgaggcagagcgggaggccggggtccacttccggccaggctatgagtatggccccgggcccgatgacctgcactacagcatctatggcccagatggggcccccttctacaactacctgggccccgaggacaccgtccctgagcctgccttccccaacacagccggtcactcagcggaccgcacacccatccttgagtctcctttgcagccctcagaactccagccccactacgtggccagccatccagagcccccagccggcttcgaagggcttcaggcggaggagtgcggcatcctgaacggctgtgagaatggccgctgtgtgcgcgtgcgggagggctacacctgtgactgttttgagggcttccagctggatgcggcccacatggcctgcgtagatgtgaatgagtgtgatgacttgaacgggcctgctgtgctctgtgtccatggttactgcgagaacacagagggctcctaccgctgccactgctccccgggatatgtggctgaggcagggcccccccactgcactgccaaggagtagcagtcaggggtcagtgtggcaactacctggaaatggcctccagtcacaggcaggggcctgaggatgatttcctagctgggaagacaccgtgacatcaggccagaggtttccaatcagccttgcctgctttcatctctcccagcttagcctctggctgtaagcttcggtcattgcctccatgcccttgcttggctcaagcaccaccaatcgctttaatgcttcagccaccgcatgaggccctgtccaccacctttcctggccttgctatgggatgcttaccaaaggatggccctcatccaccctcccaagctgtgcgagcatgcaaggccccatggctcacactgcagacacccctttccagccacaatccaccatcatcctgacgatcccacaactgggacagaggctacatctgccctagggaggtccttcagaatctgtggagcaagaaaggatttggggaagcttggggactgactccagagccccctcctaagaaccatcaccaccactcagccaatctgttctgggccctgattttgccacacctccatcctgtagcccattctctgaccccaaggagtggcagaagatcccttcactcagagaagcaaggctgatattagcttgttgaatgtaagagacacaaatgaagaagaacaaagagcctgagaaagcagcaagaggacatgatgaaaaatacgtggagttgatgagaaaggggagccaaggctttatacgtctaaagaaaatattcagtagctgaatccgcccagtgatagcctgtgggcaccacaggaagggctgccatgggatacagtacccatctacaaagacctctattacataaacactgcttcttacaggaaacaaacctcttctgggatctccttttgtgaaaaccagtttgatgtgctaaaagtaaaaagtctattttccagtgtggtcttgttcagaagcagccagatttccaatgttgtttttcccctccactcagaaacccctgccctttcccttcagaaaacgatggcaggcattcctctgagtttacaagcagagactcactccaacccaaactagctgggagttcagaaccatggtggaataaagaaatgtgcatctgctcgtgccgctcgtgccgaattc

SEQ ID NO: 1181 - protein, 1821 aa, Homo sapiens
MRPRTKARSPGRALRNPWRGFLPLTLALFVGAGHAQRDPVGRYEPAGGDANRLRRPGGSYPAAAAAKVYSLFREQDAPVAGLQPVERAQPGWGSPRRPTEAEARRPSRAQQSRRVQPPAQTRRSTPLGQQQPAPRTRAAPALPRLGTPQRSGAAPPTPPRGRLTGRNVCGGQCCPGWTTANSTNHCIKPVCEPPCQNRGSCSRPQLCVCRSGFRGARCEEVIPDEEFDPQNSRLAPRRWAERSPNLRRSSAAGEGTLARAQPPAPQSPPAPQSPPAGTLSGLSQTHPSQQHVGLSRTVRLHPTATASSQLSSNALPPGPGLEQRDGTQQAVPLEHPSSPWGLNLTEKIKKIKIVFTPTICKQTCARGHCANSCERGDTTTLYSQGGHGHDPKSGFRIYFCQIPCLNGGRCIGRDECWCPANSTGKFCHLPIPQPDREPPGRGSRPRALLEAPLKQSTFTLPLSNQLASVNPSLVKVHIHHPPEASVQIHQVAQVRGGVEEALVENSVETRPPPWLPASPGHSLWDSNNIPARSGEPPRPLPPAAPRPRGLLGRCYLNTVNGQCANPLLELTTQEDCCGSVGAFWGVTLCAPCPPRPASPVIENGQLECPQGYKRLNLTHCQDINECLTLGLCKDAECVNTRGSYLCTCRPGLMLDPSRSRCVSDKAISMLQGLCYRSLGPGTCTLPLAQRITKQICCCSRVGKAWGSECEKCPLPGTEAFREICPAGHGYTYASSDIRLSMRKAEEEELARPPREQGQRSSGALPGPAERQPLRVVTDTWLEAGTIPDKGDSQAGQVTTSVTHAPAWVTGNATTPPMPEQGIAEIQEEQVTPSTDVLVTLSTPGIDRCAAGATNVCGPGTCVNLPDGYRCVCSPGYQLHPSQAYCTDDNECLRDPCQGKGRCINRVGSYSCFCYPGYTLATSGATQECQDINECEQPGVCSGGQCTNTEGSYHCECDQGYIMVRKGHCQDINECRHPGTCPDGRCVNSPGSYTCLACEEGYRGQSGSCVDVNECLTPGVCAHGKCTNLEGSFRCSCEQGYEVTSDEKGCQDVDECASRASCPTGLCLNTEGSFACSACENGYWVNEDGTACEDLDECAFPGVCPSGVCTNTAGSFSCKDCDGGYRPSPLGDSCEDVDECEDPQSSCLGGECKNTVGSYQCLCPQGFQLANGTVCEDVNECMGEEHCAPHGECLNSHGSFFCLCAPGFVSAEGGTSCQDVDECATTDPCVGGHCVNTEGSFNCLCETGFQPSPESGECVDIDECEDYGDPVCGTWKCENSPGSYRCVLGCQPGFHMAPNGDCIDIDECANDTMCGSHGFCDNTDGSFRCLCDQGFEISPSGWDCVDVNECELMLAVCGAALCENVEGSFLCLCASDLEEYDAQEGHCRPRGAGGQSMSEAPTGDHAPAPTRMDCYSGQKGHAPCSSVLGRNTTQAECCCTQGATWGDACDLCPSEDSAEFSEICPSGKGYIPVEGAWTFGQTMYTDADECVIFGPGLCPNGRCLNTVPGYVCLCNPGFHYDASHKKCEDHDECQDLACENGECVNTEGSFHCFCSPPLTLDLSQQRCMNSTSSTEDLPDHDIHMDICWKKVTNDVCSEPLRGHRTTYTECCCQDGKAWSQQCALCPPRSSEVYAQLCNVARIEAEREAGVHFRPGYEYGPGPDDLHYSIYGPDGAPFYNYLGPEDTVPEPAFPNTAGHSADRTPILESPLQPSELQPHYVASHPEPPAGFEGLQAEECGILNGCENGRCVRVREGYTCDCFEGFQLDAAHMACVDVNECDDLNGPAVLCVHGYCENTEGSYRCHCSPGYVAEAGPPHCTAKE

SEQ ID NO: 1182 - DNA, 189 bp, Homo sapiens
atcagtgaagagctgaaggagaagctgcgggatgtgatggtggaccggcacaaggtggccctggggaagactctgggagagggagagtttggagctgtgatggaaggccagctcaaccaggacgactccatcctcaaggtggctgtgaagacgatgaagattgccatctgcacgaggtcagagctggag

SEQ ID NO: 1183 - DNA, 301 bp, Homo sapiens
  misc_feature (282)..(282): n is a, c, g, or t
tttttttttttttttttttttttttttttttttttttttgcacaggaagctgttttatttttgctgaaaaacaggggctgttgcccacacacaaaccctgggtcccccctgcaaaaaaggccaggagggcctgcaaagctgggaagccccccccaagggtttaagtcaccaaaactgcaggaaaggcaaggccatgtcaggcctggcagttggggttggggccaggagggagggaccaggcccatgtgggaaacggaaaaaatgcccaaggccacatccttngtccacagtcctgaggctc

SEQ ID NO: 1184 - DNA, 3432 bp, Homo sapiens
actccagcgcgcggctacctacgcttggtgcttgctttctccagccatcggagaccagagccgccccctctgctcgagaaaggggctcagcggcggcggaagcggagggggaccaccgtggagagcgcggtcccagcccggccactgcggatccctgaaaccaaaaagctcctgctgcttctgtaccccgcctgtccctcccagctgcgcagggccccttcgtgggatcatcagcccgaagacagggatggagaggcctctgtgctcccacctctgcagctgcctggctatgctggccctcctgtcccccctgagcctggcacagtatgacagctggccccattaccccgagtacttccagcaaccggctcctgagtatcaccagccccaggcccccgccaacgtggccaagattcagctgcgcctggctgggcagaagaggaagcacagcgagggccgggtggaggtgtactatgatggccagtggggcaccgtgtgcgatgacgacttctccatccacgctgcccacgtcgtctgccgggagctgggctatgtggaggccaagtcctggactgccagctcctcctacggcaagggagaagggcccatctggttagacaatctccactgtactggcaacgaggcgacccttgcagcatgcacctccaatggctggggcgtcactgactgcaagcacacggaggatgtcggtgtggtgtgcagcgacaaaaggattcctgggttcaaatttgacaattcgttgatcaaccagatagagaacctgaatatccaggtggaggacattcggattcgagccatcctctcaacctaccgcaagcgcaccccagtgatggagggctacgtggaggtgaaggagggcaagacctggaagcagatctgtgacaagcactggacggccaagaattcccgcgtggtctgcggcatgtttggcttccctggggagaggacatacaataccaaagtgtacaaaatgtttgcctcacggaggaagcagcgctactggccattctccatggactgcaccggcacagaggcccacatctccagctgcaagctgggcccccaggtgtcactggaccccatgaagaatgtcacctgcgagaatgggctgccggccgtggtgagttgtgtgcctgggcaggtcttcagccctgacggaccctcgagattccggaaagcatacaagccagagcaacccctggtgcgactgagaggcggtgcctacatcggggagggccgcgtggaggtgctcaaaaatggagaatgggggaccgtctgcgacgacaagtgggacctggtgtcggccagtgtggtctgcagagagctgggctttgggagtgccaaagaggcagtcactggctcccgactggggcaagggatcggacccatccacctcaacgagatccagtgcacaggcaatgagaagtccattatagactgcaagttcaatgccgagtctcagggctgcaaccacgaggaggatgctggtgtgagatgcaacacccctgccatgggcttgcagaagaagctgcgcctgaacggcggccgcaatccctacgagggccgagtggaggtgctggtggagagaaacgggtcccttgtgtgggggatggtgtgtggccaaaactggggcatcgtggaggccatggtggtctgccgccagctgggcctgggattcgccagcaacgccttccaggagacctggtattggcacggagatgtcaacagcaacaaagtggtcatgagtggagtgaagtgctcgggaacggagctgtccctggcgcactgccgccacgacggggaggacgtggcctgcccccagggcggagtgcagtacggggccggagttgcctgctcagaaaccgcccctgacctggtcctcaatgcggagatggtgcagcagaccacctacctggaggaccggcccatgttcatgctgcagtgtgccatggaggagaactgcctctcggcctcagccgcgcagaccgaccccaccacgggctaccgccggctcctgcgcttctcctcccagatccacaacaatggccagtccgacttccggcccaagaacggccgccacgcgtggatctggcacgactgtcacaggcactaccacagcatggaggtgttcacccactatgacctgctgaacctcaatggcaccaaggtggcagagggccacaaggccagcttctgcttggaggacacagaatgtgaaggagacatccagaagaattacgagtgtgccaacttcggcgatcagggcatcaccatgggctgctgggacatgtaccgccatgacatcgactgccagtgggttgacatcactgacgtgccccctggagactacctgttccaggttgttattaaccccaacttcgaggttgcagaatccgattactccaacaacatcatgaaatgcaggagccgctatgacggccaccgcatctggatgtacaactgccacataggtggttccttcagcgaagagacggaaaaaaagtttgagcacttcagcgggctcttaaacaaccagctgtccccgcagtaaagaagcctgcgtggtcaactcctgtcttcaggccacaccacatcttccatgggacttccccccaacaactgagtctgaacgaatgccacgtgccctcacccagcccggcccccaccctgtccagacccctacagctgtgtctaagctcaggaggaaagggaccctcccatcattcatggggggctgctacctgacccttggggcctgagaaggccttgggggggtggggtttgtccacagagctgctggagcagcaccaagagccagtcttgaccgggatgaggcccacagacaggttgtcatcagcttgtcccattcaagccaccgagctcaccacagacacagtggagccgcgctcttctccagtgacacgtggacaaatgcgggctcatcagcccccccagagagggtcaggccgaaccccatttctcctcctcttaggtcattttcagcaaacttgaatatctagacctctcttccaatgaaaccctccagtctattatagtcacatagataatggtgccacgtgttttctgatttggtgagctcagacttggtgcttccctctccacaacccccaccccttgtttttcaagatactattattatattttcacagacttttgaagcacaaatttattggcatttaatattggacatctgggcccttggaagtacaaatctaaggaaaaaccaacccactgtgtaagtgactcatcttcctgttgttccaattctgtgggtttttgattcaacggtgctataaccagggtcctgggtgacagggcgctcactgagcaccatgtgtcatcacagacacttacacatacttgaaacttggaataaaagaaagatttatg

SEQ ID NO: 1185 - protein, 774 aa, Homo sapiens
MERPLCSHLCSCLAMLALLSPLSLAQYDSWPHYPEYFQQPAPEYHQPQAPANVAKIQLRLAGQKRKHSEGRVEVYYDGQWGTVCDDDFSIHAAHVVCRELGYVEAKSWTASSSYGKGEGPIWLDNLHCTGNEATLAACTSNGWGVTDCKHTEDVGVVCSDKRIPGFKFDNSLINQIENLNIQVEDIRIRAILSTYRKRTPVMEGYVEVKEGKTWKQICDKHWTAKNSRVVCGMFGFPGERTYNTKVYKMFASRRKQRYWPFSMDCTGTEAHISSCKLGPQVSLDPMKNVTCENGLPAVVSCVPGQVFSPDGPSRFRKAYKPEQPLVRLRGGAYIGEGRVEVLKNGEWGTVCDDKWDLVSASVVCRELGFGSAKEAVTGSRLGQGIGPIHLNEIQCTGNEKSIIDCKFNAESQGCNHEEDAGVRCNTPAMGLQKKLRLNGGRNPYEGRVEVLVERNGSLVWGMVCGQNWGIVEAMVVCRQLGLGFASNAFQETWYWHGDVNSNKVVMSGVKCSGTELSLAHCRHDGEDVACPQGGVQYGAGVACSETAPDLVLNAEMVQQTTYLEDRPMFMLQCAMEENCLSASAAQTDPTTGYRRLLRFSSQIHNNGQSDFRPKNGRHAWIWHDCHRHYHSMEVFTHYDLLNLNGTKVAEGHKASFCLEDTECEGDIQKNYECANFGDQGITMGCWDMYRHDIDCQWVDITDVPPGDYLFQVVINPNFEVAESDYSNNIMKCRSRYDGHRIWMYNCHIGGSFSEETEKKFEHFSGLLNNQLSPQ

SEQ ID NO: 1186 - DNA, 586 bp, Homo sapiens
  misc_feature (565)..(565): n is a, c, g, or t
  misc_feature (586)..(586): n is a, c, g, or t
ttgaaacagggtctcactcctgttgcctaggctggagtacagtggcacaatcacggctcactgcagccttgacttcctagggttcagatgaacctcccacctcagcctcccaagtagctgagactacaggcatgtgccaccacgcttggctaattttttctatttttagcagagatggaatttcaccatgttggctaggctggtctcgacctcctgggctcaagtgatctgcctgcctcgacctcccaaagtgctgagatgacaggtgtgagccaccacgcctggccccaaataagatttcttttggtttcaatatggagcaattttctttcttggtgctattgtttatctgaatagggtctatgttaagatgatccctgttcctaaggaagagccaccatttctatatgtggcttcaagtccagtatcttttcttgcatctctaacccagaaacatcagatagaaaagagttccaagtaaataagagcttttagtgttttgggttttcctttctggaaatcaattaacttcaacagtcccaacaaccttaaaggttgaaaaggngaaggaaaggaaaagttttan

SEQ ID NO: 1187 - DNA, 445 bp, Homo sapiens
tcgcgcgggcgtcgtgcacgcggttgtagctgcccggcggcggcagaagcggcgctcgcgccaagggacgtgtttctgcgctcgcgtggtcatggaggcgctgccgctgctagccgcgacaactccggaccacggccgccaccgaaggctgcttctgctgccgctactgctgttcctgctgccggctggagctgtgcagggctgggagacagaggagaggccccggactcgcgaagaggagtgccacttctactcgggtggacaagtgtacccgggagaggcatccctggtatcggtcgccgaccactccctgcacctaagcaaagcaaatatttcctaaccagcgccctactgggatggaacagctgtgatcgatggagaatttaaggagctagagtttactgattatcgggggaaaacttggtttctctttttctcactggat

SEQ ID NO: 1188 - DNA, 623 bp, Homo sapiens
gggacctctagcagttaacgacgcctgcgtcaaggagaccaggaaggggtgagacaaggaagaggatgtctgagctggagaaggccatggtggccctcatcgacgttttccaccaatattctggaagggagggagacaagcacaagctgaagaaatccgaactcaaggagctcatcaacaatgagctttcccatttcttagaggaaatcaaagagcaggaggttgtggacaaagtcatggaaacactggacaatgatggagacggcgaatgtgacttccaggaattcatggcctttgttgccatggttactactgcctgccacgagttctttgaacatgagtgagattagaaagcagccaaacctttcctgtaacagagacggtcatgcaagaaagcagacagcaagggcttgcagcctagtaggagctgagctttccagccgtgttgtagctaattaggaagcttgatttgctttgtgattgaaaaattgaaaacctctttccaaaggctgttttaacggcctgcatcattctttctgctatattaggcctgtgtgtaagctgactggccccagggactcttgttaacagtaacttaggagtcaggtctcagtgataagcgt

SEQ ID NO: 1189 - DNA, 509 bp, Homo sapiens
gcggccgcaagctcggcactcacggctctgagggctccgacggcactgacggccatggcgcgttcgaacctcccgctggcgctgggcctggccctggtcgcattctgcctcctggcgctgccacgcgacgcccgggcccggccgcaggagcgcatggtcggagaactccgggacctgtcgcccgacgacccgcaggtgcagaaggcggcgcaggcggccgtggccagctacaacatgggcagcaacagcatctactacttccgagacacgcacatcatcaaggcgcagagccagctggtggccggcatcaagtacttcctgacgatggagatggggagcacagactgccgcaagaccagggtcactggagaccacgtcgacctcaccacttgccccctggcagcaggggcgcagcaggagaagctgcgctgtgactttgaggtccttgtggttccctggcagaactcctctcagctcctaaagcacaactgtgtgcagatgtgataagt

SEQ ID NO: 1190 - DNA, 226 bp, Homo sapiens
caacagctgacggggaagttcagcacatctgtgctgaccagggctggaggcgatgccagtccgtgcagctgggaacgcgtgctctgctatggctggagccactgctgaaggcactccacctgcacctatcaccaatggcccctgaacgggtatctaggcccacccttaataaagatgagctgctcattcccaaaaaaaaaaaaaaaaaaaaaaaaaaaaaaaaaaa

SEQ ID NO: 1191 - DNA, 521 bp, Homo sapiens
  misc_feature (416)..(416): n is a, c, g, or t
  misc_feature (441)..(441): n is a, c, g, or t
  misc_feature (462)..(462): n is a, c, g, or t
  misc_feature (485)..(485): n is a, c, g, or t
tttttttttaacaattctaggtttggtggaattaaaaagagctttgcccagtctgagctgtaaaagacctcatggcggaggagtgctccgggcctggaggcggaatctctgctgtgagctcaggctgtgcatgggtgatccctgggcatgacacctcaggtctctcagccttcaggtcctcatcactcaaagaagggaactgttcagccctgaaatcatcagatttgggactctagggatttcaggaatcaggattcctccaagattgaaaccatatcagtgtatatacatgatccccagaggaaatatggccaagagggaaaaaaggccaatcccaaaagggtcacacacggtatgggctccatttattttaacttacatggaaatgacaaggtttttaggaaatgaggattggntccagtgggtttttcaggggttctnggttgggtaggggctttggangggattggtccttaaaggccacngggggggtcccttgagggcagaatttcccgttttcc

SEQ ID NO: 1192 - DNA, 475 bp, Homo sapiens
  misc_feature (68)..(68): n is a, c, g, or t
  misc_feature (342)..(342): n is a, c, g, or t
  misc_feature (410)..(410): n is a, c, g, or t
  misc_feature (423)..(423): n is a, c, g, or t
  misc_feature (441)..(441): n is a, c, g, or t
  misc_feature (454)..(454): n is a, c, g, or t
  misc_feature (471)..(471): n is a, c, g, or t
ttttttttttttcagcttttcagaagttttattataaagagatttgagagaagcactgggcaccaagnacagacactcgccagggccaggaaacagctgcaaacgacgtcaagaacccaaacccaaacgaaaccccaaaaccacacacacggtaggataagctgtaacttcgttctcaaggtttcttcataaatagacaaaagtcgtcgccggcaatttaaaatagatgaatacatgattaaaaggagagcagtgctccggggtggctagcaagcgtccggtccttgctgtgaggatgacgaaacggtttggcagccgcttttgtgcgcgtctcccttaagntaaaacttaaaattgtgctaaggtttcatataaaatgctttttaccttaaagggaaactacttttttncccccacaaaatngtttttacagatgttttncagcacagttttnaaaacacgtagttcaantatg

SEQ ID NO: 1193 - DNA, 452 bp, Homo sapiens
  misc_feature (243)..(243): n is a, c, g, or t
  misc_feature (257)..(257): n is a, c, g, or t
  misc_feature (261)..(261): n is a, c, g, or t
  misc_feature (275)..(275): n is a, c, g, or t
  misc_feature (319)..(319): n is a, c, g, or t
  misc_feature (326)..(326): n is a, c, g, or t
  misc_feature (360)..(360): n is a, c, g, or t
  misc_feature (373)..(373): n is a, c, g, or t
  misc_feature (377)..(377): n is a, c, g, or t
  misc_feature (405)..(405): n is a, c, g, or t
  misc_feature (415)..(415): n is a, c, g, or t
  misc_feature (445)..(445): n is a, c, g, or t
tttttttttttttttttttttttttttttttttacggaaaagggggactttattcattctctggagcagcggccccgcctgcccgcgcacaaccgctccgcaaggtactactgagttcaggaccaagactgtctggcactggaaacacactgaaaacatcaactctcttccctttttttttcctttttttttttgggacaaaatgatacaaacaacaatacaaaatagttgtgctgttgacgnttacaaaaaaaggngggnacgtttaacctcgngatgctcaggatttgcagggtgtgagttacatcatactccagtnttctttnccccaaaacaactgtggcttcatggcagggctgnctacacattttgncccnttttcaaaagggaacatggcaaaaaaantcggggttgnaaaaagggaggggaaaggaaaggttaaacngcgtttt

SEQ ID NO: 1194 - DNA, 147 bp, Homo sapiens
gggcgtggtgcggagggcggtgttggggtctgctctaagctgcagcaagagaaactgtgtgtgaggggaagaggcctgtttcgctgtcgggtctctagttcttgcacgctctttaagagtctgcactggaggaactcctgccattac

SEQ ID NO: 1195 - DNA, 518 bp, Homo sapiens
tttttcaacacagacacacgcaggcctttattctattacacagagtagggctggggccagggcaggtcattctcaggctgcgtcagaaggtgcagagcgttcgggggacacaggccgaaccccaaagtgataataagttacggggggatttctcaggctgttgtcaggctggagcaagggcaggacgccatgtgaggaccccagagccactttcagctgcccagctcagccgtcccaggcaagcctggttccaggacagactcggcctccacaggccctcagttcagctcctgcagattctcgtaatctggagccccctcttcctccacttactctgcctcctgggaactcagggcggcaggctcagtcttagccgttccaggatgcaattgcctggacaattgcacatactagcggcggccatacagagacgcttatgcactctgcccgctctggggaacggtcaggtagatatcatggtacgtaatggagaaggcacggactgagatgcatggagt

SEQ ID NO: 1196 - DNA, 689 bp, Homo sapiens
gaggaagctttgcacagacgtgaggacggccccgggcgcctctaccccggggacaccccccccccaggagatggaaccccgagggcacggcgtggcggcccatgcgggcagctcgcgttaggacccagcggcctccggggctggagggcgggcgccagccccgtcgggggccgggaggggggactcggagcgggccaaggggcggctccggcgggcggactcggagcgggcggcggagtgacccggacagctgtcctctctgacaccaccccggcctgcctctttgttgccatgagagctgcctacctcttcctgctattcctgcctggctttgctggctcagggccagtatgacctggacccgtgccgccgttccctgaccacgtccagtacacccactatagcgaccagatcgacaacccagactactatgattatcaagaggtgactcctcggacctccgaggaacagttccagttccagtcccagcagcaagtccaacaggaagtcatcccagccccaaccccagaacaggaaatgcgagctggagcccacagagcctgggcctccttgactgccgtgaggaacagtaccgtgcaccgcctctactccatacacaggcttgcaaacagtgtctcaacgaggtctgctcctacagctccgcgtgtgtacgtcatcaccaaggagat

SEQ ID NO: 1197 - DNA, 356 bp, Homo sapiens
aagcccccaatttcggcctatccatatgagccttccaccttctgccctacttgagttctgggttatactgcagtctagggccttgtataggtcttggatcatctcacatggcagcctggcataaggaaccgctccacaatgcttgctctgatagccgacgttctgcacctatcaggcaggggttaggaagcccctctgccacacatgacacacacacacgtacacttgcccacatatgcaaagaaatatttaaggagagattacatgaaatcaaagagagggagatagattcatgaagaggctgaaatactcaaaggtgagtagaaagggaagaagcagagaacaaatacaagcca

SEQ ID NO: 1198 - DNA, 416 bp, Homo sapiens
  misc_feature (231)..(231): n is a, c, g, or t
  misc_feature (311)..(311): n is a, c, g, or t
  misc_feature (389)..(389): n is a, c, g, or t
attctcattgtatagttaaaccacagtgagaagggttctataagtagttatacaaaccaagggtttaaatacctgttaaatagatcaattttgattgcctactatgtgaactcactgttaaaggcactgaaaatttatcatatttcatttagccacagccaaaaataaggcaatacctatgttagcattttgtgaactctaaggcaccatataaatgtaactgttgatttnctcacttggtgctgggtactaggttttaaaattgtatgatagttattatattgtgcaaataaagtaggaaaatttgaacnacaatgattatctttttgaatactcataccgcaagggattggttgtctgaagaatgccactatagtaagttatctatngtgtgccaatctccattgctaggcatg

SEQ ID NO: 1199 - DNA, 536 bp, Homo sapiens
tttgttttttttttttaatttcatagcaacatgtttatttaagccctagctaagttttcatttacaagcaaatattttcaggggaaaaaatcacataagacaatattttcaaatgttataccatctacataaaaattaaacttgcagaatttacaaattaatattctgagcagacagaaatattatacatccttttgcaaaatccagtcaacaacttttaaaaattcatacaggcacaacacaagatagtctctctatacaatctacctatttacatagcttttcccaccacagatgataatagctctcatcatagctaccaaggttcgcaaacatagtatatttaaaatatatttagcagcatataaaaaattagataaaagggaaggaaatactactattaaataaaaacaaaattaaatggtcataatagaaacaactccataggaaaatagatcaaaatatatttctgttaggacatcaacaatgtttcccatcacagaatatatgcacagcactggaaaaaaaaaaaaaat

SEQ ID NO: 1200 - DNA, 320 bp, Homo sapiens
  misc_feature (162)..(162): n is a, c, g, or t
  misc_feature (298)..(298): n is a, c, g, or t
cattttcattagttaaagctacatcagttactgaaaaatcagaagccatgctcgcagaggctcacccagaaatcagagaagcaaaggcagtaggaacccaaccacatcctttagaagaaagtaaagttttggtggagaaaaccaagactttcctgccggtgntcgtttcttgtcgtgatgaaatagagaaccactctttatctcaggaaggaaatctagtattagaaaagtcaagcagagatatgccagatcacagtgaagaaaaagaacagttcagagagtcagagctatccgaaanggcggttcagttagatatcaca

SEQ ID NO: 1201 - DNA, 200 bp, Homo sapiens
tttttaaagtcaaaatgtttttatttacgctgaagtttagcaagtacatttttaacaaagaaggtgtactttaacgttatgtatagtagaacagggaaaccatacatataactttctagtctctaacacactactgcattttttaaaaatttaaaagacaaaaagccaagttgaaatgagcatagaaaagcatcaaatat

SEQ ID NO: 1202 - DNA, 627 bp, Homo sapiens
agtctccggcgagttgttgcctgggctggacgtggttttgtctgctgcgcccgctcttcgcgctctcgtttcattttctgcagcgcgccacgaggatggcccacaagcagatctactactcggacaagtacttcgacgaacactacgagtaccggcatgttatgttacccagagaactttccaaacaagtacctaaaactcatctgatgtctgaagaggagtggaggagacttggtgtccaacagagtctaggctgggttcattacatgattcatgagccagaaccacatattcttctctttagacgacctcttccaaaagatcaacaaaaatgaagtttatctggggatcgtcaaatctttttcaaatttaatgtatatgtgtatataaggtagtattcagtgaatacttgagaaatgtacaaatctttcatccatacctgtgcatgagctgtattcttcacagcaacagagctcagttaaatgcaactgcaagtaggttactgtaagatgtttaagataaaagttcttccagtcagtttttctcttaagtgcctgtttgagtttactgaaacagtttacttttgttcaataaagtttgtatgttgcatttaaaaaaaaaaaaaaa

SEQ ID NO: 1203 - protein, 79 aa, Homo sapiens
MAHKQIYYSDKYFDEHYEYRHVMLPRELSKQVPKTHLMSEEEWRRLGVQQSLGWVHYMIHEPEPHILLFRRPLPKDQQK

SEQ ID NO: 1204 - DNA, 701 bp, Homo sapiens
ctaggctccaagctcaggacctcaggatgggagatgaggagaagcggaacagggccatcacggcccgcaggcagcacctgaagagcgtgatgctgcagatagcggccacggagctggagaaggaggagagccgccgtgaggcagagaagcagaactacctggcggagcactgcccgccgctgcatatcccgggctccatgtctgaagtgcaggagctctgcaaacagctgcacgccaagatcgatgcggctgaagaggagaagtacgacatggaggtgagggtgcagaagaccagcaaggagctggaggacatgaaccagaagctatttgatctgcggggcaagttcaagcggcccccactgcggagggtgcgcatgtcggccgatgccatgctcaaggccctgctgggctcgaagcacaaggtgtgcatggacctgagggccaacctgaagcaggtcaagaaggaggacacagagaaggagcgggacctgcgagacgtgggtgactggaggaagaacatcgaggagaagtctggcatggagggccggaagaagatgtttgagtccgagtcctaggccactcgctgcccctacgcctgccccggtgcccggctcccagcagaacatactagggagatgcacccagagcctgccagggagggctggcctcaccaccaccgtcaataaaggatttgaatcccc

SEQ ID NO: 1205 - protein, 182 aa, Homo sapiens
MGDEEKRNRAITARRQHLKSVMLQIAATELEKEESRREAEKQNYLAEHCPPLHIPGSMSEVQELCKQLHAKIDAAEEEKYDMEVRVQKTSKELEDMNQKLFDLRGKFKRPPLRRVRMSADAMLKALLGSKHKVCMDLRANLKQVKKEDTEKERDLRDVGDWRKNIEEKSGMEGRKKMFESES

SEQ ID NO: 1206 - DNA, 363 bp, Homo sapiens
ccgtaaactccttgaaaaacattttaaagtcatcaatatgatctgtttcccatgaaacttaagttagctttcttattggagttatttcttttctgtaagtctgaaaagtagagattttgttttacgcattttagtaacctgcaacaaccaactctaaaaaagatttggcttgtaatgacggtctctgcttttttgggtttggagtacacaattgtaatatttacttagttatttgtgtttttctttgttcaaggtattgactagtttcataaattttttgcaagtttttctttcattggttggaaagcagattacattttgcactattaaaataagtttattactttaaaaaaaaagtcgacg

SEQ ID NO: 1207 - DNA, 1274 bp, Homo sapiens
cagcgggagacggccacgagattcccccatctctttgaatataattttagattgagattcagattaaatccgaggggaaaacactttatgaggctgaaagctgtgtcgttgccagagacagggttatgagctatcaaatgcaattacattaagacagattatactgggcaaattgagccatttagaaggtgagaatcaaagaaacggctctgatcctcttttcccccttctctctccctctccctctctctctaaattgcagttcgtagttccttccaattcggaggcacaaaagtaggtgagactgcttttgtatctgcgaagtgcttcactcctgaatgtaattctagctgagtgcaatctaggttaagagccggacaagcgggtaattagagcccgctagctgcccgaggaccggccgccccgccaaagcgcgccccgagtcggcgcccttctcccggccgagcctagctgcggctggacacggagcgcccgagatgatggtgctggacaaggaggacggcgtgccgatgctctccgtccagcccaaagggaagcagaagggctgtgcgggctgtaaccgcaagatcaaggaccgctatctgctgaaggcattggacaagtactggcacgaagactgcctcaagtgtgcgtgctgtgactgccgcctgggcgaggtgggctccaccctctacaccaaggccaacctcatcctgtgccgacgcgactacctgaggctctttggcaccacagggaactgtgctgcttgcagcaagctgatcccagccttcgagatggtgatgcgggcccgggacaacgtgtatcacctcgactgcttcgcctgccagctctgcaaccagagattttgtgtgggagacaaattcttcctgaagaacaacatgatcttgtgtcagatggactatgaggaagggcagctcaatggcacctttgaatcccaagttcagtaacgcccggcgcctggcctccaggcccgtctgtccatctgcccgcctgcccacctgcctggccggccagccagccactctaccagtgcaggctggccagccgctctcctgccacattagaacttctccgtcctcgatgggagggatggcccttcctcctccaccaccgcccgtctgtgtgtgacccctcctggggccaggccgggcctgtacagtctgtcttctgtatataaatgggaacatttattttatgagaaatgtaatgcgattttattactggcgtggattaaacttatgaatgtttccggg

SEQ ID NO: 1208 - protein, 156 aa, Homo sapiens
MMVLDKEDGVPMLSVQPKGKQKGCAGCNRKIKDRYLLKALDKYWHEDCLKCACCDCRLGEVGSTLYTKANLILCRRDYLRLFGTTGNCAACSKLIPAFEMVMRARDNVYHLDCFACQLCNQRFCVGDKFFLKNNMILCQMDYEEGQLNGTFESQVQ

SEQ ID NO: 1209 - DNA, 214 bp, Homo sapiens
tttttttttttttttttcaggtttacatgccgttacacgatatgttcattaaacacaacgagggttcatagatgacctaggtcccaagctagaacaggcatacatacttttaagaacaatagatttaccaaatgctttgaaacacatgacaaccacagatataaaaaagtgctttttaatttttagccagaatggtcaagttgaatctccactc

SEQ ID NO: 1210 - DNA, 1482 bp, Homo sapiens
gcgcactcacagtcgcaacctttccccttcctgacttcccgctgacttccgcaatcccgatggaataaatctagcacccctgatggtgtgcccacactttgctgccgaaacgaagccagacaacagatttccatcagcaggatgtgggggctcaaggttctgctgctacctgtggtgagctttgctctgtaccctgaggagatactggacacccactgggagctatggaagaagacccacaggaagcaatataacaacaaggtggatgaaatctctcggcgtttaatttgggaaaaaaacctgaagtatatttccatccataaccttgaggcttctcttggtgtccatacatatgaactggctatgaaccacctgggggacatgaccagtgaagaggtggttcagaagatgactggactcaaagtacccctgtctcattcccgcagtaatgacaccctttatatcccagaatgggaaggtagagccccagactctgtcgactatcgaaagaaaggatatgttactcctgtcaaaaatcagggtcagtgtggttcctgttgggcttttagctctgtgggtgccctggagggccaactcaagaagaaaactggcaaactcttaaatctgagtccccagaacctagtggattgtgtgtctgagaatgatggctgtggagggggctacatgaccaatgccttccaatatgtgcagaagaaccggggtattgactctgaagatgcctacccatatgtgggacaggaagagagttgtatgtacaacccaacaggcaaggcagctaaatgcagagggtacagagagatccccgaggggaatgagaaagccctgaagagggcagtggcccgagtgggacctgtctctgtggccattgatgcaagcctgacctccttccagttttacagcaaaggtgtgtattatgatgaaagctgcaatagcgataatctgaaccatgcggttttggcagtgggatatggaatccagaagggaaacaagcactggataattaaaaacagctggggagaaaactggggaaacaaaggatatatcctcatggctcgaaataagaacaacgcctgtggcattgccaacctggccagcttccccaagatgtgactccagccagccaaatccatcctgctcttccatttcttccacgatggtgcagtgtaacgatgcactttggaagggagttggtgtgctatttttgaagcagatgtggtgatactgagattgtctgttcagtttccccatttgtttgtgcttcaaatgatccttcctactttgcttctctccacccatgacctttttcactgtggccatcaggactttccctgacagctgtgtactcttaggctaagagatgtgactacagcctgcccctgactgtgttgtcccagggctgatgctgtacaggtacaggctggagattttcacataggttagattctcattcacgggacccgg

SEQ ID NO: 1211 - protein, 329 aa, Homo sapiens
MWGLKVLLLPVVSFALYPEEILDTHWELWKKTHRKQYNNKVDEISRRLIWEKNLKYISIHNLEASLGVHTYELAMNHLGDMTSEEVVQKMTGLKVPLSHSRSNDTLYIPEWEGRAPDSVDYRKKGYVTPVKNQGQCGSCWAFSSVGALEGQLKKKTGKLLNLSPQNLVDCVSENDGCGGGYMTNAFQYVQKNRGIDSEDAYPYVGQEESCMYNPTGKAAKCRGYREIPEGNEKALKRAVARVGPVSVAIDASLTSFQFYSKGVYYDESCNSDNLNHAVLAVGYGIQKGNKHWIIKNSWGENWGNKGYILMARNKNNACGIANLASFPKM

SEQ ID NO: 1212 - DNA, 496 bp, Homo sapiens
ctccagctgaggtttctagacgtgacccagggcagactggtagcaaacccccacgcccagccaggagcaccgccgaggactccagcacaccgagggacatgctgggcctgcgcccccactgctcgccctggtggggctgctctccctcgggtgcgtcctctctcaggagtgcacgaagttcaaggtcagcagctgccgggaatgcatcgagtcggggcccggctgcacctggtgcagaagctgaacttcacagggccgggggatcctgactccattcgctgcgacacccggccacagctgctcatgaggggctgtgcggctgacgacatcatggaccccacaagcctcgctgaaacccaggaagaccacaatgggggccagaagcagctgtccccacaaaaagtgacgctttacctgcgaccaggccaggcagcagcgttcaacgtgaccttccggcgggccaagggtaccccatcgacctgtactatctgatgga

SEQ ID NO: 1213 - DNA, 520 bp, Homo sapiens
attttgaattaatttaattactggcatgaaaccaaacattattgagaggttatcaacaaatactgttctgacttgaagcaagagaaaagcctcagtctacagccagagagaaggatggcatcattacttatgcaatcatctttcaattccatttccttggctctacaagtaaatgaaaaagaaaagatggaatacaaagtttttcatatatatgagttaaaatttcagagaactaaatttttgtcaataaatactaataaatgttccattgcccaggagcttaggaaagccttgctactgaggcaaaagcagaggaagtgttaaagaatgctatttaggccaatctccccaggagggctgaaaaatgcaaaacctctacagtccatctagtcagaataacatatttcaattgctccaagtgtttttttttttaaaataccctcgtgccgaatttttggccttgagggccaaattccctatagtgagtcggattaaaatcggaatcatgttatagctgttt

SEQ ID NO: 1214 - DNA, 407 bp, Homo sapiens
gcgggcggggctcggccggggcaccggtgagtgccgggtgcagagggaggcggcactggtccgacgtggggcggcacgatgaagcgcccagttcaatacaaacaagtgagtttgactcatcagatgaagagcctattgaagatgaacagactccaattcatatatcatggctatctttgtcacgagtgaattgttctcagtttctcggtttatgtgctcttccaggttgtaaatttaaagatgttagaagaaatgtccaaaaagatacagaagaactaaagagctgtggtatacaagacatatttgttttctgcaccagaggggaactgtcaaaatatagagtcccaaaccttctggatctctaccagcaatgtggaattatcacccatcatcatccaatcgcagat

SEQ ID NO: 1215 - DNA, 1358 bp, Homo sapiens
cctgtttgggacactggactcccgtgagctggaaggaacagatttaatatctaggggctgggtatccccacatcactcatttggggggtcaagggacccgggcaatatagtattctgctcagtgtctggagatcatctacccaggctggggcttctgggacaggcgaggacccacggaccctggaagagctggtccaggggactgaactcccggcatctttacagagcagagcatgatcacattcctgccgctgctgctggggctcagcctgggctgcacaggagcaggtggcttcgtggcccatgtggaaagcacctgtctgttggatgatgctgggactccaaaggatttcacatactgcatctccttcaacaaggatctgctgacctgctgggatccagaggagaataagatggccccttgcgaatttggggtgctgaatagcttggcgaatgtcctctcacagcacctcaaccaaaaagacaccctgatgcagcgcttgcgcaatgggcttcagaattgtgccacacacacccagcccttctggggatcactgaccaacaggacacggccaccatctgtgcaagtagccaaaaccactccttttaacacgagggagcctgtgatgctggcctgctatgtgtggggcttctatccagcagaagtgactatcacgtggaggaagaacgggaagcttgtcatgcctcacagcagtgcgcacaagactgcccagcccaatggagactggacataccagaccctctcccatttagccttaaccccctcttacggggacacttacacctgtgtggtagagcacattggggctcctgagcccatccttcgggactggacacctgggctgtcccccatgcagaccctgaaggtttctgtgtctgcagtgactctgggcctgggcctcatcatcttctctcttggtgtgatcagctggcggagagctggccactctagttacactcctcttcctgggtccaattattcagaaggatggcacatttcctagaggcagaatcctacaacttccactccaagtgagaaggagattcaaactcaatgatgctaccatgcctctccaacatcttcaaccccctgacattatcttggatcctatggtttctccatccaattctttgaatttcccagtctcccctatgtaaaacttagcaacttgggggacctcattcctgggactatgctgtaaccaaattattgtccaaggctatatttctgggatgaatataatctgaggaagggagttaaagaccctcctggggctctcagtgtgccatagaggacagcaactggtgattgtttcagagaaataaactttggtgga

SEQ ID NO: 1216 - protein, 263 aa, Homo sapiens
MITFLPLLLGLSLGCTGAGGFVAHVESTCLLDDAGTPKDFTYCISFNKDLLTCWDPEENKMAPCEFGVLNSLANVLSQHLNQKDTLMQRLRNGLQNCATHTQPFWGSLTNRTRPPSVQVAKTTPFNTREPVMLACYVWGFYPAEVTITWRKNGKLVMPHSSAHKTAQPNGDWTYQTLSHLALTPSYGDTYTCVVEHIGAPEPILRDWTPGLSPMQTLKVSVSAVTLGLGLIIFSLGVISWRRAGHSSYTPLPGSNYSEGWHIS

SEQ ID NO: 1217 - DNA, 2066 bp, Homo sapiens
tcgcgctggagggcagccgcttagcgtgcgctcttgtccccgcaggtcgcagccaggcggcgggcgcgcccagccccggcccctggagcgcccgccgcggtccccacctccatggacgccttcaaggggggcatgagcctggagcggctgccggaggggttccggccgccgccgccgccaccccatgacatggggcccgccttccacctggcccggcccgccgacccccgcgagccgctcgagaactccgccagcgagtcgtctgacacggagctgccagagaaggagcgcggcggggaacccaaggggcccgaggacagtggtgcgggaggcacgggctgcggcggcgcagacgacccagccaagaagaagaagcagcggcggcaacgtacgcacttcacaagccagcagttgcaagagctagaggccacgttccagaggaaccgctaccccgacatgagcatgagggaggagatcgccgtgtggaccaacctcaccgagccgcgcgtgcgggtctggttcaagaacaggcgagccaagtggcgtaagcgcgagcgtaaccagcagctggacctgtgcaagggtggctacgtgccgcagttcagcggcctagtgcagccctacgaggacgtgtacgccgccggctactcctacaacaactgggccgccaagagcctggcgccagcgccgctctccaccaagagcttcaccttcttcaactccatgagcccgctgtcgtcgcagtccatgttctcagcacccagctccatctcctccatgaccatgccgtccagcatgggcccaggcgccgtgcctggcatgcccaactcgggcctcaacaacatcaacaacctcaccggctcctcgctcaactcggccatgtcgccgggcgcttgcccgtacggcactcccgcctcgccctacagcgtctaccgggacacgtgcaactcgagcctagccagcctgcggctcaagtccaaacagcactcgtcgtttggctacggcggcctgcagggcccggcctcgggcctcaacgcgtgccagtacaacagctgaccgccccgccgcaccacgcgggccggcggccggagcggggaagggcgcgggcgcggaggacgcacgcggggccccggctcgcaagccccagctcaccgcgccgcggacctcacacctgcgcagccccctcctcccacttcccactccgggttggttttgtgtttgcttttccggaccccactctgccctccaaaaagacaaaaaaaaaaaaaaaaaaaaaagcaaaaagacgtcggagaaaagtgccgcgaaaaaatggatgagttgcaatttctctcgggatggcgcgggtggtgtgtgtgtgttcccacgggccccggaggcccactccgcggagggcacgcggcgcggtaggcaagcgccgaggcccagcggccgggggaggacaacctcgtatcccgcgcccccgccgcgctggatccggactgagcggccgggcctgcggactggatgtgcggggcctggacttgcctaggatttcccgaccccgtacaaaccaagttgccctctccgagctaggcccggccgagagcgccttaactcgagtcggatccgtgttggggcgggcgttgggtttggggggacggtgcccccagcccaggatcgggcactcagtggagccgcacacggcccggcgcgcctggtagagcctcgctggccccgcgccccggagccctatattaaggccacggagcgacagcgggcagtgcgggcctggcgggaggtgggggaggtccatctcagaacaccccagccttgagcttagctgcaggcccaggccctctgctctgctcccgggctaggaggtggccctctgtctgggcgaacagccccctcctcaccgcccgccgtgcaagagtcgagccggcagagcaaggggcgcggccccagggccctgcgcccactttgcacacccgctctccggcccgcgcccctgtttacagcgtccctgtgtatgttggactgactgtaataaatctgtctatatcgactaaaaaaaaaaaaaaaaa

SEQ ID NO: 1218 - protein, 314 aa, Homo sapiens [sequence omitted]

SEQ ID NO: 1219 - DNA, 443 bp, Homo sapiens
cttctccattccttggctttctggagtacagtgcctttgcctgtgaccacgaccgagagaggtctgttcttgagtgtggttgcagagttgactggggtacagtctggggcagaggcaggcgtgacagctttggggcgggggctcacattctccaggtgggtggtgtccacggtggtgcctaacgtcacaggccctgcctcagccttcttcaggttgtccttcacctccatgatgctgagctccaggtccacgcgcctgctctcctcgccccggcactcctcgtcaatttccttcagcttctgctccaggctcgccaggacttccttgtctgtgcatttcagtagggtttcctttagctcccgtttctctttccggagctgagccaggtgcccccggatttcttctttcttcttttcaagcctctccttctcctctgtgtaccg

SEQ ID NO: 1220 - DNA, 5071 bp, Homo sapiens
ggcctgatagcgcggcgtgtggaccggccgaagagcgcgcccagagcggcgccgtcgcgagccacagcccgagccggtcccagccgagccgagccccagccgagccgagccggcccgagcgctccggtgcccgcagccatgccggccggccgcgcgcgcacctgtgcgctgctcgccctctgcctcctggggccccaggatttcgggccgacgcgcttcatctgcacttcggtgccggtggacgccgacatgtgtgccgcgtccgtggccgcgggcggcgcggaggagctccggagcagcaatgtgctgcagctccgggagaccgtgctgcagcagaaggagaccatcctgagccagaaggagaccatccgcgagctgaccgccaagctgggccgctgcgagagccagagcacgctggaccccggagccggcgaggcccgggcgggcggcggccgcaagcagccgggctcgggcaagaacaccatgggcgacctgtcccggacaccggccgccgagacgctcagccaactcgggcaaactttgcaatcgctcaaaacccgcctggagaacctcgagcagtacagccgcctcaattcctccagccagaccaacagcctcaaggatctgctgcagagcaagatcgatgagctggagaggcaggtgctgtcccgggtgaacaccctggaggagggcaagggggggcccaagaacgacaccgaggagagggtcaagatcgagaccgccctgacctccctgcaccagcggatcagcgagctcgagaaaggtcagaaagacaaccgccctggagacaagttccagctcacattcccactgcggaccaactatatgtatgccaaggtgaagaagagcctgccagagatgtacgccttcactgtctgcatgtggctcaagtccagcgccacgccaggtgtgggcacgcccttctcctacgctgtgcccggccaggccaacgagctggtcctcattgagtggggcaacaaccccatggagatcctcatcaatgacaaggtggccaagctgccttttgtcatcaatgatggcaagtggcaccacatctgtgtcacctggaccacccgggacggggtctgggaggcctaccaggatggcacgcagggtggcagtggcgagaacttggcgccctatcaccccatcaagccccagggcgtgctggtgctgggccaggagcaggacactctgggtggtgggtttgatgccacccaggcatttgtgggtgagctggcccacttcaacatctgggaccgcaagctgacccccggggaggtgtacaacctggccacctgcagcaccaaggctctgtccggcaatgtcatcgcctgggctgaatcccacatcgagatctacggcggggccaccaagtggaccttcgaggcctgtcgccagatcaactgagcacggcaggccaggctgagccgcccgccctcgccccctgcttgtgcggcgatgatctgtttgtgcgtctcttctctcccttttccccaggaatgaaccgaggccgtcgccctgcacacgcacacgcacacagcctggttttgtcctcatgcacacgaagcagcccctgctcccatctgtccctgaggaagccccacttctctgtaggagcccggactctctcagcatgccccattcacagctgaagtgggtgctgcaacgtcttgaacaaggcagaagttggtgagaggatctgtgtgtgcgtgtctacatgtgtgtgtctacgtgtgtgcgtgcgtggctgggggaggccttttctttgaggacgtacctcatttccttctttcttctggctttggaaaaatctcatgatgaaaattcatatttgccaactttgttagctgcgtgcgtgctttggggttggtgcaacctcagtacacgcatttgtctttgtttgcaaacctttctcagagcgacatatctttatattgatgtaataaatgtcttttagtggtttgtcaaaggccgggggcgggggctctctacagagaatttttattttgtaatagaagtgaactgtctctgaaggtgaaggcaggccgtcctgggatggtaccctgtgctctcccgtggaggagaggggatggctgaggacactggcccttacccagggcgaacagcatccatccctgctgtttgcatcttgagagcagcatggggcctgggaggtcggcctgtgtgcccagctcagctagctctgccccaggacggccctgccctcgaccttcccacctcctcagatcctgcaaggctgggtctgcccctcccttctcacctctggagctgtgctgcactgcttcccagagagggccctgagagaggagcgtgccacccaccagggaagccgggccccagcacccctctcctttggcctcccggagtgcagaccagaggggaccttttaaggaaagaagccgtgtttcgatgaagacctggccacatggggcactgggacttcaacccagcccatcggtgggaaggtcctttttgggggactttgacagccatatccctcccagcacaccaggcgccaggtgagctggttcagacccctccagggtactccagagacctcacgtgtggagccaggcctggccaggcaggggcctgaaacccactcctccatctcatgggctcacggcctacacgagcccacaagctgccactggccggcgacactgacacctgagcagtgtccagaacctttttgcctttttttgttccccgtgaaaagcaacatggacatttccttctagtccttccaaggaggggagagaagtgtatgtgcatttgtgtgtgtgtgtgtgtgttgtgtgtgtgtgtgcgctaagtgagaaagagagcaggctcgggaggccctgcccagggtaggaggagcttcctgctttgcaccatctggtggtcgcaccctggagggcaccccgactctgtctccaggagtctcatcagcaaaccgctgacaagtctttctagaaattctactgcactgcctggctcagctgcacgctgcagacatttctgcaggaggagcaggtgtttctgtcttctgttccttctagggccacctgtccccttaaacacaggtccacgttgtgtcaagaacctagtgcatctgtgtgtgtctgtcagtgtctctgtgtcagtgttctcgtgggtgtctgcacggtaccggcccgccttctgcaatcatcactcccgcagagggggtgcagatcaggcgccgtgctgcggttgttgttcaacagtgctttttcttagatagcgtcttcctcagcgcccgtcggttgtggcatccttgatctcagggatcttctccgtttgcatgtcctcggagtggcgtgttccttctccctgggtccgacatgtgttcccgcacctgcatggactgccccggttctgtgttgtgtgccgagtgccgcccagtgttctgtgaccacccgtgtagctactgaaaatggctgggtaagcaagtcaagggtgttggaggaggtcaagagagagctcagtttccctctccccctccccaaacacaccaagaagcatttttaacgtgtaggttgagaacaagcctaaaggattcccacagctgggagccagcaagagagcttggagtcgcctctctagaccagatctagccccaccctcactccagccatctcggagcccttgtgtaggcaacgccggtgcgcggctgtgtggggtgctccctgccagcacctccggccagccccgcccctgccgatctactggaccgcagaccaccttctgcccccgtggccaggtgggagctgtccgttcaggaccatgagccatcctctgccctgactagcgaggggcagagcacaccccagtgcttacgcctccacccctgcagcctcctggcccgctcaccttcctcacccctcctctgacccacccatggtgccagggccgaagctgacctttagctccctcctgcccttgctagggtctgagccaagcccctcgactcctcactgtgttgacacttggcactttgctggccccgagaaggtcgatgacacagccgcaaatctaatccacgtagttcccatttactccttaatctgattgatgttccctcttgcactgaataatacatgcctctctcaggtaagccattttataaaacaagaagataaaaagcactgttgaggcagtgtttgcttttgccgagctggtgtccgacagctccctgggtgtccggggtgggagagctgttgacagaagctctccgggcctcagggcttagatcccacttgagtcgtaagccttcttgcttttgataacacagtattatttctcttactgtagaagaaaaagtttattaccaaacaagagtatttttatgaaagaaaaggacaaacctataaattaactcaacctatatctcccttgaaaatactttcaggctccaccaaaacgtagaactgaaagcatgtattttggaagaaagagatacattttgtatgctttcttttccttttgtagattcccagtttattttctaagactgcaaagatcactttgtcaccagccctgggacctgagaccaagggggtgtcttgtgggcagtgagggggtgaggagaggctggcatgaggttcagtcattccagtgagctccaaagaggggccacctgttctcaaaagcatgttggggaccaggaggtaaaactggccatttatggtgaacctgtgtcttggagctgacttactaagtggaatgagccgaggatttgaatatcagttctaaccttgatagaagaaccttgggttacatgtggttcacattaagaggatagaatcctttggaatcttatggcaaccaaatgtggcttgacgaagtcgtggtttcatctcttaaacacagtgtgtaaatttattcaactaacgatgggaaatgtattacttctgtacacagtggactgaagtgcaatttgttgaaagggaacaagtcattgaagagaaaaaaaaaaagcccaatacttagagtcccaattttgtctcatttgccaaaaaaa

SEQ ID NO: 1221 - protein, 430 aa, Homo sapiens
MPAGRARTCALLALCLLGPQDFGPTRFICTSVPVDADMCAASVAAGGAEELRSSNVLQLRETVLQQKETILSQKETIRELTAKLGRCESQSTLDPGAGEARAGGGRKQPGSGKNTMGDLSRTPAAETLSQLGQTLQSLKTRLENLEQYSRLNSSSQTNSLKDLLQSKIDELERQVLSRVNTLEEGKGGPKNDTEERVKIETALTSLHQRISELEKGQKDNRPGDKFQLTFPLRTNYMYAKVKKSLPEMYAFTVCMWLKSSATPGVGTPFSYAVPGQANELVLIEWGNNPMEILINDKVAKLPFVINDGKWHHICVTWTTRDGVWEAYQDGTQGGSGENLAPYHPIKPQGVLVLGQEQDTLGGGFDATQAFVGELAHFNIWDRKLTPGEVYNLATCSTKALSGNVIAWAESHIEIYGGATKWTFEACRQIN

SEQ ID NO: 1222 - DNA, 2053 bp, Homo sapiens
catctttgatgagggcagagctcacgttgcattgaagacgaaacctcggggaggtcaggcgctgtctttccttccctccctgctcggcggctccaccacagttgcaacctgcagaggcccggagaacacaaccctcccgagaagcccaggtccagagccaaacccgtcactgaccccccagcccaggcgcccagccactccccaccgctaccatggccgaagacgcagacatgcgcaatgagctggaggagatgcagcgaagggctgaccagttggctgatgagtcgctggaaagcacccgtcgtatgctgcaactggttgaagagagtaaagatgctggtatcaggactttggttatgttggatgaacaaggagaacaactcgatcgtgtcgaagaaggcatgaaccatatcaaccaagacatgaaggaggctgagaaaaatttaaaagatttagggaaatgctgtggccttttcatatgtccttgtaacaagcttaaatcaagtgatgcttacaaaaaagcctggggcaataatcaggacggagtggtggccagccagcctgctcgtgtagtggacgaacgggagcagatggccatcagtggcggcttcatccgcagggtaacaaatgatgcccgagaaaatgaaatggatgaaaacctagagcaggtgagcggcatcatcgggaacctccgtcacatggccctggatatgggcaatgagatcgatacacagaatcgccagatcgacaggatcatggagaaggctgattccaacaaaaccagaattgatgaggccaaccaacgtgcaacaaagatgctgggaagtggttaagtgtgcccacccgtgttctcctccaaatgctgtcgggcaagatagctccttcatgcttttctcatggtattatctagtaggtctgcacacataacacacatcagtccacccccattgtgaatgttgtcctgtgtcatctgtcagcttcccaacaatactttgtgtcttttgttctctcttggtctctttctttccaaaggttgtacatagtggtcatttggtggctctaactccttgatgtcttgagtttcatttttcattttctctcctcggtggcatttgctgaataacaacaatttaggaatgctcaatgtgctgttgattctttcaatccacagtattgttcttgtaaaactgtgacattccacagagttactgccacggtcctttgagtgtcaggctctgaatctctcaaaatgtgccgtctttggttcctcatggctgttatctgtctttatgatttcatgattagacaatgtggaattacataacaggcattgcactaaaagtgatgtgatttatgcatttatgcatgagaactaaatagatttttagattcctacttaaacaaaaactttccatgacagtagcatactgatgagacaacacacacacacacaaaacaacagcaacaacaacagaacaacaacaaagcatgctcagtattgagacactgtcaagattaagttataccagcaaaagtgcagtagtgtcacttttttcctgtcaatatatagagacttctaaatcataatcatccttttttaaaaaaaagaattttaaaaaagatggatttgacacactcaccatttaatcatttccagcaaaatatatgtttggctgaaattatgtcaaatggatgtaatatagggtttgtttgctgcttttgatggctacgttttggagagagcaatcttgctgtgaaacagtgtggatgtaaattttataaggctgactcttactaaccaccatttcccctgtggtttgttatcagtacaattctttgttgcttaatctagagctatgcacaccaaattgctgagatgtttagtagctgataaagaaaccttttaaaaaaataatataaatgaatgaaatataaactgtgagataaatatcattatagcatgtaatattaaattcctcctgtctcctctgtcagtttgtgaagtgattgacattttgtagctagtttaaaattattaaaaattatagactcc

SEQ ID NO: 1223 - protein, 206 aa, Homo sapiens
MAEDADMRNELEEMQRRADQLADESLESTRRMLQLVEESKDAGIRTLVMLDEQGEQLDRVEEGMNHINQDMKEAEKNLKDLGKCCGLFICPCNKLKSSDAYKKAWGNNQDGVVASQPARVVDEREQMAISGGFIRRVTNDARENEMDENLEQVSGIIGNLRHMALDMGNEIDTQNRQIDRIMEKADSNKTRIDEANQRATKMLGSG

SEQ ID NO: 1224 - DNA, 623 bp, Homo sapiens
  misc_feature (196)..(196): n is a, c, g, or t
  misc_feature (481)..(481): n is a, c, g, or t
  misc_feature (507)..(507): n is a, c, g, or t
  misc_feature (541)..(541): n is a, c, g, or t
  misc_feature (559)..(559): n is a, c, g, or t
  misc_feature (574)..(574): n is a, c, g, or t
  misc_feature (583)..(583): n is a, c, g, or t
  misc_feature (612)..(612): n is a, c, g, or t
ttttcctcttttcctttttttttttttcttttttgtaagcagggcaatcaatcaacctgcttctttcaagtagctggtaagtcaaatagcgggtaaggcctcaggaaatcttgttatttggtttatttctaaacatttgcaaggtgacacttagggcttttttttttttccaccaaggtttaaggtcatcttgcancgcagcgaatgagtggctcctatctatatctttccttcctctctcttgcatgcgggcccccaaaactgatgttcaacatctcaggacttctcttggtacctgatatgtttacagctagcttcctcattgaaagagcaaaacctcatcagggtgaatctttaagccctgatctccctaaacctgccccactgagagagtaatccaacccttccggccagaatgcgttcccccttctctctccagagcagttccagaaaaccctcctccaatccatgaggcaattcngtgggaaagccttaattattccaatnccaaaaatcacttttcctcatagagttccaatgnttacacagaaggagtccngacaaccccgatgangccaagagngttacaatgacagcatcctcccaaagggnccaggaaggat

SEQ ID NO: 1225 - DNA, 453 bp, Homo sapiens
ttttttttttttttttattgcaaaactgaggtttaaaggacaaatacattatccatttaaaaacagatatctaagacaaaataactcaaacattctgaggtcagatacttgcttatgcacactgacatccacaactgctaccggtgcggaagcaacgccaggcctggttctgtatagtcacagccgagctgaacaccttagctccgacacctggatgtgttctaaagaatgacaggctgaaactgtagtttggtttaactactggctttgttgcaataatcctcgaataccacacagtggcagcttttggcatcataaaaatgggacataactgaagggaaggcttcacacatcacaaagaccgggttggttaatgactaaatctcactacatgaatacgcaatcttaaattactgtgcttatcagccatttctcgcattcatgtgtagaaaa

SEQ ID NO: 1226 - DNA, 2275 bp, Homo sapiens
agattagtctgtgagggaaggagatgcctcttccttcccttcaatagtgggttaaacccagctggcaccctctggaactacgggaacaatattcttcaagagaaggtcactctaccaaagccaggagcacagtattctcaggatctcaacaaggaagagcagaccaaggttgcttctgattccttacaaccttccgtaattccaggcttgtggccccaaattcagggccccacccttccaggaacaaatcattatagtaataatttgccttcatcttccatataccaactaagcatgtttaactacgaacgtccaaaacacttcatccagtcccaaaacccatgtggctccagattgcagcctcctggaccagaaacctccagcttctctagccagaccaaacagtcttccattatcatccagccccgccagtgtacagagcaaagattttctgcctcctcaacactgagctctcacatcaccatgtcctcctctgctttccctgcttctccccagcagcatgctggctccaacccaggccaaagggttacaaccacctataaccagtccccagccagcttcctcagctccatattaccatcacagcctgattacaatagcagtaaaatcccttccgctatggattccaactatcaacagtcctcagctggccaacctataaatgcaaagccatcccaaactgcaaatgctaagcccataccaagaactcctgatcatgaaatacaaggatcaaaagaagctttgattcaagatttggaaagaaagctgaaatgcaaggacacccttcttcataatggaaatcaacgtctaacatatgaagagaagatggctcgcagattgctaggaccacagaatgcagctgctgtgtttcaagctcaggatgacagtggtgcacaagactcgcagcaacacaactcagaacatgcgcgactgcaagttcctacatcacaagtaagaagtagatcaacctcaaggggagatgtgaatgatcaggatgcaatccaggagaaattttacccaccacgtttcattcaagtgccagagaacatgtcgattgatgaaggaagattctgcagaatggacttcaaagtgagtggactgccagctcctgatgtgtcatggtatctaaatggaagaacagttcaatcagatgatttgcacaaaatgatagtgtctgagaagggtcttcattcactcatctttgaagtagtcagagcttcagatgcaggggcttatgcatgtgttgccaagaatagagcaggagaagccaccttcactgtgcagctggatgtccttgcaaaagaacataaaagagcaccaatgtttatctacaaaccacagagcaaaaaagttttagagggagattcagtgaaactagaatgccagatctcggctatacctccaccaaagcttttctggaaaagaaataatgaaatggtacaattcaacactgaccgaataagcttatatcaagataacactggaagagttactttactgataaaagatgtaaacaagaaagatgctgggtggtatactgtgtcagcagttaatgaagctggagtgactacatgtaacacaagattagacgttacggcacgtccaaaccaaactcttccagctcctaagcagttacgggttcgaccaacattcagcaaatatttagcacttaatgggaaaggtttgaatgtaaaacaagcttttaacccagaaggagaatttcagcgtttggcagctcaatctggactctatgaaagtgaagaactttaataactttaccaacattggaaaacagccaactacaccattagtaatatatttgattacatttttttgaaattaatccatagctgtattaacagattatagttttaattaggtaatatagttaatatatatttataatattatttatcctttgactcttgcacattctatgtacccctccgatttgtgaagcctacaggaaatctgggtatatggatttgtaactgcagaagactatcttaaaatacaggattttaacatttaagtcatgcacatttaacaattacaggttataaattagtatcaactttttaaacacatctaatgcttgtaataacgtttactggtactgctttctaaatactgttttacccgttttctcttgtaggaatactaacatggtatagattatctgagtgttccacagttgtatgtcaaaagaaaataaaattcaaatatttaaaacggaaaaaaaaaaaaaaaaaaa

SEQ ID NO: 1227 - protein, 498 aa, Homo sapiens
MFNYERPKHFIQSQNPCGSRLQPPGPETSSFSSQTKQSSIIIQPRQCTEQRFSASSTLSSHITMSSSAFPASPQQHAGSNPGQRVTTTYNQSPASFLSSILPSQPDYNSSKIPSAMDSNYQQSSAGQPINAKPSQTANAKPIPRTPDHEIQGSKEALIQDLERKLKCKDTLLHNGNQRLTYEEKMARRLLGPQNAAAVFQAQDDSGAQDSQQHNSEHARLQVPTSQVRSRSTSRGDVNDQDAIQEKFYPPRFIQVPENMSIDEGRFCRMDFKVSGLPAPDVSWYLNGRTVQSDDLHKMIVSEKGLHSLIFEVVRASDAGAYACVAKNRAGEATFTVQLDVLAKEHKRAPMFIYKPQSKKVLEGDSVKLECQISAIPPPKLFWKRNNEMVQFNTDRISLYQDNTGRVTLLIKDVNKKDAGWYTVSAVNEAGVTTCNTRLDVTARPNQTLPAPKQLRVRPTFSKYLALNGKGLNVKQAFNPEGEFQRLAAQSGLYESEEL

SEQ ID NO: 1228 - DNA, 1108 bp, Homo sapiens
  misc_feature (1084)..(1084): n is a, c, g, or t
  misc_feature (1092)..(1092): n is a, c, g, or t
gcgtcgacctacggcgaggcactggccagcccagctccacgaggactgaacaaggtgctgtctcactgccaccatgccggaagtcgagagaaaacccaagatcactgcctcccgcaaactcttgctgaagagcctgatgctggccaaggccaaggaatgctgggagcaggagcacgaggagcgcgaggctgagaaggtgcgctacctggcagagcgcatccccacgctgcagacccgtggcctgtccctcagtgccctgcaggacctgtgccgggagctgcacgccaaggtggaggtggtggatgaggagcgatacgacattgaggccaaatgcctccacaacaccagggagattaaggacctgaagctgaaggtgatggacctccgtgggaagttcaagcgcccgcccctgcgtcgagtccgtgtctcggctgacgccatgctccgggccctgctgggctccaggcacaaggtgtccatggatctgcgggccaacctcaagtctgtgaagaaggaagacacagagaaggagcggcctgtggaggtgggtgactggaggaagaacgtggaggccatgtctggcatggaaggccggaagaagatgtttgatgccgccaagtctccgacctcacaatagaggtacctagagaccagctcccttctctggggtccatcagagtctagaggataatgagggagtccacaatgggcaggcgggttgtacttagtgtggtgcacggatgcacggactaaggcaccgatgagactgatttgagtcggctctcctgggctcagtcctggctccagcaccatgatacttgggcatgtcatttctgtttggcggccctttttgttcccatcatctatgaaattgggggctgtatcaaatcagtggttctccaagtgtggtcctgggaccagcagcgtctacatcacctgggatgcaaatgatcagcccccaccccagatccactaaattggaaactctggggtgaggccagccttctaggtgattctgatgcacatgagagtttgagaaccactaggttagagggtccctgggatcccttcatctctgactttntgagaatntatgcacttttaaata

SEQ ID NO: 1229 - protein, 187 aa, Homo sapiens
MPEVERKPKITASRKLLLKSLMLAKAKECWEQEHEEREAEKVRYLAERIPTLQTRGLSLSALQDLCRELHAKVEVVDEERYDIEAKCLHNTREIKDLKLKVMDLRGKFKRPPLRRVRVSADAMLRALLGSRHKVSMDLRANLKSVKKEDTEKERPVEVGDWRKNVEAMSGMEGRKKMFDAAKSPTSQ

SEQ ID NO: 1230 - DNA, 3568 bp, Homo sapiens
gcggccgccctgcgcgcgaagctcgtggcccgagaggggtgcggtcgggccgacggaggcggggccctggctgcctctctccctgctcataggctggccgctcaggcctggccggcctcggggcctcgggattcgcggcggcgctgccaatcaggcgatcgggccccgcccccccggagttgggtgaaatagaggcgggcgtcaagtgtcagtagtcgcggggcaggtacgtgcgctcgcggttctctcgcggaggtcggcggtggcgggagcgggctccggagagcctgagagcacggtggggcggggcgggagaaagtggccgcccggaggacgttggcgtttacgtgtggaagagcggaagagttttgcttttcgtgcgcgccttcgaaaactgcctgccgctgtctgaggagtccacccgaaacctcccctcctccgccggcagccccgcgctgagctcgccgacccaagccagcgtgggcgaggtgggaagtgcgcccgacccgcgcctggagctgcgcccccgagtgcccatggctacaagggtgctgagcatgagcgcccgcctgggacccgtgccccagccgccggcgccgcaggacgagccggtgttcgcgcagctcaagccggtgctgggcgccgcgaatccggcccgcgacgcggcgctcttccccggcgaggagctgaagcacgcgcaccaccgcccgcaggcgcagcccgcgcccgcgcaggccccgcagccggcccagccgcccgccaccggcccgcggctgcctccagaggacctggtccaaacaagatgtgaaatggagaagtatctgacacctcagcttcctccagttcctataattccagagcataaaaagtatagacgagacagtgcctcagtcgtagaccagttcttcactgacactgaagggttaccttacagtatcaacatgaacgtcttcctccctgacatcactcacctgagaactggcctctacaaatcccagagaccgtgcgtaacacacatcaagacagaacctgttgccattttcagccaccagagtgaaacgactgcccctcctccggccccgacccaggccctccctgagttcaccagtatattcagctcacaccagaccgcagctccagaggtgaacaatattttcatcaaacaagaacttcctacaccagatcttcatctttctgtccctacccagcagggccacctgtaccagctactgaatacaccggatctagatatgcccagttctacaaatcagacagcagcaatggacactcttaatgtttctatgtcagctgccatggcaggccttaacacacacacctctgctgttccgcagactgcagtgaaacaattccagggcatgcccccttgcacatacacaatgccaagtcagtttcttccacaacaggccacttactttcccccgtcaccaccaagctcagagcctggaagtccagatagacaagcagagatgctccagaatttaaccccacctccatcctatgctgctacaattgcttctaaactggcaattcacaatccaaatttacccaccaccctgccagttaactcacaaaacatccaacctgtcagatacaatagaaggagtaaccccgatttggagaaacgacgcatccactactgcgattaccctggttgcacaaaagtttataccaagtcttctcatttaaaagctcacctgaggactcacactggtgaaaagccatacaagtgtacctgggaaggctgcgactggaggttcgcgcgatcggatgagctgacccgccactaccggaagcacacaggcgccaagcccttccagtgcggggtgtgcaaccgcagcttctcgcgctctgaccacctggccctgcatatgaagaggcaccagaactgagcactgcccgtgtgacccgttccaggtcccctgggctccctcaaatgacagacctaactattcctgtgtaaaaacaacaaaaaacaaacaaaagcaagaaaaccacaactaaaactggaaatgtatattttgtatatttgagaaaacagggaatacattgtattaataccaaagtgtttggtcattttaagaatctggaatgcttgctgtaatgtatatggctttactcaagcagatctcatctcatgacaggcagccacgtctcaacatgggtaaggggtgggggtggaggggagtgtgtgcagcgtttttacctaggcaccatcatttaatgtgacagtgttcagtaaacaaatcagttggcaggcaccagaagaagaatggattgtatgtcaagattttacttggcattgagtagtttttttcaatagtaggtaattccttagagatacagtatacctggcaattcacaaatagccattgaacaaatgtgtgggtttttaaaaattatatactatatgagttgcctatatttgctattcaaaattttgtaaatatgcaaatcagctttataggtttattacaagttttttaggattcttttggggaagagtcataattcttttgaaaataaccatgaatacacttacagttaggatttgtggtaaggtacctctcaacattaccaaaatcatttctttagagggaaggaataatcattcaaatgaactttaaaaaagcaaatttcatgcactgattaaaataggattattttaaatacaaaaggcattttatatgaattataaactgaagagcttaaagatagttacaaatacaaaagttcaacctcttacaataagctaaacgcaatgtctttttaaaaagaggacttagggtgtcgtttttcacatatgacaatgttgcatttatgatgcagtttcaagtaccaaaacgttgaattgatgatgcagttttcatatatcgagatgttcgctcgtgcagtactgttggttaaatgacaatttatgtggattttgcatgtaatacacagtgagacacagtaattttatctaaattacagtgcagtttagttaatctattaatactgactcagtgtctgcctttaaatataaatgatatgttgaaaacttaaggaagcaaatgctacatatatgcaatataaaatagtaatgtgatgctgatgctgttaaccaaagggcagaataaataagcaaaatgccaaaaggggtcttaattgaaatgaaaatttaattttgtttttaaaatattgtttatctttatttatttgggggtaatattgtaagttttttagaagacaattttcataacttgataaattatagttttgtttgttagaaaagtagctcttaaaagatgtaaatagatgacaaacgatgtaaataattttgtaagaggcttcaaaatgtttatacgtggaaacacacctacatgaaaagcagaaatcggttgctgttttgcttctttttccctcttatttttgtattgtggtcatttcctatgcaaataatggagcaaacagctgtatagttgtagaattttttgagagaatgagatgtttatatattaacgacaatttttttttggaaaataaaaagtgccctaaaagaaaaaaaaaa

SEQ ID NO: 1231 - protein, 457 aa, Homo sapiens
MATRVLSMSARLGPVPQPPAPQDEPVFAQLKPVLGAANPARDAALFPGEELKHAHHRPQAQPAPAQAPQPAQPPATGPRLPPEDLVQTRCEMEKYLTPQLPPVPIIPEHKKYRRDSASVVDQFFTDTEGLPYSINMNVFLPDITHLRTGLYKSQRPCVTHIKTEPVAIFSHQSETTAPPPAPTQALPEFTSIFSSHQTAAPEVNNIFIKQELPTPDLHLSVPTQQGHLYQLLNTPDLDMPSSTNQTAAMDTLNVSMSAAMAGLNTHTSAVPQTAVKQFQGMPPCTYTMPSQFLPQQATYFPPSPPSSEPGSPDRQAEMLQNLTPPPSYAATIASKLAIHNPNLPTTLPVNSQNIQPVRYNRRSNPDLEKRRIHYCDYPGCTKVYTKSSHLKAHLRTHTGEKPYKCTWEGCDWRFARSDELTRHYRKHTGAKPFQCGVCNRSFSRSDHLALHMKRHQN

SEQ ID NO: 1232 - DNA, 1365 bp, Homo sapiens
gctgaaagaggctggcttggggccacggtgaaactgcctcctcaccatccgtcctgcctccctggcgcccccagagccttctgatgaagattgacgccttccactacgtgcagctggggacagcctacaggggcctccagcctgtgccagacgaggaggtgattgagctgtatgggggtacccagcacatcccactataccagatgagtggcttctatggcaagggtccctccattaagcagttcatggacatcttctcgctaccggagatggctctgctgtcctgtgtggtggactactttctgggccacagcctggagtttgaccaagcacatctctacaaggacgtgacggacgccatccgagacgtgcatgtgaagggcctcatgtaccagtggatcgagcaggacatggagaagtacatcctgagaggggatgagacgtttgctgtcctgagccgcctggtggcccatgggaaacagctgttcctcatcaccaacagtcctttcagcttcgtagacaaggggatgcggcacatggtgggtcccgattggcgccagctcttcgatgtggtcattgtccaggcagacaagcccagcttcttcactgaccggcgcaagcctttcagaaaactcgatgagaagggctcacttcagtgggaccggatcacccgcttggaaaagggcaagatctatcggcagggaaacctgtttgacttcttacgcttgacggaatggcgtggcccccgcgtgctctacttcggggaccacctctatagtgatctggcggatctcatgctgcggcacggctggcgcacaggcgccatcatccccgagctggagcgtgagatccgcatcatcaacacggagcagtacatgcactcgctgacgtggcagcaggcgctcacggggctgctggagcgcatgcagacctatcaggacgcggagtcgaggcaggtgctggctgcctggatgaaagagcggcaggagctgaggtgcatcaccaaggccctgttcaatgcgcagttcggcagcatcttccgcaccttccacaaccccacctacttctcaaggcgcctcgtgcgcttctctgacctctacatggcctccctcagctgcctgctcaactaccgcgtggacttcaccttctacccacgccgtacgccgctgcagcacgaggcacccctctggatggaccagctctgcaccggctgcatgaagacccccttccttggtgacatggcccacatccgctgagggcacctttattgtctgggacaggccctcagcccctcctgccccatccacccagacaagcaataaaagtggtctcctccctgtgcaaaaaaaaaaaaaaaaaaaaaaa

SEQ ID NO: 1233 - protein, 390 aa, Homo sapiens
MKIDAFHYVQLGTAYRGLQPVPDEEVIELYGGTQHIPLYQMSGFYGKGPSIKQFMDIFSLPEMALLSCVVDYFLGHSLEFDQAHLYKDVTDAIRDVHVKGLMYQWIEQDMEKYILRGDETFAVLSRLVAHGKQLFLITNSPFSFVDKGMRHMVGPDWRQLFDVVIVQADKPSFFTDRRKPFRKLDEKGSLQWDRITRLEKGKIYRQGNLFDFLRLTEWRGPRVLYFGDHLYSDLADLMLRHGWRTGAIIPELEREIRIINTEQYMHSLTWQQALTGLLERMQTYQDAESRQVLAAWMKERQELRCITKALFNAQFGSIFRTFHNPTYFSRRLVRFSDLYMASLSCLLNYRVDFTFYPRRTPLQHEAPLWMDQLCTGCMKTPFLGDMAHIR

SEQ ID NO: 1234 - DNA, 188 bp, Homo sapiens
gctgcctgtgctgtgcctgcctcctagagctcattccctacgccccgactctgtcctggacagcgtgcccaccagccatggcggggcctcggggcctcctcccactctgcctcctggccttctgcctggcaggcttcagcttcgtcagggggcaggtgctgttcaaaggctgtgatgtgaaaaccacg

SEQ ID NO: 1235 - DNA, 18061 bp, Homo sapiens
tgtaccgagctctaatacgactcactatagggcgtcgactcgatcatcccaacacccaggtattaagcctagcgtccattagctattcttcctgatgctttccccccaaccacaggtgccagtgtgtgttgttctccgccatgtgtccctgtgtggaaaatataatatgcattcttaacctgtcaatatctaaagttaatctgtatgtttgctgttttcctaaacagtcccgcaatttagaacaatttaactccattcatccccttccagccctcatctactttaattccatattgttttttcttctcaatagatatattattttatagccaatacttgtctttacatttacatttggtcgcatgcttagcactctatttgttcattattttaattcttttatgcatctcagaactttcatctggaatcatcttccttctgcttaaaacacattctttcagattgctcttagtgaaaacttagaagttgatggcaaattcagttttttaaatgttgaaaatggctttattttacccttcttcaaatataatgttaccgagtcagaaaattccggaatggcagttatttcctcccagcacattgaagattctattccatttccagtgtccattgttgcttttgaggagtcagtcatcagtctaaccaccattcctttgttggtgatttattctctatctgcttgtaattatctggttttctgcctcaatgtgtgtagtgatttatttttattccttttgcctggaattcattaggtctccttaatctgagaacttgggttttttttaaagaattctataaaattctcacttttattttgttgaatgttttcttattctcttgtgtcttcttctggaactctgattagacatatttagaccttctaattatagccttcatgccttcttgacttcctccttcgtcacttagctgcattctggaaattttcctcagagctacattttgttcaataatcctggcttaatctgttcctggatccatccactgaacttgtaattttaacggcattatttatttcctctggtttgtatttcagatctgcttggtacttgctccaattttaagtttgttttattttctaaaacaatttatatttatattcttcatccaatcattctatagccactatgagacaataaataaatccatccaactcatcaaaacacagctgagaattaccaaataagtacaaacaaaaacctaaatatgactgattaactgtgcagaatacaatgatgtaagtttactatacatcaacctccttgtacccatctcctcgcttcaacaaataactcagggcaaaacttccttcatccatacttccaccctccttctccctgtctgaacaagatgccactccagagactgcaggttctatgtctatcatatgtgattgcaatagcttggtcatggtagaatacaaaaaaaaagaaaaaagttgaaagccctctgaaaactgtagtgcttataatagccttcccaactactggccatacttaatattaatcattaacactctcagtagagtgtctcagaagtcaaaatgtatctcctactagctacaaggaagttgggatctaataagtatttatttacagctgcagtcacccaacagcctgaaataccagggtctctaaattcatgactttgtgtatgaacaagggtcaataggatctttactcagtcctcgagatataactcagaaaaatgaattgctgtgaaaaactcacttgatttcctgtggtcacattataagatcgaataatctacaaaagtacaaaactcagtgatatagagaagccagcaaattctcctgcccttatataaacaggtgggaggctttccagtagaattttttctactccaacaaattggtagattgaatgactatacctcataatgatgacactattgtatcatattttagtttaaatttaaaacctcaaaaacttaccaaaactagccaaagatttctggaataagatatagacaaagttatttctcaaaaaaaagaaaaaaattggctgggccgggtgcagtggctcacgcctgtaatgccagcactttgggaggctgaggcaggcagatcacaaggtcaagggatcaagatcaggctggccaacgtggtgaaaccccatctctactaaaaatacaaaaatcagctcggcggtggtgcccacctgtaatcccagctactagggaggctgaggcaggagaattgtgtgaaccggggagggggaggttgcagtgagctgagatcatgccactgcactccagcctggtgacagagcaaagctccgtctcaaaaaaaaaaaaaaaaaaaaaaaaaaacggctggacacaggggctcacacctgtaatcccatcattttgggagggtggggtgggaggatcacttgagctcaggagtttgagtccagcctgggcaacatagtgggaccctgtttctaccaaaaataaataaataaaaattatgtaagcatggcgtgtgtgcctgtagtcccagctacttgagaggctgaagcaggaggatcacttgagcctgggaggtcaaggctgcagtgagctgtgattgtgtcactgcactccagcctgggtcacacagtgagaccctgtctcaaaataaaaataaaatggaaaataactaaaaatgggattttcaactctttgatataaataggtccagccataaggaagaattgtgctacaaaagagaacaaaaatcatcatgtttaacaactgcattcatgttcttttctaattataaagctaactattgattttataatgcttctacacaccttgatcatgtgttagcatatgaaactcttagctgagaccaacttactataaaacttgtgtaatttaaatagtataattttccaatgactttaatctaacaacctcctaccccattaatcaacaccaaaaacaattcatctttgaatacatgtataaagaacatagttcatgtgtttataaaaagttcttctctgctacagagtttagctgtgacatctattaacaaagtaatttataactctaataagttagcaaggtcttcttgctaccagtccagtcattggtggtgagtactcagtattggctgatgaatacatgaatggataaaaatataagagctgcccacacatataccataaaatgcataaaatagattccattttatctcaatttttatttctgtgatataactaagataaaatcaaacacaatgtattattttaaagtatactgtttataagagagaaataataagatctgaccttattttagaagaaagttgtgtgtaaaagaaatttaaactcaaaagtaaaaaagccactggtttctaaaaactcaaaaaaaattttttttaagtgactggctttcagaacaacagcaacaacaaataagccactaaaataagacaattaaattccaattttttttgcatttacttgcttgcttaattatatacaaatctcaattccattaaagtatcaggatgacaattaattagatgtttttagtgacttttccaatcccttctaattaacttggaagtgattaactgattatctaattatattaattagtgattatctaattaactaaggaagtgatttacatgcttcatgggaagtgtgaattctcagccagggggtttgaatgaagggaagcaagtgactcaggcatttattggttgcttacaatcagattcccaccgatgagatcatgcccatgtgtctagaggtccacacacaagcagctgcctccagcccaaccctggaagctgagtgtagtcccaagtccccgcctgcaccccttcctatataaacagccactctcgctgtgattatgggggcatacaaggaagatcaggcttccatggaagcttctgcaactgaaatccactggggactttagaaggagcacctgtaagtagcttcaggatggatggggcagagtctgtctcatggtgggtgttaagctggcctcatacaaaagaggagacccatcctgataccatgccaggtacaaagcactgtgtgatttattctaagtgtcttggtaacaggacttgaagccaggtggtgactggaaacctaaaatgcaatatttagtcatagaacattagaaatagaaagaaaataacctcccaaatcatctaatccatcactcagctaaattcatttaattcacatccccaaactacatctccaaatgtacaatggtttcattcctggtttagggattcgaggttttgtgtttgtacaaaatattttaatagtcttataaaataagatgtccaaaacacaataaacttaaaagccaaacacaagcaaagcatgaaacagaggttctgaagagcaactcctcaatacaaatcaaacattgtcctttatctccattgtgactttcagttatgtaggcacatctgcctttttagatacctaaattatacatgaggattgtaaatattctttgtgtgtatgttaggatgaaaaaaacctgccaaggcaggcgcatgggctaaaagaatacactttcctgtttccttttattacctgtttaattaaaaaaaaaaaaagttgcccctgataaaagcctccaagaaatgcctctagtggtattttctggaattgaattaagcatattaacatattgctatacaaagcggggggcgtggaagtaaggcaaggtggactgtggtgccaatcctagtgacatgtcagcagaggaggagtttcttgcctgtggacttcataaaaggctagctcaacaccctccatgagacacactctgccccaaccatcctgaagctacaggtgctccctcctggaatctccaatggatttcagtcgcagaagcttccacagaagcctgagctcctccttgcaggcccctgtagtcagtacagtgggcatgcagcgcctcgggacgacacccagcgtttatgggggtgctggaggccggggcatccgcatctccaactccagacacacggtgaactatgggagcgatctcacaggcggcggggacctgtttgttggcaatgagaaaatggccatgcagaacctaaatgaccgtctagcgagctacctagaaaaggtgcggaccctggagcagtccaactccaaacttgaagtgcaaatcaagcagtggtacgaaaccaacgccccgagggctggtcgcgactacagtgcatattacagacaaattgaagagctgcgaagtcaggtgagagatgatgcttgtgtttcctactctgtgtttagcttcaagataaatcaagaggttatctatgttaggtaggtccaaatggactttgtaaagcaaattaggctaaaatgttacatctataaaaattctttcatctacctttagtgctggagtacctgactgtacaataggatgaccttaaatcatgctatttttaatgtttaacacaattacatacaaaatatgaacattttatcctccggaataaaatgaatctttgtcacagcttatcacatcagggctaaatgtatagtgaacaatctttctgaaaagagctaaaaattaattacgtgataaatctctcttagtttttcacctagtccttatcaagttttgaaaccccagtaaattcaaagacttttctccttttatttaagtaaatgttataatatgactattagaatactgtactgcagatttaaatagcaaagtgattctgggtggaaacagtgtggcaggaatatgggtcttaatgatgcctggatttttaagtgccctgtttaataacatgaccatcagcatcaagcagttcagaaactacttctacagtaataaaatgttctattgcccccaattcatgtttattacaatcatatcacaacctcctcctatgtcatcaaaaaaagggtggagctctgtattttatcagtttcatggaataaaagcagaagactttgctcctaattgaaaatttcagatatgacacagagcacttgcttcaaattaaagttcttatctaattaagaaaagtgttcactgtaatttgtgttaagattcatactcctttagagcaaagcgcatttacttaccagcaagtctgtttttcttgagttgtactaaacatcagggcaatttgattcggactccatgggaagttactttggaattttagaaactataggcatgtgaagcaatggcatttaaatagcgccttccggaataaagttcatcctctgcaagctctcactaaaaatgttcgaaccacacctgtctcgtgtttctgactctagtttggttcatctgaaatacacagcacaggccatccgtcccattgagctggacagtcccaaccataggaagcagccctctccaaaactgggtccattgaaagagaaatgtcattgtaacatcttctgcaagtagatttttcatctatatgcctccatcatgcatttcgttctttcatgcatcatgttctttcattcagccaatactgaatgaacactaactaggtgctgggcaccatgctggggactgaggaatattatggtggacacaatatgatttatgaggatacagggatggacagagggaccagcacacagagggataatgagagcacaggcagatcatccagttcagttttgagagcatctgtgaaggctcctatgaagcaatgttgtcgaacctgagacatgagggaggaatgggagttcaccagaccacaggggctaaaagaaatgtcctaagtagaaacatcaaaggcaaggcactcaataaggtgtgatgactcaagttgagttaaattatccttctgtaaaatcacaagaaagtagaccaaaccctggggcatctagagttgcattttatgactctgttatgttaaataactatgtcattattttttctatatattttcatgtagaaatacttgaaatgaacatcatttttgacataatagtcactgtagctggggataaactaaatccttgtaaactcctatccagttgaaaatgtcattcttggccgggcacgtggctcacgcctgtaatcccagcactttgggaggccgaggcaggcagatcacctgaggtcagaacttcaagaccagcctggccaacatggcaaaatgctgtctctactaaaaatgcaaaaattagccgggcatggtggcggatgcctgtaaccccagctactcgggaggctgaggcaggataattgcttgaacctgggaggcagaggttacagtgagccgagattgtaccattgcactccagtctgggcaacagagcaagattctgtctcaataaataaataaataaataaataaataaataaataaataaataaaaaagaaaatgtcattctttctcatgtattttccagattaaggatgctcaactgcaaaatgctcggtgtgtcctgcaaattgataatgctaaactggctgctgaggacttcagactgaagtaggttccctaatacgtggcaaaagtttctgaaaaagaattcctttagtagtccttccagatactcagctttccatatcattgttgataaaggaagcacggttcaatgtccagaatcctgaagcctaaaggaggttagaagctacatgtatgaagctaacccagcactcagggatggccttctctttcttgatcccccggcatgtaactaaacacctccagtaactactattctccttggttattactggttgctaaatttttttttagtaacctggtatctaaacctaattctgccctttggagtaataacaaagtaatttacaattctccttctccctaagtgcctttctgttatctaaagagagtcttgtgtctacccttggtgattctccaagtaattctccacgttcattcaagtgcctgcaagtgtatgacccaagttccaggggtgactcttgatgatttctggcttgccagtgttttacaggatggtctggccaaccaaagaaccaggaccaatctataataattagctggcgtgatgccgtatgtctgtaatcccagctactccggaggctgaggcaggagaatcgcttgaacctgggaggcggaggtttcagtgagctgagatcgtgccattgcactgcaacctggggggcagactgagaccttgtctcaaaaaaaaaaaaaaggaagaaagaaagaaaagaaaaagaaagtaaaaattgtgttcactttctttgtagtcatcacaccacatgtgaccagacctgttccttgcaaacagcttccacactaaggcctcttcatcctgaatttgtacaatgcattaacaccaaaaagccctttgtggttagaagggtagccttttaatgctccaagggattaacaagaaggaaataggaaatcaaatccaaagatgaaagcagtaaaggtgcattacttccaattttacctagcactgagtgtcacattgcagtgtcattttttaaagttggatattttaggaaactgggcagggcatgcatgatcgtaacgcctgtaatcccagcactttgagaggctgaggcaggaggctcacttgagtcctggagtttgagaacagcttgggcaacgtggcaaaaccacatctctatacaaaaatacaaaaaaaattagctgggcatggtggcatacatctcgtgtcccagctacttgggaggctgaggtgagaggattgcttgagccccaaaggttgaggctgcagtgagccatgatcacaccattgtactccagcctgagtgacagagtgggaccctgtctcaaatacacacacacacacacacacacacaccacacacagtgtgtatgtaagattgtagaggaggatgtagagctgtttgagataattcactttggatgtctctgttcacaaagtaataaaaataaatcgatcatgtacattcattaagtaaaactaaccattatttaatatcaataataagaaccctttgccaacacaataattaacacaatttaatttcttataagataaattctagaatttagaagtgttcaaaattatttcagattgcctttttaccagtcaccccaaattatagagattatattattgagcacattttctgactcctaggttcttatgtaaatttcatgattgtgtaaaggcagacattataaagtattgaaattgatctcctcataagccacatttaaaaacctatcccattatattagattctctccttataatggcttcagaaggaccagttatctctgtacactaattaattcacaggtatgagactgagagaggaatacgtctaacagtggaagctgatctccaaggcctgaataaggtctttgatgacctaaccctacataaaacagatttggagattcaaattgaagaactgaataaagacctagctctcctcaaaaaggagcatcaggaggtgagaaaatattcagaagtggtattggaaacaatggaatggttctatataatactaataataggaggagcgggagaaacaggagaagggggaagagttggtggtgatagtgacagagatgatgacgatgacaataatgatacaagccctaccttcttttcataatgttgttgtaagttaaatgacttagagcagcacctggaccacaataagcccaacacaagttattattttatatcttttttacttattcccaatgaaagaggtcatgagactccttatgtcttttctgcccagccttatctgagaatgtgcttcagactaaaatcaatcagaaatttcactttcataggaagtcgatggcctacacaagcatctgggcaacactgtcaatgtggaggttgatgctgctccaggcctgaaccttggcgtcatcatgaatgaaatgaggcagaagtatgaagtcatggcccagaagaaccttcaagaggccaaagaacagtttgagagacaggtaaccacacaattctaaagggtgagcaaacgtgtagatgctttcctccagaaacagataactcattttctttttcatttgttcattcttcctttctctttctgtcttttctttcttatttccacccctcaactatttttttttcactcttggcactgtagactgcagttctgcagcaacaggtcacagtgaatactgaagaattaaaaggaactgaggttcaactaacggagctgagacgcacctcccagagccttgagatagaactccagtcccatctcagcatggtaaagcatatctaacttctctttctcaatctagtatgtgtttaccaaggtcctctgttaggaactatagaaatgcaaagacctacaagaaataacccttccccttgcagaactggcagggaaacaggccgaacaactgattataattaaaggacagagagaaatcgaggaaagggcaatgtactgcatgaatgcagaggaaagagtaaatctggaagatttcacagggaaagtggcatttaaaccagatctttttgtaacttttaagttcaggagtacatgtgcagatttatgatgtagttaaacttgtgtcatggggatttgttgtacaggttatttcatcactcaggtattaaacctaatacccattggttatttttcctgatcctctccctcctcctaccctccaccctctgttaggcccccatgtctgctattcccctgtatgtatccattataccagatctcaaaatctaagataaaattttaagatggagaatggactagagacattccaggccaagcaaatcagcaagcccatgacaaattatgttgtggtaagcagaatccctcaaaccacagtggcctgcagccatgatactacatccaccgtgacatttcctttccaagggcaaggctaaaggggtaggccctacctaggacatgccagtgtcctggcagaaagaaaagagcaatggttggtccacttgatagctcttaaagcttctccttagaaaaggcatttgtcctttgggaggccaaggcaggaggatcatttgaggtcaggaggttgagaccagctggccaatatggtgaaaccccatctctactaaagatacaaaaataagctgggcatggtggtgtgtgcctgtaatcccagctacttgggaggttgaggcaggagaatcgcttgaacccaggaggcagaggttgcagtgagctgtgatcacattactgcactccagcctgggcgacagagcaagactccgtcccaaaaaaaaaaaagaaaaagaaaaggcatttgtcagtttgacctgcattttattaaccaaagagagtcacatgacccagccaggtgtcaatggattaaaggaatctaatcctgcaattgagaaatgccacagatcacatggccaggtctgatgaaggagtgagaggtataacatcttcacacagtggggaagcaagtactgagaacaatgctacaatgcgccgcactgaaagaacagtaggtgcaaagctacaagcaaagaaaaaccccaagagctaatgatcctagctggctggctgaggttgcctagttgggaagagtgggagatggagctagaaatatacaccatgcccacagtgatgaactgcagagacccttctcaaaggaaattaaaattaacccatctcttgaatcaagtcctcacataagaagtgccctatttttcttgtgctcatagaaagagtctttggagcacactctagaggagaccaaggcccgttacagcagccagttagccaacctccagtcgctgttgagctctctggaggcccaactgatgcagattcggagtaacatggaacgccagaacaacgaataccatatccttcttgacataaagactcgacttgaacaggaaattgctacttaccgccgccttctggaaggagaagacgtaaagtaaggctcttagaatcaaggaataggtgtcaatatctgtatgcacttctattttaatgtccctgtcactcattacccagcaccaatgcaatccctaggacagaagcaattatactcacacatgcctcaccacgaacaacaaaacgaaaatataccaaaaaatacacacacgcccaaaatatcaagtacagccttgagatcatgtggtaggactgagttctaccacatgatcatttggagataattctccaaatgatatagattatgctgatattaattttcatcattaatatataattgaaggcataataaccttttggaaattctaattgagagctcatgaattagacaataagctgctgaggtccacgggagccagtctgagaatcataagtgtggcagcagcaactgtcttcagataccatacctaagaatatcaacaagagaacacaagatttaaacttccattgtaattttgttattttaattagaggaacttcttagcatatattaaactggtcagttttaaatctatgtatttttcaagttaaaaagtaaaatgctcaagtttgcaataaaagcaatgtaaaagggaaagatatatgaaagcaataacacattcacttggactttgaaatataaaagacaggagtgcattccattttcaaaacagcaataatgcttttttctgtttcttttttcttcttttcattaaaaaaaaaaacagaactacagaatatcagttaagcaccctggaagagagaggtaagttctaaatttttgcacattttctatgacattcagctgctttctattaactacatgccactgataaaaagtaaagtgaggctgttttagtctgttttctgctgctgtgacagaatacctgagactggataatttacaaacaatagacgtttacttggctcacagttctggaggccagaaagtccaatatcaaggtgccggcatcttgtaagggccttcttgctgtgtcatcccatggcagaaagtagaagtgcaaaagagtgtccatgagaaccagagagcaagaggaggctaatctttcttttagaactagcccactctcacaataactaacccattatcatggtaaccacattaatccatccatgagagaagagccctcatcatctaatcaccttttactaggccgcacctcccaacactgttacattggggattaagttttccacacatgaactccagggaacacattcaaaccatagcaaaggccaattctcaagggagcagatatgacaccagggattctaaaaatcttgtacatggcataaagaaaccctccacatgggaacttgggcacactcctcagaatggggtgattttcttggcctgtgctattgctatcttgaaacatcctgacatcctgaaaaggaaaaacaagacaaaatttgaattccacttaaattcaagataatttatttcttgaatttttaagagtaggacatttgtaaatttggggagaagcacattttctgcatctatttataaaatggacttaagattttttgagaaagaggatgggtttaacatatttttctaaaagaaggaaataagtaaaaagaataataatttaaagttgaataatataaatcagcagagtcatgtgcctgaattaacatttaatgtttaatatgaattcagatataaagaaaaccaggaagattaagacagtcgtgcaagaagtagtggatggcaaggtcgtgtcatctgaagtcaaagaggtggaagaaaatatctaaatagctaccagaaggagatgctgctgaggttttgaaagaaatttggctataatcttatctttgctccctgcaagaaatcagccataagaaagcactattaatactctgcagtgattagaaggggtggggtggcgggaatcctatttatcagactctgtaattgaatataaatgttttactcagaggagctgcaaattgcctgcaaaaatgaaatccagtgagcactagaatatttaaaacatcattactgccatctttatcatgaagcacatcaattacaagctgtagaccacctaatatcaatttgtaggtaatgttcctgaaaattgcaatacatttcaattatactaaacctcacaaagtagaggaatccatgtaaattgcaaataaaccactttctaattttttcctgtttctgaattgtaaaaccccctttgggagtccctggtttcttattgagccaatttctgggttaatcttattgatttttcagcatcagtacaactctacaacctttgagctatatctgctttttcccattgcttccactgccttttaaaactcaacacagctttttgaataatttgagagtcaaattcaatcacaaatgctgagacgaataagagtgaagtacactatacttaaaatggaaatagattaaaaacaacattactgaaacccttcgcaaggcaaaatgtgtctccttttgataataagctgcatatactatcaggtcctctctttctttatatggtgaacatatatttttaatgaaatgtctctcatttttttaataacagatttattgagatataattcacacaccatgaaattcacccttacaaaacgtacaattcagtggtcttcagtatgcttacaatgttttgcaaccatcaccactatctagttttagaacacttcatcaccccaaaaggaaatcttgtacctattagtagtcaccgccttttcccttcctcccagcccctaacaaccactaatctacttcctgtctctacggatttgcctactctggacatttcatataaataggttaatacgatgtgtccttttatacacaaatgttcatagcagcattactcataaaagccccaaagcgaaacacctcaagtgtccatcaaccgatgaatggataaacaaaatataatatatccacacaatagaatcttattcgtcaataaaaaggaatgaagtactgatacatgctataacagagatgaacttcgaaaacatgctaagtgaaagaagccaaatccaaaaacaataaaaacacatattgtatcctcaccctttttgcattttagtgagcaatcattgcatatgaatgtttatgggaaaaatcaatgtgtgctaaatcattgtattccagtaaatagattggacttaaaacttgatacagaagttgcaaataagtgggattgagtttgattattatatagaaaataattacatgattcatttaagaataataatatccaccatttattgagcacttactatgagcctgtgtgccaaacatttcatgcatttctcatttaattctcacaataatcctgtgaggtagaagctattaggttgaatcatatgaacttgccaatatatgataatttctaagagttgggaatttttgaggatgtgaatggtaccactttgaattcctaagatgtaatataatatctaacacatagcaggcacttgattcattattttaaattgaaagaataaagttttttaagctttccaatatatgataatttctgactttcagaaatagcaattttatatgctattatatagcatatataataaggttcagccttattatgttacccccactttacatatgaggataaatgaggactcatatgaagacatgagataaagactttcccaaagtcaagcagttaccaagtagtagagcgagactgaacctcagcgctgtttctctaaaaccaggacaccctcataagcaactaattacataacaaagcaatacatgattcacagttgaaataggcacttgctatccgcagttattttgttgttttctaattgtcattttcatcagccagacacaacagccaattgtggcaaatgtccagctttggctcgtaacatcacacatgacttgattcagtacaacttttgtcagaaaaggtattctcacctattctcattgccttcttttccaaagtgaagagatttcactcatttttttcttaattttcttccaagtcacgctagctagtaagttgcatttaaagatgttaagaatatttaaaagtgaattctttttcacctactgagtcacattccagaatagtctgaaactttgacatgcaaataccagactgtgaatctgattaataagaaacctatgcagatgggtttgtaactgattaggcctgaccactgttatatggcaatgatgacactgtgttaaaagaggtaggattgttattcttaatttaggatggtcctcttttaactacctgttaaaagaagtagaattgttatttttagatcagaaaaatgaagattttttcttcctcttgcttctttggtctgtctctagtttcttccaagcaatctttcaaagaagtgagtgagagctacatacatgtggaccagatggtggagttctacctccagttctgccagcagttactgtgtgaaagtgaagcattaatctttgtatctatctatatttctgatatgagctaagaactagaatgacataatcctatttctgacaggtaaacagatccagagagaagtctttatcacacattagaattatcatcaatgtattttttcattttatatgaaattgtcagtgcagaagtgaagctatcaaactcagagagagcccctagaggtgaggttaggatggaaataactattttttctgagctctggagattatttctacccagagttctgaatcatctaaaaaggagaatgacatggagtgatacaaaatcaaaacatggccagtgacctcctcagacactctgttctcatccacatgcatcaggatcagcctcaggtacctgattagacccccaagtaacaattccaacttaaagcattagtagtgatttttatttttgaattctctttcaaacatctctgttttctctcccctaggctcatttccaagattcctctcatcagggtattattttatcatcttcctgtctcctaccactttcaaaattctcccctgctttcaagaaccattgatctctggagcccagaagtcaatctcactcataccccttaggtccttgtttaaccctcatctcaaaagcacaatacataaaatgtaggcaacccaaaattctctcagtcactcacaggattttataatgttatccaaagtgaaagatgttacagatcaagggatcagcgagttgcagaaaatgacaggtctgtcttacgggaaaaaactcaggtagaaaaccctgcaaagaccaggacagaaaccaacctgacatgaaaagatgagggtatgatttactcaataaaaatctaaagacttgtaaaaaccacataactaattttctctattttgaacatttcctaaactctacaaaaatggaagatataattcttttgaacagtttgccctggctataatcattttcctctctgcctcaacttatgcaatcactctgccaacaagcccaagattgtttattgttttttacatcaccactgccttatgcattaatgtggctgtcaaagaaaattattttcacttctaaaacctctaaagcagagtcttgattatttaacttagcctcccacttaaaaaaaaaaaagccactgaagaagaaatatttcccttttcaacttctgaagttgctccccattcataactgaattcagaataaatattggtcaaagcataccagtaaattagggcacagtcattttcaaatgaaatgaatttcaaatgacacattcaaacacattaagacttaacttctttcaaatgaaatcattcaaggagtgcagtgataaagttcagcgaaacactaggctaggactcaggataaaaaataaattagatgtagtacctacctaacaagcttagtctaggataatatgttatatgtatagaaacataaacaaataatatataaacataatttttagagattgagcaatattatttaaattttaccataggcattagagttggaaagtgtacctttcagcacaaaatcaattccaagttcaaaaattcaacttaatcatattcccgtattatgtgatcgagtcgactccctttagtgagggttaattgagctc

SEQ ID NO: 1236 - protein, 424 aa, Homo sapiens
MDFSRRSFHRSLSSSLQAPVVSTVGMQRLGTTPSVYGGAGGRGIRISNSRHTVNYGSDLTGGGDLFVGNEKMAMQNLNDRLASYLEKVRTLEQSNSKLEVQIKQWYETNAPRAGRDYSAYYRQIEELRSQIKDAQLQNARCVLQIDNAKLAAEDFRLKYETERGIRLTVEADLQGLNKVFDDLTLHKTDLEIQIEELNKDLALLKKEHQEEVDGLHKHLGNTVNVEVDAAPGLNLGVIMNEMRQKYEVMAQKNLQEAKEQFERQTAVLQQQVTVNTEELKGTEVQLTELRRTSQSLEIELQSHLSMKESLEHTLEETKARYSSQLANLQSLLSSLEAQLMQIRSNMERQNNEYHILLDIKTRLEQEIATYRRLLEGEDVKTTEYQLSTLEERDIKKTRKIKTVVQEVVDGKVVSSEVKEVEENI

SEQ ID NO: 1237 - DNA, 491 bp, Homo sapiens
  misc_feature (72)..(72): n is a, c, g, or t
caggcacctgcgtggggaggaaggcatggctttagcttccccgcagcctggtttgcgcgtaaagaatgcagncatctggcggtttgcggtccctgtacttgccccgaaggttgaaatcacaaagattagacacctttttagataggtgttcttcagcaccactgacaacacggttctgacagtatttcatgacaatggatggtgacagttctacaacagatgcttctcaactaggaatctctgcagactatattggaggaagtcattatgttatacagcctcatgatgatactgaggacagcatgaatgatcatgaagacacaaatggttcaaaagaaagtttcagagaacaagatatatatcttccaatagcaaacgtggctaggataatgaaaaatgccatacctcaaacgggaaagattgcaaaagatgccaaagaatgtgttcaagaatgtgtaagtgagttcatcagttttataacatctgaagca

SEQ ID NO: 1238 - DNA, 442 bp, Homo sapiens
  misc_feature (191)..(191): n is a, c, g, or t
  misc_feature (193)..(193): n is a, c, g, or t
  misc_feature (245)..(245): n is a, c, g, or t
  misc_feature (438)..(438): n is a, c, g, or t
tttttttttagaccttcatcttctttattttatatatgatgcttcttttaatgcagccaaaagtgatatttgcttttctcagaaccataatcgatacaagatgcagtgaccaattcattccttaaaacacctgggctccttaaggggctagaagacacaagttacatccagcccatcagggagccagaggngnaggggtccccagccaagctctggcaggcctgccatggggcgagcctgtaccntgcagccagaggtgtcaggaggcctggggaagggtgggcagaggcagctgggctctcagtcctgggaaccggagaccaagggctgctcatcaagttccgttcaggcaagggcggcctcatctgtgcctggtagattctaactgcttccaaggtagaggaggacgcgttcaggaaattcgttttcaattgtcancttt

SEQ ID NO: 1239 - DNA, 7758 bp, Homo sapiens
caagagtgcctgaggctggatcagaaatagccacgatcgtccagtttgattgattgattgattgatttagttgtgatggagtctcgctgtatttcccaggctggagtgcagaggcacgatctccgttcactgcagcctccacctccccggttcaagtgattctcctgcctcagccttccgagtagctgggattacaggcacctgccaccacgcccggctgatttttgtgtttttagtagagacagggtttcgccatgttggccaggctggtcttgaactcctgacctcaggtgagccacccgcctcggcctcccaaagtgttgggattacaggcgtgagccactgcccccagccccagcttgatcttgaacctcctgtgtgtgggcagagagacatggccctgctactgcttgaacggcttccggagacagtgacttgtttcctttttccctctgaactatgccgtagggccaggtgagctgctgtgaaggactcattcttggtagccggcagttactggcaacttgtgagcttggtgggctcctactaacgcacctgggacaccaggctgctgggctcccctctaggcagcctcccctccaggcagcctcaccagcagctcccctgagccatggagaccccagaggtccccgtgggctcgctaatcgactttgggcctgaggcacccacctcttctcccctggaggcaccaccccctgtgctgcaggacggcgatggctccctgggggacggtgcatcagagagtgagaccactgagtctgcggacagtgagaatgacatgggcgagtcgccctcgcacccgtcctgggaccaagaccgccgttcctcctccaacgagtccttctcctccaaccagagcaccgagtctacccaggatgaagagaccctggcactcagggacttcatgcgtggctacgtggagaagatcttctctggaggggaggacttggatcaggaggagaaagccaagtttggagagtactgcagcagtgaaaatggaaaaggccgggagtggtttgctcgatacgtgagtgcccagcgctgcaactccaagtgtgtctcagaggcaaccttctaccgcctggtgcagtcttttgcagtggtgctgttcgagtgtcatcagatggatgactttgggcctgccaagaacctcatgaccatgtgcttcacctactaccacatcggaaaaccacagctgctgcccccggagtcccgggagaagcccgcgggcagcatcgactcctacctgaaatccgcaaacagctggctggccgaaaagaaggacatcgccgagcggctgctgaagaacacctcggccaggactgagaatgtcaagggcttcttcggggggctggagaccaagctgaaggggcccctggccaggaggaacgaggaagacgagaacaaaccccaggagaagcggcccagggctgtgaccgcgtacagccccgaggacgaaaagaagggggagaagatctacctgtacacgcacctgaagcaacagcccatctggcacactctgaggttctggaatgcagccttttttgacgctgtccattgtgagaggacaaagcgatctcccactaccagaggggatgctggagaggaggaggagaagagggagaagtggtgccacatgacccaggaggagcgcgacgacagcctccggttcaacgagaacatcaccttcgggcagctgggcacattcacgcacaacatgctggcctttggactgaacaagaagctgtgcaatgacttcctgaagaagcaggctgtgattggcaacctggatgaagagcaatacaagctgcttagtgaccacattgagcaaatggccactgagtaggccccagaggtcgcactccgcaggaggactgaggccatgtgccattctcccgggcccagcgcccggccgtcaccccacccgatgacctgcatgaagccagcagcacccagagccactcctgctgccctagaactagcggttagaagaatccgctgttcctccctcatctcctctgcctgtgtctgcgacccccatccatgtgccaaagtgtcccttgggtcacacagctaaagccgaggtgaccagttgtaccccgagtgccaggcttgtgagatgagaccaagagggaggaggggaaggactccatgggccatcgtgggccaagggctggcgagggtgggggtgggcaagggatgcaggcaggacagccatgaggtggggctgcagccggcacacccagtggtggagggccggcgctgccactcacggtgggtggccgtgggccaccttccctgcaatgggtgcacacgcggctcccatccagccctctcagcgtggggctgtggctggtcctcactattccccagtctcccgctgtggggcaggaacaggaagtgacgggaaccttgaggaggaaacgcctgtgttagggagagagtgggtgcggtgtagaggatgctcttggccggctggagcaagacctggctcccaccagagggacgtgtgtgtgcctgcagacggcccgggagctgtgtgtctccgccagagtcacagcagtgccgaggtgtccgcggcagaccacacagaccgtctgaaatgcgcccgcctggcggacagctcccttctgaagcagagaagcctccatggtcacgaagcagcgttgtgctgtgtgtccctcgcaagaagcacaggaaagagaagtttctttagtagccactagacaaccaccctttctgaaagcaaacagtgctgctctttattccagacaaggcaggaaagtctgagttgggagtgacagtggctggagagaagcagatctgtgcaacgtgcagggcaagccagtggcgtggcctctgcctctaagcgctgagcattgggccccttccccaccagacctttgtagctcctccagcctctgcagagactcccttcacctcgcacttactgcctgggaaccacggcccttctcttctgtgggtctgcaccaggtactccaggccagcccatgggcccggggcctgaccccaacacctgcatgctgggtccagagccttctgtttcaccgtgcgtggacactgctaggccgcctggggtcccctgcctcctgcctgtcgctgccgtggtccctgactgcgaaataggcccgcggggctctccctcctcctgccatcctcccctcccgcccttcctggctacctcctctgacatgcggtcagataagtcccgtcttgtttgtgagtaccacagaaacgcctgagagtcacttacccggccactgcttggaaggtttccctccggggaatgcctccctggaatgttccagagacggaacattctctagagacaacagtctgtgctgcagattggttggatcacagaatgtgtgtctggggcattatctgaaacgtggtgtcatctgatgcatttggaccatatgctgccagactgcagaacgggggagccggggctcagggcccctgactgcatggtgcatgagtgatctcagcctagcgatgccgctggccagaccgtgaccatgctgccagtgtgctcgccatgagctgggtcagggctggggagttgtgcaggctggggtgacccttcccccatcattgggccccaacgggcatgtctccaccgaatccatttagagaaatgtcagagcgaggggtgtgtggacacccctcgctctgatgccaactgcagataatacacacctcctgcagcgtccagccacggctccagggcactgctctcctccttgcaccggtgaaactcaggccacactcaagggctgactgtccaggcgctcccttcagccgcctcgtcgtcagcgttcttagtcatgcattattcgtgttagctgaaatgcattcagactttgttctgcggtgcccacaggacttacccctgtatgtacaggatttttgtatgaaagttttgtttgattctgagactctcttgggaacgctggagagcttgtgcacagcctctggaaggaaaggcagcgctgacttcgttgggcttttttccaagcactttaacttcagaaatggtcttgacacttttttctccacatagactcttgaaatagccatttcaggggaggaaagggttggggttttctttgtttgtttgtttgtttccccctttactacctgttcttgtagatctagctcctcagagttggaggaaggctgacagagaaggtctcctctgtgctccatccacacaggatgccggagagacagccccttgtgctgtgagcagagcaggcagtggctctggaggctgcctgtggtctccttccagctgtggctgacagtggctctggccagggttgcttggagaaggctcagtgtgcctgggacagggcttaccacctgccaccaaggtttcctctcttcccccaggacctgggcagagcaggcatgagctgggctgtggtgcagagcaagcagacccagccacactgctcaaaggtccctgcgtggggaggtgtcacaccaggggcacacccagggccacctgggtgtaggagagctctggtggcccctccgtaaactcaggaagtgtcaggtgatttcctagggagaggttcccagtcccagcaggcagaatgcccaaaaccaggagcacgaaggcctgtcatccatggggccattgcaggcaccctgccgcccgaccttgagggctgtgccaatcctagtgaaccaaaatgcaaacaactcacacaagtgaaaagctccctgctttgaaaacaggacatgttgacaggcagcatggtatgtttttagcctttgttacagttttagcaacattgatgtctaagaggggccgtggtaatagattgcatctgccctgtgcatgcgcatgtttaaccacaggccagagaactcaattctgatgtcgtaagttctctgtaagtgaaatggggtagactgtatgattttcctattgccaaaagaaagaaagggggccaaacagctctgaaatttccaaaaaatggctagagggagagtccagtttctgagctctgtacccaaattaaaatcctgatgttcaggttaatccaagcaacacgcattgggtttaaaaccagcaccgaggcccagtgggggaatcacagacatcaccaagtctcgtcttctttccttcctgtgagttgaaaccaaacaggcctctcgctcactcctcccagcccagtaatgctgaggagttcagttgtgaggaaagaaggctggagctgtgagattcgcttttccctaggctgttccgcgtgggttaccttatcaccctggagcacttggtattccagacccctgacatgaggaatgcaggttcacactgtaaagagtttgtgaaaggtttcagtctaactggggttccttagctggaagccagggctggaagctacaggcctgaccttcctgggtcccactatctgttggcattttttttttttttttttagacggagttttgctcttgttgcccaggctggagtgcagtgacacaatctctactcactgcaacctccacctcccgggttcaagcaattctcctgcctcagcctcctgagtagctgggatgacaggtgcacgccaccacgcccggctaatttttatatttttggtagagatggggtttcaccatgctggccaggctggtctcgaactcctgacctcaggtgatcccccccacctcagcctcccaaagtgctgggattacaggcgtgaggcatcacacctgcctctgttggctttttagttaggaaggatccagctaggcccgtgtggttagatcagctttgttactgaattacctaaaaccagaccacagcacagccagggagcccagtagtgtttccaagaacagtgtggagcttgagaaagagaactttaaaaattagagggtccctttctgcagaggaagggatgctcgcagggtggcagtggcccagccccagcctcagggacggggagggagagccccctctgggcccagcaggcaggtgttctgaggctggtccctcctcagtttccgcagccacaaggcgaaacggccagattctcactcaaggtcgttctcactccttttcctgtcccgtttccagtcccactgagccattcacttctgctgaaccatttttcttaggatgcagccgtctcactcccttgtcctgtaaatcgtgtattcatgttgatgattcttggagataggtttcactttttcccagctgcgtccacaggaaaggggagtcggatgccagctgcaccccgcctggctcgcacaggctaagaccacagacagagcagggcttcccggagccacacaggccacgcaccccaggaacccttgctgctgcgggccaggaacaggaatgtgttggtgcctgagacaccaaatggaagaagcacatcaagactgttctcctgcggccaacactggcccggaagccgccctccatacaggccctcagggggcctgccttctgcgcctcagtcccccgtgcatccctgggcctgggtatcacatgctctccaggaaagggacggaatcaatcgtgtgaccgatgggctcgcaaggatgggtgccgccgtgggagccctgcctctggtgctggcaagggattgggtttgtgtgggtgtctctagcctgcagagtgcagtgagtgagagtccttgggagcgcggcgctgcctgtagctgcgcctggggatgcacgtggccacgggatttcagtgggacagcgctcccacaggggctgggggtgggggtggggtttcttagttactgttggaaagggaaaaattcaccatatccaaggggagagacgatgggctgggtttgtttactccaacttcccttctacacccctcctgcagaacagtacgatttggggagaacccagctccccactttatctgcagactctgggacctgacaaaacagtcagagcctgagtgcactgcagcctgaactcccttgagcagcgctataagggactttgcactttaaaaaggggatgcctgtcagtaaatcccctgtgcattgactagaactggggggctgcgcccgctccctccttaatcctagatgatttgctcatgaaatagaggtgggggacgaccgcatgcactctgggaggtgcagccctaaggggtggactccagatctccctgcaagagacagcttggcttggctttggctgttggggaggagtccctgccatcccggtgagcctggggctgttgcttagggtcttctgggtggacacgtggagaaagagaaggcaaacgttggaacactaggaaaagctagaaattcagacaacacacatggatccccttaaaacatgtaaatgtgtcagaacacggttgacctgccgccttcttgaacctggtggcccccgttggaactatcagtggcgtctcccatgcacacgccctctgctttctctttcctagactcgcggtgctcacatccagacattaccttgttggtagcccccaagtggcgtgcagtgacaccagtatcttctctgttgcatttttgcaatcttgtgtcccgctcggtgatgttctacaaactctgttttaaggttgagaaagtttcaagggtgaagatctcaaaacagtgctaaaatcaaaggtgtttgctgtgaagaaaaacatgtgtatatattgcaccttgagttgtcagaaggtagaaactgaaataaactaacttt

SEQ ID NO: 1240 - protein, 411 aa, Homo sapiens
METPEVPVGSLIDFGPEAPTSSPLEAPPPVLQDGDGSLGDGASESETTESADSENDMGESPSHPSWDQDRRSSSNESFSSNQSTESTQDEETLALRDFMRGYVEKIFSGGEDLDQEEKAKFGEYCSSENGKGREWFARYVSAQRCNSKCVSEATFYRLVQSFAVVLFECHQMDDFGPAKNLMTMCFTYYHIGKPQLLPPESREKPAGSIDSYLKSANSWLAEKKDIAERLLKNTSARTENVKGFFGGLETKLKGPLARRNEEDENKPQEKRPRAVTAYSPEDEKKGEKIYLYTHLKQQPIWHTLRFWNAAFFDAVHCERTKRSPTTRGDAGEEEEKREKWCHMTQEERDDSLRFNENITFGQLGTFTHNMLAFGLNKKLCNDFLKKQAVIGNLDEEQYKLLSDHIEQMATE

SEQ ID NO: 1241 - DNA, 935 bp, Homo sapiens
tatttatctcgatgtttaccattatcttagacattaacttagtgtattcttttcctgcaaatccatatttctttcggtgtaggatctagctgtagctgcaccatcatcgctgaggtaggcacatccttcactccctctcatgccaaacgatttggtaaatgtagctccatctacccatatgtcctgttcgattttttgccatcttcagtccaatccagtgatcagaactgcatttataccgcctaagaaaattcatttcttctatgttgtcacttatagttaggtcggcatgttgagtggaacagttgtatttacttgaattccaatctccttctttctttagagaaataatagcatatgtttcggaaaccaatccaatcataggggcataaactctgagaatctcgcagttagtttaactatcagagtaataatattagttgttattaaaacaccaacaattataaaacactttttatgtgttggtacatcataccgtgcttcttattaatcagcgtttagatattactgctagcagctttgtgtcatgtcttgcagaaactctcttcaaagttgtaactattactttaaactttaatactacacactgtgactctgatttttaaaagcgccagctccaaaactagaggtattgcccccaccgggcccgtaatgggccgaatttccccgggcgatatgtgccggggaaccgcacgaacctgagaaacgttacgtaataatgtattgctaataccgaaagttaatgcacggcgcgatacctcgccacacctgacttcgctgcgcatcaggccgtacgagtgacagggaactagcagcccaaagtgagtcggataaacagatcctcaaggaccggcgattcaacaagcgtcaggcgaggaaaacgaatatccacaggatcagggaaacgcaggaaa

SEQ ID NO: 1242 - DNA, 623 bp, Homo sapiens
  misc_feature (426)..(426): n is a, c, g, or t
  misc_feature (539)..(539): n is a, c, g, or t
  misc_feature (558)..(558): n is a, c, g, or t
  misc_feature (580)..(580): n is a, c, g, or t
  misc_feature (603)..(603): n is a, c, g, or t
ttttttttttatatcaaaacatttattttttgtgttacaaaaacacaaataaatccaagcagataatgaaataaacacatttttttagtgtcccatcctgggttctctgccctagaatgtattaagcaggtcaagtttaggttacttcaacacttcttctggatgctatgaagtctccatcttataaccatgtttctctagttcagctcgtaactgattagagaagtcatcctctacattgtcatcatcccaattatcctcccagacatgtgcatcttcatcttcatctaagccagcccagtcttcggcagggaactcttcaaactcgtcgtcttcctctaacagacctaagtctaccggctgttttttctctgacatctcgactgtccgcgcccaaaactcccagataagcagaaaagttggaancctcatcttctcaagggaacgccacggtcataccgcctccgagctgagctaccatagagattggggaagcccgtgcgaatcttggctcgagggcaaattcctatagtgagcgnattaatcggaacaggcaantgttccgtgtgaatgtatcgcnacaatcaacaaaacgagcggagnataagtgtaacctggggcca

SEQ ID NO: 1243 - DNA, 1729 bp, Homo sapiens
aaaacagcagcaacaacaacagcaacaacaaaaaatacactgtctttgggactattgatggataggggcactcactttttcccttctttttccttatccagggaaccgaagacgtgtttgcaaatgtccccggtgagtctcttttgaactctcagcctgctcaccttggccagccctggggtggggtcctggttggttctcagacctttcaaaggctgggggattgggaggctggacgtggctggatggatgctgcactggcggggttctggctacaatgatggtcgctttcctctctttcaggcctgtggtcaaatcgggagacaagcccagcctttcggcgagatacgtctaaccctgtgcaacagccactacattacttcaaactgagatccttccttttgagggagcaagtccttccctttcattttttccagtcttcctccctgtgtattcattctcatgattattattttagtgggggcggggtgggaaagattactttttctttatgtgtttgacgggaaacaaaactaggtaaaatctacagtacaccacaagggtcacaatactgttgtgcgcacatcgcggtagggcgtggaaaggggcaggccagagctacccgcagagttctcagaatcatgctgagagagctggaggcacccatgccatctcaacctcttccccgcccgttttacaaagggggaggctaaagcccagagacagcttgatcaaaggcacacagcaagtcagggttggagcagtagctggagggaccttgtctcccagctcagggctctttcctccacaccattcaggtctttctttccgaggcccctgtctcagggtgaggtgcttgagtctccaacggcaagggaacaagtacttcttgatacctgggatactgtgcccagagcctcgaggaggtaatgaattaaagaagagaactgcctttggcgaagttctataatgtaaacaatatcagactttttttttttataatcaagcctaaaattgtatagacctaaaataaaatgaagtggtgagcttaaccctggaaaatgaatccctctatctctaaagaaaatctctgtgaaacccctatgtggaggcggaattgctctcccagcccttgcattgcagaggggcccatgaaagaggacaggctacccctttacaaatagaatttgagcatcagtgaggttaaactaaggccctcttgaatctctgaatttgagatacaaacatgttcctgggatcactgatgactttttatactttgtaaagacaattgttggagagcccctcacacagccctggcctctgctcaactagcagatacagggatgaggcagacctgactctcttaaggaggctgagagcccaaactgctgtcccaaacatgcacttccttgcttaaggtatggtacaagcaatgcctgcccattggagagaaaaaacttaagtagataaggaaataagaaccactcataattcttcaccttaggaataatctcctgttaatatggtgtacattcttcctgattattttctacacatacatgtaaaatatgtctttcttttttaaatagggttgtactatgctgttatgagtggctttaatgaataaacatttgtagcatcctctttaatgggtaaacagcatccgattttggttgtgccatgcatttatttaactattacctgatatttagttgtttccaacctt

SEQ ID NO: 1244 - protein, 235 aa, Homo sapiens
MALPVTALLLPLALLLHAARPSQFRVSPLDRTWNLGETVELKCQVLLSNPTSGCSWLFQPRGAAASPTFLLYLSQNKPKAAEGLDTQRFSGKRLGDTFVLTLSDFRRENEGYYFCSALSNSIMYFSHFVPVFLPAKPTTTPAPRPPTPAPTIASQPLSLRPEACRPAAGGAVHTRGLDFACDIYIWAPLAGTCGVLLLSLVITLYCNHRNRRRVCKCPRPVVKSGDKPSLSARYV

SEQ ID NO: 1245 - DNA, 905 bp, Homo sapiens
cgctcagggaaggcgggtgcgcgcctgcggggcggagatgggcagggggcggtgcgtgggtcccagtctgcagttaagggggcaggagtggcgctgctcacctctggtgccaaagggcggcgcagcggctgccgagctcggccctggacgcggcgagaacatggtgcgcaggttcttggtgaccctccggattcggcgcgcgtgcggcccgccgcgagtgagggttttcgtggttcacatcccgcggctcacgggggagtgggcagcgccaggggcgcccgccgctgtggccctcgtgctgatgctactgaggagccagcgtctagggcagcagccgcttcctagaagaccaggtcatgatgatgggcagcgcccgagtggcggagctgctgctgctccacggcgcggagcccaactgcgccgaccccgccactctcacctgacccgtgcacgacgctgcccgggagggcttcctggacacgctggtggtgctgcaccgggccggggcgcggctggacgtgcgcgatgcctggggccgtctgcccgtggacctggctgaggagctgggccatcgcgatgtcgcacggtacctgcgcgcggctgcggggggcaccagaggcagtaaccatgcccgcatagatgccacggaaggtccctcagacatccccgattgaaagaaccagagaggctctgagaaacctcgggaaacttagatcatcagtcaccgaaggtcctacagggccacaactgcccccgccacaacccaccccgctttcgtagttttcatttagaaaatagagcttttaaaaatgtcctgccttttaacgtagatatatgccttcccccactaccgtaaatgtccatttatatcattttttatatattcttataaaaatgtaaaaaag

SEQ ID NO: 1246 - protein, 173 aa, Homo sapiens [sequence omitted]

SEQ ID NO: 1247 - DNA, 379 bp, Homo sapiens
ctgaggtgggcatctgcttttgtaaagcctccagtgtccattccatccctgatgggggcatagtttgagactgcagagtgagagtgacgttttcttagggctggagggccagttcccactcaaggctccctcgcttgacattcaaacttcatgctcctgaaaaccattctctgcagcagaattggctggtttcgcgcctgagttgggctctagtgactcgagactcaatgactgggacttagactggggctcggcctcgctctgaaaagtgcttaagaaaatcttctcagttctccttgcagaggactggcgccgggacgcgaagagcaacgggcgctgcacaaagcgggcgctgtcggtggtggagtgcgcatgtacg

SEQ ID NO: 1248 - DNA, 456 bp, Homo sapiens
gcacgaggcggtgccgggggcggggcgcggcggctgtcagctgactgtggcggcggcggcctcgaggtgacaactgtctccgtcgcaggctccggcgggggcgcaggaggtcgcccggcgcgtcactgtcgggtcggcgagccacgggggccgccgcagcaccatggcgaccaccgtcagcactcagcgcgggccggtgtacatcggtgagctcccgcaggacttcctccgcatcacgcccacacagcagcagcggcaggtccagctggacgcccaggcggcccagcagctgcagtacggaggcgcagtgggcaccgtgggccgactgaacatcacggtggtacaggcaaagttggccaagaattacggcatgacccgcatggacccctactgccgactgcgcctgggctacgcggtgtacgagacgcccacggcacacaatggcgccaagaatcc

SEQ ID NO: 1249 - DNA, 451 bp, Homo sapiens
  misc_feature (276)..(277): n is a, c, g, or t
ttttttttttttttatttgcagtagtttattcatattttgtcacaaatggccggggagggggtgccggactcctccaggcgacataaaaaataggtccaagagacaaggtgggctgaggttggggcagatggagacagggctggagaaagagcctgggggagaggggagggcagactaggggtggggctgcccccctgctgagcctgctcattcccggtgcgggtacccccccacctgcagggggagcctcagggtgggggtggaggggggaatgnncaaaattttccaggtaaagctctgccccttggcagggcccaagtttcccccgaaatggacaaggccggaggtcctgccccttccaggaatgactgccatgcccacaggctggcagaggagcccctgcccctgtttagagctttgcccagccgctctagtccaagggggagggct

SEQ ID NO: 1250 - DNA, 346 bp, Homo sapiens
tttttttttttttttttttttttttagtagtgtaaatagtttattatttgctcatatgccatgaaaagaccagaaaagtaacatgaattgcttttataaaacattctaatattgctaagaagcaggcccattaatagacaaacagaaaagaacatgccaacgttgtctatttgtagattaataaataggcaattattttaatatacatatatgtcagcattgaactttggaaaacagctgctttgtagtggaagtccaacttggtcaaattgctatttttaatcgaagtgaatgttgagtccacagaaagacaaaatcgtggcatgttctttttaaagtaaagtac

SEQ ID NO: 1251 - DNA, 383 bp, Homo sapiens
cgggcagtagcggcgagaggcggcgagaggcgggctgaggcggcccagcggcggcaggtgaggcggaaccaaccctcctggccatgggaggggccgtggtggacgagggccccacaggcgtcaaggcccctgacggcggctggggctgggccgtgctcttcggctgttacgtcatcactggcttctactacgccttccccaaggccgtcagtgtcttcttcaaggagctcatacaggagtttgggatcggctacagcgacacaaactggatctcctacatcctgctggccatgctctacgggacaggtacactctgcagtgtgtgcgtaaaccgatttgactgccctaccgtcatgcttgtggggggactttttacaacattg

SEQ ID NO: 1252 - DNA, 265 bp, Homo sapiens
  misc_feature (5)..(5): n is a, c, g, or t
  misc_feature (21)..(21): n is a, c, g, or t
  misc_feature (147)..(147): n is a, c, g, or t
  misc_feature (158)..(158): n is a, c, g, or t
  misc_feature (195)..(195): n is a, c, g, or t
  misc_feature (208)..(208): n is a, c, g, or t
  misc_feature (256)..(256): n is a, c, g, or t
  misc_feature (263)..(263): n is a, c, g, or t
ccctncttctttgccccagtntccagttctccagtgttcacaggtgagcctaccaacagccactgctcatcaagctgaagctgagcagaagcaggcagaagaaagaagtaaacagctggaggatgagctggcagccatgcagaagangctgaaagggncagaggatgagctggacaagtattctgaagctttganaggatgcccaggngaagctggaactggcagagaagaaaggcttctgatgcttgagggcttnaggttgncc

SEQ ID NO: 1253 - DNA, 3575 bp, Homo sapiens
cgggaggaggtcccccgacatgcctgaggcaaaaccagcggccaaaaaggcccccaaaggcaaagatgcccccaaaggagcccccaaggaggctccccctaaggaggctcctgcagaggcccccaaagaagccccacccgaggaccagtccccgactgcagaggagcccaccggcgttttcctgaagaagccggactccgtctcagtggagactgggaaggacgcagtggtcgtggccaaggtgaacgggaaggagctcccagacaaaccgaccatcaagtggttcaaggggaagtggctggagctgggcagcaagagtggcgcccgcttctccttcaaggagtcccacaactccgccagcaatgtgtacaccgtggagctgcacattgggaaggtggtactgggggaccgtgggtattaccgcctcgaggtcaaagccaaggacacctgtgacagctgtggcttcaacatcgatgtggaggcaccccgtcaggatgcctctgggcagagtctagaaagcttcaagcgtacgagtgaaaagaagtcggatactgcaggtgagctggatttcagtggcctgttgaagaagagggaggtggtggaggaggagaagaagaagaaaaagaaagatgacgatgacctaggcatccccccggagatttgggagctcctgaaaggggcaaagaagagcgagtacgagaaaatcgccttccagtatggcatcaccgacctccggggcatgctgaagcggctgaaaaaggctaaggtcgaggtcaagaagagtgcagcattcacaaagaagctggatccagcctaccaagtggacagaggcaacaagatcaagttgatggtagagatcagcgacccagacctgaccctcaagtggttcaagaacggccaggagatcaaaccaagcagcaagtacgtgtttgagaacgttggtaagaagcgaattcttaccatcaacaagtgcacgctggcggatgacgctgcctatgaagtagctgtcaaggatgagaagtgtttcaccgagctcttcgtcaaagaacctccagtcctaattgtcacacctcttgaggaccagcaggtgtttgtgggtgaccgggtggaaatggcagtggaggtgtcagaagagggtgcccaggtgatgtggatgaaagatggtgtggaactgactcgggaggattccttcaaggcccggtaccgcttcaagaaggacgggaagcgccacatcctcatcttctcagacgtggtccaggaggacaggggtcgctatcaggtcataaccaatggcggccagtgtgaggccgagctgattgtggaagagaaacagctggaggtcctgcaggacatcgcggatctgacggtgaaggcctcagaacaagctgtgttcaagtgcgaggtgtctgatgagaaagtgacgggcaagtggtataagaatggggtcgaggtgcggcccagcaagaggatcaccatttcccatgtaggcaggttccacaagctggtgatcgatgacgtccgccccgaggatgagggagactacacgtttgtgcctgacggctacgcccttggttcgctctcggccaagctcaacttcctggaaatcaaggtggagtacgttcccaagcaagagccaccaaagatccacttggattgctcggggaagacctcagagaatgcgattgtggttgtggctggaaacaagctgaggcttgacgtgtccatcacaggggagccccctcccgtcgctacctggctgaagggagatgaggtattcacgaccaccgagggcaggacccgcatcgagaagcgggtggactgcagcagctttgtgattgagagtgcgcagcgggaagacgagggccgctacaccatcaaggtcaccaaccccgtcggcgaggacgtggcttccatcttcctgcaagttgtagatgtcccagaccccccggaggctgtgcgcatcacctcggttggagaggattgggccatccttgtctgggagccaccaatgtacgatggggggaagccagtcaccgggtacctcgtagagcggaagaagaagggctctcagcgctggatgaagctgaactttgaggtcttcacagagaccacctatgagtccaccaagatgatcgagggcatcctctatgagatgcgtgtcttcgccgtcaatgctataggggtctcccagcccagcatgaacaccaagccttttatgcctattgcacccacgagtgaacccctgcacctgatagtggaggatgtgacagacaccaccaccacactcaagtggaggcctccgaacaggatcggggcaggtggcatcgatgggtacctggtggagtactgcctggaaggctccgaggaatgggtccctgccaacaccgagcccgtggagcgctgtggcttcaccgtcaagaatctcccgaccggagccagaatcctcttccgagtagttggggtcaacatcgcggggcgcacggagccggccaccctggcccagccggtcaccatcagggagattgcggagccacccaagatccggcttccccgccatctccgccagacctacatccgcaaagtgggcgagcagctcaaccttgtcgtccccttccagggaaagccccggccccaggtggtgtggaccaagggcggggccccgctggacacctcccgcgtgcacgtgcggaccagcgacttcgacaccgtgttcttcgtgcgccaggcggcccgctccgactccggggagtacgagctgagcgtgcagatcgagaacatgaaggacaccgccaccatccgcatccgcgttgtggaaaaggctgggccccccataaacgtgatggtgaaggaggtgtggggcacgaacgcgctggtggagtggcaggcccccaaagatgatgggaacagtgagatcatggggtatttcgtccagaaagcagacaaaaaaaccatggagtggttcaacgtctatgaacgtaacaggcacactagctgtactgtgtccgaccttatcgtgggcaatgaatactatttccgagtttacaccgagaacatctgtgggctcagtgactcacctggtgtctccaagaacacggcccgcatcctcaagacaggaatcaccttcaaaccgttcgagtataaggagcatgacttccggatggctcccaagttcctgacacctctcatagaccgcgtggtcgtggctgggtactcggcagccctcaactgtgctgtcagaggccacccgaagccgaaggtggtctggatgaagaacaagatggaaatccgtgaagatcccaagttcctgataaccaattaccaaggagtcctgacgctgaacatccgtcgcccctcgcccttcgacgctgggacttacacctgccgggccgtcaacgagctgggcgaggcgctggctgagtgcaagctggaggtccgagtgccgcagtgagacctgtcccctacctgccaagacaattggtggtggagtcctgaccccaatccccaacctcccaggactgtgttctttctggagttttcgctgagaacaaaacagtgttgtctggaaaaaaaaaaaa

SEQ ID NO: 1254 - protein, 1142 aa, Homo sapiens
MPEAKPAAKKAPKGKDAPKGAPKEAPPKEAPAEAPKEAPPEDQSPTAEEPTGVFLKKPDSVSVETGKDAVVVAKVNGKELPDKPTIKWFKGKWLELGSKSGARFSFKESHNSASNVYTVELHIGKVVLGDRGYYRLEVKAKDTCDSCGFNIDVEAPRQDASGQSLESFKRTSEKKSDTAGELDFSGLLKKREVVEEEKKKKKKDDDDLGIPPEIWELLKGAKKSEYEKIAFQYGITDLRGMLKRLKKAKVEVKKSAAFTKKLDPAYQVDRGNKIKLMVEISDPDLTLKWFKNGQEIKPSSKYVFENVGKKRILTINKCTLADDAAYEVAVKDEKCFTELFVKEPPVLIVTPLEDQQVFVGDRVEMAVEVSEEGAQVMWMKDGVELTREDSFKARYRFKKDGKRHILIFSDVVQEDRGRYQVITNGGQCEAELIVEEKQLEVLQDIADLTVKASEQAVFKCEVSDEKVTGKWYKNGVEVRPSKRITISHVGRFHKLVIDDVRPEDEGDYTFVPDGYALGSLSAKLNFLEIKVEYVPKQEPPKIHLDCSGKTSENAIVVVAGNKLRLDVSITGEPPPVATWLKGDEVFTTTEGRTRIEKRVDCSSFVIESAQREDEGRYTIKVTNPVGEDVASIFLQVVDVPDPPEAVRITSVGEDWAILVWEPPMYDGGKPVTGYLVERKKKGSQRWMKLNFEVFTETTYESTKMIEGILYEMRVFAVNAIGVSQPSMNTKPFMPIAPTSEPLHLIVEDVTDTTTTLKWRPPNRIGAGGIDGYLVEYCLEGSEEWVPANTEPVERCGFTVKNLPTGARILFRVVGVNIAGRTEPATLAQPVTIREIAEPPKIRLPRHLRQTYIRKVGEQLNLVVPFQGKPRPQVVWTKGGAPLDTSRVHVRTSDFDTVFFVRQAARSDSGEYELSVQIENMKDTATIRIRVVEKAGPPINVMVKEVWGTNALVEWQAPKDDGNSEIMGYFVQKADKKTMEWFNVYERNRHTSCTVSDLIVGNEYYFRVYTENICGLSDSPGVSKNTARILKTGITFKPFEYKEHDFRMAPKFLTPLIDRVVVAGYSAALNCAVRGHPKPKVVWMKNKMEIREDPKFLITNYQGVLTLNIRRPSPFDAGTYTCRAVNELGEALAECKLEVRVPQ

SEQ ID NO: 1255 - DNA, 512 bp, Homo sapiens
  misc_feature (507)..(507): n is a, c, g, or t
tttttactttggaaatcatgtattatttaaatcacatgtttaaacgcacataaacttctgagtagtgttttctgcacacacaagatgtctccaggggcaccaaagaatgcattttccacgtttgtccctaaacgttaatgcataagtaaccttggtcaccaacagatgtgagggcacgtgacgttcgggctgcgccctccccgccccggccctgcacacagtagggccgcaccgcgctttgcaaacaggtggactcggcagaggcgcgaccgccctcaccgcagagagctgggccacctgcaggctctcaggacacccaaggccccacctcccacccggaaaagagacgatacgccgggcgcaggcgcagaagccgcgcccgtccgcggcgccgccagccagggcggaaacggctgcggcttcgctagggacgcatgcgcgggtcccttagttttcgcgagataacggtcgaaaacgcgctcttgtcgatttcctgtagtgaatcangcacc

SEQ ID NO: 1256 - DNA, 2074 bp, Homo sapiens
atacacgcttgagcaagctttgctatcagccagccaagagatagaaatgcatgcagataacccagcagccattcagacagtggtgttacaaagggatgatttacaaaatggactgcttagtacgtgtcgagaactttctcgagccactgccgaattggaacgagcatggagagaatatgataagttagaatacgatgtaactgttaccaggaaccagatgcaagagcagctggatcaccttggtgaagttcagacggaatcagcaggaattcagcgtgcacagattcagaaaaagaactttggcgaattcaggatgtcatggaagggctgagtaaacataagcagcaaagaggtactacagaaataggttcccactttcctgttggagtagtccctccaagagcaaaatcaccaacacccgaatcttcgacaatagcttcctatgtaaccttgaggaaaactaagaagatgatggatctaagaacggaaagaccaagaagtgcagtggaacagctctgtttggctgaaagtactcgaccaaggatgactgtggaagagcaaatggaaagaataagaagacatcaacaagcgtgcctgagggagaagaaaaaagggttaaatgttatcggtgcttcagaccagtcacccttacaaagcccttcaaatttaagggataatccatttaggactactcagactcgaaggagggatgataaggaactggacactgccattagagaaaatgatgtaaagtcagaccatgaaactcctgcaacagaaattgttcaactaaaagaaaccgaaccccaaaatgtggacttcagcaaagagttaaaaaaaactgaaaacatttcatatgaaatgctttttgaacctgagccaaatggagtaaattctgtggaaatgatggataaagaaagaaacaaagacaaaatgcctgaggatgttacattcagccctcaagatgaaacacagaccgcaaatcataaaccagaagagcatcctgaagaaaatacaaagaacagtgttgacgaacaggaagaaactgttatttcttacgaatcaactcctgaggtttctagaggaaatcaaacaatggcagtgaaaagtctgtccccatctcctgagtcctcggcatcgccagttccatccactcagccgcagctcacagaaggatcacatttcatgtgtgtgtagtcttagaagaactatactgacttctgttgaaaccattcaaagctaaagacatggaccttcagcagtgtaagaagatattgtacagtatattttaaatctatgaaattcatagttctgatgcttttggtcacagagcatcattttatcacttctggaaaatgtttattccaaaacggctttaatggcccatatgtacacttcgtaatctcaaggttattattctgacaccagcttgctgctatgatttcagagcacataagtaaaggtgctttttaatgtgcagtctatttccagagcttacttagttgctgatttccagatttcgatgtttcttaagtctaggtgaatttatatatatatttttttgcttctcattttctaaagttagttattatttccattgaagcttgttttctttttttcttcccattttagctactgcagtgcttttgtttcacacttgatttgtaaaaattttatatatatgtatttaaaatgtgccattttattgctaagtgaagtatgtcctgttttctgctataattctttctcggtcagattgcaatgtcagcagttactgccacactcctgtcagcttaaacacaaatgttactgcttatcttttcttaaaaaaaaaaaaaacaaagtgtaggtattttgaagtactgggcttatatttcattggaatacatgtgtacagcaataagcaggttcccaaatccggtacttagtttgtgtacaaatgtaattatgttcattgtgtatatattatacaatgagcacatgtaatgtattaaaggctacttactattgtttaaatgcaaatgttcatatctcatttctttttttatcatgttaaataaatgttgatgttctt

SEQ ID NO: 1257 - protein, 292 aa, Homo sapiens
MEGLSKHKQQRGTTEIGSHFPVGVVPPRAKSPTPESSTIASYVTLRKTKKMMDLRTERPRSAVEQLCLAESTRPRMTVEEQMERIRRHQQACLREKKKGLNVIGASDQSPLQSPSNLRDNPFRTTQTRRRDDKELDTAIRENDVKSDHETPATEIVQLKETEPQNVDFSKELKKTENISYEMLFEPEPNGVNSVEMMDKERNKDKMPEDVTFSPQDETQTANHKPEEHPEENTKNSVDEQEETVISYESTPEVSRGNQTMAVKSLSPSPESSASPVPSTQPQLTEGSHFMCV

SEQ ID NO: 1258 - DNA, 493 bp, Homo sapiens
  misc_feature (4)..(4): n is a, c, g, or t
  misc_feature (448)..(448): n is a, c, g, or t
  misc_feature (457)..(457): n is a, c, g, or t
tctncacgctttgcaaaaaaatgagcttttttggagtttaaattaagcatccctctggtgtgtttggttttttagccaccaaaaatttaacaaatttgataacctgtcacgtgtaagttcagaaagcactttggtcttaattggtgacttgggggttatttggtataaatataggttgtttttctaaaaattattgccagtatcctccaaataattgccccttcaaatgtttcatctaaaggtgacagcttgtgggcagaaccatgcacaggaagtgcctgccagtgggtgttaggagatgtaggtggagtctgtgatagccaaccaaaagctatccccttctcgcccagaaaagccacgtgctttgctggacgctacttggaaatctgaactctgcacctacatatggtagtaaaattaggacacttttgtcactttaatttttagnattatcccnaggtttcactagatttcaatgtgccacttgtgctat

SEQ ID NO: 1259 - DNA, 566 bp, Homo sapiens
caaatgcaaatagtctttattatgagaaagcagtgttatctaggaaagtcacatgctggtttctttctaataaaatgacaaagcaggtttcttaaataatttacaaagggcagaaattgctcttgaacagggctacccctcctggcacatccacagtgctctgcactgagcatataaataggtacccgtgagcccagggtcgtaagcctggaaatatctcctatgccttcctccgagtccctggtagggaaaggagggatgagagtggggccctcaagagccttggcaccagaaacacagtgggtgagtgactctgcggatgactccccaaaaaccaggcacccgggtacacagctaagagctctcaaatatctgatgctagcacttcatgttatagatgaggcaaatagaaggctcaaggtcaagtgtacgatgagtttctaagctcaagagtcccctaggaaagcagaaggaacaattctccccctctgcaaggtctccccaagacactctcaggctatggcaggcagtcactgatgggtccagatgtggctggagcagggggc

SEQ ID NO: 1260 - DNA, 1789 bp, Homo sapiens
ctgctgaggagacagcaggcggggactggaactctgtgtgcgagcgattcggtgcctggttttaccagggccccaggggccaaatgaagcaaaccaaaagcaaagagagagcacaagcagcaactagagacaatgccagggtcctgggaacgcaaacagaagcgcggccagcttccgacaggacccctgccgggggcccacagcccctgcgctacctctcggcgatcagagaccaagtctagccctagaacgaagacccgacgcgagtcttcgccgttcgtctcaaaacagaaataaactggccacgtcaccgggctgccgagaagggggctcgggagaccagctcgggtcgttctgcgaggcggggtcggaggtcgcggctgggagactggggcacagacctcgttctcaggccagtcggcgggagcggaggccgcgccagagacagcatcgaggccgcgagcgcaggaccaggagggacgcccaaggccctcggggaggaggcccgggtttcagggccgggggccggcggacaccggataaaggacggccggggtctcccggcgtcccgggagggggcggggcggaggcgtggggaccaagagcggcgtcccgcacgcgcctggcagggagcagggacggggaagggggaacagaccccagtgcccgctgaggcgccggctccgccgctgcagccgctgccacctcacagcccctgtccgcagcttcctcttccgctgcctgtcagtcacccgtctctatggtgaccgcatccggccgctcgctccgcccgcgcgttctctatggtcgctcccacggcctctcagcaccgcgcacctcctcggctgggatccgggctgcctggccccaaccggccgccccccgataagacgcgttcgcccccacatacgcgaatccaggcaaatccagagtggaccaaagctgccccgtaacttgggctgaacaccatctgccctggaaaaagcatacccccaccctcgagagcgcttttctcccaattggctgtggaatcccatcagcctttcagttgcctaagaaatgtttgttgtttgccaggcacgtacgttcatctaaggatgctaagttccgggcatcttcgtgagtgctgggtaaacaagcggtggacgagatgggcatggtccctgctctcagggaactgaaagttgagggagacaggtaataaacacgcttgacatagcaagaataaaacaggtagaaatcccagtctgataagtaccattgcagaaaagcacagagtcctgtggaaaaactaaacaaagtattaaattagactgggaatttggcaatgctgagatccaaaggttcaggaaaagttatccagacatgaagtggacagttttccaggcaaagaaaagagcaccagaatgtcctgagagaggaaagagattggcttggagaagaactgggaaggcccagggcatctttgagcctggtgaggggagaacagcccaaggtaaggctggggaacagggaacaggtaaagcattcagaccaccacagtggttccccaaccagaatggcaccctccctaaggagcaatttggaaatgttcggggcaattttgttgtcaaatgattgggggagaggagccaaggaggctccgtgtcttgcacattgcaagatggtatcacacaagaaaactgtcctgatcccacacagctttcacatgtcctactgaatattcatataggttaaaaaaaaactggttataatcaaaaaaaaaaaaaagaaaaaaaaaaaaaaaaaa

SEQ ID NO: 1261 - DNA, 2930 bp, Homo sapiens
cgctcccggctcggagtgtgatctaagcaggtcgcgtaccttcctcaggtgactccggccacagcccattgtccgcggccaccggcggagtttagccgcagacctcgaagcgccccggggtccttcccgaacggcagcggctgcggcgggtccatggagaagggccctgtgcgggcaccggcggagaagccgcggggcgccaggtgcagcaatgggttccccgagcgggatccgccgcggcccgggcccagcaggccggcggagaagcccccgcggcccgaggccaagagcgcgcagcccgcggacggctggaagggcgagcggccccgcagcgaggaggataacgagctgaacctccctaacctggcagccgcctactcgtccatcctgagctcgctgggcgagaacccccagcggcaagggctgctcaagacgccctggagggcggcctcggccatgcagttcttcaccaagggctaccaggagaccatctcagatgtcctaaacgatgctatatttgatgaagatcatgatgagatggtgattgtgaaggacatagacatgttttccatgtgtgagcatcacttggttccatttgttggaaaggtccatattggttatcttcctaacaagcaagtccttggcctcagcaaacttgcgaggattgtagaaatctatagtagaagactacaagttcaggagcgccttacaaaacaaattgctgtagcaatcacggaagccttgcggcctgctggagtcggggtagtggttgaagcaacacacatgtgtatggtaatgcgaggtgtacagaaaatgaacagcaaaactgtgaccagcacaatgttgggtgtgttccgggaggatccaaagactcgggaagagttcctgactctcattaggagctgagcttcattcagtgtgtgtgcgttggttgccgatcgtactgccagtagcattgtctgtctgtccggtcttgtttgtacattccattttcaattgttacagatgtgaactttattccttgtcactaattatatttaaaattatttctaggaagtcaaataaatataataaagggttgagccctctactttcttcttgccacctttttgtggcaatattaaagtgaactgctaatagtgtaagtacgtgcacaaaaccactgccagataaccagaggggcctgggaagggagaagaattagtgtatttttttcaaatagtacagtaatttgcctcataagcataggagcattgggaatgagagggaactgtgcccagtatactgttttttttcttcctccaataaaagtggtgtagtgccgaaagtgctaaaatatttagtgcggtattgctctgtgaattcaagttcaacagacttcactttggtcatgtttattaaaccaccagtgacatttaaaaatatatttttagcagtcgtaatgttagtcaccaagggaaggtggtggaatgtctatgtttttgattttactgtgagttaaaaaggcacatttctaccttctattgtttttaaattcaagaatagggaattagttcctggtgttgtttacgagtgtattctcgtgtcaacatacagggatttagacatttaactctctgtgccttgataagaatatcatttagagtgtagatacttttgcctttttaaaaaagccattattttatgagacttagtactcacactgcaaataactagtcagctcagttttaactttataggtttattgagtttcctttgtgtgatccatgtagatgcctcaaaatgtttcttcttcttcttttttttaatcttataagatatttttctaagtatttccagaaacatttgagagtgcccatcattttcaggtctgcagaaccatagcttccacgcacctgaacgagcacagaatgaactgacggtggaagacattatgagctgtgtccaacgttttaaccaaagcgtatcgtaccaacgatctgtgaaaatgcactggaagcttctggtcccggtttcctttgtggtctatgtgggtcttgtcctcattgtaactccgtatagatggtataggtattttaatcctggaagctgttgccttattaatgattatcttaaaatttcctccattggggcagcgtgggccaaattaaaacaaacaaaaccgcaactcctccacagaaacacaaacacagttattccatgaagtttagtatttggttgacatagtgctcttcaaattcatcccattaccctaaaagtaataactttgatgcttgctttaactttagtcccatctctgccactttgatgctatttgggttatgatggggcaagatggcagaggtattgggtttttttgtttttttccattcctctctacttctgtttcctagctttttctttctggagtttaagtacagtgatggttggcttgagtacctttttaaatctagcccagtataaacattagcctgcttaatatttagacatttataggtagaattctgagcactcaactcatgtttggcattttaaagtaaaaacaagtgtgacttcgaggaccaaagaaattgtcagctatacatttatctttatgaactcatttatattcctttttaatgactcgttgttctaacatttcctagaagtgttcttataaaggtctaatgtatccacaggctgttgtcttattagtaaatgcaaagtaatgactttgtctgttttactctagtctttagtacttcaaaattaccttttcatatccatgatcttgagtccatttgggggatttttaagaatttgatgtatttcaatacactgttcaaaattaaattgtttaattttatgtatgagtatgtatgttcctgaagttggtcctatttaaattattaaactattgtaactttgaaaaaaaaaaaaaaaaaaaaaaa

SEQ ID NO: 1262 - protein, 250 aa, Homo sapiens
MEKGPVRAPAEKPRGARCSNGFPERDPPRPGPSRPAEKPPRPEAKSAQPADGWKGERPRSEEDNELNLPNLAAAYSSILSSLGENPQRQGLLKTPWRAASAMQFFTKGYQETISDVLNDAIFDEDHDEMVIVKDIDMFSMCEHHLVPFVGKVHIGYLPNKQVLGLSKLARIVEIYSRRLQVQERLTKQIAVAITEALRPAGVGVVVEATHMCMVMRGVQKMNSKTVTSTMLGVFREDPKTREEFLTLIRS

SEQ ID NO: 1263 - DNA, 424 bp, Homo sapiens
  misc_feature (17)..(17): n is a, c, g, or t
  misc_feature (26)..(26): n is a, c, g, or t
  misc_feature (385)..(385): n is a, c, g, or t
  misc_feature (408)..(408): n is a, c, g, or t
ctagaagttttatggcntgggatttnatgtttaggtctgtgatccatctcaaattaatttttgtgaacagaatgaggtttggtttttttccagcatggatatacagttgttccagcaacatttacttaaaaagacttttctttacccattagattgacttggtagcttggttaaaaattgatcacgtgtgtgtgtatttctacattttctgttctgttccattaatctatttgtgtatccttacatcagtaccacactttggattattgaaactttctagtaagtctttaaattagtaaatccttcctttttgttatttttcaagatcgctttggttattgtcgattccttggattgtcataaaagttttacaattagcccatcntgtttttcaaacgtagatgtgcnggggtagccgtgttcg

SEQ ID NO: 1264 - DNA, 4744 bp, Homo sapiens
aaataataaagaaattgaaaacaatacattaatataccataacactaaaaagagcaggagcgagagatgagaaagggaatccagcccgctctggagcagtacctggtgaccgccgggggtggggagggggcggctgtcgtcgccgccgccgctgcagcctccatggacaaaagggcactgctagccagccccggcttcgccgccgccgccgccgctgccgccgccccgggcgcgtacatccagatcctcaccacgaacacttccaccacctcctgttcctcctccctccaaagcggcgccgtagccgccggccccctcctccccagtgcccccggcgcggagcagaccgccggcagcctcctctacaccacgccgcacggaccctccagcagagccgggctgctgcagcagccaccagcgctgggacgcggcggcagcggcggcggcggcggccctccggcaaagcgaaggctggagctaggagaaagcggtcatcagtacctctcagatggtttaaaaacccccaagggcaaaggaagagctgcactacgaagtccagatagtccaaaaactccaaaatctccctcagaaaaaacgcggtatgatacgtctcttggtctgctcaccaagaagttcattcagctcctgagccagtcacccgatggggtattggatttgaacaaggcagcagaagtgctaaaagtgcaaaagagaaggatttatgatatcaccaacgttctggaaggcatccacctcattaagaagaagtctaaaaacaacgtccaatggatgggctgcagtctgtctgaggatgggggcatgctggcccagtgtcaaggcctgtcaaaagaagtgaccgagctcagtcaggaagagaagaaattagatgaactgatccaaagctgcaccctggacctcaaactgttaaccgaggattcagagaatcaaaggttagcttatgttacatatcaagatattcgaaaaattagtggccttaaagaccaaactgttatagttgtgaaagcccctccagaaacaagacttgaagtgcctgactcaatagagagcctacaaatacatttggcaagtacccaagggcccattgaggtttacttatgtccagaagagactgaaacacacagtccaatgaaaacaaacaaccaagaccacaatgggaatatccctaaacccgcttccaaagacttggcttcaaccaactcaggacatagcgattgctcagtttctatgggaaacctttctcctctggcctccccagccaacctcttacagcagactgaggaccaaattccttccaacctagaaggaccgtttgtgaacttactgcctcccctgctgcaagaggactatctcctgagcctcggggaggaggaaggcatcagcgatctcttcgatgcttacgatttggaaaagctcccactggtggaagacttcatgtgtagttgattatgcttcgtgtgaactctccttaaaaaccgatatttttttatcatggaccagaacatctgtcatgcagtgttgtcccttcctaccttcttcctccaagagagtatcatgaagtaaactacaaacttcagaagaaagctgacattttaatgaattttttaaaaaattaataaacaaattgtctaaacgcacagttgcaggctcccttgggaaagccctgctttgctccaggctccaagatctcctggctaagtcagcaagtgagaaaatgtgcaatcaggtgtctctcaccccgaattgtccttcctccttcctccccggattggcttgctgtgcctgacggatgggctgtagaatggggtctggccacctggcctgctgggaaacagcaatcttccttaatagcatttcaagccgtgccttctccgcagaatgcatgtctttgaggtctgctaatatggaatggaactgcagcaaatgcaaacttgaagtcatgcaaaagtatgaaatggatttcttcagctcttcttaggaatatttaaattactgtcataattcagtttaagctatgaactgtgtgtcccagtaggaggtcaagaaaacctccacagccttctggatgaagaacctgttttcaaatatacttgttgcagatacagaagactagtagagttctgccactctaagctgttgtggattttcctgtctccatgaaccactcccattcccccgtccccaatgtgtttgtgagtttccagttgatttgtagcaaatgcctacttagttctttgtggattgttctagacttttaatttttttagctgccatttaagcattcctgtggcacccatcaccatttcaatttaattgtttactttgaagcggtttttgcaaattcatattacttaagcagagggagagaacctctactgatcagagcatctaaacctgtgtgatctaaggtttatcagcctctgcaaggagctttgtcccatcgtgcttccattcccaggagggggagcttggagcgagtcagtcctggggcttgctgacatgggtggcccattggaaaggagaaccaggtcagatgatgtaacagccccaaggagcagcaggcatgggtccctccatccttgggcttcccgggcccctgtgacaggggaaagggctctcttacaccgcactcagggagaccacttctcaggatggggtcagatggagagacctctagggagaaagacatccccattgtgtgagtggcatttccttaagctggcaggaacagggagcagccctgtgtcgggggctggaatagttctggccagaccccgttccccttcctctatgaaggaataagttggaccaagggaagtcggggacgtaaaaaatgaagcaaaacaatgccagggtgtctcccgctttactcttcaggaatggtgtcccaagttggaggctttgtgtcagctgcaaatcctaccagttatgtccaagaatggctttccctcgggcaggtggcagcggccatctcccactgggaatatggcgtagtatctccggtccattccttggatgctaaggactgcgggaatgagggagtcagataaagaacaaacctcgaaacgaacagttaaattgaaatgctatgtgcctgacccaatggtaggcacatagtaggcactcaactcatatgtttaattgaattgaaaatatcccttaggaaaaaaaaaaaacacacaaaaaaccacaagagccccagccagtttactccaggtagatttccacaatatgcaaagtggtggtggggtcaagacagatgacaccagcactttaaactctttgtgtgggtatgcgtgggtgtatgtttgggaagaaaaacaaaggtgcagactatcttcctttttttcttcttcagcctccatccctggcctcctcccctcacacacactggacttggtacaaaatgtcggtgtggtcctagatgaagcattggggtgggggagggagagggagctttgtgttaagtgcctactggaaatgcactgtggggttttttcctgtatgggaaaccatttatgccaagcttttccccatttcccatatttatctcatctggttagctgcctctgcttccagctttgtgtaattctctttgccagctgcacaaagctgattttttccaaagtctaaagactgagctcacctggctagattgttgtgtgttttgttgaattttttcataatgtaatgccgtatttattgtttttaaaatgaaaggaatactaataagtcttaaaagttccttcatgcataagatttttttccagttactgggcttaactggtgtacattaattagatgtccatactgtattttgtttgcattaagtaattttctttttgacttagtatccggcacacaaagtgggttagtactacagtatttgcgttactttaagtactaagtatgcaggtttcctggtaccattgagttgctgctattaaagctcacacacgaaatggctaaaagttacaagtgtgcaaattatgactgcgtgagccttagaaaataaaatgtataaagggcaacacatgagctgtcaaacagtgttaggagtgtgtttatatgtacagagttgtgcatagcaatcgttttatttaagttgatatgtagtctactcacattttcattatttagcaattttgtacaaaaatagcaattaatttgtaaacactgccagaatactttctagctgctttgtaattttttaagagtgttattttgtttttgtttttctgttctttgttgtggctcttgttttcatttttgttgtacgtgtagatctgtaaataaaattgcagtatttaaagcttaagctttcaggaaaaagaaaataagaattcagtgtgtgcatgacaactcgtgtgtatgagaaggagggatatgaaggaagatggcttgcagagtaagtcgggtggcaattgtcagggtgtgggaatttcttttcctacggggtacgtgattttgtaaaaaggaagtatttctcccaaaattgggagtaggcaaactactaatcagtttagctttgtgttgtatgctagtttaaaaaagaaaatatgtaatataatgtaaaaaaaaacaaaaaaaagcttttatgatggattttgtaaatagatttgttacagggtgacctgttctctagctgtgatcttaccacttcaaatgggtgtaatttgaataaattttgtatggtaaaggatcaataaaatgattttttttaaga

SEQ ID NO: 1265 - protein, 465 aa, Homo sapiens
MRKGIQPALEQYLVTAGGGEGAAVVAAAAAASMDKRALLASPGFAAAAAAAAAPGAYIQILTTNTSTTSCSSSLQSGAVAAGPLLPSAPGAEQTAGSLLYTTPHGPSSRAGLLQQPPALGRGGSGGGGGPPAKRRLELGESGHQYLSDGLKTPKGKGRAALRSPDSPKTPKSPSEKTRYDTSLGLLTKKFIQLLSQSPDGVLDLNKAAEVLKVQKRRIYDITNVLEGIHLIKKKSKNNVQWMGCSLSEDGGMLAQCQGLSKEVTELSQEEKKLDELIQSCTLDLKLLTEDSENQRLAYVTYQDIRKISGLKDQTVIVVKAPPETRLEVPDSIESLQIHLASTQGPIEVYLCPEETETHSPMKTNNQDHNGNIPKPASKDLASTNSGHSDCSVSMGNLSPLASPANLLQQTEDQIPSNLEGPFVNLLPPLLQEDYLLSLGEEEGISDLFDAYDLEKLPLVEDFMCS

SEQ ID NO: 1266 - DNA, 331 bp, Homo sapiens
  misc_feature (37)..(37): n is a, c, g, or t
  misc_feature (54)..(55): n is a, c, g, or t
  misc_feature (83)..(83): n is a, c, g, or t
  misc_feature (96)..(96): n is a, c, g, or t
  misc_feature (150)..(150): n is a, c, g, or t
  misc_feature (234)..(234): n is a, c, g, or t
  misc_feature (245)..(245): n is a, c, g, or t
  misc_feature (276)..(276): n is a, c, g, or t
  misc_feature (306)..(306): n is a, c, g, or t
  misc_feature (326)..(326): n is a, c, g, or t
tactaaaaagtgttttatactagctttcttgattganatttccctataatactnntgaatttgggtgatggaaagtaatgganattgttaaaagtnctgctctcaagtctgagtctccttgccctgtgtgccaatgtttaaccatatttnctaatctaagccatattgcgaggatctcaaggatgatacttgtcaagagtttggggccttgagagcacagttttcaaaataatncttagtatttnctgactatagagtacatttgtcttgtaaagnatattttaaaatacagagaagtgtgaagtncaaatatctcagtgctactntttaa

SEQ ID NO: 1267 - DNA, 1473 bp, Homo sapiens
gatgaagtggcacagccactgaacctatcagctaaacccaagacctctgatggcaaatcacccacatcacccacctctccccatatgccagctctgagaataaacagtggggcaggccccctcaaagcctctgtcccagcagcgttagctagtccttcagccagagttagcacaataggttacttaaatgaccatgatgctgtcaccaaggcaatccaagaagctcggcaaatgaaggagcaactccgacgggaacaacaggtgcttgatgggaaggtggctgttgtgaatagtctgggtctcaataactgccgaacagaaaaggaaaaaacaacactggagagtctgactcagcaactggcagttaaacagaatcaagaaggaaaatttagccatgcaatgatggatttcaatctgagtggagattctgatggaagtgctggagtctcagagtcaagaatttatagggaatcccgagggcgtggtagcaatgaaccccacataaagcgtccaatgaatgccttcatggtgtgggctaaagatgaacggagaaagatccttcaagcctttcctgacatgcacaactccaacatcagcaagatattgggatctcgctggaaagctatgacaaacctagagaaacagccatattatgaggagcaagcccgtctcagcaagcagcacctggagaagtaccctgactataagtacaagcccaggccaaagcgcacctgcctggtggatggcaaaaagctgcgcattggtgaatacaaggcaatcatgcgcaacaggcggcaggaaatgcggcagtacttcaatgttgggcaacaagcacagatccccattgccactgctggtgttgtgtaccctggagccatcgccatggctgggatgccctcccctcacctgccctcggagcactcaagcgtgtctagcagcccagagcctgggatgcctgttatccagagcacttacggtgtgaaaggagaggagccacatatcaaagaagagatacaggccgaggacatcaatggagaaatttatgatgagtacgacgaggaagaggatgatccagatgtagattatgggagtgacagtgaaaaccatattgcaggacaagccaactgataagggtcaaaagattgttgtgaccttaggacttaaagaagccctaactggttcatccttaccagtggccaagcacattaactttctcatacactgactgttactttaactgttagtcttaaatagttgggacatcagctgactaatagacctcagcctcaaaaggcttggaaagaaaaaacaaatacaacaagcaaacaacaatatcaacaacaagagattgaaataagctatgggtaaaataatgccagtaattcagctgctacatccaagcactgaagtcttacccgtcaactttttttttttttaaataaactttatggctgtttgttctacaaaaaaaaa

SEQ ID NO: 1268 - protein, 347 aa, Homo sapiens
MPALRINSGAGPLKASVPAALASPSARVSTIGYLNDHDAVTKAIQEARQMKEQLRREQQVLDGKVAVVNSLGLNNCRTEKEKTTLESLTQQLAVKQNQEGKFSHAMMDFNLSGDSDGSAGVSESRIYRESRGRGSNEPHIKRPMNAFMVWAKDERRKILQAFPDMHNSNISKILGSRWKAMTNLEKQPYYEEQARLSKQHLEKYPDYKYKPRPKRTCLVDGKKLRIGEYKAIMRNRRQEMRQYFNVGQQAQIPIATAGVVYPGAIAMAGMPSPHLPSEHSSVSSSPEPGMPVIQSTYGVKGEEPHIKEEIQAEDINGEIYDEYDEEEDDPDVDYGSDSENHIAGQAN

SEQ ID NO: 1269 - DNA, 806 bp, Homo sapiens
agcagggggcgctgtgtgtaccgagaatacgagaatacctcgtgggccctgaccttctctctgagagccgggcagaggctccggagccatgcaggccgaaggccggggcacagggggttcgacgggcgatgctgatggcccaggaggccctggcattcctgatggcccagggggcaatgctggcggcccaggagaggcgggtgccacgggcggcagaggtccccggggcgcaggggcagcaagggcctcggggccgggaggaggcgccccgcggggtccgcatggcggcgcggcttcagggctgaatggatgctgcagatgcggggccagggggccggagagccgcctgcttgagttctacctcgccatgcctttcgcgacacccatggaagcagagctggcccgcaggagcctggcccaggatgccccaccgcttcccgtgccaggggtgcttctgaaggagttcactgtgtccggcaacatactgactatccgactgactgctgcagaccaccgccaactgcagctctccatcagctcctgtctccagcagctttccctgttgatgtggatcacgcagtgctttctgcccgtgtttttggctcagcctccctcagggcagaggcgctaagcccagcctggcgccccttcctaggtcatgcctcctcccctagggaatggtcccagcacgagtggccagttcattgtgggggcctgattgtttgtcgctggaggaggacggcttacatgtttgtttctgtagaaaataaaactgagctacgaaaaaaaaaaaaaaaaaaaaaaaa

SEQ ID NO: 1270 - protein, 180 aa, Homo sapiens
MQAEGRGTGGSTGDADGPGGPGIPDGPGGNAGGPGEAGATGGRGPRGAGAARASGPGGGAPRGPHGGAASGLNGCCRCGARGPESRLLEFYLAMPFATPMEAELARRSLAQDAPPLPVPGVLLKEFTVSGNILTIRLTAADHRQLQLSISSCLQQLSLLMWITQCFLPVFLAQPPSGQRR

SEQ ID NO: 1271 - DNA, 625 bp, Homo sapiens
ttgaatttaggtgacactatagaagagctatgacgtcgcatgcacgcgtacgtaagcttggatcctctagagcggccgcctactactactaaattcgcggccgcgtcgacttttttttttttttttttacagcttcctctttgccccttcattgccctcaaaaagaggcccatctgcaggactcttatgcctcatcctatcttagctcaaaggtggaaatctgcacacagcctagaagggataccagatcttagtactgacaggcctcttcccagggttggggttgttccttctgcctgaaatcacaagcttcctggggcggagctcccgcctaagtgcaggcactgagggccgcctacgtgagcctcacggtcactcaccgggtgcgttatctgaaggactggaaggacatcacacccaattatttccccaaataattaccaaggactccaacattttgctactaaaaatgcattcctttgatctgtccacccaatgtcaagctctttcaaaagtaaatgctcctgggagaggcattcatgctatagtgttatgacttacaattcagactatagccttaatgacttattagggctatgtttttctcattccccttgaaaggcga

SEQ ID NO: 1272 - DNA, 381 bp, Homo sapiens
  misc_feature (311)..(311): n is a, c, g, or t
  misc_feature (348)..(348): n is a, c, g, or t
actcaggctatggacaaggacagccccaaggttgggaagacctggccttagtcgtcctcagcctagggcagggcagtgaagaaagctctccccgctcctgctgtaatgacccagagtagcctccccaggccggcatcttatgtgtgtcttccaccatcctcatggtgggcacttttctaggcctgtctcccagcattgtgcaaggctcggaagagaaccaggaagtgaaactgggtgaaaacagaaagctcaatggatgggctaggttcccagatcattagggcagagtttgcacgtcctctggttcactnggaatccacccagcccacgaattcatctccctctttnaaggatttatttctactggggttttgggaacaa

SEQ ID NO: 1273 - DNA, 404 bp, Homo sapiens
ctcataagggccaagacagaaaagcatgaaaggactcatgaaatcataccaattaatgtgaataataactacgagcacagacacacaagccacctgggacatgcagtactcccaagtaatgccaggggccccattttgagcagatcaaccagcactggaagtgcagccagctctgggagcaacagcagtgcctcttctgaacagggactgttaggaaggtcaccaccaaccaggccagtccctggtcataggtctgaaagggcaatccggacccagcccaagcaactgattgtggatgacttgaagggttccttgaaagaggacctgacacagcacaagttcatttgtgaacagtgtgggaagtgcaagtgtggagaatgcactgctcccaggaccctaccatc

SEQ ID NO: 1274 - DNA, 350 bp, Homo sapiens
ttttttttaacttataagataggcctttcctgatgccaaataagggcaatgatcagcttccccattcctggagccaggacctgccacatcatttgcagtgcaaaatgcaaatgagagccccttgttcaaagagcaagataaaagtgccatcctaggcgctcaaaatacaaaggttcctcctttcttctatggtctgtcaattggtcaaggcattttaatttgctacttaatgtcatgcttgctgggcactggaatactcatgcggtgagtgtaggatcccacgggtatctggaggctcgccctgcaatttagcatgtgcaaggagctccccacctctgccagcccaggat

SEQ ID NO: 1275 - DNA, 457 bp, Homo sapiens
atgcaacacactcacaacactgacaataatttaattaataaagagtccaccttttaatattcgtgtttaacacatctatgggtttggtagaaagcaaattcatgaccttgaaatagtagtaggtgataacatgtgacttgccagtaaattctcatatcttcactgtcacttaggagataatcgaagaatatgaacatatttaattcctaaagttcctgcaataacctacatacaccttaacattcagctttattaaacaggctttttgaaatagcatgtgaagaagttatcgctgtgcctcattttgaatggtattttctgcttcattttgattttcaacagcaaaaggatatggtgctcttcctaaaagaaactgttcccatttgggaatatattcttctactgatgcccagtaacgagtctcaagagaaaccacctcaggccgtggaagtgggtg

SEQ ID NO: 1276 - DNA, 578 bp, Homo sapiens
  misc_feature (502)..(502): n is a, c, g, or t
caaggattacgaaattcttctgtcttagttacaaacaaaatgcagctatgaagcactgggaagtaaatgcaaaatatagaaagaatcttcatgattctcccaaactgtaagcacagctcacaaagtctcattgctttagaatgttttctggatgaacaagttaccagctgcaaaccgacttcagaagtgaggaaaatgttttctcatgtttcatgtagctgtcaaattttcaaaaatcctccatccttcaatcacccagtggggaaaatgtgttataaaacactgccccctggagtattctgggaggaatgtcttaaaaaaaaaaaaaaaacagcaaggagaaagtactttcaaattctttactaaccactaacagaatttctaagaagcaaaagaaaaccacagaaaggaaatgtacatgaataaagttgagcaggatgtgtacaactttaaactgtattgtattcatgttgctaaacaatattggccttctcgatgattntattcatgttgctccaaagttaaccctgtagaactaagtaggtgaagagatattttgtataagtgccacagaagag

SEQ ID NO: 1277 - DNA, 1164 bp, Homo sapiens
gtcgccgctgccgggttgccagcggagtcgcgcgtcgggagctacgtagggcagagaagtcatggcttctccgtccaaaggcaatgacttgttttcgcccgacgaggagggcccagcagtggtggccggaccaggcccggggcctgggggcgccgagggggccgcggaggagcgccgcgtcaaggtctccagcctgcccttcagcgtggaggcgctcatgtccgacaagaagccgcccaaggaggcgtccccgctgccggccgaaagcgcctcggccggggccaccctgcggccactgctgctgtcggggcacggcgctcgggaagcgcacagccccgggccgctggtgaagcccttcgagaccgcctcggtcaagtcggaaaattcagaagatggagcggcgtggatgcaggaacccggccgatattcgccgccgccaagacatacgagccctaccacctgcaccctgaggaaacacaagaccaatcggaagccgcgcacgccctttaccacatcccagctcctcgccctggagcgcaagttccgtcagaaacagtacctctccattgcagagcgtgcagagttctccagctctctgaacctcacagagacccaggtcaaaatctggttccagaaccgaagggccaaggcgaaaagactgcaggaggcagaactggaaaagctgaaaatggctgcaaaacctatgctgccctccagcttcagtctccctttccccatcagctcgcccctgcaggcagcgtccatatatggagcatcctacccgttccatagacctgtgcttcccatcccgcctgtgggactctatgccacgccagtgggatatggcatgtaccacctgtcctaaggaagaccagatcaatagactccatgatggatgcttgtttcaaagggtttcctctccctctccacgaaggcagtaccagccagtactcctgctctgctaaccctgcgtgcaccaccctaagcggctaggctgacagggccacacgacatagctgaaatttcgttctgtaggcggaggcaccaagccctgttttcttggtgtaatcttccagatgcccccttttcctttcacaaagattggctctgatggtttttatgtataaatatatatatataataaaatataatacatttttatac

SEQ ID NO: 1278 - protein, 267 aa, Homo sapiens
MASPSKGNDLFSPDEEGPAVVAGPGPGPGGAEGAAEERRVKVSSLPFSVEALMSDKKPPKEASPLPAESASAGATLRPLLLSGHGAREAHSPGPLVKPFETASVKSENSEDGAAWMQEPGRYSPPPRHTSPTTCTLRKHKTNRKPRTPFTTSQLLALERKFRQKQYLSIAERAEFSSSLNLTETQVKIWFQNRRAKAKRLQEAELEKLKMAAKPMLPSSFSLPFPISSPLQAASIYGASYPFHRPVLPIPPVGLYATPVGYGMYHLS

SEQ ID NO: 1279 - DNA, 1950 bp, Homo sapiens
ggaattcggcacgaggagagagagaactagtctcgcgtttttttttcttccctctagtgggcggggcagaggagttagccaagatgtgactttgaaaccctcagcgtctcagtgcccttttgttctaaacaaagaattttgtaattggttctaccaaagaaggatataatgaagtcactatgggaaaagatggggaggagagttgtaggattctacattaattctcttgtgcccttagcccactacttcagaatttcctgaagaaagcaagcctgaattggttttttaaattgctttaaaaattttttttaactgggttaatgcttgctgaattggaagtgaatgtccattcctttgcctcttttgcagatatacacttcagataactacaccgaggaaatgggctcaggggactatgactccatgaaggaaccctgtttccgtgaagaaaatgctaatttcaataaaatcttcctgcccaccatctactccatcatcttcttaactggcattgtgggcaatggattggtcatcctggtcatgggttaccagaagaaactgagaagcatgacggacaagtacaggctgcacctgtcagtggccgacctcctctttgtcatcacgcttcccttctgggcagttgatgccgtggcaaactggtactttgggaacttcctatgcaaggcagtccatgtcatctacacagtcaacctctacagcagtgtcctcatcctggccttcatcagtctggaccgctacctggccatcgtccacgccaccaacagtcagaggccaaggaagctgttggctgaaaaggtggtctatgttggcgtctggatccctgccctcctgctgactattcccgacttcatctttgccaacgtcagtgaggcagatgacagatatatctgtgaccgcttctaccccaatgacttgtgggtggttgtgttccagtttcagcacatcatggttggccttatcctgcctggtattgtcatcctgtcctgctattgcattatcatctccaagctgtcacactccaagggccaccagaagcgcaaggccctcaagaccacagtcatcctcatcctggctttcttcgcctgttggctgccttactacattgggatcagcatcgactccttcatcctcctggaaatcatcaagcaagggtgtgagtttgagaacactgtgcacaagtggatttccatcaccgaggccctagctttcttccactgttgtctgaaccccatcctctatgctttccttggagccaaatttaaaacctctgcccagcacgcactcacctctgtgagcagagggtccagcctcaagatcctctccaaaggaaagcgaggtggacattcatctgtttccactgagtctgagtcttcaagttttcactccagctaacacagatgtaaaagacttttttttatacgataaataacttttttttaagttacacatttttcagatataaaagactgaccaatattgtacagtttttattgcttgttggatttttgtcttgtgtttctttagtttttgtgaagtttaattgacttatttatataaattttttttgtttcatattgatgtgtgtctaggcaggacctgtggccaagttcttagttgctgtatgtctcgtggtaggactgtagaaaagggaactgaacattccagagcgtgtagtgaatcacgtaaagctagaaatgatccccagctgtttatgcatagataatctctccattcccgtggaacgtttttcctgttcttaagacgtgattttgctgtagaagatggcacttataaccaaagcccaaagtggtatagaaatgctggtttttcagttttcaggagtgggttgatttcagcacctacagtgtacagtcttgtattaagttgttaataaaagtacatgttaaacttaaaaaaaaaaaaaaaaaa

SEQ ID NO: 1280 - protein, 356 aa, Homo sapiens
MSIPLPLLQIYTSDNYTEEMGSGDYDSMKEPCFREENANFNKIFLPTIYSIIFLTGIVGNGLVILVMGYQKKLRSMTDKYRLHLSVADLLFVITLPFWAVDAVANWYFGNFLCKAVHVIYTVNLYSSVLILAFISLDRYLAIVHATNSQRPRKLLAEKVVYVGVWIPALLLTIPDFIFANVSEADDRYICDRFYPNDLWVVVFQFQHIMVGLILPGIVILSCYCIIISKLSHSKGHQKRKALKTTVILILAFFACWLPYYIGISIDSFILLEIIKQGCEFENTVHKWISITEALAFFHCCLNPILYAFLGAKFKTSAQHALTSVSRGSSLKILSKGKRGGHSSVSTESESSSFHSS

SEQ ID NO: 1281 - DNA, 711 bp, Homo sapiens
agatggctaggacaggccggggtgttactcggacgaggctcactactgatccaattcctcctcaggtaataaaggctcaggcaccggcagttctactctggagcccaccagcctctcagagcctccggtgactggcctgtgtctccccctggatggacatgtggacggcgctgctcatcctgcaaggccttgttgctaccctccctggctgatggtgccacccctgccctgcgctttgtagccgtgggtgactggggaggggtccccaatgccccattccacacggaccgggaaatggccaatgccaaggagatcgctcggactgtgcagatcctgggtgcagacttcatcctgtctctaggggacaatttaatacttcactggtgtgcaagacatcaatgacaagaggttccaggagacctttgaggacgtattctctgaccgctcccttcgcaaagtgccctggtacgtgctagccggaaaccatgaccaccttggccaatgtctctgcccagattgcatactctaagatctccaagcgctggaacttccccagccctttctaccgcctgcacttcaagatccacagagcaatgtgtctgtggacattttatgctggacacagtgacactatgtgggcaactcagatgacttcttcagcagcagctgagagcccgagacgtgagctggccgcacacaggctgtctggtc

SEQ ID NO: 1282 - DNA, 704 bp, Homo sapiens
aaaacacacactcataaacacatctgctttggcaaaggagcacatcagaagggctggcttgtgcgcgctcttgctctctgtgtatgtgtattatgttttatgttactgtaaaagatgtaaagagaggcacgtggttaagctctcggggtgtggactccaccagtctcacttcagttccttttgcatgaagagctcagaatcaaaagaggaaaccaacccctaagatgagctttccatgtaaatttgtagccagcttccttctgattttcaatgtttcttccaaaggtaagcataagagtcaaagaagtcccaacccagctttccctgaaagtgactctcagtaactcttttgctttttataggtgcagtctccaaagagattacgaatgccttggaaacctggggtgccttgggtcaggacatcaacttggacattcctagttttcaaatgagtgatgatattgacgatataaaatgggaaaaaacttcagacaagaaaaagattgcacaattcagaaaagagaaagagactttcaaggaaaaagatacatataagctatttaaaaatggaactctgaaaattaagcatctgaagaccgatgatcaggatatctacaaggtatcaatatatgatacaaaaggaaaaaatgtgttggaaaaaatatttgatttgaagattcaaggtaagtgttcattcccttaat

SEQ ID NO: 1283 - protein, 351 aa, Homo sapiens
MSFPCKFVASFLLIFNVSSKGAVSKEITNALETWGALGQDINLDIPSFQMSDDIDDIKWEKTSDKKKIAQFRKEKETFKEKDTYKLFKNGTLKIKHLKTDDQDIYKVSIYDTKGKNVLEKIFDLKIQERVSKPKISWTCINTTLTCEVMNGTDPELNLYQDGKHLKLSQRVITHKWTTSLSAKFKCTAGNKVSKESSVEPVSCPEKGLDIYLIIGICGGGSLLMVFVALLVFYITKRKKQRSRRNDEELETRAHRVATEERGRKPQQIPASTPQNPATSQHPPPPPGHRSQAPSHRPPPPGHRVQHQPQKRPPAPSGTQVHQQKGPPLPRPRVQPKPPHGAAENSLSPSSN

SEQ ID NO: 1284 - DNA, 438 bp, Homo sapiens
  misc_feature (341)..(341): n is a, c, g, or t
tttttttttccagaaaagcctccatttgaggctgtgtgataaatgatctctgggttcagctctggcctcggaatcccagctacaaatgccagcggggaaccacctggagcaggagggtttccaagtggcctttatcgactctgccaatcatcgggccagcccccatgggagcctcttgctttcagccctagagagaggagggggttggggagtgggcagtgtgggcaggagtgcagtggggagggggaggcgggtgcatgaaggagtgaacaggctgtggaagcacaggcctcctggatgccctgtgtcctgggggctcttggttctactgagctcacctntacctgcccctcccgacaagtcccccaccacagagcagaaatgactgggatcaaacccctggccagtcacagctggcgagtctctgagcaagcacct

SEQ ID NO: 1285 - DNA, 3048 bp, Homo sapiens
cgccggcggggaagatgaccgcgggcgccggcgtgctccttctgctgctctcgctctccggcgcgctccgggcccataatgaggatcttacaactagagagacctgcaaggctgggttctctgaagatgattacacggcattaatctcccaaaatattctagaaggggaaaagctacttcaagtcaagttcagcagctgtgtggggaccaaggggacacaatatgagaccaacagcatggacttcaaagttggggcagatgggacagtcttcgccacccgggagctgcaggtcccctccgagcaggtggcgttcacggtgactgcatgggacagccagacagcagagaaatgggacgccgtggtgcggttgctggtggcccagacctcgtccccgcactctggacacaagccgcagaaaggaaagaaggtcgtggctctggacccctctccgcctccgaaggacaccctgctgccgtggccccagcaccagaacgccaacgggctgaggcggcgcaaacgggactgggtcatcccacccatcaacgtgcccgagaactcgcgcgggcccttcccgcagcagctcgtgaggatccggtccgacaaagacaatgacatccccatccggtacagcatcacgggagtgggtgccgaccagccccccatggaggtcttcagcattaactccatgtccggccggatgtacgtcacaaggcccatggaccgggaggagcacgcctcttaccacctccgagcccacgctgtggacatgaatggcaacaaggtggagaaccccatcgacctgtacatctacgtcatcgacatgaatgacaaccaccctgagttcatcaaccaggtctacaactgctccgtggacgagggctccaagccaggcacctacgtgatgaccatcacggccaacgatgctgacgacagcaccacggccaacgggatggtgcggtaccggatcgtgacccagaccccacagagcccgtcccagaatatgttcaccatcaacagcgagactggagatatcgtcacagtggcggctggctgggaccgagagaaagttcagcagtacacagtcatcgttcaggccacagatatggaaggaaatctcaactatggcctctcaaacacagccacagccatcatcacggtgacagatgtgaatgacaacccgtcagaatttaccgccagcacgtttgcaggggaggtccccgaaaacagcgtggagaccgtggtcgcaaacctcacggtgatggaccgagatcagccccactctccaaactggaatgccgtttaccgcatcatcagtggggatccatccgggcacttcagcgtccgcacagaccccgtaaccaacgagggcatggtcaccgtggtgaaggcagtcgactacgagctcaacagagctttcatgctgacagtgatggtgtccaaccaggcgcccctggccagcggaatccagatgtccttccagtccacggcaggggtgaccatctccatcatggacatcaacgaggctccctacttcccctcaaaccacaagctgatccgcctggaggagggcgtgccccccggcaccgtgctgaccacgttttcagctgtggaccctgaccggttcatgcagcaggctgtgagatactcaaagctgtcagacccagcgagctggctgcacatcaatgccaccaacggccagatcaccacggtggcagtgctggaccgtgagtccctctacaccaaaaacaacgtctacgaggccaccttcctggcagctgacaatgggatacccccggccagcggcaccgggaccctccagatctatctcattgacatcaacgacaacgcccctgagctgctgcccaaggaggcgcagatctgcgagaggcccaacctgaacgccatcaacatcacggcggccgacgctgacgtgcaccccaacatcggcccctacgtcttcgagctgccctttgtcccggcggccgtgcggaagaactggaccatcacccgcctgaacggtgactatgcccaactcagcttgcgcatcctgtacctggaggccgggatgtatgacgtccccatcatcgtcacagactctggaaaccctcccctgtccaacacgtccatcatcaaagtcaaggtgtgcccatgtgatgacaacggggactgcaccaccattggcgcagtggcagcggctggtctgggcaccggtgccatcgtggccatcctcatctgcatcctcatcctgctgaccatggtcctgctgtttgtcatgtggatgaagcggcgagagaaggagcgccacacgaagcagctgctcattgaccccgaggacgacgtccgcgaaaagatcctcaagtatgacgaggaaggcggtggcgaggaggaccaggactacgacctcagccagctgcagcagccggaagccatggggcacgtgccaagcaaagcccctggcgtgcgtcgcgtggatgagcggccggtgggccctgagccccagtacccgatcaggcccatggtgccgcacccaggcgacatcggtgacttcatcaatgagggactccgcgctgctgacaacgaccccacggcacccccctatgactccctgctggtcttcgactacgaggggagcggctccaccgcaggctccgtcagctccctgaactcatccagttccggggaccaagactacgattacctcaacgactggggccccagattcaagaagctggcggacatgtatggaggtggtgaagaggattgactgacctcgcatcttcggaccgaagtgagagccgtgctcggacgccggaggagcaggactgagcagaggcggccggtcttcccgactccctgcggctgtgtccttagtgctgttaggaggccccccaatccccacgttgagctgtctagcatgagcacccacccccacagcgccctgcacccggccgctgcccagcaccgcgctggctggcactgaaggacagcaagaggcactctgtcttcacttgaatttcctagaacagaagcactgtttttaaaaaaag

SEQ ID NO: 1286 - protein, 916 aa, Homo sapiens [sequence omitted]

SEQ ID NO: 1287 - DNA, 185 bp, Homo sapiens
ttttttttttttttttttccaattttaacatagaactttattgaaaacacagactcaaatagagaaccatatatttaaacaacgaatagcagggtagcttacttaggtgacacagttcattgaaaacttaatactgaaaaataccgcaatctggacagcaagacaaatatcaacaaatgtgtttt

SEQ ID NO: 1288 - DNA, 585 bp, Homo sapiens
ttttttttcctacaaatcacagttttcctcacagtgttagacttttaggtcactctgatgtagcagtaccttacaggatgaggggccactgctcgttttttccatttgacctttacagtccacatggtccagttagttgaagccacaaaataaagaccagagacagcaaaattattgctaatgtgcaactatattagtagaatgcaattaactgggctaactaatgtgtatgttaatgtctttttttttttcaaaaccaacatcatctaacaacatattcttttagtttttccataaaacctgcattgagaatgatatcatagccccaggcaggcatttaccagactgaatgttttgctgatctgaacactacctgtattccaattttttggctaatgcatggttttgtatttcaatatgttctcatacattaaataaatgaaacacaattatacattatagagtttatatgcatcatgatgatataatttgagaaattatctctatagattatgctaacaaaggattcttaggaagatttttcaatgtactagccagttaagttgatctatctgtttgataacc

SEQ ID NO: 1289 - DNA, 749 bp, Homo sapiens
ttaggctaggtacgaggcctgggtggtactagatggaagcgttttgcggtcgcggtccggactttgggcggggggtccggccccaggacagttttaccgcattccgtccactcccgattccttcatggatccggcgtctgcactttacagaggtccaatcacgcggacccagaaccccatggtgaccgggacctcagtcctcggcgttaagttcgagggcggagtggtgattgccgcagacatgctgggatcctacggctccttggctcgtttccgcaacatctctcgcattatgcgagtcaacaacagtaccatgctgggtgcctctggcgactacgctgatttccagtatttgaagcaagttctcggccagatggtgattgatgaggagcttctgggagatggacacagctatagtcctagagctattcattcatggctgaccaggccatgtacagccggcgctcgaagatgaaccctttgtggaacaccatggtcatcggaggctatgctgatggagagagcttcctcggttatgtggacatgcttggtgtagcctatgaagccccttcgctggccactggttatggtgcatacttggctcagcctctgctgcgagaagttctggagaagcagccagtgctaagccagaccgaggccgcgacttagtagaacgctgcatgcgagtgctgtactacgaggatgccgtcttacaccggtttcaaccgcattggcccggaaaggtggga

SEQ ID NO: 1290 - DNA, 211 bp, Homo sapiens
  misc_feature (137)..(137): n is a, c, g, or t
  misc_feature (148)..(148): n is a, c, g, or t
ctgacttcacatcaaaactcctatactgacctgagacagaggcagcagtgatacccacctgagagatcctgtgtttgaacaactgcttcccaaaacggaaagtatttcaagcctaaacctttgggtgaaaagaactnttgaagtcatnattgcttcacagtttctctcagctctcactttggtgcttctcattaaagagagtggagcctgg

SEQ ID NO: 1291 - DNA, 202 bp, Homo sapiens
  misc_feature (89)..(89): n is a, c, g, or t
  misc_feature (123)..(123): n is a, c, g, or t
  misc_feature (189)..(189): n is a, c, g, or t
  misc_feature (199)..(199): n is a, c, g, or t
actcagaagtgcctagctgccactccatttatatgaggcaagacggcttcctggctcatcccagcagaacagaaggctgtatgtttganaagggccccaggcagttttatgatgacacctgtnttgtcccagaaaacttcgatggagacataaaaacaagagcccggactgtatcgggaaggacccacntaccaaaggngag

SEQ ID NO: 1292 - DNA, 440 bp, Homo sapiens
  misc_feature (403)..(403): n is a, c, g, or t
tttttttttttctgtttcaataaaactttattcacaaaaacaggtggcagggtagatttggtctctgtactgtagttcactgacccctgatctaaaagattacatactttgaaaacagcaatgccaaaccttgaatccaggtccgatattttccagcaatcgtgatgcttctctgatcaactgaatgaaacagttataaatgtactggctaaatttagctttatgcacttgttttgtcccctattacagtataaacttttggtgaatagggattttcaaattaattaaagcacttatttttatacccaatacacacaaatacagaactttactatagcagatttttgaccccaatttagtgtgctatctgaataaaaggcttagtaactaaaaaaagtgctgncttagatttctgaactatttttttttttttttttgga

SEQ ID NO: 1293 - DNA, 2341 bp, Homo sapiens
ttttatagtgtcagtcagtcaccccacagtctcctctctcttcttttctactgtgctatcctagaatcaaggatttcagcaacaatgcctctgttcaaactcccagctgaagagaaacaaattgatgatgcaatgcgcaactttgctgaaaaagtgtttgcctctgaagtcaaagatgaaggaggtcgtcaggagatttccccctttgatgtggatgagatctgtccgatttctcatcatgagatgcaagcacacatattccatctggagactctgtccacctccacagaagccaggagaaaaaagcgtttccaaggacggaagactgttaatttgtccattccactaagtgaaacatcttccaccaaactgtcccacattgatgaatacatttcctcatctccaacctaccagaccgtgcctgattttcagagagtgcagattactggtgactatgcctctggggttacagttgaagattttgaaattgtttgcaaaggtctgtatcgggcactatgcatacgtgagaaatacatgcagaagtcgtttcagaggttccctaaaaccccttccaaatacttgcggaacattgatggtgaggcttgggtagcaaatgagagcttctatccagtctttactcctcctgtgaagaagggagaggaccccttccgaacagacaaccttcctgaaaacctgggctatcacctcaaaatgaaggacggtgtagtttacgtctatcctaatgaagcagcagtcagcaaagatgagcctaagccacttccttacccaaatctggacaccttcttagacgatatgaattttttacttgctttaattgctcaaggacctgttaagacctatacccaccggcgcctgaagttcctctcctccaagttccaggtccatcagatgcttaacgagatggacgagttaaaggagctgaaaaacaacccccaccgagatttttataactgcaggaaggtggacacccatatccatgcagccgcttgcatgaaccagaaacatctgctgcgttttattaagaaatcttaccaaattgatgctgacagagtggtctatagcaccaaagagaagaatctgaccctaaaggaactttttgctaaattaaaaatgcatccttatgacctgactgttgattctctggatgttcatgctggacgccagaccttccagcgttttgataagttcaatgacaaatataatcctgtaggagcaagtgagctacgggacctctacttgaagacagacaattacattaatggggaatattttgccactatcatcaaggaggtaggtgcggacctggtggaggccaagtaccagcatgctgagccccgcctgtccatctatggccgcagtcctgatgagtggagcaaactctcctcctggttcgtctgcaatcgcatccactgccccaacatgacatggatgatccaggttcccaggatctatgatgtgttccgttccaagaatttccttccacattttggaaaaatgctggagaatattttcatgccagtgtttgaggccaccatcaacccccaggctgacccagaactcagtgtcttcctcaagcatatcactggctttgacagtgtggatgatgagtccaaacacagtggccacatgttctcctccaagagtcccaagccccaggagtggacattggaaaagaatccatcttacacttactatgcctactacatgtatgcaaacatcatggtgctcaacagcctgagaaaggaacgaggcatgaatacgtttctgttccgacctcactgtggagaagctggagccctcacccatctcatgacagcattcatgatagcagatgatatctctcatggcctaaatttaaaaaagagtcccgtgctacagtacttgtttttcttagcccaaattcccatcgccatgtcaccactaagtaacaatagcctatttctagagtatgccaaaaatccttttttggatttccttcagaaagggctaatgatctcactgtctacagatgacccaatgcaattccactttaccaaggagcccctaatggaagaatatgctattgctgcacaagtcttcaagctgagcacctgtgatatgtgcgaagtggcaaggaacagtgtcttgcagtgtggaatttctcatgaggagaaagtaaagtttctgggcgacaattaccttgaggaaggccctgctggaaatgatatccggaggacaaatgtagcccaaatccgcatggcctatcgctatgaaacctggtgttatgaactcaatttaattgctgagggtcttaaatcaacagaataaaaaaaagtaaacc

SEQ ID NO: 1294 - protein, 747 aa, Homo sapiens
MPLFKLPAEEKQIDDAMRNFAEKVFASEVKDEGGRQEISPFDVDEICPISHHEMQAHIFHLETLSTSTEARRKKRFQGRKTVNLSIPLSETSSTKLSHIDEYISSSPTYQTVPDFQRVQITGDYASGVTVEDFEIVCKGLYRALCIREKYMQKSFQRFPKTPSKYLRNIDGEAWVANESFYPVFTPPVKKGEDPFRTDNLPENLGYHLKMKDGVVYVYPNEAAVSKDEPKPLPYPNLDTFLDDMNFLLALIAQGPVKTYTHRRLKFLSSKFQVHQMLNEMDELKELKNNPHRDFYNCRKVDTHIHAAACMNQKHLLRFIKKSYQIDADRVVYSTKEKNLTLKELFAKLKMHPYDLTVDSLDVHAGRQTFQRFDKFNDKYNPVGASELRDLYLKTDNYINGEYFATIIKEVGADLVEAKYQHAEPRLSIYGRSPDEWSKLSSWFVCNRIHCPNMTWMIQVPRIYDVFRSKNFLPHFGKMLENIFMPVFEATINPQADPELSVFLKHITGFDSVDDESKHSGHMFSSKSPKPQEWTLEKNPSYTYYAYYMYANIMVLNSLRKERGMNTFLFRPHCGEAGALTHLMTAFMIADDISHGLNLKKSPVLQYLFFLAQIPIAMSPLSNNSLFLEYAKNPFLDFLQKGLMISLSTDDPMQFHFTKEPLMEEYAIAAQVFKLSTCDMCEVARNSVLQCGISHEEKVKFLGDNYLEEGPAGNDIRRTNVAQIRMAYRYETWCYELNLIAEGLKSTE

SEQ ID NO: 1295 - DNA, 447 bp, Homo sapiens
tttttgttttttttttttttttttttttttaaaattttaaaaatttaaatttattaggatttattaacacaattacacagaataaagttcaggatttcattaatgatggtcaccaatatgtgcttctttgtggctttttaacccataattctcatgattcaaatttattcatattatagttgaatttcatacacagcttcacaatgtggatattacaggtccaccagtaaaattaatgaaaacatatctttcatgaaaggcacataaagaatctaaactaacacatttaaggaactttgataactttgaatttctttacattacaaagaaaaaaatcctccaaatgaaacagatatgaatatagtttatggttacacacacacacacacacacacacacacacacacacacacaaatatacttcaacccagtgacaacacgtaactt

SEQ ID NO: 1296 - DNA, 613 bp, Homo sapiens
tcaagtaaatcgcggatcatccgcctagacagatatcacagtcctagatgcccccaagtcacggggcactgactggcggatgttatgcacagaagcggcgtatggaccggtacctgaattactttgccaccgaagcgagccccacgggtgtgatcctggacctctgggaagctctgcagcaggacgatggggacctcaacagcctggcgagtgccttggaggagatgggcaagagtgagatgctggtggcggtggccaccgacgggtactgctgagcctcctgggacagcgggctggcagggactggccggaggctagtacaggaaggcctggggcagcctcctgatggggatgtgtggcctctgcttcctccccagttcacagccagagttgcatctcctcctcctcttccccaacccccagaccatgaccagccttagaaaatccatgtactctgtagtaagagggcccagagttccttctccaaccccgctctctctctcttggcctgagatctctgtgcaggaaccaagatggggctgaagcctctggaggcagttggtttggggcgggcaggaggagcgcctcctccacccaccaacctcagccggca

SEQ ID NO: 1297 - DNA, 2838 bp, Homo sapiens
gggcgcagagctgggccgagccgtcgccggcgccacgcgagtcccgcagccgccgcgcccgggcaatgggccgggggcactgagggccgccggggccgagcgcggaggggggaccgagccagtgccgtgccctcgggccgcgccaacatgccccgcggcttcctggtgaagcgcagcaagaagtccacgcccgtttcctaccgggtccgcggcggcgaggacggcgaccgcgcactgctgctctcgcccagctgcgggggcgcccgcgccgagcccccggcgccgagcccggtccccgggccgctgccgccgccgccgcccgcggagcgcgcccatgcagcgctcgccgccgcgcttgcctgcgcgcctgggccgcagccacccccgcagggcccgcgggccgcgcacttcggcaaccccgaggctgcgcaccccgcgccgctctacagtcccacgcggcccgtgagccgcgagcacgagaagcacaagtacttcgaacgcagcttcaacctgggctcgccggtctcggccgagtccttccccacgcccgccgcgctgctcggagggggcggcggcggcggcgcgagcggagctggcggaggcggcacctgcggcggcgacccgctgctcttcgcgcccgccgagctcaagatgggcacggcgttctcggctggcgccgaggcggcccgcggcccgggccccggccccccactgccccctgccgccgccctgcggcccccgggaaagcggcccccgccccctaccgccgcggagccgcccgccaaggcagtcaaggccccgggcgccaagaagcccaaggccatccgcaagctgcacttcgaggacgaggtgaccacgtcgcccgtgctggggctcaagatcaaggagggcccggtggaggcgccgcggggccgcgcggggggcgcggcgcggccgctgggcgagttcatctgccagctgtgcaaggaggagtacgccgacccgttcgcgctggcgcagcacaaatgctcgcgcatcgtgcgtgtggagtaccgctgtcccgagtgcgccaaggtcttcagctgcccggccaacctggcctcgcaccgccgctggcacaaaccgcggcccgcgcccgccgccgcccgcgcgccggagccagaagcagcagccagggctgaggcgcgggaggcacccggcggcggcagcgaccgggacacgccgagccccggcggcgtgtccgagtcgggctccgaggacgggctctacgagtgccatcactgcgccaagaagttccgccgccaggcctacctacgcaagcacctgctggcgcaccaccaggcgctgcaggccaagggcgcgccgctagcgcccccggccgaggacctactggccttgtaccccgggcccgacgagaaggcgccccaggaggcggccggcgacggcgagggggccggcgtgctgggcctgagtgcgtccgccgagtgccacctgtgcccagtgtgcggagagtcgttcgccagcaagggcgctcaggagcgccacctgcgcctgctgcacgccgcccaggtgttcccctgcaagtactgcccggccaccttctacagctcgcccggccttacgcggcacatcaacaagtgccacccatccgaaaacagacaggtgatcctcctgcaggtgcccgtgcgcccggcctgctagagcgcgccctccaccccggcccccgaactgtgccttcgcttggagacccacaaagagagtgcgccctgcacgccccgaacccgagtccgcgctgggggagcctcgcccccgcccccaccgggtgagagtgtcgtctccgcttctctcggtgtggcgtgacggtaaccccatactctccttttgactccttttggaacccccacttttacgttgtgtccctccgcctcccccatggcgcaacaggagtcagtctctttctgtacaagggagaaaagctgtacgcgtttgtctcgtggttggaagcctccccttggcggggagaagctttttttcttgctagtattcgctgtgttcatggtctagaaatgcggtctggtctcgcctcgcctaccaatctctgctctctatgtatgtagcgtacgggttgttttgggtgaatcttgaggaataaatgcctttatatttcacaggctgtaaattgaacttcccacacgattagctttattatggcttgtgaactgctggagtctggctttacctttttgtatgtgaacaaatcaaattgcttaaaaaagagttttctttagtatagccacaaatgccttgaactgttgtctgggattgttttgtggggggagggaagggagtgttccgaagatgctgtagtaactgcctcagtgtttcacgtaagactttttggtttgatcatctttgttgaggtaggactatcagttccctctaaatgtatatgttgatttatgagtaattgttatttattctttatttatttatattaattatgaagattatgatattatttgattgcagatttttttggcgcgctgccccctccccaccctgccactcttgacattccactgtgcgttttagaagagagcctttttctaaagggatctgcttaaagttttaacttttatacctatctgagtgaattacagacaacctatcatttattctgcttcgagggtccccagggcccttgtacaaccgacagctcttacttttaaatgcaatctcttttctacatacattattttcttaattgttagctatttatagaaagcttcaatagaactgtttcaactgtataactatttactattcaaataaaatattttcaaagtcaaaaaaaaaaaa

SEQ ID NO: 1298 - protein, 510 aa, Homo sapiens
MPRGFLVKRSKKSTPVSYRVRGGEDGDRALLLSPSCGGARAEPPAPSPVPGPLPPPPPAERAHAALAAALACAPGPQPPPQGPRAAHFGNPEAAHPAPLYSPTRPVSREHEKHKYFERSFNLGSPVSAESFPTPAALLGGGGGGGASGAGGGGTCGGDPLLFAPAELKMGTAFSAGAEAARGPGPGPPLPPAAALRPPGKRPPPPTAAEPPAKAVKAPGAKKPKAIRKLHFEDEVTTSPVLGLKIKEGPVEAPRGRAGGAARPLGEFICQLCKEEYADPFALAQHKCSRIVRVEYRCPECAKVFSCPANLASHRRWHKPRPAPAAARAPEPEAAARAEAREAPGGGSDRDTPSPGGVSESGSEDGLYECHHCAKKFRRQAYLRKHLLAHHQALQAKGAPLAPPAEDLLALYPGPDEKAPQEAAGDGEGAGVLGLSASAECHLCPVCGESFASKGAQERHLRLLHAAQVFPCKYCPATFYSSPGLTRHINKCHPSENRQVILLQVPVRPAC

SEQ ID NO: 1299 - DNA, 485 bp, Homo sapiens
tttttttttttttttttttaaataatttgcctgttgtttttaattgttgaggcagtaatacttggttcatgaaactgcaatatacagagaggggaaataaatagcttatatatatataatatatataatatagctggttttaaaatattcccttatcattggtgtactaggtcacgtgagtcacggaaggtcgatagcagcatcctccaaaactgcgagcaaggcagggtcaccatgattggacgaggcgtctgtcgtcgggaggtcgaggcgcggagaattcccaggggcaccccttccctgcgcggtgtctcggggcagcttgcagcggacaataaataaatgactgcaaaccaaagagcgatttttgttggagtttggggcaggaacagaggattgggaaagttagggggagtttgttggtgggcggagcactactttctctttgcttttctttttttttgctttttttttttttcctttca

SEQ ID NO: 1300 - DNA, 6314 bp, Homo sapiens
gtcggcgaggagggtccggccggagttgaaggattgaactttccggctcagtcgcggcggctgcctggtcctcagcagtgcagccccggcgcggagcagggagcctcggcccgcgcccggcgccctcgccctcgccctcgacccgcagccatggtgcccggggtgcccggcgcggtcctgaccctctgcctctggctggcggcctccagcggctgcctggcggccggccccggcgcggctgctgcgcggcggctggacgagtcgctgtctgccgggagcgtccagcgcgctccgtgcgcctccaggtgcctgagcctgcagatcactcgcatctccgccttcttccagcacttccagaacaatggttccctggtttggtgccagaatcacaagcaatgttctaagtgcctggagccctgcaaggaatcaggggacctgaggaaacaccagtgccaaagcttttgtgagcctctcttccccaagaagagctacgaatgcttgaccagctgtgagttcctcaaatacatcctgttggtgaagcagggggactgtccggctcctgagaaagccagtggatttgcggccgcctgtgttgaaagctgcgaagttgacaatgagtgctctggggtgaagaaatgttgttcgaatgggtgtggacacacctgtcaagtacccaagactctgtacaaaggtgtccccctgaagcccagaaaagagttacgatttacagaactgcagtctggacagctggaggttaagtggtcctcgaaattcaatatttctattgagcctgtgatctatgtggtacaaagaagatggaattatggaatccatcctagcgaagatgacgccactcactggcagacagtggcccagaccacagacgagcgagttcaactgactgacataagacccagccgatggtaccagtttcgagtggctgctgtgaatgtgcatggaactcgaggcttcactgcccccagcaaacacttccgttcttccaaagatccatctgccccaccagcaccggctaacctccggctggccaactccaccgtcaacagtgatgggagtgtgaccgtcactatagtttgggatctccccgaggagccggacatccctgtgcatcattacaaggtcttttggagctggatggtcagcagtaagtctcttgtcccaacaaagaagaagcggagaaagactacggatgggtttcaaaattctgtgatcctggagaaactccagccagactgtgactatgttgtggaattgcaagccataacgtactggggacagacacggctgaagagtgcaaaggtgtcccttcacttcacatcgacacatgcaaccaacaacaaagaacagcttgtgaaaactagaaaaggtggaattcaaacacaactcccttttcaaagacgacgacccactcgcccgctggaagtcggagctcccttctatcaggatggccaactgcaagttaaagtctactggaagaagacagaagatcccactgtcaaccgatatcatgtgcggtggtttcctgaagcgtgtgcccacaacagaacaaccggatcagaggcatcatctggcatgacccacgaaaattacataattcttcaagatctgtcattttcctgcaagtataaggtgactgtccaaccaatacggccaaaaagtcactccaaggcagaagctgttttcttcactactccaccatgctctgctcttaaggggaagagccacaagcctattggctgcctgggcgaagcaggtcatgttctttctaaggtgctagctaagcctgagaacctttctgcttcattcatcgtccaggatgtgaacatcaccggtcacttttcttggaagatggccaaggccaatctctatcagcccatgactgggtttcaagtgacttgggctgaggtcactacggaaagcagacagaacagcctacccaacagcattatttcacagtcccagattctgccttccgatcattatgtcctaacagtgcccaatctgagaccatctactctttaccgactggaagtgcaagtgctgaccccaggaggggaggggccggccaccatcaagacgttccggacgccggagctcccaccctcttcagcacacagatctcatcttaagcatcgtcatccacatcattacaagccttctccagaaagatactaaactgttcaaaaagattttgtgaaattgcacagatgtgtaagcttgttgaacttcggccacgagacatgcacacttccagaggcagtgggaactgctcagaggcccggactctcctatgtgactttagtgcaggaagaacttctgtcaatcatggacgcatctggagacaagtgagaaacagtagattggtgaagacagacaccagttccctacaagcatggagaaaatgaagaataggcctgtttaatgctaaattttgttttcatgtatggtgtcgctcatttctattgaattacaacagaactcagttttccctgaatttggagcaccaaactccgccccaaaaaggagagtaacaaatacacaattcacacataacactaagcgtaaatctaatcaataaaatatatttttgactaaattattgattcgatatgaaaaatcaactaagattacacagctttgtttttttgaatctttcctaagatcatttttatcctaggtgatttttaaatgaaaatgtgtaatctaaaatataccagcgaatttaaatctaaaaatgctcctactttaagtaccttgtgctgctctttatgcaaaggtaaatcaaagttccctctataaattatgatttacaaaagacacccaagccagaggaactcaatgaaataagctgctaatcagattttaccttggagaaatgaaaattatttcttggggatgccttttaatatttgatcctattatgtgagagattttcctgatatgttatcttatttatattttcccttattttcctcaatgcagataatagcttttggtgcacttttgtttcaccatctgaaaattcacaaaacttcttgcttcaaatgaaaaaatcccaactattgagcatgtttaaatctttgcagagatttgccttttcttaatcaaagaaaggtctttgtgtgctagaatattattggtaatgttttaaaaattcctttgattgatagagaaggacagttatttgcatttaattcacccatatgctttcaaatctagtatatcttactttttggaaatgttttatgctacaaattagtgccttgtagcatgaacttaagtcaaaacgtgttatcaatatagagtgttgcagtgtatattgtaacaacctaaaacgcagagaagtttaatttaatactgttttttttcttgaaggaatactcacatacatggtttgaaatgtgcatagatatgcatgtctatataattataaatgcatgtgtatatatatgcaaatatatgtacatatacatgtatatacacacagacacatgcatatacatgaatataccttgagcatgaatccctggagaaatcgttttcgtaggctcaccaatggtgagtaaagatacagctcttttaaaggtcataaggataatatattttccccatcaatgctgattctgagaaaagagcaatttatcaaaattaaacactgtaaaagaaaggtgtccatatgtctttacctacctaagtaaaacaggaagaaaatcagtaacattatccttaggttttgacaatggtacttgcttcttgttgttttattgtttcctgaattcatgcagatgcctggccattcctgggaagagtggataactcagaagtcactgtactccacagagcctcactgcagtgtctaaaggtagatgcaaattaaaatgcagggaaaataacttttctgatgttgatgcatgtctttgggaaacacatttataaacatggatacctgataatagatattgaaacccatttcctgtgtgttaaaatatttaaaaagtggatattccaggaatgttttgcagctttgtacaagtaacataaattggacacctcagaatgaaagttcatgttggttctgaatggttcactgcagctcctgtcacaagctgggatggatttatcacattgagttatgaaattacctggttctaagaatttttgagtggcaaaaatagaaaacaatcttcatttgaaaacatccctaagcttgaataaatggataccatagatagcttctcttttttattctggtgtcattaccagcatctgaatttcaagttcttaaaatttcaaaaattaaaatttttcattattagctatccatttatcttttacatgaacttgtcatgaacaaattcaaatgtttatgccagcaaatttttgtactgttgcatagttaaaaatgctgggagtctctgcatagatacaaaatattattaaattattacataaatttaattttataaaatttaatcatgcttcttttgtctggtaatagacattggacagatatttttagttcagatggtgattctgaagcttacatctcccttaaaaaaatctaaagcagctcttatgggcttctaattttaatataaataaataatttaaattttattggtgttattggaagaaaaatgctattaatgggctaataaaaaacatgtgtttctcttatggattttaataagctccagtattattcaaatgatcaaaaatatagttataattttttgaattttaaaaatgtgattgctctaataaagaataaaatctatgctttttaacaaacatagttttggtgcctaattctgtaatatgttttattgaaattagattcatttctctaatgtgagaaaaatatatccagtaatagtattgactgtttaaaaaattgagctcatcaaaaatattgtcatcaaatacaggtggttaatctgacatacattgcagttacatgcattatttttatttacaacatttgctccttaatgatgaatttatctgtgttaccctgtttttctacctggaactccatagaatgatgtttgcaaaccaacatgtgctcttttcagtcattcactgttttaatatgacatggtagagaagataaggtttatggcaggtaattttttgtaatgtgtattaaacgaagttcaaagattagaaatacatctgtgtcctgaaaaccttagatacatagccgactgtatacagaggttcatctcaacctcaacactattgacttttggggctggatagttctctgttgtgggggtttgtcttgtgcactgtaggtttttagtagcatccacactttctcctcaccagatgccagttgcaccctcccccaagttgagacaaccaaaaatgtctccagatattgccagctaccccttgagggatggtacctctggttgagaaccattgctagagaatgatctttactgaatttgccctttataagaaacccagtgaatttctagagcaagtcccaaaaactaagggacagctaagaagttattatggttgacttcaaaggcctaaactgtgttttttatgtccactaaacaacttgattaaaagacggaattttgactcgtgtctgtatcatacaagtacaaatactaattttgccctatgtatccgtaaatgtcatttgtgattttgacttatttatttaatgccctttcttatgccgtgggttttcaagtttactcatttctatggttgcaaataactctaaaacttattatataaactttcatattataggcagaacacaatggctaaatatctgttgcatgtactttaaagtttattataaaatataaacagatatataaagatgttgactcttacctgtgattttgcatggtcagactcggtgtcaggtacggagaggattctcatgactgtcttacctctactgaatattctagtgagttatatgatttacggagtgattaacagaggtctatataaagttacttttcccctttacttaattatattgtagtgtgcagataacaaaactgctaccttctcatccaagtggtctgtagaattcatgtcccttacagtggtcatttaaagtcaatatttatttatgtatgtaataaaaaaagttggatttttgtgtatgtctgtcacattatttagagagaagtaatcttgtaaaaatgttttgtaaaaaacaaaaaagtattgtaaatagtcttgatattctgtgactcattattttcatgttagagtttgtacatactggttcaataataaagtatccttaaaccaga

SEQ ID NO: 1301 - protein, 680 aa, Homo sapiens
MVPGVPGAVLTLCLWLAASSGCLAAGPGAAAARRLDESLSAGSVQRAPCASRCLSLQITRISAFFQHFQNNGSLVWCQNHKQCSKCLEPCKESGDLRKHQCQSFCEPLFPKKSYECLTSCEFLKYILLVKQGDCPAPEKASGFAAACVESCEVDNECSGVKKCCSNGCGHTCQVPKTLYKGVPLKPRKELRFTELQSGQLEVKWSSKFNISIEPVIYVVQRRWNYGIHPSEDDATHWQTVAQTTDERVQLTDIRPSRWYQFRVAAVNVHGTRGFTAPSKHFRSSKDPSAPPAPANLRLANSTVNSDGSVTVTIVWDLPEEPDIPVHHYKVFWSWMVSSKSLVPTKKKRRKTTDGFQNSVILEKLQPDCDYVVELQAITYWGQTRLKSAKVSLHFTSTHATNNKEQLVKTRKGGIQTQLPFQRRRPTRPLEVGAPFYQDGQLQVKVYWKKTEDPTVNRYHVRWFPEACAHNRTTGSEASSGMTHENYIILQDLSFSCKYKVTVQPIRPKSHSKAEAVFFTTPPCSALKGKSHKPIGCLGEAGHVLSKVLAKPENLSASFIVQDVNITGHFSWKMAKANLYQPMTGFQVTWAEVTTESRQNSLPNSIISQSQILPSDHYVLTVPNLRPSTLYRLEVQVLTPGGEGPATIKTFRTPELPPSSAHRSHLKHRHPHHYKPSPERY

SEQ ID NO: 1302 - DNA, 426 bp, Homo sapiens
  misc_feature (244)..(244): n is a, c, g, or t
  misc_feature (284)..(284): n is a, c, g, or t
  misc_feature (291)..(291): n is a, c, g, or t
  misc_feature (325)..(326): n is a, c, g, or t
ttttttttttttagtttttttctctttttattatttcaagttttcataaaaatccatatttattgaaacccaagttacagagaaagttcgtaacttttttattgaattattgactctgccgcgtgtcggttcgtcggctttcaactccagtctgtcaatgcccctgtgtaggtggggtccccaggtctgggcttctgaggtcctggtagaaggagggcaggtggtgagggctggcggggggcancaggggacggaggcgggagggagaaagagaacgtgtgtanaagggtnagggaggagggtgggaaggactggaagtgttaannagtcggcaggcccctttcctctgcccgggccgccccgggccctggcccccgccccggcctcatataatttttatgttgaacttgcggggcgcgtcggcgg

SEQ ID NO: 1303 - DNA, 474 bp, Homo sapiens
  misc_feature (9)..(10): n is a, c, g, or t
  misc_feature (27)..(28): n is a, c, g, or t
  misc_feature (50)..(51): n is a, c, g, or t
  misc_feature (62)..(64): n is a, c, g, or t
  misc_feature (78)..(79): n is a, c, g, or t
  misc_feature (105)..(106): n is a, c, g, or t
  misc_feature (119)..(120): n is a, c, g, or t
  misc_feature (130)..(131): n is a, c, g, or t
  misc_feature (153)..(153): n is a, c, g, or t
  misc_feature (163)..(163): n is a, c, g, or t
  misc_feature (178)..(178): n is a, c, g, or t
  misc_feature (439)..(439): n is a, c, g, or t
  misc_feature (445)..(445): n is a, c, g, or t
cctggtttnntttttttttatattctnntagatttttaccactttttatnntttaaaacagnnnagaatttcattatnntgattaacactctatctatctaaacnnagaatgatgcatnntaattaaatnngccttgtccttaactgttatanagctctgttnagaaaaataaacatnctcaccacaaactacagtgtcagctctttaataaatacataaaacagaagttagtagtcaatcagagttatatgaacaggttcatagtatattatgtgaaagtatcatattctccaatattctgtatcatttaagacaatttaagttacgtataattcaaagccagaaataataagaaatatgttcagtgataatttgcttctttcttagagctattttatattcaaatatttaatttaaaaatatattctatattaaatntatttntacaaacgcagtattcgttaggtgaaaca

SEQ ID NO: 1304 - DNA, 459 bp, Homo sapiens
gcaaggtctctatcctgggcctatttctgattgtgttctgggattttagagaattgaacaatagagtatttaattttaccactcccctcttgagtaaaaacatcagacacttttaggaaagttttagaaggtacatcttcaataagcagagatctttcatctcaaataactgggaagaattgcactgcttaagaatagttgaacttggacctgagagcaccatacttagaaatctaagtatatttaggtcactcatctaacactgggactttaccagccctgtcacccaaactggttgtagttagtaggaccacaaagtcactgaagaaatctgctttcctttaactttcaaggcaataagaaaaatgagttctctgttagcagtccctgagctatctgaatttcgtgtttctctcttaagcctcttgctttggaggatgatgaatcatttcctactcc

SEQ ID NO: 1305 - DNA, 284 bp, Homo sapiens
ttttttttttttttttttttttttttgggtttgcacagtttattaagataatcaatcaatttcttaagttattcctttgttaaccagacagcatctttggagagaaaatgcactctctgtgtagatacataaaaatacatcagtcattttgcccctcctggatgtgaacggaatctcccctcctcacctccacagagggagctcaagccccagggaaccttcccctccccttttatgcattaccaggggagtggcaggggcagcccccaactgtggggtgcatt

SEQ ID NO: 1306 - DNA, 457 bp, Homo sapiens
aatgcaatcttctataagaagtaatttcaaaagccaaacaatctaacattaaatgggatttcctctgagactgactttctctattagtttctttgtttgttcctcaatcatttgcaatatcagaattactacactggtaatcttcattataaaatgtgatcctatcttatttaacatagcttgactttctgtaactatttcaggagtggaatttctaaaagcaattttatccaatgtaaacaggcacaagaattctgataaaattgctaagttttagagtactacacagctaacattgcagcatgatctgtatccttaagagggaaaaaaagaaataaaaatcaaacctctataaatgaagaggatttcagatacttatggctggcatagaagaaaacagaattttatactttcaccagacatttttacaaaggaaatgtcttgatgatcttgtttt

SEQ ID NO: 1307 - DNA, 1236 bp, Homo sapiens
  misc_feature (815)..(815): n is a, c, g, or t
ctattgctgtttctctagtgtgtttttcacaattaccattttaattggtatttccaccttatgtgaaatcactaaactgttctttggctcaaactgtcttcctcttgtttttcaggaacaataccagttcatctataaagcaaggcttagcttggtcagcactaaagaaaatggaaatggtcccatgacagtagacaaaaatggtgctgttcttattgcagatgaatcagaccctgctgagagcatggagtccctagtgtgactggaatcctgaaagggcacttaatttgtaaacttctgaagactgagaacttttttgaggccttttttgccagactctaggttatacaataacccagttacttttttacactgataaaagttttgatatttattttttgccattttatgtcttaatggtatcctactgagcatttgcacctctgttcatttcacacagtgaaacgcaattttacctagtttgcactatatgatcagtgttactgcctataatcttatacaacagcaaaccctgatgtgacattccatgacgacatacatgctacttttttttagttcaatacagtgaaggtctttgttatgacagtgaatattgcttttattattattattgctgaagtggttgcattctactagcaggcaatgctgtacttttcttcagtcctcctctcctttttattttaggcactgttcaatactgtatgccttctgtattttaatggagtggatagcattgttttcttttacagactagcaggctactgggacctaaaaaggtctgttaatgtcatggncttgaaacagttccatttatgctggttaagagatcccttaagaagttagaaggcttaagaactgcttcatgtgaacatcccttattagttacaaagttatattcacagttttttaaaaatgtgtcaaaataaaggataactctgtattacagctttcacagtagctatgtggacaatgtgttatttccattttgactctctaaaatagctacatcctaaaatcagggctatctttaacaatagcaagatagcaatattatatacaactcagttatgagaccctttagttattctccattaatgcttcttagtttgtaataccatacctcacagtaggtagaagaatgaaaacttctgcaggtgtgtaattttgaaactagtcctctaaaaattccctattactcctatagcaactaataaa

SEQ ID NO: 1308 - protein, 1445 aa, Homo sapiens
  misc_feature (1183)..(1183): Xaa can be any naturally occurring amino acid
MRRLLEPCWWILFLKITSSVLHYVVCFPALTEGYVGALHENRHGSAVQIRRRKASGDPYWAYSGAYGPEHWVTSSVSCGGRHQSPIDILDQHARVGEEYQELQLDGFDNESSNKTWMKNTGKTVAILLKDDYFVSGAGLPGRFKAEKVEFHWGHSNGSAGSEHSINGRRFPVEMQIFFYNPDDFDSFQTAISENRIIGAMAIFFQVSPRDNSALDPIIHGLKGVVHHEKETFLDPFVLRDLLPASLGSYYRYTGSLTTPPCSEIVEWIVFRRPVPISYHQLEAFYSIFTTEQQDHVKSVEYLRNNFRPQQRLHDRVVSKSAVRDSWNHDMTDFLENPLGTEASKVCSSPPIHMKVQPLNQTALQVSWSQPETIYHPPIMNYMISYSWTKNEDEKEKTFTKDSDKDLKATISHVSPDSLYLFRVQAVCRNDMRSDFSQTMLFQANTTRIFQGTRIVKTGVPTASPASSADMAPISSGSSTWTSSGIPFSFVSMATGMGPSSSGSQATVASVVTSTLLAGLGFGGGGISSFPSTVWPTRLPTAASASKQAVRPVLATTEALASPGPDGDSSPTKDGEGTEEGEKDEKSESEDGEREHEEDGEKDSEKKEKSGVTHAAEERNQTEPSPTPSSPNRTAEGGHQTIPGHEQDHTAVPTDQTGGRRDAGPGLDPDMVTSTQVPPTATEEQYAGSDPKRPEMPSKKPMSRGDRFSEDSRFITVNPAEKNTSGMISRPAPGRMEWIIPLIVVSALTFVCLILLTAVLVYWRGCNKIKSKGFPRRFREVPSSGERGEKGSRKCFQTAHFYVEDSSSPRVVPNESIPIIPIPDDMEAIPVKQFVKHIGELYSNNQHGFSEDFEEVQRCTADMNITAEHSNHPENKHKNRYINILAYDHSRVKLRPLPGKDSKHSDYINANYVDGYNKAKAYIATQGPLKSTFEDFWRMIWEQNTGIIVMITNLVEKGRRKCDQYWPTENSEEYGNIIVTLKSTKIHACYTVRRFSIRNTKVKKGQKGNPKGRQNERVVIQYHYTQWPDMGVPEYALPVLTFVRRSSAARMPETGPVLVHCSAGVGRTGTYIVIDSMLQQIKDKSTVNVLGFLKHIRTQRNYLVQTEEQYIFIHDALLEAILGKETEVSSNQLHSYVNSILIPGVGGKTRLEKQFKLVTQCNAKYVECFSAQKECNKEKNRNSXVVPSERARVGLAPLPGMKGTDYINASYIMGYYRSNEFIITQHPLPHTTKDFWRMIWDHNAQIIVMLPDNQSLAEDEFVYWPSREESMNCEAFTVTLISKDRLCLSNEEQIIIHDFILEATQDDYVLEVRHFQCPKWPNPDAPISSTFELINVIKEEALTRDGPTIVHDEYGAVSAGMLCALTTLSQQLENENAVDVFQVAKMINLMRPGVFTDIEQYQFIYKARLSLVSTKENGNGPMTVDKNGAVLIADESDPAESMESLV

SEQ ID NO: 1309 - DNA, 1694 bp, Homo sapiens
taggtgagatagccctggggatggaggcaagccctggaggtaggtagctggagaggggggagtctgaaccaggtcagaggtcgggcactgacttgtgtcctgccaccccaggtctgatcatcgacgcttttggtgagctccgagaccaacaagagcaagtgaaggaggatatggaggtaggtcatgtctgggggtgacccagagggattacgggattcagggggtcaagtgggcctccactctgatgtctcttgccactcacagaccaagtgcttcatctgtggaatcggcagtgactactttgatacgacaccgcatggcttcgagactcacacgctggaggagcacaacctggccaattacatgtgagcagacacactggccagtcaggagggtggggggcatggctgccaatagccagcagtggggtacttagctttggccagttaggaaagggggtgtagtgtccatgtgggcagattccctgccagccaatcagaaggtaagggtggggccccgcaagatggttcacacctgtaagcccagcactttgggaggccaagtggggaggattacttgaggccaggagttcgagaccagcttgggcaacatagcaagacttcctctctactataaatgaaaaataaaataaggtaagggtggttctgacttgtctcctgtggtcctctcaccctcaggtttttcctgatgtatttgataaacaaggatgagacagaacacacgggtcaggtaagggggtgttaatgggaggacagtgggcaggacgtggagccctttaacataaggccagtcagtaggtggcagtaaaaagctcctatcaatatcaagggttagggctgggggctgggcacggcggctcacgctgtaatcccaacactttgggaggccaaggcgggtggattacttgaggtcaggagttcaagaccagcctggccagcatggtgaaattcagtctctactaaaaatgcaaagattagcagggcgtggttgtgcatgcctgtaatcccagctacttggaaagctgaggtgggagaatcgcttgaacccaggaggcagaagttgcagtgagccaagatcatgccactgtactccagcctaggtgacagagcgatactccatctcaaaaaaaatgggtttgggctggctcacgcctgcaatcctagcacttcgtgaggccacagcgggagaattgcttgagaccagaagttcaagacagcctaggaacacagcagccctttctctattaaaaaattagccaggggtggtggtgtgcacctgtagtcccagctactctggagactgaggtggagaatcgcttgagccaggaggctgtagtgagctgtgattgtcgccactgcactccagcctgggcaacagagcaacaccctgtctaaaaatatatatatatatatgtctcaagggtttgaagatgtgaccaatgaactctttctatccccaatcctaggagtcttatgtctggaagatgtaccaagagagatgttgggatttcttcccagctggtgattgtttccgtaagcagtatgaggaccagcttagctgacacacccccagctggccctccacccccacctcaagtgccttattctcacagcaagccccttagtccccaagcccctccccctaaggcagctgggggagaggtgacctagtac

SEQ ID NO: 1310 - protein, 5038 aa, Homo sapiens
MGDAEGEDEVQFLRTDDEVVLQCSATVLKEQLKLCLAAEGFGNRLCFLEPTSNAQNVPPDLAICCFVLEQSLSVRALQEMLANTVEAGVESSQGGGHRTLLYGHAILLRHAHSRMYLSCLTTSRSMTDKLAFDVGLQEDATGEACWWTMHPASKQRSEGEKVRVGDDIILVSVSSERYLHLSTASGELQVDASFMQTLWNMNPICSRCEEGFVTGGHVLRLFHGHMDECLTISPADSDDQRRLVYYEGGAVCTHARSLWRLEPLRISWSGSHLRWGQPLRVRHVTTGQYLALTEDQGLVVVDASKAHTKATSFCFRISKEKLDVAPKRDVEGMGPPEIKYGESLCFVQHVASGLWLTYAAPDPKALRLGVLKKKAMLHQEGHMDDALSLTRCQQEESQAARMIHSTNGLYNQFIKSLDSFSGKPRGSGPPAGTALPIEGVILSLQDLIIYFEPPSEDLQHEEKQSKLRSLRNRQSLFQEEGMLSMVLNCIDRLNVYTTAAHFAEFAGEEAAESWKEIVNLLYELLASLIRGNRSNCALFSTNLDWLVSKLDRLEASSGILEVLYCVLIESPEVLNIIQENHIKSIISLLDKHGRNHKVLDVLCSLCVCNGVAVRSNQDLITENLLPGRELLLQTNLINYVTSIRPNIFVGRAEGTTQYSKWYFEVMVDEVTPFLTAQATHLRVGWALTEGYTPYPGAGEGWGGNGVGDDLYSYGFDGLHLWTGHVARPVTSPGQHLLAPEDVISCCLDLSVPSISFRINGCPVQGVFESFNLDGLFFPVVSFSAGVKVRFLLGGRHGEFKFLPPPGYAPCHEAVLPRERLHLEPIKEYRREGPRGPHLVGPSRCLSHTDFVPCPVDTVQIVLPPHLERIREKLAENIHELWALTRIEQGWTYGPVRDDNKRLHPCLVDFHSLPEPERNYNLQMSGETLKTLLALGCHVGMADEKAEDNLKKTKLPKTYMMSNGYKPAPLDLSHVRLTPAQTTLVDRLAENGHNVWARDRVGQGWSYSAVQDIPARRNPRLVPYRLLDEATKRSNRDSLCQAVRTLLGYGYNIEPPDQEPSQVENQSRCDRVRIFRAEKSYTVQSGRWYFEFEAVTTGEMRVGWARPELRPDVELGADELAYVFNGHRGQRWHLGSEPFGRPWQPGDVVGCMIDLTENTIIFTLNGEVLMSDSGSETAFREIEIGDGFLPVCSLGPGQVGHLNLGQDVSSLRFFAICGLQEGFEPFAINMQRPVTTWFSKGLPQFEPVPLEHPHYEVSRVDGTVDTPPCLRLTHRTWGSQNSLVEMLFLRLSLPVQFHQHFRCTAGATPLAPPGLQPPAEDEARAAEPDPDYENLRRSAGGWSEAENGKEGTAKEGAPGGTPQAGGEAQPARAENEKDATTEKNKKRGFLFKAKKVAMMTQPPATPTLPRLPHDVVPADNRDDPEIILNTTTYYYSVRVFAGQEPSCVWAGWVTPDYHQHDMSFDLSKVRVVTVTMGDEQGNVHSSLKCSNCYMVWGGDFVSPGQQGRISHTDLVIGCLVDLATGLMTFTANGKESNTFFQVEPNTKLFPAVFVLPTHQNVIQFELGKQKNIMPLSAAMFQSERKNPAPQCPPRLEMQMLMPVSWSRMPNHFLQVETRRAGERLGWAVQCQEPLTMMALHIPEENRCMDILELSERLDLQRFHSHTLRLYRAVCALGNNRVAHALCSHVDQAQLLHALEDAHLPGPLRAGYYDLLISIHLESACRSRRSMLSEYIVPLTPETRAITLFPPGRSTENGHPRHGLPGVGVTTSLRPPHHFSPPCFVAALPAAGAAEAPARLSPAIPLEALRDKALRMLGEAVRDGGQHARDPVGASVEFQFVPVLKLVSTLLVMGIFGDEDVKQILKMIEPEVFTEEEEEEDEEEEGEEEDEEEKEEDEEETAQEKEDEEKEEEEAAEGEKEEGLEEGLLQMKLPESVKLQMCHLLEYFCDQELQHRVESLAAFAERYVDKLQANQRSRYGLLIKAFSMTAAETARRTREFRSPPQEQINMLLQFKDGTDEEDCPLPEEIRQDLLDFHQDLLAHCGIQLDGEEEEPEEETTLGSRLMSLLEKVRLVKKKEEKPEEERSAEESKPRSLQELVSHMVVRWAQEDFVQSPELVRAMFSLLHRQYDGLGELLRALPRAYTISPSSVEDTMSLLECLGQIRSLLIVQMGPQEENLMIQSIGNIMNNKVFYQHPNLMRALGMHETVMEVMVNVLGGGESKEIRFPKMVTSCCRFLCYFCRISRQNQRSMFDHLSYLLENSGIGLGMQGSTPLDVAAASVIDNNELALALQEQDLEKVVSYLAGCGLQSCPMLVAKGYPDIGWNPCGGERYLDFLRFAVFVNGESVEENANVVVRLLIRKPECFGPALRGEGGSGLLAAIEEAIRISEDPARDGPGIRRDRRREHFGEEPPEENRVHLGHAIMSFYAALIDLLGRCAPEMHLIQAGKGEALRIRAILRSLVPLEDLVGIISLPLQIPTLGKDGALVQPKMSASFVPDHKASMVLFLDRVYGIENQDFLLHVLDVGFLPDMRAAASLDTATFSTTEMALAVNRYLCLAVLPLITKCAPLFAGTEHRAIMVDSMLHTVYRLSRGRSLTKAQRDVIEDCLMSLCRYIRPSMLQHLLRRLVFDVPILNEFAKMPLKLLTNHYERCWKYYCLPTGWANFGVTSEEELHLTRKLFWGIFDSLAHKKYDPELYRMAMPCLCAIAGALPPDYVDASYSSKAEKKATVDAEGNFDPRPVETLNVIIPEKLDSFINKFAEYTHEKWAFDKIQNNWSYGENIDEELKTHPMLRPYKTFSEKDKEIYRWPIKESLKAMIAWEWTIEKAREGEEEKTEKKKTRKISQSAQTYDPREGYNPQPPDLSAVTLSRELQAMAEQLAENYHNTWGRKKKQELEAKGGGTHPLLVPYDTLTAKEKARDREKAQELLKFLQMNGYAVTRGLKDMELDSSSIEKRFAFGFLQQLLRWMDISQEFIAHLEAVVSSGRVEKSPHEQEIKFFAKILLPLINQYFTNHCLYFLSTPAKVLGSGGHASNKEKEMITSLFCKLAALVRHRVSLFGTDAPAVVNCLHILARSLDARTVMKSGPEIVKAGLRSFFESASEDIEKMVENLRLGKVSQARTQVKGVGQNLTYTTVALLPVLTTLFQHIAQHQFGDDVILDDVQVSCYRTLCSIYSLGTTKNTYVEKLRPALGECLARLAAAMPVAFLEPQLNEYNACSVYTTKSPRERAILGLPNSVEEMCPDIPVLERLMADIGGLAESGARYTEMPHVIEITLPMLCSYLPRWWERGPEAPPSALPAGAPPPCTAVTSDHLNSLLGNILRIIVNNLGIDEASWMKRLAVFAQPIVSRARPELLQSHFIPTIGRLRKRAGKVVSEEEQLRLEAKAEAQEGELLVRDEFSVLCRDLYALYPLLIRYVDNNRAQWLTEPNPSAEELFRMVGEIFIYWSKSHNFKREEQNFVVQNEINNMSFLTADNKSKMAKAGDIQSGGSDQERTKKKRRGDRYSVQTSLIVATLKKMLPIGLNMCAPTDQDLITLAKTRYALKDTDEEVREFLHNNLHLQGKVEGSPSLRWQMALYRGVPGREEDADDPEKIVRRVQEVSAVLYYLDQTEHPYKSKKAVWHKLLSKQRRRAVVACFRMTPLYNLPTHRACNMFLESYKAAWILTEDHSFEDRMIDDLSKAGEQEEEEEEVEEKKPDPLHQLVLHFSRTALTEKSKLDEDYLYMAYADIMAKSCHLEEGGENGEAEEEVEVSFEEKQMEKQRLLYQQARLHTRGAAEMVLQMISACKGETGAMVSSTLKLGISILNGGNAEVQQKMLDYLKDKKEVGFFQSIQALMQTCSVLDLNAFERQNKAEGLGMVNEDGTVINRQNGEKVMADDEFTQDLFRFLQLLCEGHNNDFQNYLRTQTGNTTTINIIICTVDYLLRLQESISDFYWYYSGKDVIEEQGKRNFSKAMSVAKQVFNSLTEYIQGPCTGNQQSLAHSRLWDAVVGFLHVFAHMMMKLAQDSSQIELLKELLDLQKDMVVMLLSLLEGNVVNGMIARQMVDMLVESSSNVEMILKFFDMFLKLKDIVGSEAFQDYVTDPRGLISKKDFQKAMDSQKQFSGPEIQFLLSCSEADENEMINCEEFANRFQEPARDIGFNVAVLLTNLSEHVPHDPRLHNFLELAESILEYFRPYLGRIEIMGASRRIERIYFEISETNRAQWEMPQVKESKRQFIFDVVNEGGEAEKMELFVSFCEDTIFEMQIAAQISEPEGEPETDEDEGAGAAEAGAEGAEEGAAGLEGTAATAAAGATARVVAAAGRALRGLSYRSLRRRVRRLRRLTAREAATAVAALLWAAVTRAGAAGAGAAAGALGLLWGSLFGGGLVEGAKKVTVTELLAGMPDPTSDEVHGEQPAGPGGDADGEGASEGAGDAAEGAGDEEEAVHEAGPGGADGAVAVTDGGPFRPEGAGGLGDMGDTTPAEPPTPEGSPILKRKLGVDGVEEELPPEPEPEPEPELEPEKADAENGEKEEVPEPTPEPPKKQAPPSPPPKKEEAGGEFWGELEVQRVKFLNYLSRNFYTLRFLALFLAFAINFILLFYKVSDSPPGEDDMEGSAAGDVSGAGSGGSSGWGLGAGEEAEGDEDENMVYYFLEESTGYMEPALRCLSLLHTLVAFLCIIGYNCLKVPLVIFKREKELARKLEFDGLYITEQPEDDDVKGQWDRLVLNTPSFPSNYWDKFVKRKVLDKHGDIYGRERIAELLGMDLATLEITAHNERKPNPPPGLLTWLMSIDVKYQIWKFGVIFTDNSFLYLGWYMVMSLLGHYNNFFFAAHLLDIAMGVKTLRTILSSVTHNGKQLVMTVGLLAVVVYLYTVVAFNFFRKFYNKSEDEDEPDMKCDDMMTCYLFHMYVGVRAGGGIGDEIEDPAGDEYELYRVVFDITFFFFVIVILLAIIQGLIIDAFGELRDQQEQVKEDMETKCFICGIGSDYFDTTPHGFETHTLEEHNLANYMFFLMYLINKDETEHTGQESYVWKMYQERCWDFFPAGDCFRKQYEDQLS

SEQ ID NO: 1311 - DNA, 259202 bp, Homo sapiens
caactccagtttgaccattgctagcttggaaatatgggcaaattatttatctctgtgcctcagttgccttatctatgaaaggagacatggtaagagtacctacctcagagttgtttgaaggattaaagggttcttatgtaatgggtttatttaaaattttcaggatgcgatctcacccatggttgctctttatcgttgctatcattgctattattattattacgggagatgttgcagccattgggaatgacaaaatctaggggatgactgtgtgagtgagtgccacatagaggagaggagaacactgttgttggagattaggtcaaggtgcagaaaggcaatcattgttggaaggttcatctatgtgcatactgaaatgaccaagtgtttaaaatcttagtaaaaaagaatgtttcttaggtaagaaagatctgtattagaaattaactatctgtggtcaacaaattgtaggaagggtcatcaaatactcttcatttgaaaccaagaattaggacatacatgttgaatatatataagaaagaatattctttactccatgactgatgagaaagattatgttgttttagcatatgagtggtgaacacaactgtttaaaattggtcataaatgttgtctaatagtgttcagaagtattgatttaaagagtatccatttaaagctaatgcagaattatgttttgtaagtattaaaatttatccgattttaatcactttttagttttgtgcttctagagaatatttcaagagcaacaaaagagacggcaacaagatgggaaaggaactgaaagagattgagccgccacatgagcaattcacaaaggtctgttctatttggtaacacaatacgttcttataaaatacaactcatgaacaaaaatagaagacagtctgcttgtttctgaatgtatggaaagacctttttttttgatcagtttgactttattaatatttgttccacagagctttacaggtatcctttaactgacttctaggatttatagtttttacttttttcaccaaacaacaaattcatttttataaaattcagttggccccgagagtttctttttttttttaattatcctttaagttctagggtatatatgcacaaagtgcaggtttgttacattgtatacatgtgccatgttagtgtgctgcacccgttaactcgtcatttacattaggtatatctcccaatgctatccctcccccgaccccacaacagtccccagagtgtgatgttccccttcctgtgtccatgtgatctcattgttcaattcccacctatgagtgagaacatgcggtgtttggttttcgtccttgcgatagtttgctgagaatgatggtttccagcttcatccatgtccctacaaaggacatgaactcatccttttttttggctgcatggtattccatggtgtatatatgccacattttcttaatccagtctatcattggtggacatttgggttggttccaagtggacagaccttttggttatacattataaattacttaccattttcactttgtattgttccagatttaacataattggtaagtgtatttttaggattcatgaatagttttgtgggagttatttaaaacaggaaaaggtaaattggaaattttacctggaaatataaatcttgtgtataaaattgatactttatgaatacattaatgaagatttcatattcagtttttaggagatcagcgacagatctttagtggaatgcaggaagtccataaatccttactggatgtcttttttacttgtcttgtttaaacagttttagttaaataggaagtaggcaagtgttgactactgagtatctcttttatttcctgctggaatgtaggagtgttttatggcatattccctttcaaaactattagtgactagtaatggttttacatgaaaatttgtaatcataagagatggttcagatgtataacagaatgtgaaagccagcagattattaacactttgtgaattgtgaattatctgctgtcatatagcatattagctaatcgttattggacaatgacctcttcttcatgtagatgtatattatttaggaaacaatgtaattttcttttgggaggtattctttttaataaccttgtgaaaagacatgctcatatgtcactcctctacactaactgagatgtgttaaataaactaggaaaagcgtttgaaaataaaattttcaagcaacttaaggatgatctgtacacaaacagttatttacatagaagtcacgagaagagaacatgttgctataatgttcctcagaaactatttattaattggtatgaacattaaactagaaaagttatcctgtcaatgttaatgctacatgttaccccttagggtagaaactttggtatcatcttggactcctctgagtccattatccttcccatgcagttattgcgaggcacgtttaccgctgtaatggtcctttaatttctttctttaaatccctactgaggctgccctagttcaagacctcattcttccttgcttgtattattaagctcttttctgagttatctcttctcttctgagccatccttcactgatgggcaatactatcttcctaacactctcccctttctaaaatgcttcctagcccttccctcttcccagcctgtcagtggtgcccatgtctcagttcttagatattcagagactctcccctttacatgaccccctcttaggcttgttttgccaccctctgtctttcctcccaactctccagattgacagccttccctgaaggaactcaccgttactcccatgctttgctcatgcccttccctccaaatgcttttaaaatctttctttttcttttttctttttttttttttgactgattgaaatcttgtgccaactaagtcgacatcagtctccatttttggctacatgtccgagtgagttgctcttccatagcagtaacacaagttttgtattacttttttttttattcgtgcatttgctcatgtcacaggaatacggaagagattgtgtactcattttttacgtcttcctcagtattaacatacaacattttagggactatgaactgctgaactatttgttgagggactagtatatgtttcatacgtagttatgttttccccaacttgattaggtcatatcacagaccattttatcccttcaatgaaaaccacgttatgtggactattagtgataacaaatggtcactacctggtgaaaaaatatggtattccatgatataagactgacagtctttttctgtctttggtccatcttgtctgtaacatgttcatcaagccattttattcaagcaaactacatgactgttggacctgctataataatatttcactgaaatctggaattaaaaaatttaagtatttggagctccatgtattgattacagtttttaaatttgaaataaataaccagcatcctttgaatattaaaagctgtttcctttgacatctaatttaccctgtttaaaacctgagatgtaaagtgatggtttgtcagtgaactagactttttgttttagagtattgaggacttggaagagtataatgaaagccctctttttggtgaagaaagtggtgaagaaagtcaacttaaaaaatacatcaccgtgttccaaaataaaattgtgtcggagaccataagtactgcatatttaatcttaaaaactcaggattgatgtaagcactggaatattttatttgtagaaatgtatattgcaattacttaaatttctttttttgagacaactgcagtaagagttggcacttattcagatgtctctttaaccactgttattctgatggctgatgaaaaaacttgaacctatgttatatgatacaagcataacttgagctacactaaaccacatgacagtatttagttaattctcgtataaattagtgtatctcctctatcattagtttgtttgttaaatgccagacctcgttactgtgatctgttgaatgaaccctagacagttctgtgagaaagcagcaattgcacagttatatacatggtcagttaaattttaacattaaagataatttagttttaggtttggcctctgtggatctgtatccgttccaaaactgtagaaagcacaggcatggaacagtacatttttctctaataaaagaagacaaaacttattttatctgtgcattctttgtatttattcattaggttaaagagacaattccaatgaaagtatgacttcaaaaaatagatatactctatggcctttcaaaattattaaacttaccttaacatctgtgttcttgaaaaaaattaaactactataaatgattgagacaactgagcaggatatataaatgtcagtgctgagccattggcttgtgggtatgtcatttccaaagacatcaaaatgccatttagtttgttttggtccaccattcaatgataccacccctcagcattgattcaaagtattttattaacatttatgtatgcttaacaattacttcacatctatggcaaggtaaattatgtagggtgctttgttttttaagtttagtatttgtggagtatgtggaagttagtttaagtatgcatgcatctaaaatcttgtatgatgaactctcttacctttcctttttaatgtgcagtttttgcacataacatacaaaatgttcatttggaaacactttagtaaatatgaaattcagaatatatttggaataagtcagttaaatgtattcttttgctgagtttctgaaattccattcatgaattgttcagaacacaataccctcattgggaggagaggagagacttactctcattttcccttgttcttttcattttaattggcccctatataccactcttatcttttcaaggttttccaagttaaagaaaaaaaaagttcattcagattctgtttttctgcctacagtcacttatacaggaataagtgaatccttatggggagcatttaattcttaaagcttgcattttcataaaggattttccttttacccaaagcatgtgttgatgtgtaagtctaagtactacttcaagtttctaagaagatccttatttgagatctctttcagtagttacagaggcaaaataagcactgcagaggtccatgtgagagttctattatacatactgggctatctgactattctacagtggaaggatgagaaagacaccacaaggtatttagtgatggaacagttgatttatttttatttttattctttttgagaaggagtctttctcactctgtcaccaggctggagtgcagtggcatgatcttggctcactgcaacctctgtctcccgagttcaagcgattctcctccctcagcctcccgagtagctgggactacaggcacacgccaccacacccagctaatttttgtatttttagtagagacggggtttcagcatgttggccaggatggtctcaatctcttgacctcgtgatctgcctgccttggcgtcccaaagtgctgggattacaggcatgagccaccgcgcccggccaaaagttgatatttatgtcaccccttagtacctcaaatgagtaactgtgtacttgaagtcactctggcagatattctgaagggaagaaagtttttgaccttaaaagttattaggagtgtgtgtgtgtgtgtgtgtgtgtgtgtgtataaatgtgtgtatatacgtatatatgtgtgtgtgtgtatgtatatatgcatatacatgtatgtatatagataatatgcatatatatatgcatatacgtatatgtgaatatatgcacacacacacacatatatatgactttgttttttagaattgtttttagttcacaacaaattgatctgaaggtctagagatttctcatttaccccctgttctgccaccatagcattccccactatccatgtaccccaccagagtggtgcctttgttgcactccatgaaattacattgacacatcattatcaccccaagtccatagattacttcagggttcactcttggttactttttgtgtgtgtgtgactattttcctcacatctcttgtgctatagcccctgttttattttttcattaagataacgtttaatttatatatttgtgaccatgaaattttaggttaggatatcagaaacaagtcgcactaaaacaaacgtaaagatacacttttctcaagaaaatggtaagacaggtaactttaatttacatacatatgcttgaaaaattgcagttagtgcttttaaattctagactgaagcacgtattttcttttattccataataaacacccgctttgaagaatggctgatatcaagagcatcatgtctcctaatattgtctcactcagcagctgaatgttaaaatgcaaagtaaaagcactaaatatatccttagagcagtgatgtactgaacaaaattcagaggtcatatgcaaagacagtgcccaagaaattttgcccacagaccagtggcaagtcctttatttcagcaactgaaactgaagagaaacagtcttttgcctccctgcctcttggagagggtttctcctgatagcagagggaaaggaccatctcatttccctgatgttaaaatttcatcttggagtcctaggcttatatctttgtgaagatatctaaattaaggtgatccagtcaaatcacaaaatacttgactcactccttaggaggagcttaagtctgccctgatttctgtgcatacacctgatttattgcactcagagtacaaaagctctgagatgtcaaattgagccaggccgcacattgcattcttatccaggtgaatcagggctctctcagtgctgctcacccaaagcacattgaaataatttttcttatttatttgtaaaacagtgatgatggtatctgtgtcagagggttactgtgtcacaggaaacaatgatggtgagaaggttagacatatggtacatgttgaataaatgttagctattagttaccaatatcttcatgatttttattgatatataatagttgtaaatatgtatggagtaaatgtgatattttgattcatgaatatgtaaagatcaaatcagagtagttgggatattcatcacctcaaacttttatcaattttttgtgttgagaacatcgcaaatgtcttctaggtattttgaaatacatgataactacagttattcgagtgtgctattgaaccctagaacttatttcttctctctaactgtatgtttgtatccattgtccagcatttctttatccccgtcaaccctgctactgtttccaccctctggtaaccaccgttctactcactacctccctgagatcagtgttgtccaggaatgaaaagcaagtaaatggtaaagacaggccgggtgtggtggcttacacctgtaatcccagcactttgggaggctgaggccggcagatcacctgaggccaagagttcgagaccagcctggccaacatggtgaaacctcatctctactaaaaatacacacaaaaaaaaaaaattagctgggcttggtggcgtgtgcctgtagtcccagtgactcagggaggctgaggcaggagaatcgcttgaacccaggaggtagaggttacagtgagccaagatcatgccactgcactccagcctgggcgacagagggagactccatctcaaaaaggaacaaaaaaataaaaaataaaaaagatgaactagttgatagttaataatcatgactggtctatttgtctgctacactttctttcctctatgtgtggcaagtgcctacttactcttttaagacttgtgtcaaagaccacctagttcttcaccttttctggaccctgttagttctcaaacaaaattgtgccccctttcctctcttttagtggttctgtacctctcaaaccctgtattgtggctgttatttactgaactgttaccctagagtgtaaaaactttatcatagtcctaattttatttttggaaactggtatgttcccagccatacaggaggtgcacaatacacacgtactaaataaagtaatggtcatttgaaagagtaaatggtgaatacacagcaattctccaatctttgtgtttatgcaaacacaagaattaactttattggcctaattcaaacgttatcttgaaatttattcaaagttcccattttccatgaattaaccagacattttttgttactagattttcactaattaaccagttaaatctcttttgtcttatatcattttaaaagagcatgtggaacaaattcaaacaacttaggtagttcacgtctgtttagctcactattttaaggagtgaagttcaccccgccatttgcctacttgcctcagtactcacacaacaattgcactgatgtcctgctaatgcgcattaaatcagatatccatacctggctttgaagtgtgccctattcaacaaacagctcacttggttgttatcttccatctagtataaagataaaatatgtgccagagaaagatgtcttatagagattttcgtgatgtactagttacccataaacaattaattactggggcagacattcctaccttttagaaggagaaggcttgttcataggagttgagagtgaagaaaattaattcttgttgaactgataaatgtcccttctagatagtttacattgccattaaagcataacgttgccattttttctttatctctcagctacttatttcttgcatgagctattctggcttttaaaatcatattttttggtcatttgccaagtgcttggctgttgggtacacatggaataaattatccagtaaaaaccatctcagatctttccagctatttttgatcaggtacacctgtaaatcttaaaaagcctataaagaaatacctaactagtacattggatacaagacacacaaatctcacataggacaatggtaactgaagttctgaatgttgactcaacttaggaaattgcagtccttagggggaaaatatccttaaacaaaggcttaaaattctactaggtggtcaccaccgtttatacacatatgtatttccctctttttatttgggaaactgatggtcgtatttccttttcagggtggaagaaggaattctccattaagagaagggaaggaaaatataggaaaaataaccactctttgaaagcatctattgtccaaatcatgaggaagagcttgtagttctgagtttcacaaacgtgatttagttgtttttctgtaggatcctgcgtggggtcacctgtttcacgatagctgtgtcctcagacccagtgtaggagaagggtaaaaaatgtgttacttcactagttcatacctctctgagcctctcttgaaactgctgcagggaaaatttctccatctttgttctgtcacttgcatatttggagcctttcctactgcccttgttatgctgctttgctttgttttacagcatgcattttttccattgccaatgtttgtttgtatttccagggtctagcacatgactgtgctcaaatatcaagtgaatgaatgaatgtatgaatgaatgaacatgactttcagatgtcctttatggcttttctcattgaagtatatgcttgttctttacctcttcaaaagaggtgcaactcattgagaatagggttgccaaatgttgcaaaaactaagcatagtcttacaaaactaaacatagctgagccatacaatctaacagttgcactccttggtaactacccaaatgaactgaaaacttacgtccacacaaaaacttgtatgccagtgtttaaccagctttatctatcattgcaaaaatttggaagcaactaatatatccttcaatgggtgagtgcataaataaattatggtacattcatacaatggaatactattcagaaattataagaaatgatctagcaagccacaaaatgatcaagaggaacttgaaatacatattgctaagtgaaagaagccaatctgaagaggctgcagcctgtatgattcctgctatatagatgacatctggggtctggaggactgtggccctcttctcacagctcctctagacagtgccccagtggggactctctgtggggacttcaaccccacatttcccttccacactgccctagcagaggtttccatgagggctatgcccctgcagcagacttctgcctggacatccaggtgtttccatacattctctaaaatctaggtggaggttcccaaactgcaattcttgacttctgtgtacccacgggaccaacaccacatgtaagctgccaaggcttggggcttgcaccaagcaacagcctgagctataccttggccccttgtagccacagctggagctgaagcagctggaactcagggcaccatgtcctaaggctgcatagagccggggggccctgggccaggcccaggaaaccatttttccctcctaggcctttgggcctgtgatgggaggggctgccgtgcaggtctctgacatgccctggagacattttccccattgtcttggtggttagcatttggctccttgttacttatgcaaatttctgcagccagcttgaatttctccccagaaaatgggtttttcttttctattgcatcatcaggctgcaaattttcgaaactcttatgctttgcttcctcttgaaggttttgctgcttagaagtttcttccaccagataccctaaatcatctttctcaagttcaaagtcccacagatctctagggcaggggcaaaatgctaccagtctgtttgctaaagcacagcaagagtcaactttatttcagttcccaacaaattcctcatctccatctaagaccacctcagcctaacttcactgtccatatcattatcagcattttggtcaaagccattcaacaagtctctaggaagtttcaaactttcaaactttctaagtttcaaagtttctgagccctctgtctctaggaagttccaaactttcccagattttcctgtcttcttctgagccctccaaatggctccaacctttgcctattactcagttccaaagttgcttccgcattttcgggtatccttatagcagcacccaactctactggtatcaatttattgtattagtgcattctcaccctgctataaggacataactgagactgggtaatttataaatgaaagaggtttaattgactcagtttcgcagggctggggaggcctcaggaaacttacaatcattgtggaaggggaagcaaacatgtcattcttcacatggcagcagcaaggagaattgcagagcgaagtgggggatgccccttataaaaccatcagctcgtgtgcgaactcactattacgagaacagcatgggggtaacagtccccatgattcaattacctcccactgggtccctcccaccacacatgggtattatattcccataactacaattcaagatgagatttgggtaaggacacagccaaaccatatcatgctctaacctctaccttacgctgtagtggaggaaatgtggtgcctatttcagggatgtgacagtaagagccagatacatgaactggcatgcccaaggtaacatagagttagagagggaggggaatgaaaaactaacaatttccaagctctaaatatgcactggcactggaagaagtacttttttttaatgatatgaaatatttatatcatatacctaatacgtgtcaacacacgatccattgggatagcattttgatttattcattttacaattgagagaactgaaaatcagagaattaacgcaaattctctcaaaatcacagaactggtaggtggcagggctgacattcaatgccaaattcaagttctttccaataagcgcagttctgtcttgagaggtgtggctaagagcagaacccagatgcctatgaggagaagctggaagtccttctttaaggtcactttgcctttgcaacatgagagatggttcagggctctcctatccaggaggtgtttgtaaaacagcggacatccatttgtgcaatgcatttagactctgccctcccagaagtctggatgatgggcaagaagcgctaaggctcatttctcatccaggcaatcatggggaatgagtgtaaacagcctcaattcacaggtgcacctgaatgtgggatatggcatcaatgtttaagcccttttaaatttcttcacttgcagagctcaataaagattacattactggaaaggaaaggaaatcacctgcactgaaatatgacatgagggtggaaaagaatctaaatgtctgctggggacaaagacctcctctggtgctgctacacacacaggcaaatttccagcctcatgggtgcaaaatggccatatccagtcccctactattcaggtggtttttagcccacacaaagttttataaaaagttaagtcctaatgcaaaatcttggaaagttcacatacatatctagagttccagcctcttgaggaaagtggaagagctggcaacactgggtcccacattcctcacatgtgccccaaggcagcataggcacccaaccctgggccactgtacccacttacattacctggtatgcctcagagtttgtgaacctaccctagcctaaaaggaaggtcctagcttattcaaagctttgaaaaaaatcctgctgagaaaagactgaaggaatgctttttggcaccatctcctgtttcattagccacagctgccttactatgtatttggaccaataaaattgactctcggagaaagcaaaccaatgaaattcataggcaatgaggagagctcaatgaaaaagtgaggggaaaatgatttaaaaagatacacttgggtggcagagtagggaagtggccctttagaaactgcatataatctgtgccaggatttctcagcctaggcactagcgatatttggggccagataacttttcagtggagaatagtcctgtgcttcgtaggatgtttagcagcattccctggcctttatctactagatgccagagcaccccaccactgttgtgaccacacacgatgtctctggacatcaccaaatgtcctccagggactaaacttactccagttgagaaccactggtctatgtataactcaacttagagagcagctatgaacccaaatcatgtaaatgtgaacaaaacattcacattttcccacttgtcacaatgctcaagttatactttatctcagtttctgttttaaacagaacaatgtaaaagtgtttacaaattatgaagcctttatgtatcacactgactttgggacacaatagcaattttctttaatttacgaagaaatgggagtctgcatataattatctttctaccaaatttctaggactacagatgggggaataagccaagtttcttgaggaaatagccttgtatttctttatatgaactgtttttttctccttgggtggggcaggatcaggtatggaacaccctctgatagtcaacagttgtatgaatggatgtttagcatttagagaagactcaggagacattgtggttctttccttttatttagaggactaaacatggtggatgaagagacttactggccagccctccatgggccagaatgaaaattcaggaagatatcataggaagacagtctagccagcaaatggaaccagtggaatgagctgcctcaaaacaaagcatcattcattgtggcttccatttggttgtattctgtcttgcacccctccactttgtgagaaaccaggtcaggagcagccctatgcaaaaagctaaggggtaagtctccagctgaaagctatactagtgagcctgggaactgctcctccagccccaatcaagccctaagatgactgcagccccatctttgcttggctgcaacttcacaggagcccctgaaccagaacacccaagctaagctattcacagaagctgttttacaagataaatgtttgttatttgaaaaataaaaataaaaagataagaaaagatgcccagttaaatgcaatgtggtatcctgaataggattctggaagagacaaataacattagtgtggaaactggtgaaatctgagtgaagtctatagttttgttgatagcaatgcaccaatgttggtttcttagctgtgataaatgtaccaaggtaatacatttatggtattaatgttaccataatagcattgaggttatgttattatgttaacagggcaaactgggtaaggggcataagggaactctatactatcttcataactctctgtaattctaaaattattccaaaattaaaaaaaaataagtcctttctcccaggcaccagatgtattcaagcaaaggttggaaactcacttatcaagcatgtgagaaaatggaggcctgtattgctcactgaagtgctccacagaactgaaagctcagtttagtgacaagaagggaggtgactcacaagccaggctgaaactagtgaaataatctcctatttgcatctccttgatctgaaagaaaacatgtgcctaagctgacatgaaacatctattatgtttgccattctggtggagcctgtttgctggaaagggagtggacagctaacaagatggaccagatttgtttttatggggctggtgattttttcataggtggcttattaggttgttgtaagattctaaatcttaggttctctaaatcctttttctgcttaagttatccagacagtatttttcatttgcattcatgaacaccgattatttgattagtacagaaatctatttttaagctccaatgcctattctgtaaaccaaaatattgtttttaaaataaaatataacatctctttacatatatatgtacatataaatgtgaattgagttatatgatctgtggatatcctgtaaaaaggtttagtaataccatattttgtcctttattaaaactaaaattcattatttcatctcattatttctcactttgagggcttttctttgtggctttcaagccacagacctcccaaaaaataaggcaagagaaagactgaaccagatattttatttccagtttggaacaggaggtttgttaaagaagtaacaatattattaatgacccctggcacttgggagccattcattgtgcctgtactccatgtttggtgctttctaatgattaatcccagcaacataagttaaattggcccagtaagtttacataggaaaacaggtgttacctgaggacaagtcaggctggacaaaggatccacttactgccattgccaccccgagtggaatgaattcaaaattgctccttctactttgagttgcctgcttcatattcaaagtctatcccaagaaatggaatggatagcagctctgatagaaaagaggaatagtaatctaggaaagcgaaaccagtgggaccaggaaagggaaaacagtgggaccaatgcaatgctctggtttaagagttaacctgggatgaatcccagagatttaggaagggagccaaaacagggatctcttccctattcttaagcaagtattctctgcccagggatgttgtaccatagaacatgatgactattcttggcttgggaatattatttacaatataatagttatctgtttaaatgtcatcttccatacactgatctatccatccacccatccaccctttgattgatcaataggtgagattctgagctaggtgctatgaacccagatgaatgaatgctatctctgcctttgaaaaattcaaaattcagtgctagagatagacatgtggaaacctaattaaagcaaaatgaggccgggcatggtggctcgtatctgtaatcccagcactttgggacaccgaggcaggtggatcccttgagctaagaagtttgagaccatcctgggcaacgtgctgaaatcctgtctgtactaaaaatacaaaaattagctgggcatggtggcacgtgcctgtagtcccagctactgggtggggtggggtggggtggggggctgaggcagggggatcgcctgagccttgggaggttgaggctgcagtgagctatgatcgtgtcactgcactccagccggagcgacagagtagtgtcactgcactccagcctgggcgacaaaaaaaaaaaaaaaagcaatatgaagaaatgcttcagtgaggagaagacatttactaggtgccaggacaaaagagagaagactgcttccagttctgcttgcaaaggctaatgtttgagttcaaccttaagggatgaagttatccctctctggggtctttgaattttggtgggggtttccaccagcttagtttaggacatccttcctttctgattaccctatcccttttaatgtttgattccttataatccaaccctttaccaactaagcattctattggtgaaaaagatgagaaaattgcaaattcaggagtggattgctagtttcttaagtgggaaccagggttcaagagaggggaaaataataattgtggaagaaaacaatctatatggaaaataatggaaaacgtattcaagcccaaactggtcccatcattcaggcaatgctggatacgtgtgtgtgtgtgtgtgtgtgtgtgtgtgtgtgtgtgtgtgtgcgcgtgtgtcatcttcaagaaatctttcataccctagattgttggttatttaaccaaactcatgttatcaaagtttttgcttattaacttatacttaacagttcttccactaactttaattgaaatagacaaaggcagataggaacagggtgattggttcacttttgttggtataagtcccagtgaattaaacactttctttttcctgctagcactttgtgggctaggatttccaaaatctctttccaaagtgtctatgtttccctggagaagaaaatgttttatggtattcttaagcaatagcgatgcctctccttagggctgaggctccccaaagtacttgtgaaatgtactaatccccacagtttacatgttgaagtggtggtgaaattatcaaaggtgtggtcagaaaataagaacattctgtgagtctctcactgctgtagagaaagtcgactcttggaggtcaccatgccttcagttaaacactaagaagaaacctattctgttttgtgtaaattattctggcagggtgattagttctaaaatttttctatatcatcttcaagaggagaaaaaaaacttctggatcctcgaacctcaaagcaagtggttttctattacagaaaaatcattaagatatttgatttgttgaacacgtctccttgttccgtcaaaacatgaggtagggaagctgatctcatggtttagatgccatagctttaaaggctcaactatggtttttccttaactaggtgttctttgtaatcactgcttgctgtaagaactgctaatgatcaaattatgccctagaaggatcttttacttgctttcatttttccacagtcaagttatatgattttttttaaagaagatttttttttcaaagctttcagcacatgtctcaaaggggcagctctgctgctgacttttcatgatctaggagctagtatgtccttccaggctcctgaatttgtatctttcattgaacagtccttaaatggaggacaatacttttagtttagtctaggtaggcactgtatttgtagagacaggagtttccaaatatcggggcagggaaaatggcttttgccaagtcatttttttaagctacatttcattcctggagtgtaaatgaaaggaagtaggcaggagaacaaaaatacaaaaatcatttttccctaataaatattctaggtggttaactcaagaaaattaaaacccaaattttgggagtcttatcattacttgttaaagtcttggaaatgcctagaatttcctgccagttgctcccatgaaaacagctctctctgattcagtacctgaaaagatgatgcaattaaatgaaactattatactacctatccttttcttatccattccatgtttttgattatcctttgagccattcaaaacaattccatatgctatggaaacactatatacataaatgtgctatgattgaatttttaatgtatctcatttaatttttcaaatatttattgtgctgtaggtatgtataaggcactgtgctagacgctaaagcaaataaaataagaatggtttcctctctatcacttgtctgcaatggcagaagatgacaatgttcttccgtataccagtagtttttaatctaaatccatctctatcctgctcccctccacctactcactgcaattcttccttgctccattttgtcagttgctcatcctccatgcaactcatcctgggatgagttatcaccccaaactcgggaaatgaacccttagttcaagccaatcccagtgatttatttctacttcccagtattgatttgggcactggcaggtgttgcaattctaggacatgagaagggaatattgctaacttctcagtcatcaaacaagatagtaatagtgaaagtaataacttgtaatgaagattgacttattaaagttacccatttaatgcataactcatgtgtctatagactgcatggtggcatcagttgtttaaaccagtcataaaaatattgacttttattttttgcttaatgccaccaaaggaactcatctcaccttgaaaaaatatttggtcacatatgcagtcatgtgccacataacaatgctttggtcaacaggccatatataagacagtggtctgaaaagattataatggaggtgcttcatacagctatactattttttatcttttatgcaatatttctactatgccttttctatgtttagatacatagatacctaccattgcattccaattacctacagtgttcagtacaggaacatgctgtataggtttatagcctaggagcagtaggctctaccatatcgcctaggtgtgtagtaggctatgccatctaggtttgtgtaagtatactctattaagttttgcacactgtcaaaatcatctaatgatgcatttctcagtatgaatctgtcattaagcaatgcatgactgtaatataagcactaaaacatctaagaataacaaaggtctgatccttaaaaagcacacaattactacatcatgaaattaaaataatgaagaaattgaaatgaacaggaatagtatagttgaacaactgcataaaaaataacaatgaattactataatattaatttcaaattaggggttggcaagctttttttctgtaaagatccagagaataaatacttttgatcttgtgggccataaggtctctgtcaaaactactcaactctgccactgtagcactaaagcagtcacaggcaatacagaaagaaatggacatggctgggttttaataaaaatataaaaacaggcaatggactggctatggcccatgagcttagtttgcccacatctatcttaagtgaaaacctgttaaactactcttccagagctttccatatgtaaagctctagtaacacccactagttgaatttttaagtaatcttgagggcttgattccaaatgacctaaaaaggctgattggttaaaaaatacactcagcattaaatttcaacgtatacgtatttgcttttattttgcccatggggaaaccaagaaaaaaggcaaaatgttcatgtttgaaggatgggatattcttcataattatcaagtttattttgggctatgatcccaaaagagaatatagtgcagtcttgaaatctttgaaaggtgccagaatatttcagaaactgcagtgacagaagttttggtcaagatgccaaagtcttgtgcaatagtggttgctgctccaacaagacatacgaatatgtataaatatgaccagttgagacaagaccttggatagaaaacgatattgtctgagaacataaaggaagtaatttgtgaataccatggtacaaagcacatggcttaaagaatcccacacctgcttggcaccaacatagcatcatatagtggcagcagacacttgagaactttacatggtaaaaaccctggggtgctaggaagagcatccaagaagaaaattacaaaataacctgcaggataatgtctttgtcattcttggcttttaccagagtgggtggatgaggcagcttctatctaaagggtcaccaaagtcaacttggacagatcatctccactgctctatcttttaatataattgatgcatctgtgttttctctgtctattgactaggaactactcgatgataggaactccttttgacatagtgttgaatcctctatcgcagctagaccttaaagccccacatatgtatctccttcaggttgcataacccttggtattatgaggaaagagctgtgaggccttgtaggaagccctctgggtgtcactccctcagtttggctctagagagagaaggcataagatactcaggtatggctctagccttaggttcatcaccatggccctatggaaaaagaagttcccgtccaccttatcaaggccctgagagccacagcaaagatcaactaatttttccatactgatatttttgttgcttcctttgtgattccctgttctctattccatataccttccaagactgtgttattgaatagtggtttataacctattaataaatcaagaaaattcagtggatcatgaaaacatattttgaaaatgaaagagaatcagatagaagaggataggagagaatattataaagaatatccaaatgtatctctgataaagataagctgtttggcttcatgcatttcctgggctgagatgtaaaatgtacttctcactgcagataggttgtggacaaaaaatctgcaacctgctgttctaagacaagtaaacaaataaaagtctgtggtgcattctgagaacaggctgcaaactaaatggatttcttcttttatatgaaatagatagtatctcatataaaatggctttgatagtaagatcagtagacaatagggagccttgggatttttgtttgctttttgtttttccaacaaaggagtagccactgtggttgaagtttcactctggtgattttacgtgtggtagatagaatagaggagaagccctgaattgaggaaagtaggtaggggttctatgactataattaaaatcaagcataatgatgcagtgacatagggttgaggggagatacaggacaaagtgatatggtgatggcaaaaatgacaatgatgatgatgatgatggtgatggataagttttatggagagtatataagatgtcaggaagtgatttaagctcattatggttattatttcatttaaatctcacatcaaccctatgagaccatcaatgaaagctggaaactgagcatgaagtgaaggagtaaggaagtgttgaggttgttttaaaatcattactggagacactggggacagtgggagaaaggtgatcgatgctctttagagatatggggaagagtgagagaaagagcttaatttaaaagcttattattaaataatatgcctgcacgcatccattcacatctcaaagatttgctgagggccacttgtgtattaggcagtacagatgatgttccagatcaaagaccaataagacgtagccctactccatgggaagtcaccatcctttgtgtgaagatcacagaaaaggtgattgtggacacacagaaggtacaatcagctccacagttcacagaatagagacctttgttgagggcctctgggcacagtggtctcattattccgtgatcatccctatttggtggtgtttgcttcccattggcatttctacctacagtggattttgtggattctgcaccaggtttcaaccttatttttacttacacaaaaggctttggcagacagttctagcacatcacctcttcaactgggcattgccagaaagaataacagaaataggacagttaaatttttctgtcaagggttgttatataaacacccaatctcaatttccttgcctaccaggttacttttattttctaaatcaacatttaaatcacaaactgaagacagctgcagtgttggcctagcaagaatgtaattttccttatttcattgagttgtgtacttggatttgacattgcctaagggataatggcgagggatcattttataaggaagccatataattgagcaattttgaggcattggggtactcttttatgagactcttctccatattttcttaaaccatcagctattcctcattccatgatactgttttcaaaatgcataaacaaagcctttctcaattgtgatatcagaaatgaactgatacaagaagaaaacagctctaaagaaaacacaaatatgcatttctgtcttatagaaccattcaactgtaaatattggtttacaatataataaggttaagccataatgcctacactaacgtgctatagtgattgtggcaggaataagttattttctttcattttaccttagatcaggcatcagcaaatttttcctgtaaagggccagatagtaaacttctgagacaatgtcacaactactcaactctgacattgagtgaaaacaggcatagacgaattgtaaatgaatgagcatggctgtgtttcagtaagactttatttacaaagacagatggtaagcttggtttggccatggttcagttgctaacccctgattttgaccatttgtattaaaatgttaccaaaataatattaattggacctaacatactacttgatatacaaaaagtgctctttggatgtgttttaaataagtgaaaagtttgtgtagaccattaggttttgcttaatttcttgactattttttacatttgtttcctggttctgtgactaagagttggccatttacaaactagatagtctgatccaagagcctatgccaagagtagccatttgaataatcagatagtccatgcttgcctccatggagtaattttgggctcacagggaaaatgattggttcctgatttcaaccactaaaaatgtctccagattctcaaaagcattttcaaaagtctctttttgaaccatgttaagtttagaaggggtaacaaattaagctcatcagctattttatcttattagttattcagtgtgtacatctccaggctaaatggatatacaggagggaggagccacaagatgcaagaagcctgggtccctgaataacggcctggaagagagtttgcccttctcaccccattgccaacctgcattagatagtgcttcagtaagaaatatacttttgtagtggtgttaaggcactgagtggttagcctaccccaacaaatacaagtatgtatctgtgagatacagtcttagaagtagaatggttgggccatttaaaatttagaaaaatgcaagaacccaaaagcaaatgcaataaaaagaaagataaatagctgggacttaattaaaccaaagagcttttgcacaccaaaaggaaaagtcagcagaataaacagacaacccacagagtgggacaaaatcttcacaatctatacaattgacaaagtacgaatatacagaatctacaacaaactcaaacacattagcaagaaaaaaacaaacaatcccatcaaaaagtgggctaaggacacgaatagaaaattctcaaaagcagatatacaaatggacaacaaacatataaaaaatgctcaacatcactaatgatcagggaaatgcaaatcaaaatcacaatgtgataccaccttactcctgcaagaatggccataatcaaaaaatcaaaaaataatagatgttggtgtggatgcggtgaacagggaacacttctacactgctggtgggaatgtaaactagtacagctgctatagaaaacagggtggagagtccttaaagaactaaaagtagaacttccatttgacccagtaatctcgctactgggcatttactcagaggaaaagaagtcattatacagaaaagatacttgcacacacatgtttacagccacacaattcgcaactgcaaaaatgtggaaccaacccaaatgcccatcactcaatgagtggataaagaaactgtggtatatatataagtatgatggaatactactcagccataagaaggaatgaattaatggcattaacagcgacctggatgggattggagactattattctaagtgaagtaactcaggaatggaaaactagacattgtatgttctcactaataggtgggagctaagctatgaggatgcaaaggcataagaatgacacaatagacttcagggactcagggagaaagggtgggaaaggggtgagggataaaaaactatgaattgtgttcagtgtatactgcttgggtgatggctgcaccaaaatctcacagatcaccactaaagaacttattcgtgtaaccaaataccacctgttcctaaaaaaccatggaaataataaataaataaatacaatttagacaaatgttgccaaattgccttgcaccctgttgcaacaatttacacctctaccaacagtgtatgagagtgtttgtttccccacgaagtgtatcatccaacttttggagccatgccactctgagagaaaaaaaaaatctccttggtgtttaggttgcatttctttaatgaatgtgagggagagcatcttttcaaatctatttataccacttgtatttttctgtgagccacctgtaatttgtctatattttagattttctttttatattaatttgtaataaagttttatgcaatagagaagttagcctttagtttgtcaaatgtgctataaagtttagttatttgcttatctgtcagagataattctatttttttaaaatgtagtgaaacttgttcctctctttgtttatgttttctgggtaggccttccctagtgtaaaaaaatatatatctacctatgttttctgctggtgcatcatttatagtttcattttttaatctttaaatctttcttccatatcaatttattattttcttaatgatgattgtctcattatctcaaatacaataataacccatctttttccctttacaaaaataccgtatttatcacgtaataaattttcatatgtattttggttcatttttaattcttcagttttgtgacacattttaataaatggacagggttaatctccattttatctctttatcagatttcccctgactaccttcacttaattattttcccagatgatgtttagattaatttagtaaaatcatcaaaaagaaaaattctgttggtactttattttggaatcacattcagcttatagataattaatgacaaaatttacagctttatattattgaattacttcctaatttcctttcttatccagttgagactctgtgttgtgggattagaatcattcctttggatactgtattagcttcctagtgctgctataactaatgacaagagacttagtgtcttaaacaactcaaatttatcatcttacagttctggaggccagaaatctgaaatgggtctcgctgggctaaaattgaggtgtcagcagagctttgttcctttctggaggccccttgggaagaatttgtccctttgacttttctagcttgtagaggccatctgcattccttggctcatggcccctttctccatctttgaagccggcaacattgcatctctctgaccatgcttccatagtcacatatctccctgattacagctgggagaatttctgcactttaaagtacccatgtgattagtttgagcccacctagacaatccaggataatctccctatctcaaggaccttaactcatcacgtttgcaaagttccttttggcctgtgaggtattatattcacaagttccagggatgtggatgtggccatcattgggggtccattattttgcctactacagatatattctcaactgccatgtccctcttcaccttcattgaattgaactagaaaagtcctaactcaaaagaggatatttggattaactaaggctggggaattaaaagtccgatatggtgtatttagcttaacagtgtttagataccaggatgtttatttttcatttaaaattcccagctactaacctcaaacggaccttttggcctgtcctgcaatcctgtgacattgctggcccgttagctgccctctcttccactcctctcctctttcctcaaacctccaggacctcttcgccatcctcacgcctagtggattaaattgcttcctattttgttggacgctgagacgcaatctggagtaaaatcccacgtgccctcccaccatcttctaactcacttgcatcagtgtccatataactaatgcccatctatcattatagtgtaaaagaaggtcaaaccctccacttgtgctctggatcccacccttgtggtctactctaggaaatcacccagtaatttcccaactcccccatcctcaattctttcctctctatggtaaattctggcagctgatgatcatgttataatagcattcatttgaaccctggaagcaccagactcacaggagagggttctacaaatagataaccacaaataaatccctatgatcatcctaatgtgacagagaacagaaatgtgagcttgactatgtgtccattttcattgtatcatgattttcattatatcctattaggtttggcatcatttctttaggctttaggtcctggctacagtatttattttcctgtgaaaattattcacacagtgaatctgaccctgttgagaacctccatttgaaggtttgcatggggatcaagtggccacatttagaccaaagctactgtcatagagcttgccaccagccacacattccaaggatctcagtaaatatttgatgtctatattcatatgcccaattcagtagcttcagaaaccctcatgcgatgcctgtttctttcaccagccacacaattccctctctcctctataaatgagaaaattatttgtaaatcattagttcctattttgacagaaaatatgaaaataactgctgtggcctgggaatatcttcaaacatttcgatagcacaaatctttctctggatgtgcggataaccacacagcctcagaaataattaatggagacagagcctctagtagacaagttttataaaattgtttttggtaaaggttatttgtttagtggactctttaacaagcaggaacaaagaaaaaaatcaactggatttaaaaacaaagccacagagagtatctgttccctgatatcttatctgatgtgcattcaaaccaagtttcaaaaacttttcaaagtcatcattctcttcactacaaattaagtttgctaacaatattgccatttttttttccttaggaatgaaaagaatgtctgtgcttattaaagggagacaaaactcttggcccgggccccacatgggccactttgtgagttatgttggagggagaacaggcctcatctccaccctacaaccaaaccaataccaggtaaggcaggagggcgtttctcaaggataagagcgacacggcctgacagtcactagtattcatttttcacaattgcctaagtgattttcttcttatttgagctgagggtctctatgtgtgagattagcatgaaaaaataaaacagggtggggatttcctcttggaaacaacatgctgtggttgtggtagtgaacaaaccgtgacaagaaagccaaaggtgcaaggcatatgccagtgaaatatgcatgtcttgtcagcccattggccttgtctatctctctcttctgaactctgtcataacctccaatggagtctcaggttctgcttcaagaaaaaacgtggccctaagactcactatccaaagaaaaactctggtcagtgtttttgtgctactctttctggtcaaagaactgagcctcctaccgcagaggcaagtcgcccaagctcacaggtgtgaggagtgacaggatgagttcacaagtcctagtctttagacctccaagccagcattctttctgttagccacagctgagccaagagaactgcaccactggcactgtgggtgacagaatgtgaatgtatgtgtgtacagcaaggtaggtcaacttcagcacatggggcctgataatttttgttgcagggggctgtcctatttattatagggtgttggtcagcatcctcagcctttacccactagatgctaggagcatccatcccctaagctgcaaaaaccaaaagtatatccagacattgccagatgtccccagggcatggggagcaaaatcaaccctgcttgagaaccacctatttgtgtgtatatgtgtatacatatatatgcacatatgttgtgtatatatatatgaactatttatgaataaatattcatgaagcatcccctcgacctcctccaaaagaaaacaaagtagaagagaagttttgcagataccaaaatcctccgtggaaatgttctagtttctagaagcttcctatccctcttctgctttcctttaagtttcaggcaccctgcccaatgttgcttttcatggcagatttactttatgtgtataacatcatagtttttcattctgcctcaaagtagctgtctgctacatactaatacaaattaaaaagtgcctttataggccaggtgcagtggctcacgcctgtaatcccagcacagcactttgggaggctgaggcaggcagatcacaaggtcaagggattgaggctatcctggccaacatggtgaaaccttgtctctactataaacacaaaaattagctgggcgtggtggtgtgcacctataatcccagctacttgggaggctgaggtaggagaatcacttgaacccaggaggtggaggttgcagtgagctgaggttgtgccactgcactccagcctggcaacagagcgagactccatctcaaaaaaaaaaaaaaagtgcctttatagacaacagtaaacatacagagacaaagttttatggattcaaggaattcaagtacatgtgtctcatctttactggaatcaggatctgtttaaaaaacaaacatcagccaatcaggtgtgcactggctccagtgcaacatacaacacaccagctgaaaaactggctaaaaaggagttaggttcggtaaaatccctgattctgagttggcatagggtcaaacgacaagtttaacagagtgttaaggcattcttttcaaatgggttattttgaaaccaaactgagatagacacagcttttcttctgaccctttaagatgaccttcctgaaaattatttttaattggttgttcagaatccatatagactgttgatatacacacagctttcctttgtaatgctccaagttgaccttccctttaaataaatgtattacctgacatgcaaattgtccctcttgaacatgtccttcaaatggacactaatgccagccaacaaccaagaagctgtagtttccttcctgtgtgaatattaggtgtgagaagagttcacagctcacggctttggcagagccaatatttgacttgcagtgttccccggcagaaaggcagaagaggccttacctttgggaatggtgatctgacagctcaggtcacagtcctgttgcaactgataaaaagccacttcctgcagccgggccctctccagctctgagagactctggatggggactgacctcagccgtacactgcggcctgacatgctgttccaggtgaaatcaccctgtaggccaaaaaaaaaaaaaaaaaaaaaatcaagagttacagagttcacttacctctcacaaatctcatcctctcttagtaataaagtcaagcaaaccacctttgtgttccaaaattgggtctcaattcccaaagtcaaatcctcttttagttcactgtggattttctcagttagttgcaaatgtcaaaatctcaagtatctgctgggtcacatgatcttatctcattatgcatataggcctgaggaaactatgtagaaagatactgtgagggtcctacttcctcctttttatgggaacacatgggaacttctaacttttgtgaaacactgtgctgctgctaattgccatcacacacatcagatatagggggatgagtgtgtatggagagcctaccatgtgccagcggctgcaccaagggcattttttaaaattggcaaataaaaatcgtacatattcatggggcacatggtgatatttctatacatatggttattagatatatatttctaataattagtaactaatctcaaacacttattatttctttggttgctaacattcaatatcctccttctagctatttgagatcatatattactgttaaccatagtcaagggctttttagttaatccctccaacaaccttatgaagtggttaacattttttacctatctcatgtaaaatttaataatataatctagtataatatatgagaatatattataatagtaaagtttatacttatgacatattatatgaatagtatagtaacatataccaatataatatagatgatgaaactgagtcttgaggaggttaagtaattctccccaaatcataaaacttataagatttggaataaggactcaagctaagaatgtagggctttaaactctatgctaatattgtaaccactgaggttctatttgtagcactctcatgagttattgtgaacacaataagcttagagttatgatcaacaggaagatgttcagtatttatagagacatttgatgctaaaatactccacatcaaagagtcaaagcaaagatttccacaatcctaaaagtgtactcatgtgtacacatgcacacccttgcaggccactgagggtaaatggctccaccctcaatgcagacagtaagaaagtgacgtccaaagaaaaagtactttacaatcctctgaaacccagtgtctccttactaaagacttcttgtgaatctcatgtatcaggcatgctgcaacagatttgaggaggcagctactgttgctcaatgatcaagaaagaaaagttctatcagggaaggagaggtactggcccacgcagggactcattgcaataaatggaacacttaacagaatcccataagacttcaccatcttaaagaagtcactcgcctggacgtggtggctcacacctgtaatcccagcactttgggaggctgaggtgggtggatcacctgaggtcaggagttcaagaccagcctggccaacatggcaaaagcccgtctctactaaaaatacaaaattagccaggcatggtggcgcatgcctgtagtcccagctacttgggaggccgaggcaggagaatcgcttgaacctgggagggggaggttgcagtgagccaagatcacaccactgcattccagcctgggcaacaagagcaaaactctgtcttaaaaacataaaaaagaagtcactcaccttaaagaagggagacagaaagactggtcccagcaacaaagtgccatagcactttgtttcacactggtgacaaattcctgtctagtgtattcattccaaaagtgaatggcatgatgttaattctttgatattttccctctttatctgggatttcattcactcatttaatacatgaatatattatactctggtaggggcagaaaatgaacggggtaagtaaaaggaatggtgtgtgaaataatgataactgctaggaaggagaaaaaggcaaagaaggggaagtagaagaaaggaatttgcagttttagagacagcagccaggaaagacctcactgagaaggcaaaatttgagcaagtgttaaagaagttatggcttttagtttctttgccttgacatgtatgaattatatccagtggataatgatgaagactagcaggaacccaggaggagctcagggagggtgatgcaggaggggatgtggggagaggagtgagtgagcaaatctagtcaaagtgaggaggctgcagtcacattcagtgaacagaagaaaattcttctggggccagtgtattttgaattttttctttcttttatgtttttggtataaccagactaagaaaaaataggacatatagacattatggttggggactcaggccttgggtgtacccctcactcacaccctctaagcttagagaactacaaggaacactattggggaattttttttattattattttctcccagatagaaagtccccagatgagtttataaattttagatatcaagcttaggtacctacgggagctgactgttatttgaagtgtcaaaacagaattacatacctattctttaaaagcaatcaaagatgtgacctccaatgggcttaattatctgtagtaggggtttgacaatctttttctgtaaagaccacatagaaaatatatcaggctttgtgagccatgtgatctctgttacaactactcaactctggcttggtgggatgaaagcagccacagataatttataaatcagcgagtgtggccatatgccaataaaactttatttacaaaaacagcaggctggttttggctggcgggctagagtttcccaacctgtgaactatagcttatgactgaaataaagtaattcctagaagggacattttgttcttatttactaagtcctcctggttaattaattcaaacaatatttaataagcacagatgagatgctaagctctgtggtaggcttgggactattaagatgacaacacagtcctcgtcctcagagttaaccttcaggtaggaagaacacaaacaatccataaaacacagagattgtggtactagaagtaagtactaaatgcaatgaatgcctaggagacaaggctttgttatctatctggaggatcaaggaaagctttatagagaaggtagtgtttcaatggaggcttgaaagttgagtaagagggggcagggttcgcccagtagcaatgcaactttagcagcaggtgcaaaggcaaatgagtttgagaaaacaggcttgttcagggaattacaaggctggaaggaggaaaagggcaagaggtgaagccaagcagaagtcagggccagattctgtagggctgtctctgttggcaatgcaaaccagattagattttcctccatagacgatggctagtcattcaggaactttgagctagagaggaacatgagcagatttgaaatatagggaagatgactggaaacaagtttcctaaggaattaaaggggagagcaagtcaaagatgtggagatgagaaaagactccgtgctaagtgggatgctgattccaatttgaacagacacgggagaaacttagaaccacatagatgctagagaataaactggatgcagtgaggggaagagaaggggtaatctaggatgactcttgagtttctagcttcagcaactgggcagacagtaacactaatcaccaagatggggaatggcagagggaattatgtttgcagggggagaaggaagatcacccagttttggacatggtgaaaatggtattttcttttgaaaaaacagaattaaaacattactaagtctggcaaaacagaacctggccaatttatatttttcttgagctttgattttgtactctcaattaaaacagttccaacacaatcaaataatatatgttttttcaaactgtttacaaatgactacagttagcataataaaaagtaaagtgcgatgcttcaagtttactttagtccattatatattgcagcccacggttcttaacttcttggatttttaaacttctttgttatatttggaattgttaaccaaaagagagatctgaggttattttgttatggcagacccagtgaccaagacaatatctgtattttttgtttccttatttttactttttaaatttctgtgggttcatagtaggtttatatatttatggggtacatgagatgttttgatacaggcaggcaatgcataataatcatcatggagaatggggtatctgtcccctcaagcatttatcctttgaattacaaaccatccaattccactctttaagttattttaaaaatgtacagttaagttattgttgactatagtcaccctgttgtgctatcaaatggtaggtcttattcattaattctaattattttttgtagccattaactatccccacctcccctgatcccccacactgcccttccaagcctgtggtaaccgtccttctactctctatccatgagttcaattgctttgatttttagaacccacaaataggtaagaacatgcgatgtttgtctttctgtgcctggcttacttcacttagcatgacaatctccagtttcatccatgttgttgcaaatgacaggatctcattcttttttatggctgaataatactccattgtgtatatgtaccacattttctttgtccattttttttcctgaagttccctaatgattctcccatgcagccagggttgagaaccactgagctcaaggcttgaatagattctagtttgagtgtgcatccacattgttcagttaggctataataagtgctatgtagtaagtctagaaaatccaagaagtcctccattgtcaaagaaagatacaaatctaccaagggaaagaaagctatttctatgacagtcataatagtaaggacgttactttctgaaactgagagtaagcatgaccctgctttcttttattaaacaaatgaagtgatgacataatccttattttttcactcaacaaaaaaattaacttgaacctgacactctcagaagccactcttagccactacaatattctggctggttgttgcaagcttgtgagttgcccctctgcccacattttgttctgtggaggtagagagaagtacagtaaggcgtaatcaggtggaaggtgtggttggtagaataatgtctcccctaaagatgtccatacccgaatcccaggaacctgtgagtatgttattttacatggtaaaagggactttgcagatgctattaatttcagattattgagatggggagattattctgaattatccaggcgagtgcaatgtcatcacaaggagagaggtagaggcagaagcgagacaaaaatgtgataatggaagcagaggtgggagagagaaagatttgaaagagcttggctgctagctttacagatggaaaaaggagccacaagacaagaaatgcacacagcttctagtgcaggaaaagccaaggattctctcctggagcctccagaaggaacatggcctttgattttagcccagtgaggcccacatgagacttatgtaagtttgtgttgtaagtttgtgataatttgttatggcagcaataggaaatgaattcaagagtaagggggagcattagaaaaggaagttggtggggtgaagggcatgctcgcagacacttaaaaaagtaggttttgaccttccatcagattcttatctccctgctacctgatgctaaggtgctgcttcatactacaggtaccatcaccaatgatttgtgctggagaggtcccaagactggaattctgaaatcacttttcccataaaatagaattatagaaaattacatatagtaaatactttacgctctgtgggtcttatggtctctgccacagttactcaacttttgccattgtagggcaaaaacagccatagaccctacataaacaaatattccaaaaattttatctatgacatgaaaagtcaaggctcatataattttatgtgtacaaaatatccttccttcaaatttttttcaactatttagaaatgtaaacataattcttagcttgcaagtcatacaaaaacgggcatcaggctgcttttggcccactggctgttgtttgccaacccctgatatggagattagggtcatgtagtgccctacacatatttgtgtagcatctacagccatattccagcaacccagtcctagggccttgcattatcagccatatacaacagctagattcaggagggcaagacccttgtctggcttattcattttgatgttctcggtatctaaggcagtacctggcacttaacagccactgaataaatatttgtcaatctagggactaatgaaccagccccatcatgagttaaataaattggaaacctaaccaacccatacaatgttgtatatatgtgggaaactgtattctggattcgaataaaccattaagagacagtcttttgaaatagcctgttgataagccaagaaaaacccatgccagtacatgaggggagaaaataaatgtgataataggtgacgcggggaagagttaatccgtgatacctatacccacccatcagacttcataggagcagtaagacatgaacacaaaggtcatagtctccctttgactctcatggcatggaccataaagtgataaacaagcacccaggaagggcaccaaagcctaccagcacagtctagaatatgtttctggtggtttctcaaggctcacatgcatggtccagaccagcatttttctttggtgactgtttatcttataaatgaatgactcatttgaaggctttctgaatctagtcttttgagtgatcatcatggaatttttttaaggattgaaaatggatgatttcaaatttgtttagattttataaatgtagatgaaattgaaattcatccaatgtctctggatagactaaagaccttggcagttgtaaaaacatctttctattctagggtactatgtgacagcattaataaagggcagcaatatgataaaatgatataggataatggtccttggtggggtaatgttgcccccagtgagcatttagcaatgtctgaagacatttttggttgttataactggggcagcgtttgatactggcagctagaagatagaggctagggatgctgctaagcaccttataatgcacaggactactgcccaaaatcaacaactatctggatcaacttgtctacagtgcagaagttgagaaaccttggtttagcataaataagtctgctgttaagcccagattacatataatctccttaaaatgatggtgctggaaatattaacaattatttatatattttgtttatcataaaaatatgtactatatattcgtttatatatcatgcattactatgtgtattttacatgtatttttctacgtattatacacataaacagaatcatagggcttattttaagctagtattaataagtacaaacactacaaacctaattaaaagaagcaaaccaaaaaaagtttgaaaacaatagagtcttgattaactggagaacaactcaccaaaagtgttaactaaagagatttccttcccaccagaagtatatgtctctatgtttagaaaaaaagaagcaaaagacaaactaaaacccaaacaatctaatatctatgctttattcagaaagtcattcttttgagctaagttgcacctttacagacttgattttcccatgaaataaaattgattgaaataattttggttttgttctacaccacattgttttattacatccttggggctagtctctaactgcagcatctctttaatctcatccaactgtaaactccccagggccaaacaaggggtgaggcagggctgttcaaaatgtggtttgtggacccaaggcatcggaatcacgtgggcagaatgatcattgttaaacacgtaggttcctttggctctaaggtagatttagagaattagagtcacagggaataggtcccaagcacctccattataaagcagcatccccagatgagtcttactttttgcataataaaagttgagtctcactggcatggtggtgaagacttggattcagatagatggcagttctttggtaagattcagaaaatctctgatcatcggttttctcattattaagatggagaaaagaacaagacttaactctcagtttgtagggataatatcagacaatacaaatgaatttcttgtggaaggcttataagctcccacaagacctgaataaatggaaatttaagttataattaatattaatcatcaccactctaaatttgcatcaccatctgatgtggtttggatgtttgtcccctccaaatctcatgttgaaatacaatcactaatgttggaggtggggcctggtgggaggtgtttgtgtcatgagggtggatccctcatgaatatcttggtgctgtccttgcaatagtgaattcttgctctgagttcatgtgagatatggttttttaaaagggcatggcacttcttccctctctctcttgcttctgctcttaccatgtgacaggctggttccctgttgccttccatcctgagtacaagttacccaagggcattactagaagctgagcagatgacaccaccatgcttcctgtatagcctgcagaactgtgaaccaattaaacctcttttcctttctttataaattacgcagtctcaggtatttttatggtgatacaagaaggacctaacacagcatcttaacttggaagtattagagacaccaaaaactcttaagaaatgtgtgctgaattacacagcaagttttacaaggtgataagagatagagaaggaggtagcacagggtgaggggaataggagtgctgcatgagctaccaggacagccttacagagaacatgatttttgcaccaacccttaaggaggtgagggaatgagccaggcaggttttgggagcccagcagcccaggcagagactggttgacataggtatagcatagcctggtggctaaaagcaaggggtggcaagctgggctgcctgagtttgagtcccagttttgccacttactagccagccatgtggctttttagcaagctacttacattccccatgccccattttcctcatctatgaaatggggatgatgacagggattttgctgatacaagctgactagccggggagccaagtactgcctactgattgttttcataaatcaagttttattgatttatgaaaaccacagccacactcattcattgttattttctgtggcagcctacaggccacaattgcagagttgagttgttgcaacagagactgcacagtccatgaagctgcccttccgtaaaggtaaccatctggccctttatggaaaaagtttgctgacccctggactggactaaaagtaaagacacatctatgattaggatctgccttttgccatcaccattttcctcctctcctaagattttgtctctgagaaacatcccagagagcctgtaaaaaaaaaaatcaaacaacataatttagcatattagaaaatatgcaaatgctagcatgaaatagaagtggttatctgcaaatggcctgttcacctgggttaccgataaactaaagaagtagaaatgaacattgtcaaacccagggctgggctaacaccatctaaaaaatcaaatgtcacttacatcttgtttccagtggaaagaacctttccagtggttagcatagaggggacatactggaagtcctcaagggcaaaaacgtcagagcaaaaggtcaatttcatttctgtgtagtcccagttgaattgtggacttttctaatggccatcaatttaattctcagttctaagcttctctcgagtcttggatgggaggaagaaggtaagatggcctgcacaaatctcagggttgcaaaaactggaaacactggcatgaattagaaatttcttaatgacagggccagcagctgatggttctacttgtctttctctaattaaatttagttcactgaaattagaacgacctccggagatagattagaccttgaagatactgctcacatttatagatggtccgctctctgctagttactgttctaagccttttatttatattatctcatttaattcttacaacaacctaaggactatgttaccatcattattcccatatttcagatgaagaaactgaggcacagaacttaagtaacttgccaagagcacacaccaattaagtggcagagttaggatttgaagccaggctttaggttctagaatttagactcataaccactatatgtatttcataacatttcatgataaaccaatccaaacctctaactttacaaatgagcaaagcagctgcagtggcataatgggatctgggacatcagggtcatgttcccctctttccaccaccaagccctttcattatgagacatacccttataataatgaaagccagacagtgtttaaaaattcagaggcttaaagtttcctcttttgtaaaagacagcacaagcacatccgatgtattattagccttatttaatatccaaactgttcccctaaacccatatttatcacagccacagcaactaaaatgttgcacccatattcaagaagttaagagggaaagataaaccactttaccctttcagacttcaaaacagcctgtgcccgaatcttttacagaaattagctcaattatgctgttctgttaatcatgacacaatcctttcctgcttgagtttgctcatttcaagctgccacatcattaatctaaaaataaggttctcataaatccatattgacacagacagtttttagctgtcacacatctcagacactgatcattccagttttcttcctaaatcacaagatggatgtgaaagaatcacaaaactttatcacaattattttctgaaaaagtagtgtaagtatagatatttatattgcttacccataaattataatcagccgcgtctttgctgtcctctctaatctaactgaactaagcttgcagtaggaagttgagtctgttttaaaaaaattatttttttggtaaaaaatgcatcctgaaatggcagatcatattgaatgtctgagaaatggcccagctggcatagctgtgactcccacgataccttttgttgccagagacctccgctactgtgaatcttgggaccaaaaatatgcaatcttttcatcggatcattgagaagttcctgtcctttcagaacagaggcaggctgtgtccctgagtaagtgcacaaatgagtgagtgcgtgtgtttgtatgcgtgtgtgcctgtgtgtgtgtgtgtgtgtgtgtgtgtgtgtgtgtgtgtgagagagagagagagagagagagggtgagagagagagagagttggggaggaggaaagaggggagggaagggacaaaaagaatgagagtattttgaagaaatatactcgagttagaaaaggattcctctaaaaaaaatcctcttttccacagggatctacaaacggtaattggattgtaactgtgcaaactgtccttattaggaatcaaccaaagaatgttggaagccactggtgaaacccctgagagcaagataaagcacataggatgccttctttgtttaggacaaattctcagttcttaaattatattttaaaactactgactccatttttctaacactagccacacacactaaaaagcaaaagttttcattctctttcacactgaagcataacacatgctctgtattttatcctctttgtgggacagcagtccttgagaagttgttcatttcctgaacagagggtgtggaggtcagagtgaatatacccacatggccatatctaagagggttcaggttggggtgggggttgggggtggcatccatgaagagcagagagaaaagggaagattaattccaatcgcgaattaccttgatctccatgcattccacatggcactgaaccaaatacaactcgaaaagacatctttgtttcccagtcaataggaagttatagttctctcatgggtctcaagtgaattccaacaaaagaatcactgtgattataatttacaaaccgggaaatgatttcatggaagatcttactgattcaaaattaaggactcggtatgcttttactaggattctgtgaaactaatcatgtaagccacacatagcctctgctgctgctgctgctaaggaaggaattttaaagcagtaaaatattccaggtggttttctttactagaatgattaaacttaaacagagattcagagtaaaatctacctgttactgcacatacctccaccaccactatcctaaaaactgatgttgaaaatacgcattattccagtagacagtcaacatggctcatactggatactcatcaatggaagttacatcctcatttaaagatatctaatatcttaatatcaatatatctaatatcttaatatattatttcacatgaaattgataaatatgtaattcattttttattattaggcaaatgatcctttagtttataaatagatgacagcaacatgtagttctgactgagcacttactaagtgtcaggcattgttttaggcattttatgggcactgacttatctaaccatcaaaataattcttagcagtaggttacattattatcctcatattacagatgaggaaacagaagcgcagaggagttaagtgacttgctcaaagattcacagctcataagtaatgcggctgtcatcccaaccactatgagcttacaaattaactggaagacaaaaccacagttcagagtcagtactagtaggagccatgttataagtatctaataaggaagagacagtgatgaaataagaatgtttacctaacactagagtggtctgttaaatcaattatttgatggagacatacactgtcaggtcaataaatgtttcgtaagaaggtgactaagtgaataatctcaaataatcccgagagacaacatcttgtgaaattcctagtctgttttaagagtggaagcaaggcaggccttaagaggaagtgcagaaataatggagaaggtgtgtatatttggtattctttggaaaatgcattcaaaccagaaaaacaaaacataaagataaggaatcctttttaagatttaaataacaactctttaagtaaaaccaataagagaccaaagagtcactgaaagagccttggaaataaatatcaggaagcaactaaaaggttccatctgtggaagagtttcgctaatcacaaaaagtgctgagagcacaatggtcatttttttcccatttaaccctccatatctaagcataccaagaaacaatttatagcctaagaatctatgccattaagcattcattccaccttcttcttggctcttattctggattatttctgtttatatcactggtgatattttgcacatttaaggcaaaaatatcatagaatcactgtcaaactttttgagtgaatacatttctgattacagtactcttttgcctaaaaccctttgatgtctcctccttagctccaggacaaagtccaaattccttagcctggtatccagtgcggtgtgcttttacttagatggaataaaatcaaatagccactacataatagtgaatgataacagtagaagtttactgagcatgtattaggtgctaagcacttcatgtgtgccatgtattcactgcctccaacaatttcattttatagaggaagtgatggaggcacagaaatggatggcgcacagtgaggaaaacactgactgctcatgaagcccgtagcccctttttcgtgggcattcagctagtctacatttcccagcctctcttgcagttaatagtggtcatatgactggagtctagctaatggaatgtcagaggaagtgacaagcttcatttctagccccagtccataaaaacctggagacagcatccaggcaacctgcatagccatgtgtggtagtcccaggagtggaccacatttttcagtgttctttgcctagtgtagtcccctgcccttcaagcccgcctggctctatgagttactttaaccaactgaatgtggcagaaggggatgccaagcccattctggacctgagacataagaaggcatggaaacttctgcttttgcattcataggacccttgagcccccatgacataggtgtagccactatgttgaagagaccacgtggagaggcaatatagccagcgtgaaaggtttagttgccccaatgtctcaacctaaatccagcccaccctacctccagctgaatgaaaggaagaagcagcccaggttcagaatcattgcttggagcacagctgtcccaccaattgtggccaatctaacagtatgaatgacaaatagacttatgttgtgaaatttggggatgtatctgatatagcagctgacctcactttcctgaacttcccatatgaacacagataataaatctaagcagcctgatctggagcccttgcgcttgaaactcctcctatacttctccccactgaacgacatcatgactcatttcgtcccttcctacattctcacttggaaacagagtagttgatcaactggatggtaaagtaaaaattgctctttatatattgttttgctgagcatgtagaaagtctttaatataaaagaagacaaatatatttctaatgacatccttcagattttgaataatatatagccaatggttagaaataggtaatgcttttatctttcaaaatcatgactgactcataaaatggcacagtgaaatttcatttagattatattcattactgataaaccttccattggtcctggtaaccttttttgagtgtagcatagagttcgcatgtaaggtcttaatattttttaagactatatataaaaatgcaaattgtgagagacattttagttcatctgctgccttacagtgctcagtgaaaatgtggtaccatcagtttaaccatcagactctatctttgtattgctcagaacttccaggggctaggtgataagccaatgtatattctctcattgctgccatttgcttccttaactgtagctgtccgtcctttccccattcctagcaccctgaccttggtctaattgctagcgtccttctgatgctactgtgacctatttgcacggagagaatgttttggatccttcagatctaaactctaccatcaaagcaaatctagtaactggaaagctatttaagaccatgaatctgaaacagtcaaaaccacaataaagaacaactaaaatttactgagtacttattgtctccatgaatacgctatcctctaggaggcaggcactagaattatctctattttgcagataagaaagttgaaacaaagagagcgtaaagcgtaaagagcttgccagaagtcacacaactggcaagtaaagagttggcactcaaacccaggcagtctgttttcaaatgcaataattttaacccctaggcaatatcacagcatgccagcaaccttttctttattcacttccttggaagacctataaacaaagtaagtatgacacagagcatccaacagagactggaaggcctctctgcaactgggagaattttggtaaatacatagatgacagctcagggctcaaagccctgtggaattgagacacagaaatatgcagaaacagaggcagggcaccaggatgaaacagagaaaagaaagccaatagatggggcaatgacctccaggaataaggagagggacaggtatttcatttaaagaaaaaaggaacagccatgttagaaaacctcctggatgccagatcctttacaagtagaactagccactctcagttttaggtaggggtgtaacaccatgaaagagatgttttaggaaagatgaatgaggccgagtggtgcagaactgataggaaggggataaagagaggaagcaaactgagtctacaatgtaaccggtaaacggaggctctacctgtggaatgaactgataagaagcgagtctaggcagcaataaaacaagctgactctaggaattctttctttatgagagtccctctctttttccaataaatatggatccccagaaaattaagcccaagattatagctggagaaatacctttgagtacagagtgtgaaatttgcatctcattttaggtgcccaggagggttgacctagagaaaagcattttatcttgattcttatggagaaatctgtatatcgctggttctaccacactgcagagaatggtacttattttgtagctgctccttctactcatgtagtgaggaacgctgagttataaggttggatgcttcaggtttcttgaaataagaaggaaactcagataagagggcactcattctaggtaagatgtcatgtgaactctttgtagggcaggtcatttattctgttatgggtatattcactgctcattaaacatggaatggatttcagagcaagattacctaaaagatacagggatgctgaagtactgtcacctcaaactgaagaacccaatcccaagtcagatatttacaaatcagcaggatataaaacaagccttaaggatagaagaatatcgtatttaggagcttgaaaactcttaggccaaacaaactaggcaaaataaaaaatgccaaagtgaattcctttccactttctcatttcaatgctatatttggtgacattgtgtttcatcaattgcactttggcactttgcaaaagtctcttctcagtggggttcttctctaatgagaaaggaaaacaatttcctcaaaattacatgcgacttcataaacatattaagttaataaattaattttggatatcatcaaatatatagacgttgcttctaatctgttgcctaaaatgtgagctgtggacaatgagcctctcggttttactgtaagataatttatcctattaaactcttttaataagtaattcaaaatctacatgaattgttgtaccacttcattctaagtggggaaaagcaagttattcatttttagttgcagtctggtagttaactcatctaaatcttgtagagtaaatgagcaagcaagctgctttaaataaaaatatatgcggctacatttctaggctgcagaaaaagtctagcattaatgatattttcagaatcatcttccaaagcaaaatgacctcagatacaagtggtgatacattttagaacaaatgtattctccaaggaccaacagttctctaagttcattgcacattataattacttgctgtagttttcaaaaatttttatgaccatgtccctctccccaagaacagcatggtccaatagacttttctataacaatggacatttttgttaacagtactaattgctaaggtggctactagccacccgtggctaatgagcacttgagatatggccagagaaactgaatattgaattggtaattgtatttaatgttaattgattcaaatttaaattaccacaggtggatagtggctactgtattggacagcacaggtatagaccaagtcaattagactgtctggggttggggctcagacaatgatatatttataaagctttccccaaaattctaaggtgcagtccaggttgagaaccattgtaatggccagagcttaatgaaactatcagggaagacaaattccttgaactttttccaggatccataacttttctccaaattccactaagaatttgtcatgtacctttgcttccctccctcctgcctccactcctcatttcttgcacccttccacatactcatgtgatgactgcactctccatatattccttcattgactgattctgccagatttctcccacaccgagagcataacgtgccctcatctcaaagctcagattctttttttcctttctcttccattgacagcagaaagaaaacttaacaatgctaccaattaagagattaagtctccaagcacatacatccataatttaaaattgtttttcacgtgcacaggcttgatccagatgtcactttccatgagctctgccatagatgtgatggggaatattttgaacagtagcacagttaagcagctttcatcttatctgttcattttgccactgtttcattcaaatgggatgcagtgttatagcacagtggttacagggaggactctccttctggctgcctgtgtttgaattcaagttcagcatataactagccatgtgagtatccaacgcttttaagcctcaattacctgctctgtaaagtggagataaaatagtcctgtagggaggagagagctatgcatgtaacacttatgataaatgaacgtgtcacatgcgctgatagacccaggttttgattgctttttccctacacccctccccaaacctcaccctttttttttggtaaataaagcaaatagcggggccaacttttgaaggagaaagtcatgaaatccctaaaagcatgttccaagtatttgataaattaacgtggcaatatgaagaccattttgaaaacagttacaaaaaaatcaattatatggtaatctgatttttaaaaattattaaaaatttttattttaatgagtcatttttcttgacttccatgccaccagttaatattaataggatggacaaggaagggtatgctgtaaacatagctacattttatttcatttgtaaaaaaaaaaaaccagtagactcagaattccagaattcagtgatatgaacataaagaacatgatgtccaatgttcaagtacataatcgctttgttgaccttttggtaattttaactgttgtaccctaacaacatgttcccatgtcattttcactcatgggcattactgatttgtgcacgttcacattttctacacagagttttgctgcttctttcttgttaagtatccatctatgggtagattttttttttaacctcagaaactacaaaattacaacccattagcaacataaaaatttgtagtcaccacaactactaattagtggtgcacagtaaggattattcatcagtgactcacagcacagataaaataagctgagagctatgtcctggatctaaatccaaaagatttagatatgtggggaatgactatcatctcttgtacatatagtgtgtacccattattattccagtcccttatggtgtactcatggttttaatcattaaacaatcttaaaatgtgaggtttattaatatgcccattttatagatgaagaaatcaaagcacagggcagtcaagtaacttgtcccaggacacatattgcaagtggcatggctgaaattcaaactcagggaccttagtcctgagtttgtggtcttaaccactatcctatgctacttttctgcaccttgctctcctactcaagaaaattcatcaaaataactgtatgaggtggttctaggctcatctctaattctctctcatttagttttcttacaaatattctaaagtttgtaacttaattattataggtaataaattacttctaacacattgactgaggcatgccttgaccttgaggtggcaactgttgacttaaagcagggtcagcaaaggacagcctaaggcctatttttgtaatcaaattttattggaaaacaaccacacccactcatttacctattgtctgtggctgcttttccgatacaacagcaaagttgagtagttgcaacacagacagtatgatccgcaacacctaaaatgttttctatctgattctttacagaaaaagtttgccgaccccagatctggacccactgaaaagaaatcaccagatatatgacataggggatgacaatgttcacatttcatggtggagcatttcactatttcaaacagcaaaggaaccacattttttttctgtttctttttttaattaattttaagttccagggtacatgtgcaggatgtgcaggtttgttacataggtaaacatgtgacatggtggtttgctgtacctatcaacccatcacctaggtattaagcccagcatgtattagctatttatcctgatgctctccctcccccaaccccaccaccggacaggacccagtgtgtgttgctccccttcctgtgtccaggaaccacatgtttttaaaactatgtttgtgacatctctgtatgtatgagcagatgggtccacagagatcactcaatgtctaattttcttttacgcacataatgagaaaaagctcagggagaaaaagtgaaatcagtagcatggactttagtatttggtatgagctacttattaggaatcagcatttcttccaagtattctcgaaagaaaagacattcatactagagtgatgcctatcaaatccactatggccggcctgagaaacttgtaattaaaaactacaaacattatagatttgtctccatattaaatagatttaactatctctacatctatgtgtatctatatgtatctcttgactattatatatttattatatgatgaattatatatgtgacatatttctatcttatatagacaaatatttataataggtatgtgataatacacagtgggtaaagggtacgtatgcaaatgcatcttgctttaagtaaaccaattatttgaaaatacacacaataaaattaggggcaatgattctgtggttcaaatacatcagtatgggttccctgcagtgacccaggaaaactgaagcaaaatcatttttaacattgcttcctatgtctctcctactcacactcagaaagtcaccagtttctgtggatcccacctcattaaaaactgtcctttcctttaacacttcctctctgggaatgtccaccagcacttccacactcttgtaggctgtctctccctacaaagcaaaactcatcttgtcccttcccttttgaaagccatcattgaggctcctagctttccagatgaagttctcaactctgaggtgaaaacacaagatcgctcaagatctggccactgcttagctcttgggcttcaccaagcctcacttacttcacatcccttaatttcagccacatggaagagcccagaggacttcatggttagggtgaggggtgctctcagcccaaatggcttccccatgccttcctactcaccctgtaatgcttactgagcatcacctcctctgagaagccctgtcgtccccctacagggacattacaaatgaatcatcacattaacaagaaaatcataccatctaaaacacaaacaagtttactatggacctataaggaacaccaaaacatgaccaaaggaaattcaccttatgtttgttaaagaaggcgaatctgcttctttcaaggttccaaatgacctagacacttgagatgtctagacaatcacttgtgatgtctcattgagggaggaaagaggaggggtgggaatgtttaaatgtcagctatttttccagaaaactctaacgtcaccgatacgtccctcctatgtaaccatcacactcatctccccccgaccctgccccatctcagctattttcttgactcttatttaaacattggaaagctatttgattatctatatttgtgccttttctccctggctagactgtaggttctggaagaatagaaacagcactaacattttgtgcttttgtatatttgctggttgaaagaaaatttgaaggagagtagcaattctgtctatacagaaaatcatttctgtctattagcatggaaacaagaccagcagggaatatttatatttaggacatttattttaaagtagctaaaatcacttccagtaaaaatgcaaaaaaaagaaaatcttgcttcctgacttttagtattaagagacaaacatgtaaaagggaaaattgaaaagggagaaaccaacatgaagtatgacaccaaatgcaggtatgacgtgaaaacaagccatctgcacttactggttcacatctgattttctagctgccacttttcagatttatttttcaaaaatgttttctcctcaatatacgacttttaaaatgataaattacacagtatttcacagacctgtgtaaatacttttgctctgatgtatagaaaatcatgctttctctgagcaatgaagcatattgaaatttacattttcaaaaataaattatagtaaaataatagaagagcttggacataaaaatcatatgccataaaagttaccactttaaagtgtatagttctgtgtttctttttagtatactcatagatagtgtacaaccatcatcactgattccaaaacattttcatcacaccaaaaggaaagcccatacccagtcactccccattcccctctcaccccagcccctgggaaccactaatctactttctgtctctatggttttgcatgtttttgacatttaatataaaagtagaatcatataatatgtgggctttttgtgtctggtttctttcacttagcatgtttttggagttcatccacgttgtagcatgtgtcattacttcattcattcttatggcaggataatattcactgtatagatatactaaattttgcttgtccattcttcagttgatgggcatttgggttctttccacattttgactggtatgaataaagctgctgtgaatattcatacacactttgtgtgaacgtaggttttcaatgattttgggtatataactagaagtggaattgctggatcatatggtaactatgtagccaaaaacaaaaaaaaaaaacgtagacaacatgactccaaatagcaagattcaaacacttattttagtgcaaaacttgttttccgcctcattccattcacatgagatatcaacaattacaagaaaactcatgcaatgtttccacttcatatagatcagccatcagagctttttccaagctgtgataaggaacacaatccttcagtttcttttgctttttacagtctgatgaatatgagtgtcttgaaaaatttagaggtttctagtattctttttttttttaaaaaaaaattagccctgtaatggctataccacaaagagtagattaactaatttaatcatttatgtttatattttaactctaaagactaattgttgatatccagcatggcaattttacttgttaaagtacagttcagagtttagttcctttcagggagatattcttgcctatatcagaagagaagctaaaaagaatgctacacaaaatagatcaataggcttgctttaattactcttgtcctctttgattttattgcttactgggtgaggaaaagccagaagaatttaataccccttacaagatagtcattgcacatttcatgagttgctagggtcaaaagcagatgaacaaatgctgaacttcttcctggctctacagaacacgaccccacaccctccagggttgagaaatggaagaagccactaggataggtagtgcagaataatatctctcacccctaaggtttccacaccctgatttctggaacctgggaatgtgttaccttacatggcaaaagggactttgcccatatgattaagttaataaccttgagagggggacagaagtctagattatccaggtgggcccaacgtaaccacacaggcccttaaaataggacaacccctttcagcagaattcagagtttgaggaagatgtgactatagaataatgatctaagagatgtaatattgctggccttgaagctggaggaagggggccatgagctaaggagtgtgggtggttttagagcctccagaagaaatgcagctctgtcaacaccttgatttttgtccagtgcaacctgtgtcagatttctaacctacagcactttaagataataaatgtgtattgtttcatggcactaaatttatggtaatttgtcacagccatgatgacagattaattcaaaagaaatcagaatatttttatgcctgcaagggacacatacattatttaatgcaggattttccaagctgttccataatcaaatatatttgaaaaagttgtgcatggtagcttcaacttaagtagtcacaataaacaataagaataatagagaagtcctgcagaggggaaatcataactcggagtacctcctaaatacacttgctataatctcacctccttctattttttatttttttttaattttcagaccatctctccatatcactcgaattccccagaatatagttgggacatgctaaactaattccatctgctcagaacctgaggcacaatgggaagaagtgacaagccaaggtgcagcttggcaacacaaagacataaccctggactcatactctccatctggagtcccgtccaggatgccactctgtcttgctgtatctgcatcacagataatggcaataacaaagggatgcagccacagtgtgtttcttaaggttcagacctagcttaacatgatgacttgtttttctattgccagaatttatgaaagttagatctttggtgggagaagagggtatcaggtgaaaatcaacccaacaaagctcctaacagataaatttttctacttaataatatcaaaaacaatacagctgctttagcactgaatatattttattatttaagataaaagcattcaacacactattgaaagtttaataacttcatattaacaagagtaatacaataaaatatttccccacagtgatttatcctgttcctaaaaatgcctaattctgctgccaaagtctattttccacaaattctagtttccaaatgttaacttgagaaggaacagagagagacaaccaaatgccattgtcttccatcatagcacttaatgttttctccacatttccatttcccattgcctgtgttccaagagttatgagccccttgtcctttgatgttttttcagatatgcattatcctcatcctttttccaggatacacaatgggaccccttcttccacccctccatttttttttaataataataaagattatgactaataaacctaacaactttcgacacttatttttttgccaaagactatgccaagtgcatcacattaataatctcatttaatctcaacaacaaccaattgaggtaaatattactattaatatctatatttaacagatgagccaaatgaggcagagaacttaggtactttgtcctaggtcacataaaaagtggctgagccagaatctgaacataatctgatttagagctggggtcttctataagcactagcttagtagtcctctactggggtgattctgcccctcaagggacatttgccattgcctggagacatttttggttgtcacaactgaggaggaaagtgccagttgtgatgggtggagtccagggatgcttctcaacatcctacagtgcacagaacggcccccacagcaaagaatgatcccaccctaaatgtcaacagttccaaggttgggaaacactgctctaacctaatgtctcccaatgtcagctcattctgaatgggacattttttggtaagacatgcaaatggctctcacctccaggttagaatcttctttctctacttgggaaaggaggttatctcaatctggagtggatggtacttagagccacagagtccatttggtgtatattatcatagcatcaatgtactcaaaagtttaagctggcatcctgggacactaggtcattttatctttttgtccctcagtggatacatgaaagaggcactagctcactagagcgtgactgaaaagagccagaagattctggtttttgttagtcttgccttgtagtcaggaagacacaatagcagcgtctgtgtcacagataatggtaatagcaaaggggtgtatccacaataggttacttgaggtccagacctagcttaaaagtcaaaatatttaggccaggcatggtggctcacatctggaatcccagcactttgggaggctgagatgggaggactgcttgagtccaggatttcgaggctgcagtcaagacatgattgtaccactgcactccagcctgggcgacagagcaagaccttgtctcaaaaaaaaaaaaaaaaaaaatcaaaatttttttcggagcagttctgtgaataccatttgacccagcaattctaatatctactttatagcaatacttgcaaaatgtgcaagatacatttgcaaagacattcacttcagtacaatatctgatagcaaaaaaacccagtcaccaataaaaacaacggaaatgtgagcatatgttcaccaaaatatgtgtgctagaatgttcatagcagcattattcaaaacagccccgaactgtaaattatccaaatgttcgtgaaagtagactgaataaattgtggtatatcacataatggaaaactatgcagtaatgggaatgaaaaaacaaactccaaccacctacaacaatacagatgaatcccagagacatcacgttgagcgaaagaagtctgacataaaaaataacatgctgtaggataccagtaatgtaatctataaaaccagataaaaccaatatatgctacaaaaatacagaataggggttacctttggggagaagtgactggaagggagtccaagggatccctgtgaggtgctggtcagggatggttctccatctggcacaggtgtgttcactttgcagaaattcattaagttgtaaacttatgtgcacttctctacatgtgtattataatctaccaaaatatatatattaatacttatatataattaattttattatatattagttatatgcatatatgtttaaagaaacataaaaaacctaagtgtccatcagtgagcaactggctaactaaactacggggtatctattcagtggaattctgggcagtcatgaaaaaaagtggagtagttctctctgaataaatttggaaagatatccactatatgtaaagttaaacaaagaagttgcagaacacaagttatggacataaatgtttattataatttaacagggagatctggggttatatattctcaaatggttattagtggccatcactggaggatgggatttgtgggactttgacactgcctaatgaatttttatagtgttggaatttatttacatgtattatgtttgtactgaggggaaaaaaggacatttagaaaattaagatgaacaaaatatatcttaagtttgagattgttattatttcatcatccatgaagattagggtttctgatagatgaaggaaacgataatggaataaacagagtgtcttgccttcagggttgctaactgaacccattgatggaggtcactttggtttgttgctggcaatgttaacaattgcttcaaattagcacttctttgctgggttgctctacattcaaatccagttgtggtgtggccaccacaaacaagattcttggccacacaaagaatgtgtctacaaaatggtaaaacaactgaatttgtttaaattaacaaaaccatatactcagaggaaggaaaaatcaaaacagctacacccaaagtaattcactcggatgggtggttcatgaaatgcacccattcattaaatcaacatgttagcagcctcaagtggactctgtgagagactcaactgcaatgcaatattcctgaataaatcaagagaccataaaagacacttttttttggcccatcattagcaaacgttttctgagtgctcactgtggttctgccatcctgctaaaactctggggatgtgataccacctttataattgcaaatgtcattatgttgagtgttcttaattccaccaatgacattgaatggaaattagaaaaacatccactgattcaggcaaagttgataaaactacaacttctcatatacagtaaaggtctggcagatgtaacaatttataaggtagaataagttgtgttcaatggatctcaaccatggctacacattatatttgatcgaaacagaatttctggaggtggcacctggccatcgatatttataaaagcttccccaggggattcaaaaacatagcaagagttggagccaatgcttagaccaagtaaatcagaaactaggtagaatggaacccaggcaaaaatattatttaaaagctacacgaatggttcaaaaatatagtctatgttgagaaacactgcttctaaattgatgttataaatgaagccagaggcgacacttcagtaagcattatgtaaagagactcaataccacctgtccttatcttgtgcagttttgttagcaaattatcacaaggtagtattctaccatgttatggtttcagacgtttcatgtaaattatatctatatctccatgtgctctatttacaacatttcatttgattccaacaacaatcctatacagaatgtaatattatccccattttacacaggagggtaataaggcttgacagagattcagcatcaatccctcagtttcacaaagtcaagattccacagtctatatagtcatatcgtgctctatgtgcctgaaagcagtgtaccaatcaaagaatgttttctaagtatctattatgagctaaattctcttctaggcactgaggagatggagaataactataagatagggtcttctgtaggatacagcttacagtctagctgagaagctagtatcacatggccaagtttggaggattttgcaggaagatttctgaattggtaggagattggtcctgactggattccttccaagatttttctctatgacacaaattttgctggagaataaaggtaaaattatttgtgtaggaagcagaataatgccccccaaaatatgtccacatccaaatctcaagaatatgtgaatatgttatgctacctggcaaagaggagttaaagttgcagatgggattaatgttgctaatcatatgctgttaaaataaggagattgtcctgaattatgtatatgggactaatatcatcacaggagcaacttaaatgtggaacagggaggcagaagggtcagtgtcagagtgatgtgatatgagaaagactcaccaggccatttctggctttgaagatggaggaaggaaacatgagccaaggaatgtgggcagcctctagaaaatggaaaagtcaagaaaaatgattctcccctacagtcaccaggtaccatgattttagcccagtgagacccatttcagacttctgacctctggaagtgtaagataataaatttgtgttgttttaagcgactaagtttgtgattatttattatagcagcaacagggaaccaatacaatgtcttcccaatttttgaagagggaaatagaaggctcaaaaaggagaaattttgtagtttttacccaagctatcatatctgtagtcccaaatcttgatccctttctcaggcctactaaatgagaatctgcctttcaacaaggtcctggcctagtcatgtgatttctagcaagctcccaggtgctggtggtccccaacagttctccgatttaagcattaaagttcatcagaatcatggggaagcttgttaaaataacacagattgctgggccctaccccaaaagtttcagattcagtaggtgtgggagggggctgacaatgtgcatttctaacaagttcccaggtgataccaatgctgctggtccagccaccacattttgagagccattgctttagatgacactaataaacatgtaagaggaaagaagtggcacttatcattcaactaatatccatgataggacctcattattaactgacattttatagcaggtgagtgatctgtttaacagtctgtactttatgtacttgctctgtgaaaaaggcaccacatagccccagggttttgggcaacacttgtgggcaaaaatagccacatctttggaacaccaaagtatcaaatccatagatgtatttccccaaatcccaaaaacacattttcatgtgtatctatattttctccttgcagcattccatatggcacaactggcaactgtggatattgacatgctccacatctcataagacaacctgaggcactgggaatttccttgaacaagatttcccaacttcaatgctactgacatttggggttggataattctttatttggggggctttcctgtgcattgtagaatatttaacagcatctctggcctctacccactagatgccaggaacatccgtatcctccaattgtgacaaccaaaaatgcttccaaatattataaaatgtaccctgaagggcacaatcattcctggttgaggcccactagtttatctgattctcatgcatatttttatgtagatataatagatctggaaagagattattgagtcccacagcacaccttggacaggacataagattcctgagttgctgtttggtcagataatgaattcgagctgatccatatcatgttgagccttctgtaagctactgagtggggaacagatctttccagatgaacaaccacacagattgttttttttttttttttccaaacattttgctcttactcaattttacagccgatctgtgagacccaaactccctcagatgttctgtctattccccatcctaaatgtcaggatgggagaacaggttaaaggggaaaatcttaaaaatatgcatatttaaaattttaaaaacatctttggaacatgtattttaaaataaatgtaagtcagcttgagtttaagggcctcagtaatatccctgataaaaacaagagctacattctgtaattgctatagtccatgataaataaaaaggaaatatacattttgtacttacagagaagccactgtataatgacaacctacttgtaaacacaatctgggtttactaacttgcatctgataacaatgccatacacagggcatcaagtcctagagggtcaaggctgcgcagtctaaggcagtttgagagaacacttcctttaaactgagaacaacaaagataccagttattacctcaatcactttgtgattcccactctgagcaggacagatcctaagaactagaaaggaccacagtcatgatttctttagcccgtttatttacaaatggatttaccagggaggatgacagcttccttcacttacacaattctgaaaagaaaagaggtcacacttatattttctgaaatgtacatatttctaaagtccacaagcttcctctttttagtccattcctgagactaaattagattagtagggtatgatcaaattgtgattgcccacttgttttcgttagctacggtataaatcaaatttcatgcttccttttgctgctcaaggggtgtttatagtctgcagagtaatgttaaagctgacttaagtaaggctctttgagaaccattaattcttactgttgtaacataaaacagcccaaatccaaatttagacactttttgaattattgacaccatgattccagtcctttataaggaaggtaaagaccactggcatatactattgaattttattttaaaataacaatttctatcttttaaaatgtctttttatttccataggtttttggggaacaggtgatatttggttacatgaataagttctttagtggtgatttgtgagattttggtgcacccatcaccctctatcttttttagtgaccgaaaaaatgagtgtttttccccaccagctattgtttgaacaataacttcatctaaataacagttgtgcctcttgcccctagtcatctctttcctatttgctaaaatgaatcacagagttttggaacttggggtacaaactttggaccttcacagaccctgaaatagttgtctttccacaacagcaccctgggtccaggcacccacctcactttatacacccctacacccagctcagttcttaggtaactgtaaatctgtgggtttcaactaggggcgaatttgccccctcactcccccatcaaacatatgcgatgtccggagacacttttggttagtcacaacttaagagcgagggttgttgctgctaacacctagaaggtagaggccagggatgctgctaaacatccctcagcaaataattatctggccccaaatgccaagagtgctaacaccgacaaacctttttgtagaggttctcagagacacattttccaaccatatgttgtatgactctatttctatgaaatgtaccaaataagcaaatccatagacacaggaaatagattggtagttgtcttgtgctaaggggaggagaatgggaattcactgttactgggtatgggatttcttttcaggtgatgaaaatgttctagaactagactatggtgatggtggcaaactttgtaaatacattaaaaatatactaaaacccactcaagtgtaccctttcaacacatgaactttatagcatataattatgtattaagttattaaatccgtttttatagacctttcattaaatagcttttatttcttactaaacaagagcttatattgtagagcagttttgaatagctgtaggtttctctggagaatattctctggtaacagtttttgaatgcaaccctatatttcacaggaaaaacattatgttctgtatttttaaagacttatctatttccagttgttcttataatgttatcatttgatctggggccccaaggtatgcctcattcatctgtgagcaagtgggtgaagagtgtctgagccagggccagagcccaggggtcttgcgtctgctctgactctcaatgtgatgtgaagacagccaagtcatctgattgctttgtgtttctaccttctcattcttgacacaagtctgagcttccagacgaactttcttgtagaaaccctagcaagcaaggacagtggatacaaatgctcagtgctttgccactgcagaggggacacaagtggatttccctgtccaacattcagggtctctctgttcccaacagcccatctgccattgccctttttctacctaaaacctctgctgctgcctagctggtctttttctgcacaccaagcatgctctgcccattcccgtttctctttcttccaatgactcagccctgtgaggaaatagcctctatgtctatccaaatccttcacatctccaaagcctgaagcccctggcacacaatgaacaatagaattattttaggcaaggaattctacatttaattgctaagatcatggaagcatgagaagatgtcaccttttggccttcagctcctcttatgccctccaccttgcaccacaccagcagtgctgggttcctgccagctagctaacacactgggccacttccatgctggtgcctttgtgctgatcccagagatgctcaggcgaacacctcaccttcttcaagaaattgtttaaaactgaccaccctattgaaacgtgcaactcagcacgtctaatccttcttagctgctctactttttccttttccataggctttctcttctgctgtccttatttattatatccattgttcatagttgctttctgtgagactgtgagtaggagtctttgtgtgttttaatcactgatgtaaaacataaacccagaatatacccggcatgcgggaggtgaccaataaacatttaaacatgttaaatgcttagaaccatggctggcaataaaggttagtttcatcttcatcatagtcgtcatcatcaactttatcatcgtggggcaacacttacactattgttctgtaccattacaccgtgtttagccttttaatctatattttacataatgtataaaggctgtacattttttgagggccgatatcataccatatataatatgtgtccttttaaaaattaagatataattcacataccataagattcaccactttaaagtgtacaattgagtggcttttagtatattcacaagattgtgcaaccatcaccactgtctaactccagaacatttctatcatcacaaaaagaaacctggggctcattagcagtaactccccatttcccccttccctcaacccctggcaaccatgaatctactttctgtttctatggattttgcctattcttggcatttcctatacagtcatacagtatatggtattttatgactggcttccttcactgaatgtaatgttttcaaggttcatccatgttgctgtatggatcagtgcttcattccattttatggctgaacaatattttaaaaaactactaatctatgtatgtctccactgaacctcagcaggaaagttgaacttactttggtatattttacccaataaacaggaataaaaatgcttgtttttacattactgtcctacctcttttaacacagatgtaccattttcactcctgacagttaccagttaattataatccaaacaacacactcttcaactgcatataatttcccttgttgaaaattgttccacctgatatttagcaaatgcctacggacttttcaaattacaagctgtatgaactcttgctgtgaatgtttatattattaaaatatttcctactcatgatttaaaagggctctctcactttaaaaaatcgtgtgtttttttttgtcttggattttatgttgaaccttttttccccctaagaatgaacattggatatacccagggcctatgcaagtagcactatcacttactcatctctcttgctgaacatgagtgagaaatatcatactccaaacttctcgtatttcccctgcatttgttgcattcacagattatttaaaagaaataaatttaaacctcggctacccagagattttcaaggagtccctagataactactgtgttttggcgaatatctccccaaatggagagaagggagagcagggagggagggagaaaaaaattagagaaggggactttaaaaaatctatttttccacttaacaatgtatcaccaacatctttttatgttgacaaacgcagagtgacatcctcatcttgaatgctatttgtgccataatcgatttgaaccagccccgctattggtagacattttgttttaaatgttacttcataggccaggcgcagtggctcatgcctgtaatcccagcactttgggaggccgaggcaggcagatcatgaggtcaggagatggagaccatcctggacaacatggtgaaaccccgtctctactaaaaatataaaaataagctgggcatggtggcatgtgcctgtaatcccagctacttgggaggctgaggcaggagagtcacttaaacccgggaggcagagattgcagcgagccgagactgtaccacttcactccagcctgggcgacagagcgagactctgtctcaaaaacaacaacaaaaaattatctatcatagtgtatttgtttggagtatattataatttgaactaagaggtcagagccaaatgtaatgagactgttaggataatagattctagcgcttttacagcatctcccttttcagatacttatcagaggtcatttgcacagaagtccacaggagcagttgagagcaatgctgaattatccatcttagctattgaaaaggtccatctaaatcactgtaggatttctttcagaatccacattttctatgtttacaatgtcatggaaaacttttctacattttcattaattcatcaacacatttatctagcacctactttgtataagagctttttctaggtaccaaggagctcccaagaaagtataagacacaatacctgatttctaagggttgcggtggggtcaaagttacgatgtgtatcggaattcatcggtggttttgtgcctaagatctgaagatcatacaactccaactctaccccagcaaaaaaaaaaaaaaaaaagctatcctagagaatgatgttttcttgtaagtaaacatctacagagaaaatatttaaaagccagctttggctccagctacttaagaagactcactgttgaaattattccagaatattggataaccctggggatgctttaaaagaaggctcaagagttgaactcttacagatgataggaaaggctttgcaaactcataatacctgacttatccaaaggccaccctcataccccgagtgctgttgaaacccaggcagtaagccagtggagaggaaccccaaaacaaaccaaacaccctcccagcagtcaaaaataagtgtcacaaaaccgaaattcatttgcttttctcacaggcgaggccctcccaggccagccccacttagagtgttcctttactttcagttcacgcatacttttaacaagcttgggcatatgattttctagcatactgtaaattagaagcagcaaattagaagtggggaagttgctaacataagcattgtgagaacagcaaaacgtactgggctgcaagtcaagaaaaagaatacctactacaaaaaaatgagcaaaagaactattttatgcagtcaatttattcataaataaaataattgcttataggaaaaatatttcaattgaaatttcattttcctcaaaacatttaccaatttttaagctgtgtaagtggggcctaaattagtggaagagatttcaaacagagatccatattttaatgtcctatgattcaggatatgcagtaggggaaaatcaattatttctatggaatcggccatcaaagcttgttcaactgtccatggtgaattagcggtaactcactatccagtggtccagaggaattaatgccacattaaggcagcatcctgttgatcattatggccaaatatatcatcctctcattcttagaaggtgagaaaaagtataagatcaatctttctaaaactacaaggctactagtaattcatcattgacttcattagtagagattacccacaactttgtagaaaaaaaaaatatcctgaatcctttcagacactccaatatatgtaattatataaaatgggggaaaaagattgaaagtgaataaaatgtgatccacattttccttcctctcccttaccaccttgctgtacacccctgccaatcctcctaaggtccattttccaacttccttcaaagggaatccttcttgtctctgctataaaattcaccaataaatatattcataaataaagccaaatcctggggacatttggcttttagaatcatattctatgtttcttttcatgcatacattttacctgttataatcttctacttccttctttgcaatctctctctccctgattggaaggtcttacctttctttgcaatattcatccctactgatttatccccaaagatcatcttggaatcttgtttattagcattctttaaacatttactgtatgccagctgacagggttggggagagtaataaatagacttccatttccccagagatgtcactcatctacttttcacatgaattccctgagctaggttctgttattatttccattctacatatcaggaaattgaggctcagacaggctaagtaatttgtatatatacgtataaacatatgtatatatacaaactttataagtattacttgtgtattcaaagagatccaagtataacatcaactgtatctgggtagatattcagtatctcctttattgatctaatattgatggacgactcgtcagttagctcctgccactaattacaactttgctcaattagatcaatctaatcaaattccagaatgaaagaaaaagcccatgtgttataccaaggtagaggggtaaaacacacatgaatttaataggtagatgatcagaggttcttttagaaagtgaatagctttggtcattgcttagggaaaggggaggctgctgagaacatggaaacaaagtagctagccagacagttaagagactctgaaaaatagagaggaatttgggtttgcctgtatgagaaagtgggattgggccagaaggatatgggcaaagaagggccgccatactgagaggccaagctgctctgtgagatgggaggcaaaggacaacatcccctgtgacatgagtttgcttgtaaaaaacaaaatttactttaaaatgtgctgtctggtgtgcactccttgccttgtagtatagatcatcagtaaaagctttgctactgcaagaaccttaagttcctgattgtttttacggtagatgggtttcagcatggggccgagaaggggctttgtcccctgttttggtggacaccagaggggtgataaaggagtagccaaggggaacagagaaaaaataccttcaatggaagcagataatagagcagtggtgatcccaaaattataattcctcagagagaaactagagagagctttggggttttacccaaatgggaatttgaatcaatttctcctgatctgaaagggctggaaaaatcctggaggatatccagattacactagagaatctcaaccacctaccttgatttttgtaaagaacaacgttgtttgctagaactgaggaaaaggcgatggcagagaagctttttaaaaataaatctgaatatatcaacatgtacagtcaactaatttgctgacttcaaaatagcgtgatgaaactctttgcctgttaaacctattattgcccataatgaaagattccatatgcactaatcacaacatacagccttatgtctgatcatagcttctaaaaaatcatgatacagggatttttagttatactcaacacatttttcctttagaaactggattggttgttacagatgccatgaatgatataaattgagcttatagttggaagaaatctaaaggatcaagcatccctgagtttcaaacagaaacttgcactgaatacattcaaaggtatgtggattttatttataatttgatatcctttttattgtgcttatttctttctctgcatttcttttaaaagatataaatgtattctacatttctaatactatatgccatcaatagttactttttagttggcccataattaaattagactctgattactgaaatgatttttaactttataatgcaacaaagtgcttgtctaattccaaaggtctttcttggccacatttcacagtaaaatatttattttaattaattatcgattaaagtaaaaataatacattcacaggctgtgatctactactttgaaaagctttttatttaattacataaaatagaaccatccatgaagtgttttttctcattaacccaaacaaacaaacaaacaaaaaacaaatttaggagttagaaaactttagtgtacttttcatagacagcattatcacatgtaatattcacttcttatacaaaatttaaggtctttcttctgacagttttcccagtaatttgtgccacaaatcaatgtgcacattttaggaggacctgttttgcttaatgtcccaagggtcttatttatagaataattacagtgcaacatcaaacaaaatgaagattccattgaaagaaaatgaaacctcttagggagaaagtattcaaaattcattgaagaatcacataaaattcgtaccatcctctcctgttggttcagccacatcttttgctccacaatctggagctcagagatgttactggagggtcttgcctgaagttctgtagataggaatttctggaactaaaatctatcttggcaaattaatatattttctcaaatgattagtccttgtttttaacagtagcaatgtccaggtagactgtgcacgagacatttctgtgcctccttgttctaaaattataaaatactgtgcactttgatgatcttcccaacctttagagccaactttattcctttaatcattaattataaatacaatttagcttctatgactaagggctgtataggcataggaaaatggcatgcaaagtcatatgaagatagatcattcatgtccctgtaacttgtttagccctcaacctaaattaaatgcatctttatcactactgtgactccagaaacaatgaaataggctgagagctggaaatcacatatgactgaagtaaattcacaaacaatggctccatccttcttactagcaatagactaatgtagattatgtgtgttttatggagcattcattacatccatgtttcagaagagataagaaaagtggatgttgacttacatttcagaaccatcaagaaatggggacctggattttatttgcctgcctcctgggagcagcttttgccatgcctgtgagtaaaacaccccttgcataagtcagtgtccaatttcacaaacttggacataaaaatctgctcatagttggtgaaattagggtttaaaacagtatgagatcagatgtcttcatatgtctctgggttgaagaaacacttcaggagcttgttttaaaaaggtatattctcaaatgccgctaccaaaaattctgatttggtacagctggggcggggcccaggactctgcatttttataagcaccccaggagattctgttggaactgttagcttgtaaatatcaccacccatctctagatggaggaagcttttggaagggacccttgaaaggtctccagagaaagtgcttaaccagctttggacaaatattacagagatgccagttttgtctaaaacccaattcctctcaagattccaaatctcttcctgccctccacatattgctgctcttacccctcagggggtaagatttttgtgttaggaatccactttttgagccacattcctgttctcagaggccccacccctttgggtacatctgatgagtacgtgacttttttgtggttgcccgggatcctgcctacacccaatacatagtgatatattttatattcaaatgtattaaagatcaggacattagacccactctgtctggacacaggtgcataagggcagagaacttagatcacatgcatgccaagcaggctgcatctgctttttggtggaataaagagcagttgatacaaccagaagccagcaagcttgcacccttgcctcctctcttcctctctcacccacaaaaccaagattctgtgctctgacttcctgaaatcctgcattgcagcgattcctagtttcctcaggggtccctgccttacaaattcagcccttttcccactctctaagatggtattgttcaagagggtataggacctgactaaaaccattcacatccagatgagagagaataaaccttcccatgaaatgtgagcatttttaaagaatataatagagccaatcctaaatgaggccaatgtctgagggagattttctgcatgaccgtctctcctccctggaccccaggcacaaccagagttccacaatacaggcaccagacacttgggccccacttttgagaggacagacagtcctgattcagatcatcattcaggtggccttttatttttaacttgaaaatttttctgccataaaaccgttggcagaataataaaaaaagatcggcctaaacgtcataaatcaactctttcattttccatgggatttataatgtttccactttgctccacccatcttgttctggcattcatcaataattcccaccttgtggtttcttttgtggcttcttttgttgtatggaagtgttgtttactttgcatgtcaattatgagaaatccctttgatacttaaaagtacttgaccacctcctgatctacaagggaacattcgtgagacaattctctccttgttgatatttctttattgtgaaagagaaacacacttctctccccattatggggtgagttttatcagcaagtaaactgttgggcaggatagggtaggattcattgaaaacactgggcgtgggggtgggatgctgtccaaagatcactggagaataaatgtgtgctggtttctgcttccaggtctccagccataaggctataaccccaggaacagtcatttagctgttctgaacctctttaaaataaaaggtctcctcttctatacagcacatttgttcaaactaaaaacagacctcaagtatattctgcactatatagatttttttaaagtagcttcagtctcctttaatgtgaacaattgcatactgacttaatctcttcctctctcttctcttccttcactctctcccttcctctctctttctattctcctcccctcctccctgtaaaagctaccacctcatcctgggcaccctggttatatcaacttcagctatgaggtaatttttctctttactaattttgaccattgtttgcgttaacaatgccctgggctctgtaaagaatagtgtgttgattctttatcccagatgtttctcaagtggtcctgattttacagttcctaccaccagcttcccagtttaagctctgatggttggcctcaagcctgtgtcgtcccagcagcctcccgcctggccactctgactcagtctgtcctcctaaatatggccgtaagcttacccatcatgaaccactactcagggaggctccatgatagggcaaaaagtaaactctgaccagcttggttctaacccagctagtaaaatgtaaggattaggtaagatgttatttaaaactctttccagctcaaaaaactcctgattctaagatagtcacactctatgtgtgtctcttgcttgcctctgctgaaatattagtgactaagtggtataggagagactccgcagaacagcggaatgcatgagttttggacgtcgggtttgaggttctcctcaacctcttactaactttgtgattttgggcaaatcatttcctctttctggaaccctggtttcctcatctggagaaaggaaataattataataaccatatttcaaaatattgtttggagagtaatatagttaatgaatatgaaaagtgctttgtcaagtataatatgagcaaggttactgattattttttgtatcgattaaatgccgtattactatatgaagaatcctcaaacctaaggctaaccaagtatatatactgttcagaaaggaataagattcttacttctctcacaggttcaggtaacaatctatgagtttatttacttataaaagctgaagacaaatgttagtaagattttgaggcaagattttctgttgaaccgaaaagattgacacatctgatcagtcaatctgtgtttctaggatgagggacagtgtttgcacctctctttttcccattgtgacatcaaagaaaaaaatgaaattaacatcatgtcatattattatgtcataattttgtgtttgttttgctcttacaatgaaaagaaggaactatggaattaaacagatttactccctgtgtaacctcagtcaagttaatgaatctctttaactccccataaccttatctaaaaagtgagagtaataatacttgcctcctagcatataagaaaagatgaagaatgtgtgtgatggatgtaaacacagtgcctgtcacacaggaagcacccaacaaatttttaccttcttctttcttttgtagaactcacattctcaggctatcaatgttgacaggactgcattagtgagtctatatttcctactgcatcagtgagtttctatattggatgaaagtaaattaaatcaaatgggttctaatatctttttctcttaaggtgcttacccctttgaagtggtaccagagcataaggccaccggtatgtagacattttgttccttattccctgaaaatattaggcatgcattaaaattcccatattaagtgaaatatcatgtctactccacatgcagacattaatgggaaatttagtttgtaaaaaatcatatctgtgtacacagttacaaatttttgcaaaggaaaaatgaataaaatattcctatagccataatggcaaagaaaacactgctgcttctctggttggagtcacctgagccaatggtaaacctgcctctctgtttctcaccagtacccttcctatggttacgagcccatgggtggatggctgcaccaccaaatcatccccgtgctgtcccaacagcaccccccgactcacaccctgcagcctcatcaccacatcccagtggtgccagctcagcagcccgtgatcccccagcaaccaatgatgcccgttcctggccaacactccatgactccaatccaacaccaccagccaaacctccctccgcccgcccagcagccctaccagccccagcctgttcagccacagcctcaccagcccatgcagccccagccacctgtgcaccccatgcagcccctgccgccacagccacctctgcctccgatgttccccatgcagcccctgcctcccatgcttcctgatctgactctggaagcttggccatcaacagacaagaccaagcgggaggaagtggtgagtatattttgaagccactacaatgcaaatcctgtgaaaatggtgcagcaaaataggccccagagttctaaggtctccgacaaccaaggatctagagttgtagtagttacaggtctatgattctattagtccaagcaatatgctatacctttatgttaaagacaaattcctctaaatggcttggtaattaagaccacagtttttatggtaggtttcaattttactattactgaatttctaccagaatatgtattaccaaaacccattaatagaaatatatattactaaaccccatgaattttaagggcaacagtataagggaatatcagttctccttatatttcaaaggtttgactagcaagaataggctagagttgcactgaaggcttaagacaagagggagcggataattttgagagtgcaaatatctgaacaggctacaaaaggtagacgggaaatctcttcaaaaacctacaggaagattccccatttccagtagttttcaatctaacttggaggcggctaaactaaacatactgttagattccttttctgtactggggttctatagatgattaagcttttagcaagaagttactgcaatttagcactaaatcttccattacaggtagctcttacaaatgaatgggaatagtcaacaaaacaaacttaatctacatccataaagtcttacttctatgtatacgagattatgtgatcctatcatgtatatgtatccaactgtaattccaatttatacatgttattgatgatttgctactgagaagaagagagaagtgaggtggaaatgaccaggataagaagccaggacacaaaggttccaattctggctttgccctcaaagacgaggcagtattgtaaaagttacttcaaatgtatcggtgttttattttcttttaaatgggggaaaatgacgaaatcagattattttcaagtctctgtccaattataaataccatagtttctgaatttaaaaaaatcataatatatgtcataaatggcttcataattgtgagcatgtttacggaaaatatggggcagaattttttgaaaattgattgaatcccaagtaatcggtgcctatcattggctattctagtccaaggcacatgttctctctgtacatagaaaatgcatttacttctttatgaataattaataccatgaactttataatgtgctcacatcttgacaaagctatttatggaaaggtgactttgggcagatagtttgaactctttaaaactcagtttctttttgtgtaaaatttgagtataaacattgatagtttcttagagttgttttatggaaaacaaaatagcgtgataagcttggagcctgacatgcaagacgtaccccccaaaaaggtagcaattgttattttattataaaataataggctttaagtgtcctgaaggtggaagcagtcctcatggacacctaatatctaatgacaacgaaataacaaagaaacttcagaaattatagagttcaacttaaatggttgtacattgttttgacaaaactgaagccagacatgttattgtaaatggtactcactaggaacatttgtaaattattttaactgttcttttgcaatttttttcaggattaaaagatcagaagatgagaggggaatgaatacttcagatgctttcaggagtgacacaagaacacaatgatttttgcttataatcactttacttagcaaattctgtaactaaaaaagtaccattagcagacaataaaatgcattaaaaatcattcatgtctttgtgttgaatgaaacttaaattttcctatcatttgagatgatatattatgaatgagtattcttgaatcaggtaggaactgctcatttagtcatacaaattcaccatttggcaagcaaataaggaatatatttctttttagagaaaatttaaattatactgtctcaaatcttttttaaaaaacaaagtttatacatcagttaaaacagttgataaaatgaaaatttatgaatatgtacaataactaaaacctgaaccaaatgaagggaagtttatatgaaaaattctttacattaagaaagataaacttttgaagaatgtttatattatgaaacaaaataggacatggaacactggctttacacttcacaccacactggcaatcaaaatctggtcttttgatctcattctatggaaaaaagatttttaaatgaaattatgtgatatgcataataatgtactgaatttaaagttattcaagtaatttgttttcctcaaaaaatgttatcaatggagcttcaaatagagaattgcagtgattttaaacacaagtcatttctttcacctcataactttaagataaattgtactgtatagtcttcaaaatgttaacaaatgcataaaatggactcaaaacaagttttctttctcactcatatttatatttgaatccttttttcttcctacacccacacagaattgtaaacagtctttgcagggtttatattacacaaacccatggtaactttattccagtacctttatgattaaggccccttaatcattttctggaatgaataaacataactttattgggagggtgtcaatattcaaacaaataacttgattttaaagaatttagattcaattttttaaaggtagaaaagcttttaatcaattggcatggaccaattctaatcaattgagtcaatatttattaagcacactctagggcaaggcactattccatgtgctggtgaaaagagcaaggccccatccttaaggaatctagaatctaccaaaggggtaaaataagcccacaaataacaattaaaaaggccaaatggtattaatactatgacagaagtacagtcaaaacactctggcaaatatggcaaatatccttggctagctgtccaacagctttcctcaccactcctttcctgttggcagagctggaatcaatcccagcattcagccacggtttccaaatcaaaattcagatacgtagtgtgataatacagaggaatgtttcaaaccagagacatacattaactggtaattatactctaatacttgcactgtcaaatatggtagtcctgtcctatgtggctatttaaatgtaaataaattaaaattaaataaaacttaaaattcaattcctccgtcatagtagacacattttaagcgctaaatagccacatggggctagtggctaccattctggacaacacagatacagaatatttccatcaccattcagttttatcagacagcattgctctatgtactacttcttgaagttgaaaaataattcttattaattcaaatattttaaacaaaagatgaaacaaaacagatttgctggttgaaactgaaaatctcagctacccacagcaagttgttccccaagcatgccagtaatcctgatcctctatgagaattttctaagaactgtagaagtgccattctcttcctcaggccaaactttacatactaaaatggtttcccctctagctttcatttagaacagataaatccagagttcagaagatatttacattcttttctattttgtggttcaaactaatagtgcaacataacatagagggaggcacacattcacgttacacacactcacacacccataaccacgcatgctttctgggtttacctgtagtaaaaagacacatgtggagacatgtgccatttgagtaacttgaaattttaaataaaacttctttccattacaatcatttagagaatgattatgtggttatggtattcattatcaccaccaagacatactacagttcttccaatacaaaaatcatatcaagaaaaaaagatcaagctgtgcatttcatttccaagcaatgtcaagtttaccatcccctttctcaactccacacaaaataaaaatacagacttttctctaaatccgaagtttttcctttggtagtaaacaatagctgaaaataccaagactgagtttaaggccaagacttttaaaaagaaaataaattagtagacaactgtattaattgggaaaaaataacccaagagatcctagtatgaacagcttaacatgagactaacaagagaaaaacgacttcaaccaatttcctacatttccagaacatagtagcatttagtagtactccacattgctttaataaaatagtcatcagcttatgtctgttgtgaaattcttgttagttggagtttttacttatttttgtgatttggctttcaattccttttgcccctatttgatctggagccttaacagcaagggccataggccgacatttagatattaaaaaatacctccctgttgggaaaagtccatgctggcctcatttgaaacacctgactcttccagacgataaataattattgaggaataagattgggctgggagtggtgaggatttgaagagagaagaaaggagtggtcatttgggttcgaaacatttacctcaataaatcacacttgaatcctctatcacaaaatctaaattaataaagcccatttgcaaatatcattgtcctatggtcaacaaaaaacaccacaggacccagaattcactttactattaattttaaaaatgaacgatattaaaatctcaattcctccaaacagccaaattttgtttgcctctccaaataattttccatgcttcatatttggccatggaatgtgcaggctctgggggtgtcagttaagtgtccacagaagcacaaagccggctttccagtgtgatggtagggggtgcagcctccataaccaaaccgtttgattcacaatcatgaccattgcctatctgctgtggaaacttggacaatttttttggcctctctatggctcagtacactcgtctataaaatgtactaatatcatgctctgctctgagtcttttcatgttaatgagccccaagctcaataaatgttagctacagttcttgtaatcagaaagagagctttgtcctgcctctgtagactcccaaagagaacactacccagttggaagcaggagtgatacaaaattaggatatgacatggaagtttttgatgccacaggcactgaagtacatcacgtttgtctttttttttttgagacagagtcttgctctgtcacccaggctggagtgcagtggcatgatcttggctcactgcaacttccgcctcctgggttcaagtgatcctccagcctcagcctcccaagtagaggggattacaagagtgagccaccacacccagctaatttttgtatttttagtagaaacggggtttcaccatgttggccaggctggtcttgaactcctgacctcaagtgatctgcccacctcagcctcccaaagtgctaggattacaggtgtgagccaccatgcccggcccatgtctgtcatttatcagtgcatcactctgacagtgtagccacctgaacacctcccttactgattgtgaccctaaatgatctttgccttctcctacctgatatccccagacactgttctttgctgcctccaagacaagccttcatcctcaattcaccactctgagggtaacaggagagcaacaccaggcaagtgtcatgggggcgctccactaagtggaggctagaacttgagaccacctctctctgcatgtcttccttttaccttctttctagggctgagcctttgtgtacagtgactcccaactcagacccttcccttgtcactctggcattggcacaattcagctaattccacattataaggatttcatttttctttcttttacttttttttttttttttttttttttttttgagatggagtctcgctctgtcgccaggctggagtgcagtggctcaatctcggttcactgcaatcaccacctcccaaattcaagcgattcccctgcctcagcctcctgagtagctgggactacagccaggcaccaccatgcctggctaattttttttgtattttagtagagacagggttttaccatgttggccaggattgctcaatctcctgacctcctgatctgcctgcctcagccacccaaagtgctgggatcacaggcgcgagccactgcacccggcctttaccaaaccgttttcctctagatgagtggttcttaagcaggtacagttgtgtctcctaggggacctttggcaatgtctggagtcacaacagggatctaaacaaatcaaaacagcttggggagtggtaggggtgttaaggagaatttgcaaaataaagaaagtgctgtcccgtgattaagtcagctaatgtctctaaatcaaaactatcctgttaaaagcccagatttcaccactacacaatatatccatgtaagaaagcatgtccaccctctaaatctataaaataaaaaaagtaaattaaaacaaaatttttaaaaaccgtccgacagaagttagaatagttatttgcttcttcagaacttacttagaagtgagtatttgtttcttgggaggttacaagaagcttgtctcctgtgagttaattgttcctgcttgtttgaccttccaaagatgtgctaaggagctaattgtaaatcagactgaagaacctctgaaagtgattgtgtctacccgagtgataaagaggagaaaataataaatttagccatgagtgtaactactgaattcaaggttattcaattagtctgggataagttctgttctgagatttgcttggatctggcagaataatgagaaatgagtggttctgtccataaagtgggcagtaatttaagatgccttaattctcatgattttcagaaccaccactctccaaaagaatgattcttttgattaagaagtttttgttacaaaattgttacagaataaaacccctacagccatggagaatataaagcagtgtattgtaaggagagaagatgattaagcactgaccttgggcagctgagaatatctgacagacccaggccatcgaacaccctatctgtccaaataaccaactcaaggcacttctgaagtgaggatctccctgcctccttgctgctgtatcccaaacatccgggagcagccatcagtgaccctcacctcaatgccacctcttctagaaatcttctctcactgctctacgttggctggcactcctggaagtgaggttcccctgtctccttgcccccatatccacacatctgggagcagccatcaatgaccaacacctcaatgtcacctcttctagaaacctctctcgctagtccacagggctggagtgcacaggctcagaggtttcccaggatatgttgaccatgcctctatttcaaacaactgcttctttctacttttgtctcccccttagctgtcaagctccttgaggcagatttggaaaaatacctggaaactggtcagtatgcttaatatctgctcaatgagccatcattagcattaaacacccaggatgctgtcatataaaagtaatgataataataacactgaacatttactgggcttattatatttcaggcactattctaagcacatgacatgtattagctcatttaattctcacaacgttatagaattgtctctatcaccaatttacaaatgagggtttgaactttaaattttaacaagaagttaggctcttttaaaacacacacacactgccccattttttatgagtaccatttgaaagataaactaattcgtcatccgcctctaggattctaattaaacaatctatagctatttttaatggcaaatgtaaattcaactccattagagtcatgaagcttgtctcctgtgacttaatttttcctgcccatttgtcctcccaaaaatatactagagagctaactgtaactcaaaatgaagaatccctaactcattaaatgctctgtagttgcatgagggagttgcctcttgtgctaaactgccaaagatggggaggagacagctacaaacataggcaagtatcccctacgctaggacaacattgccatggcaaccagggtaagggcaaccagctttgagtgtgaacctgctcatggatggtcctcatgccttctctggttccaaaggatggatggaaaacaaagaaacgcaagtccagtgctcgtagaaaccacaaggccctgtctttctctcactgattagttcaatgaaataatcatgtgttttaggagacccaggccttggccctccgctatcttccttcccagacagcccactgaacacacactcaacgcatacagaaagcccatttcaagcagcattctgaaattcaccgagaatgacaagaataataaggctactgatatatccctaccatgacattgaagcagaactaattggcttgcatactctctctacctggcatctaatgcccagattaaaatagatgacaaagttcaggtaccccaatagcttcctgcactgcagcctctacaaatgttagctatcaaggcagcagtccaaactggctccttccatagggtcctgactagggaaggaaatgtttgcaaatttgcacagctgcatgcaataacaaattcaggctctgcaggtttacaaaatcccatcttctccctgtgattaggaacttgggatcaacttgttttccacaaatgatttttcttaatctggaagtaggtacaacagaggaacttcaaaatctgtttcttttgagacaattctcaatttttaaagtacttattaaacattgctaaaatgtgcagttcttatcagcaggatttacaatgacacttggaaagcaatgggatttactgcttttgtggcttttttttccccgttctggtagtgaaaaaatgttcccgataaacagtaatagatatccaaaaatctgcaatcaccaccacattagttgatttgatagttgctattactgtaaataatcagaatcacaataaaaagtctatgcctacaaaatgaaatcacttaacaaactgtaaataatcataatctaagagcagcaaattttcttcaaaagcaacttggcttttaacaaactaaataattcgtatatattttaattactttatacctatggtggcatgtgcacatgatagagagaggaagaaatttgcaaatgaattgatgtggcctgatcatattgtttaaggtaatagatcaccaatctgtagaaaagccaatgatttcactttcttggtgttaacacacaattcaccaaataaaccaatataagtttaggaaggattcaaagcagcttttacttgtagctatatgaaaccagcaagtatttaattaggctctgtgaacacttcggtaacaatctaaattaatattctgaaaagatgagttttaaggttctttctatgaaatcattaaagaaaaaaccctggaatcattaaaaaaaataaaatttgcaccagatgctacctttattgtatgcaaacaacaaaaccaaagttttctgaaccagccatctgtctttgctgcatggagtggccacaggacagagctgaaccacattttgtggttccacattagtaccctaatcagttatcgatgttatagaatcttgatccttcatcatactaaggaaaagggcaacctatgcccttgtccccagtcgtcagtcattatatagtacccaatgattgagacccaaagagacactccatagcaatgatgttttggctcatcctggattagtctggtgatcctggcaatgcctgattcactctgaacttcagtttccttacctctagcacaaaaacactggactggaacagtaacattaagacccatgcaacagtaacattataagccaatgtgcatgttaaagtcaaattccattgattttcaaatactgagaaaatagccaaaaggaatggtgcagaagaaatggtgggtccttactatgatttgctctgaactttcaataaaaatatacacgtcttggcaatggtatgtaatattccaataagcctggtttgaagactctgaatttactcttaaagcaacaggcagaggcagtgtgactgtcatttgaaccacctgagctttgatgttaaaagagactcaagcgccaggacacattgagcaaatccctccaacgctattacttccctccttctttcctacttatgttcaccttttccagatgctgctctgggattattaccccatggaatctttcacgtcttcctggcttgggtcctaccttgcttctagcagtaggcacgaaacacagagcctgaaatacacacaccgtatcttcttacctctccagggttcttacacctcagcaatagcagcagctccaggcagtagcgagcccccatactccccacgcagagcccctgtgcagtgtgggaacagagaaggagacaggaggcagggagggacactgctcaaagtgctagaggagccggccaggcagtctccctgtctggaatgcacaactagaggatctcggagggagagagccttgggtcactgtgatcctctgagtcagacaccctggggagctcttagttctgaaagtcctccccaggcacagaaggctgaaagcccccaagcacccactaggaagaaaagtgtaaaagttaaaaagttaaaaagttgagataaatgaggtagacatatggcagtttacagtagatggtagaaatgcagtatgattgctggagggaaaaaatcatttgaaaaaaatgctcactcacatatctgatgagagatttgtatccagaatctgaagaactcttacaattcaataataaaaagacaacctaattgaaaaataagaaaaaaaatctgaataaatatttctctgaagaagatatacaaatggctgataagcatatgaaaagatgcttgatatcattagccatcagggaaatgcaaatcaaaatcacagtgaggctcatgccggtaatcccagcattttgagaggccaaggtgggcggatcacttgagctcaggagttcgagatcaacctgagcaacatggcaaaacctcgtctgtacaaaaattaaaataaaataaaaaacagcctggtgtggtggtgcgtgcccatagttccagctacttgggaggctgaagtgggaggatcacctgagcccagggaggtcgaggctgaagtgaactgtgattgtgccactgcattccaacctaagtgacagagtgagactctatctcaaaaaaaaaaaaaaaaaaaattatcacatcacgcccactaggatagctttaaaaaaaaaaaaaaactgttggtaaggatgtggaacccttacatagtgctggtgagaatgtgtctccaaatgttaaacatacatttgccattatactcagcaattcaacttttaggtatatacccaagaaatatggacatgaaaaacatgtaagtctgcacaaaaacttgcatatgaatgttcctaacagcattattcttaatagtcaaacagtcaaaacaacccaaataatccatcaacagatgaaggaataaacaaaatgtgtcatatccctacaatagaatattattcagccacaaaaagggatgaagtactgataaatactacaacatggatgaaccctggggacattatactgagtgaaaaatgccagacacaaaagaccaaatgaaatactggctcttattcccttgcaacaatcattccccaattacaccaggctcttccgaggtcaccattactcctgcaaatttacctatgtgttttggcagaagctacagtgagaggaggcttccatctcagtgtggagctacaaccactggtccccagcacattcagacccttcttctcagctttgcttctaggccactgacaaaaattctgttctggcttcatggttcagccccactcctccccaactccttcatttctgagtagtggctcccttctctccatgtctatggttcctatctgtgagagtttttttggaacttacagttgctcttgtatatcaggtagttggcatctccaaagagattaaatgcaacttaagcacaatggactctcacagttcagtgggtttttcatagctgaaattcagtaattaattgtgaccctctgcctttttcgcagggaaaggatatacttttttgagcacttaaacaaaaaaattagggtattgcctccaggggccattgtgcattttcactatcataagtaaaaatgaaattagaaggcgatgccaatgaaggaagcagtccaatgaagagactgccactatggtcattgggttaaagaaaaggtcgacattcttatgtaattttatcatccactaagagaaatacattacagttactgacattttaattattaattttaattcttctttttttgcttgtttgtttccatatccttcatctttccaaactattcctgggtacaatggaccaatgcccttgaacattattttcttaacaataactagttctatcctgtgtcatgctcaaggtttagttcgatcagtgcattctgctaacaggacagaagtctcaaaagaaagatttgctagtggccccagttagctacaacacatggtttctggagtcacatttttggccaatatgtaacttttgcctattctgggtttgtcttaaaaatctcaacctttaaacccttgaaagtatccatttttaaaggttgatgccattgccttctgaaaaatgtcgatcaaagtgtggaggagaaggcttcctgtctaaggataacaaagctgcaaatgaacgttccccaaagcgccggctgtgttcattttgtactgaaatgtccatacaggctgattctgaaacacactcgagtgttgtgggtaatagatgtcaaaaaataaaactcaggcacacgctatgttactttttaagggaaaaaagtggggggaaatcaaagggtttaacaattttattcattggcttacattcagcgactctgaaaatttggccactactcaggtttgcaaatttctatggaaaatgaactgtgtttggcaagctcaacgaaatatgaggctgataaaaaaaaaatgtttcatgctttctcaagaccttatgccactaactgtgtgggattggaaaaactgtttaaatgtcaatttaaatactgtaaataaatgattttctatatccatatgaattaatataattctgttgatttcaggccataacttgaactaaagtttctttgaattttgatgaggaaatgtttcagacacacacaacacaaacttcagattaagtagtttagttcagtagagttgtttcagagtcagaaatgttaatgcaatactttattttacactatggagaactgactgaaaatttgattgacactaaggtttttacaaagcaggtcttgaactaaaaagaattagaccaaaaaagacaaaaatattatcgtaacagcccaagccattatacaaaaaaacatggtggtaaatcccattgcaaagttcaggactctcaaatactatctccaaaccaatcatctttgtgtttatggagctgactatccagctgccttcttgacccttctacctggtgtctcagggtcatctcaaacttcccttatccactaatgaactcttgactttctcttctggcaaatgttttggtatcctagcctcccacatctttagaggtgtttacaaagcatttatcacaatgcctgcctggtatgcagcactcgcttaatcagtgttgttgtggatgatgatgatgattattattattattaaataatgattatttttatccacccagttagttgagccaggaactaagtcattttctttattctcctcttcactgcatgttctacttttaatctattaccaacttctgtcaactctgcatccaaaataaatcaggaatctgacccctcctctccatctttactttcatcactccaattccagcccccatcacatttctcccaaacaaatttagcagccttccagacaacctagccatctgctcttgtccttactcaatttgttcatgggggaaataacagtaatcttcttaaagacaattcttcattttgagacatacatagagcatatcacatatttattaaatctgctaaacaaccttaagaggtaggtactgttattacttccattttacaatgaggaagtgagtgaagagaggttagaacatgctcaactttactctgcctataagaggcaaagccagaattcctgcctgggcagtctggctcgagttatgtgttcaactgctacacaaagtaccacaccatatccaaccttaaaaaaataacaacaaacaagcaagcaaagatcatcaacgggcttccattgcacttagaataaaatccatccacatagaacttgcctatgtcaaagggtctggaccaacttccttagcctcacctttcatgcctcctctctttcctcctgttcttcaaacactcatggacaaggcaagctgggtcctgattaggggtttctgtctatgctgtttcctttgcttgaactgctttcctaaggcgtcagtcacagggctggctcctcctttttctggtctctgcttaaatatcatctgctcaaaaagccttccttgacttccccaatctgatattaatgtttcctggcttcttgatctcaacacactgttgattttcttcttagcacttatctcaacctataattgattttacttgtttgtgcatttgtctattggctgtctctcttactgggctggaggcttcacaattagaaagattgtttatcactgtatttttataatctagcatcatgctaagatgctaggtttaggtgctaagaattttgataaatgattgaaggaagacaagtacgctttgatgatatgaagcatccccacacagaccttagattctccaagtgtgggcaaaagatcaaatacagaatcacctggggttactttttgttaaaagtgagttccaggagctctgagctattttaagcacttacttttgaggttcatctccttgtattatcaagaatttttacaattttgattttgacatgatttggcaataagtaattcatcggattctcgtttggctgtgattttttaagtaattattgtgcgtgttcaggaatacttgttaagagaacaaaatgtacattacgaattgtttttacatgtgatgagattgttaaaaatactagttgacaatgaaattggcacttgctatgtttttagatatataggtgagtatttacatcattactttgggagtcaataatttccttttcagcttgcagaaatttatatgagctcctgaacagcttgtggatcctctgccctgtaatcagataatggtgtgggatggatgaaatggaccagctggagtccagtcccaaattgatcataacagaacttctgatgtcaaggaatctgcattttaagaaactttccaagaaactcttatgcaaaataaaaattgaaagctgtttttctcatagctagatttatgtatgttattttagaaaaatttgcaatagatatccagtgttcactctttaaatttgtggttgatttctgagaaattcaagataatgtcccacaaaaagggaaaacattttgctaaggataatggcctccacctccatccatgtccctgcaaaagatatgatctcattcttttttatggctgcatgctattccatggtatatatccttagcaaactaacacaggaacagaaaactaaatactgcatgttctcacttataagtgggagctaaatgatgagaacacatggacacatggaggggaacaacacacactggggacctctcagaaggtagagggtgggaggagggagaggaacaggaaaaataactaatgggtactaggattaatacccgggtgaggaaataatctgtacaacaaaaccccatgatacaagtttatccatgtaacaaacctgcacatgtacccttgaacttaaaagctaaaaaagagaaaacataaaaatattgataagatcaccaagtgtccataaatgcaaattatcaataatcgttctggtgaaataaatcatctctgaaaaatatcttttgttagcctgcatatacagattgagagaaagggacaggcatttctcaccctggaggggcaggatgaaccatttgcccagatggaaaaacaaaagcaaggtaagttccttagcccatagcttcgctatgttttagactagctgaccccagccatttttggcaccagggaccggttttgtggaagacaacttttccacagacagtgcggcggggatggtttcagcatgaaactgttccacttcagataatcaggcattagttagattctcataaggagcttgcaaccaagatccctcacctgcgcagttcacaatagagttagcgctcttatgagactctaatgaatgccaccactgatctgacgggcggcggagcacaggcagtaatgctcactcctgctgtgcagtcccattcttaataggccatggactggtactggtctgcggcccgggggtcgggaacccctgttttagatgataagtggatgttaagaaaattaataattgacggcaggaagaggcttcctggcttgctcaaaagacgaaggctgttttttctcttttagggaaagatacccaaattccagaatttgaaagagcttaagttaaaaacaaaaacaaaacaaccagccatgtttttgacgtcaattaacaaatgtgagaataagctttgtggatgccacactcttttgagtgtctatcacctctctgaatgtaacataatgttggaattcaccatggctctgttcttgaatctcctttatttttcatctgcaattcctctttggtgattttaaccaaccttgtatctttaaatgacatctatgcactgatagttacctagtttatatctccaactaggacatttttttcttgaattccctgagttcttcaacttcttctcaatattcttctctatagtgttccccatctaagtcaatagcaactcaatttttccagtagatcaggccaaaacttccactctctatcaccaatgggtccatttcacaatccatagtcaatctgtcagtaaatcttgttggctgtaccttcaaaatatgtcagaatctgacctcttctcataatttcaatggttccatcttggtccaagctatcatcatctctcacttggattgctgaatgactcagtaaagacataggttctgcaaagcccttctttaaagtagtcatctctcctggttgaaggtaatttctcttgggaaaatccagattgtcaataagccacttccagtcatatccttttctagaaagatattaatgcagataacccagaaaaaaatacaggtgaagaaacacttccccaaatcccacagaaaggtttggagagtatgtttattctttagcagttcacaggatttttaaaaaattaacaaataaaaattgtacatatttattgtgtacaagatgatgtcctgacatacatatacaattgtgaaatgtcttcattaagccaattaacatatgcattacctacatagctgtcactttttgtggtgagaatacttaaaatctactctgttagtgattttcaaaataaaatacattgctgttaattatagtaaccatgttgtacaatagatctcttgaatttattccttttgtctaagtaaaatattgcatcctttgaccaacatctctccaaccctcagccccacccccaggttctggaaagcaccattttagtctctgcatctatgagttcaacttttttagattccacatgtaagtgagaaagtgcagcatttgtctttgctttctgtgcctggcttatttcattgaacacagtgtcctccagattcatccatgttgttgcaaataacaggaatttcttcttttttagggctgaatagtaatgatgcctgaattcccctctcttgctaataacaaaatagtactattatatgacgggtatttattgttctggttgacagtgtatagcatggacatgccacatgcattttggggctcagtgagctgatcttggtaatactgttccccacccacgattgatctcagaacccaggcctaaagccttttgtactataggcaccagcatgtgagggaaatgtggctggaagcctttggaaatgtttcctagaatgtaagtgagttataggcagaggaaacctttcttcttctatgccagagttactcagcactattgacattttgggttggatcattctctctggtggggctgtcctgcacaccgaagatgtttagaagcatccctggcttttactcacttgatgccagtagcacctctccacttgtgacaaccaaaaatgtttcccgactttgccagatgtctcctggggtggtcacccacagttgagaaacactagcttagacatcgtcatatttatccccaaactgccacaggttctgttgctatcagcctagaggtgacacttagagggacataaaatgaagagcactgcaggaaaaaggtcaagtcactggatgaaaccctacatacttatggattttggtgacatgagcctctaaaattcctaattatttaaggtggtttaaatggattttgcttttattataagccaagggcatcaaagtgatccaaggtccagaatcacaggccactgtacattgctttcttccagggcatcatactgcttggagaaatgacaccggccccaccttagagcaggattccatagtacagctttacatgaaggatggcaagtagaatggctcatttttccatttcataattattgcttatacactgttgttatggaattatagaattttagagcaggaaggaattttagggatggagaattaagctaaaaccaatgtctatgtttatcttcaaaggaaggccttcaaaagaggatcaagcccggtgcctccaaatattagggaaagtgccattatccacttcaaaacacatcctgagcatgacaagtcatgttacatcttgtgttaaaagcaaaaggaaatattttcttatagccacatacccttaaatattcccttctccataaatggaaattctatttggctttaacgtctacatcaattatctatttacagcagacttcctgtcatttccaaaagcagagttgtcatttaattctactatccagcaatattgcttttaatgtgaaaaatgatgaatagatacagctggcataattgctggactttaagttcatagcatagtggggaaaggaagaagataaaaaatacaatcaatttattttactgttttatatatatacatataaatctgcattatctttgcttataacagcaatttgagcttacaactaatgtaatcataaatataaaaataagcaaaatgagtaaaattaaaatcatccataatccaacaatcattgattatgtcttaatgaatattatcccctatattttttgcatattgaaattttcttctcaaaaagtatcatattattttgcaatctactatatttaaaacatccccttttatcagatatttagctgttacttattcatccccattgtaaacagtgctgcatatgaatagttggctgaaattattaggttggtacaaaagtaattacggtttttgccattactttccatggcaaaaccgcaattacttctgcaccaatctaaataaattatatatgcttagaaagaaaaatggaaggataaaacacaaatgaagaaattctgaaaaatggaccaatatgtaggatattgttggcttcaaaatcctgtgaggattcaactgttgatccagtccccaaagcaatcagatctaccaatggataagaaccagggcagacagcagctgccaagaagacagaggggagggaagagcaaaccagttttgcagtgaaggaaaccacccaggtggcagacttgatggaacaaacactttaagtgaacctaatggaaaatggttcaacaaatggaccaccagtagattttctcagtttataaatgatagacccattgcctagagaaaagaacagcttttattcaatcatataataagtaaaaggaaataatttgctcctctaaaaaagtcctgtgatggtaactccacatttctatatctatatctatatctatatctatgtctatctatatatctctctctcaaaatatctgtatttatatctgtatttgtattcatatttgtatttatacccatacctatacttgtacttacatatgtatgtgtcattgtacccacatatcttgccagccatccaaccatccatccatctacatagaagtgcttcttaaactggagtatgcatcagaatcctctggagggcttgttaaaacacagattactgggccccatccccagagtttctgattcagtaggtcttcaacagggcctgagaatttgcatttctaatgtttcagggtgatgcagctgctgatggttccgggattacactttgagaactgctgcttacacctgtacccctctcattctctctttctatctcattaccaaactctaatttaatgaacatacagttacccgcacatattttgattcattatcaattgtcaatatacatcacagtgttaaatactacacaaaatagatattatgctgatttcaaatttctctccccttaatttaataataaaattataagatacaaaaattattaccatgtatatttttcctcccaggagaatacttaaatcgtggtacatttcttgcttttacttggttttcactgcctttggcttctaacttgatgtatttacatcttaatggttcagatttattttccaaacagtgagatgaaacagggacaactcaaaggcagcttcattttgaaattggccaggcttttgtaaacaaacccttgacagagcaatttctaattctctaaacagctgggggggaaaatatcacacagaaaagcagatgttattcgcgtaacttctttttttcaggtctacaatcatcatctacagcaccggatccaccatatcacttcaagtaaattttgactttgctaggtttcaaccacattactcacattggagatgtgagtcaaagaataaagcttctcagagacagctctgtggatgcctcttcatgttaggttgacagcttttgatttaagcgttctgttagctcatgactgcagcatgcaataggaacacagttcctcagatgccaaccctaacctaaataaaagctagaccggcatctcctcagggtcaagttaaagaatatgggctgtgctgtctcagacctcagcggctaccaattagtgggagacaagacatgtataaaaggaaatttaattggtaattttaatggataaacaactgcagggttgagagaaagaggtcacttgtgctggtggagttggggaaagtttcatattccatgcattcagatcttgagaaacaaaggttatatctccagaaagcaaaaggcggacattgaaaagggaagcaaatctttacagatgaagtcacagcaaagacaatctggagccaggaattaacgtgtgacaagagagggaataatcccagggatgatgaattttactactgaaatgattataaattacagccacctacaacctattgtgaatggcttttatggtatcagaacagaatagttaaaggaataggaaaaaatcttgtgccctaatgaagaaaagggagatgtgtgttttgctcaattcaaagaaaatatctctttacacacacacacacacacacacacacacacacacacacacacacaggtgtataatatacacacacacacatatataaacgcaaacacatatatgtgtatatatatacacatacacctacatatacacacatgcatacacacatgcatacacacactcagaccttatggaataattctaattatatataaggtctccttgttcccattaaacatccaaaatgcccctagttgcaaatacttcagcaaatagtccctgaataaaagatatagtcagccaacattgaaataaagctgttactacaaagaaaaatattttgcaaaagagacagctcatagactgctacaatacaaaagtctgcattttaagagccataactgtatatggatgtaagcggtgtttttaatgttaaatacatgttcaatatttattactttttgtaaattgtgccatgaaggaaatttactggaagcaacaaaatagaagaaatggtaacaatttctaagtgttttctaatgtaacaatttggcctgtagttctaatttatttaaaaatttgttcaattgggcacaaatttagttgcacagtggtattttgatgtaaaagttagtataaaaagcaggaaaagtgaacatttttcaaaataagtaccttttctaaaaatagtaatattttgaatataaaaatagtgcaataaatgctactcacaagtaacttctcaataaaatgaatgattgaataaaataatacatctaaatttgctggctctcagatctgagctcccagaacttcaacagccacacacatatacgcacacattttcaaattcaatgttatcctattaaaaataagcctgtgttaaaagaagttgtaactgtccatcacaccaaaaatgcatagtttagccacagccattatagcaattttcatattattcaaaaagaaaagattctaaagagtacaaataaagcacaaagcagatgttcaaaacaagtctgcatcaaaaattcaaaaacatttgccacaggaatggcgcactttcatcattaatatacacctactatgtacccacaaacattaaaaattaaaacaaattaaaaataaaaaagaaacggatcataaatattacagctgccagtttcctggtgagaaatctttgtgaagaaattgcagttaaagtggcgctctggaaaataagataaaatgacaattaagagattatcttttctttctgctgtgacgtgacatatgtgagtaagactgttggcatacccacagatacagtgatgcaagttaacatttgcaaaatgtcccaaatctgaagaacatctcaagaaaatcactggagaataaagaaaacattttattgatcatctctacagtacagagtttctcaatcttggcattcttgctatttgggcgagatcacttgtttttgtggtgggtgttgctgtcctctaaactgtgggatgtttagcagcatccttggccagtagcaaatcacccctcccaaatgtgaccacaaaagtctccagacattggcaaatgtgtcctggggggaggtacaaaatttccccagtgaaaaacactgatagcatatttttcttttttgagacagagtttcactcttgttgtccaggctggagtgcaatggcatgacctcagctcactgcaacctctgcctcccaggttcaagcaattctcctgcctcagcctcccaagtagctgggattataggcatgcaccaccatgcctggctaattttttatatttttagtagagacggggtttcaccatgttggccaggctggttttgaactcctgacctcaggtgatccacctgccttggccttccaagatagcatacattcacataaacttatttgatcaattgatgtggtaaataggataaaattgtccacaatgttatattcatacagaactcattctgtgaattttgcctaagtgttgtatgtacacatttttcatatttaagcacaatagattgacaaatctggagtgactatttcttaggtataaacatttttaaactctactagaatgcttctgctgattatattaaaatttgaaggattctcacccagaagttgtgatttggggtttaacccaaaatgttatcactgctttacatgatgtaacttatattatattttggataaaggaaaacaatctgtttctgctgtttgaatagaagctccaagtaatattgctaagcatagtataccctgaattctgaaggttttgatattagttatcagaaataccttagatgaatgtgaatggtttgtaacaattattcaggaatgagctggaaaaacttctccctggacagaactggcaataatgtggaatattacagaaatacttaattataaaaaccatacaagtcatacttttgtccttaaaacttatcttagtcaaacacgctagtaaaatgaacaaagagaaagtatgaggggacttcaaaaagttcatagaaaatatgcattatgaaagaactatacaaaaatttcaaatgtatattacaccaaaataaattcttactaacttgttataacctgccttaacaagatctagtttgaggcactaagaaagataagacatcagtttgaaaagagcccctgtcagggaaacatgaattctgctaaaattgaagcaagaacaaacatcaaatttatggtgaagattgggtggaagaatggtgaaatcactgatgctttattaaaagtttatgaggacagtcccccaaagatatcaacagtttgcaaatgaaaaactcattttaagaagtgatgagggctgagtgtggtggctcacgcctgtaatcccagcactttgggatgctgaggtgcacagatcacctgaggtcagaagtttgaggccagcctggccaacatggtgaaaccctgtctctactaaaaatacaaaaattagctgggcttggtggtgggcagctgtaatcccagctactcaggaggctgaggcaggagaattgcttgaacccgggaggcagaggttgcagtgagccgagatcgcaccattgccctccagtctggtgacaagagtgaaaacccccatttcaaaaaaaaaaaaaaaaaaaaagaaaaaagaagaagggatgatattgaagatgaagcccacagcagcaggccatccatatcaatttgtgaggaaaaaaattcatcttgttcatgctctaatcgaagaggaccaatgattaacagcagaaacaatagccaacaccatagacatctcaattggttcagcttacacaattctgactgaaaaattaaagtcaagcaaactttacgccctaaagttaccaaaaccattgcacttagatcagctgcagacaagagcagagcttttgaaggaaatttttcacaagtgggaccaagatcctgaagcatttcttcaaagaattgtaacaggaaataaaacatggctttcccagtaccatcctgaagacaaagcacaatcaaagcagtggctaccaagaggaagtggtccagtcaaagtaaaagcagactggtcaagagcaaaggtcatggcaacagcgttttgggatgctcaaggcattttgtttgttgactttttagagggccaaaactcaattaacatctgtttactatgagagtattttgagaaagttagccaaagctttagcagaaaaatgactacaacaatgctcctggatcactcctcttatcaaacaagggcaattttgtgagagtctctatgggaaattactaagcactcaccttccagtcctgatttggctccttctgacttctttttgcttactaatcttaaaaaaaaaaaaaatctaaagggcacccatttgtcttcagttaataaaataaaaaagattgcaatgacatggtaaaattcccaggacccttagttctttagagatggactaaaatggcgggtatcattgatcaaaaaagtgtcttgagcttgatgctgagaaagtttctatttattatttcttatcttttcatttaatttgtcccatgaactttttgaagtgctctcatatatgcagcacaaagtagtggttggtttcacttaaaattcttttgagacggagtcttgctctgtcgcccaggccggactgcggactgcagtggcgcaatctcgactcactgcaagctccgcttcccgggttcacgccattctcctgcctcagcctcccgagtagctgggactacaggcgcccgccaccgcgcccggctaattttttgtatttttagtagagacggggtttcaccttgttagccaggatggtctcgatctcctgacctcatgatccacccgcctcggcctcccaaagtgctgggattacaggcgtgagccacacttaaaattctttagtctgataaatgttccaaataagaaaaataagaaaatgtttctactaattctgtttaaagtgtgtgactgcattgtttaatgataataaatctagagatcaaaatgcttatcaatcactattaaaattataatgtattcactgacaatacaggaattactcaaatttaccaagaaatgtgggaaatttttaagaataataagcatatcaagtgggtgcaacatgcttacttcaataatacaggacaaaatatgaaagctattatttttttctgaattgttcatttctttgtataattttctaatgaagattattcatttaccactaaatataatcaaattattgtatcataattaaatgcacaaatgagaaaaaacacctttgttagtctctacatacaaatttttctttcagaaaatgttgtcactgttattcacattcctacacagataacatctgaaacctgtattttggtttctgtaattattatttattattgaagtgaaaattatctaaaatatacctcatttgaaagagaaaaacatcctagaccaaacttatttttaaaagtagttatgctattttgctagaaatatgctaatttgctagattagtagctctcaactgaggatgacttcacacccaataagacatttagggatgtctggaaacatttttggttgtctcaactgaggggaaggtgctactggcatctagcggctagaaatcaggcatcctgctcaacattctgcaatgcacaggacagcccctcacaaaaaagaatgatctgcccccaaatgtcaatagagctgaggtttagaaaccctgctacacataaaattgtttcccagtttaatctgtgcaacaaggcaagaagcacgcaattcaaaatggtgtgaagagaatccctgtttagagagtatataatgttttaccaaaggaatttttctttttctttctttctttctttcttttttttttttttgagatggagtttcgcttttgttgcccaggctggagtgcaatggcatgatctcggctcactgcaacctccgcctcctgggttcaaccaattctcctgcctcagcctcccaagtagctgggattacaggcatgcaccaccacgcccagctaattttgtagttttagtagaaaaaggatttctccatgttggtcaggctggtcttgaactcccgatctcaggtgatccacccgccttggcctcccaaagtgctgggattacaggcgtgagccatcgcgcccagctgggattttttttttttcctatggaaagcggaatttaaattatcccttcttgctattgttggcacctcacaaagcaggaaacacagttgaaggttgaggggatcatgtactttgatattgactcaaagtaatgccttcactataaaacaggaatcacttgacatgctaagaaaaacccatcgtagaaatcaatataactaaagcttgaatgaatctgagtaactctttttccctcgatgtcaaaagtaagtggtagcctgtattgcttaggaggcactattaaaaaacaaacttttaacagccttaagtaaacgttttcattttccataaaactaaatgatggcacagtaatatgattgcttacagctgcaaatgcctcatcatgaactaaacacttgttaaactttgagtaaaatttttcttcaatggcttacagtaaaataaaagcatttttaaaaattatttcattaaataatgccatggcagaccgcttagttaaataatgtcatagacttgacccaatcatccactgatttcatgataagtacacattaaatctaaaaaaaacccctacatccctaaatacaaatgactttataattttacattagggagtagcactgtataagttactaatgttttgtcccacccaaaggaaggaaaaatagaaaacttcatgctaggaaggaaaaaaaagtttcctatgtgtttaattttcctaaatgtccaagatattctttagattacatgtcatcaacacttcaggagaaaggtgtcaagtttctgaatggggtagtaaagagaagttgaggtaagaaaaggacatctgacattcattcctgctaagaaagaaaagaaaatcttgctcacacatttcgttttaaagacttgtaagggaaaagtttgtctaaaatttcaaataatacaaaacaaaacatattcgtcattcactttttagtatgcattacttcaatcagattgttttgttctaaggccaaactaaattcagccctttaaagattggaaaatatttgatgttgctggatgttttgcaaagtatcaaataattttggaatgttgaacacctatgggaagggcatactaagtgagtaccataatccagagggatgttgtcaaagataggtgagtaaagaggcatttgaataccagcaataagccaaaaaatgtcactcctcctaaacacagatattatgggttcatttagtgactattaccatgtcctctattggtgccagggatgtaggggctcaggtaaaaagatatcaaaaagtcaggtctgagcctgacttcacaatggtacctaggaatttgggggcaatcataacctgcttttgagtataatcgtgtgctacagaggaatgtagattagatttatcaaaacaaaagtcctggttattcatttacaacaggctttgtgaccacagaagttatcccaagtctttgattattctacaccattacaagatactttacagggttttaaaggtactttacaggtactttacaggtactttacaggccaaaaagcatcaacaaagacattgctgatttagtcagcatctggcctgcttctctgacatgcattaatatggaaccctttcaaaccatattcagtgatagttcatattgaatccttcacattacaagataatcacttttgtggtaaattattttgttttggtattagattggtgttaatttttctcatttcatcgtgaaggaaggtaaaatgttgtctaaagtcatttctgaactttgcacatacatctccaaacatctgagcattattattctgtacaggagatacagttatggtataggaaggtacaccagtgactagtggaccagcatagggctggagagggtagggaacattaatgaagtcatgctgaagtccagatgggggagccagcctccgatagattctaattcagatgcagcatttattgagtaatttgggagcgagttacctacatggctcacttttaaaatggggataaaaatctcactctactaggatttttgtgaagttgacaaagattctatgtgaatgcatgatgagttcttagaaaccagtaacagttaactgaattcagtgcctgaccaccaccactcttttctgtcacgtctcagggtactctgccacactggctaaaatccaaaggtttcctaccaattctgtcaaggattaatgatgtacaagtgtctgcccttgcagaacttctagtctatcctcatagttgttgagaatttctgggaaaatctttgtttctgcagcttgtttgaggtattttatttttttcaccaccaaaaacttttcagtaaaacctatttctgagtgtggagatatcttcgtctcccaaagttgctaaagggcacctgaagccttgatgtacaaaaattctaatttcaatttaattttcaacacattcaatccaaagactattaactcatgtagctagatcactcttcagacataataactgaatgttctaatcaaaatctcccagagttacaaaaaaatctaattctgcaaaagacaatcaatgtaataattacagaggtattatggtgactcattagaaaaggcaagtgttagaaaggagctttttctgtaaatagcagccctatcatctttgcaattcgactaatcccattacacctacacaagaacgaatttcaaactttaataataaatttcatgaaggttaccgagcccaggcaatgttggcaccagagttatgagatcattatgggaagttcgtgaacctggtgctagagagatgattcatcagctctctgtaagatggtaaagattttatggatcaacatgggagtagtcatttttcaatatttcaaaagcctggcttgggtattcaacagtttgacatacttagctgtagcagcagccacagtttgtttagtcaggggcaacaggaaagagtgataaattagaaaacgtcaagccattctttccctcacctgcctgactttaagtaattaatgacagctgttttaatgaattgattagtttaataattgaaaaatgcaagacactacctttatttctgttatttctcccatctccttctaacaagatgttcaagaattgtatctctgttaaagtacaatcacgtgtcaatgatgaggatatatcctgagaaaactgtcattgtgaacatcatagagtgtatttatacaaacacctaagcattatcatacagtgtggcagacatacaaagagttacatacaaaaaggtacagaaaggcttactagtgacctagtggaccacgaagtgaacatcatagcatgtacttacacaaacctactacacacctaggctagatggtacagcctattgctcctgtaatacagacctgtacagcatgttactatactgaatactgtaggtaagtgtaacacaatagtatttgtgtatctaaacatatctaaacatagaaaggtagagtaacaatatggtattataatcttatgagaccactgttgtctatgtggtccattattgacagaaacatcctcatttgtaacatgactgcatattcgcaagtggattccagccaccattttacaataacaacaacaactacatgcacaacagcaaaagctaacaattttttagcactgactacatcccagctactgttataagcacatctcaaggtgttccaccaagctggtgaggctgggggatgtcagcaatggggttaaagggtgcaaagcctcagaaacgaggaagacatttgagttttttttgagatctgctgcacagcatgttgaatatagctaataactgagtaccatacatttcataattacagagagtaaatttcaaatgttctaatcacaaaaagattaaatatttgggatgtatatgttaatcagctcgatttaatcattccacattgtattcaaaattcataacatcacttttcaccaaataaatacaattataatttattaatatataattttaaaaattctgagagcccactagatttctcaagggttaacgagatgcatgtgggtcttagaacgccaggaagcatagcaactatctccttggcgtctctgaggaggatggtcttgaaaaccagataaacacaatcttttacacatcccgcaaatattaactgagggcttcgtttgtgccaggcatagagctctatgctctagatgtgtttactcatctaatcatcacaacaccaccattgctcccatttcacagatatttaatagaacagtggagaaacttgctcatagacccacggtaagaaggtggcagagtcaaaatgcagagaatagatttagcaaatcaattggagtcacccagtgaatggtgtcatcatctcagcacccaactggaaagctgcaggatccctctcttcctttcctctctattctcatggatgttagaatagtgcctggcacatgttcagcatgttagaagaattttgttggggctcagaaaacagtatctcaaaatgaagactgctgctgagcagcttcagaagcaaaagtttctcctgaccttctcctgtcctcctctcagtcccattttgccctaaggatagccatggaaactagaatcccttttccccaagatagatcatacaaatcagaaccccttttcctgaaagtcagtcataaaacctaaaaatattctacgtaaaaactggccatgaagaaatgatctgacctaactggtttgactgtagatcctaagactcctgttccagacagggtcctctctcacatcaagaaggaagaaatgcttctcagagaggccaagaataatctagatggacaggccttactgggtttcccctactcagtccattagcatttaaatcagaccctttctgtccaatcacatttctacatggctgtccacatattgttgaacctaagcataaaaatggacaactgtccattttcccctgtatgttaggtattcattccgaaggtttctgtgtatacaagttaaataaacgtgtatgccttttcttctgttaatcaatctgcctcatgccagtatattttcagtgaccctttagagcgcaaaggggaagtttcttcttgactcccttagagttagtaaatgaaataggtaaaagacatgagccaactgctcccactaaatgagtaaaaccatgcttaagataggcagaataaacacaagcccctgtaagctgcaaagtgaaggcatttagtcaggcccactaaacaaattctctatgtgaattcaaatgctatagatatgttactgatttactgtgttattcttctttattggttttggaggtctgagaccatcacaaagaggctcttgtggtctattcttggcatctcacaacatctcacaatgttgtcatgggtaagataactgataactgtttgttgattagactttcctgggcaaatataactgaatacagagaaatcatagacataactggctatgcttactttaaaactgtgaagctctgtataaacaactaacaaaatggggcatattgctaaatcaatgagagcaaagtacccaagtccaaggctattttcaaatgatacgtttacctcctcacactaatctattcattttcattctttgattggattttaaaggtttagctcaagtgtggttctcaaaaaaactagacatattacttccacctagtgaccctcttgccgctatatttttcccaccattttcatgatcaagctactcttagatccatcccctagaaatatgctttctctgaataatcaaattattcaatccttttttgtagattctgctcagggcttccctatgacgtctggcttgctctggtattttgggtgctgatgaatcttagagatatacacatatattctcattaatttgcaacttttttcttgatgcaaacaaacacaaagcaatcaaaacaaaaatgttctagaggacacatacattcccttatccacagtgcagggccacagggtacagacagcagaaagtcatgtgttttggcttgctggtactaccagagatcttcatccctatgctttgtgaagtgaatacatcaaagtgcctctcttccaagatggtttgactcaagttcatgttgatgaatgcattttagactaaacttttttattttgagataattttagattcacattcatttgtaagaaataatatagagccatctcctatactcttctcccagcttcccccagttgtaacatctttcatgactatagtataatgtcacagccaggaaactgacattgattcaactatcttatttagaattcacaagttttacatgttatcatttgtgtgtgaatgtgtgtatgtgtgtgtatttagttatatgcaattttatcacatatgtatctttgtgtgacaaccacaatagtcagggcacagaacagtttcattgccacaaggattcctcttgctacccctttacagctatttgcacctccctctcaactcatcatcttcttaaatctagcaaccactaatctgctttccatattcaatgaagggaggatgtccaactgggcagaggcaacatccagcaggagacaattacacaatcatcgaagaagatgctcagataaattgcagttaccttctccactgagaacagtaaggctatggcgtcattagaaaattatgttctttattcttaaataaatccaagtaggatggggcttgatatactttggctgtgttcccacccaaatctcagcttgaattatagttcccataatccccacatgtcatgggagggacccggtgggaggtaactgagtcaatgggatggttaccctcatgttgttctcgtgatagtgagttctcacgagatctgatggttttataaggggcttttgccccttttgctcagcaagtcttcttgctcctgccatgtgaagaaggacttgtttacttccccttccaccatgattgtaagtttcctgaggcctccccaaccatgctgaaccatgagtcaattaaacctctttcctttataaattacccagtctccagtatgcctttattagcagcacgaaaatggactaatacagggtagatggtcaatccagcagtagaatgggatgaaaatctaggatagttaaaaatctttgtgcataaggaaaagaatagcatgaaaaaggagaagagatagccttttctttttcttaaatgagaggaaaaagcaccttttattttccttgctgcagtggcagcaaactcattggttttcataaaacacaacttctgcgatatggtctgttgataaggttgctccatcatgggaggacaaacttgaggctgactgttaatgacagaactaggtcttctctcaaagcctctaatgtgtgctatttctcatgaagaacccctgacaccgtaagatgcttcagttaaagcttctgaaatattgcagtggcataattgacaagttttttggtgctatgagtttctcacacatgtaaaccctttcggaaaagttggagataaaaagatgggggagagtttggtttagagtcacaaagttccagataccagccacagatgcctctgcccaatgtcgctacatgttcttttctgagaaatgcattcaatcactcagtattacgcactgtggttaaaaaaaaaaaaaaagatctactcaccaccatctaccctcccttatcctccatgtgaagctcacggtagcagcagctgaagacagaaaagttgtacctgttccctcacaccagggacattacttggtgacctggtgaatggcataggcaagattacccgtgttgctggaggtgatccctgccacagggatgcagtcatcctttgtcatacagatggaaaaccccttggttagcttctccacctgttcaggctttagccttgtgaaacaaagcatgccaatttagtcagtcatgtgttgtcagatgtgtgaggaactctccttactgcagttggagatcagctgagtctgcatgctagtaatgcagttggccatgattttcacttcttgcaaccattattttcacaaacccaggctgttcagaatggtagaggcaatacaggccccactgagagaagggttggaatacatgggatggatcaggatcttcaactgactcccctcttttggtttcattcactgtctttgcagatcacagtgaaggctctcatacactgaccatataaagcccatgttcttggcacatgattgacagagacaaacattaatgctctgttcaatgaagttgcacacagcccaggcatccttgttaccatcaccactggcaaagccttggtaggccatatcaaagaacgcagtttctttttctttgccactattattatttcctttcactgctttgcatgagggtcccaggcatgcaggagaagagcactttgctctggtatttttgaaatgtcctccatagcacccgtgaagtcaaaactgcaagtcttggggttatagaattgataatcttgtagttgcatgccagctaccctgaagataggtgtgtgatttccccagggtggtttggacagagacatctctgtcttcaaaaactttaaaaatctttgcacaaaactggctccaacccttaaaccccagttccagaaatgatccacacagtgacagactggccacttttcaacactttgctcttctcacccaaggctggttctgcagatgccttggaaaattcagcttgtccccaaatgggcaggtattccttgtctaaatttttttattatattttaagttctggggtacatgtgcaaaatgtgcagttttgttacatggatatacacatgccatagtggttttctgtacccatcaactcgtcacctacattaggtatttctcctaatgttttctctcccctagcccccaaccccgtgacaggccccggtgtgtaatattcccctccctatgtccatgtgttctcattgttaaactcccacttatgagtgagaacatgcgctgtttggttttctgttcttgtgatagtttgctgagaatgatggtttccagcttcatccatgtccctgcaaaggacatgaactcacccttttttatggctgcatagtatcccatggtgtatatgtgccacattttctttatccagtctattattgatggacatctgggttggttccaagtctttgctgttgtctaaattttttatggtaatctaactgggtctcttattgtcccggtaggcaccaactcccagattcatctttttgctgttgatttccctcttaaaggctttggtggttcccaggatgggatctggaggtctcatttccacatgggcccacaaggagctggctctggcagaggccatggtggggaggcctaggtaaaaggtggcagcgatcccctagaggacacggctggagtggagcagggccgggtcatggtggaccttgagagtgcagtgggtaggcacaggacaaagtagaaggcaagaaggtgcagaaccagggggcatggactcctgctgaaggtcttgttttgtattagaagacctccacagtggagtgaaaaatgaagtcacttctctgtatattttgaattaaagcttgcacaggtgtttcagcctgctaaatagttcaacctggactatttcagctctgaattattcaaataattatttttaaaatattttaaatttaatttagcacacagagaatgcctctgtgtgaagtaagtggtggcaatttaaaataactaatgatcataattattggaatctagtctcctgggcattttctacttcataatttacagggagcctatgagagttcaaacacactgtattttcgccaaaggagtctcatgctttgtctgcattttatggcttcctttgcacctggagcagctattttaggactgtctagacaatcaccccagctttaaaggtcttttcctttcttttcacatagtcactgagcatgaaggataataaatagatgacgctggcactctctcaccaaagatactattcaaatagagacaggaacaagaaggcctttgctctggctcacaaaatcaagatgccttaatatacagccccagatgtctaccaattggccaaacttgaaaccaacaagaaggccttccaatgtccacatctctgtagtagctggatcatactttttggttgagctgcgtgaaatggttactatttgaccatcttggacatataaaaatggcaatttaagatgtttcgatccaagagatttgggaaagaatttgggagtgctctgtttccttttttcctctccaattcccaagcaacattcatctgggttctagcaaggacccagaatgcacagcttctgcaggccacttttgccactacagggaaataatgcagccaagcatgattcaggaacatttcctatatacgtgtcctaggtaagacctaaaagttagtaagtaatatatcccagggagacgtacaccgggtcagtttacttcacccctcacagtcatttctttcaagaggtaagagacaccttttaagctctccacaggactcctacagcccacctgtccccaggctctttaatgggttccgagattgcatcccaatctcagaccctcctgggaatattcctacttggtactctctgatggtgaaagtatttcattttgtaggaaaaaaatacacaagggtagatatctatagatatatagatgtacattgcatataatatacaatataatattcaattacattatatacaacatacactatatatgtatttttacattatatactatatatataatacgtcacctagcaatgatcagttttatttgtttccttataatgttagagtatttctcagtacaacaagatgtgcacatattaattttctgctaacatcataccatttctactgtcgtgttcaagagctatctccaccctttactctgtcccactttctccactgatgatatgtgtaacatgaatcagtttggaggtctgaagtccaaagcatttctcctgagtataaactggagcttcaaaaacaagagcagcccaagaaggctgggccaagggctgagaaatttcatatcagtgccactcacaactgcaaactttgtgccaggcactgggctaaatgcaatggtaagtatggggatacaaagtagatgaatactcagtctccacttaagcagatacaattcttataggggaataaaattacaacaccaagtggagcaaacacagcatagaaccaagtcaacagatgttgtcttacttcattttgtgttgctataaaggaatagctaaggctgggtagttaataaacaacagaggtttattttggttcaaagttctgctggctttacaagatagatggcactggcatctgcttggatttcagcagagcttttgtgttccattaaaatatgtctgagaaggtcaaagaggaagcagacatgtgcaaagagggaccaaacccaggggtgtcctggctttctagcaacccactcttgcaggaactaatcaattcccctgagaaccaatctagtgtcaagagtgagaatgccctcactgccatgagaacagcaccaagccatttatgagggatccatccctgtaacccagacatctcccactatgccccacctccgatatcaccatgctgaccgtcaaatgtcaacatgagatttgatggggacaaacaaaccatgtccaaaccacagaaaatatggattcaaattctccgagggccatggcttatgagcagcgttattagggcaatttgcttaacttaccctatttcctcccttgagtatcagttaataataatttgaatcttacttggcatttaataagataattactgaaaatttatgtcaggtagagtgagactggcaaacttaaaatactataaatgcaagctcttatttttagtgagcatccactgcatgcatatactaccccatttcatcctcagcagtctcaatcttttaatgtattactactttcttccttttagatagacaagttgggcaaaaataagttaattaatctccccactaacagaagactctttcctgcaggaaaataatgaagtcccgaactgaaggcaaacttctctaaagtcatcagcaatttttcacttctcaattgccaatatcttctcactttgtcagttttcacttcccagacactccttcaagcaactcaatctgttttctacttccactattcagataaaactggtttggtaaaaattcccaatgctgccatgttataaagctgaggggcgactattctgcttttattctacctgatccctcagcaccactaaacctagctggccattcattacctttgccatctggacctcccccagcttttgctatacgcaccccttttctctctttttccttcactagccacttgctctaggttctttgctgctgcttctgctcctttagagctctaaatgctggcactcctcatggctctgttgcaggccaacatctcttagtcaatccttctgaagatgtgtctggaatttgtgaacctcctgaatcagctccaccagaaagaaacaagcttcatgagggaaagaacttttgcacataaattgctgaattcccaacacctgaaagaatctcaggcacactccaggtgctcaacaaatatttgctgaaggaatgtgaattgcctgaagtgcttgagatgttcctgggatgcccttctggacatctaaattggaatcacagtgcatctgagaaccaaaatctctggtcttctaccacaccgacttttatccatgttctttccttaatctgatatcctctcccacttcctcattctttaatgcgcagggaagcctttcctgaccctcacctccacccagatttagtcgaatctccctctcgtgccctttcatagaaccctctcctttgtggtactgaggtcccttaaattttacacatatctgtgtgactactgccagcctgtctcagatcatacaggcttgcactcaccatcatacctccatttcctcactaagtctccctcatggtgggccctcaataaatatcagtgaataaattgttaataatacagattttatattaacgttaatatatcaaaatataataatatatttaaattgtatatttatgatataatgaataattaaaagttaaatgatgacacaaatttctctctcctcagctctgagctctcctctgaattctacatgcatatccccatctaggggcatcacatctccaaacggatgtctaatgggtttctctatttcagcctgtccaaagccccagcttttaaattttccaatacaaacttgtttctctctcaatattttactcatgttagtaaatagcatcacccacccagttgctcaagcaagctcttgagagtcacatctgattcccccttttccttcaccagccccttacccatatctaattaaacacttagtcctgttgcttatacttctaaaatatatttcaaatccatcccttctccatctccacagctgctgccaagcccaatcttccattaacagtcaactggatggtggctgcaaatcaactggtcccctgtatccattcttgctggtctaccacagattttctacacagagctcaaaacatcaatcaaaccatccccattagagccccatcctaattcaatggcttctcactgcaatgcaatgaagtacatacaccttagtgaagctctgcctatctatctacagcacctcatggcattgctcccttcactcactagactcccaactctcttttgtacatactgttccctccgcctggaatgattaccccatgtgtccccacccacacctcacacagctggcttcttctcctcctccagtcctcagattacatgctgccttctcagagtaaccttcttaacagtgtctaaaatagatttcggccgggtgcagtggctcgcgcctgtaatcccagcagtttgggaggccgaggcgggtggatcatgaggtcaggagatggagaccatcctggctaacacggtgaaaccccgtctctactaaaaatataaaaaattagccgggcgtagtggcgggcgcctgtagtcccagctactcgggaggctgaggcaggagaatggcgtgaacccgggaagcggagcttgcagtgagccgagatcgcgccactgcactccagcctgggagaaagagtgagactccgtctaaaaaaaaaaaaagatttcgccttcagatatctgttgtcacagaaatatttctgttctttacacagcatttgccacaatttggaattactgatttactactgttcattatcttgtttccagatagaaacttctatgtcagtcttgttcaccatttcatccctagcacctaaaatggagctcagcatagattatcaataaacggttgttgcatgaatggacagagtggagaaaaacggtcagattaatacagttccaacagatcaatggttgccagagcctgagggtgaaaagaggggttgactacgaaaaggcagaaggaagagatttggtggtgggggtgggggtggggggtggtatatatagaattcttctgtatcacaattgtgatgttggctacacaactttatgtatttgtcaaaactgatagaaccataccctccagaaggtcaattttactctatgtaaattaaaaaataaattaataaaattatgattccaaaacccatgtcaacccagaacaaatctaagattccaagattcacaggtttagagtttttttgttgttgttgttctggtggtggagggttcagttaacttcctgtgttcatggtcaaagtactgactcaaaacatacttccctatttttcatttatcagtttaaagaaaggaaaccggaaacaaaataaagatgtgaaagataaataatacaagaaaaagcacagtagtaaaataatatttaaactaatcatgtgataaaatgtcagcatttattcatgacatttggctctgtttgtattggatcaccccagcagggcagtggctgtgggttgatttcataatagtgcctcccacatgtacgcccacgcctgacctctgctttgtgcagttgataatgactaaacttcacatattatgctgacaaaatctactccttccctggagggctgttacacacagggaattggagtttcacagctgaacaatgtttctttctcaaattctgggatgatccacttccattagaacaaagttatacgggctgataaattgctgtcttttgccaaagtgttactcatcatcgtatattcacccaacagatgccactgagaaaccccatcctatcagggggaaagaaggatgcagagatatgaatagactgtttagacacaagttgcattccctaaagtaagcacatgacatacgaatttcaccttatgacatttcccccacccccacccccactgactttcatccattagaacgtgttgatggatataccatttcaaaatgaaatatttggatatctgactctgatttggggaaaggggaaatggtgagctaatttcctcttttatcaagctgaatcactaagttcgctctgttgccatgcacgcataagtaatgccatagcaacctctcagtttgctcttaaacacacaacagcagaagtatgcgaataggtacattttttaatccttagattttcttagcagcttaagttttataagacattttatggcaccggattatttagttcacctttggtagtcttattgctgactgacacatatatcatcaataccagcacaacagaaaggcttagttcttggaaaattttccaataactttcctttattctcaatctctagctcacaattaaaaatttgcacattggacgctatagtctggatcctcttcaggattttctttataaagatcctaactttaaatgggactgaaatatataatttgaaattcatgaaatatagaaatacatggacctctcatatagctatttaagtaaattcaatgaaagtgtcattatcacttggtatgtactaggaattatgtcaggttctagaaagaaagaaaatctttactatcaagggattcagatgaactcctgtagaaaataagggatgggtactcttgaattctgccactttgaggtttagatttttatgcctacaaaatatatggtaacacctaactttatactagtttaagaaaagtccatctaaattgagaaaatgtggatttttaaatagttttattacctcatgcatttcttcacaaatgtgtacacttctttctactggatgacaacaaaatgagagcactagtactatggaaatgccttttacaaaacaccatgtcactgctctctgtcaagtgtctttggctgatagactggatgaataattgacttgttcttgaaatacctgaaatgggcttcagattccatacttgaatctaacattatttagccacttctgccaaatattttaattacttaaggagttaaggttttgttattttatagagaggcaatacacttcaataaaattttagatatcccatccacccttccatgagcatatgttaatgtatccaaagctaagggaatttggatcaagtcattttcacttaagcacttatgtataatttgaaggatacacatcaggaaacagaaaatatcaactttctcattgaccagatgcgtttaaaaatgtctcagtgaactggcatcccttcatttccgatcaggtagagagctgtgcattcataaaactactaggcttgttcttaagcaaagcttgctgttgctagctcttgctgctcttagaagtgggagcaaaaggtttgattctatagggctgtcctgattgtaactatagaattaggaagccctctatatttcttgatgaatcatattttaagttatttgtatactatgataaaatgatttttaacttttaggaatattaacttgaggccttaatagatggtccccagggttaatattcatttgaaatgctaatatagagaaattctttacattaatgattgtcaaagtatagtccctaggagagaaatgtcaatcttagctggaaacttattcaaaatgcaactgtttgaaccccaccccggacctactgactaggcactctggagatgaggccggcaatcagtattttaacaagccctctaggtgacttcaatgcactctcaagtttgaaatccactgctttatataatacacattgctcatctgggataatacatacagagcaatttatgttgagaaatagctcttttcttctttttgatggtgtgttgttttttgtgtgtttgcttgcttgttttgtattctgataaaagtaattgaaaatgtttaatataaggatttttgcctatcccagtatggttatgacacaagatcacttggttcctgataaactaaaaagtcattgtaaatgttgttttgaagaacaacctaattaaaatatattttattagcagcaataataagaggatgactaatttgaataatctagcaacttgagactggggaaacaatatggcttagagtcagagggactttagtccagcttaaatcagggttactcaatataagcattattgacctttggggccagataattctatgttgtaggggtgctataggatatttggcagcatccctggtctctacccactagatgccaggggatgccccttctcagttgtgataataaaaaatgtcccattgtcagatgtccccttgcgggggcaaatagtccctacttgagaaccactggtcggtccattgggggttctcaacctcagcagtacagtagaatcaattaatactgatgcccggccaggcgcagtggctcacgcctgtaatcacaacactttgggaggccgaggtgggtagatcacctcaggtcaggagttcaagaccagcctggctaacatggtgaaaccccatctctactaaaaaaatacaaaaattagctgggcatggtggtggcaggtgcctgtaatcccagctactcaggaggctgaggcaggagaatcacttgaacccaggaggcggaggttgcagtgagccgagactgtaccactgcactccagtctgggcaacaagagtgaaactccatcacaaaaaaaaaaaaaaaaaaaaaaaaaagaaaagaaagaaaagaaaagaaaagaatactgttgctcagactggttggattgaacctctgtggataggctcagaatcagtatcttttcaaagctcggtaggtgatacaaaggtccagccaagactgccaaacactgtacagacatcccagtgcatccatacccttacctgggagagagctgtaataccatctattgtaactatcacacaagatcagatgagagagcatttatgaaagcatttataccacaaggcaattagtatgttaaaggcagcagagaaaaataatgtacttttcaaagttgccattgaaattgaaaaatatatccagctctctattatgaattaggatggtttatatttactgtcttttagattcatatcccattcccaataggaaagagatgtgatgcattctctatgtctctcttgggagtagattcatgatattattcagtcttcgatgggcagaaaaccatacaaattggatcaaatcgttcatactatgcaccagtgatgctctgaatatatactataaaatcaatattctttctattcttttgcctctcaataaccaattttaataagtggaaaataattcagattcctctgacaatagcctctttagaaagaatggggaaaattcttgggttacaattgtgtcaatgaaagggattctttattttaaaaaagataaaaatatccaaagcaaataagaacaaatgttaacagttactaaatctgagtaacaaatacatagatacttgttttcgtttttctatatttttctttgaagtatctgattcaaactcaaagaggatgctaaaatcagtttgaacaaagcaccagtgaatacttcaaagaaaaataaagaaaaaagcacgtttttcttggtgccaggtgactatgtagaccccatggggatggggaggccagctgggggccaaggggctgcatcccacagtgtctacctcagtttatattgccaccttacgcaggcagggcacgttagcctttgatattcaagagcagttctaactgagcagttcagctagggtgtaaggaaatcttagtagttgaatttttttttcatgtgctctaacagcttttaaaacaaggaaattattatcaatatctgcttctactctccctaatgagttgcaaaagtgtgtaacccctgcctttctctctaatagaaccaatatggtagcaatggggacattttacacaaaagtcagagtgaaaagatggacttttaggcacattttttttttttaagagatgagggtttctctatgctgcccaggctggacacaaactcctggggcacaagtgatcctcccacctcagtctctcaagtagctgggattacaggcgtgcaccaccatgctcagtttaggcatatattataaaagaagcaatttgcctgaagcactacactcccctgtagactgtggacagataagtaagcaaaacaatttttctcccagagtaggagttggcaaactacagcccctgggacaaatccagtccactgtctgtttctgtgaatacagtattaatttaacacagcccagtccattcgtttgcatattatctatggcttctttcagctacaacatcagagttgagtagttgtgacaaaatctgtatagcctcaaaagcctgaaatacttaccatctgtcccattacagaaaagttccctaactcccatcctagggtattaacatatgaatttgttccatagagccactgtaatcccagcactttgggaggcggagaggggaggatggctggagcccaggagtttgagaccagcctgggtaacatggcaaaactctgtctctacaaaaattagccaggcatgctggtgggtgcctatagtgccagctactggggaggctgaggtgggaggatcacttgaacccaggaggtggaggtttcagtaagctgagatcatgccactgcactgtagcttgggtgacacagtgagaccctgtctcaagaagaaagaaaagaaagaaagaaagaaagaaagaaagaaagaaagagagaaagaaaagaaaagaaagatttaataacaagtggacaaaataaaaaataatatttctcaatgacttttatagtcacacagtagtatacatttatactacatttttgctttaatacagaaaaaacaattataaagacccaaatattgtcaccttttctcttgaaaaacaaacaaacaaacaaacaaacaaacaaacaaactagtgtgctctacaaaggaaacctaaaagaggatgtgttgataattaataatgtaacacattgttaaaatatcactgtttgatagtctctcaacctagccatttcctagagtaagactattttacttatatacctatttgcagttgaataactgtaatacaggtaaaaatactaatgaaaatttataggcaaaaatatttcccttttatagaaaaatagaagtcacagctgtacgctagagaaaaatagaaaagtaatcttttctttcagtccttacaaaataattacttctatagggagtaaagatgatatttgtgttttgacataagtaaaagcttatttttagttcatttcatatgcctggactttccaatgtttggggaaattttaagaaatggagacgtttttgtagctatataagactctattatttccagaagcctcataaattgaaaatgagaccttactgacattctttcttttgtttcttctcaaaaggattcccaaataggaaaagagtatgtaataaaacagagagtgcagagctatggttgtcaaggcaactgtaataatcttgcccttgaactgtggtagagcatccactgcagttcaatctaacctcatgtttcctcagaatgcttatgtatgttcgaaatccttattatatagcaatatcattccaatcaatcaggtgatgataggaatgtagaacacgaactgaaatgtccatggcattcccattatggaaggcagacaggaaaatgacacttgctagcatacagaatagctaagagaacatgtccttccactccacgccattcaacatgcatttgggacactatactggctactaccattaatagaaacataagtccagcccacaaagtagtgaatccagattaaatgagctacaatcctgtgataggtccccatagccctaggaactatgacaaactacagaatggctggtatacacactcacaaattgccactttgtggaaaaaatggtcactatttatgatcatcaggttttcttcatagtgaagagaagaaaactttccccatacaatttggaagaaactgttactacttatttgtatctcatctgatgcttccttcaggactgcagaggattgtgttttctctaggagatagtcagtatcttagaggctgggcagctagagtttgcctcactgaacactaaatgatctttgcttatattttccaactcagacactcctcaattctgaaagtctgttaagatagctggatatttcaaagtccacatgcattttcccatagaaataaagatacagtggttttggttcgtaggtcagctcaagtagtctcatttaacctatgacatacgtgaagtacagagtgggaagtacaaatgtaaaagggaaccccattctcaccgttgtgagaccctggaaaacagcaaagagtccccatcatgggataggggaaggagcactgggttgggatcagaagtctttgtctgtatcagttctttctctgtgcctccaggccacagaccatctcctctgaagtcagtgctgaggcccctggatccagctcaatcacttagctcaccatgggaactcagcacatcatttactggaaataaaataataagcaccttgccatttgatctgaggtcgtcatttagtcatttgaacatttatttttctgttttgttttgttttgagacggggactccctctgttacccaggctggaatgcagcaatgtgatcttggctcactgaagcctcgacctcctaggcttaagcgattctcccgcctcagcctcccaaactgctaggactccaggtgggcaccacacctactaattaaaaaaagttttttttaagagacagggtctcactatgttgcccaggctggtctcaaactcctgggctcaagcaactctcctgccccagcctcccaacatttcaatatttctgagattcaagattctcctccataaattagatgtttgggaaaaataggccaggcactaagcttctcttactctcaaattgtattacccttagatatgtggataactcctgttattcctgtttttttttttttttggtataatagtgataacaatgggttccataaagggtggatgggaagatatcataaggatagagacagagttaggataagcattttactattggtgggggattgaaaacttatatttttggaaaggaatttgctgaacaaaatagacactggcattttttgctgaattgacaatgtgataagaagcactccccaatttcccctctcagttatttttgagtaagtcctaccccatcttcctggtgtctccttccactcattaaacaaatttctttgttttttgtttctagtgtatttatcaccatctcacttaccttattttttaccgtgtatgtattggccatcctttggccctctagaaataaagtaccatcagggcaggggtttgtgtctgttctgtccagaactgtatctccaaagcctagaatagcatctgcacatagtaggcattcaaaacatacttactgaataaataaatgaatgaatcactgaatgagagcaaaaaaaaagaatactcttcttcagatctaaataaaatagacatttcaaagtatatgttgaggcatccactgaagacaaattttggaatattatgaaatccagtaggaggaagattattttttgtcagaaaaactaaggtaaggagacccaataccccagactactatccaaaagattgagtaaccagggtgattgcttagatacagatgctcttgatatattagaagtaaacatgtataaagaaggaatgcttcttgtatttctacttaggcctgggaaatgtctggtacaatggaaaacaccctgaggcagaagccaccaggcatccagaatcagtggattcttgctctgcctcttagtacctgttgactttgagcagctagaggacttcccaaacttcagatttctcacttataaaactggaatatggccccctgccttacaaggtggttgtgagggtaaaataaaacgtaaggaaacccagaaaaagaagatcttcagtaaatgatggccactcctactattgccatcaccaacagtagcctgctcaagtcacttaacccctctgggctccagttcccttttctagaaaatgaaaacattggacgagaatgatttcaaatggacctgccactccaaaaatcctgtatgctcagtttcactccctcaaatatgtaactatggggctgggtgaaaaaacaagatcttttaaagagaacctagacttagctatagaggcttattaaattatctgtgttataattctacattcataaccctaaaatataattttcccttaaaaatattcggaaaaaaagtttcccatgtcttggcaaaccaaactccagagagttttccagtgtttggaaggggctgaagggccccaatattttaaagatgaatataatttggtgctgaaatcttccttttgtgtttatgactatgtcccaaaacagaatcctagaagagagaagtgtagcttagaaatatcaagagactgcctaagaacccagcagggtttcatatacattttagttgatttacactttaaaattgttactcacttacatgtttccacatttctactgtcccaaacagaatgaatttgacaatttgtgaatcatgaaaaaagaaagaaaatcaacttaataaacaagttattttccctttgggtcatatgtaccccataagataactttaaagcagcacttacattacagagacatttacttgggattagcagaaaataattttcaggttgctggtcagtctttaaaaatctttttaaagaaattatgtattcaaagagctcccgggggaaaaaaatctgttaactataatacttctgaccaacaaaaaaacctaaatggtctgcaatacttctaagttattagtgaaaaagacttccctttagtacaacacaatttttaattccttgaagtatgtcttggggtaacaaacacccccatcctttaggtcatattcaaattacacacacacacacacacacacacacacacacacacacacgcatgcatacacagtgcaccacccacttctctcatttcctcctgtaaccacaaaacggaatgttttactacaatcatgcacacccattttatttacataaaaatgatgcctttaaactggtaaagaagcaggagatcataatcagaactgaaattagtcaaaatgaagaaaaatcttttaaaaataaaaatgaactttacattctaatatatttgtgcctggatcaagagctactatattaaaataaacattcatatcatataactaaatacacgtgacctagaaacacccaacttacaaatatcctgtacatgagaacagtcgacccaagtgagccaggccaggaacagggcaggctctccccagacttgaaggctagagaaggattcctctaggattcccctccatctcgtcctgctggatagtggcgttggaagtgattagagtagaaaggggaagtgagaagccatgggccttgtaccgcctcagtactgtcttcccaccattctcaacgaggactccatttcccataaatgttacaaagagtgccttggttcccaggccggaccgtcagaagtctgctggacccacagtgcagctggaactgtgctattaatactaggctgacttcccacttggaagccaactccagtcctgacagtgctgtcagctctgttatggttaaatggatttctgggcggtcctgggagcctgccagtgagaacatcctttctgtgggaaaattcctaccgaggcccaaacagctcactgtcaaacagggttgtagaccacaagttgtgagagccttaggcattgaccaatcacttctcacctttcccttctggaaatacttgagtgatcattggagtcaactcttacacagagaaacataaggcaagtccaacactcagcatgtgatctgttccatggcaagtaatgtgtatattttactgttgtcattaataaaacgactacaaaaataaattatacctcagtaacaccatgttctaatcaactgagagacatgatcacttaatagtcctcttgaataagtggaacttacgtgtagaaaggttactgttctcatcaatagcaaagaggtagtttggtaaaagttgatgaaatacaagatcaaatagtttacccacacaacacacacacaaagacagctaacaatgcaacagagatggggagttattatagtagcagattgtaatctgctaggagatgaaagatattcactgcctgggagccttaagtacacactgttaactggtccaaataaggcaatggtcatgctgaagcaggtacctttggtatatcttcagtttatttaccagtaagaagtagggcctcccttatctacttaaagacagcacagaaaccactgaggaccaaattagggcatgaaaaagtagaggatctcccatatctgaggccttaagtcagttgatcaaagttcttaaccaaaggacaaggggacagacaagggccaacttcagtgtagtgacttgtcctccatgtagggggtcagaagagagatttcggcacatctgaataattctcaattctccagtactgagtcactaatgataagtcagctttggtgttgtatctctcttacttaatcatccccaaggataaaatattccagtacccatggggaatctgaaatgaggtaagagcaggtttcttaaatgcctgagaatgatattttagttggaatataatatatggatacacacatatgtagactatatattatgcatatacactctgttcacctggattgatgtatacatactatgtataggtatatatactacatatatatgcatatgcacatatatataatctttcttttttatacaatatatgtcaactgacctttagaaatgccttcaaattatatgattcagttcaagcatacttagtaccgtatccatctgtgggtagccaattagaaattcatgcctcactaacatgtttccagactgaaggtaaattgtaagcatgcacatctgtgttggttgtgaaaaacaacatcctttgcactattgaagaaatcttaatgccaacctaccctccagagaagcctcagatccttggaaaattttcagtttgatcaacacacagaggtaagccccagcaaaagttctttaacaggtatttggaaaaaaggcaacaaagaatttccctctctaagttaggctgactagtgtggtgctgtggagacagaaggggatattaattccacatagtgctctctcccaggcaaagcattttaaaacaaaaacagcaaaaaaagttctaatttcaagtcaccctgagaactaaacttcttcctttcaggacatttactgaacttggccagtgcttagaagtctttagtattgagctatttgctagggtgtccttatttaatcagaaacaacctgtctcaggcaacagtattgcttatagtgtgtgtgtgtgtgtgtgtgtgtgtgtgtgtgtgtgtgtgtgtgtgtatgcatggtagtatgtcaatctgagccaacttgtcccaagggccacacctatttcttgagagttaaacaaacccgatttaggataaggagtttgaaattagagatgtggcaagtagcccaaatgaatttttgtctgacccgtcacttctattttagttctctcttccctaattgttctgcctcctctctgtactttctgatcattttccttgacctcatcattggaaagggtgtactcatagagtgggtgaagccatattctagaaaagtcactgcctaggatttttaatgagctaacaatcgtttgtgactacatcaggcaaacttttcatgcaaagaaatgcttagaaagcccaaaaagacagataaattgattatctccaagctaccaaaacaggctggatttttggtgcctgctggctattaaatggttatgtagaagaatttgctctttcatacaacctggtagtgacatggtagtacagcagttaacttttaccacttgtcacttctccagtgtttccattatctgccaaagagaacctaccagttgtgaatgtctaaactagttagggtcagtgagcaacacctagcctacaagtttgttgcaatgattacatgagataaaaagtataaagcacttatgtagtacctggcacatggaaagagctctctctctctctctctctctctctctttctctctctctctctctctctctctctctctctatatatatatatatatatatatatatatgttcatcagcatcatcataatcattataaccatgatcaccaccaccactatcatcaccaccatcattgtcatcatttattgtgaaatgaggactactgattataaaattttagttaggacaggagtaccatccatgatagaataaactgaaaggtaaacacaataatacatagttctctatgtagaaggatcccctgagagttcatcagtctccacatattttccccacaaaccatatatccacttttcttccattaccatggaatctgactccaaaagatttagataaattactgatttcagcagcatgctggacaaatttttccggaaactttgtggatcagacagtaaaatgtagcaaatacagctgtacatacagatggactgaagaactatgcatatcaggtactaattaacaaagtaggcaaatctaccaccacaggtacctggtcccatcttgtttaacatcttcatcagaaacttacataaaagcatgggcagtgattatcaaatttttactagacaactaagctaggaagaatgcataatataatagaagagagaattggggttttaaaatacaattgtaatttatatataataatttaattagattaaaaggttaggatgatactttaaaaattcaagaaattagaaatttgcatttaaattgtaacaattaattagacagagagaggcaacttgagtttaattctgtgaaaaggaagaggtaggatttctaatgagccaacaattgtccgataagctcaaatgaactccaagtctgacaaaagcattacaccaggcaatggaaacttgagctgcatgaaaaaaactttggaatccaactcaagaaaagagaaaagtgaccacgcaatggattccaccccagccagagcacacatggagcactaaactctggtctggaggatacgcctttgaaagacattgaggcatccagcaagttctgaagagggtagtgaggctagagaggggaagatggtgaaagcttggtcatttgacaaacctttgaaatccatgaaagaaactgatgttgagactgaagttgcaaaggctgtgcagtaatagaaatgctgacctaaaatatttgaatggtgaagtagtagatctggcctatctttcaagagagcagatttcaaatgacagaatgagaatttcaggaagtaggcctgggcctccttcaaggagactatatctaaagaaaacattcacccaaggataagtgacttaagggtaaggggattcttaatacttaaaggttcatgcagataaccatctgattatccattctgaatgtggtaaaaaggaatcctgttttgggtgagtggccaaacatatgaccgttagggtgccacaactgtaattcagttctcctgtgtaaagtgtcaatgagtgatatgaggaagagggagggcttcgttagaggagaaggggatggctggaaatggggaaagagcagtttacggctggctttgggtagctgaagagtgtagcaggtagcatagttcccatgataaatgaattcatactaattaattaataaaggctcaaaccaaactttggaattttactcaatgctagtcctattctaatgacaactgagtcaaagatagctgcccaagtgccctatggtctaatccattccctccccatgctggaatgatgttttattctttttcacagtcctcatgacaccttaggcactaggcagcagctttattaactttctacttttgctccagggagttcaggctaaagaatgaggaatgattagtcaacagtagaaactagtttgacacaccacatgttctcactcataagtgggagttgaacaaagagaacacatggacacagggaggggaacatcacacaccggggcctgttgggggtgggggacaaggggagggagagcattaggacaaatacctaatgcacgtggggcttaaaacctagatgacaggttggtagatgcagcaaaccaccatggcacatgtgtacctatgtaacaaacctgcacattctgcacatgtatcccagaacttaaagcaaaataacaaacacacaaacaaaacaaaaacaaaaagaaacttgtttggcaagatgactatttccttgactactttcactaggatatatgacctcaacctaagttgaagtactttgacatcaaggtgatataaacatttttgctgtttttttgagaaaaatatcacagtagtatgtcaatgtgggtttttttcttaaatctcttgatcactgttaatttttaaaatttgtctttttaaaatatactttttaatgtctgatgggacattaaagaatattgttagactgtgcttcaacactatagtgatttaacatattttgatataatataaaatatatagcatacattatgttttgatatatgtaccttaatatctaacaaaactttctagaagaattacatccatttatgtattaaattatactaaagaaaattgagaatttatttcatatttaacacaaaatatccatattgcctggacccagaaatgaggaaaatgatgctacagtgttaaagcaaggttagaatattattgtagagcataattaatggagggagtgcattttcaaatatcctctttacctccttgttgctatgttggctacacacataatactacccgagcctgtacctctccttaatccattgaaaccttttcttgctgaggaatttcatcacagccatattacctgccagtaagtgatagttcaggtcaatttgaaatgccacggcttttgatcctgttgtctctgagtatttcattttagattttaattacaatggtattgtgcttatggaccgaccccaaactgcattgaattgggaagtcattttcctttatttaccttttataatataatttcaaaatgacaggctcatacacaaagcataattctttatagacactggctcatcattggacttaatcacttccaaagcaatgaggatggaagaaatccagggggtcctgattcatggagattcctggcttttttcccactcagttgatggaaaatgttttctctttttaagttagatgagggatggggttagggaaacttacatcctacactcttatgatttggctcatggctttattgttctccaaattttatgtgtttgggtcagttaatcagactcctaactctatccattgtattcaaacagatgtagtacttttttctcctttcttcccccaaagctgcattactttttggatatggggtctctctggccagctgcaaagattctgcctttgtgagagatgacatcacccccatgctaataagtcttttaaaacccagaaattatcttgggtatcctacaagtcatgaacagcagtacactagggatatagcgatttacttaataaatatctgttgtgtggatagaaaagctagaactactagtcaggtctgctttttctcgaacttgagtcttaattatatctttctttaaaattgagatataattcacatactataaaatttaccactttaaagtgtacaatccagtaagttttagtatattcagagtcatgcaaccattaccacaatcaactttggagcattttcatcaccttaaaaagaaatccatacccattaacagttactcctcacatccctctccctcaacccctagcaaccatgaatctactttctgcctctgtggatttgcctgttctggacatttcatatatatccagtcatacaatatgtagccttttgggtctggattctttacttagcataacattttcgaggtttgcatgtgttgtcgcaggaatcatcccttttgtggctaaatatattcttctgtattgatatatcacatttgtttatttgttgatgaacatttggattgttttcaattcttagctattataaataacactgctctgaacattcatgtacatgtttccatgtagacatatatgttcatttctcttaggtagataaccaagagtggagtttctgcgtcatatggtagttctacgttttaactgtatctttctttctttctttctttctttctttctttctttctttctttctttctttctttttttttttttgacagagttttactcttgttgcctaggctggaatgcgatggcgtgatctcagctcaccgctacctctgcctcctgggttcaagtgattctcctgcctcagcctcccgagtagctgggattacaggcatacgccaccacacccagctaattttttgtattttttagtagaggtggggtttctccatgttggtcaggacagtctcgaactcccaacttcaggtgatccgtccaccttggccacccaaagtgctgggattacaggcgtgagccaccgtgcccggccttaactatatcttaattgttttcctcaggtagctatgagtggtctcaattcttctgtaaattcttttatgatttagtgacttcctgcctttttataatagaaaaattggtttggtatattttattccattttatcttcataaaggtcctccacccatgtctagaaacattttaatgcaaagtcctaaagaaagttaaatcctaagcacttatctccttaaaaataaattcagcttgatttagaagaattctgtatgtaaaaaaatgggtaaattccccattcattaataactctttgttataatattatctgttatggcatctccttataaagcaaacacctcaggtactaggtattacaaataatttcttccttgtgtgaatgtcaagtcctctgagagctgatggtatgaatctgtacagaaacattttctgctcactgtaaaatctggtagtgccaaacccatcttatatgagacaaacggatcaatctgaattagtgacaccaaaaacaaacaagtttttccatgtaaacatttttatattcaggaacacacaattattcagattttcaggataagaaactttgttagataataagaggacattatgtttaataaacaaattaattctgtaagtggcacttaaaggaagattaaaggtaaccaaacagtcttgctcatatgtattatcaatacaacttctaaatcttatttagcctataataaaaggcttgctaaaaatgtgtatcagtaccaaacctcctatcaccatattccaatgtattcaaaattcctaatcatctttgcacaagcattattaagccagagcaaacacattcaaaagctagcagaaggcaagaaataactaaaatcagagcagaactgaaggaaatagagacacaaaaaacccttcaaaaaattaatgaatccaggagctggtttttcgaaaggatcaacaaaattgatagaccgctagcaagactaataaagaaaaaaagagagaagaatcaaatagacgcaataaaaaatgataaaggggatatcaccaccgatcccacagaaatacaaactaccatcagagaatactacaaacacatctacgcaaataaactggaaaatctagaagaaatcgataaattcctcaacacatacaccctcccaagactaaaccaggaagaagttgaatctctgaatagaccaataacaggctctgaaattgtggcaataatcaatagcttaccaaccaaaaagagtccaggaccagatggattcacagccgaattctaccagaggtacaaggaggaaccagtaccattccttctgaaactattccaatcaatacaaaaagagggaatcctccctaactcattttatgaggccagcatcatcctgataccaaagccgggcagagacacaaccaacaaagagaattttagaccaatatccctgatgaacattgatgcaaaaatcctcaataaaatactggcaaaccgaatctagcagcacatcaaaaagcttatccaccatgatcaagtgggcttcattcctgggatgcaaggctggttcaatatatgcaaatcaataaatgtaatccagcatataaacagaaccaaagacaaaaaccacatgattatctcaatagatgcagaaaaggcctttgacaaaattcaacaacccctcatgccaaaaactctcaataaattaggtattgatgggacgtatctcaaaataataagagctatctatgacaaacccacagccaatatcatactaaatgggcaaaaactggaagcattccctttgaaaactggcacaagacagggatgccctctctcaccactcctattcaacatagtgttggaagttctggccagggcaattaggcaggagaaggaaataaagggtattcaattaggaaaagaggaagtcaaattgtccctgtttgcagacgacacgattgtatatctagaaaaccccattgtctcagcccaaaatctccttaagctgataagcaacctcagcaaagtctcaggatacaaaatgaatgtacaaaaatcacaagcattcttatacaccaataacagagagagagccaaatcatgagtgaactcccattcacaactgcttcaaagagaataaaatacttaggaatccaacttacaagggacgtggaggacctcttcaaggagaactacaaaccactgctcaatgaaataaaagaggatacaaagaaatggaagaacattccatgctcatgggtaggaagaatcaataccgtgaaaatggccatactgcccaaggtaatttatagattcaatgccatccccatcaagctaccaatgactttcttcacagaattggaaaaaactactttaaagttcatatggaaccaaaaaagagcccgcatcgccaagtcaatcctaagccaaaagaacaaagctggaggcatcatgctacctgacttcaaactatactacaaggctacagtaaccaaaacagcatggtactggtaccaaaacagagatatagatcaatggaatagaacagagccctcagaaataacgccgcatatctacaactatctgatctttgacaaacctgagaaaaacaagcaatggggaaaggagtccctatttaataaatggtgctgggaaaactggctagccatatgtagaaagctgaaactgcatcccttccttacaccttatacaaaaattaattcaagatggattaaagacttaaatgttagacctaaaaccataaaaaccctagaagaaaacctaggcaataccattcaggacataggcatgggcaaggacttcatgtctaaaacaccaaaagcaatggcaacaaaagccaaaattgacaaatgggatctaattaaactaaagagcttctgcacagcaaaagaaactaccatcagagtgaataggcaacctacaaaataggagaaaatttttgcaacctactcatctcacaaagggctaatatccagaatctacaatgaacacaaacaaatttacaagaaaaaaacgaccaaccccatcaaaaagtgggcgaaggatatgaacagacacttctcaaaagaagacatttatgcagccaaaagacacacgacaaaatgctcatcatcactggccatcagagaaatgcaaatcaaaaccacaatgagataccatctcacaccagttacaatggcaatcattaaaaagtcaggaaacaacaggtgctggagaggatgtggagaaataggaacacttttacactgttggtgggactgcaaactagttcaacccttgtggaagtcagtgtggcgattcctcagggatctagaactagaaacaccatttgacccagccatcccattactgggtatatacccaaaggactataaatcatgctgttataaagacacatgcacacgtatgtttattgcagcactattcacaatagcaaagtcttggaaccaacccaaatgtccaacaaggatagactggattaagaaaatgtggcacatatacaccatggaatactatgcagccataaaaaatgatgagttcatgtcctttgtagggacatggatgaaattggaaatcatcattctcagtaaactatcgcaagaacaaaaaaccaaacaccgcaagttctcactcatagatgggaactgaacaacgaaaacacatggacacaggaaggggaacatcacactctggggactgttgtggggtggcggaaggggggagggttagcattaggagatatacctaatgctaaatgacgagttaatgggtgcagcacaccagcatggcacatgtatacatatgtaactaacctgcacattgtgcatatgtaccctaaaacttaaagtataataataataataataataataaacactgtaattctatattgtgatttgcttcccatttgaaaaaaagtatttcctcccttgtcttctaagaaggtactccttgagggattttatagagttcagatttgctgtctttctcctgcctccttcggcaccagtcaaatcattttgtaaaattcactgggattaacaggcattagtaatttgtttatcggtcacatagataaaatttgcctttgaattttatatgaatactgtccacaaacacagaatgttttttctatcttttcagttgactaagaaaaaaactacacacatgcgcatataaaaagcactgtttccttctgatacttcatttgaaagcccctcaaaagcagaagaaaaaaaataaaaccatatgaattaaagttaaggtagaggatttttccaacagcatcatttctgctggttactaagttccacaaatagctaatgaggccaaccacctttgaaatcaaagtgctgtgccccatctcctaatggagccacagtatgctaagggaagtgaaacttctagagtcagcacccagatggtgttgacaaagaaacccacgtgcatggtgcagtgcagactattttttaaattggcctcaaactctaaaaagcacacaaacacacatttggatcacctctgttccaccacacaaaacagtcccagtttgcgtgactccccactgcctggttcacatgctgagtaactggatgctatttcaatatttagctcaggccaacaacattagcaaagcagatttttctcaccttattgcccatggccaaatatataactttgaggtggtctgcgcggtctgcttctttccatatgagtataacattgacctgtatgcatatgattctcagcaatgtagaggtaactgctcacatttgtatcttagtaagagggaattgatgaagcaataaatgtttaacagctaggtgtcatctcccagctgtgtatgaatttctgttataatatcaatgacaaatcattgactaagcttatcttatagacagaagtccactgaacttgcttttagacaacctaagtcgaaattacttttctgaatgtaaattaattcagccactgtaaaaagcagattggcaatttctcaaagcatttaaaacagaactaccattcagcccaacaatcccattattgggtatatactcaaaggaatataaattgttctatcataaagacacatgcacatgtatgtttatcacagcactatccataatattccaaagacatggaatcaacctaaatgcacatcaacagtagactggataaagaaaatgtggtacatatattccatggaatactatgcagccataaaaaggaacaagatcacattctttgcagcaacacggatggaactagaggccattatcataagtggaggaacataggaacagaaaaccatatactgcatgttctcacttgtaagtgggagttaaacatttagtacacatggatacaaagaagggaacaacagacaccagggcctacttgagggtggagggtgggaggagagtgaggatcgaaaaactacctattgagtactatgtttactacatggttgatgaaataatctctacaccacagccccacaacatgcaatttacctatataacaaacctgcacatgtacctttgaaactaaaaatgttaaaaaaaaaaaaaaagaaattacttttccaccaataattagccatgtgaccttggaaaacttaattaactttattagcagcctcagttagttgcctacccaacagtgatttccccttccctccttcttccaaagagaggtctaatgttatttggctattcaaccttccgccacgtgaccaagggtagatgacccatcccggctccaaagatagatcctcattatgtttggtcccttgtggttacactattccatttgccaggaatgttttaagaagggaaatgcatatcagattaagtttggttgcataactacaaaaaagagcaagaaataaaaataacagtggtcttaaataagatgcaaatataattccctggggaattatattttatatactggagaaaagaagacaggtgttaggcaacagggggcaccctgttcaggagtagatagatgcatcagggatgaggctctcaactagcttacttttctgccattttgctgtgctgtctcaggtccggcactgctgctaggagccctggacaacttcagccaacaggaagcccttactgcaggggacttagtcacatgatgacagttagctatacaggaggtagtgaaaggaaggtgggggaaatgcaaggagaaggggagacaactagtagtcattgtcacagcatgtggcccaattcccgcctatgaaatatgaagcttccgggaaagtctcctgctatgaaagagaaacaaaaagagataaactgtacttctccctctgatcagtgtcacatctcaatgtgatgtctgaaactgatgcagccatcttggtaccagcctgagagcaaagccaacaatacacagagcaggacagagcctgcagagagaaggacccaacatcctgacattctgtatggtacccagatcgtaggccatgctggacttcttgtcatcttagatggaaatttcattactgtttatttccaatggagggggagtcttctgttacttgcagacaaatgtcttcaaattcattcgacctatccagtaggccttacaaatttaaagacagtcatttctccctcttggtttgtattttcacaagctaaaaattctagagacatagaagatcaatcaattcttattttaatcactattatcaaaatatatcttgattaatgccttagcaatattaagtaacgtatatgcctatagtgatgtgttattgtcatgtagaccaaaatagaaaagcagaacaaaaagataaaattcattaaatacgtcatattcacgttcattaaaaaataattgttcatttatcttttggcttattgttttataaaatgaatgcagaaaaccataaaataattcaggtattggggttccaattcctggccttaccacttgcattgtgatctaaggaaagcaatttcatctgtgagagccatagttttttatacattaaaaaatgggagaggaataccactggttttagtcagccttggctgccaaaacaaaatatcatttgcttttcacagttctggaggctggacatctgagatcatggtgccagcagagttcagttctgatgagggatctcctcctggcttgcagacagccaccttctcactgtgttctcacatggcagggaaagagcaaggtctggtctcttcctcttcttataagggcactaatcccatcatgggagccccactctcatgaattcagctaaacctaatcactccccaaaggccctacctgcaaatagcatcacactggctgtagggctaggcttcaacataggaattttggtgggacgcaaacattcagtccataaaaccatctcttcttaagaatgtgtgaaggttgaagaaatgtgtaagtggcataatggcagttatatagtactcattaactggcaactatgacatcatgggcagccagtgaggatacaaagacaaagttagtagatctgattcaatatttcattcattcgtttatacatacatacattcagattccacctagttccagaaggcattgaaagcagaaggaaagcaaatataaaaattattgcaatgttttaagttatagaataaattgtatctatcaagaaattatgggtagatagagagatagcagaaaccaagagacatcagatgtcatgaaggagcagaagccatgagggaaagagaagaaaagtcaacgaaaggtatttgagagtagactagagcgacgtgggtaagtgagggaggtggggagaaagagagaaagctagttagcatcaagtctacagcctggtaaatgtcgaatgttactagagtcatactttgcacagggatgagtttcctttgagtcttgcatggggtggtgttcagttttcacaagggctaagatgtttttccccttttaagttctttcctgtgtaactttacaatggatatctcctacctgaaataaccaagtgtgtctctgttccttgcaacatggaagaacataaaacaaagtagtagcctaagccacagaattgataaaagggtgaaagaaatgtgtctacagtgagaggagaagaggcctaagatggaagtatgtttaaggagcaggtgaggaataacatgccttcaaaggagagcaagacatattactcccagaggtaggaggagaaataatagagttatggaaaagggaagaaaagacgttgtcaggaaaaaacagctggattcagaggttccagaggtaacatgcaataaggactcactctcctgaattcgcagcaaagttgcctataaccctgaagacagaagactcaaaggaatgatggggtagaagccagatagcagagagttcaggagtagatagatgagcatgtgaactagctttgagtgtaaactattcttatgagagatttagttgcaaaaaagagatggctttcagaagaggtttgctcaaggaagggttttgacatgacaagatgactgagagtgtagaagttgaagctggggaagagttaacatgatgctatctggagtgaccctgatgaagcagaactgcatgggatttggacaggatgacagatgcctttgcctctgagatgggaggaaatggggcctgtgctgcccatacttgaatttcatttgtgatgaatctttgactacaaggacaaattgacccagtactttcatgtggaactagctataacaaaggatatttaaagttttaagtgagcttgttttaacctcacaaagtattatatataaataatatggtcatttaaaatttcccaattattgttatttgttctggatcttaagctcatatcataagaacattgatggggctaagtttctggaagtgacagatcttgtgcttgtggctggctaatgaatcacccaggaagtttgagagaccaggatgttacctccagattgtgggacttccaggcttccgccctatcaggcaggcacatctgcttctccagatgaaggaaacaaaaccagaatagaagagtcagttggcaaagcaacaaggtcaattcttgccctctccttcctggtttcctgcactgacctggaactatctacgtgaactgccttcaaccaattctgcactctgcaaaaagaattaaagcaggaaggactacactgttctcctctttcagcatccctgaaatgccgtctgactcatttactaaacccacaagttttgactgatctatactgtgcattagactctgtcctaggcactggagaaagcatggtgatcgtaaaatagttttcctatgtagcacagattgccgtgggtcttgcatgaggactaattgttaataaggattcttgttgtttatctaaacggatgcatctgtaaatcttgcttgagcatattgcattactgtttacaaaagggtaaggttgctgtttatttttcggcatggaagatgcacacattgtacttttcatttacaagatacagctcagggtgaacaaagccctaggataaatactcttttctaaaacacacaaaagatgataaactccaaagcttacatgtgttctaattttcattatggcccatttggcccagggttccatatctgtcagaagatccccgtgacatattagggagggcatggttttggctatcatctaaaatagcattcttattcctcctccaattctaacttcccaacctgccttaattatcacatttggattcatcttccatgaattaaaatattagactatatcacttcttaagatacaggatagaaatagaaccaggatgcttgcaatttatgacttccatgaagttaactctaattttatgtttcctaatattgctgttgtcaagcttaaagggtattacctagtcctgttaagttctattgtgtcttgtccatctcatatctctgtagcttataaagtacctgacaaagaaggaaagagcttgataaatatttgtggaataaaataatttaatcaataactaattgtcacccttttaaatttgtagactttaaatttcctgtctctctggtttcatgttttacagtctaaaaaatcctgatattttggtagattctcaccaagtaagacttaggtgcccatatgtcccagtttgcttagtgcagttccagttcatgcctaatgtgccagggtaattattcctagtgatcttttccctttcaaaagtatcccagtttgaatgaccctctaatcactattctcccgggtcccttgagcccctctgtaaaattctacatgtgcatttcagaagctggagaaagctttctttttacaggacattgtggtaggttttttgtttgtttgtttgtttgtttgtttttttgcctactccccttcctgatgataaagtatctctacggactttcagactactgggcaggggttgtctaggaaaagcctagggccatgcttttcaaattttagtgtgctttaatgtatcactgggggcttctgtgaaaatgtagatcctattcagcaggtctggaatggggctcctgatactgttgggctgaggacagcactttgagtaacaagggtctccaagttttcctagttagccatgacttagagcccagctattatgacataacattgcttagtgctcaacaggatactctttagaagccacagagctgaggtcaaaccttgccctcatcactcatacctttgtgaccttacacaatgtattgatccctctaaaactcagttttcttatatatgagatacaaagaataacaattatctcagaggaatgatgtgaagattaaatgaaataataaatataaaacagtactatcttccctcattgtaaatgttcaaaactggtggtagctgaaattgtcatcatcacagttatcaagtgtagtttgaattcctcccccgttttctctgcccagttcttccctgccatttcccccgttttactcaaagcttaacatcagaagttacttgtttagataaatatcaaagggtaatgagcagagatatattttggatagtgccttaaaaatggacactgggatatgctaaactatcaagttgtcagtacatgcaggaattacaatcaaggtttggacagatctacaggaagggccaaaagttggcaattaatgccaattcatagatgcttaattatcacttgactggattaaattccctgggctgaggctgcctcctttagttagcatgcgtcaatagcagcagtcagaagcaattcaattgtatatactcttctaaaacccagaattaccagaagaaagagaatgaatattagaaaaatagaaaagtttaatagaccaactcatcaacctagaccttgttttaaactttgccttctctttttcctaattgggtatcaggtagcagaattccaagtattccagtttcacttactttattttagcctttcaaaagtcacataatctaaaccttcgttttaactcatggaaagtgataggactgaaacagcattttgtaaataacaacttactatttaaacctatagcgtcaacatcattgttgcagtcatcaaaattgttattctcttcctcatcttcaaggtcccttctggctataaacatttctctttcctctgatgtcagtcctaatgtaggacccatgttctttctctctgggtagagtcaccagtgaaagaataaaagtgatatcagaaacttggataattttcttactagaaaatctctacttagtcattgtaaaactggatgttgagtttgaagtgacaatgtgctataggtttacctcctacaattcaaagctcactatagactataattttccattgattaattcattgacttattcattgtacacttgcttagaccatagtacctatggcatgaagaacataataaaatgtctctccctagtgagaactcacagaactaccagggcatgcttcctgaggcccatcacactctacaggtcaatcatgattccatcttgagttaactattcttgacacttacatggcaggtcattttcaaagtatgcttacaaacaacaacaacaacaacaacaacaacaacatgttcttaacaaagattggcccaactatcacaatgactggagggcctacttatagaaatagtaggaataactaatttatattttccaccagggttgcactgagcactgataggtctcacttgatggataattctcaaaatcccttaagaagatttccatgcagaaagaagagaaatcaccagcatattttcattatctgactggagggatggctatttcctagagaacagcaaccaggatatgtgcaacattaaaattaacatggtcccttaagtgtttccctcaccagattggttctacaagcacacagctatttatcctctaagcaagggtcagcaaactataatccatggaccaaatccagcccatcacctgttattgtaaataaagttttattggaaccagccatgcacattcatttgtgtattgtctatgactgtttttgtactcaaatggcagagttgtgactgagatcttatggtcagaaaagcctaaaatatttactatctggtcttaactaaaagaccatgctactttaccaaaaacaacaacaacaaaaccattaagcttgcattgacatttcagtgatttagtttgaagaattcatagatatctttaataattttaaattactataatccttaatagaggtaattaaaagctacaatggagagatttggaataaaaatttctatgcaaatatccctttggtatatggttaatcactaacaaattaatcaaatattatttatgagaaagataatgcctagttttatatattggaaacttaatgaaaaagataacaagtaaacatattcaacagctctgatttctgccagtatatcataaaataaatactagtacttgagctcatgctcatatcctaatatctacataataattaggaatagatgagttgatccacgactctgctgtaagtactacaggaaatgtctctgtaaaagtatattatcattttaatctagatttaatgtatctcataagcttttaacaatgtatatgtgtaatcatttgagaatctagaacccaaatgaaaaaatatatatttaaatggagaagagggttatttctgtgtcctgctttagttaattttaagacataaatatctaaagttgataaaacaaaaggggaaacaagcccatctgcagaaataattttgcagtttatatccaagctacttttgaaatatagaacctgctttctcctttcaaagaccctcaagtatttgctgtagctttattattaaaatatctagatgtgtcattataatcagatggaaaattcagcaaaattgtgttttcttagtaaataaagtatatactgactatatgtttatatattaactttttcccacatgaaaccagtatttaaagctaaacatttttctcactacagatacttcttgactaatgagtcagtgattaaatatataccaagtgaatattaataaagaatggattttttaaaaatcatgttcactttgggatattgatctcatattcctcatgctatgtgaattgtacagaatggttaagaaattattgttgactggcacggtggctcacgcctgtaatcccagcactttgggaggccgaggagggtggattacgaggtcaggagatggagaccatcctggctaacacggtgaaaccctgcctctactaaaaatatagaaaattagccaggcatggtggcacgcgcctgtagtcccagctactcgggaagctgaggcaggagaatggcctgaacctaggaggcggagcttgcagtgagccaagatcgcgccactgtactgcagcctgggtgacagagcgagactccatctcaaaaaaaaaaaaaaaaaaaaaaaaagaaaagaaaagaaacgaaattattgttaacttaattgggacaatgatttacaattctactgatgctgaaaggttaaggaaagactttggaaattcaaaagccaaccacaattaatattgctttattcttttctttcttatcaggtacaaaaaatttggaatgtttatagaatgcttgccatatgtaaatattgaaataaaaattattcatacaaatccctaaccatgaaactaaagattctaataattctaaatttttaaatatgaatattttctatttttttcacacacacacacaaacacacacacacacacacacacacacatatatatatatacttttaaaattaggatgctaaatctctgcccatctgtgtcagccttttaaagagcttgtgattcccaatcttcaatgccaggatacacagatgttagtaggtgagacaacagaccgacaaattcctgcttggtaagtaaaataaaaagtaaaatgtaaaacaggagatcttgttttctctactttggggaaaataaatcaaaacaaaacaaaatcatcaccagccctctcaagttcataaaaaagacattgtttaaaaaaaaaagagagagagaaaaaagcaaatgatagtaatatttatcctgaagcaaggtggctaaaatttgacccaagtacttcctaactactgaaaattaaatcattgcttttgtggatttgaaaaacagaaggtctgcatttcaagcatataaataacatgaaataattgtgtcttcactttgaaagggctatttaccaaaagaatgtgacattctgaggggcacactttggggatgaaatttaagcaaaggtcacatctcaaattcaaccagcctttttcacctgggctgcaatggaatggaatgattgaacaagtgtgaactcctaggcagggtgggcataggtggagttagtgggtaaatttgatttgtttgctaaggttagtgaaataaatttatctcctttggagtgggattccaggtgctaaaaaataaaacatggtgtttgtagccacatttctttccttcattttcaaaatttatccaaatgagattaagttgattggtactctacagagatagcagccacctaccattctgattaatatttcagtgaggaggcaatgtcttattattgagaccaagcaattatcagccttttgactatataacataaaataaaataatcaagaccaatatcccatggaaattatctgaagatacaaacacaagcctgaggagacatccctatagctaagcctgttgaggtaaaggactggagtttgaaggggctcttcctccttcacagaagcactatggcctagctaccctctccgtggtagtaatatggagtgggcccaagagagagcagctttaaaattcaaaacaagatcctggaggactgtggttgacttggccaggtacttaggagccacagttttgctcgtaaagaggctttgagtagtcactccctctcaggtgggctctagggtggagattccatctttgtggtccttgggacatctcaaacaacagagatgtggaagctataaagaaaacctctgaggaagactattcactgggacagggcagatattacatatttccagcatcacaaaattttctattggacaatgctgtatatctaggtgctataacatttaaagtgttagctttttaaaatttatctgcaaccatttcttctcttaattcctcagaagtaggcaatctaataccacctctggagctactatttcaatgaataatcatatgtttgcttagccatattggaaaatcaaataaatctgaaagagtatgttgtccctggaatgtgctaatttctagttactcactgctatgcgtaagaagttaaactaaaacctgttcttcacattaacagacaaaaagggctttctttgtctgactatctaaattgacttcccacacaggaacctaagtgatagcaagccgttaacaatggttgactcatcctttaaatatcaggtctcctttatgtcatatttctgattgtcaccttttgagaaagcttccctaccatcctactgactcccctccatcattctatccccttatcttctgtattaccacctggcatattatatacttattggcttgtcagtctccctattctacagcataatctctttaaaagaaagtattgtattttattcactgatgtattcctaatgcctagaacagtatctctgtttttgttcactttatatatgcttagtaaatacttatagaatgaatttatgaatgaaacctccagaaagcagatacaaaattttcttcatatacattcctctggagagcaaatgtataacttagatcttattctgaacagatttgttctggggcttaaaaagactaagaacctgagttttacacacattatgccatttcattatcagcaacatcattctctgcaatgtccatacatgaaagttctgcaactgatcaaatgcttactttattagaatcatacaaaataaatataagttgaaaaagcaatgacatgaaacatttatatttgaagggcttgttgttgttgttgctgtaattgtaagaaaatttacaccaaaaagaacttcatctatcctaggtaatttagatcactccaaattctattctgatctttcttattaaacatacctctatatttacgcatgtgtaatcagtaatcatgtaactgttgtctttgagatttccttaagagattttagcaggagctccaaaaggttcaagtttggctgcagaacatggggcatttttatgtagatgtggattgtgattctcagtaccaatggcttctccctgctatgtctgctttcccgcctcccatttgtcaagatataaactgcacagtcagggctgaaggagctacaaaagttaaacaatgtgtgtaaatgaagataagaattctgcatgagagcaagggttagaagaggaagctaagaaggacagaaaaagagattgactcaatgttgtgtaaaaatagagaccaagagggctcaaaggaaggtgataagaaaattaaattagaaaaagccaggaagataaaggaagttcaaaatatccataaatagccaaatgaataagaaatacaaagaaaatactaagaagcagtaaaggatagtaacaataagggaaaaaagaaatgtgtagcaagggaaagaaatagtaaaaaaggataaacagtgatacagcatgaaaagagaaaatgaaaaaagactgtaaatacagaagagagaaaataacaagatgatcatgtgcacatacaaacacagtgagatgcgataaggagagaaataacagaaactcatctattggcagaaagatggcctcccaaagatgtccacacacccatccctggaacctgtgaatattttgactgacatggtaataggaacactgcagatatgattaagtgtatagaccttgagaaggagaaattatcctggattatccaggtaaaaccaatctaatcccatgaacctttaaaagtgagactcttccagttggagtctgtcaaagggaaatggaagaaaagcacaaaggcacagggagatgcaacactgttgactttcaagatggaagaagggcacaaaagccaatgaatgagggcagcttctattaataggagctcaaaaggcagggatctgcccctggagcctcccaaaggaaccctgctgacaccttgattttagcctagtgagatctgtgtcagaattctagtctacagaactagaatataatacttttgtagtattttaagacactaagtttgtggtcatttattattgcatcaatagaagactaatgcttatgagatcacaaattattacagcaaaatgcttattttgtgcagcacaattgttaaaatcatgcttggttgtcattttacagcatacaaagccctttcccatatattgtcaggtctgatcattctaagacctgtggaatataagcaaagaccatcaattctacccctcctgatgagacaaggggggcccagagaggtaccatgtccaaggtcttggtactaaatgttacaattaaggacagaatgagctctccaagacctcagtttgcttccatagtaaaaccatgattgccagcaagacattcacatctaataaactcaagagcacaattaaagtaatttgcctggttcaatactctggtgctttgatggcctgcagagcaaaattcttccagtgtgagtcccatacctcatgcttcaacttgcacactccaaatgatcaatccctctgttaaatggaatgggattcattgtttccttgttgttctgctttcccagaaaggtaagctctttttccaaccagtgcccagcatagtgcttggcacaaaatggatcccaaagttttgtgttaatttaattgaatcaagaacacagaaacgtgatgctaaatgaaagaagccagtcacaaaggaccacatcttgtatgatttcattcctatgaaatgcctagaataggcaaatctatagaggcagaaagcagattagtgtttgcaagggctggtgggtgatggggaaaatagggtgtgactgctaatgggtatggagtttcctttggagtgatgaaaatattttaaaatttattgtggtaatggatgcacaactagaggaatgtactaaaagccgttgagttgtacactttaaatcagttaattgtatggtatgtgaatcagagctcaataatgctattaaattttttaaaaagattatatcaatttcctcatttgccccatattgtgcttaaaatccagaagacttatttcaatgtcacctttgattagtcccctcgtgagcgggattttagtagtagaatttgctaccattcattcgttgccaacattcaaatgaggctgagggtttacgacagtgagagagataggtccaggacagaaaaagtaagaaggatggcaactggaagggacagttgagaagtggagccaaggaactgatctgtgggcccaaacacaggacatagatctcagatctaggaaaagagggtttctggccaagatgaaagggactgttttcatgatggatacaagcagcacgtcattgttactcactgacagtctgggccaggatggggaagaagggctcttccctgcatctacatggagtaccactggcatggacacagtggtggctctaggctgtgtggcacatgtgggcaccccaatggttcgctgcgtatagtgtcatctgagaaagaagaggaggatgctacctgtacttgacaggatgagtttgggtattcaaatgaaaacagccccctccagggactatggaacataactggtggggattttcattgtttctttgtttaacagctttattgatatatatttcacatatcataaaattcaacaatttcaagcatgcaattcaatgacatttagaaaatttaccaagtggtgctaccatcaccataaaccagttttagaacactttcttcatcccaataagatccttcatggacatggttacttttaataagaactctctcattaaatatcaagtgtgatcaggagagaaacatgggtttcatcaatagataactggaatattttttctttctcaaaaattcttccataactatcctttccattcccgaagaccatcctctgcttcagagcttcatgactccagttccataatactacaaaagtctcacaggtaatatgtctagggacagccaaaccattccttctaactcatggttgtatttaccttcctaaaatccctgttccatcattccattatctcttcctattgcatcacttacaaacacttaagacttgggtaccattattgtttggccactaatcactttgtcttagttgaagacctggcaccagattatttctatggcactttcacacaatactatgattcttttggctggcttttaaactcctctataatttgagtcagcactctctatccagttttatttttgattatttctcaataagcgtgttctacttcactcaagccaactttctcgtgatccaacatgttgatagacccttctcttcacggttttatcaatactattatctttacttggaaaattcttttcttctctactcatgtgtatcagtcagctattgctgtgtaataacctactcggaagctggagagtggttgatcctgaatggactagctcatgcatctgcagggggctgtgctctaggctgggcttgggtggagttgcttagctatgcagctctacgccacatgtctctcattcctctccagcaatccggctcagacatgtccttctcatggccatggcagaagcacaagtggacaagtgtgaacaagaaaggtctcttgaggtctaggattacaacaggtatgctatcacttctccatgtccctattggccaaagccagtcaaaaggctgactccagagtcagagttagagggcactgtcatgttacctaaagagcatgtatacagggatgagtggaacactgggtccatcaatacatgctaccacactatccaaatccttcagatggatttcttggtcactgttgtatttggcataggaaaagaaagtattccagaaactactggaacctttcaaagatgacaatgagggatctacaaacaaattaggttttgaagagctggaatactatgaactcacataaaaataagtatcatcaggtttaacaaacaaaatcctttaataacaaatagcaatatttatatcttcagtccctgaaaaagtatgatagaaatggctccacttattcatgtgtctgttgtttagggcttgaactgtccagaacataatctttaatctggaagtaaccccaaagctttctcatgaaatttcttcttgagataggggagctctgagatcatcctctggccagagttgattaaggtacttaatgaacttgattgcctggtttcctgtgtcagccttaaattctactcttagttatagccaagcagtaggaatctatgaggtgggatggaggacagtgacgtacaaactacctaaacacagatgttttatctgacatttttatcctttacaatacatccttgcctataatgtatgccccacaaaaatcacataaaataccaagtgatgagcaattattgaagagagacccatataaaaataattatttcactggctctcagaagacaatttgtgattagaaaaatgcacaaatagagaagattacttatttgggccagtaaatacgaaactcaatgtaatttctaatttagaattctgtggctctccaaaatgggttttacctaattcaatttaaggtttaattttagataatcaaaccccaaaccaagcctgtgtatatgttgacatcttttgaacctagactaagtctccgagacttcccttcttaagtagagaaaataagagaaaaagaaccttcctagattttcagctgggtgtggttcctggatttgtaattgcactgatttccccatgagtcacatttgttcctagtgtacgccagactttccccttttagatgcttgaggagatacttctatgcgacaacggaacactgaaagtggtgaggaaaccatacgattgtgtctagctcaatagacacagaatgatctgttgttttagagcagagcttctctcccttgagtgtgcaagaagaacttgggggcttgtagaaacacacgttcctgagctccaaccatggagtttctggttcactgggtctgggacagggctcgtgattctgcatttctaacaagctcccacgtgttgcagatgctgctgttccgtggaatacattttgagtagcactggttaggagtacagtttctcagctttggcactactgacatctggaccaagtaattctctgttgtgggggctgcactgtgcattacaggatgttgaggagcatccttggcctctaccgactagtagcacctctccaggtatgacaaccaaaaatgtttccagacattgccaagtgtcctctgggagtcaaatcacccccattgagaactactggcttaaaggatgggttctgaataaaagagacatgagctgaaatctgccctaaccatttgactacgcatgtggttcaggggagcagtgtccacatggctaaagcttcggtatgagtatgcctccctcacagagttgttgtagggacaggttaagtgaggatgtatttaatcaagtggcatggggcctggccccaaagcagcagtccatagcggttcctgagtattgtatcaaaaaatctttctatgaggcaatatcatccaaactctgtttggaaggtaagcagagttacctacctagaagggtaagtttccgtctacttagttcaagtgtgtgcgttatatttagaattctagagtcttttctcagttcagaggcaataacaataaaataaacccaatatctatctctatgatcatgaagcttaaaatctagttccatggctaatacaccgagcatatttttatgatcctgaaataatctttatttgaaacatagatgtgtttttcaagtggtttctgaagcaaaatgctttgtcagtttgtcaaatccctttcatcccaacgaccatagaagatataaaccagttgttgtccaaagaacaaaagtaaccaagggggctgagataaaaatctcaggcaacactggtgaaaagggtaaagctgtatttacatatctcgtaccctatcaatacactcccataaggagcactagtgttagtttttccttttgccaccagggggagaaccaaactttctcacagagtcacacatatttgtcagacgtgcgttacagaggctggcagaccagggttgaacaaagcttttagttacttcctaccagaataaaaatatctgctggcatgaattcacgagagaaggcagtacgaaccacttttgtatacaaggtcttttaagcttttttattccaaacactgcagcaacaactatttttgatcctgggagtcaagagacgacaaagttaactatctctgggtcttcttactttctttacatttaagatgaggcattaggaataagacaagtaacattaatgttacataagacataaatgtacatttggctccctttagcttcctcaagcctagtattaaaggatgatgacaatggtgatgatgacagtggtggtgattgtaatgttgttggttgtggtagtgatggcagtaatgatgacaaagatgataatggtgatggaaattttagctaaacataatgaacacctaccaccataggatagatcctgggctaagcaacttatattagtagctaattaaactctaggaggaaaacatggagctttcttcatttacttattaaaattttaaagttagaggaagtttgggcatcctgatcactcccagaaacctttgaaccccccaccacaggaaaagataaataagtaaatagatagatataaaggttattggtaattgttatattaataataattaaataaagagtgtttttatgctcagatacaattccacagagctgtatttgtgaaggctggctcttcatgtgataaactattggcctattttcattgttgtcccaataaaataaggcaagaatacacatagtatatggatcctgccatgtactcagaattttttcttattacaatccactctttataattttgtctatcgttgcaacttttttacaatgagtgcatgttacatataaaataataatgcagcttcgtcatcttagaataaacaaaaggtgtagatcccccaaaattacccagaataaatatcacctgcatgtctgagtctgaaacatgggcacttgtgttgattaaactgtctcctaaatcactacagattcactgagtttttgcccaaacaaatcaaagtaccaaggaaaccaaaaaacaacaacaaaattacaaatgaaaattcatctgtaatgaaagtcagaaacaacgaggtcaaagcagcttatacggacatcaaatttcacttggctttgtctgttagaaatttacctcaatggagaagtggatgtggcatctctagtcacatttttagtgatgataattattatttggtggatgaatacacaaactccacattatttattagatacgttacttcctcttggctaaaatcactttggggcttaagccaaagccttccctacataaatgacatcaatcagattggcatttaccagaacattccaaaatcaataaggcgtgtatttttaagagccttttttgctatctttagatcggcaaatgaaggagttctgaagaaccaggagtgggagttccacaaataaacagcatgcttcatggttcattgtggagaaaaatctggaaactctcaaggggattttattgctgatctgaagtgacttgacgaaactcaggatcccaaatgagggaaatcctttgatagtaagagtttgcctaatatcttctcagagtgaattctaaaattaagagttaggtctaagattaagtcagaaaacactgcaaaagggactgccttcttaagatatgcccccttctctctcccatcactttccctacaaaacaacccaggatgagggcaaaactcactaaaataacatttatgtgggttttatttttgagccttggcctgtggtctctgccattggtggctgtactgttctgactcaatttctgccccatatcctaaatctatagtctcaggtacaaattatcagcccatatgaggactgagagggtgacctgctcgtacatttctacctctttttaaaaggcaacaaaatacctacttcctctcatttcagaggaaaatccactttccacttcatgtataaaactcagttggctataacttatgaagaaataagctaaggagtgatgactcttcagaaaatatgagtactggagaacgaagaaattatcaaactataaaaggaaatagagtttgtgcctggaaaagacaacagggtgcttccccttgcctctcagaataaactagaaaataaatgaagtctatacacacagttttcctgattctcagttgaaatttgaaaggaaagtaaataaaagagtgacagaattttaatgcttgaaaaaaacacaaagaacaccatattgatttatagaaaaaaagaataaggataaaaaagtatctacaggatggacaatggggatgcacaaaaaccatgtgagagaattaagaatttcaatttcagataagatcatggatccaagatctacctactatgaatgctcttgtaaaacaacacgatgtgcccccgggtagccaagattttggtctctaaaactttcaactaaaaagtgaaagacacagggatccttgaaaagtagttgattccatgtcttgtggcaggaaaaaccaggatgagtctggaacactttgttgttaccaagaagcttgaatactttcaagggtggtgctaactggacaaatggaccagcttaatgcagttgtcactaatgaaagcatgacagtttaatcaacaacaaaaaactctgtgaaaagtcatgagaacacatatactcaaaaacaacaaataacataatctgctcaagaaagatgtgcatgacttcccccaggaatatttactggaaatacttcacattgatgaacccaaacacatgcttgtcaaattcaagttttgctaagttccaggaggtcaaagtagacaatacaatgttgcatagggtgtttcaaattgggtagagaatgcagaatgatggttctcaaccttggctacacaggaaaatcacttgagaaaatttaaaaaatatcaatgactgggcactatccccagacaaattaaatcagaatctctggaggtggggcttggggcctggtatgtttgaaaagttccccagaccattctagtgggggtggagaaccactggcctagaatctaggataaccagtcatcctggacactttcctggttttagcgctgaaaagttcccatgtcccagcaaaccctccagtcctggaaaaacaaggatgattggtcaccctctccaatcaggcaataaaaagttgtcacagaaattttcaataaaaattacataagaaaacactgtaagaaaattaagtataaatgaccatgattcaccagactacaagaaaaggttgaagcttagaaattcttactactgtataaatgactatagcacaataaaggcccagtgggattgaggaatcagaatggcaaaccctagttcttggtgtcttggtccaaaatctctgactgaaaacccccaatttataaatttgaagtcacattctcaaccaataactgtatctatcatttctgttttccttatttgggtcagtaaccttgcaactctgagaagtatactaatactaatataattctaagaccaaggctaattctatgctaatagtgctggtgctggtactaataatgatgatagctctagcattaacactattatgaatactaatgataatgctgctaccagtattaatactaatcaggtactagtagtaatattgataaaatacatggggcaaatgaagaaattaatcaaactttggtattaatacaattgagttgagtgtaaaaataacttctggaatcaacatgttaggatatgcaagttttatttgttctttgaggtgtttgaattgttttggagaatctgacatatcgaacttatgattttaactaaaatacttgggacttaatgatttaagtttgcaatctctgtttaagtgtttgaggaaatctgatgagttaaatctagaagtttaaattttgtaaggaatatttagatgctcagtaaaaaattaagtgctagatttgaaagtctcactagctggtatttaagggatcaaaagaaaggtgttgtgttttgttttgtttttaaacattaatgcaaaaatgataaaaaaatgagatatataaattgggcttaaaggcttaaaaaaggtgtttttaaaagactagcttgatatactagtattacacaaagtgagagtcaacgttaatattcttgtacaagtgaacccacaagcaaaagctaaggctttaaaaaaatacaagtggtgtgatgtttctggaacagctgtggaagtgtgatctcagagaacacaagaagacagcaaagacaattcctgagaaattagaagggaaaggacagagcaggcacagcaaatctagcctcaagtctcagtgaaaaggcccaaaggggccaaacactttgctgagttgtgggaagctcccctgccaaatctctggaacgaacctgagatgcctttttgcaatgactcagatactagaattgaaagaatgtgacgtaagttttagcaatggggcaatttatgatttattttagaagaactaactgaggaaacaagatgaaagttgctggtagggcttagcagaaatgctctcaagcaagccaaggataaagatctttgcaatattacttagaagtccaaaggttgctagagaccacggagttcagggagaggccagcagctacagggctggaaggcaggtgagcctgtcttgtgggaaggggagaggtgaatctagacgtgacgagatgcctgaggcctaggatggtttgcctggcccagatccaccggccataataggaacctgggagcccaacagacatgaggtgtcacatttaaacgcttaggtggggcaaacagggccataagaacatacatttttaaataagacacaaaccaaatacacgggtctgaagttataaagcacagaaaacttactttcccagcatcttgaaacacacctaattcacaaaacgtgagcatgtcatctaaggatggaaacatgaataaaaaagagcacaaagaaaagaaagaaaattaaactataaatagcagtaaggaaaaagaaatagaggcaagtgatggtggtaaacatagacaggaactgcgtataatgatttgctggcaaaggaagaaatacccgcttaaaaaccatatatattttttaaggtggactgaggttaacagttgaaataaaggcagcagttgaaaggaaggcagcagctgaaagaaggtcatggattaagtagactgatccagcagtttccacgccaagtccaagtctgaacaaaggaaaaacacttggaaaaaatcatttggttaaaaataataacaagggataggcagaagagtttgaccaggatgttgcagacaggaagaaagcaggctacagggaaatgtgggaaagtgatcaatgaaggagaaaggcagcaaagccctatctacctacatcagtgggtgtcaaccctgactgcactctagaattacctggggagctctacaaaatacctatgcaccaccctcgaccactgagctggaatctctggggcttggggattgggtatgaagtttctaaagctcccaggtgatctcaatttgcagctagggctgagacccactgctttgcatgcagagagagtaaatgtgaggtcccatatctctaaattatcaggcccaaacagccacttgcacctgaagcactccaataattgtagccaaagtcatttccttatttgaacttcgcaggtaaatgactagatttttcacttgacttaaggagctttaaaattcagaaggaagaaaggaagaaatttttttattatcctttaagttttagagtacatgtgcgcaacgtgcaagtttgttacatatgtatacatgtgccatgttggtgtgctgcccccattaactagtcatttaacattaggtatatctcctaatgctatccctccccgcttcccccaccccacaacaggccccggtgtgtgatgttccccttcctgtgtccatgtgttcttattgttcaattcccacctatgagtgagaacatgcggtgtttggttttttgtccttgcgatagtttgctcagaatgatggtttccagcttcatccatgtccctacaaaggacatgaactcattgttttttatggctgcatagtatttcatggtgtatatgtgccacattttcttaatccagtctatcattgttggacatttgggttggttccaagtctttgctattgtgaatagtgctgcaataaacatacgtgtgcatgtgtctttataacagcatgatttataatcctttgggtatatacccagtaatgcaatggctgggtcaaatggtatttcaagttctagatccctgaggaatcaacacactgacttccacaatggttgaactagtttacagtcccaccaacagtgtaaaagtgttcctatttctccacagcctctccagcacctgttgtttcctgactttttaatgatcaccgttctaactggtgtgagatggtatctcattgtggttttgatttgcatttctctgatggccagtgatgatgagcattttttcatgtgtcttttggctgcataaatgtcttcttttgagaagtgtctgttcatatccttcacccacttgttgatggggttgtttgtttttttcttgtaaatttgtttgtgttcattgtagattctggatattagccctttgtcagatgagtagattgcaaaaattttctcccgttttgtaggttgcctgttcactctgatggtattttctcttgctgtgcagaagctctttagtttaattagatcccatttgtcaattttggcttttgttgccattgcttttggtgttttagacatgaagtccttgcccatgcctatgtcctgaatggtaatgcctaggttttcttctagggtttttatggttttaggtctaacgtttaagtctttaacccatcttgaattgatttttgtataaggtgtaaggaaaggatccagtttcagctttctacatataaaattttctcaactaaactcagaaaaggaagtggggaaatatgtttgggtggcttgtaaactatcaattattttacatatttgaaaccatctttaaatagaaatccagtgtaccattggtcttcacactgaaaacaattcactcagccacaaaataaaagctagcaacacggagataagaatgtcttatttaggtcacaaaatgcctacagattctttttctgttttcatctctactgatcagtgattctcaactgggggcagttttgcacccttaggggacatttggcaatatttcagacattttttattgtcatgattggcagcttgttattggaatctaccggggatcgaccagggacactgctaaacactctacaacgcatgacaaatcccttaaagtaaagaattatccagtccaaaatatcaatgtgctgaggcagaaagatcctgctctagatagtaaggttaacatttctgcaaataataactaatactctctataataactctctattgatactctctactaataactgcctttcaaccgaaacacaaataagtttaaacatgcaccaattatatgctgaattaaagaaaaacaaaaaagcctcttacagaaaatcaaagcactaataaaattatcctgtgggtttaccacaatgagagatcaaggactggagaattaaaacattggccaaccaagtgaagttgctaaagcaaaaaccagatatcaaattattttgattgttggaattgagtttacactcagacaaattgagagtcctctaaatgaagacttctgagcatgcgttatcatcaatatttagtaaattatgcttaaaatatctgtgtttgctaaattttacatgtcctaaataatacatttgtaggggaaaaaaaggcttttcaagctatacaattatataaatttcttccaaatcacttggtaaatttgctcacttcatggaaaacaaaacagaggtgggataggaagatatttttcagaattgcaatgcaaatacagtgagaaataatatcacccccaaacatgagaaagtcggtgtggttagagctgaaggaagacaaggaaaacttatcatgcatcccagtctctgatctgtgataacagtaatgttaaccactagtctagttctaatgggaactagaagtctattctagagaaagatttacaaattattaagagtattcattaaaagccacaaaacatgcctatgtcctgaatggtattgcctagcttttcttctagggtttttatggttttaggtctaacatttaagtctttaatccatcttgaattaatttttgtataaggtataaggaaggaaaccagtttcagctttctacatatggctagccaattttcccagcaccatttattaaatagggaatactttccccatttcttgtttttgtcaggtttgtcaaagatcagatggttgtagatgtgtggtattatttctgagggctctgttctgttccattggtctatatctctgttttggtaccagtaccatgctgttttggttactgtagccttgtagtatagtttgaagtcaggtagcatgatgcctccaggtaggcaataccattcaggacataggcatgggcaaggacttcatgtctaaaacaccaaaagcaatggcaacaaaagccaaaattgacaaatgggatctaattaaactaaagagcttctgcacagcaaaagaaactaccatcagagtgaacaggcaacctacaaaatgggagaaaatttttgcaatctactcatctgacaaagggctaatatccagaatctacaatgaactcaaacaaatttacaagaaaaaaacaaacaaccccatcaaaaagtgggcaaaggatatgaacaggcacttctcaaaagaagacatttatgcagccaatacacacatgacaaaatgctcatcatcactggccatcagagaaatgcaaatcaaaaccacagtgagataccatctcacaccagttacaatggcgatcattcaaatgtcaggaaacaacaggtgctggagaggctgtggagaaataggaacacttttacactgttggtgggactgtaaactagttcaaccattgtggaagacagtgtggtgattcctcagggatctagaactagaaataccatttgacccagacatcgcattactgggtatatacccaaaggattctaaatcatgctgctatgaagacacatgcacacgtatgtttattgtggcactattcacaatagcaaagacttggaaccaacccaaatgtccaacaatgatagactggattaagaaaatgtggcacatatacaccatgaaatactatgcagccatgaaaaacgatgagttcatgtcctttgtagggacatggatgaagccggaaaccatcattgtgagcaaactattgcaaggacaaaaaaccaaacaccacatgttctcactcataggtgggaattgaacaatgagaacacatggacacaggaaggggaacatcacacaccggggcctgttgtggggtgggcagaggagggagggatagcattaggatatatacctaatgtaaataactagttaatggggtcagcacagaaacatggcacatgtatacatatgtaacaaacctgcacgttgtgcacatgtaccctagaacttaaagtatgattaaaaaaagaaaagaaaagaaaaaaaaaagccagaaaactttaaaacataactggtactctcaaacaagcaatttaaataattgatgaatcccatttccacgtgcttgatagtcatcagtgattgagggcctgtgagtgagaacaatcaagtcagtggtcttcaagttttgctgtacgttctcatcagttggagattacaagctttctttttcttttttaaaatgatgccaaggcaggcttcttcccagaccaaataaatcagaagctctaggagtgaagcttgatctttggcacagtattgtacagcacatctcaaactttaactttcatgtagattgcctagggatcttcgtaaaatgcagattctaattgagtgggtctggggtgtgcctgagattctgcattttgcaatgtcaacagtggtgttctaaggaacacacttggaatagtgaggtgtcaaaagcttcctgtttgattctaatgtgcagccagcattgagaactgtctatgactaagctcctagttgtaagctgggtgctatgtgggcacagaagtaaaatagaaaaagaagcattcctcaaataaggaattgttccatcctaaatcactgtcatgcaattcacatatctttggcttatcttttgcaagaaaaaagggtcaaattttctaatgggaagaaattccattgtagaccaaaggaagctcagttactcctctggaaggacagcccatttgatgttatcttatattaatacaggtaacttgccccagccttagcttttgcgtttccttttctggaaggctctttcagcagagttctgcatggctgtttcctgttcatcattccagcctcctcctatgtaccattcccaaccccaccccatcactctcatttccttatcctgggtttttcaccagctgtttatcacgagttaattaatcaataacaataaatggccagtgagctcaaagaaacccacaaccattcccatgccctgctgaaacatgaatgaagcctgaatattggttagtactattggtcttgggagagagaaatcctaaaaggaagaaaaataatgaccttattaaaaaatcacactggctagcattttggaggaggctttacatttatagcttaatctcaaattgattgtctcatttgatgcctatgaaaaactcatagggtggggattttccccattctcaaggtaggaaaactgagtttttgagatgccaaagagcacaaaatcacagaaggaagaatcaaaggcaggcatctgaattcaaagtctaagttctttcaacttctcctagctgacttctttattttttcaacacactcttaagaatcaacaaccaagtcctaagactgtacatacatttgaacttgatattaagtaaatttaacccaccagtatctaaaatgggaaataagagatacaaggcaagtcacgttggtgtgtttgtcccaaccctacaccctactttctccatgtgatttttaatgggggccctttctatttactgaattacaagaaggatatcctgaaaaagacactatcaaattcaggaaatagtcagttagtttgtattactgagtatttataaagcagtattattttcttatttaaagaaaatggaagttttaattattatttattccaaagattataaaaggtgaataataagtgatttaagagagtatatgataatgattacaaatctattcaagagcaatttaagttttttagtctttaatttttcctatttaaaaaagtaatacttttttaaagaaaacaaacaaaagcaaaaaccaaaaacagcagaaatatactgtgaaaagaagaaatctcctatagttcctccccctgaagaaagccattgtaagtaataatgataataataatataactaacatttgttgagtgtagtaaaggccacacactgtgctattaatttgttaaaattttctatggatataacaaaatatatgcatagacattatgttattaatataacttgcatcatattatatgatgtgttctattctgttgtgatacactagcaaatggtagtacatatctgtacataacagaatcatcactcatcattgtagaaatgtttacatttagtaacatttgttgtactaagcactgtgttcaatgcattacctgacttatttaattctgtcaatgattctctgaggtagtgtgtagtattatttcataatctaggaaatcaagtattggagagatttaatagcttattttaggacatggctttgagaggcagagctaggatttccactgagagctgtctcagcccagagcctgaattcttatcaatggtatttttaacttgttttaatactgagaaaaatattttttaaatattgatgaacattaactcaaaaaagcgtctttagaactgctacaatatgtttgcaatttagtagtaattccagaaagtgtgcttggtagtaattgaactcaaatattaagttcacttacaccctcataaatagcttaaagtttctcagaaggtagggtgagtagttgatccagaaggtgccaaaatgataagcgttataagccaaaaatggacttcctgtagaatgcaatggggctacctttccattctcaatgaaaatttcagcaaaaataaatgtgcactcacagataagtagataagcattatttgtcctacaccaacctcacatatcctataaatcttagcgtaaagttgtgcattgacctgctgcaacatgaatgagcctcaaagacataatactgagtgaaagaagtcaatcacaaaagaccacatgtcatgttgtatggttccattcatatgaaatgtccatagaaggcaaagctgttccaatagaaagtagattagtgggtacctggggctgggggtgggaacagggaatgactgcaaatggggatgaacaatttcattgggatgatggaaatattctaaacagattgtgggaatgttgcacaactctgtaaatttattaagaaaccactgaattgcacacttaaactgagtaaattttatgatgtaaaattacttcaataaagttattttaaaaatatatctcaataagagaaccagaaattacttgcaagtgaaggattaaaattaatcttatacattcaaaataagtgagtaacattataatgtatcattttccttcctaggacacccatttagaaaaatcacaatataatgaatgaaaataaacatcatttttttgttactacttatttagtatttatagtgatctgaccaagcatccatctgtggttaatatagaaacagcccactgatctacacaccagacttctaagaaattcagctttctaaaatcagaagcaaaaaaggcatctgaacaactatcaggattggctacataatttatggagccctgatcaaaatgaaaatgcaggacctcttgctcagattaataattttaaaatgatgacagcagaacattagtcatgttgtccttctgagcatgggccctgtgcgaccacacaggtaggatactcataaagctggtgttggcaatcaaactagttgtcacaaaaattctggactaaggccatgcattttattcaagaggtttattctgtaacagaagtcctctaactctcattttattctacatgcacatttatggacttggttatctcatttgatggactaagggcaatcaaaatcaacacataagaactgagtggaagatttcagaaggaagaagccctcttctgaagggaaaagtgaagaaacactaagaagctaacccagcaatatgaagtataataatgggaccaggaaatagtaaatttttctattacaccctgtttgcaaagacagcaacatctaatacattttagaaaatattcatcaaaaaacaaaaaggaaggactcaatggggcagcagtgtgctgataaaacatttaacaactggttctctggaggaaagctctgatttgcgccatttgttaatttccataatataaatactcattgtggcggattccagggtaccaaggtgaggacacaggacatgcagttaggaagagatgcacacaactggttctccagccaacgcaagctggctccagcatactgctgaaatggggaaaacattaggtactaccggcagtgaaaatataagacaggcccggggcacaggaggagaaataaaattcagttctgttcccttataaaacattttgttccaagggttagcaaagagagaaggtgactgttgctatttgctaaaataagatactaattctaatggcaaaatcatcttggataatcaaaaattgactacataactatttcccttgtcactttccttccaaaaataattatctctgaataatttcaaggttaaagattgtaagcctaaagagcaaccgactgtaaaaacaactgaaaactatgccagtgatatggcttttaaaaaaatagtaatatttgtttttaaaaaagagagcatggccaagtaaaaatattttctcttttctgttccaatggtttaacctatgaatcaccctctaggagtactatcataccacagataggcaactcttactctttacagcaaaagcataagtcttcactatcagttttagttgcttccaatagaaaggagagtatatgtgatattaaaatgtaaacatttcaaatcaccataggctaccttgagaatccctgattcaaaagacctctctcaccctcaggaacactttaaaatttcttcagagtcaagcagtcaacggcattctggctcagggcatgataccacagaagacacttccctgatggtctcttaggtggcagccatattactcacccagcatgcctggtgtttcctaaatcccttttcaattgcccttcttacacccagaagcatcaaagagaggtctggggatgactgctccctcttactgtagcaactctctcctccagagagggcaggggttaaagttatcttttttaaattatctaataaaaccgtagttgatcaacatattttttccaaaagtatttacggagtgcttattacatccaagcactgttctaggactcataattttgatatttttgctaggtaccagtccaattctgacagtacttagaaggcaaggtaacatactgtgcacatgcaagcctgtttaaaaacagttctggaatgaatgccaagatgagagacgctgacttacattagggaagcctatacaactgattatcctcattacctctgtttaacataagctcagacttttttttaaaaaaatctcagaacctatatggacattatcagttttaatctagtgtcttttttgcctttataactttctagtatgagcgcatagaatatcctacttaatgagagatcctctaggcatggaggcctagagatttggtaacactaattattttggttaaaacatatacacacacaaacacacacatgtgcacacacaccctaaatgggatccatctttgggaggccaagtagatgagtataggtttcccattcttgggagtagatggtatcattactagcaactgttgtgagatgcccctgcctgtaagaactgcgacaagaaactccttttgatggaagttgcccccaaagcagaaaggtcagaatcaggctgcaaagctgtggacatgtcagggtcttcagatctctctcctacaaggcatccttactatctggagatagatggaaattattgatctttcaacatcctcttcaccaagaagaaagaataataacctccaagaatattagtagcactgtacttcctgaaagtctgagaagaattattacccaagacatggaagcacatgggaaagggtagcctgcaaggggctaagcatttatgtgtgtgtataacatatgcatatatatgtgtatgtatatcaaagacagcatgactatacataatatgaagatgtaatataatatatattatctataatgtataatgtatggtatagataatccattatatataccatcaaacaggtaggtgacaatgtatattttatctctcacatttaatttcattgctctcctaagctgtatgaaaatatcctgcaagctgaacatggtgactcacgcctgttttcctagaactttgggaggccaaagtgggcggatcacttgcgcccaggatgagaccaacccaggcaacatggtgagaccccatctctacaaaaaatacaaacacaaaaaattagccaggtgtagtggcacacacatgtagttctaggcactcaggaggctgaggtgggaggatcaactgagcccagggaggtcgaagctgcagtgagccaaggtcacaccactgcactccagcctgggcaacagagcaagactctgtctcaaaacaaaaatgaaaacaaaaacgaaaacaaaaacaaaacctgcagccaagttgcctctgaaacctagaatgatgtcagaccaacagattccccacattgatagtaactaattaaatcactgctttctttgagataaagactagaacaggcactctttactctggggcaggcctactccactttggaaaaggtgccaaatctcatgggcttacactacctggtgaccttacacaagttactgaaactctcaggttccttatctgtaaaatggggataataattgtatatgtttcctagggttgttatgaagattaaagaagtatttgtaaaaattctaaaccagtgcctgttaaatagtaaggactgcgtaagtgctataaaaaaaaaaaaaaaaaaaaagaaaccgtgggagtatcttattgttttctaatgtttgcagagggagtaagagttttactcatctatatataatatgagcacataactcattctcagtttgatttttccttaacacaaacaagcctcttttcagagtttaaacaaatcacaaaagaatttttaagtcattgttaaaattgacatgatttataagctggaatgaaagtgccattcttgtcccttaaatgcatgaggtgatcaatacgttttttcctagatataagaaattcctttaggtacctgctttggcatggctggcatagacatatttatattaggtaattaagaactcagatgaaaacaatttgatactattgttaagcacaatatgttttaattattatagtcataattatataattatacctttatatatagtataacaatgcattcttttctacagtttgcagtttgattccttttatccttgatgtcatttaggaattctaaatgtcctaatttctccaaaacactgaatgagagttgcagaaagacaaacataaaaccagattaactgcaggtgaaaatggcatgtggataatttatttctgaatccagaggaattacatttttgatgctttgtctctccttagcctagagtctcaagaagcttttatacatacaagtcaacagattaacattcgtgatgattcactgtttcaaaataacttacatggtacatccaaagttactgctagaaatattgctggcattgatttctttaagcacatttaaacacaaaagcccaacagaaaaatcagagcttctacatttggactaaaaagaggacacacacagagatctgttcctctctaatagaatgtattaaatagtagacttgagtggtgtttgtaagtatgacattgtgggagggaaactatatgaagcaaaggctataccttgaataggctgttattactgcacccatcaccccaaaacaggccagtgtgattttatgtgcctcccccacaaaatagagcttcttaattaaagccttagcacttaccagttcctgccacacaataagcaatcaaaaaaaaaaaaaaaaaaaaaaaccactggcttaaataaagaccaaataaatggatcattgtcctaagtagcttacagtctaatttgggaggtgagactaatttgggatgtgggataatcaatcctgaggacaaatagtgacatcaacagacttgtgcagggtaaaatgtcaaagaggatatggagaaatctgaatccctgtattaagattggtgcaaaagtaattgcagtttttgccattgcttttaatcatcactgttacatcactggtgggaatgtaaaatggagcagccactttggaaaactgtctggcagctcttcaaaagtttaaacatagagctactatgtgacccagcaattccactcctagctatatttcatttcaagagaaacaaaaacacatgtacacacaaaaacttgcacataaatgttcacagcattattcataatagctaaaaagtggaaataacccaaatgtccatcagctgatgaatgaataaacaaaatgtggcgtacccatacaacgaaagattattcagccacaaaatgaaatcctgatacatgtacaacatagatgagccttgaaaacattatgctaagtgaaaggagacagttacaaaaggccatatattatatgattctatttttatgaaatatccataaaaggcaaatctatggggacagaaagtaattagtagttgccagaggtgttaaagggaaagggaggggtggttggctgctaatgaatgcagcaattctttatgaggtgatcaggatgttctagaacatgtggtgataaatgcacaattctgtgaatatactaaaaactactaaattgtacacttttaaaaaggggaattttatggtatgtgaactagacctcaatttcttaaaacatgcaaaagatgcatcactgcaggagttcagtggagaagtattaataaaatttggaagaccttagaggcttccagggggaggggataattgagctaggtcttcagggatgcattggatttaggtttaaggagggaaggcatttcatagaagagaaagaaggtgacgaagtgaagctggtcattgttccagtcatgaaaaaaaaaagaaccaacataccttgcaataatattgtcaatgaacgtgcccccccgcaccccgtccccccctggctaaaagcactgtcgtttacctctgcttcaggtggaatttacagttcaaggcagccaatatgcaaaccacctaagcctccattttcacagctgtggcttaccaatttctctttaaaacaccaacttttagatttctgtcccactcaattacattgaaagaaatcctagatatcctatctttcatccagaaatatttcagcattatactcttaatgtttgacattaacctagcatgaactatcactgtatgatactcatgctgtgactgtgccgtattgtatttgactttcccaatatttgggggtctgagtttcaagaaggacatgaatgtcaacttctagtcatgtaaatagaattaaaaactcctagtgctgtttatcttgataaggtttctatagtttactattaaatattagagttcaagcctccacttggaatcagatccattcaggagactgtatcatggtgttgcatagcagaattgctatttaagaataacattcttgtcacattcatccacattccaaaaatactctgcttggccttgatggcaggatctgagaagaagctggtcatggtgaacacaaagtttgggagagattcttgctgaaatatagctttgtgtgacaaaagaggaaaagcacgggattcctgggattggaagagcatccaaaagcagctaatccagcctcccgcccaatgaacaaattccctccgacgatgctattaggtaagtatcaccttgagttcaagtagtcacagctttatgtccaaccagctcatgactggacaatttttatctagacagtcctcatagcatggccaaagtcacaaatgatgaaagacataataaactctagaaaaatacataatatcaagaccatgtttcttaacctaggcactgtagacatttgggtctggataattctttgctgtaggggctgttctgtgccctgtaggatatttagtagcatctctgacctctacttgcttatacgccaatagcaccctccccaagatgtggcaagcaaatacacaaaaatgtctccagacattgccaaatgtcccttggtgggggagtaggggtgggggagggcaaaattgcccccagttgagagccacagggctagaggcattacatgttaagagctacaggagggaagctgtgacctaacggccattcatatgtacaggatattaggatacttacgacctgaacaaaaatatacccttcagtatccaacagtaagttatttgacattaccaaaactcagcaaatgtttgttagcttaaataaaaccatatgattgtatatatttcctgttttagaataagaataattcagtaaaaaggctagtgcattatgttttcattgcatacatatatacatataaataattgaaggagatctgataacatgttaaattttaaaattcagtggtgttattatttagtcagactttgtcccatcactgtccaataactttatgtacatcattctgcttaattctgactccatctctgaaagataggtctgctgactcaattatgatataatactaaggctcacaaataacttgctggaagtcatccaattagtagatacaagagttgggatttgaaaccatgcctgattccaaacacaaacccaaagtacaacattgcattgagatttaggatctgattcccaagttcttggccacaaaagtatgctgtacgtttgtctgtctcgttttaaagaattacaaatatgaacaaatgagaacaattcaaatatgtgtcaagtttttttcacccattttggttccaccttctttgaacattttcaaaacataaaagactgtgagtcagactttgagcctatgcctaatttaagcaagactttatatactagattaattaacaaaatagaagattgttctgctctcttgatctcacattgcaacaacccaggctttattgtacaggggtcacctcccttctagaatggctttatccacaactatgcttgtatagagaagtctacaagtcactagctctctgtgagtatcagctacaagacattgctctggcaacaccaaggcatgcttgcaatttaacaaactctgtaagtggaaggaaaaaagagccttccacctaaatgccaaatctatatgtttcacataggagtgatgtttgaaatatctatttcatttttgcctgccactcccctattctctcagagctctgttacataaagcattaggtgttctggggaataattgagcatcagttgtggcagagcgtaggaggatgcctaggttacctccattatcacacactctatttaggaggtgggcaaatcctatttatgtaactccagatgaagatacaccctagcaatttgggagggtgatcaccaaaataaataggtaatttcacttgaacaccttgtactaagcacaaatctgcttactgccttcatcttcttcgaaaggaacaggtgtcattgaaaacaatagtttgcgttggctgctcagtatgggaaagccaaggggttgaaattcaaagctgagtagaatacgggcagagaacagcagctgaattttactacgaaatgtgaaaacacagctctgtatcctccccacctgtgaagataagacatcctgactatttcagtgtgagaaaagttcagcaatcttggggtgctcagggctgggtgtaggtatgggggagagttagagatagttgatgtgaaaacttccccagtaggaaactgagtcaaatcagtcatcttttggttgctcattcagttctctaaagccctggtgtcaaatacgacagccactagccccaagtgaccaatgagtactggaaatgtggctagtcagaattaaaatgtgctgtaagtatgaaataaataatagtgcaaagacttggcatgacaaatgtgtatatctcgttaggaacttttctattgtttgcatattaaaataatatttcagatatattaggttaaataaaatatattactgtttctttttatttttaaacttatctaaatgtggctattataaaatttaaaattgcatatgtggcttggatttcatttctattggacaacactaatcaggctgaaagttactttaaggcatgatttatgctgagctcaaaggaaggcgcttccataggaaagtgttgcttgactgagcttggctccctatctcaaaatgttaacttcaaatatacttcaaaactgaaatttcattcactgccttcttggcaaaatctgttagataaacaaatcttctactctttgagacatgaaaaaggatggttaacaatgtaactaaactttcttcctttgcagacatacttaaaccacgttaaagcagagataaaacaggctctaacattgaaatgggctcataattaggtgctaatgttgaatatcctgtaatgtttcaaaaagacacagatgcagaaaggccaggtctgcacaaggcaagagagaaaacgttgcatttatgaatgcaaatatgttacagatatccaagttcaccagtctatgccttactgatacttcttgctttttggcatctcctctttaatttccaccacttaactgattcacacctgggtcagaggcaaagccgtcttcctcatctctctgatgagcctctccactctttgcatctcccattgctaatctgtcttgtccccctaccattgcaaatcatctcaacttttggcttaagaacctatgagagtagcaggcagcccaggatcgaggtcatccttgcatcaaagccttaaaatccgattctacataatccagccaagcaagagattccaaaggcaagcacgagaatcattaataatgaagtagtcttccaatctattcaagtcaatcctcagtctttttaatgcaacatttacattaaaacataaaaataatccctttgttttgcatttgtttaattcatttacaaattattccatataattagaactcaaagaaagtatcactgtctgccaacaggaaccaaattttcttttcagttcataagttttttaccctccaaaacctcatcttaaaaagttttgtgtttgtgggtggttataaatgtttttctaatctagagctcaaagaaaatgtggccaaaggatactgctttgggtaacctcaggaaggaagaatatctccaaaaatattaaaaataaaaaagcagatcatagctcttaaggcccagtatgctaaatcctcagcgagcctggatcatgtaggaacgagtaattctagataagcacacatcctggatagctcagggttaacattctaactatcttattgtaagagcttctatttctctaatggagacattttcatgtcttttaaaaccattgaacagtttgtcttataagcataattataggtgaaaatacagattaaataaagagctgattgaatctgtcatgatattaccacatgaagcaaatgtctgcaggcatccacactgacaatccattatgactgttatatcttttcaatatggcacccagcgtcctggtaggcctaatataaggggctgctggctgcccctccagcaaacgttagagcagttcctgactctacttcttcattgctgctctcttttccactgtcaacaggaagggcaaactgctgtccctctgttgattctcacttctaccaccacatggccatgggtgcccaccttgaggtcccaggtgaccccagtactgttgccactgtgatctctaccactctgctcctctttgctttctccatccttagttctcaaaatgagcttttcatgcacctatcaccactggggtggaatgtctttttccttctataagacaaatccatgacggaagacactgctgggtaaaaacacatctggatcccaattctacttttaaggagaatttcttttttctttctttttaaaaaaattactagtcattcctgcaggttggtatcctacaaatcaagggtttactgtatgattattacatatccataagaaaaaaatgacaatttaaaaaattttaatggcaagctctggcatattaattggaaatccttggttcttagtctaaacattgaattgttgtgtaatcaatttctagtcaaataatcaatttctacttcagtttcattaataattatgattaagtcagtagcaaaaaagcatgttatttctcctcgggaagatgtaagacagcttaacttaagggaccctaaatatggtctttgtaatcagtggacttgagtttacaacccaacttcaccacttatttttgtgactttggaaaagttacttagcctctacaagccccagtttcctcatctataaaatgatataaagaaacctattagagagttgtaaggaatttttttttagataggatctcactctgttgctcaggctggagtgcagtggcatgatcatcactgcagccacagcctccctcgctcaagtgatcctcccgcctcagcttcctgagtagctgggactgtaagtgtgccaccatgcccagctaatattttattttatttttagagacagggtcttgccatattgcccaggctggtctctaactcctgggcttaaatgatcctcctttctctcccaaagtgctgggattacaggcatgagctaccatgcccagccgagaattgtaaagattataaagtactcgcataagtcatcaaggaaaatgtatgacacagagtgggtactgggatgggggcggagattttgcccattgctgatcccctggcaacagactaaagaagactatactgagcctcagctaggaaaagcaatcctcaaatacttgacagcatgtaagaatgcacttttaaagataatgatcttttttcctttttagagattcatggtactgtttggcttacagcattccgcctgagcttgctgtaaactatacacacacacaccccacacacacactcacacacaatgtaaacacacacacatatgccactgccaccatgactatcagccagttaaacagattatggtacattcacccacaaatgtccatataaaaagcatcctagtatcctgtggttggccatcgtggttactcccagcatgttggccctgattaatgtgtgtgggatgtgtgcgtagggggtattgaaatatactgtatcccagtgtccagcgaaaggccagaccgtgttcacgtaaacagtcctgacatattctgtttcagtttcccatgacataaaataaactgtcacctacaaactgcaagtaaactgagaagattgttaagcacatatataacaaagaaacatctaaatagataaatggggagtttttttttttttaataagtaaatgtgcctagacagactattaccttacagtggaatagaccatgcatgtctagcattgcttggctttcttggttcattttttataactacattattgagatataattcacatactttacaactcacacatttcaggtgtttgattaaatggttttcagtatattcacagagttgtgcaaccatcaccacaaccaattttagaatatttttatcacctcaaaaagaaaccccatacccattattagtctctctgcattttatcccacccccagccctagggaaccaccaatctatattccatctccatggatttgcctattctggatatttcatgtaagtggaatcacaagagaatatgtgatctcttgtgtccagctcaagagagacttagcaccatgttttcaaggttcatccatgtgggagcgtgtgtcagtacttcattctttttcctattgaataatattctcttgtatggttgaccatattttgtttatctgttaatcagttaggatggattcttgggttttttccacttttttgttgttatgaataatgcatgtgcattcatgtataagttttttgtgtacacacatttcatttctcttgggtagataactaggagtggaattgctgagtcatatggtaactctatgcttaactttttgaggaactgacaggctgtttttcaaagtggctgcagcattttacattcccaccagtagtttatgagggttctaatttccctacatcctcaccaacacttattctttgtatttttttcatcattactatcctggtgggtgtaaagtggtatttccttgtggttttgatttccatatccctgactgctaaagattttgagcatgttttcatgttcttattggctaactgtatgtatgttccatgtgttcattggccatttggagttgaacggggaggaggtgtgggatgatattcaaaggaatagtgtaggaatcagatacaggaatgatatcctatagtccagtatttttttctttctgctggcacaatgaatgttctaaggaatttatgagtagctttttaatcttaagcctgggatttgtgagctaactataaatcacttaaccaaagcatgatgaaatgctattcaacaaaatgctgaaggaagcagtaagattaataactaaagacaacgtatgacttcaacactataacttaaaaaaaatcaaaacaacaaaaatagaactataagtcttctgtccattagtcaaaggtgttatcactggctcctaggtcacagattgagacctcagcctggttagtctgtcaagcagagttcactgaagtaaacgtgtgtaaggaggcagggagggggaagcggaatggaagagtttataacaaaaatcgcaaccagattctcaatgcatacagtgtggcaaacgttgtataagcctcacgggtgaactacaatattggttattcttgccacaagtctgccaggatttcttaaaaagttgttgctctcattggtggtttgcttgtctgtaacagagaagggcaacaaagttccttccatgtacacagtttcctcttgctctgtttaatagccacaagcagcttataagcataaaactctatccaggtacaacggaagcacccttagccatagctataataggcccagggagaggaggtgaccgatgcagcagttacccagtcaataggggtctatgaggaagcatgatggaagagttttcccagtatggacgctgctgcccaaattgagagttgtagaaattgccgttcagtgggtgccgggaacagacagaagcagatttaaaggcagtaggacgacaaagtagtcatccatgagttcttcctaccagagtttacaagatatctgagggtggcaatgctatgggtatcctggcaataaaagacctcctattctgagtgtccaaaaggctgtaacacaatttcatcacatctcttttttctaattgaggaaattgatcatcacacacacacacacatacacacacacacacacacgcacacacacacacgcatcctccaaccctcacactgcttaactgtttctataacttccccttactccaatatccttactctgtggcctgtaagtccctgccatttttcttgaccaccgcacccatctctccaaagctctgttctgctactgttccccttactccttcactcagtctgctactttcttcactcatttgcttgaacttgctatgccactttgctcctcagcatctttgcacaaactattccttcttttctatagtgttttccgtatgttaatccacctaataatcatcagcctgtaggtcttggcctagtcttcacttttaaagcataacagatataataactagggccaccgacacgtagatccacagcctgcaagaaatggggtggggggttgtctctggcttgcaccccatgattcactggatatctatgtcaagtgttcactcaggagcacaagcaggggcctgtggccacatgtcctctggcctctccaagtcttgctgccaagtgccagggctggaaaatggttgaagtggatgaccccctgccacttcctccaaggtgacactgtgaaggtggagcaggacatccatactcaggggacacagattctcaagcaaggagaggtggagggagccttttgtgtacactttactttgataatggatactgctggaatatgggcagactgcagtggactatttttaaagaaaaggatctggttttaaattcatatgtggttttgtgattttaaaaggaggactacaaaaaatactgttgtgaagcaaatgatcaccatctaatgtgcctcttgtttgttatacaaataaaagttataactaaaataaaacacttcacactggctaggatggctactatcaaatagacaaagctggatgtggtggcacatgcccatactcccagatgctcaaaagattgaggttggaggattcctcaaacccaggagttcaagaccagtctgggcaacatagcaagatgctgtctctaaacattactactaataataataacaacaacaagtactggtaaggatgtggagaaactggaaccctcaaacaccattgtgggaatgtaaaatgatgcaatcactttggagaacactctggcggctcctcaaatagttaaacatagagttcctataatgaccaagcaattctactcctagttatatacccacgagaagtgaaagcatacatccatacaaaacatatacacagaagtccatagcagcattattcataaaagcagaaaaactgaaaacaccacaaatgtccatcacttgatgaatgaataagcaaagtatcatgtttccatatgatgaaatattatatggtgataaaaaggaatgaagtactaatacatgctgcaacatgggtgaacctcgacaacacactcagtgaaaggagacagtcacaaaggaccacgtattgtatgattccatttatggaaaatctcaagaacaggcaaatctagagacaaaaagcaaattaatggttgtcaggggctcagagtagcattggtggaggagataaaaagagagtgactgccagtggcatggagtttcttttggggaaacaaaaatattctaaaattagctagtggtgatggttgtacaactccgtgaatgtactaaaacccactgaactgtacactttaaatgggtgaattgtatcacatgtgaattacatctcaatagagagggtttaaacaaatgatgctataccttgagtttacagagcaaaatgtccctacataactttgtgtttccatgtttgaccacttagcaggaaggcctctcaagttaatgaacacatttccggctctcgcaagacagtcttactgattgctatgagactaaaattccacatgaacagaaccatagtgtctggatgaccttgatgagcaagagaattataaatacaagttagaaaattttcaaaaaagaaggaaggaaaagaagttaaagtgggaatagggtgttaccactgtgctagaaaaaataaaaagagagaaacaaacaaacaaaaaaatgggtgaaaagttgtttttagtagaacctctttaaacaaggggaatgctttcaacagtcccaagcaaatttcagtgtcacatggttaaggccaaaatatcccaaaataagatgaataagataagattatggccctgttgctatgacttcattatgtggaatatagatattgggcctgtgtcactggcagacattatttatatatatatatatatatatatatatatatatatatataaaatatacaaatatatatgaaatatataaacatttatttatatgtttacgttagatttatatatgcatatataataaacataaatatataaacaaatgaacatatatttataggaagataactttattttggtataattgatacagcataaaatttatgcattttatgtgtacaattcaatgatattttagtaaatgtaccaaattgtgtaaccataactattaattcagttttgcaacatttttatcaaattatatagacagtcctggtggctgctcagatatgtttttgcttttgattttagaaagtcgagtttcttagaagtctggtgtctagttcagtgggatgtttatgtcttaactacaaatgggtgcttggtcagatcactgaatcctgaacaactagcaaaaaataaaaaggtgtttcccctcatttattagattttgaactttctaagaggtggcctagaaaggaaaaaatatatatataccattactaacgtatttcaagtttgattgtataatattgattttaatccttcatttgtaaataagtactttttgattctcttattaactcatactctaaaacaacttcattgagatgtaatttacattctataaacttcacctgtaaacttactgcgttggataaccatcaccacaatccaatttgagaacatttttgtcacttcaataacatccctggggctcactgacagtcactctcctttcccaaccacagccccaggaaaccactaatctattttctgttcctatggatttctggaaggcattacactttcacacacagatagaaaaagatatatcaaaaatatatctctcctttaagaaaatcctatctctaccccagaatttcagtgtttgtgatgtttaaaatttttaagtaataaataaaagttgccacaaatgctatgaaaaacagtcccccaaatgagaagtttctccaccataatatacattttaaagtttataataaccaattaatagacagcactttaacaccatgtgatattttcctgattaaagccaaaagctactaattctaccctgctccatgactaaccagcctcccaccaaaaacaaaaatccaaaacactttagaacacatattgttcattttatttgcagacaaaactcctggactactggtctccttcaaatttggatcataagctgaattaagcaagggaaacttcccaaaatgacatcctattctgcagctttttagagctacagaaacttttctagacattaaattctctttaaagataatccggaattatgttagactagtttaaaaaccatcacttttcatagcaacatgattatattgtgggcatttccaagttaattatagatctgtcattttaaggaataatcattaattgagatcttttcattgaattaatgaagggatattgtacagctgcaacaaaataacccttttccccttaaccatcaatggagagaattcgtaccatggtaatttggaagctaccaccatcatgtatgcatatatcatagttctcaagaaaatattgttcccgaattgtcttttcctactaaagaaataacccttggtcaatgtgacaaatatatgacattgagtcatttccacataactctccagcagaccacatctgtgaagctagataaatcctgtttcaatttggattgccataaaacacaacactcttttcaggccagtccatggacttctgatagcagccttcacaggccacaggttgccactttccaagtctaggatgctgtggctctcacaagggtgctgacccggtttctattttcaactggaatttcctcctctggggtcatttgatttccaccctcagagacattttcctggttctctgttctgtgccccgacctactcgttgcttcaaaaccaaaaagaattccaggttcatcctcctgcacagtccagtgagacaaagactcgtggacattatgctttcaatctggtggaagccatggttttttgaacctcagtgagaccctcttagaagacaccaaggtgacatttactcaggaagctgctgagctctaagacaagacctgcaggaaatgatagcgggaggccatggtgtagagctaaagctgttaagacgtcttcattcaaagggtcacaagaatgtggaagagtcagccaaaagaaacatcacaaagtgtaagacagggctacttcctttggcacaacactggctgcattggcaggacccagagatggctcacccccagctcttgtggctgagcgctcagcaagccacacggagtttaaagaacaggagactggtgtttttagagtcagctcctggaggccctttatgttcttgcctctgagggagttctggatacagtaacataaaaatctcagatacatccacaagaagaactagcattttaaacccatgagtaaatgacacttttctgagtttaagtctccctttcgcactggtaagaatggcaatgtttatgaaaattattctgcctagaataattgcaaaataaaccatgaaacatatactatttttaacttaaaatttttaaagcattttccagtgatgtagagattggacaaggcaaatagttttcagacactatacttgcagatgcatcttcttattcaagaggaagccttagagtaaaaattggagactaaccttttaaaaaaatgtttcccttagcgctatacacatacccagttctgcacatatactggtgaatcaatgaatgttcactgacattttgcccttatctgaaatatacccaccactcccctccataccaacaatatgtgtccctttcttttgccttcatactgatgtaacgtagacctatctacagtgtctgtggtaatttgagacatagcattagactagagataggcaaactttttctgtaaatggccaaagagtaaacattttaggctttgcaagccatgcagttcattgcaaccaaccactgaactctgctatcatagtgtgaaagcagccaaagacaatatgtcaataaatgcacatggctgtgttctaataaaactttatttatgaacactaaaatctgtatttcataaaatgttcacatggcataagatattcttcttttggtatttttttcaaccatctaaaaatgtaaaactgattcttagctcataggagacacaaaagcaggcagttgtctggatttggcctgtgggtcatagtttgttgacccctgatttaagaactgagctaccgtaatatggcagacagtctactagatatgatcacgtacagagcaaactggaaaaaaaaacaggccttggcaactgttcaatcaagttgatataatagaggaagatatggtgaaggtgttcaaacttcaatgagacaagattctgtgtgtgtactttaagtgcattgcttttaatgtagcttatccatttacatgtcaaaattgatcaaattaataatttaattgccaaacgttgcctctggtgtgtttggcctaaaggattaatatatttttctttcattcataaatcacctcatccttaatttcttctaggttttgaaacagtagctaaattcagaaatcttttaaaagtgatactagtaaaaagaagcagataaaaaatctccagggagatgttggtcaaggatacaaaattttagttaggcaggaggagtaagttcatattccttgttcaacatggtgactatagttaataacaatgtattatatacttcaaaactgctaagacaatagattttaagtgttctcaccacaaaaaataagtatgtgaagtaatgcatatgttgattatctcaatttagccattccacaatgcatacatatttcaaaacatattgtacatcataaatatatttaatttttaattgtcaattaaaaataaattttaaaaagtatccagggaggtgattctgaatggtttctttttgatagtttgaggaaccagagctgctacacacaaggaaacagggacgagtgtcgcaattctgtttaaatgttaatatcattcagtctatttctatattcccttaatgtctactcagtctttctccaatcactgtggatttatgggaactgatatcagtgagagaacctcaaaaccctgcttttgtcatttaattgggtcatgatgacatagatattgacatccatgacagaaagaactcactgacgaaacagaaaaagaaaatcaggatagatttgtaccttcttaaaagtattggcattctcaggataaactgattaaacactgaggtaaagtgaatcaattcccccatctcttcatccctcgttgcttcacatccttaccacagccccatcatggaaggagtgcatttccccacacactgaagttaggcttttacatgtgacttgctgtggccagtagcaggtgggtggagacaatagtgtgtcaaattcctgcctacgtctcaagagtcttcagttgatcccacttgccatcttgtgcctttgtcattgctgaacttctttgggtagatgctgccagcctgggccccaggatagatacacatgggacagaattgacagaagagccttgacactttggcctctggtcaaacagctgagctctgtctagctaagccaaccctaaccgacccacagatccactaggatccgtgatggtttttttatgccactgaatgtcagagtagcttgtcacacagcattagtgtggtgatagctaactgatacaaacacacttctacattttagacaacacagctataaggtaaagtacgattttgtgtgtctatgtgcatatatgtatgcatgctaggagttctatatttcattcctttctaatgacgccttaaataaaaatgtgccctcccccacctgcggcagcacagaaatatcatggaaggcctcattctcaaaccaagtttcctcttagactcactacatgagcctttgatcctttacagatgtttgcaatgggtgatacaaagtatctgcgtggtaatggtgacattacctgtctaattttaatgcaattaaattgcattaaaagcaagagttgggctcagtatgactacatttaaaaaatgttcttcctttctaataaatatcaagtcataatcatatggtaaaactgaaatatgtgaagtatctagtaagtttgcctatgtttgcagaatcagacagcatcagcagtttggacaccttttttaaaatagtgagcaccaaataaatgcaggaagtctttctaactgtgtcccgatgataaggtttcactcttcagcaatcctgaataaaaacagctattaaggattttttgaaccagttcatcatgataaggttcaaacctttccccaagagaggtctacgaacggccactccctttgaaatggatgaataaaaatgcatgtgtgccatgaatgccaaggtttacgtaactgttgtgctgcccagagcccagctcggtcatggctacctcaaatccatgcaggactcgtgtttatccttgttcgtaaatacttttggaaaaccctgacaagggcagagtgccagctctcatgtaccttttccaggctgctgcaagttcagtcacgcggttgtcggtccagaaatggatgtgccgttagaacagccatgcaaagagggagtgtgccgcatttacgcaggagataaactctgccgtgtttcaatcaaaagcagtttgctagtgaaaacacaggtgttggaattataaaattaccacaaccctcaaaccctcaactaaaaataacaaacaggatgttctttatatgggtgtgtacatatatatatatatatatatatatatatatatatatatatatatatacacatacatatatatgcattgctgacaacaaggacacaccaaaatcctctctgatctccctatcaattcaccatactttcttctgttatgtttatggatgctttgggtgtaaataatcaatggagacaggaatgtttccaccgtgcagcaagaacaggaggaagaatttaaaatgtgtcatcttatggagacagttcagtggtagcccagattcaggatgagggcaggagtagggtggatgtgaatacaaaggggtagcatggggggagtgcttttgcggtgatggaccagctgtgtattttgaatgcggtagtggatatgccagtctgtacaggtaataaaattgcacagaactgcacgcatatatacatacataaaagaatgcatgtaaaaacctggtaaaatgagaatctgtagtctagttaataggattgtcccaatgtcagcttcatggttttgatattgtgtaaataagatgctaccattgagagaagctagataaggggtacatgggacctctcagtactatttttgcaagttcttataagtcttcaattattacaaaatgaaaggctttaaaaagtattacctcaaaggtatcaccttaagccaatggcatgtcaacaatcacccactgcacagtgattcaagcatgcagacttggcaatcaaattaagagacaaggatttgagtcccagccccactacgtactagctgtgtggccctgaaacagacataaggtcagagctttggtttcctcatcttttaaatgaggataataggacctatctcacagggttattttaaggattaagtgagataatatatgtagaataagcaggactcatagagagcattcaataaatattggctattattattactctaagtcagactaaatatttctgagagctttaaatcactgattaatttcattgacactcaagtacatactaagcatcaggcacatgctataaatggccaagcattgagtcacacacaatatagtccctggttctggtctgcgtccttttggattttctggttctgttgtgaatatggtctccaaagaagcaggatgaatatttatgaaagtgggtgcacagaagactcaaggaggaactaacttaagaataagaggtactttctgcagtccaggttgaaatgagagttttctctctgctaaaatttactggggtacagggcggtttaactgcaatacttagctgcaaccattccttgaccagcagagataaatgaaaattgcctttcagtcaagcacaggttagaccatttgtgttgatgtgcaattttaagagttaaaaccctttacccatcaaccagaaaaaaagccaaaccaaatcttcctttttctttgtttggcaaggaaattacattagactatcctaatgggcttagagggaaaaaaaatctaattgtagtctatattaatacatttacatattttgaattatattaataaatactaataaatttagaccagggcactttaaagtaatgaactttccaatattagattaatgacaaaatatacgtagaatatatcactctctactaaatgctttaataggtttgtgatataaaaatccttaaaagcaagcacaccacgtatggatggagctggcatagcacctgagtactttaaatgtggtagtcaaaataatctacagtgtggaagaaagagacatttgaagcaatttgggagacttctatatacttaggaatttaaggtctttcataaatgtaagcaaaccccaaacaagactgaaaatgcttgtaatgatattttatgtttgtcaacaccgaccccccctcccgccagccctcaacaaaaataggaaataaaatgttctgcccttctctgtgctggtctcactggattggctgggcttgggcccagaaggagatggagaacagggagaccaagaagtcagagtatttactgttccagtctatccctgcttctctgtattttgcccttgctggagtcttctctggacacattgccagggtcccttccagccaaggctgcaagtcagtgggctctggtaacgctggtccctccctggtaacagcttctcagtgttgctaattgctgggtgcttcaccactcaccgttggttcctttaaacctgtcaacacattggcgtagttcattcctcaaattaagccttttgagtgatttatctgtttcctgtttggatcctgatcgacacaaagcccttgactgtgaatcagtagctaatgtgggaggatgccttaacttttgagataaaagttaagaccgtgttttgcattttgctcagaccatcgaaatggcatcttaacatgaatggaactgttgaaagtcatgtgcatagatacccacagaaataatactatgtgttatgttaccattttcaaatcattctagcaaactcaatgttccatacccttgctaatctattattcatctgtgggtctaattaacatggcatcaccaagctaggaacctagagcaatgtccagggatttgtgcccatgtggagaggcacccacctggcacagagatgcttggcaaatatggagcccacgtgctccacaaagtgctgagatgcttttagcctctgtattgcacttggactggcttatacatttctttaccagatatttcagtcaactgcagaaaggggtcattcaaaaatatgttaaaagtttattcatctaaactacttctgttgctgttgccatggcaacttttctctaaagccacaactccaaattcttctaaaattgttatttcagaaatctaatttagctgacatcccaaacactcaaattttactataagatttttttttatgttagaaaagttctaagaaaatgacaagtatccgaagagaagaggagaacaagcctgacaggttttcatttgaaagagtcatggcatctttcaaggaaattggaagtggaagagtcttcagtaacagtaactgtatttgaatgaaaaaatttggcttatattttgtatatgtttcttgtattgaaaagtatcccatattcacatccaagtagtcaccacaaagatagtgaaagcagtaccacataatgactggtgggagtccttgttgcatcactggatctacctttacgtttttaagtattcagggtatatttaagaataaaataaatcagaaaaattggtcttttgaaaataaggttagaatgagaaaacctgagaacagaaagtacattaaaagatattaaattaattaattgtgtttgtaaacagtggtctcagtccaaaatgtggcaagcacccaagaccgttaaatctatccccaccctccccatcatctcgtaactcacaatctaaaacagaccatgctaatggacatgcagtgacatggccaggagttaagaacgggctctgcaattcaatgggagaacaggtaggccacaaacccgcctgccaccctgggctgctcaggagattttgaaccctgatgtgattgagagagaaacgctgggagccactgtttccctccctctttcctttggcttttctttcagcaactcttcccttttccccagagcaggccggtctgtgtcattatcctcaaggagtagggacagaagcaggcactctagtttctcactttcatacagatgcagatcccacatccacacaccaaggctgctgagcactccacacatcctcatttggagattataacttctaattttaggcccacgattaacacatttgttaaacgggtattctggctaaatcagaagagaggtggcaaattaggcaaggctgttagacggtcataaaggaagaagttagctaatgtctgacatgagagagaagacagtaaacatttttttaacccaagattaggaagggctttggcattgaggagtgaagaaacaaaaagcccaagatgctgaggcttctggaaggaccaccaacaccctctccagagtaatccccacacagtatgaaacacactgttcataactgtgactcacagccagggaagctcactcacattttctcacctctatctctgaaaacccaagaaactacgaataatgtattttagaaagtgccatacaaaattgttctcaaaaacatttaagattttgatatctactgagatacaattaagtcagggtttctctgtctcagcactattgacatttgaggctggacaactccttgttgggttgtgttgtgctttgtaggatgttcagcaacatgtcaggtctctacttaatagatgcctgtggcaacccctgccagttatgataaccaaaagtgcctccagacattgcccagggtcctctggttcagaaccactggtcgattttacctagaatatggataccgagggacatattgccagatgacattatatagaggaagtattcctataccttttgtatcattagagagtttggctgaaatgaacactgggtggtaaaacaaaggactgctctgaaaacttgtactagattacctcagagtcagctgaggtgaagtattgtattgcactttctgaatctactttgctgctgaatcctacattttgtaggggctgcttgagtagtaagtggttcaccgtgtaaattaatcagtgtttgccaaacccagctgatattggaaccacccccaaagctttttcaaaggattgattccaagtctggtccttagagattctcgtttagtaagaattcagtgaaactggaaagctaatttttagtctcgtctctccctctgacctcaatcatcaactaataaagggttaagtttggaaagtcctagcgtaacctagggaaaaatacacaggcagccagattcatgttctcataaatatttattgtatgcctaccctgtgccaggacctgctctaaggcagtggaaagacagtgggaaaggatcattgggtccttgccctgaataaacttacacactagtcagaggagacagacaaacaatgaatatataatataataccaagtggtgatgtgaacaatgagggaagtggctagtgtgatatgatccagggtaactgagtgggctcagaaacacttcagagaaagcagtcaggaaaggcgacatttttcctgcaatttgaaggatgtaaaaaaaaaaagcctatcacacagaggacattccaggcagaagggacagcaagtacaaaggcttggggcagaaaagaactggtcgcatttgaggaacagaaagggcacagatgtggccaggcaatgataagcttgtggagtggggtgtggtatgaggcagagaagaccatgtaaggagcacttggaaggtcaaggtcatggatgaagctattattctaagtggaatggaaaccaaccaaagagcttaagcactgaaatgtcactatttcattaccttttaaaaagattgcactggccatagggacagccaaccactcactgagatgggaaagtctgagaatgaaacaggtgacagggaagtgaggaatcaagaacccaatgaagactttgtatgactggacaataatttcacaaccaagttgagagtcatgtgtgtgtggtccagggttatcacaatgtgggaacaggaaaagtaaataataaaagttcatcaccagaaaggactaggcaaagggtggtaattgttttcaaatgattggcagagatgtctgctatgcaacatccaacaggaatctgattttttatcaattagtagtggtacttaatgagtggtttgaaggaggggagatgtagcttcctaagatgatggggcttccacaccaaagaggcctcatccaggaaaatttctgcatgcagcagaaaagtaagcatgccaggttgggggtgggagtagaaaaggtatctacaattagtagaggtgtcaattaagaggattcaataatctctcacatatttgtaagttgaaaaaattttgcttttatgaggagacaaatgacaaccagagtaatataaaaatggttttataaaagtaagttctgggccatgccacaggtcagtataagttctgctgagtttcctaagatgtctacactgttagcaccgatggatgataactgattcatatcagcataggcctgcaacggcgcccagttctgggcatcttcagaattaccagagagtatcctgtattcaataccactcaattattaagcaaacttaatgacttcaaagtctttgaaaattgaatgttcatagagaacaaacgtggaaactttcatagtttccattctatgtgaaaacaggttctctgtcagggtaagcagcttggcacttctggtgagttccttaggaaggggttaactggagcaagggcagagtcagcatctgattacaaggctgtggtcaaaagcacagatggtgcagtgaccacaccaaacaggaagtgacatcagcagcagaggagctcagactagaccagtacaaggaaggagaatgagcagcttaggacctcaaaaactaggtctcaactactagattcatgaagtcattcaacacatttctactgagcacctactgtgcttccagcactctgctaggtgtccaggtgacagcagggacaagacacacatagtactactcccagcaagttttcaacctgccagcgagagagaaatgaatgatgtcagtccagggattcctgatggtgactgtataatggacactgatttgcttttctctgccccacttgagggtaaagacaggttggggcaccaggagagaagagcttgagcctcctaaggtccccagtaagtcacaaggccaagcttttaatccagattttttttagtgtctttcagaaagacataaagatattgcattgaacttaatggatacttaaatttttagtttttgtctacactagtcaaatttaaaagctatttggccatgcaatttgacaatacagatagtcacattaagtcactgaaggtccaacatttggttgttggtttattactgtggcaaagtggatcgcagagggatgattaggttcgactatcctcattgtctaaatgactcagaagagcactgcaggatcagggcacctggataaagctctcagttctgtcagcagcgacacatgtgctgccttgaattctactgttctgagcttagatttcttcaatcaggaaacagaaaacctgcataaggcagcaattggatttcagactgaaattgacctagactgtgttcaaatattttgcaatctgtataagacagtaacaaggagggaaatatcattatgactatttgcttattatataaacttcaagagcttctctagaaatgctgccagaaaatcattgattcattcatgtcatcctcatccttcatactctatcacctctttatcccatccaaactaagtctgacaggttctatgttctaagcatctctccaatatgccaactgctctcaacctcctacccagctgccaccctagcatcagtcatcttctcgaatctctcccaggcccaaataccaggatgcactctagctcctcctcatcctcactccatactgggatcatttcaaaatgtaaatctgattcagtcaccaaaaggcatcaaggacaacacccagctggaaggacggagtcaccataatctgaacgtgggaaaactgtaggaggaaattttttgaggagaacattagctgctaacacacattattttctgtgtgtgatgataaagcaagaagacagttgtattatactttgaaaatgtctgtttatgtaaatggaggatgttcttgtctagttaattgcattttgctctctgtgaccattatgaccatttaaaaagatgagtgagatgtccatagcaactcctaacattttcactatctaactgtctctttggaaaattgaccaaatacctggaacacaacaggcattcaacaaatgtttattgaatgaatcaaatgtgagccactgacctcttatatgcagtctcaccttggacaaacgaaaaagcactgaaggaagagcattacatacttatccccgaattatatttcagaggaggcaggaggtattaaggacacatggagggtcattcatgtcaaggaagacagacccaaaaaaaacccaagatcacaggaaaatgcacagtgggacaaaaccctgttgagcaaagtaagtggaatatttgtgctaaacggcaaaacaagctctggaattatcaaaacccaaatgagggaagtaaacaaaagtgcagcgttagaatagatattataccaccaagggttatactaatatgaaaaacaatgggtcgcacttaataaagaacattctctggacacgtgactgattcagagctgctgctttctcatcctaaagtatgcataggaaacttcagagagcccgggtgacttattccaacctggaatcccaacaaattccctctggaatcttcctttttatagtcttaaaccagaatatacatacatgataatctgtactagaataaagggctatttcatcagcagtcttcagagccccaagaggggacattagcatcggcttgactcttcagtttatgattttagaagaatcagacagcctaattaaatgacaattttaaaatatttttgtaatatatttacataattgaggcaataaccattcattgaatgaatagatttttttaaaattaaggagcccgttctcacctttcctcccccacccgcactcttgcaaatggcaaagacctcagatcatgaatcaaagggtaccagcacacagttcaaaaaggtggtggggtggagatgttgaatgggcacaatgagcacagactctacttccttcagtgtaaagcaacctctgttgaaaagtggttaccctttaaactactttaaaaggcaaatcactgagccaccggtgtctccaagacagatgaacgagcattagtaacttacaagtatctcatttggtgtttcaagacaagtaactatagaaaaaccagagaaagagctgttacaggttcctggaacgtttgcctgggaaggtatcttaacaatttcctaattcaggtcttcatttttccagtggaggaaagcgaagtgtacgaggtgtgcaatttgcccaatggccctgcaattaatccaggagccccgaggtgacaccaggaaccaactggagcagctccgggatgcctgagtccaccacccctgtccacctctactcctttcttcaaaaaaacaattttttttttttttatgttggggactggattttggaagacacgaattccagacagttaactgtctttgcctgattataaatattaatgattcttgtcaactctctgcctgcttctctccaatttttaaagttggcagtcagaacgtccagtctcaacagtgcaaatcaattcaaggaaaactcagtaaattagcagatgacagaacaactgcagtgtctcatctcaaaacgacacatctcacacgtggaaaatcaatgtctgaagactggaataaggtaaaccttctccctgcccccttcctggagggggcatttgaaatcttcagaagtagtagtcattcctcagaaacaactttccttttttccttctttcctttcttttctctctctcaaagaatatactcatctagtatctggatttggtcggtcgttaaccttaaaatcttgactccttcttcaaagaaggcaaatcccatgagctttctctctgttgtgtttcctgcagtacctgcagcacctagcgcagtccctggcacacagtaggtccccagtaaatctttgtatcaacagggagaacagaagccaccataagggagggggaaggtacgacagaagagcccctggtattctcttgtattagcgtgcaacattaatgataatgtgcaacattctgtcccgccacaaagtaggagggaaatgcactccctttctaaggagtgaaacggctgcaccccaacgctcccggcagcatttcttcagcaaatccactcgccgcacactgagatcatgaagcggccctgcctcctgtccagtcttattctcgtcctttcaacatatctgactgaaggctgaatgagcgacctaggcctaaccccaggaaccccatttgtcagcctttgtcagcgaggtggtggcggagtccagccccgtcccagatgcagtgaccacagcgttggggcaaagaaacactgaattcagggttggggctcccctgtaccttctaaaagatttcgggaagcgccactgagttagtgagcaggtggcacttcggggtgacgtacccggccacccgccaccccctcagccgtggacctgtggggagccccgactaccatcgcccctcgcagtccccacccggagcggcccagtggcgccccctgtgtcctctgcacgcgtcaggacactcaccgcgtagtgcagctggggcttctcgccgcggtacaccgggtgccccatgtcgcctccgggaggagtggcgcgccttgggctcagcctggggtcacggtgtctctctgagttccccgcacttcactgccatcctggggcagcccctgggcgcgagccctgctccgtgcgtgccgagtgctgtgcaaagcgcccctggcacagcgtcccgctgccgctgcggagccggtggggacctggagaaggcagcggcgcgaagggggagggggaagaggaggaggaggaggaggaggaggaggaggaggaggaggaggaggagggagcggccgagtctgatgcgatgggcgggcgtttaattccttccgctcctggcgggtccctccggcggccgccgccgctgacagctgttgggggctgcggaggccgaacgcgcccacgacaggtgtcaggctggccggcacgcctgcctcctgccaccccaccctccccggacccgtgggaccccggctgctgaggcggggactgccaaagcctttaatgccagcgagaaggcgaacttgggtttccaagaaagagagactttcactaactttgaaggaggtgtgggcctgacagtggaaggagattcagagccttctcctgggagggcagagtttccctttctagaaagccttcttctgtgagagtctcaaattgtggggacccttggggagggcaggactgagaggaaccaagtcatgctacccaggagaactgctgcggggacaaggctgcccaggatgctggtcacttagggtgacccgagttccaggggggcttgcagggcacattctgtaggttcacaataacccttaaaactggcctctgctctgaaatcccctcatggaaacctgcactttaaaacaccttggagaagatcagcgagttccctccacagccttgtccttctgtaatttacgtccagcctcccacaagttgagcccagaggaaggccaggcctggggccagagtagagactccagactcatgaatcaatcaatgcaagccccagaggggtggctacaaagtggaagatgtgcttgggggtagcttgtgccagtttgtcagggtcccactgtactgaaccggctgaatgactctccacttgctctgtgtaagaggagaggggaggagaggggaggaaagttggatgtggccccggaatttcagcccttacaatttagttgaatgaaccatccactggcatgtaatattttaaaacaatcacagcataattataattagcagtgggaatgtgaagccaggggtgcaagtggcctgaggaatctaccattagatagtcccatgacagtttatccacctggaaaactggatggttatatctgctaaagtcaatcataggcctaccttccaatccagcaaattccacccctagatatacagagtacaataatctcatcatataccagaatgctcatactgtgttgaggcataattgccccaaataaaagcgatccaaatgtacaccaactgatgcatgacaaaccaactgtagtctgtgcacatgatggaatactattcagcaataaaaaggaaaatgctactgatgcacagaacaaatggattaatctcacaaacattatgttgggagaaagaaatcagacacaagtgtacatactgtaagatttcacttatttattctgcaactgaaattcaaatgtttaagtgcaataggcaaatggaatccatggtaataggtgtcataacagtggttaccaaagtgggaaggtggtattgactaggaaggtggtacaagggaaccttctagggtgctggaaatgatctatatcttgatctgtatggcagctactagagtacacccatatgtaaacattcactgtgcagtacagttcagactagtgtaatttacacccttcactacatgtattttatactgcaaaaataaaaaataaaaataaaaataaatttaaaatcaatcccttgccaaacccaggaacttccaaacagtgttgcctgtcttatgagaaagtcaattgaactatttgcccaagtctttcattctcccacagcctgatctacccaagtctcctttcttctgctttgtaggagaaatgagcatgcccattgaccttggaggccttccttgctctgtgacatgtccaggcagagctcgaaaaatgacacactaaagttccctctttactctcactctgttctgctgctaaaagcaacctttagagcaaagtcatcaaagatcctcagaataagacagagaaccagcttgagcttcaccatctggcatctttcagagaattgcagccagggcagcctgatgggggcacgtgtgtacagatgtaattcaatggcctagacaagccccagtttagggactttcacttcactgtggtctattcataaaggtgaacactccagccttaggactttttcttccatcacgcttgcctttaagcccctgaagctaaaaatccctttccctacaaatactatttaattatgaatatatttaaacaacacaaggtggatccctgggtcttaaaaccttaaccatagccttttgatcattacccctgagtaagtcacctcttaaaactgggtcatcctggatttggtttgtattctttctttcaaaaatgtagtaagtcactaaatgacattcttgtaagccaaaaatactccatcagccccacactgtgtacttacattttaggaatgacttctgccttctagcattatttattgctaaagtgtcatagctaagttggagtaaaatgttcaagtgcaataggattgttttttctctgtgtttgaagagtttgtgagattgggcaaagcacctaaagaaatgatcagttcatgctgcaagactcttaaatcaccttggaatgaatcatccacctccttcaattcttagtccaattgtgtaaggctcaaagctccagaaaggatctagaagatcatgcagaactctaagaagtctgttcaatcttaaacaatttgaatttcacacattattcattatttcatttaaatatatttcagggtatatttaaaacaccactctaatcaaaatttcttatttgcatatctctacttccaagtatccttcccatgttatttgttcacttggtcattattcaacaaatattattttaaattttaaattttaatttgtataaatgtatggggtaacagtgtaatttcattacatggatagattgtgtggtgatgaagtcagggcttttagggtatccatcaccagaagaatgtacattgtgcccattaagtaattcaccatcatccaccccactgcccttctgagtgtccattgtctatcattccacactttataaatatttttaagtgcatactatgcacaggtattgttctaggtcaactaaactgtatattgacatggcatgtggttttaaaatgcacatttgatcctttggggtaatggagagagataaaaaggcagcaagaagcacataaaacctcacttcagaggaggctgaagttcatccaatttgttggttaagagcctgctaggctaatgttcttttttgtttgtttttcttttttaaaaaataataaatttatctgatgtttatcattcaccccagagaggacttaaaaataatctgtatgagttactctactagcatcacctttaagagaaaacgtgccctgctaactgtggaatttccatgtcttcctgtccctaaacattacagcatttccagaactgaatgctgccctttctgccagagcatttaaattaaaatacttgtttgcatttattctgcctgcctataggctgagttaaaattttccacagttaatgccaatgcaagggtgattacttttttcagaaaaactttacccaaatctgtggaagcaaattcaacttcagagtgtaggaagagctgagggcccatctgagtactaaaaatcacttcagatggcaggacaggcccttcttgaaggcccagccccaccattgttaacagagttactatgagaccctctaagatggggaatcccctcccccaaacccagtgcccacactatgccatcctattgtcctgttaatctagcccctggagtatttttaacattttgaaatggaaaaatcaatagcatataatgtgcagcttaatgaattgttacaaaacattcacctgtctaaccttcactgaggtcaaaaattaaaatattgctagtaccctagacccccatgtcccttggctgtatttccctcctccatcccagtggtagacactgtcatgacttcacttcttcacttcccttttacagcagggtttctcaaccccagcactcttgacatttgggaaccaatcattctttatggtagaggctggacattgcagaatgttttgcatcatccccagcctctacccactacatgccagtattattccccctacgccaattgtggcaaccaaagatgactctagatattgcagatgtcccccagggagtggggaaaggcataatcacccctggttgaaatccactgccttttaggaagtcaggcatccataaatattagagcttagtgttgcctgtttcctaactttatgtaaacagattcataagtatgtttttattatagctgacttcttttgctcaacattccgtttctgaggttcatccatgtttgctgtatgtagctgttgtttgttcattccaattgctgtctagtactccattatatgtgtttattactatttatctttgtaactgttgatggacatttatgtccttttcaatcttggaccactgaaaaccacactgcttgaacatcattatacatatctccttgtgcatatgtgcatgcatttttatagggtccaaacccaggaatataattgctgggtcataggcatgcatatcttcaactttactagacaatgcctaacagttttccaaactgtattaattagaatctttatttacactattgtataaacagactgaacacagtttatatgaagactgaacacagtttagagttgtctcttttttaagtctttttcatggggctacaaagatgaaattaaggaaatcaaactccaggatcagaaaggagagctggagtagcagcttaaggccctccttggctgaaatcatgtgtctcctgtaagtgaaggacctaccagccctgctaaggccctggcattggcagtgataaggccgacttcacccacacgcacagacaggagcaatggatacactgaatgtgcttttgagggaggacatctcattaggcagaatttcagcaaagtgggggtaaaatctcagcctgataactgtaaacatatatgccatttcaggaattatcattttactctatagccataatttcttcccaccctcttaacccttccagggatatggagatagaagaaatctaaggaagaatgaaggttctcattcctttttccaggtaagtttaaggagacaacccccagcctgaagacagctgggctgaagaccagtgaaggaggaattcctgcagctggagctgcagtcacataggagagatggagaagagagaggagaacatcctggcacagcatagtaccattgtctttggcctcaaaccctagtacaaagaatatcataaagttatgcatcaattggagtcgagaatatgataatccgagaattcagggaaagaaaacaagtgaggaagggtgaggaaataaatgaccattacagtaggttctatttggtattattggtttatcttgttttttgccgttttgatattttcactgaagaatttctactccatgccacagagccagggagggtatccttaaaaagtgcctaaaaagagacatttctaatatatatgttctattcaagggtcattaggcaaaaaggagaggccgcaatttctccagctacgactttccaaataaccatttgggaattaagaaatgatttttcatttatatccataatctaatgttagtctattgccttcattcctctgatcataatctcctttcttctgcacagttgcacagtgtttcagttgtctaaagcctgcagaattcccatgacaacgccaacaccgcaggtgctagaattattgtttgaaatggtaacaattccactattcattaagcacctacatcacaggctcaactagatgctttgcaaacatctggatcctcagaacaactgggaaggaaagtatgactatcttaattttatttatgaggttaattaacctgttttgcatacctaataaatggtggagttgagatgtaaatggtagttgaccccaatctctttgcaggtcattccagtatgtttcaaggtggagattctttttgacaaatcaggcccattcattagattgctggtgtcccatccacacctcctaggccagtgattctcaacaggggaaattttgccactgaggagaaacttggcaatatctgaagctatctttggctgccacaactgcaggggaagggtgtcacttgcatccagtgggtggagaccagagatgctgctaaacatcctgcactgcacaggacggccttcacaacaaagaaagttctggtcccaaatgtctagagtgccaaggcggagaaatctttcacagacataaggaattcatcctttaataatttccacttagcagtacctctcacaccaacaacacattttctttcagtgaagtaggtcttgcaccacccaagaaaacaaagagaaagttctccagagcagaagagtagagctgagccctgggtctccacccatcgttgaagacccatacacaagtgggtctccacgcaacactgtgtgttgttaaaaggctaacagactgggtaaaaattggccatctgtgtgatcaaaactgaccactctggagttctttggagtgcttgactagtcacccccctaaaaaaaccacttttataacctcaagaaacccctggcttcagaggctcaggagtaggatgaatgatgacacctggcattactctggtgcctgcaggtttcaaagcaattttgcatatattggtttccctcccctccccccgccaactaatctatcttgtgataatgatagggagcagaacatataaggcaaatgttaagaattcgttgtcaggagtgtaataaaatgaggagaataaaacagaatgtccttctcctgccaagtcacttaaactgtctgtatcccattaatccagcaaatagagaggatgagccagggagttccagatcccccaggaatgcttggtacataaaggtcaagaaccaacagtttagcagggccttctttgccttgctgtgcagtaagaaccaaccgaagaaaactgctccaagcctaatttcttgattattttctttggggaccatgccttatgaaggtggttctcagccaggggcagatttgccccttagggtgcatttgacaatatctggaggcatatctggttgctgtaacttggagggagggggagatgctactggtatctactaggtagaggccagatatgctgctcaacttcctacaatgcacaggacagcctcccacacacaaggcaaagaatgatctggtcccaaatgtcaatagtaccaaggttaagaaaccctactttatggttaaaattgttatggtcaaaataattctaataaatcagaatctaagcatcagactgggacttttttcattatttcaactttagttgtcttccttcatgtccttgcacacagcacagatgaaaagatattacctggaaagataataagatttcttctccctttcagtggaatacagaacaagaggaagagggaccagaaggaaatggctagtcagtgtttttgaaggtatggtcttcaggaccatgggcatcagcatcacttgggtgggtttttaaaaatagattttgaggacctccccagagcctacttgcacaattccttgcagcaccacaccattgacatttttagtgagattctttggttgttatcccgtgcaacacagtttgaaagccactgatgtagtggtagtatgatgcagaaactgaaactcataaaggccgggtgatttgtccaacgtcatgcagatagcatgagacaaagtcagaagccatcctgagctctggatttaatgttaaaagaaggtggaaaatagtcctaagtgtatgactaacaagcaaggattagatccattcatagctacagaagaagaaatgaccataacatttggcccagttcagcacaacccagagcctgctaagtaacttgctacattttcctgtggttttgtcaagttttctccccattgtcttcatgactaagaataaaaagaatgctacacgtgatttcttttaaagctcttaagataattgatttccatccaattttatttttcagaagcacaaaattttttctcacattaacatgtcaagaaatgacaaatgtatacataaactacacaaatcattagtcctcttgattttccaaagggaaaacccatgcagagtctatcgaaaagccttcttacccagaaaataatttgttttctcttatcttagcaaaataaacttagccacttgttccctgttgttgatgggaaagtctgagatttggaacaaaagaaagctgttttgtacattataacagataatatgacaacctcaaagctatcagtttgcatttctgtaagtcccatttttgcagtggaatgattgaaagaacagaagatattcagtctttgaaagttgaaggaggacataaagatgatgaataatttgaggggatgtcatacataagaaagtcttgtccatatttcttcagaaagctggataagtaccaagtgtggaagttaaggagactcagattttgtctgaatataagaaagaactttctgtatctgacttagcaattctactcctaggtatatagccaagagaaatgaaaacatatgtccacaaaaacttgtatacatatgtttatggtagaattattcataatggccaaaaggtacaaacaaaccaaatttccatcaactgatgaatgaataaacaaaatatgatctatccatacaatgaaagattacttggccattaaaaggaatgaaatactgataaaacgtagatgaacctcgaaaattgtaagctaattgaaagaagtcagtcacaaaagaccacatattatattatttcatttatacaaaatgtcaagaataagcaaatccacagagtagatgtcgggttgcctaggactgcagagcttgggggttgaggagttgagggggggatagctaaagggtacagtgtttctttacagggtgatgaaaatgttctgaaatttatgttaatagtggttacccaactttgaatatgttaaagaccaaggaattgttcactttaaatgaatgacttgtatggcatgtgaattttacctccataaagtagaaggaaggaaataaggaaggaagaaagggagggagggagaaagggaaagaggaaggaaggactgactttataacaaatctagatggaaggcaacagtcccaggaggtggtagtatcttcttccctggccatatgtaagctgaacctagattaccatcagccagagaggctgcactatgtgggcagtctcactatacgcccttcaaactctaaaatgtaacagtcactgtttcaatattttatcctttttctgtttccctaactgcaacatgagtagtgcaaagctggcttctatcaattcattcagtccattctttcattcaatatttcattgctgacttaaggtaaagccttacgatatttctctgtcttaataatatatgtgcttgttgctttaggtagagttcctcagaagcagatactaagataaagactgatgtgcaattgatttattaagaacctgttcccaggagaaactggtaaggggtgagcataacagggtagggaagggaataaagccaagtaagggtgtgatttctagcaaagtcccagtctcagtctggtcctgagggaagctctggggtattaattacatctaaactttgtcccgccttcgccaaagaatttggactttaatattttcacacacatcagtcagtcatgggctgtgggacgccccgcccccagggtgatgtaaactcccaggcacttcctgctctttgtgaatatagggcaactgctccagaaccccacagagtgctcacagatgttggtcattagaagcaaaactacacagaagctggtgaatgggacaggcacacagaactggtaaaagatctgagatattccgggcagagcacagacagagtccactgtgctttttggttgaatacatgttaagctctaaaggctatgtatgaccttgttcctacgtccagaggtcttgaacagggtagaagcttgcaacctccagatttccacctgggtgaggtatgagtcggtcttttcgtactcctccttactgataaatgctttgactgacatctttgcctacattcgatctgtttcatttcatacaccgaaaatcttctgaaatgggtaatctgcccacaagcaccacagggaattcctcaacagctttagcatccgtaatattactccaaaatagcattgctgttctgcctcttactttaaggttgggcagatgccaaaagctgcaaacccatggaaccatccatgaccgggtacacttaccagatttgtttccttctcttaaattaacacaaataggcctacgatgctaattccggagccacgttcaaatttcactgtttcatcaatcatttcgtgagctcattagttgattaacacttttttggtggtgattaaattagtgtacatgcacactcatgtgatcgtgtaatcacttaaaacacagccaggcacatagaagctctgtatcaatgtttgctattattacacaagtacagagcttctctcaggttgtatgatgggatctttgtcctcaaaatcattcttcctgccaaagggcttacaacagtttttctgacctatttcaattaaaaagaaattgtttctatcttgcctttacttctactacttcttactagcactttcttctttcaagtcctctgaggttatcacataagatggggttcctggcaaaattcctcaacacctagcagaaagacagcaaatattccatagactgaaaaatgagaaattctttttaaaaagggcagaaaataaaagaggtcccagaacctcttgacgcatattttggtggtgaagagagagccagagggctttgctccagagtatggttttgtttgtatctctgaaagtgcacgagttgaaattccataaatagaggagcttctgtaccactttctattgctaatattttcttttcctctgacgtctgtcctcagcatttcagttcatggtgagtgcttaataaatgcatgatgacaacagatgttagaaagtgttacgagagcacagagcattctagaaaaacctaggaaaacaccagtgggggaaaacatcattatttaataaatttatgaaaactttaaaaggaaagcatgttgcttttcaaccaaggactttctaacagaacaaacctgtggggagataattgtctcagatctagcacagggtgagtaaaattgtttttacatttttaagtggttggaaaaaattaaaggaataacattttatgaaatgaaaattacatgaaatacaaatttcaacatccataaataaagtcttcttggaacatagtcacacccattcgtttacttacttgtctatgactgctttctcactacaccagcagaggtgagcagttgccagagaccaactgcatgttcactaaacctaaaatatctggccttttgcagaaaatgttcacccacccctgatttagaaaactaaaattgcaatttgtttcctttgaatctttttctacttttggctttcatcttttccctcctggagttttataagcccaaaagaaaaaaaaattatcttccatatattcatctctattaacatagtgattattttgtttcatttatagtctggaaacaggcaacttaccaaagagaaaccagactgcttagatcaagaggacttccaaattggatgctactgctttatgtatctgagcttttaaagacacatttgtattatttctagaagccttaggtaaatgtatttgggattcattttgtctgtagaaagcacctgcagccccatttcttctagaacaatataaattgtaactaaaaacaatgttcccttgttgcatttgtatttactattctcaaaccatttgacaaagtatttccctctcactaattagtgtttcctaagtgttattggaagccactcgcttgccttgcaagtttaatcctacatttggacacatgcttgttaattggtttccctccaaagttgaatggggcttgcacccatctgtcctggattcaattacaccaaatgccacatgctctgagatcagaaaagcaaaggattctaaaacatccatgtctatatttggcccttgacatcctattattcttccttgtcttaaaaaccctaggccactcacaggaagtgaactcgaattgttatttttatggcataaacttttcaacaggctgtaacttctatgtcacgtcatactatatagataaatatgtgtgtacataaaatttttaaaaatccaacccattgttttgcacttactacagtacacatagcatcctctccacactttgaacattccaaaatgcagccatccttctactcaatttcttgccagaggagatgcccactgaaattctaggtcacacattgaatgtgattcctttgttttcaaggagaaatttccctccacctataatgctctacttcctctgtcacctcccttccatttctcctttgcctgtgtaactcccattagcctctctggattttctggagggacattccccgattcacctcaccaccctccaataggagctttgctagcttcctgttcgtacctctgttaggatgctcatcttgtctgtttcctcctgaaacacttgtctcctcaaagacagggctgccatactcattttttaaccccagagcctggtcccatatacaataaccacttgagtaatatttgttgaatgctgttactaaatacaatttcaggagatgagaacaatcagcatcagtggttacagcaccagcaaatcaagaaacagtctcatcaggaatcaattacaatggcaatgactgctgcctggaggaacctggtgatttatataacataatcattcatcgggcccagatttgattgccatgcccaagtgctgaatgctgcagatggctcaccattctcattaggacactgtgatgtagtatttcaaaagcaaaacttttcagaatcataattccgacccttaggaaagaacaaaccatatctccagaaaaggacagtccacaggaaatcaaagggatgctctccaatctcagggctgccatttttggttacagaataaatatatcaaaggccctcctacgaaggaattcagtatgaccaagaggtaaatgcgactcccagagcaggggtgcttcccaagaacacattagtctatgtagagtttaggaggcagaactctctaatttggtttctcaccaaaacaagtgcaatctactcaaaaccctttaaaaaggctgtgctttgataattgggtcttgtctttgcatactctcccctgatcaactctgttatcagtgagatctatctccttgatgtttccacactgaagggacatcacggggcagaataatttgcttttcctaagacaagactctccaaacgttttggttcacaaagtgagaagcccaactagcagccaaccacaggagcctggcaaggacacacttgttccaatgcccctagtcccccaactcaactgtcctcctgggactgccaagtaaaaaagagaaggaacagggaagttatttccctaaggagccccttgggaagcagcggtaacccaagcacaggggccatgccactttgctttctactgtcagattttaattttcacaaaatcgagagtcatgagattttctgtgttttctcctaaactaatatttggatttctttttaaaaaatgatccttttaggtgctacacgagacctgggaggctgcattgagatcacctaaatcttctaagattcttgtacacagctccaattccttctcatcacttgccaggttttttttttttcctttggaggatggtaacttaaaaaaaaatctcatgaatttctacacatatgtatttgaaatatatatacacacatatacgtaacatatacacatatacagtctaagaaacataaaatgatatttttaaatgaaagattctggataattatgaaacaataactagtacatcttatgtatataactattggattgaatatctagctttacagttatttaaatttcatttacagcagtgtctttaaaaaattgtcatcaattgccctaattcttggattattacatcccttctattcatttttagcatttaatatttttctttcctttataactccccaccggcatcaatgagaggggacaaatttaactgaatatgtcagccaaaaaatatgggtgatttttaaaaaagacctggctgtttcttctgaccctcttcttaaaaaaaaaaaaaactgcctcaattcttcctttgggagtaataatatttgactccttttgtaaaatctaaaattgattttttttagaagtatacacattttattcagcttcccacataagactgggcagccagtcaaaattcaggagcacaactgaggcagacaacactttgcatacaaacagctcccccagtctccagcacttctttacaatttcacgaagttaagactaaacagaaacgggggaaaaaatccttccaaattgccttcttagggtccataaattccacattcagcttctttgcatcctttgctctctcctttggcaagaaagcccaggagcacgcagtctgctcagtgggttaatccactgcagtttagacacaacctttttatttttgccatggggtgtgtggagctgagaccacctagtcagtcacactgtcagggtagacgtagtcaaatgcaaaaatctgaaaacagaaaatttattccatttgtgaataagactagaatccaaagggccagggctaattatgtggttgtttcatgagggacatgtcataggcatcattttcaatagaaaactggctgagagcaatgctgatacatttctatcattaaagagatgtgcattcttttttctgtttttgaaactctttattgaaatacaatatataagcagaaaaattctgaactcataagtgtacaactctgcattttgccaaagtgaaccccctgtataacgaccacccaaatcatgaagagtcctctcctgatctctacccctaaaaggaaccatattctgacttcaaacaccattgatctgtttgcctgtttctgaactttaaggccacagaatcagtcttttttgtctggtttctcttgtcaatattatatgttgtagcaggtagcgagactcctcttcatcgctaaaagtattccatcatatgaataaaacacagttttcccttttctattgttgatagacattttggttgttaccaactttggattattaataaatagtgccaacgtgaacattctggtccatcccttttggtgaatatacgtaggcatttctgttgggcgtatacctgagagtggaatggctccatcacagagggggacatatgttctactttagtagacactgcccaacagcttctcaaagtctttataccaacccacagtgccaccagcaatgtacaagagttccagttgtcccatattaatgcaatgcttgatattgtcagctctctctttatttcttgattatagccattctgatgggaaagcagtgccatcccactgtggtttaaattaacatttcctaccaggtgcggtggctcacgcctgtaatcccagtactttgggaggccgaagtgggtggatcacgaggtcaggagatcgagaccatcctggctaacatggtgaaacctcatctctactaaaaatacaaaaaattagccggtcatggtggcaggcacctgcagtctcagctactcgggaggctgaggcaggagaatggcatgaacctgggaggcagaacttgcagtgagctgagattgtgccaccgcactccagcctgggtgacagagcgagactccgtctcaaacaaaacaaaacaaaaaagaaaaccaaaaaaaaaaaaatatttcctggtgactaatgagttggaacacctgttcatgtgcttattggtctttggatatcctctttgtaaagtgtctgttcatgtcttctgcccatttttttcattgagttatctgtttagaacagaggttggcaacatttccctataaagggccagagagaccacattttagacttcggaggtcatatatacagtctgtgtcacaactattctgtttgacagcacaaaagcagccacagaccatatgtaaatgaaggggtgtggttgtgtcccaataaaactttatttaccaaaacagtcagcgggctgaatttagtccacaggcagcgaatgttgaccactggtttagaagatttgtgtggttttgacttttaaacattagcaaaagttgggctatataccagagcttgctaattgtctacccaatatccattctcctgtcattcattggtaagataatactgaaggaggtggtaaaaatacctggctgaaaaaactatcgatattggagagcaagtgttaggttgagggcttcagtaattttgggaagctgtctcagcaaggatgcccttttgagctcccctcttccttattctttctgtctgatacatgggcatgatggctggaaatatagcattcatcttgtgagcatgagacaaccttttgaatggtgtggtcccacatgattatcttaccttcattactagccaaacatcttgtcttcacatttccaggtgagagaccgattctgattacagggtcaagggcatattactacctggagacttttgcatacttattttagcaaaggtacacaccagagaaccacacaatgcaaatgtccactcgaggctttaacaagcactcttgtctacatgtgacaggatttaataagggggaacaatcttttttcccctatctttaacaccaaaggaatgactgctttcaaaccacttcgggcttcttcaactctcttgtttcatagcccagcctgttctaaaatcattctcttctgtctgaagcattgcaaagcacttttccaagcaggaagcctgagcccagcaatactgtgattgtaaaagcaaatatgaaagccattataaactcagcagtaactccctacttagaactttagaatttatttttattgagaagaacattcttttaaaagcactgttcttttccttgttgtctgagctcactttgcctacttggacaaaaactgaagctgttaagagttaaggctgaagacttgaatatgtggtccatatgggcatgaaatagttgaattcccaggctcttaaaataggacaggaaggcatcaaaaacctctgcaaggtaaaagttttctgacattgtaagaactcttaaaactcttccccattttccaagaccacatgggggccagataattttcactcttactgtgtcacttttcaaggtggtgctacttaataattacatccagatgacagacaaaaactggattatcctaggcaaacctagatgtgtggacatcctacacacattgccccttccctccaagactcaatgcaaagttgagatcaaatatgtcaagagaagcctagggcagcagcatgcagatgtagccaatgctttttagaatatcagttcaatgatatcaaatctggaactttgcaacatcttattagggcagtggtttcaaccagggtgattctgcctcccagaggacattgggcaatgtgtggggacattttggttgtcgtgacgagggtcaggggttgggcactactggcatctagtgggtagatgccaaggatgctgttaaacatcctacagtgcacaggatggcctgtcacatgtggcccaaatatcaacagtgctgaggttgagaaactctgaattaaagccagcagaagctagagaaatagataggatgggccatgcacattccaaagcacatcagcatgaaccttatgccctgtggttggttcagaagaaagacccagtctcacaggttgagtaaagttaacttcccatcacaccacagtcagagttccccagttgcttcaagcagagggtacagaagttagtgtcagactgttgttattatatatgttcaaattacatttctcaataaactaacttattgaaaagtaatttattacatctgagaggttaattattgttaatgatttgtttgggcttttgttctacaacctgaattaaaggatcccttcaggtattattccttgaaatcacctcaactgaccactgtgatgagaatttccatgtccagagtgagaaaggcagatcatgacttctggtatctttttttaagaatggagcctgaataagttccatcttatctgggcatgttccaagtgaaaaattcagtaattgggctttagaaagaaaagaaattgataaccagccatgatactcagtattcattttccaatatggaccaacatggatgtaaggaactgtgttttttctccttaattgcttttcactccttcttttgatgccctcctcagataaattctccatgtgactcacactgaaaagaaaaaaaaatgagaaattctcttgtagccagaagagttgttggcagaaagctgacattccgttccttttctgtcctaccaacgtgcacacatttaattccaaagaatgactgatgaaaaaaaattaaaaaaacctctgggccctgactgaaacatcaaaccacctcagagggtggcaaccttaataataaatatttaataggccttagttgcaaatatgtaaatactttacagagacaatgaaaccacataacttcgattgacattttgaggaatatctattttatttgtagggaagtatatctcacttcagcctatcttctaaatcataagaacgacattgagtctcacatcttgtcagagattttttttggccaggccatattttactattaaaaaaagtgcttattaatgaggagtctctaaatgctaggaacagatttgcaatctaatgttagttttcccagaagacactgaatttccataaggaaatagtttagaataccgtcattggtctagtcaacattgaattacaccatttcacttgtgcctatggattacatggttgaaggaaatgacactgtagcgtcagacacgcactttctccaagatgagggaggaggtacttgagtcttcaagggagtaagttaagatgacaagcctgatgactgtctacatcagaatatcgtgacctattagttttccacaaacccatctgtagttagaaccttccatgtgtcatcatttacaagttacttcatttctatagcaccataacaaactatgatttaaatggttttattgaagccaaaactgaaaagtcaaatcaattaaaatatgaacttggaaaccttcccacaaaaataatccactagagtcctttattatcttagatcaggggtcaacaaactacagctctcagaccaaatccagcccactgcctatttttgtaaataaagttttattggaacacagccacaactcattcatgtattgtatgtttgctttaaggttacaaaagcagagttgagtagttgtggcagagattgtctagtctgcaaagctgaaaatatttactctcggctttttacaggaacagtttgctggcccctgccttagattcctgggtctcttccaagtgaatacttttacacaggggtacttgtatacataattaataatcttcaagaaagaatgttatctacagacttagcaataaaacatgcaaacagtcacaaagcaagaacacatggttctagcaagaaaggtgtttctaagggatgctggctccacaaatttttcacttaaggcattgcaattttcataaataattgtcaattaatataaagaatttggttgacatgtatatttattgatgcaagggtgggtgttttaaaataacagatataataataacccgttctatagaagacagctgtgttaaaacacttgcagtcaccattggacagcctttatgttaaggaagttgggaataaccaaggcagacttctagaacaaaggagtacaagaagactaaacaaatacttctccacacttatgctttccacctcaattggaacagctttcgcctcaaagcatattcagccactctctgtcatgcatccactataattgtaccacttggaaatcttaacctcaaatattccagtctttgagcacagcctccaatccttcctccttacttgattttcttctggatcatcagtccctcttgacttttgtgccttccttatccagcctggattccaaagtcagctgcagaaacccttcttgcccttccgttgtctcagaccataccaccataccctccttcctcaagttggatggtaagtacactggggcaaaatgagtgcacaaatatgcagactagacacagatccacaattcttatcccagatggggttcagagcactggttggccatcagtccattgcattccttcctcttccaggacttgcagcttttagcctgtactcactccacttcttttctcaagcccctgcatgaactggcaccacttaaagttacctcttctctcacagagaaccagcacgatttctgggaactattcctccatcccttaaaatatgctgctgtatagttgtgatataattggtctgggggtgggcctggacattgggattctgaaaggccccatagatgatgcactcagggctgggaaccactggcctagtctttaattcctcccaaatgagtgcgttcatcttagctctttctctgagctcctaccaaaaagctccctggacacccctgcatgtacattccacaggcatctcaaatttatcatgtgaaataccaaacattatccacacttctctcctaccataaagtatgtttcattgaaatgtctcaccttcatccaattttctaagccaggggccagtgatgcctccagggttttatatgcagcaatacagtttggtgcgggaggctgggagtaagttttgttgacttggtttctatacttctctggggcagctgggaacaagatgttgtgaaagctatgagaagcgtattcttcactagccttcctttgtcactgccagctgagacaccacctttggcccctaacccaacaagccaccaaggctagtgggccccatgtcagaattctctcttgaatctatacgttttatttcctttgtgtcctcaccaccaatggtttattcattggtctccctggctttggcctgccatccccaccttcgcaagccccaatccatatagcttactctccactgccaaaactgtctttctcaagtgccagttcaattacatctgattagcaacagaaatctgacatccaggcagccattgtgtgttgtttgggagtccctggaagacctcacattggtttgtgctcccaggaatgcatcccagcttttctctcccgcctgggcacattctcactaggcttctaggctcgagctctaaagtcacacctccactagtggagcctcctctacacccacaggccaatgcacccctacctctttgggctacgctgcccctgtacatgccttctcttggattaaaagtcatcatttattttctacatgtgccttctttcccttaccaagttcccctgaaagcatgagccacaacttcctgatttttagatctgcatccttcagcacaggggctggcacactgctggagatgtgctaacaaagccttagtagatggatgcatcaaggtccagggatttggaaggattcctggatgatttgtagctgactggcatcagtgatcataggcgccttaggcaaaactgggagtaaacatacgtggactgacatgtcagaaacatcttggctaggaagaaaaatgtcaggctgtgaagctccacaatgctgctggggaacactctaagacacacaggtatgatatcctttccctgtgacaggtgagatattcaccctgacagaaatggctgatgagtgggcacattccacgaccatggacactcacagttgtcaccagaacagcccctagataccaacaacaaggcagtttgttcttgctcctttaagggagagcttcccagaaaaataagaagtaagctgacaggtcgttgatatttgcatagagcgtgataagtgatttatgcttgaaatcccctttgtagaacaaataataagtgtgtgtgtgtgtgtgtgtgtgtgtgtgtgtgtgtgtgttcttttgctatctattgtatgtttgatcccaggttgatgaaagggtgatagctgaaatcctataaaaaaacagcttgttgggcttgcagccccgtcaacatatggtgttcaaactaaatacaacaaacgtgtcatttcaacgtgctcagctacctacgtgaaattctaaacaagtaatacaatatgaggagaagagaaatgtttttctggaactgagcacctgagcctgctgggcttctgagtcatgctagtgtgagatgagcccttcactgcagggctctggtgagcctgccctttgtaatgcacgttcttccaaggctgaacatctccgacatcctctaagaagtcacagaaaactcaccccgaagaaatccgttttacagcatcagattcatacactggttctgctagtacttcctgaatgccagccattccaaaagatgaaaatcatggtccaaagcagggtttctaatcttcagcactatgaaccggtgtgggcagataactccatgtggtgctagctgtcttgtgcattgaagaacatttagcagtaccctgggcctctgtccactaaatgtcatttgcacacctccctccattgttgtgacaatcaaaatgtctccaggcattatcaaatgtcccctgggtggcaaaatcctcccccatttccccaccgctgacctccgttgcaaaccactggtccaaaggatggcatcttgctggagaattaccaagagggctgttaatatgagtgcaggtgagagaccccagcattcccattcgtggatctggctgtgcagcatagcttgcccagggatgcttagcctccctgtaacctgcacacattggaagtgttcataaagccaatgtcacatggatcctcagggaagagttatcacaatagctgccccttacaagaattcattccaatacccttaacagttgcaggaataaaatgcagctgttagacgcaggggcaaacaccaagatgtggcttttctttctctctcctttatttttcataattacccaaagagaaactgttatcaccatggcctataatggaactaaaacgcaggagaaccacttgttaccatagcaacaaagccggagtatattttctgtaccccttgagttcacagtgcagctttctggtgccatctgacttgatttgctaattgctttcacagaacaatcagtccactcaagcattacagttcaagaagtaaaaccttagttacaactgatgataaatattcaaacgtggttcctcaagttgaaagagggtttatatgaaagcgaatctagcaatacaagtaacagttctgaagaacaacattctggagactcacaacccccactcatctatactttcagctttgcttttgctgctcactctgtctacagtaccttctgcaccccgcacaggtgtcactcccctgctccccagagtaagacaatgccctttctccatgatgcatagcaccttggtaacaatctgccccactgtaataccactcctttacatgtttgaaattactgctagactggaaactccttgaaggtagagatgatgtcttccctggcatttaataagggtttaataaatgtctgttgaattgaaatgactctttatgtttgacacttaagatgaaaatcaacagataacaaaagaaactcatgcaaaaattaggaaaacaagaaaaaccacaattacgtatcaacccctgaccccagacttctggcaggagatataatattagtatggatgcaatctgaaatcctaaatattccatcaatgggttcagagtaaccacattgttcattcattcattaaatcattcaaggaatatctattagatgtctattatggactaggtacatgataaatgagaataataatttttttaatttatttttttgagactgagtctcaccctgtcgcccagtatggagtgcagtggcacgatctcggcttactgcaagctccgcctcccaggttcaagtgattctcctgcctcagcctcctgagtagctgagattacaggcatgcaccatcatgcccagctactttttgtatttttagtagagacggggtttcaccatgttggccaggctggtctcaaactcctgacctcaggtgatccgcccacctcagcctcccaaagttctaggattacaggcatgagccaccgcaccaggccatgttttatatttctacaatgttttacagtccatgtaacagtttcatccacagaacctaatcagaggaatatccggaaacacattgagtggttgcatttcctaagatcatacaaaagtgagaaatctggctcttctgaccgatgctatgcttactgttctttttacaaaaacttccattcagaatgatacctctgaagaattgcatgcttctcaacaagcaaataattgaatttttcaaccttcaaaacttcaatattctgctcacataccatgacagctaatgaattttactctacagagattttttcatagaagcaggcatttgcacacaagaatctctctgtgtgactggtcccctgggctttgtccaagggcagaaagctcacttagttattaagataaatagcaaagggaagccaaacagaagctaaatgaattctacaatttttctcagtcttgcagagttgtggaaagtcaagttttccaaatctactcctcactaatatatgctgcaagactgacttagaggcatccttacatgggcatttattaaaagcatttattaaaggcatttattaaaagcccctattcaaaataaggaaacactagtgtagatttggaaaacccagaaataattagctacactttgtcaactcagaacttagaagtggtcaagctaaaatttgatttgggatttattacatttattttctgcagttttatgtggaattggctctctctctctctatatatatacataatatatatatatgctatatatatacataatatatatacataatatatatatagtatatatagcatatatatactatatatatacataatatatatatatagtatatatatagcatatatatatataattcttaggaatgttcctaaatactcccttctccagaatgttaaagatcttctggcttgtccagcttcagcatgtacctgccctggcctccaacggggacccttgcaaaacttgtacttgagatttttgagcacttgaaagaggtacaaatctggttatagtgtttaaggatggtgatgggagaggaaagaagacattgtaagcaatatttctgggtattaaatatttagttgtttccaagaagttcaagtaaatgacttgttttaaaattacttctggttgtaccaatagtattctcttgactcttctaaaactaagccacacatgagttacatgatacatccccagccctctgaaggtatattgttgctcagcaaggttcgtaaaaaagcctatcaatccacttgcttttgttttgtttagtatttccaaaagaagagtaagcaaagtagcctgcaaacatacatgtcaactctcagtcttggtaatgataacattttaagatgcattaataatgtatcttcctgagaaatctcttgtggttttgcacttcagctgttttctcatcttctttccttggctttgtctcatgctgtcccagaaaccaaaaaaagctgtttcttttttgagatggagtctcgctctgttgcccaggctggagtgcagtggcacgatctcggctcactgcaagctccacctcccgggttcatgccattctcttgccttagcttcccgagtagctgggactataggctcctgccaccacgcacggctaatttttttttttttttttttttttgtatttttagtagagacagggtttcaccgtgttagccgggatggtctcgatctcctgacctcatgacacgcccgcctcggcctcccaaagtgctgggattacaggcgggagccagggcacccagccaaaagctgtttcttaaaggatcatttcaaacattagtgggtttgcatggaaccttccacgatgaagctccttttctataaaatcacactctaaaatataagctctaaaatactttccttgaagcattcagagtaaagaaaaagagaaaggacacctaattttaagccccttaaataaaactgagggtgtctttgttaaagaaaataattacctgaataaaagagatttcttttttcttaaggaaggtttccaacaatctggcacttgaattcattggagtattttgtatagtaagtttccatatggagttgtattggcaagaatcaaggagtgtggttttcaggtcttggaggtgattaggtttatatcatttcatttactgattggacagccagtctagctctgcctcatgtgagtgacaaccagaagtcctgcttgaaaatccgtaattcccacttccatatgaaacaaatggttcaacaagggaatttaagaggttcttggtgtgcactgggcattttagatagcatttgggatgagacggatctcatgtcataggacatgtatggtgtaaaatatttgttattcagtatatacacctcaatccagtttggtttcataattggaatcactgcagactatgaaccaatattgaactacctgggaataggagctgtttggctttataacaaaacatatttttttcaagcacaacttggggagatgccagatctttattataaacatggaaaccaacacttaattgctcttgagttttcctagactctatttccttattatccaatgggtagattccaatatatctacttgacattggagagaaaacatattctccaaggcagtggaagaaattcctatatttactaaatggaaattcctctatttgctttccaggcctcttttgaaaataaccacaggaagaaatgggatatactcttactgaatccaaactctaaagtacttttgcagattttgcagagtgaagacaaaagaagaaatggtgaccttctttttgcaataatggttctgatgacataaacatagactctttggtgacatctttgtcattctacaaagcattatgagaggcagaatagttactgatactagttcctaccacttatgaggccaccattacaactgcagtagctggatcttgccacagttgtgtaattgcagccaaggacttcattacttcagtagcattgggacaaaactgaaatatttacttttatagacataccaataatattaaaccttgcaaacgggaaaaaataaaaaggagtctgtaagtccctatggccaataaatcaagacttagccaattcatgatattttgatgttcacatggtaagtgaaattattttcctcttttccatctacccccactatccgtggcttctctccaattgtagttttcatctccttttcaaggtgagtgattttaggaggcacagtgttggattgaaataagatgacatgagactagattcttctacctcaataacttggtacctggtacctatggcaggtcacttaaaatcttttgatctattttctcacttctataatggagatgataatacttgctctgggaaaatcagatggcataatgtatgtgaaagtgttttaaaatttctaacctgttgttataatctgcagatgatataacttcctgcatagataactcaagagaatccacagataaattattagaattaacaagagttcagtaaggtggctgcaataatttcaatatacaaaagcaaagtgcatttctataaactttcagccagcagttgtaaactgtaatattaaaaactgtgccatttataattgcaaaataatatataatataccatacaaaatcaaaatatgcaatattttatgtagaaaattacacattttaactatcgtaagccactaaagaagcctgaagtaaaatgagagaaataacatgttcatgaatatgaagacaaaatatcaataatgatgttaattcttccccattttttacagattttttacaatttcaatcaaaatccaaactaattattttcctttgaagttgctaaggaaagggtccaagtgtccaagattttcttcgaggaaaacaaaaaacaggtagagagacctgccctgcccaatgtcattaaaagaatgtgacaagggtgaaagaacaaagaaaactttgaaatgggacagaatttagctacagatccagatcatattggtgaaattgtgatatatgacagacctggcctcatagaataaagaacttcaattacccaacttaaccagtggcaaggggtggaggtggggcaagcccactgatgcctccttgggcccagcagaagacaacccttctctgcataccacagtacgtgagagaactccttgaaaatggaaacaacatgaaacctccattacaaaagacaatcctagcaattttctaatgtgttcaacataattaattcagaaaagaataattacaatgttcactaatcagtgaatctattctattccaaatattacaaaatagaaaacgtgtcttgccttgaaaaaatgaaatatatagtgagtattcaataggcaatatacttctacacactcataggttttgcccctaatattatttttatccttaaaagagggctggtctacttagaggaacacaatgcttaggtctgaggctcaatcaaacatgcaggacataacagagattttgtactatcctgttaatactgctatcaatagagcgaagcatagcatttggtagtcacagctggaaccctgtgcatatcccctagatccaccatggaggtccccaaaaactgtgataggtctgaaattttactctactttcaagcgaatgagtcattctgccagtttcatggatgctgttagaagacatgagacacctgagtccaagatcaaggacaatatattattcacaacaatagtaatagccagagcatcaccatttgctccagtccctccaagccccagtccctacaaggtgacttatgggagtcaggtgacacctgctcacataatggactgcattacaggacatcatctctgagcttagagaaccgaaatcttttgtgatggatggtaagtttgcctaacctttgtccctaaggaagacattctcttccttagggacagaaaacaaacctgcccttctctctagagggagacatgacctctatccctcttgagactgttcactaaacaaatatttttgaaaagatattccaaaagtgtgagtgcctctgttcacaagatgttagaaatgccagcgacacatggagaactgcctttcaatagaggtcagctgcagacagctcccctaaattcaaactgctccagggcgatctccggcaatggaagtctactaggtcacctgcactggtcaggctggaagtgcaggggaggtaagggcccagaaaaggttacagatgatggcataatacccctgcatcatcacccctcactgggacatttctgaattgtgttctacacaggccctcagctgcatttagccccactttcccacagcagtaaccaactcattaacatagcttctattagctttcctcctttccttgtcttccttactttctcactgtgttcctgcagttacctcccaaataaactacctgaactcaattcctggtcccagggtctagttctggaaaatccataccaagacagatagagcaaagaaataaacccacatcagttagtgtccataactgacatctttactttgtgatgtgtagacacagcctaaaaaaatggaagggagtcatactttaaagatctttcctgtattaagatggtccctgattcagagttatatgatggtccaaatcttcattattctgcagtcttagctgtattaaagcaagataatcctaaatttgatgcagctgaacctcctgccatagattcaatagatttactgaagactttagtaaggctgcgggccagggaatgagctcatccttcaaaaatatgcctcggcctcttgccactccagtactttcaaaagcagcagggcaggaataaggaattggcttggcataagccagtggatccaaaatccagtgcatgtaaacacacaaattgcttgtgggttactagagctgggcaacaatgtctgactcgtcacatccaccctagggttcctccaagctcctccatatggtatactacagccaaaaagagtatgtcttggagtagcaccaactaaactgtgtatattgtgacaagctacatctctccaagatttattttcttcatttatcaaaaggtagtgataatatctacatctcatggttttgttttaagagttatatgtgataatataaataaagcttaggccacaggttccaatttcttttatttagcatgtatttcctgagcgctgatcatgtgctaggcattgttctaagagcctggggtacatcagcaaacaaaacaggcagagatttctgtcctcatggagcttacattctaataaggagagatagtaataaaaagtaaatataatatataagtaaattatttaggatgttaatggtgataaattctaaggagaagtaaaaactatagcagggtagggaaacatcaggaaagaggaggtgggatggggtggggtgaggaagcttgcagtattagataatgtggtcagggtaggcttcaatcagagtttgagattagagaaaatattcaaagaagaggagggagttggagtacttatatctgggggaagagtgctccaggaaaagacataaatatattttaatgaacattaacttctactagccatctttatagtggctttttaattgaactgaacaatattgacaataacaataaaaaacacggtaaacatttatttagtgctcatgatgtgccaagaactacttaggcttctcatctatcaactacatcgattctcataggaattcttcgagatatgactatctttcagagaagcactatcttattttttagataaaactgaagcaggcagaaattagtaaattgcttaaggtcacacagcaagaaagtagggaaaggaagatccaaacaacacattctgactcaagtattgagtgccaaaccactgtaccatactgcctttatttaattaaaaggacagttaaagggggctggaaaggctacctggtgggagttggggttgtagagaaatatctggactatcaaggggcatcagatatatttttggggtgatggaaatgtttagctattgttttgtggtggtcgtttcacaacaattatcaaaattcatccatttgtacacttgaaatggatgcagtttattaaactattgctcaataaaatgaactttgaaaaggggttctggaaagattagcttgcatatactgaaatcaccagtttcattcaccccaattaccctacagaacatctgtctttaattactcaagtttctaattcatgggccaagtgtgagttctgtattttgtcttaactcccttacttttccttgaggtgtgacttacatggtctatttaatatgtgaccattcacagacttcagccctaggttgtgcatttaatagtgagtagccaatgaattagtgttaaaaaaaaagtgttatagttgatccttgttcactgcttttgataggcagaattaaaagatggcctgcaagattcccatcccctggtatatacacctggtataaccccttcccatgtgagtgtaggcaggacctgggaatatgatggaacagtctgccccttgattaggttaccttctgtggcaaaggtgatgggatgttgctcctatgattatattacagtgtgtaagactccatagtagcctacaggagagagatgctcctgctggcctttgagaagtaagttgccagattgtgagagggcctgtgagatggtcacatggcaaggaacttcaaggggactctaggagcacagtgcaacccctggctgacagctggcaagaaaagggtatcttatttctgcaatggtaagaagctagattttgccatcaacatgagcttggaagaggatcctgagctgaagatgagacagcagccctggctgatacgttcacttagggtcataggacccttgtatgaccctgtatgatcctgagtgcaggatccagttaggtgttcctggcctcctgacccacagaaactgtgggataatgtatgtgtgctattttaagccactaggtggtactctcttatgcagccaaaacaattgaatatactgctccttaaaaagatccagtcattcatttaacatttattgagatcctgctgtgtgtaccactccagaatagcttcctcaggctggaattttccaccgtacttcccttggttggacctaattatatttaagtgcctcctcctgcattgtttgtgcagtttaccacagtcctaggagctagactacctgggttcaaatcccagttctactgtttactagctgtgtgactacaggtagattattacttctgtgtgcctgtttcctcatttgtaaagtgagaataataatggtgtctactccactcaaatgagcttatttattagtcaggtaaggttatgctggggtaacaaattaaccatggagcctcactggcttaatgcaatggaaacatatttttcagtgatgctgtgggttttcgggggctctacttcttgtagttactaatggactccagctgagcgagggtcctccaaactgagatgccaccatcttaacagattgcttagacagagctggagggtcatttactttcttggccagaaagtaatacatgctacttccattcacagtccatgctgcaaaaccagtcaagtgatctcacgtaactcaagctggttgggaagagacaaacaaagaaggagcccaccctgtggaaatcttttcatatacagagaagagccagtatacaggctgtggggaaggaattactgacatgttcacgaaagagtaagaagctcagtgtgacagttgtgtggtgactaaggacaagagttatagaagaaatcattggagagatagggaggggcaagatcacacagagtgagcaaaagcaagagagtgagagagacagaaagtgctgtctgggtcacctcttagactcgtagccacacaaaggggggagctatctgtgtttgtcacttctatcccccaagtgcctaacacacttgctggacactcagtagaacctcagacactttgtttactgaatgaatacatgaatgaggtggtggggttgacatacttgtctctctgaatttcattccccgggcctctctccaaggtacggactgcttcttgaccatcacaacgaagctttggaaacatatttcagggatgatgaagcaaacattatcttgtgtacaagacagttcagcagaacattatcaaggaaaccacattcctatcttgtaggctaaggatggagctgaaagatgtgactggactttagacttcctgcaggcagcaactcttccccactgcagcctctgctggctgagaaacaggggcctctctcaagaagaagcatatcagatctgaccagagactggccagaaagaacaccctgcagactgcctgaagcccagggctaggagggaggctgaaggagggacaatagcatctctggaagtcaaaatattttcttttacccagctgccaacttgcagagaaggaaattaaagcaaggctgctttcctaatttagagcgaggatattttccatatttttgtagagatattttatttatgagacacaaaaggaaccaggggatacagatagtaagagtgtctactggccttttaatgcacggtaggctgcacatttccttcttgtgctttagaaataggttcaataaaagaaagtccaacttgtgaaatcacacacatctaattctctttgagatttaaggccacaagttgtgacctgagctgagtcacagctgggtcgaagggaactgcctcatctcttctccacccacgacaatgccctctccatcaaaaaatatctaactgtgtttgtcccagattaacagcaagccttgggatgatgtgggaaagcgacctttgcattgtttgtacagtgtagtaatggcgtccttgtgtttcctccatcccaactgtctgaaaacactttccaaatttatttcagctgtggttaaggaataacagaatagaaacatagcagcgattttgtagtttaatgactcaatcaagaaagaaaacattaccatcgtgctgtgtttgacaattcactccaaatcgattaatttgatttttataatgagatttgggataacattctgattctccaaatcttagaaagcagccatttcatccctcaaatccaatataaaggctttacctgcatgggattcaaatttataatgttgtgtggtaaggattctatgatgcatttgcttccaacttttaaactcaaatacctatggtgacaccatcaaagctaaaaagtgtgagcaaaaactggacctctgccagcactttgctagactgtcacaggcgtttccactaactgcatggctgactgaaatggcttttaaaaggtagtggcgagacccttgaaagtacttgagtgtattcttgtatctctcctcttgcagtctgccccatggctgagaaatgcagtctgtcccagccagaaatctgggtatccatctttttactttatgattccttttaggtgtctcccattagcattggtggatttctctctttctgcatccagtacagaactgcaggatccaaagatcacctgagcagagtggaaggtggtgttggaggagtagggagacctcactatacagtgaagttacgtaacgtgcaaatatatctaccttgaattcaactatgggtgttctggaaaaggtgtgggtggggcgtgtggagagggaggatggagggaaaaatgggagaatgcctatgaaaaaacataattcaactattgtggttttctgttgttgttgttgttctttcatttgtttgtttgttgatacagggtctcactctgtcacccaggctggagtgcagtggcacgatcatggctcactgtagcctcaaacttctgggctcaagtgatcctcctgcctcagccttccaagtagctgggactacaggcactaaccaccatacctggctaactttttgattttttgtagagatggggtctcattatcttacccaggctggtgtcatgaactcctggactcaagaaatccctttgccttggcctctcaaagtgctgggattacaggtgtgagccactgaacccagcctgtaattcaaacatttgattacatgctacattgcactcatgagtgtgtccccctgggagtgcacataactttgaaaatgtgattccattaaagtcatcacaactgcctgttcagtcggtgtctgtctttgcgtgcttcccacagacagcacctcactaagctaaactatgaaccgcatttagtgttcgaagtcatacattctttaaatacaacatggccttcaattataagtcaactgcttcgtagttggctgccaaagcaacagccatcttaaaccatgaaatgcccttcagaagaaagacatgtgctaggaagatggaggagggagcttgaagaaacctgggtcccaggtaaatgtgaagtcactattccagtctcatctaaatcagaaaataataacttcctatctttttcagctatggttactttgagtttttggatagatgcggctaaacctcatcctcatctacacattgtttacatgcaaaatgaattccaccttgagatataatataagaagcatgccctctttgtggctgaatataaaccacagtggaactttctccaaaaaaggaatatttacaaagctattcccttacctccaggtaagcagaaattatttaatattttattttaaaagaaatcactgcattcaatacaatgtatcttgctgagcttttcttgatcggcattttaagctcatatgattaatttttctgactttctgaagcacatagacatgaaaactgaaactaagtcacagataaacaaggagtacacacaaggatgtatcaaaaggcaaagaaaaaagtatcctaacactcaaacaaatattcataaactgtaattacaggggaaaaggcacaggatgttcctgcctgtttataaagattaacaaaccttggccaaacccttcttcttttccttatctccagtaattgccaagcaagttcaactgcaaagctaaagaatgtgccaatctcttctttcaagactttattcctctttgttttcactgctcattttcttcaatacgtcatcacaagttccttagacctacctttagataaaatgcttctgtttccttaactataatgagcttcatgtaaggagcaacaccaacatttatgaaaaatttgtcttccatttcttctaccaagttaaatacctggccctaaagtaatctgggtggccacctggtctggccatgtcattcttcagatgctacaaagagacatagtaagtgagctggcttccccatctatccacggcaaagtcagaaccggcttccaagcctagaacaatcttctgactgcaccaccttcatccctcacggttcatctgttatctttcagctttcttaatcttgtttgccaggtcgccacgcatcactcattactcactgatcttcgggtctatgatccttataactgcccatgccattacatactttataaatcagatactctcactgtcccttcccttttctacagaacttacttgtctacctttttatccctttaaataaaagaataatgatacccaattattgagcccgttgttactgtgttaacatgggctttgcgtgcaactctaattttgccctctcaatacttgtatgaagcaaaaaccacaggagataaggaaacttaggctcagagaagataagtaacttgctaaagttcccaagacactctcattttatgcttcaaccttctctgtagagtagcactgtccaatagaaatgtgatacaagccatatatgtagtttaaaatgttctggtagtcagataaaaaatgtaaaaataagtagttgaaactgactttttaactatatatttcatttaacccaaatatcccaaatcgtatttcaacatggaattgatgtaaataaataattattaataagatattttacattgttacagcacatctcaatttggacagtggattttcattagaaatacttgatctggacttagacttcataaaatatatgattgcaagaatagattcacatacccaagttgttccaaacgtacttaaaacttttccaaaaactgaacacagcatcacttttttaaaagtttaaatttcacttcattgcaaattatattaaattaaaatgaattcatcagtcacatgagccatatgtcaggtgctcaaaagccacatggtagtcagtggctaccacgttggatagcacagttctaaatctatgaatgcattcttccagacaaactcaactatattttcctacctgaactcatgcagacgagtatgtctcctcctcctcctcctcttcctcctcctcctcttccttctcctcctcctcttcctcttcctcctcctccatgagaacagttaaccctgcccatcttccgaggcccagttcagatgtcttttcctacacagagactttcctgatccactcaaaaggaagtaaacttctcctttgaacttgcagagcactttttctgggcctcttgaatgtcaatgatcatatttctctttgtagagtacacatttcctttcactcctgactcctgtactaccatctttggaaacccataaaggcttacctcaaaacaatgtaaaaagtagctcctaaaaatattttgtgcatgaatcactcaaaatgatttgtgagggaaatattaaaatgacacaagtctaagcctttgaaataaactatttactctccacaaacaaaaccagaagaggacaacttcggtaaaaaattataacctctttggtatccttatataggttgagaaagaatatgaaaaaaaaaaaaactattaccacacctcacttgttttaaattttataatagatacattggtttcacaaatccaggggcctttttgtttctctctatagacacaaagtcttgttctgtcacccaggctggagtgcagtggcacaattatagctcattgtaaccccaaactcctggactcaagctgtcctcccacctcagcctcctgagtagctgggactatgggcacataccaccacaccaggctaattttttgtttcttgtagagacgaggtctctctatgttgcccacactgatcttgaatccctggcctcaagcaatcctcctgccacaacctcccccagttctgatattacaggcatgagccaccacacccaaacacaaggggcatttttaaagtacatgtctatatatgtttcttacagtaaggcagaatgaatacccacaccagccttccacagaaaacaactagggatgttggataatgtattttaaagccctatttaaaatatgcatgagtggacaaaaaagtaaagaacacttatgtctcaaaataatcaggaagaacattgcagccctacagccagtgcttgccttgaagtcatttgttgaatgtggtgaatctaaattctgttttcctgacctcacaggattcagtggacaaaatgcgaattctaggcttgcccatggtaacaagttgaatgggacagtccttcccataaagctgggactcagccaggcatggtggctcatgcctctaaccccaacactttgggaggcctaggcgggaggattgcttgatcccaggagttcgagaccagcctgggcaacatgatgagaccccatttccacgaaatatttaaaaattagctggatgtggtagcactcaccacaatcatggctcactgcactccagcctgggcaacagagcaagaccctgtctcaaaacaaacaaacaaaaaaaaacactctgggtctctaaaaaggatgtatctttatggtaagggagaacagccctctctcaaccaaaggcaggaaaatttcctaccttaaactttgcaagtgaaaacaactcttaacacaaatcacagtagaatggatatattatggtatatacatagaatgaaatgccacaaagcaacaaggagcaatggactacagatgaatgcaacactgaggctgaaactcacaaatataacgataagcaaagaatcagacacaaaagggtacactgtagatatccatttatataaagtacaaaaatggccaaagctggtgagacacagtggctcatgcctgtaatccaagcaatttgggaagccaagatgggtgaatcgcttgagcccaggaatttgagaccagcctggccaacatggcaaaaccccatctctactaaaaatacaaaaattcgccaggcttggtagcatgcacctgtagttccagctactcaggaggctgaggcaggagaatcacttgagcccgagaggcagaggttgcagtgagctaagattgtgccactgcactccagcctgggcaacagaacaagactctgtcttaaatgaatgaatgaataaataaataaataaataaataaataaataaataaataaataaatggccaaagctaactgatggtggtagaggtcagaatattagcaacctttggagatggtgggttggagatcatgattgggcacaagggaggtttgtaggattccaatgatgttctatttcttgatcagggtgctagttatatgactgttattacttggtgcaaattcatgaagctgtacatttataatttgtatacttttgtgtgtatacatttcaatataataagaaatgaaacaaaaatgaaactcaacgaacagtttcaaaggtagattaagcatagctgaatcagtaacctggatgatacatttgaagaaattatgctgaatgcagctcagcccctgccccttcatttcacagtaatctttctaaagccttctgccttctctctttcatcggctttttctcttccacctctgttccttaaatcctggtaccttctagtgttctagccatcacgtccttcttttcttaaccacaaattttattttgaatctactcaatagttaatgaaaagtaatatttttaaaatgtaaagaacatttatctgagatggacattgttggcaaaaatattaatcaagtggtatctgtttagtagcagaagtacttaaaatatctgaaatgacttctagaaaacattttctaatctgttttttgctttccagtttgagaaaatttcttccaacaaagtccgaaacacagaattgatgctaagtggcaatttctaaatgacaaaaagggaaagccacaaaaatgtagttatgtcaaggtactatgcaatgaatgtttgtatccctttgaagtggatatattgaaggcctaatacctaatgtgacagtatttgagggtggaacctttgagaagtaattaggtatgagggtggagccttcatgaatggaattcatgtcttataaagacactaatgtagaagaaacatgagagagatgatcatgatgatatgagtgaaggcaggcatctgcaaatcaggaagaaggtccttagtagacacagaatctgccagcaccctgatcttggacttcccagcctccagaactgtgagaaataaatgtttactgttcaaaccacccagtctatggcatttgctagagcagcctgaactggctaagacacaacaaaaattaagtcttttagaatatgataatgctttttaagaaactatgtcagaattctaggaagataatctgcacataaatcaggcctttcttagaaaacaaatgtgatgatgttattaaaaataaatgattcaaagcaatctttaaggcaattctatttctaattctagaaacttaattagttacttttctattttgctctttgaactgacgtattctgtactgttttaaacaaatttgattttttaaaaacacaagtaccatactatactcaaatgtgtgcatacctacatagatatgtgcatgcatatatgcccatagaatgctgacatagtctcctgaggagtcttttacttgaaatctcttgcagacttctaacaactctaatccactaaaatacagcccaaaactataagtgacaattacctctttgcaccccaggaactaaggtccaacctgggacctctttgcaacccaggaactaaggtccaaggtccaagggtgggaggatgtaaagtattagattttcacgctaattgcacacaatgcctacatacaaggaagggaataatagcagaagaaaagcctatcccaatgtcattctcataggtcacctgtccatttgctctcagtgggagttaattcccagaaactaggggggcacacttgtgagtcaaaagaggcaggagagagaggtgggtacatctgttctatctaatgggattcggttccacagtagagccagtgcccatgttgcataaacaggaggaagcagcctcagatccaggatacctttttttcaccatgatgaatagaacatcagtgcagaagggatgcagaagggaagatgggcctaactggaattatgtagtacatatggtgtgtatgttgtaagttgtaggtatgttgctatctggctagcacagttaaccaaatactgtaagtggacattgtaccctcaaatttcaagatacaatgttgttgaacattgataaataaatgatgaagctaaaccaatttccagcaatgtatttcccagatactttcaaaatgtcagtttaccaagacctctcgtatttcatttcctcacaggtccttttggtatttcatcagaaatgactggctgatgggttcccttgtgaaagtgccccatttggacaagttaaatgagtaaacctggttaaaaaaatatattcaccaagagcctctgggcataggtacagtttccaagagcccaagcattcttggctacttgtaagtattattggaaggcactcaaaacaaacactccatttgcctgatcttcagcaaagaaaatatcagcctgtgtgagctaatgtggatgttattttagaattagcttcactgccatttcagggtagctaatactattgtcctcaactcaaagccttttgaacttagatttagaaggcaggcaagctgcaaagcttgtgactttgagtgttctagaaaaactcaaatatgagtagatttagcttggtcgtgcaggacactttcccttaacttactgaggtatttgtatcatggaagaagttgaaagattactttcaactgtaggaacagcaggggtagcttcacaggcatgaaaccaggcagtggctcagggcttcacagtacaaagggctctgtgctgagttaaatgctctgctgctgccatcttgaaattcttaatatttcttgaacaaggggctctgcattctcattttgaactgggccttgcaaacctggaaacagcaatgtggctttacttctacctccttcctagacaactttccttcttgtttgcatatacaggtttctctattcatattaaatataaaatgtatcttttagtagctgagtctctgaaaggtttggcccaccacaaggataaaaaacaggatgagagaacagtaaagtaaaatgataacattagaagaaatggaaactgggtacagggtatacaggaattatctgtacaatctttgcaacttttctgtaaatctaaaattattctaaaatataaagaccagctcatcatcaatttaaaaagaatgtagtaattataaagagacaattgtaaaataaccagaaacaacaacagtaacaaaagcctttcacacttgaaagttaaaaataaaaaagaaacaacagtattcttcttaaaaaatcacttgatcaaagaaaattaaaaatggaaattgtaaacttggaaatatattactattattttcataaccattaaaggatttaattagaattgtttaaatatagcaaaaaatatgtttaaaactcaacagtctacttttggaccacaacaataggaaaaatgaaaatccctttattcagaaatgtgcattaacgatatgtgcatgtgtttgtgtatgtgaataaattataaaattttgctaaatgatactaaagaagactgaagtaaatgaatcatatcctattgctggatggaaataattaatttcataaaaatatcagacttgtctaaagtaatacatttttaaaattctttctgtaatctgaaaaagataatgaaaaatctctgtacccctgggggatgcagggaatcatccttgggggaaggacaatgtaatagtctgatcctgagacccagggatacagggcctacctcaaactgaggctgaaccaggtcagcaatggcttaattcacttaaaaacatgtccccaggctcaaaaagctaggaaaggacagatccagggcttgagaccattcattcagtcattaacgcattcattaatccatcaattattttttgatcaccaactctgaccagggcattgttctgggggagagacagagcaacgaacaagacacataccagtttgctttcctgctttcttgggatatacattcaaaagggttaagcacagatttgagaatacaaaagcaacaaataaataggtttctccaccttggcactactgacactgggggaagaatgattccctgttgtgagggtggttctgtgcattgtaggatgttagcagcatccctggtctccacccactagatgccggtagcaccctccaccccagttgtaagaacaaaaaaatctccagatcgccaaatttgccctggggagacaaaatccctccatgttaagaaccactgacataaatgaattcaataatttcacatagtggtaagcaatatgaagaaaataaaattggatgatggacagagatggagaggcaccactttagactggagggtcacagaaggttgtttcaaggggagaaggccaagaatcaggcattgacatatgagggcagagagttctaggcagtgggaacagcgggtgaaaagttcctgaggtggtaaggagcttggtgtgttaaaggaacataaagaaaacagagtgactgaggtgtgatgacacagaatgcgtgagcaggggccagatcatacagcaacttagggtttatgcttgaaaagatgattcagttgctctttggagaacaatttgaggtagcctgaatagaaggggaaattggtagtctaggagaaagactgtgggagcagaaatagggttttagtgaaggaaatgggagtcactgaacagatctgtcacatggtgatgtggaggtaagaggccttgctaatagactggacatggacaacaagttccccttctcctttaggtgtctgccaagatgggtcccattgtctatattctgctggagatccacccctgcctccaactaggccagatgtgctgcattcctgtttgggctcaatctctaattcttggccccactctgtaccctcatcttctaataggtcacccctgaccgctgccctagtcagctccatggccagaaacctcatcttcccttagcctccctaccattttctcacatccggtttccctccaaacattgccagcacttgaagtctctcgggagctaaagctgaacattctgtttctatgattatagaaacccaagaattatcttcatcatgaattccagagaagagcctagggggtttctcagagtcatcttatgaacaaaagacatggtacatacaggggtcaaaaatgcaagaaagaggaatgtacagtacaacatagtaaccccaaaagggatatttaaacagtgattgaaatcacgggttgaattgtgtctcccaaaaagatatggtcaagtcctaaccccatgttacctgtgtatgtgaccttatttagaaatgggatcttcgcagatgtaattagttaagatggtcacattggattcgggagggccctaaatttgtaagggtgtccttacagaaaaaggaggggacacatacagacacaagcacacacaggaaagaagtccatgtgacaatggaggcagagactggagtcatgtaactgcatgttaaggaacatcaaggattgccaggagccactggaaactaggaagaggcaaggaaggaatctcccctagcaccttcacagggatcatggcactgctgacactttgattttggacttctggcctccagaactgacagagagaatacatttctcttgttttaaaacacccagtttgtagtcatttgttttggcagccctaggaaactaacacaatgcacatttagacagtttgggccaaaaaaagtacattttaagtacatgtgaatttcctgttgaaaagctatagcacagaatatttgaatgatgaaggttaatcagatgaagaactccagcagcttgaccttctgaattcagttgatattgaacacatatgccctgttaaagctgccttctcaacactccttttggctgctcaactgctccactagacccaagctcctggggtccaggctctaatgctgggttctttgcaaagtgaaattcaatatgtaccctctgggccctgaagcctgagtaccatgcctgagggagcctcagtaaaggttgattgagcctttgcatgttctgattaccctttcccacaagctgtaaacttgacaagcacacactactccaaagagacctggacagtcttctaaaggtgtcaccctcacaccacaccacagctgagtcagcaaaattccagggagtacacaacagtttcatccccaagtctgtctacagcgttatctattggtgcttctttgggtccacataccaccttttctagatctaatcaatgcttcttgtttacatccacctccatatccagctaatgaaaatttaaatggatgtataaatctcaccaaattataagtggaccaaggcattgtaactcagaagatggaatgctagacagcaagagaaatgttttggatggtggcacttctctggcatgctttcaactctttggcaggggacaagaagccctttttcttagtcatacagaagaataaaaatatgcaatcaaagggacaaattaaaattataaagcagtgaacaaatggcaataataatttgcctttcattttaaagtgtggcattctatggcatggctatggtttggatacagtttgtttgccctcactaaatctcatgttgatctctgatcctcagtgtggtggtgttgggaggtggggcttagtgggaaatgtttgagtcataggggcagatccctcatgaaggacttggtgccatttttgcagtagtgagttctagctcttgtgaaatggaattagttctcaagggaatgaattatttttcccaaaaatgagttgttataaatccaggatactcctgggtttggtccctctttgcatgtgcccacttcccttttgaccttttctgccatgttttgacacagcacagaagcccataccacaagccaagcagatgccagtaccatagtacttttatagcctgaagaaccataatctaaataaatctcttttctttgtaaattacatagcatcacatattcctttatcacaacacaaaacagacaaagacaggcattcaatattctgcagtattatcttcagtggtttaacagtattccataatagcgctatatgatcatttaatcaatccactattatagactgtttccattcttcttgtgccctatttttaaaaaatactgtgataacacatccttgaagctaaattttagcacacacccagggttatttctacaggataaatgtcttgatatgaacctatagagtttcaggaattaacatctttaaggcttttggttcctacagcttttgattcttattactgaattttttcctacccatgccaaaaaagttgtatgcatttgcacctccagcagcatatcttgagtgtttctttcccaatccaattaccagcattatatattatacaattttcatctttgccaaagttacccataaaaatggtaaaaagcatttgagtgtaatattaaagaaactacacacacacacacacacacacacacacacacacacaaacacacacacacagagctttcaagaaaataatcattgatctaaaaacttaaaagcttccagacaaaaacacaggagaatatcttttcgactttgaggtaggaaaacatttcctagaatataaaatttgatacacttcatcaaattaaaaacaaaaacaactcttgctcatgaaaagacatcattgctgaagtaaaaaaaaaaaaagcaccacagactaggagaaatttttaaaaacacatgtctaatgaaggacttgtatttagatttttaaaattcctacaaataatgcaaataaacaaaacaataggaatgggaaaaaagacgtgatcgagaaattctcaaaatactcaaactgtcaataaatatgaaaaggtgctcagcaaggagatgcatattaaagccacagagagattgaataagatatctgagacagtgttacaaggcaatcaaaagatataaaggacatacacattgaaaacaaaggagaaatactaagcttttttttttcccagaaaagacaatcatgtattaattatgtaggaagaaaatccagaaatctactttaaaaagccactagagctataagtagattgagcatggcctcaggatgcaaggttaatatccaaaaccaactgaatttctatttgtaatcaatgaaggattgaaagatgaaaccagaaaaacaatacaacgtataatttaatcaaagcacacaaaccactcaggaataaatttagccagatatacacaacaacctaaaaactgaaaatttaaaaatattactgaggaaagaaaaaagacaaataaatcaaaccataatttcagtgtaatctcaatcaaaatcccatcatcagttcttgcagacattataaaattgtattgaaataccaagaacccagattagccaatacattttgaataggaataaccaaattataggacttacagtgtctggtttcaagatttactataaagctacaaaaatcaagacattgtgtacagtgaaagacaggatgataattgcatgaagaaagacatatagaacaatgggacagaatagagaatccacaaacagactcataatatagtcaactgatttcaacaaaggtgtcaaaagtaatttaatggggaaaggagagagtttcaaaaaatgatggtataacaatgttttcttaaaaaattaaactgtccctctacttcacaccatatataaaaatgaattcaaaatgaatcatagacctaaatgtaattattaaaactataaaatgttttcaagataatatagaagaaaacctctgcaatcttgtggtatacaaagatttcttaagatacaagaaaaacccaacaagaacagatgaaaatattaaaaattggactccatcaaaatttaaaattcatgctctttgaaagatatcattaaaaaatgaaaaggcaagacatagactaggaaaaaaatatccacaatacttatatcagacaagtgacttgtttccagagtatacagagagatcttacaactcaaaaattgacaatttttcagttatgagaacttcaaatatgataaaaaaaaaaaaacaatttttcaagctggtaaaagatttggaaacttaacaaaataagataataaatggctgataggcacataagatatgatatttatcagcactattcatcaagaaaatgtgaattaaaacaagagataccactaaacttgctagaatttaaaactatactgtatgattactgtatgaatgacaaatgttggtaagaatatggaacaattggaactctcatgccttgctgatggaagcataaaatgtgacaaccctttagagaactgtatggtaatttcttataaagttaaacatacgcttaccatatatcccggccattttacttctaggtatttactcaagagaaaggaaaacatatgtccccaaaagaattgtacacaaatgcttattgcagctgttttcataatagcacaaaacagaaaacaactcaaatattcatccacagatgaacaagtaaacatattgtgatatgtctgtacagtggaatatgagtcaacaataaaaagaaattactgaaatacacaaggacatgcatgaatctcaaaaatatgttgagataaagaagctagaccaaaaaatacacatacaatatgattccaatgctaagaaattctagacaaacaaaactaatctgtagggtcagaaaatagatcagtggttgcctgctaccaggcactgactgggaaggggcatgaagagtttcttttatggtgatggaaatatttgatatcttgatgtggtggttacatggatatatatacctgccaaacttagtcaacctacacacttaagatggcatattttattgtatgctaatcatacttcaataaaagtgattttttttaaaaagagatataaatgcatacccttcagtatgactaaaattataaagactgcaagaccaagtgttggcaaagatataaataattagaactcctgtacattgatggaaaacttctttggcagttaaagttaaataaacagcttccctatgaaccagcaattccactcctagctttatacccaagagaaatgagtatgtatgtccacaaaaaggcttgtaaaagaatgttcacagaagctttatttgtaatagccaaaggctggaaactccccaaatatctatcaacaggagagtagataaacaaattgtggtgtgttcatacaatggaaaactacctggcaataaaggaacaaactaatgatgtccacaacaacttatagtctcaaaagcattgcgtacagtgaaagacacattaactcatacagtattattccatttatatggatttcaaaaacaggcagcactaatctatgtggatagaaattaggatggcagttgcctctgagcaggggaactaactggaagaggcataaggaaacttcctggggtgatggagatgttttatatcttaatctgggtaatggccatgtgcatttctcaaatttcttcaagacgtacactttaatattgctgtgttttactaaattgtgccttgcaaagcatgaaaaaaaacccataaaaataaaatttgaagccagaaagattggggggttgagagttcagcagagcttgtgttcatttgtgcttaatttctcattttcatagagatttcaaagatgctaactatcaagaatattcttcaccaacaacaaaattcttcctagagcaaagtgacacagagctctagtttcatgagggcacaaagaaacaaaaccaggagactgctgagcagtgtaagcccaaactctttgaactcatagaagggattctaaattgggaatccaaacattttctgtttcctagcagaaatactcatgcatgcaaaagctccaggcaggcaatggggctattgaaatggcaatctggccatgacagatgttttaaaatgcatttgaatccactcagtctccactttaacgaaaggcggctttctcccagagttactcataacaactcatgtagtctgtggtcacagttaatctgacttacagggtcctgagtttgaagggctgtgtcttggaaggtttctcacaggccatgagacaaacagtgcctgccgcacaagaagcaacacatctttcatggtgttttattgttgctatcatgaaatgtgaagtggtatgactgtacaaccagcaagggcaacatcccggttcagctcatcagaacacagctccaaagagatttaatgttggagacacctagtaacacattcatttctggagggtagcatccctctgatcaacaggtcattgtatacattcagctgcttaggaagtatctgcaaatgtgacattctgattacaggctggtactctatggcagatggaatctagatattttcaaacttagaactcttttcagggctggcttcatgggttcatgacctgtgcacacagccccatgctcagaagggctctgcacttggtttaaggctcatctctcgccatcttgaaattctaataattttttcaaaaggagcctcgtgttttcattttgtactgggttctgccaattatgtagccagtcccagctgatgctacagaagctcatctctcctggaccttgagactaaaagtgaaccttggccccactgctcttaatcaagagctaatctatatattaaatttggttcttaaattcactgggggtcgggggtataccgtggagggagaatctatgtaccagtctgcctttacatttgcaaatctggccaggtgatcccccttcaatttggctccacaaaaagccttaccttgaaatacacatgcttagggtgggagcaggatactgtgaaaatgaaaggaaggctgggcaaggattaagtcagggtaataatgaagggaaggaaaggaaagggaaatgtacgacagttgagctcttaattgttctcacttggatttctgcagtttattctttctctagtttgtttccctgcccgttttgcctatccacacaaaaacttgtgtgtgaatcttcatagcagcagtattcataatagcccaaaactgaaaacacaaatgactttcaactgatgaatgtaaaatgtgatatacacaatggtatgttattcggcaacaaaaagaataaagtatagatatatgatacgacatggatgaaccttaaaaacattatgctaaatgaaaaaagccagaaaccaaaaaaaatcacatactgtataattccatttatatgaaatatgcagaataggcaagtccacagagacagcaagtagattagtggttgccaggggctgaggatgagtaggtatggagtgggagaaatggggagtgatggctggctaatggatatggagtttctttgtggtgtgataaaaatgttctaattgattgtggttatggttgtacacctctgtaaatatactaaaagccatttaattatgcagttcaaatgcgtgaattgtataagtgaattacatttcagtaaagccatttttccaaaatgtaatgttaagtaatcattacagttttagcatgttagctgcttttcctccccccagtcttttttagttgaaataaccaagacacacagaaagaactcagcaatacacacactgtaactcaagccaaatttcccctgggttactaaataaacaatcatcagagttattgagtctctcagatgaattctggttcccatgatgctgcatcctgtacctctgctgtagttctcttatctagcaagagctcattgctgccctttctgccacaatgaatgtaaggaagatgacaagcaacatttatttcccttattttttagtttgttttattcaaataactcacaaatcagctgatcttttaggcaatgatagtattaataaatcttttagaaaaaaatcatcctaaaatatgtacaatatatgaaaggttaactgcatctggtcttaaaaatgcaaattactaggatctcccctggagtgctactatttacagaggattttttttcctctccctctaatattttcatggtgatactaactagaggctttcagaataggggctactgtggaatgctggagaattccttccccaggatcctccgtggctgtattactcaatgattcgattcccatgagcttctcttagggaagctaagagtaattttttttcacatgcacgcacacccacatataatgactgcaggccttaatccaactccatataatcaatttgcagaaagacacaaaagctaaaagaagggacagggcactatggaaagtagcagcaatgctgaaagtgctgtgatagaaacagcccaagttgtggtgccacggtgagtggagtacaagctaaccaacaggcagagtggggactccatgattgaaggatacgatgagtgcaccagaatacagtaatgcaggcatttcctagtggagtccttagagaaagaatgtgtgccaagtacagtggccaaataaactacaagacacccagttaaacctggttttggataaagaacacatacttttgtagtataactatattccaaatattgcaaaggatatattttactaaaacattgtttgttttctgagattccaatttaactggatgtcctgtatttttatttgcttaatctggcaaccctaattctaaggaaagaaagcctcagctcactaatggcaggtaaatgtgagaagggagaggaaattctgaatacaggtccagtattctttattcccctagcacagaggaaacaagacacaaatgacaaattaactcactaagaataagagtcacactaaatctggcaaactcccatgaagttcatagagttccacagcttagagggcatttcccccaatttagcaggtgaaacctggaagctacagttgcaggagcccagtgttctaagccggtggttctccaccaggagtggttttaacaaggtctaggggatatctgtcacaactttggtgggggaatgctggtggaattggcttcaagtggagaggggccagagatgctactaaatattctacagtgcgcaggatagtcccccacagtgaggaataattcagcctcaaatatcaatagtacttggggaggagaaactctactctcagctaaaaagtaagaaaagcctaaatggggaaaagaggaatggcactagaagtcatcactgacagctggcgtacccccagcagctgcagataaagagaatccagcagattccacacagtacctgggcagccaaaattcccgttctcacgtaagacctctcctggaggcaccctaatgagtttggggaatgtgcagagggctgatgagttggtgtcctgagatgttgacctctcagcatttttctttccatagggggccaccttccttgtgctcatactgtcctggttcacttggcaaccatcaagcaatgcccacccacaccgtggctctggggtgcagacttgatgctggtctggactgtcatggaccctgtggcagatgtccttggggctcagctcatatcccctccaagtccccagtgttatgcttagtggctctaacaggctcttactccaaacggccagccttgtgtctcctggttagagaactacccacagacttccagaatctcttttgcctgcacatgtgaagaaccaggagtgcccagaaatttatatcccctccccacagtgttggtggggtaatcccgatggggaacacagcactgagtggggtctacactgtccccagtacttctctgtggagttgcacttaagttatcctctggggggtgaattttatgagaccttgaactctgtggagcctccctctcttcttcatcccacttcctctaccattttttcccaagaatatttcctgaccaatccttttcctgttaatcctactctcagagactgcaccagaggaacacagtcgaaggcagaactcttcgtgctgccctcagcagatatgagggatagacatatgacccaaaatgggctgcagcagatattgaccactgccttaccaacaaccatctgtacacacaccctctcctgccatgcacacagaacttgcaatgtgttcaagaggcaggaacctttggtttcaggaaaagctgtcccttcacttagcctcagatgccgagccatgattgttgtaaaccactcatgttaactccgtcgcttcttgccaataattggtcttggagtggacacgtgccccacttctggccaatgggatataaagagaagtccactgggggttttagagtagagatcttctatcccccaaaataagagtgttgtcagaggaatgacctcttttctatcctttcttcctccttatgatgctgaggtgaagaagtgatgcttggagctgcaatcatgagcatgaactcaagagggttacaagacactgctcagctcctgctatcactgagtcactgactcaacccaagagccccttacctccaaacttctagctctgtgagataatcaaatgttttttttttttcttttcttttcacttaagccactgctgattactcttctgcttaccaatgaaaatatcctgagatgaaaggcaatcatagccctcccatgaaactggttaataaattggatgttgtaatagaaatggtctcacttcctttgggatcatgagctgtagggatggatgtctctgttggattgtgattatcttttatgactatagggagaaagacatatttagtggaagaagttaaagccagcagggagggaaacagagctgagagactgctcttatactaatgttaattcttatagtgacaccgtcttcaactctcttatctgtaaagtgggaataataattcctattatgcagggctgctatgagaataatttgaaataacatttcaaattgtaaagtgcctggttccacttctcttaaatttaaaaacctagagaataaggtattccaggcttatctgcaaag

SEQ ID NO: 1312 - protein, 191 aa, Homo sapiens
MGTWILFACLLGAAFAMPLPPHPGHPGYINFSYEVLTPLKWYQSIRPPYPSYGYEPMGGWLHHQIIPVLSQQHPPTHTLQPHHHIPVVPAQQPVIPQQPMMPVPGQHSMTPIQHHQPNLPPPAQQPYQPQPVQPQPHQPMQPQPPVHPMQPLPPQPPLPPMFPMQPLPPMLPDLTLEAWPSTDKTKREEVD

SEQ ID NO: 1313 - DNA, 463 bp, Homo sapiens
tgagcttttagcctcagtttcctcatctgtaaaatgagctctaatgactttgtgactctttggtgtggccctggagcctggggcacggtggagttcctggccggccttgccacttgacaactcctttaaggcttcccccttaacacgggatccctgtggtggtgtttgggagttgcctggaggaactccaagcctggcccccagctgaagcatggcaatctggctgctctctacagggacccctaagcgctgtgggtggagggcaggggtcgggggggttgaccttcttgggtcttcacatggcctaggcagtcctccggtcagactggtgtcaggcaccgtggtgataaattcctcttctggcccctccagtacccagagaaactggctgggcattaactgctgcagcaccaagggtggtagaaagagctgtgaagagcccccaaaccagtaccaggacacc

SEQ ID NO: 1314 - DNA, 528 bp, Homo sapiens
agtggacccatgtttgaaggcagtggaggaagtccctggcagatttggtagaaatcacaagacaactagaattagaattagggccttaaggtgagatgaaattgctgtaaactcatgatgaaacttgaacaaatagggagttgcttcttatggacgagcaaagaaaatattttcttgagatggaatataatccaggtggagatgctatcaacattgttgaaatgacaacaaaggatttagaatattccataaacctagttgataaagcagcagcagggtttgagagggtttactccaattttgaaagaagttctactgttgataaaatgctgtcaaacagcatcacatgctacagggaaatcttttgtgaaaggaacaaacttcattgttttaaaaaattgacacaggcctccaaccttcagcagcccccacactgattagccagcagtcatcaatatagaggcaagactctcaccagcaaaaagattatgacttggtaaggctcagatactcattagcattttttag

SEQ ID NO: 1315 - DNA, 352 bp, Homo sapiens
attcggccagagggggtttcttgactaccatttccactgactttaggaacattttatggtttctatataaaggactgacttatcaataagccacattttccccttcctggaaatatccttgagtctgtaggatttctctcctccacccaccccccacaccaagtttcattaatatgaataactttccatgtttcttgtgttcacagaatggcctgggaatttttagttgagccaaaaagatgaatgagctgtgccattacaaaccttgttggttatgtgactgctccacagctctaaattcacactcatgtaggtggaagatagcggagaagtaagttattaaaggtgtggt

SEQ ID NO: 1316 - DNA, 611 bp, Homo sapiens
gatagtgggggaaatgccagatgaaaccaactcttgctctcactagttgtcagcttctctggataagtgaccacagaagcaggagtcctcctgcttgggcatcattgggccagttccttctctttaaatcagatttgtaatggctcccaaattccatcacatcacatttaaattgcagacagtgttttgcacatcatgtatctgttttgtcccataatatgctttttactccctgatcccagtttctgctgttgactcttccattcagttttatttattgtgtgttctcacagtgacaccatttgtccttttctgcaacaacctttccagctacttttgccaaattctatttgtcttctccttcaaaacattctcctttgcagttcctcttcatctgtgtagctgctcttttgtctcttaacttaccattcctatagtactttatgcatctctgcttagttctattagttttttggccttgctcttctccttgaatttaaaaatccttctatagctagagcttttctttctttcattctctcttcccgcagggttttgctacatcaagaacttagtacataagttaaatgattgagagtgggctgatttag

SEQ ID NO: 1317 - DNA, 401 bp, Homo sapiens
  misc_feature (55)..(55): n is a, c, g, or t
  misc_feature (138)..(138): n is a, c, g, or t
  misc_feature (140)..(140): n is a, c, g, or t
  misc_feature (146)..(146): n is a, c, g, or t
  misc_feature (152)..(153): n is a, c, g, or t
  misc_feature (190)..(190): n is a, c, g, or t
  misc_feature (195)..(195): n is a, c, g, or t
  misc_feature (221)..(222): n is a, c, g, or t
  misc_feature (227)..(227): n is a, c, g, or t
  misc_feature (301)..(301): n is a, c, g, or t
  misc_feature (306)..(306): n is a, c, g, or t
caaggagaagtcggcagatgcatcagaatctgaggccacggactctgactacgangacgcgctgcccaagcactccttcgtgaaccactacatgagcgaccccacctactacaactcatggaagcgcagggcccaggncncgagcnctgccnncacaggtacgaggcggtggcgggctccgaggcgggcncgcantgcacccggtcatcaccacgcagagnngggcngcgtctacacccccgctggccccggcgcgcgaactccgctcaccggcttctcctccttcgtgtgagcaaagccncgcgnctccctcagggcggaacggaggcaactttccggagtctatttttgttaagacaattcaactccaataaactgagctgaagtttttgtttaaaaag

SEQ ID NO: 1318 - DNA, 1685 bp, Homo sapiens
gggcgcagcacactcccagccggccgcagcctgacacgccgcgcggccccccagtctcccgcggctgctcccccaggcatggcacagggcctcgcctcactatggcagcagcacggcacagcacgctcgacttcatgctcggcgccaaagctgatggtgagaccattctaaaaggcctccagtccattttccaggagcaggggatggcggagtcggtgcacacctggcaggaccatggctatttagcaacctacacaaacaagaacggcagctttgccaatttgagaatttacccacatggattggtgttgctggaccttcagagttatgatggtgatgcgcaaggcaaagaagagatcgacagtattttgaacaaagtagaggaaagaatgaaagaattgagtcaggacagtactgggcgggtgaaacgattaccacccatagtgcgaggaggagccatcgacagatactggcccaccgccgacgggcgcctggttgaatatgacatagatgaagtggtatatgacgaagattcaccttatcaaaatataaaaattctacactcgaagcagtttggaaatattctcatccttagtggggatgttaatttggcagagagtgatttggcatatacccgggccatcatgggcagtggcaaagaagattacactggcaaagatgtactcattctgggaggtggagacggaggcatattgtgtgaaatagtcaaactaaaaccaaagatggtcactatggtagagattgaccaaatggtgattgatgggtgtaagaaatacatgcgaaaaacgtgtggcgatgtcttagacaatcttaaaggagactgctatcaggttctaatagaagactgtatcccggtactgaagaggtacgccaaagaagggagagaatttgattatgtgattaatgatttgacagctgttccaatctccacgtctccagaagaagattccacatgggagtttctcagactgattcttgacctctcaatgaaagtgttgaaacaggatgggaaatattttacacaggggaactgtgtcaatctgacagaagcactgtcgctctatgaagaacagctggggcgcctgtattgtcctgtggaattttcaaaggagatcgtctgtgtcccttcatacttggaattgtgggtattttacactgtttggaagaaagctaaaccctgaagatcagtagcccctaatcacatgtgctgcaaatagccttcctgacctccatatgctgtacatgacatcaaaatgagtcaggcaattgattgtgaattccttaaagttttcctttttttaataattatttttaatttaaaaaagcaaatggaaaatgtatattttgatgagcttagggtgttttttttttgaaagtcagctgaaggatggttagacagcacagcgaagactgctaaatgcactgaccccccccattagaatgtgatttttgttcctttttatttctctgtgggcttttgtttttgtttttgttttggtagatcttcaatttggatatttggaggagtgaacatcgttgttttgctggagggaagatcttgatggtgtttctttccccaaaaattgacttagatattaaaatttggtgcttataagagagagttaaaaaaaaataggattgcttcaattaaaattacaaaagag

SEQ ID NO: 1319 - protein, 366 aa, Homo sapiens
MAAARHSTLDFMLGAKADGETILKGLQSIFQEQGMAESVHTWQDHGYLATYTNKNGSFANLRIYPHGLVLLDLQSYDGDAQGKEEIDSILNKVEERMKELSQDSTGRVKRLPPIVRGGAIDRYWPTADGRLVEYDIDEVVYDEDSPYQNIKILHSKQFGNILILSGDVNLAESDLAYTRAIMGSGKEDYTGKDVLILGGGDGGILCEIVKLKPKMVTMVEIDQMVIDGCKKYMRKTCGDVLDNLKGDCYQVLIEDCIPVLKRYAKEGREFDYVINDLTAVPISTSPEEDSTWEFLRLILDLSMKVLKQDGKYFTQGNCVNLTEALSLYEEQLGRLYCPVEFSKEIVCVPSYLELWVFYTVWKKAKP

SEQ ID NO: 1320 - DNA, 425 bp, Homo sapiens
  misc_feature (383)..(383): n is a, c, g, or t
cattttactacatgaacatcatggataacaagggattctgattcattattaatttcattaattatattttctgatatgagtctagaacttactgcaaaaacaagacaaaactaaaaaaatacaactgagaagggtgaagagaagtatgtttgttaaacagtaaaaatgaatagtatacttcttaactaggtttacaactggtggaccacacaccaggcactaatcacctggtgaggatttggcatatccaccaaaaaatgcatccgatttaaccaacatctccaccagcgctacggactcctcccaattctgacatctcttgcagacaatactatgctctctacacactgtttagaaatggaaagggtgatctgcactgtatncttgggtttgttggctatgcttcctttgatgacatatattat

SEQ ID NO: 1321 - DNA, 310 bp, Homo sapiens
ccagatttgtagaaaattgtaattttctcagtatctaaaactattttgctttccattaagtttctatttgctattttctcagaattttacaattaaagataaatcacaaactgtttgtttttcttaaagttctttgagaaaatgtctaattatacaatccttggacaatactgtgtttttttggtgctgtgttttttaagaagtcctacttactggaattttgactatttggatatttttgtttttaaaaggggaggggaatttgcttaatacttctaaagatgtgaattgataattgatattaaaatag

SEQ ID NO: 1322 - DNA, 310 bp, Homo sapiens
ttttttttttttttttttttttcaaaaattgaaccatttattaccctaggtctgggtttcaggcattgcggaggcacgtttggggagctctatgaggggaaacaagcccctgactggctccttgccccccaaaaacccgctcccccaggctttgcattcacaaaaaattactctgaggcatgaggtttccttccccaaggtgagctgcaccccagctctccagtggggaggatgggccaccaattccaaagggggtctgggcaggaccaaagctccccgacttttggcagcttcaacacaaacatgagca

SEQ ID NO: 1323 - DNA, 191 bp, Homo sapiens
  misc_feature (15)..(15): n is a, c, g, or t
  misc_feature (25)..(25): n is a, c, g, or t
  misc_feature (110)..(110): n is a, c, g, or t
ttttttttggaaaangaaaaaaaanatttaatgggaatctgtgctcaaataatatgttacaacaaaaatatacagaatgtacacaatacaaaatacttagaaacaacatngcagtctgtgttttgtttttcccacttactcaagtctcggagggcagttcactgttgggcactgtttttaaggcagaggag

SEQ ID NO: 1324 - DNA, 216 bp, Homo sapiens
  misc_feature (55)..(55): n is a, c, g, or t
  misc_feature (110)..(110): n is a, c, g, or t
  misc_feature (158)..(158): n is a, c, g, or t
  misc_feature (168)..(168): n is a, c, g, or t
  misc_feature (180)..(180): n is a, c, g, or t
  misc_feature (186)..(186): n is a, c, g, or t
  misc_feature (192)..(192): n is a, c, g, or t
tttttttttttttttgcaattaaattcagtcttttatttaattatattaatttancccagcaacttcaaagacccacaatgccaatgataaagttcagttaaaaaacagnggtcttgaaaaattttttttcttcagccgctaataccatttacacggncgccatctgngaatttgtagcnccgtcncagtcncaggatttagggaaatttgtttta

SEQ ID NO: 1325 - DNA, 4573 bp, Homo sapiens
cgcgtgtctacgcggacgcaccggctaagctgcttctgccgccgccggccgcctgggaccttgcggtgaggctgcgcggggccgaggccgcctccgagcgccaggtttattcagtcaccatgaagctgctgctgctgcacccggccttccagagctgcctcctgctgaccctgcttggcttatggagaaccacccctgaggctcacgcttcatccctgggtgcaccagctatcagcgctgcctccttcctgcaggatctaatacatcggtatggcgagggtgacagcctcactctgcagcagctgaaggccctgctcaaccacctggatgtgggagtgggccggggtaatgtcacccagcacgtgcaaggacacaggaacctctccacgtgctttagttctggagacctcttcactgcccacaatttcagcgagcagtcgcggattgggagcagcgagctccaggagttctgccccaccatcctccagcagctggattcccgggcctgcacctcggagaaccaggaaaacgaggagaatgagcagacggaggaggggcggccaagcgctgttgaagtgtggggatacggtctcctctgtgtgaccgtcatctccctctgctccctcctgggggccagcgtggtgcccttcatgaagaagaccttttacaagaggctgctgctctacttcatagctctggcgattggaaccctctactccaacgccctcttccagctcatcccggaggcatttggtttcaaccctctggaagattattatgtctccaagtctgcagtggtgtttgggggcttttatcttttctttttcacagagaagatcttgaagattcttcttaagcagaaaaatgagcatcatcatggacacagccattatgcctctgagtcgcttccctccaagaaggaccaggaggagggggtgatggagaagctgcagaacggggacctggaccacatgattcctcagcactgcagcagtgagctggacggcaaggcgcccatggtggacgagaaggtcattgtgggctcgctctctgtgcaggacctgcaggcttcccagagtgcttgctactggctgaaaggtgtccgctactctgatatcggcactctggcctggatgatcactctgagcgacggcctccacaatttcatcgatggcctggccatcggtgcttccttcactgtgtcagttttccaaggcatcagcacctcggtggccatcctctgtgaggagttcccacatgagctaggagactttgtcatcctgctcaacgctgggatgagcatccaacaagctctcttcttcaacttcctttctgcctgctgctgctacctgggtctggcctttggcatcctggccggcagccacttctctgccaactggatttttgcgctagctggaggaatgttcttgtatatttctctggctgatatgttccctgagatgaatgaggtctgtcaagaggatgaaaggaagggcagcatcttgattccatttatcatccagaacctgggcctcctgactggattcaccatcatggtggtcctcaccatgtattcaggacagatccagattgggtagggctctgccaagagcctgtgggactggaagtcgggccctgggctgcccgatcgccagcccgaggacttaccatccacaatgcaccacggaagaggccgttctatgaaaaactgacacagactgtattcctgcattcaaatgtcagccgtttgtaaaatgctgtatcctaggaataagctgccctggtaaccagtctctagctagtgcctcttgccctctcctcacctccttttctctcagtgactctggaacctgaatgcagcttacaagacaagcctgacttttttctctgattaccttggcctcctcttggaaccagtgctgaaaggttttgaatcctttacccaacaatgcaaaaatagagccaatggttataacttggctagaaatatcaagagttgaatccatagtgtggggcccatgactctagctgggcaccttggacctccagctggccaatagaagagacaggagacaggaagccttcccattttttcaaagtctgtttaattgcctattacttctctcaaagagaacctgaagtcagaacacatgagcagggtgagaggtgaggcaaggttcatcctgaatgggagaggaagtcgaaccactgctgtgtgtcttgtcaggatgctcacttgttcctactgagatgctggatattgattttgtaacagcacctggtgtttcacggctgtccgagtgagctaacgtggcggtgtggctgcctggacctcctctttcaggttaacgctgacagaatggaggctcaggctgtctgcaagaaaacagttggtttggctgtgattttgacctcctcttccccactgccatcttctaagagactttgtagctgcctcctagaagcacattctgagcacatttgagacctctgtgttagaggggagactgcacaaactatcctcccccaggttgagacgtctgcagagtggcaagctgacttgtagaaatggggtgccatttatgctctacttagacaagggtaatcagaaatggaatcagtgcaggcaaaatttaggatttgccgcttccataaatcaaagcatgactaatagggggtctctgaaatgtaagggcacaaacttcacttagggcatcgcagatgtttgcagaatggttggcctaatgattatgctacagatgggttttaaatgacccgtctaggttactgcttccttgcaaaaaaagtcgaatcctgcattgaattgaatatgaatttctctaactctctccagaaaatggatggagataacttgtctttaaaactgtaggccagccttagccactgtggagcccttgcctccgagctctggcttcaaggggagctcttctccaggttcactaggtgaattgatttattattatcatattgataatgtgagattctttagccactttggggagcctgtctctccagaagcctttcttagtggtgcccacagttggagcccaggggccatgtttgcaaactgattcatgtgcatggctgacaggagtactggttcactaccaatgcctgagcttttctcttacatagaaaaactgtccactctcagtaatcacaagcagcatccgttttgttttctcttcttgggagacatctgtcaaaccaggaatattcttgaaaagaacgtgagcaggaaaaactgctggtgatactttttttaagttttgtttttatcttgcctgttggcttcaatacatttgagaatacgctgaagagggaaaatttcagtgatggagattctagattaaatatcaggactgatttcctggtgggattatggtccagttttaccaaagaaccaattccttgaatgttggaatctaactttttatattgtcattattattgttgtttttaaacggttctttgtcttttctgttttatttttctcaagctgctttcaggagctagcagaaaataactcaaagttgaagactctggaagattttgctttaacctaactcgcattgatgtattaaatttataattttagcattcccaatagatcctatcattccttaaacataataccctttgtcttggagtagaatactaagttagagttagtggatttctagtttaggagaggagctcaaaactataatctttaacaaattgaaaaatgaaatagggtgttttccctttttgtgcacacctatattaccttaagaaatttccttccatagacagctgcctcaaagggaaatcctctttaaaccgtagttggcgcagaggtcagtcctagtcggagcttaggaggggcggagacgctcacatcgtctgacttgagtcgccactgattgtggcaacagctttgcctcatgagtcaaaaattggcaatttcttttgatttttagttgttgaatttgctgtttcaagcatttgtacatattagaagtctaaggagtagcaagtcagtgggaggactttttcacccctggcattagcagcttcgacctcattttccagatgcaccagctcctattaataagttagcaaggaaagtgtatgtcacgtgcaggaacagtgaggcagggacaggggttctgctccttctcacttcaccaccggcacacagcttgcccctgtctttgcccccaaaggtattttgtgtctagtgtcaaattggagctattcttcactggtccttaaccttgggttttaaaaagaaggcttctctgtttgggtagcgtaagagctgagtatagtaagtcctcttccaaagagatggcaatatgctgggcatctactttaaaacaaagttgtctgatttttgcaagagaggttaggattttattgttcttatttccctttacagttctgcagttccatcacagtatttttttaaataactcaggtgtatgagcagaaattagaaaagaaaattaacttatgtggactgtaaatgttttatttgtaagattctataaataaagctatattctgt

SEQ ID NO: 1326 - protein, 531 aa, Homo sapiens
RVYADAPAKLLLPPPAAWDLAVRLRGAEAASERQVYSVTMKLLLLHPAFQSCLLLTLLGLWRTTPEAHASSLGAPAISAASFLQDLIHRYGEGDSLTLQQLKALLNHLDVGVGRGNVTQHVQGHRNLSTCFSSGDLFTAHNFSEQSRIGSSELQEFCPTILQQLDSRACTSENQENEENEQTEEGRPSAVEVWGYGLLCVTVISLCSLLGASVVPFMKKTFYKRLLLYFIALAIGTLYSNALFQLIPEAFGFNPLEDYYVSKSAVVFGGFYLFFFTEKILKILLKQKNEHHHGHSHYASESLPSKKDQEEGVMEKLQNGDLDHMIPQHCSSELDGKAPMVDEKVIVGSLSVQDLQASQSACYWLKGVRYSDIGTLAWMITLSDGLHNFIDGLAIGASFTVSVFQGISTSVAILCEEFPHELGDFVILLNAGMSIQQALFFNFLSACCCYLGLAFGILAGSHFSANWIFALAGGMFLYISLADMFPEMNEVCQEDERKGSILIPFIIQNLGLLTGFTIMVVLTMYSGQIQIG

SEQ ID NO: 1327 - DNA, 504 bp, Homo sapiens
gcggccgccttttttttttttttttgttcaaaagcaatatttatttttcatgaagataagaggcatattacattcgctatagaaaatgctatgagaggaaaaagctgcatgttaccgatatgacaaaaaacataaaaaactctacttatgaaagtgttttgccctataagaacatattcaataaaaggcattattccaggtgaatgagccatgcggaaatgtggatttattagggtttgttttgaaatgtaatttgtacggccagctttttattcctttgatggctatcaaatagatttattggctacatgttagaagtgcaaaagataacaggtaaccaagggagaagttttaataaaactctcaggaaaggcaaagaaaagtgagtgaatatgcctgcttatatttcagctaataaataaaaagtgcagatagggctttaactgaaaaccttgctggttattgcagcctggaaggtttattgaaaactgggtagaacactct

SEQ ID NO: 1328 - DNA, 359 bp, Homo sapiens
ttttgggtgatattgtagaggttaattagaccatgaggagaggatttacctacaagtaattctggagagctggctaccaggggccagatgcctcataggagaaattcattgaatagcatgcatttattatatgttgccagcagtttaagcatttgagctcaaacctcctattagaccctccccagcatgcgggccacccaccagttacaaggcatgatgacacgacagatgactcgtcctccttggtagcagtatggatatgggtagtagcctagtaaaggttcacagacgcggcggcaatagcggttgcctcgacggcagtaaatacaacaataacctctctcatccagcatgggatc

SEQ ID NO: 1329 - DNA, 494 bp, Homo sapiens
  misc_feature (91)..(91): n is a, c, g, or t
  misc_feature (242)..(242): n is a, c, g, or t
  misc_feature (413)..(413): n is a, c, g, or t
  misc_feature (477)..(477): n is a, c, g, or t
  misc_feature (494)..(494): n is a, c, g, or t
tttttttttttttttttttttcatgagatgatatttaatcttacaaaaggaataatgaatataaaaaataaaacaaggagttaccattttncctctatcagaggccaaaaagttcgaaggcacaatgtttgcaagaatgtagggaaatggatatgctcagtttatgtacttttggcagtcatgcatactggtgcaacttctttgactttataggcaatcataggcaaatttataaatgtacncaccctcttaagaggatggttttattcactgtattttctgtgatacaatttggatttttaccatgtacacatattattttttcagtaaaaaagttaaatcattaggaaaacattaattctcattgacaggaagaccctccttcctattcatacagcaacattttacttccnatgtcacaccatggcaacagcccccagcagcagtaggccagaggttgttttcatgtcccatatnccagctagggattattn

SEQ ID NO: 1330 - DNA, 524 bp, Homo sapiens
  misc_feature (409)..(409): n is a, c, g, or t
  misc_feature (411)..(411): n is a, c, g, or t
  misc_feature (414)..(415): n is a, c, g, or t
  misc_feature (417)..(417): n is a, c, g, or t
  misc_feature (420)..(420): n is a, c, g, or t
ttttgctgattataatatttggtatatttaaggtaatctagttaactagatgctatttcatagattatattgaatgatttaaaactttattttcaaggatagtttattttaaatggcatattgaaaacatcattattaagatccagtaggtaggacatttattggattaaaatgaagcatttatctatgtctttaggtgtcattgttccctttctgaattagctgtacatataagccttcctttggttttaagtactgatttttttttaaaaaaaagagggactgtttaccattcttccactgtgctgttataaagttgtatttgaaaggtaatgttgtttttattaatcttttgtcttaaaataatttaaagtgctttgaattttaaaacattaaacaaatccttaantnccnnanaanttgggtttgcaaatttttggagtttaaatttaaaaatttttttttttttaaaaaaaattggggatattaaaaaaaaattaattggtaaaaaattgtcctttttt

SEQ ID NO: 1331 - DNA, 435 bp, Homo sapiens
  misc_feature (168)..(170): n is a, c, g, or t
  misc_feature (176)..(176): n is a, c, g, or t
  misc_feature (193)..(193): n is a, c, g, or t
  misc_feature (204)..(204): n is a, c, g, or t
  misc_feature (207)..(207): n is a, c, g, or t
  misc_feature (219)..(219): n is a, c, g, or t
  misc_feature (223)..(223): n is a, c, g, or t
  misc_feature (341)..(341): n is a, c, g, or t
  misc_feature (380)..(380): n is a, c, g, or t
catattaaatcttcagaccctggtaggtatttactcaccgcacacctcaactctggattagccacatatcaagtgctcacagccacacatactcatggctcatggttacagtgctgggcagtgcagctcgaaagcatgacaggcttttgctaaccacaagcctttagnnncacagngtcctttttcccttccnacctccttttngtnatccccctcttnatcnagattcctcaaggtccaactcaagtagaacctcttgagaaaggcctatcccagcaactccagctcttaatgatcctgacccactacaataaaactgaatggcaaactgtggggcaatngagtatggggagggcctatttacagaaaaaaagttccangacaggaaacccctcaagggaatttgacccttttcggggttacaaatatggataa

SEQ ID NO: 1332 - DNA, 432 bp, Homo sapiens
tttttttttttttttttttttattctttcaaaatatattttattagcggcacatggaatgtcaagttaagcaaattctttccagagagaaggggagcctgacagactaaaacgttgagcacggatgatacagcagaaataacatttccagtgtaatgagagataaagaggaatactgcccaacgaggaaatgactttcttcaccatgctgaccacactgcacagcgcccgatccggctggtgaggatggggaggtggagaatctcaaagcactggacagggtgaggactcaggaagtcacggggtcagccctacagcatcagctcctctctgttgttggagaggccctgagccccattactcactatacgaggaccagagtgtctttggcaggtggaggctggctcacgggagaacaccaagtgagggggct

SEQ ID NO: 1333 - DNA, 496 bp, Homo sapiens
tttccttagagcaatgtataataatggggctgttaaccagttaagtgcctttctcctcttactggaagggcctgaaaattcatgaccaaagaaataacactatgaggacagtggcaccattgtgccaaaaaggttttaaaaaatgtttgccatgttgaaaaggaaaacattaacacctttaaacctttaaaaggcatcaggctgaacagggcagctggactaagatctggaatgagttacattgggttgacttatttaaatacaattaatatcagaacaaagaatgccaaggatttttatcacacttttaaaccaaattcctcattatctatcctttttttctctctttccatagcatgcagatattcccgaaagcggactaaacctgatatttacaaaaacatagttttaaatgatcaagacagtacaagtttcaacatcagctagagaacatgcacagtcataccgcctaattttgtacctgtgataaactctg

SEQ ID NO: 1334 - DNA, 506 bp, Homo sapiens
ttttttttttttttttttcatagaccaaaatagagatttttatttccaaacacaaagcagatacatttttaaaaacataaaacaacagcaaaaacgtcaaaccatcttttagaacactgctacttccaacttgcacaaaaggaaggggaggaaaacgtcaatgcaactttaaaatatagcactaagaagaaactccggggtcctggtgttcctccctggatggcggggaaggctccattagctttggacttgatatgaaccgagataacacacacatgttccgagacagtcgtttggctccaatactgcttgccttcccagaaagcttaatttattgcaaatgcatgttttaccatcacaaataatatgacaagagtagatatggtccctctgcgtattgtttacataatagaatatttaaaacaatggaatgtgtttgtctttgacatcaaaaatcatttatgcagcatctacatgcacatatacacacacaagtgtgaacgcat

SEQ ID NO: 1335 - DNA, 5543 bp, Homo sapiens
ggtgcgtcctggtccaccatggccaaaccaacaagcaaagattcaggcttgaaggagaagtttaagattctgttgggactgggaacaccgaggccaaatcccaggtctgcagagggtaaacagacggagtttatcatcaccgcggaaatactgagagaactgagcatggaatgtggcctcaacaatcgcatccggatgatagggcagatttgtgaagtcgcaaaaaccaagaaatttgaagagcacgcagtggaagcactctggaaggcggtcgcggatctgttgcagccggagcggccgctggaggcccggcacgcggtgctggctctgctgaaggccatcgtgcaggggcagggcgagcgtttgggggtcctcagagccctcttctttaaggtcatcaaggattacccttccaacgaagaccttcacgaaaggctggaggttttcaaggccctcacagacaatgggagacacatcacctacttggaggaagagctggctgactttgtcctgcagtggatggatgttggcttgtcctcggaattccttctggtgctggtgaacttggtcaaattcaatagctgttacctcgacgagtacatcgcaaggatggttcagatgatctgtctgctgtgcgtccggaccgcgtcctctgtggacatagaggtctccctgcaggtgctggacgccgtggtctgctacaactgcctgccggctgagagcctcccgctgttcatcgttaccctctgtcgcaccatcaacgtcaaggagctctgcgagccttgctggaagctgatgcggaacctccttggcacccacctgggccacagcgccatctacaacatgtgccacctcatggaggacagagcctacatggaggacgcgcccctgctgagaggagccgtgttttttgtgggcatggctctctggggagcccaccggctctattctctcaggaactcgccgacatctgtgttgccatcattttaccaggccatggcatgtccgaacgaggtggtgtcctatgagatcgtcctgtccatcaccaggctcatcaagaagtataggaaggagctccaggtggtggcgtgggacattctgctgaacatcatcgaacggctccttcaacagctccagaccttggacagcccggagctcaggaccatcgtccatgacctgttgaccacggtggaggagctgtgtgaccagaacgagttccacgggtctcaggagagatactttgaactggtggagagatgtgcggaccagaggcctgagtcctccctcctgaacctgatctcctatagagcgcagtccatccacccggccaaggacggctggattcagaacctgcaggcgctgatggagagattcttcaggagcgagtcccgaggcgccgtgcgcatcaaggtgctggacgtgctgtcctttgtgctgctcatcaacaggcagttctatgaggaggagctgattaactcagtggtcatctcgcagctctcccacatccccgaggataaagaccaccaggtccgaaagctggccacccagttgctggtggacctggcagagggctgccacacacaccacttcaacagcctgctggacatcatcgagaaggtgatggcccgctccctctccccacccccggagctggaagaaagggatgtggccgcatactcggcctccttggaggatgtgaagacagccgtcctggggcttctggtcatccttcagaccaagctgtacaccctgcctgcaagccacgccacgcgtgtgtatgagatgctggtcagccacattcagctccactacaagcacagctacaccctgccaatcgcgagcagcatccggctgcaggcctttgacttcctgttgctgctgcgggccgactcactgcaccgcctgggcctgcccaacaaggatggagtcgtgcggttcagcccctactgcgtctgcgactacatggagccagagagaggctctgagaagaagaccagcggccccctttctcctcccacagggcctcctggcccggcgcctgcaggccccgccgtgcggctggggtccgtgccctactccctgctcttccgcgtcctgctgcagtgcttgaagcaggagtctgactggaaggtgctgaagctggttctgggcaggctgcctgagtccctgcgctataaagtgctcatctttacttccccttgcagtgtggaccagctgtgctctgctctctgctccatgctttcaggcccaaagacactggagcggctccgaggcgccccagaaggcttctccagaactgacttgcacctggccgtggttccagtgctgacagcattaatctcttaccataactacctggacaaaaccaaacagcgcgagatggtctactgcctggagcagggcctcatccaccgctgtgccagacagtgcgtcgtggccttgtccatctgcagcgtggagatgcctgacatcatcatcaaggcgctgcctgttctggtggtgaagctcacgcacatctcagccacagccagcatggccgtcccactgctggagttcctgtccactctggccaggctgccgcacctctacaggaactttgccgcggagcagtatgccagtgtgttcgccatctccctgccgtacaccaacccctccaagtttaatcagtacatcgtgtgtctggcccatcacgtcatagccatgtggttcatcaggtgccgcctgcccttccggaaggattttgtccctttcatcactaagggcctgcggtccaatgtcctcttgtcttttgatgacacccccgagaaggacagcttcagggcccggagtactagtctcaacgagagacccaagagtctgaggatagccagaccccccaaacaaggcttgaataactctccacccgtgaaagaattcaaggagagctctgcagccgaggccttccggtgccgcagcatcagtgtgtctgaacatgtggtccgcagcaggatacagacgtccctcaccagtgccagcttggggtctgcagatgagaactccgtggcccaggctgacgatagcctgaaaaacctccacctggagctcacggaaacctgtctggacatgatggctcgatacgtcttctccaacttcacggctgtcccgaagaggtctcctgtgggcgagttcctcctagcgggtggcaggaccaaaacctggctggttgggaacaagcttgtcactgtgacgacaagcgtgggaaccgggacccggtcgttactaggcctggactcgggggagctgcagtccggcccggagtcgagctccagccccggggtgcatgtgagacagaccaaggaggcgccggccaagctggagtcccaggctgggcagcaggtgtcccgtggggcccgggatcgggtccgttccatgtcggggggccatggtcttcgagttggcgccctggacgtgccggcctcccagttcctgggcagtgccacttctccaggaccacggactgcaccagccgcgaaacctgagaaggcctcagctggcacccgggttcctgtgcaggagaagacgaacctggcggcctatgtgcccctgctgacccagggctgggcggagatcctggtccggaggcccacagggaacaccagctggctgatgagcctggagaacccgctcagccctttctcctcggacatcaacaacatgcccctgcaggagctgtctaacgccctcatggcggctgagcgcttcaaggagcaccgggacacagccctgtacaagtcactgtcggtgccggcagccagcacggccaaaccccctcctctgcctcgctccaacacagtggcctctttctcctccctgtaccagtccagctgccaaggacagctgcacaggagcgtttcctgggcagactccgccgtggtcatggaggagggaagtccgggcgaggttcctgtgctggtggagcccccagggttggaggacgttgaggcagcgctaggcatggacaggcgcacggatgcctacagcaggtcgtcctcagtctccagccaggaggagaagtcgctccacgcggaggagctggttggcaggggcatccccatcgagcgagtcgtctcctcggagggtggccggccctctgtggacctctccttccagccctcgcagcccctgagcaagtccagctcctctcccgagctgcagactctgcaggacatcctcggggaccctggggacaaggccgacgtgggccggctgagccctgaggttaaggcccggtcacagtcagggaccctggacggggaaagtgctgcctggtcggcctcgggcgaagacagtcggggccagcccgagggtcccttgccttccagctccccccgctcgcccagtggcctccggccccgaggttacaccatctccgactcggccccatcacgcaggggcaagagagtagagagggacgccttaaagagcagagccacagcctccaatgcagagaaagtgccaggcatcaaccccagtttcgtgttcctgcagctctaccattcccccttctttggcgacgagtcaaacaagccaatcctgctgcccaatgagtcacagtcctttgagcggtcggtgcagctcctcgaccagatcccatcatacgacacccacaagatcgccgtcctgtatgttggagaaggccagagcaacagcgagctcgccatcctgtccaatgagcatggctcctacaggtacacggagttcctgacgggcctgggccggctcatcgagctgaaggactgccagccggacaaggtgtacctgggaggcctggacgtgtgtggtgaggacggccagttcacctactgctggcacgatgacatcatgcaagccgtcttccacatcgccaccctgatgcccaccaaggacgtggacaagcaccgctgcgacaagaagcgccacctgggcaacgactttgtgtccattgtctacaatgactccggtgaggacttcaagcttggcaccatcaagggccagttcaactttgtccacgtgatcgtcaccccgctggactacgagtgcaacctggtgtccctgcagtgcaggaaagacatggagggccttgtggacaccagcgtggccaagatcgtgtctgaccgcaacctgcccttcgtggcccgccagatggccctgcacgcaaatatggcctcacaggtgcatcatagccgctccaaccccaccgatatctacccctccaagtggattgcccggctccgccacatcaagcggctccgccagcggatctgcgaggaagccgcctactccaaccccagcctacctctggtgcaccctccgtcccatagcaaagcccctgcacagactccagccgagcccacacctggctatgaggtgggccagcggaagcgcctcatctcctcggtggaggacttcaccgagtttgtgtgaggccggggccctccctcctgcactggccttggacggtattgcctgtcagtgaaataaataaagtcctgaccccagtgcacagacatagaggcacagattgc

SEQ ID NO: 1336 - protein, 1807 aa, Homo sapiens [sequence omitted]

SEQ ID NO: 1337 - DNA, 307 bp, Homo sapiens
cgtgctgactcggcgttttcatccacttctttaatgtacggcagaaaacacatctgcatttgatagtcacatgatcctgctgccaggcaaaacgttgttgggatgccaaatccaacgctgagggactgtggagcgaatcggctttttaatgtgcttgctcacccaccagtcattttcagactcaaagtaacaaacagaaatgagtcgtgctccacttcccacagcaaatttgttctctaggggggaccacttcacaaaagtagctgcgcgattaattctcaggatcaccagggttggcttccaaaca

SEQ ID NO: 1338 - DNA, 5297 bp, Homo sapiens
gggccgggccgggctgggctggagcagcggcgcccgggagccgagcttgcagcgagggaccggctgaggcgcgcgggagggaaggaggcaagggctccgcggcgctgtcgcgctgccgctcactctcggggaagagatggcggcggagcggggagcccggcgactcctcagcaccccctccttctggctctactgcctgctgctgctcgggcgccgggcgccgggcgccgcggcggccaggagcggctccgcgccgcagtccccaggagccagcattcgaacgttcactccattttattttctggtggagccggtggatacactctcagttagaggctcttctgttatattaaactgttcagcatattctgagccttctccaaaaattgaatggaaaaaagatggaacttttttaaacttagtatcagatgatcgacgccagcttctcccggatggatctttatttatcagcaatgtggtgcattccaaacacaataaacctgatgaaggttattatcagtgtgtggccactgttgagagtcttggaactattatcagtagaacagcgaagctcatagtagcaggtcttccaagatttaccagccaaccagaaccttcctcagtttatgctgggaacggagcaattctgaattgtgaagttaatgcagatttggtcccatttgtgaggtgggaacagaacagacaaccccttcttctggatgatagagttatcaaacttccaagtggaatgctggttatcagcaatgcaactgaaggagatggcgggctttatcgctgcgtagtggaaagtggtgggccaccaaagtatagtgatgaagttgaattgaaggttcttccagatcctgaggtgatatcagacttggtatttttgaaacagccttctcccttagtcagagtcattggtcaggatgtagtgttgccatgtgttgcttcaggacttcctactccaaccattaaatggatgaaaaatgaggaggcacttgacacagaaagctctgaaagattggtattgctggcaggtggtagcctggagatcagtgatgttactgaggatgatgctgggacttatttttgtatagctgataatggaaatgagacaattgaagctcaagcagagcttacagtgcaagctcaacctgaattcctgaagcagcctactaatatatatgctcacgaatctatggatattgtatttgaatgtgaagtgactggaaaaccaactccaactgtgaagtgggtcaaaaatggggatatggttatcccaagtgattattttaagattgtaaaggaacataatcttcaagttttgggtctggtgaaatcagatgaagggttctatcagtgcattgctgaaaatgatgttggaaatgcacaagctggagcccaactgataatccttgaacatgcaccagccacaacgggaccactgccttcagctcctcgggatgtcgtggcctccctggtctctacccgcttcatcaaattgacgtggcggacacctgcatcagatcctcacggagacaaccttacctactctgtgttctacaccaaggaagggattgctagggaacgtgttgagaataccagtcacccaggagagatgcaagtaaccattcaaaacctaatgccagcgaccgtgtacatctttagagttatggctcaaaataagcatggctcaggagagagttcagctccactgcgagtagaaacacaacctgaggttcagctccctggcccagcacctaaccttcgtgcatatgcagcttcgcctacctccatcactgttacgtgggaaacaccagtgtctggcaatggggaaattcagaattataagttgtactacatggaaaaggggactgataaagaacaggatgttgatgtttcaagtcactcttacaccattaatgggttgaaaaaatatacagagtatagtttccgagtggtggcctacaataaacatggtcctggagtttccacaccagatgttgctgttcgaacattgtcagatgttcccagtgctgctcctcagaatctgtccttggaagtgagaaattcaaagagtattatgattcactggcagccacctgctccagccacacaaaatgggcagattactggctacaagattcgctaccgaaaggcctcccgaaagagtgatgtcactgagaccttggtaagcgggacacagctgtctcagctgattgaaggtcttgatcgggggactgagtataatttccgagtggctgctctaacaatcaatggtacaggcccggcaactgactggctgtctgctgaaacttttgaaagtgacctagatgaaactcgtgttcctgaagtgcctagctctcttcacgtacgcccgctcgttactagcatcgtagtgagctggactcctccagagaatcagaacattgtggtcagaggttacgccattggttatggcattggcagccctcatgcccagaccatcaaagtggactataaacagcgctattacaccattgaaaatctggatcccagctctcactatgtgattaccctgaaagcatttaataacgtgggtgaaggcatccccctgtatgagagtgctgtgaccaggcctcacacagacacttctgaagttgatttatttgttattaatgctccatacactccagtgccagatcccactcccatgatgccaccagtgggagttcaggcttccattctgagtcatgacaccatcaggattacgtgggcagacaactcgctgcccaagcaccagaagattacagactcccgatactacaccgtccgatggaaaaccaacatcccagcaaacaccaagtacaagaatgcaaatgcaaccactttgagttatttggtgactggtttaaagccgaatacactctatgaattctctgtgatggtgaccaaaggtcgaagatcaagtacatggagtatgacagcccatgggaccacctttgaattagttccgacttctccacccaaggatgtgactgttgtgagtaaagaggggaaacctaagaccataattgtgaattggcagcctccctctgaagccaatggcaaaattacaggttacatcatatattacagtacagatgtgaatgcagagatacatgactgggttattgagcctgttgtgggaaacagactgactcaccagatacaagagttaactcttgacacaccatactacttcaaaatccaggcacggaactcaaagggcatgggacccatgtctgaagctgtccaattcagaacacctaaagcggactcctctgataaaatgcctaatgatcaagcctcagggtctggagggaaaggaagccggctgccagacctaggatccgactacaaacctccaatgagcggcagtaacagccctcatgggagccccacctctcctctggacagtaatatgctgctggtcataattgtttctgttggcgtcatcaccatcgtggtggttgtgattatcgctgtcttttgtacccgtcgtaccacctctcaccagaaaaagaaacgagctgcctgcaaatcagtgaatggctctcataagtacaaagggaattccaaagatgtgaaacctccagatctctggatccatcatgagagactggagctgaaacccattgataagtctccagacccaaaccccatcatgactgatactccaattcctcgcaactctcaagatatcacaccagttgacaactccatggacagcaatatccatcaaaggcgaaattcatacagagggcatgagtcagaggacagcatgtctacactggctggaaggcgaggaatgagaccaaaaatgatgatgccctttgactcccagccaccccagcctgtgattagtgcccatcccatccattccctcgataaccctcaccatcatttccactccagcagcctcgcttctccagctcgcagtcatctctaccacccgggcagcccatggcccattggcacatccatgtccctttcagacagggccaattccacagaatccgttcgaaatacccccagcactgacaccatgccagcctcttcgtctcaaacatgctgcactgatcaccaggaccctgaaggtgctaccagctcctcttacttggccagctcccaagaggaagattcaggccagagtcttcccactgcccatgttcgcccttcccacccattgaagagcttcgccgtgccagcaatcccgcctccaggacctcccacctatgatcctgcattgccaagcacaccattactgtcccagcaagctctgaaccatcacattcactcagtgaagacagcctccatcgggactctaggaaggagccggcctcctatgccagtggttgttcccagtgcccctgaagtgcaggagaccacaaggatgttggaagactccgagagtagctatgaaccagatgagctgaccaaagagatggcccacctggaaggactaatgaaggacctaaacgctatcacaacagcatgacgaccttcaccaggacctgacttcaaacctgagtctggaagtcttggaacttaacccttgaaaacaaggaattgtacagagtacgagaggacagcacttgagaacacagaatgagccagcagactggccagcgcctctgtgtagggctggctccaggcatggccacctgccttcccctggtcagcctggaagaagcctgtgtcgaggcagcttccctttgcctgctgatattctgcaggactgggcaccatgggccaaaattttgtgtccagggaagaggcgagaagtgcaacctgcatttcactttgtggtcaggccgtgtctttgtgctgtgactgcatcacctttatggagtgtagacattggcatttatgtacaattttatttgtgtcttattttattttaccttcaaaaacaaaaacgccatccaaaaccaaggaagtccttggtgttctccacaagtggttgacatttgactgcttgttccaattatgtatggaaagtctttgacagtgtgggtcgttcctggggttggcttgttttttggtttcatttttattttttaattctgagtcattgcatcctctaccagctgttaatccatcactctgagggggaggaaatgttgcattgctgtttgtaagctttttttattatttttttattataattattaaaggcctgactctttcctctcatcactgtgagattacagatctatttgaattgaatgaaatgtaacattgaaaaaaaaaaaaaaaaaaaaaaaaaaaaa

SEQ ID NO: 1339 - protein, 1461 aa, Homo sapiens
MAAERGARRLLSTPSFWLYCLLLLGRRAPGAAAARSGSAPQSPGASIRTFTPFYFLVEPVDTLSVRGSSVILNCSAYSEPSPKIEWKKDGTFLNLVSDDRRQLLPDGSLFISNVVHSKHNKPDEGYYQCVATVESLGTIISRTAKLIVAGLPRFTSQPEPSSVYAGNGAILNCEVNADLVPFVRWEQNRQPLLLDDRVIKLPSGMLVISNATEGDGGLYRCVVESGGPPKYSDEVELKVLPDPEVISDLVFLKQPSPLVRVIGQDVVLPCVASGLPTPTIKWMKNEEALDTESSERLVLLAGGSLEISDVTEDDAGTYFCIADNGNETIEAQAELTVQAQPEFLKQPTNIYAHESMDIVFECEVTGKPTPTVKWVKNGDMVIPSDYFKIVKEHNLQVLGLVKSDEGFYQCIAENDVGNAQAGAQLIILEHAPATTGPLPSAPRDVVASLVSTRFIKLTWRTPASDPHGDNLTYSVFYTKEGIARERVENTSHPGEMQVTIQNLMPATVYIFRVMAQNKHGSGESSAPLRVETQPEVQLPGPAPNLRAYAASPTSITVTWETPVSGNGEIQNYKLYYMEKGTDKEQDVDVSSHSYTINGLKKYTEYSFRVVAYNKHGPGVSTPDVAVRTLSDVPSAAPQNLSLEVRNSKSIMIHWQPPAPATQNGQITGYKIRYRKASRKSDVTETLVSGTQLSQLIEGLDRGTEYNFRVAALTINGTGPATDWLSAETFESDLDETRVPEVPSSLHVRPLVTSIVVSWTPPENQNIVVRGYAIGYGIGSPHAQTIKVDYKQRYYTIENLDPSSHYVITLKAFNNVGEGIPLYESAVTRPHTDTSEVDLFVINAPYTPVPDPTPMMPPVGVQASILSHDTIRITWADNSLPKHQKITDSRYYTVRWKTNIPANTKYKNANATTLSYLVTGLKPNTLYEFSVMVTKGRRSSTWSMTAHGTTFELVPTSPPKDVTVVSKEGKPKTIIVNWQPPSEANGKITGYIIYYSTDVNAEIHDWVIEPVVGNRLTHQIQELTLDTPYYFKIQARNSKGMGPMSEAVQFRTPKADSSDKMPNDQASGSGGKGSRLPDLGSDYKPPMSGSNSPHGSPTSPLDSNMLLVIIVSVGVITIVVVVIIAVFCTRRTTSHQKKKRAACKSVNGSHKYKGNSKDVKPPDLWIHHERLELKPIDKSPDPNPIMTDTPIPRNSQDITPVDNSMDSNIHQRRNSYRGHESEDSMSTLAGRRGMRPKMMMPFDSQPPQPVISAHPIHSLDNPHHHFHSSSLASPARSHLYHPGSPWPIGTSMSLSDRANSTESVRNTPSTDTMPASSSQTCCTDHQDPEGATSSSYLASSQEEDSGQSLPTAHVRPSHPLKSFAVPAIPPPGPPTYDPALPSTPLLSQQALNHHIHSVKTASIGTLGRSRPPMPVVVPSAPEVQETTRMLEDSESSYEPDELTKEMAHLEGLMKDLNAITTA

SEQ ID NO: 1340 - DNA, 4236 bp, Homo sapiens
cggggactcggaggtactgggcgcgcgcggctccggctcgggacgcctcgggacgcctcggggtcgggttccggttgcggctgctgctgcggcgcccgcgcttccgtagcgttccgcctcctgtgcccgccgcggagcaagtctgcgcgcccgccgtgcgcccctaagctccttttacctgagcccgccgcgatgggagctgcgcggggatccccggccagaccccgccggttgcctctgctcagcgtcctgctgctgccgctgctgggcggtacccagacagccattgtcttcatcaagcagccgtcctcccaggatgcactgcaggggcgccgggcgctgcttcgctgtgaggttgaggctccgggcccggtacatgtgtactggctgctcgatggggcccctgtccaggacacggagcggcgtttcgcccagggcagcagcctgagctttgcagctgtggacccgctgcaggactctggcaccttccagtgtgtggctcgggatgatgtcactggagaagaagcccgcagtgccaacgcctccttcaacatcaaatggattgaggcaggtcctgtggtcctgaagcatccagcctcggaagctgagatccagccacagacccaggtcaaacttcgttgccacattgatgggcaccctcggcccacctaccaatggttccgagatgggacccccctttctgatggtcagagcaaccacacagtcagcagcaaggagcggaacctgacgctccggccagctggtcctgagcatagtgggctgtattcctgctgcgcccacagtgcttttagccaggcttgcagcagccagaacttcaccttgagcattgctgatgaaagctttgccagggtggtgctggcaccccaggacgtggtagtagcgaggtatgaggaggccatgttccattgccagttctcagcccagccacccccgagcctgcagtggctctttgaggatgagactcccatcactaaccgcagtcgccccccacacctccgcagagccacagtgtttgccaacgggtctctgctgctgacccaggtccggccacgcaatgcagggatctaccgctgcattggccaggggcagaggggcccacccatcatcctggaagccacacttcacctagcagagattgaagacatgccgctatttgagccacgggtgtttacagctggcagcgaggagcgtgtgacctgccttccccccaagggtctgccagagcccagcgtgtggtgggagcacgcgggagtccggctgcccacccatggcagggtctaccagaagggccacgagctggtgttggccaatattgctgaaagtgatgctggtgtctacacctgccacgcggccaacctggctggtcagcggagacaggatgtcaacatcactgtggccactgtgccctcctggctgaagaagccccaagacagccagctggaggagggcaaacccggctacttggattgcctgacccaggccacaccaaaacctacagttgtctggtacagaaaccagatgctcatctcagaggactcacggttcgaggtcttcaagaatgggaccttgcgcatcaacagcgtggaggtgtatgatgggacatggtaccgttgtatgagcagcaccccagccggcagcatcgaggcgcaagccgtgctccaagtgctggaaaagctcaagttcacaccaccaccccagccacagcagtgcatggggtttgacaaggaggccacggtgccctgttcagccacaggccgagagaagcccactattaagtgggaacgggcagatgggagcagcctcccagagtgggtgacagacaacgctgggaccctgcattttgcccgggtgactcgagatgacgctggcaactacacttgcattgcctccaacgggccgcagggccagattcgtgcccatgtccagctcactgtggcagtttttatcaccttcaaagtggaaccagagcgtacgactgtgtaccagggccacacagccctactgcagtgcgaggcccagggggaccccaagccgctgattcagtggaaaggcaaggaccgcatcctggaccccaccaagctgggacccaggatgcacatcttccagaatggctccctggtgatccatgacgtggcccctgaggactcaggccgctacacctgcattgcaggcaacagctgcaacatcaagcacacggaggcccccctctatgtcgtggacaagcctgtgccggaggagtcggagggccctggcagccctcccccctacaagatgatccagaccattgggttgtcggtgggtgccgctgtggcctacatcattgccgtgctgggcctcatgttctactgcaagaagcgctgcaaagccaagcggctgcagaagcagcccgagggcgaggagccagagatggaatgcctcaacggtgggcctttgcagaacgggcagccctcagcagagatccaagaagaagtggccttgaccagcttgggctccggccccgcggccaccaacaaacgccacagcacaagtgataagatgcacttcccacggtctagcctgcagcccatcaccacgctggggaagagtgagtttggggaggtgttcctggcaaaggctcagggcttggaggagggagtggcagagaccctggtacttgtgaagagcctgcagagcaaggatgagcagcagcagctggacttccggagggagttggagatgtttgggaagctgaaccacgccaacgtggtgcggctcctggggctgtgccgggaggctgagccccactacatggtgctggaatatgtggatctggaagacctcaagcagttcctgaggatttccaagagcaaggatgaaaaattgaagtcacagcccctcagcaccaagcagaaggtggccctatgcacccaggtagccctgggaatggagcacctgtccaacaaccgctttgtgcataaggacttggctgcgcgtaactgcctggtcagtgcccagagacaagtgaaggtgtctgccctgggcctcagcaaggatgtgtacaacagtgagtactaccacttccgccaggcctgggtggcgctgcgctggatgtcccccgaggccatcctggagggtgacttctctaccaagtctgatgtctgggcctccggtgtgctgatgtgggaagtgtttacacatggagagatgccccatggtgggcaggcagatgatgaagtactggcagatttgcaggctgggaaggctagacttcctcagcccgagggctgcccttccaaactctatcggctgatgcagcgctgctgggccctcagccccaaggaccggccctccttcagtgagattgccagcgccctgggagacagcaccgtggacagcaagccgtgaggagggagcccgctcaggatggcctgggcaggggaggacatctctagagggaagctcacagcatgatgggcaagatccctgtcctcctgggccctgaggcccctgccctagtgcaacaggcattgctgaggtctgagcagggcctggcctttcctcctcttcctcaccctcatcctttgggaggctgacttggacccaaactgggcgactagggctttgagctgggcagttttccctgccacctcttcctctatcagggacagtgtgggtgccacaggtaaccccaatttctggccttcaacttctccccttgaccgggtccaactctgccactcatctgccaactttgcctggggagggctaggcttgggatgagctgggtttgtggggagttccttaatattctcaagttctgggcacacagggttaatgagtctcttggcccactggtcccacttgggggtctagaccaggattatagaggacacagcaagtgagtcctccccactctgggcttgtgcacactgacccagacccacggtcttccccacccttctctcctttcctcatcctaagtgcctggcagatgaaggagttttcaggagcttttgacactatataaaccgccctttttgtatgcaccacgggcggcttttatatgtaattgcagcgtggggtgggtgggcatgggaggtaggggtgggccctggagatgaggagggtgggccatccttaccccacacttttattgttgtcgttttttgtgtgtttgtgtttttttgtttttgtttttgtttttacactcgctgctctcaataaataagccttttt

SEQ ID NO: 1341 - protein, 1070 aa, Homo sapiens [sequence omitted]

SEQ ID NO: 1342 - DNA, 354 bp, Homo sapiens
  misc_feature (6)..(6): n is a, c, g, or t
  misc_feature (137)..(137): n is a, c, g, or t
ctcgtncaattcggcagggcacggtactgcagctgccttagcgtttttaagtcaggagagccgaacgcgggccgggtgtgccgggggcctacgggtcccggccccggtcactatggacagttttttcttcggctgtnagctctccggccacacccgctccttcacctttaaggtagaggaagaggatgatgcggagacgtgctggcactaaccatgctctgcctcaccgagggagccaaagacgagtgtaatgtggtagaagttgtggcccggaaccatgaccatcaggagatcgcagtccctgtggccaacctcaagctgtcctgccaacccatgctcagtcttggatgactt

SEQ ID NO: 1343 - DNA, 878 bp, Homo sapiens
cagattttcaggttgattgatgtgggacagcagccacaatgaggaactcctatagatttctggcatcctctctctcagttgtcgtttctctcctgctaattcctgaagatgtctgtgaaaaaattattggaggaaatgaagtaactcctcattcaagaccctacatggtcctacttagtcttgacagaaaaaccatctgtgctggggctttgattgcaaaagactgggtgttgactgcagctcactgtaacttgaacaaaaggtcccaggtcattcttggggctcactcaataaccagggaagagccaacaaaacagataatgcttgttaagaaagagtttccctatccatgctatgacccagccacacgcgaaggtgaccttaaacttttacagctgacggaaaaagcaaaaattaacaaatatgtgactatccttcatctacctaaaaagggggatgatgtgaaaccaggaaccatgtgccaagttgcagggtgggggaggactcacaatagtgcatcttggtccgatactctgagagaagtcaatatcaccatcatagacagaaaagtctgcaatgatcgaaatcactataattttaaccctgtgattggaatgaatatggtttgtgctggaagcctccgaggtggaagagactcgtgcaatggagattctggaagccctttgttgtgcgagggtgttttccgaggggtcacttcctttggccttgaaaataaatgcggagaccctcgtgggcctggtgtctatattcttctctcaaagaaacacctcaactggataattatgactatcaagggagcagtttaaataaccgtttcctttcatttactgtggcttcttaatcttttcacaaataaa

SEQ ID NO: 1344 - protein, 262 aa, Homo sapiens
MRNSYRFLASSLSVVVSLLLIPEDVCEKIIGGNEVTPHSRPYMVLLSLDRKTICAGALIAKDWVLTAAHCNLNKRSQVILGAHSITREEPTKQIMLVKKEFPYPCYDPATREGDLKLLQLTEKAKINKYVTILHLPKKGDDVKPGTMCQVAGWGRTHNSASWSDTLREVNITIIDRKVCNDRNHYNFNPVIGMNMVCAGSLRGGRDSCNGDSGSPLLCEGVFRGVTSFGLENKCGDPRGPGVYILLSKKHLNWIIMTIKGAV

SEQ ID NO: 1345 - DNA, 335 bp, Homo sapiens
cctgcccctcatttgctctgatgttccctaaattctgtaatcatatcataacttttgttatgaatagagaggaatgggctcactgaaacctgacactagaaattggtgggtgatgctcataactgcaaacacttagcttattgaagtgcctctatttacatgttctttagttataatatgtatttttctaacagaaatacacgtctgtaattggtatatattatactttgtatgtgtcacaacaaaagctaaacagaggctaaagtctttagcagagaagaatgaattacaaatttaccaataagagctctgtttatggttctgtattgaaggac

SEQ ID NO: 1346 - DNA, 1576 bp, Homo sapiens
gctgaagcaaaagatttgcatttaaggagagaaatacaccctgaaatttgagtttgaaagattagaacatagagggtctctacagtgtttttctgcaacaccaagtagtcaaatctatttatagaaactctgattacaacagaaattttaaaatgaaattttccacatcggtattttgtaggaaagctcttataatcaatgcttaagctgctttttgaggcttttcttgtacagaggttgcagccaattacattttaattggtaggctgctgaataatgtttttgtatgttttaaaataatatttattttaataggttttttaacattatgcaaatcccaataaagaactgacacgttccataggccattgactgggaaattttgtgaaacacagcctaaatacacagtttttacaccaactaatttgtcttgcctttaaaactgattataactcttctttaagtacaacttttataaagaaaaaatacaacactaagactgtatgttctgtaaattatagtgtgatgacccatgcagaaccgctgtctgaagcttactcagcgattcatagccatctccagccatgttttatcaaatcacacactaaaaataaatggaaatgctacagtgaaaaaccaaaagttacagagcaacataagtaaaatgactaggcagtttcttagtaacatgtttgaaatgggaaaggtgactgactgcctttcaccagagtcttagctgtttcacgttcactattttaggttaattttcttgggaaatcaatttgaatattcccccctgtccttttgcattaaaggacgaaaatatatgttgagagtttgacagactttttaaatatgcctctttcccaattttatgtatttttggttctgcgcacacagatttatcaatgaagtacatttgcctctggctttatcacaaggaaaaaggaatcaaacattgaacacaaatgtgttccaaaccagtcttgtccatcttgtcacttttatgtgactgctcctctgaaccagaaggggcacgatagaaggccataggaatgaaagtaaatcattcaggtgaagtgagaaattcttccatatacagagtgaaaatgtgtgatttcattcctgccttcctttaaacgttgtcttgatctctgcctagtagtagttgagccctcagtcgcccaaacatgaggagagacccaactccagcagccagaatttagtatttacatttgccttcccaagttgagaatagaatgtggtgttctgtgctttctgtttttattattccaaaatatttttttaaagaagtgttatttttcaacagattcataaattagttcctgatgtacggtaaattaaaactcccactgtgtcagtcaaactgagatgtgctcatttcataaccactcatttctagtctgtcagagctgcactggtggcttattgctggtttttaaaggtgtttttaacttacatgtaacatgtttaggacatgttttttttttctaatttgtgtgtctttacaactgattaaacagtagtttaaaaataaaaaaaaaaaaaaaaaaaa

SEQ ID NO: 1347 - DNA, 354 bp, Homo sapiens
gcgtcgacgatgatactggttaaaatgctcaaaaagcctctggatcatccgagacagactcacagttcttggtcctcttcctccaggcctcattgtcttactgcttccatgttaaagcacccagacccttgtccagaacttttatagcaagataaaagatcccttccctgagcaacttcctcctgctttgggacacatcttccctcagggcacaatctgtcagacactcgctcgcctggcctgctgtctcccctcccggcctgatgttggatttcagtaggttgcagctaatgttgaatatatttcagatgctgtaccctctctgtgaactatgaagacatgattagcagatac

SEQ ID NO: 1348 - DNA, 4612 bp, Homo sapiens
cgaccgatatagctcgccaggtgggtgaaggttgccgaactgtccccctggctggacatgtggggtttgacagcttgcctgaccagctggtgaataagtccgtcagccagggcttctgcttcaacatcctgtgcgtgggagagacaggtttgggcaagtccaccctcatggacaccctgttcaacaccaaattcgaaggggagccagccacccacacacagccgggtgtccagctccagtctaatacctatgacctccaagagagcaacgtgaggctaaagctcacgatcgttagcacagttggctttggggaccagatcaacaaagaggacagctacaagcctatcgtggaattcatcgatgcacaattcgaggcctacctgcaggaagagctaaagatccgaagagtgctacacacctaccatgactcccgaatccatgtctgcttgtatttcattgcccccacgggtcattccctgaagtctctggacctagtgactatgaagaagctggacagtaaggtgaacatcatccccatcattgccaaagcagatgccatttcgaagagtgagctaacaaagttcaaaatcaaaatcaccagcgagcttgtcagcaacggagtccagatctatcagtttcctacagatgatgagtcggtggcagagatcaatggaaccatgaacgcccacctgccgtttgctgtcattggcagcacagaagaactgaagataggcaacaagatgatgagggcgcggcagtatccttggggcactgtgcaggttgaaaacgaggcccactgcgactttgtgaagctgcgggagatgctgattcgggtcaacatggaggatctgcgggagcagacccacacccggcactatgagctgtatcgccgctgtaagctggaggagatgggcttcaaggacaccgaccctgacagcaaacccttcagtttacaggagacatatgaggccaaaaggaacgagttcctaggggaactccagaaaaaagaagaggagatgagacagatgttcgtccagcgagtcaaagagaaagaagcggagctcaaagaggcagagaaagagctgcacgagaagtttgaccgtctgaagaaactgcaccaggacgagaagaagaaactggaggataagaagaaatccctggatgatgaagtgaatgctttcaagcaaagaaagacggcggctgagctgctccagtcccagggctcccaggctggaggctcacagactctgaagagagacaaagagaagaaaaattaactctgctgtttgctgcatgctgcatgagacccagggtcctgtttgggcttcctgtagacacccttttcctgcgcaacagagctgggcctccctttctctaatttcccccttaacatgcctggggggcatacaatccaacccgcgccctctcctctcttcctgccaaggtttatagaaacctgagaatctgagggtgatgtctggccgctggtcaagaagccaacagtcatgtggctcgcagatgcatcctgcatcccagtccccctcccagcacccccagccatcccccctgtcttcccccacatctttgccagaggtgtgacatggtcagggggcccatctgctactctttcccaccagctcccctgttccagttctggttgctgttagtttccctgaggtatttgcaaccaccatggctgggtaaccaccgatcagcacagctgtccccttggtctcctgtatcccagtcactagtcctccctggtccaccccaccctcatcctcaggagccacagccatttcttagagggtttcaaaaggacagcctttggcgccttttccttctaacctttgagtccagccctttccagttttcattcactcgaagtaactgcactcaagctgtgctcaaaatcggcaacgcatttatttacaccaagcccttcccataaaacacaactgctgaagaaaatagcagacgtttcccctctctctaactctgggtatcccacagatgcaaaagggagaataaacctgaatattattaccagcctagagtcttgaatgatagccttaccgaattcttcttgtgaggtatttcagcatctcggggggtaatttccggaagggctccatactgtcccaataaggtgaggccagtagcaggaataataaatcccactttgtaggctggaaaactgagctgtcaaaagaatcaagtgtttgggggtttgctctgatgagtcttctagttcatttggtgaatgtcatgatgatttttaacatgcattttgcatgcatcccccaataagaagagatgagactcggctggagagaagaaaaggcccttaactttctttccaatttaaggagttgagagtttaaaaatattccagccctaagtttttatcatgggtcccatctgatagtggctttgggaacctctgtgaagtagagagccctcccttgtcagggttatgaggcacagtggcctttggtgtttggccagtgacagtgtgagagatggagttgacctggcaatgatctgtggctaacatgccgtctctctgcccttcctttgcagtaatccatggctgtgtactgaatagtattccccgctacagctggactggactccatttagccttttaagccgaggttcctattttaactgacagctttcctttggggtgccaggcagcgaggccccccacccctatcctgccatgtacttcaagctcacttcttctttttgagttccgcaacttgctcctgcctcccagccccactggcactgaccatgaccacctacttctattttttttttagagtttctttttttgatcacttactttcaaagcacacagtcaaacaaggttatgccaaatttccaggcctttttgaagtattgagaaggggaaggggatttctcacttcaattatagatcataataggaagcaaaaagaaaaaaatgaaaagcaaacatatgcacgcacttttcttgttgacaaagcaagaatataggtttgctgtgtaggtttggtgctctattgattggtgagtgaccagagcaagtatgaaggtgatgctgccaaagcacaagcctttttgaagtattgagaaggggaaggggatttctcacttcaattatagatcataataggaagcaaaaagaaaaaaatgaaaagcaaacatatgcacgcacttttcttgttgacaaagcaagaatataggtttgctgtgtaggtttggtgctctattgattggtgagtgaccagagcaagtatgaaggtgatgctgccaaagcacaagccagtttcttgggaaaattcaagttacagtggagtatttttttgaagaccatatgcttggaggtagaaacaaaccaacgaccaaaaaaaaaaaaaaaaaatctgctcagatactcagccagtagctcagagagatgctgagttaggcctgtcaggtctccttgggaaaggcttcatatttgcaactttgatgattctatgtccagcttcagagctgctttcccagaaattcacgcttaaacaaccaaccggtaaccaccacttccccacaccgccgcccggtaattatttgcattacaaaccggaggcgccctcatttgcatttgtgtacagattaactagttaaggcttgagaagctctgaataattcaaaagtattagacccacacagccttggagagaccttcagaaactaaggaggagttttatattaagggagacattttagtcagtaagacgatataacctacttactccgtaaggggaaatgaaggcccagagaagggaagggacttgaccgaggtcccacttctgtttcgaggcagaagccagactaattttcatgcctcctgactcccaatcagtttcacaaagggattcaatctgtttatatacgttacattcctggatacgaggtcttttgatgttcagagtaactgactagttagtattagaagaccctcgaggtttttttccacagaaaaacatctgaagatggattgggtgagggctggcaaaacgaaggcatgccgggccagctccttaacccaatgacccagtgatgctgcaaggctggaacggggtccaggagactgtgtgtaacaggtgccctaggtgacccttataatcagggaagtttggtgaacaaaaatcgaacccatgagtgaacataaattaaaaagttgatcaacctattaaaatgtgtatttcattgggtagcttttctcactgtagacagattttttccttcttcaatgaaaaggcttttaaattagtacaactgttactatttaaaaaaaaaataccctaagtactctgtttacttctggtgaaacaaaaccagtcattagaaatggtctgtgcttttattttcccagactggagtggcttttctgaaacacacacacacacacacacacacacacacacgtacacacatccctcacttctcttaagccaagaagtttgctttccctagctgcagtgtagatggctcttgtttttgtttttttgttttaatcatttggcattcacatgtggctgttaatatgtgcttgtttttaattaaaacaagaagcttt

SEQ ID NO: 1349 - protein, 424 aa, Homo sapiens
TDIARQVGEGCRTVPLAGHVGFDSLPDQLVNKSVSQGFCFNILCVGETGLGKSTLMDTLFNTKFEGEPATHTQPGVQLQSNTYDLQESNVRLKLTIVSTVGFGDQINKEDSYKPIVEFIDAQFEAYLQEELKIRRVLHTYHDSRIHVCLYFIAPTGHSLKSLDLVTMKKLDSKVNIIPIIAKADAISKSELTKFKIKITSELVSNGVQIYQFPTDDESVAEINGTMNAHLPFAVIGSTEELKIGNKMMRARQYPWGTVQVENEAHCDFVKLREMLIRVNMEDLREQTHTRHYELYRRCKLEEMGFKDTDPDSKPFSLQETYEAKRNEFLGELQKKEEEMRQMFVQRVKEKEAELKEAEKELHEKFDRLKKLHQDEKKKLEDKKKSLDDEVNAFKQRKTAAELLQSQGSQAGGSQTLKRDKEKKN

SEQ ID NO: 1350 - DNA, 458 bp, Homo sapiens
gagattcctgtgttgcattgagtggggctgcatatttggagatcaactttgaatccggtgtgaaacgttcacttcctaggtcctctccttctgatgggaccacgtgttctgatgtggcagtagaaggcagtggtgactggcattcagaagtcttttcggttgtggatggtgagagagagggctcagaagcaggggccacagctggagtaaacgatccagtgtcttccttctcttctgatggaatcatgtattcagaaacacctttcaatattaacggggacttacggtcaattgttttcttcagtgactcttttgttgccagtgatggaactgaatattcagaagcagatgtggagtctggtgtgtaacaccactttctgaggcctcgtctcctgataggaccatgtattctggtgtaactgttgaaaaccagtggagactggttctctgctcgtgcc

SEQ ID NO: 1351 - DNA, 1633 bp, Homo sapiens
ctgagctgcatcatggtgcggtctgtggcctgggcaggtttcatggtcctgctgatgatcccatggggctctgctgcaaaactggtctgctacttcaccaactgggcccagtacagacagggggaggctcgcttcctgcccaaggacttggaccccagcctttgcacccacctcatctacgccttcgctggcatgaccaaccaccagctgagcaccactgagtggaatgacgagactctctaccaggagttcaatggcctgaagaagatgaatcccaagctgaagaccctgttagccatcggaggctggaatttcggcactcagaagttcacagatatggtagccacggccaacaaccgtcagacctttgtcaactcggccatcaggtttctgcgcaaatacagctttgacggccttgaccttgactgggagtacccaggaagccaggggagccctgccgtagacaaggagcgcttcacaaccctggtacaggacttggccaatgccttccagcaggaagcccagacctcagggaaggaacgccttcttctgagtgcagcggttccagctgggcagacctatgtggatgctggatacgaggtggacaaaatcgcccagaacctggattttgtcaaccttatggcctacgacttccatggctcttgggagaaggtcacgggacataacagccccctctacaagaggcaagaagagagtggtgcagcagccagcctcaacgtggatgctgctgtgcaacagtggctgcagaaggggacccctgccagcaagctgatccttggcatgcctacctacggacgctccttcacactggcctcctcatcagacaccagagtgggggccccagccacagggtctggcactccaggccccttcaccaaggaaggagggatgctggcctactatgaagtctgctcctggaagggggccaccaaacagagaatccaggatcagaaggtgccctacatcttccgggacaaccagtgggtgggctttgatgatgtggagagcttcaaaaccaaggtcagctatctgaagcagaagggactgggcggggccatggtctgggcactggacttagatgactttgccggcttctcctgcaaccagggccgataccccctcatccagacgctacggcaggaactgagtcttccatacttgccttcaggcaccccagagcttgaagttccaaaaccaggtcagccctctgaacctgagcatggccccagccctggacaagacacgttctgccagggcaaagctgatgggctctatcccaatcctcgggaacggtccagcttctacagctgtgcagcggggcggctgttccagcaaagctgcccgacaggcctggtgttcagcaactcctgcaaatgctgcacctggaattgagtcgtaaagcccctccagtccagctttgaggctgggcccaggatcactctacagcctgcctcctgggttttcctgggggccgcaatctggctcctgcaggcctttctgtggtcttcctttatccaggctttctgctctcagccttgccttccttttttctgggtctcctgggctgcccctttcacttgcaaaataaatctttggtttgtgcccctcttca

SEQ ID NO: 1352 - protein, 466 aa, Homo sapiens
MVRSVAWAGFMVLLMIPWGSAAKLVCYFTNWAQYRQGEARFLPKDLDPSLCTHLIYAFAGMTNHQLSTTEWNDETLYQEFNGLKKMNPKLKTLLAIGGWNFGTQKFTDMVATANNRQTFVNSAIRFLRKYSFDGLDLDWEYPGSQGSPAVDKERFTTLVQDLANAFQQEAQTSGKERLLLSAAVPAGQTYVDAGYEVDKIAQNLDFVNLMAYDFHGSWEKVTGHNSPLYKRQEESGAAASLNVDAAVQQWLQKGTPASKLILGMPTYGRSFTLASSSDTRVGAPATGSGTPGPFTKEGGMLAYYEVCSWKGATKQRIQDQKVPYIFRDNQWVGFDDVESFKTKVSYLKQKGLGGAMVWALDLDDFAGFSCNQGRYPLIQTLRQELSLPYLPSGTPELEVPKPGQPSEPEHGPSPGQDTFCQGKADGLYPNPRERSSFYSCAAGRLFQQSCPTGLVFSNSCKCCTWN

SEQ ID NO: 1353 - DNA, 1925 bp, Homo sapiens
gcggccgtcgcgtctgacagaccactgcagaccacgggccgaggcccagcgcccgtccgcagcgcggccggcatggcggcgacaaggagccccacgcgggcaagggagcgggagcggtctggcgctcccgccgcaggaagtgaccaagttcactcctggatgctagctacaagccaagccttagacactgtctggagaatggcaaaaggctttgtgatgttggcagtttcatttctggtggctgccatctgctacttccggaggctacatttatattcagggcacaagctgaaatggtggattggatatctgcagagaaaattcaaaaggaacctcagtgtggaggcagaggttgatttactcagttattgtgcaagagaatggaaaggagagacaccccgtaacaagctgatgaggaaggcttatgaggagctattttggcggcatcacattaaatgtgttcgacaagtaaggagagataactatgatgctctcagatcagtgttatttcagatattcagccagggcatctcttttccatcatggatgaaagaaaaggacattgttaagcttcctgaaaaactgctgttttcacaaggttgtaattggattcagcagtacagttttggtcctgagaagtatacaggctcgaatgtgtttggaaaactacggaaatatgtggaattattgaaaacacagtggactgaatttaatggcattagagattatcacaagagaggaagtatgtgcaacacccttttttcagatgccattctggaatataaactttatgaagctttaaagttcatcatgctgtatcaagtcactgaagtttatgaacaaatgaagactaaaaaggtcattcccagtctttttagactcctgttttccagggagacatcctctgatcctttgagcttcatgatgaatcacctgaattctgtaggcgacacatgtggactagagcagattgatatgtttatacttggatactcccttgaagtaaagataaaagtgttcagactgttcaagtttaactccagagactttgaagtctgctacccagaggagcctctcagggactggccggagatctccctgctgaccgagaacgaccgccactaccacattccagtcttttaagtccgctgggggccgaacagcagtgctcaccagtgacggtggtcacagttgcaataaagtctctctctgaaaccaaagctagcatttcagcatggaaggaattaggaccttttcttcaggattacaggtacactggatgcagccatgcatggatggtttttctttatttttcagtgatttcctctgaagcagctgcactgatacatttgggagttggtggcttgactttgtccataaggggcgtggccacttcacatgatggcgggcctttaagagcacaaagaagtttaatatggacaacaacaggaaaaagcaagaagaaaacaagtagggaaaaacagctaacctggagagaaagaatttctttaacctttatgttcttcattaaaaatcttatcttggactgatttgagggatttttagaaacatggccttattttatataagcattaccttcccaggaatctttgttgtatattaatttttgataaccatttgattaactttaaaattaagtatatgtgtgtatatatacatatgtatgtttatatacacacatgtatctgtatagttttatatatacatatatacacatagacatacagagaaccactactttgtaatagtgtacagtttgttttatatctctttactttttttgttactattttatctggccagcgtaatagttttatttagattttttaaaattctgtagattaaagcaaatgacagttattgaactatcacaaaactattaaactgtggtacatttaatgtgt

SEQ ID NO: 1354 - protein, 356 aa, Homo sapiens
MAATRSPTRARERERSGAPAAGSDQVHSWMLATSQALDTVWRMAKGFVMLAVSFLVAAICYFRRLHLYSGHKLKWWIGYLQRKFKRNLSVEAEVDLLSYCAREWKGETPRNKLMRKAYEELFWRHHIKCVRQVRRDNYDALRSVLFQIFSQGISFPSWMKEKDIVKLPEKLLFSQGCNWIQQYSFGPEKYTGSNVFGKLRKYVELLKTQWTEFNGIRDYHKRGSMCNTLFSDAILEYKLYEALKFIMLYQVTEVYEQMKTKKVIPSLFRLLFSRETSSDPLSFMMNHLNSVGDTCGLEQIDMFILGYSLEVKIKVFRLFKFNSRDFEVCYPEEPLRDWPEISLLTENDRHYHIPVF

SEQ ID NO: 1355 - DNA, 3755 bp, Homo sapiens
ggcggctgcggcacgggaaaggctcagtgactgaagctccaaaggccagcaggctggtggggacgtgaccgaagcgaggctctggttccctttcggtgggcgccatttgagcctcatctctggcttccccaggatgcgccggcagccggggagcggctccgggcgcgaggtctgaggatgatctttcctgtcgcccgctacgcgctccggtggctgcgacggcccgaagaccgtgccttttcccgcgccgccatggagatggccctccgaggcgtgcggaaagtcctctgtgtggccgaaaaaaacgacgcggccaaggggatcgccgacctgctgtcaaacggtcgcatgaggcggagagaaggactttcaaaattcaacaagatctatgaatttgattatcatctgtatggccagaatgttaccatggtaatgacttcagtttctggacatttactggctcatgatttccagatgcagtttcgaaaatggcagagctgcaaccctcttgtcctctttgaagcagaaattgaaaagtactgcccagagaattttgtagacatcaagaaaactttggaacgagagactcgccagtgccaggctctggtgatctggactgactgtgatagagaaggcgaaaacatcgggtttgagattatccacgtgtgtaaggctgtaaagcccaatctgcaggtgttgcgagcccgattctctgagatcacaccccatgccgtcaggacagcttgtgaaaacctgaccgagcctgatcagagggtgagcgatgctgtggatgtgaggcaggagctggacctgaggattggagctgcctttactaggttccagaccctgcggcttcagaggatttttcctgaggtgctggcagagcagctcatcagttacggcagctgccagttccccacactgggctttgtggtggagcggttcaaagccattcaggcttttgtaccagaaatcttccacagaattaaagtaactcatgaccacaaagatggtatcgtagaattcaactggaaaaggcatcgactctttaaccacacggcttgcctagttctctatcagttgtgtgtggaggatcccatggcaactgtggtagaggtcagatctaagcccaagagcaagtggcggcctcaagccttggacactgtggagcttgagaagctggcttctcgaaagttgagaataaatgctaaagaaaccatgaggattgctgagaagctctacactcaagggtacatcagctatccccgaacagaaacaaacatttttcccagagacttaaacctgacggtgttggtggaacagcagacccccgatccacgctggggggcctttgcccagagcattctagagcggggtggtcccaccccacgcaatgggaacaagtctgaccaagctcaccctcccattcaccccaccaaatacaccaacaacttacagggagatgaacagcgactgtacgagtttattgttcgccatttcctggcttgctgctcccaggatgctcaggggcaggagaccacagtggagatcgacatcgctcaggaacgctttgtggcccatggcctcatgattctggcccgaaactatctggatgtgtatccatatgatcactggagtgacaagatcctccctgtctatgagcaaggatcccactttcagcccagcaccgtggagatggtggacggggagaccagcccacccaagctgctcaccgaggccgacctcattgccctcatggagaagcatggcattggtacggatgccactcatgcggagcacatcgagaccatcaaagcccggatgtacgtgggcctcaccccagacaagcggttcctccctgggcacctgggcatgggacttgtggaaggttatgattccatgggctatgaaatgtctaagcctgacctccgggctgaactggaagctgatctgaagctgatctgtgatggcaaaaaggacaaatttgtggttctaaggcagcaagtgcagaaatacaagcaggttttcattgaagcggtggctaaagcaaagaaattggacgaggccttggcccagtactttgggaatgggacagagttggcccagcaagaagatatctacccagccatgccagagcccatcaggaagtgcccacagtgcaacaaggacatggtccttaagaccaagaagaatggcgggttctacctcagctgcatgggtttcccagagtgtcgctcagctgtgtggcttcctgactcggtgctggaggccagcagggacagcagtgtgtgtccagtttgtcagccacaccctgtgtacaggttaaagttaaagtttaagcgcggtagccttcccccgaccatgcctctggagtttgtttgctgcatcggcggatgcgacgacaccctgagggagatcctggacctgagattttcagggggcccccccagggctagccagccctctggccgcctgcaggctaaccagtccctgaacaggatggacaacagccagcacccccagcctgctgacagcagacagactgggtcctcaaaggctctggcccagaccctcccaccacccacggctgctggtgaaagcaattctgtgacctgcaactgtggccaggaggctgtgctgctcactgtccgtaaggagggccccaaccggggccggcagttctttaagtgcaacggaggtagctgcaacttcttcctgtgggcagacagccccaatccgggagcaggagggcctcctgccttggcatatagacccctgggcgcctccctgggatgcccaccaggcccagggatccacctaggtgggtttggcaaccctggtgatggcagtggtagtggcacatcctgcctttgcagccagccctccgtcacacggactgtgcagaaggatggacccaacaaggggcgccagttccacacatgtgccaagccgagagagcagcagtgtggctttttccagtgggtcgatgagaacaccgctccagggacttctggagccccgtcctggacaggagacagaggaagaaccctggagtcggaagccagaagcaaaaggccccgggccagttcctcagacatggggtccacagcaaagaaaccccggaaatgcagcctttgccaccagcctggacacacccgtcccttttgtcctcagaacagatgagctcagggtagggtagagaacgccactttctcagacctgtcccctttgtgtttagaaatgagttaaccaggaccaagtggccatttagtgtcctggaaacttagaggacagtgttggcctttggagtcgggccttcttgtgttaaggggcacaaggtccagatcactctggagcaggccagctctgctggacagtgaccctcttcccaggcctcaggagtgaccatagccactgctgaaaagtcacgcagctgctccctcggaccccccaaggatggttgctgttagcagaggattggtgcagtcccagctgaagcccactgtgtgccaaaggaagaagctcccagggctgcttccttcacctgcagaaagccccaagtgagccaccagcactcatggggcagtccctgtccaggctgcccagggcttctcatagacgtcctgagaaggacggtgtaatgcaaggaaatggctgtggtaacactgatccttcagaagaagcttcattccctcttaatctagttaagccaggacatccagaattcattgctttaataaagaacccaggccggg

SEQ ID NO: 1356 - protein, 1001 aa, Homo sapiens
MIFPVARYALRWLRRPEDRAFSRAAMEMALRGVRKVLCVAEKNDAAKGIADLLSNGRMRRREGLSKFNKIYEFDYHLYGQNVTMVMTSVSGHLLAHDFQMQFRKWQSCNPLVLFEAEIEKYCPENFVDIKKTLERETRQCQALVIWTDCDREGENIGFEIIHVCKAVKPNLQVLRARFSEITPHAVRTACENLTEPDQRVSDAVDVRQELDLRIGAAFTRFQTLRLQRIFPEVLAEQLISYGSCQFPTLGFVVERFKAIQAFVPEIFHRIKVTHDHKDGIVEFNWKRHRLFNHTACLVLYQLCVEDPMATVVEVRSKPKSKWRPQALDTVELEKLASRKLRINAKETMRIAEKLYTQGYISYPRTETNIFPRDLNLTVLVEQQTPDPRWGAFAQSILERGGPTPRNGNKSDQAHPPIHPTKYTNNLQGDEQRLYEFIVRHFLACCSQDAQGQETTVEIDIAQERFVAHGLMILARNYLDVYPYDHWSDKILPVYEQGSHFQPSTVEMVDGETSPPKLLTEADLIALMEKHGIGTDATHAEHIETIKARMYVGLTPDKRFLPGHLGMGLVEGYDSMGYEMSKPDLRAELEADLKLICDGKKDKFVVLRQQVQKYKQVFIEAVAKAKKLDEALAQYFGNGTELAQQEDIYPAMPEPIRKCPQCNKDMVLKTKKNGGFYLSCMGFPECRSAVWLPDSVLEASRDSSVCPVCQPHPVYRLKLKFKRGSLPPTMPLEFVCCIGGCDDTLREILDLRFSGGPPRASQPSGRLQANQSLNRMDNSQHPQPADSRQTGSSKALAQTLPPPTAAGESNSVTCNCGQEAVLLTVRKEGPNRGRQFFKCNGGSCNFFLWADSPNPGAGGPPALAYRPLGASLGCPPGPGIHLGGFGNPGDGSGSGTSCLCSQPSVTRTVQKDGPNKGRQFHTCAKPREQQCGFFQWVDENTAPGTSGAPSWTGDRGRTLESEARSKRPRASSSDMGSTAKKPRKCSLCHQPGHTRPFCPQNR

SEQ ID NO: 1357 - DNA, 227968 bp, Homo sapiens
gatcctccagcctaagcctgcccaatagctggaactacaggtgtgcgcccccatatccagctcattttaaattttttgcagagatgtggcgtcttgctatgttgcccaggctggtcttgaactcctgggctcaagtgatcctcccgtcttagcctcctgagtagctgagattacaggcgtgaaccactgcgtcctgctgactctgattttacaaccagcccacccctgccacaaacatcccagggaacagggatccctgacttctactccaggtggcctacctggtccagctgcctccccacacccaccaggccctggcccagctcttaccacaagctccagaccagcttggagctgcactttatagccgtagacggtggtaatcacttcctgcaagaagatggagctcctgggcggatccatcttgttgcgtccttccacgaggaggggctccaccccctcaggcagtacgtccacagtcttgatcagaacataggtcatgcggccttgcaagcggtagctgaagccgtcaaatgtgaggtaacgggggtcgccatagactgagcattgttcagactctgccaagaagtcagacagtgagaaggggccgggcgcagtggctcacgcctgtaatcccaggactttgggaggccaaggcgggtggatgacctgaggtcaggagtttgagaccagcctggccaacatggtgaaatcctgtctctactaaaaatacaaaaattagccaggtgtggtggtgcgtgcctgtaatcccagctacttggtaggctgaggcaagagaattgcttgaacccgggaggcagaggttgtagtgagcgccgagatcgcgccactgcactccagcctgggagacagagtaagacaccatctcaaaaaaacaaaagactgagaagggaccctgcccaggtgtgacagtccccagagtccctcccccacggtggcatcccctgtggccaccctcttaggctcaggctccctggatcctttcttttctttttttaattttctttttctttttttgagacagggtcttattctgtcacccagactggagtacaagtggtacgatcatagctcactgcagcctccacctcctggtctcgagtgatcctcctgagtagctgggactttaggtgcgcaccaccacccctagctaatttttttcttttttttttagaaatggccacactacattgcccaggctggtcttgaactcctggcctcaagaaatcctcccaccttggcctcccaaagtccaaagtgctgagattacaggcataagccaccaagcccggtacctagacttttttttttcaatacctactgacattcaattagaggccctttattattatttttatttttttatttttttgagacaagatctcactctgtgtcccaggctggagtgcagtggtacaatcatagctcactgcagcctcaaactcctgagctcaagcaattctcctgcgtcagtctcctgagtagctgggactacaggcacaagccactacacctaactaattttttaaaattttaaaattttttgtagggacagggtcttcctatgttggccaggttggtgttaaattcctgggctgaagtgattcttccacctctgcctcccaagtactgggattacaggcatgaaccaccatgcccagcctccctggatccttgatcttcaattttctctatctcctggcctgattaaaaaccttagagggggcgggcacagtggctcatgcctgtaatcccaacactttaggaggctgaggcaggaggaacacatgagcccatgagttcaagcccatcttgggcaacatagcaagaccccatctctagaaaaaaaatagcaaaattggctgggtgtggtggtccatgcctgtagtcccagctacttgggaggctgagatgtgaggatcacatgattgcaggcatttgaggttgcagctagctatatgatggtgccagtgcactccagcctgggcaacagagcaagaccctatctcaaaaaacaaacaaacaagaaaagaaaaactttggaggatctccttgaccagtcccctctttttgccctgcaggtggagggtcccagaggggatcaggacctggcacatggccacagagttagcaagagctaaactggaggccaggcctcctgatccagtcgcccgccccaacccctgactgtgctggggttcaggctaagccccttcccaccctgcctcttcctccacctccgccctggccacaggtgctcccctctccaacctccccggtcgctccccttactgtctgagacacaattgctgttgctgttgtcggaagtgagctggcagtgggacccagaggggcatcggaagtccccgcactgaatggctcctcccgtgcagacacacttctccgtgcaaccgctggagacccagctcttgcccagctgtagaagttacaggaagagaaagagagtgaggagggggctgggcgcggcggctcacgcctgtaatcccaacactttgggaggccgagacgggtggatcacctgaggtcaggagtttgtgacgagcccagccaacatggtgaaaccctgtctctactaaaaatacaaaaattagccaggtgtggtagcacacacttgtaatcccagctactcaagaggctgaggcaggagaattgcttgaacccaggaggcagaggttgcagtgagccaagatcgcaccactgcattccagcctgggcaacagagcgagactctgtctcaagaaaaaaaaaaaaaagagtgaagaggggagggccagttctccttcctcttgccccagcagcctggcccaccatctaaatggcttaattgatgctggccagaggcagccacagtgtcatttggtcatccaaaagacaactgtgcaggccaagtgtggtggctcacacctgtaatcttagtactttgggaggccaaggcgggcagatcacttgaggtcaggagttcgagaccagcctggccaacatggtgaaacccaatctctactaaaaattcaaaaattagcaggctgtggtggcgcttgcctgtaatcccagctacacaggagactgaggcaggagaatggcttgaacccaggaggcagagattgcagtgcgcagagattatgccactgcactctagcctgctggataatagagggagactccgtctcaaaaaaaaaaaaaaaaaaaaaggcactgtgtttgtgcttggtgacttacatatgttgtgcaggaggtactactgaacccattttacagatgaggaaacggatataacagaggtcatctgactcatcagtggcaccatcaggattcaatcctaggttaggctgaaatgagcccatggtctttccactataccatgccatgtgctgcttgtttggattcctcagatccaaaacccaaaccatgtgccatcagcccagacctggctggagatcaatgtgccactcacaccagccttcacacccccgggccagctgtaagtcatgggtatcccaggctgagagaggcagagaaaaggagaaagcactgccctcaagctgtgttgcctccagtcccatttcccatgcccactcacagggatggagccaccatgggcatccttgcagccacactgacttctggggacacacttgtcttcactcagcacatagccgggctgacaaatgcagccctcagcgcaggcagaggggactttggcgccctcacaccggccatccaggtcccagcaggagggtgagcaggagggaaggcagttggtgtagctgctgtaggcagggcattccagagctgtgggtgaaggagacagtgggtcagtggagagggtcacagggggccaaggtgggcaggggctgtacaaaccaagctatgggtggatgaccaacaaggcttggggagctttttttgttcttttgttattcattcagcaaacatttactgagtatgggttatgtgccaggctttgggggaaagcaaggaaaaagcggctgggcatggtggctcacgcctgtaatcccagcactttgggaggctgaggtgggtggatcacaaggtcaggagatcgagaccatcctggccatcatggtgaaaccccatctctactaaaaatacaacaattagccaagcgtggtggtgggcgcctgtagtcccagctactcaggaggctgaggcaggagaatcacttgaacctgggaggcagaggttgcattgagccaagatcacaccactgcactccagcctgggcaacagagtgagactgtctcaaaaaaaaaaaaaaaaaaggaacaagaatggctctcccaagccagcatgaaggacggtggtcaaacagcaacggcagcaggaccttgatgtgtatgatcagtaggtgtgttgacagcaagagcatacaaggcatgatggaggcacagagcagggaggtattaattctgttgggggagttaaagaaaggcccttaagcaaaaatagtgtgaacaaatggaaatgcataccatgttcatggataagaaggttcagcaacatggtgatgttagttctgcctcagtgaatgtacacatttaatgtgatctcaataaaatatacatatatatatatgtatatatatgtgtatatatatatgtatatatatgtgtatatatatgtgtatatatatatgtatatatatgtgtatatatatgtgtatatatatatgtatatatatacgtatatatatatgtatatatatgtatatatatgtatatatatgtgtgtatatatatgtatatatatgtgtgtgtgtgtatatatatatatatatatatatatatatatatatatattttttttttttttttttttttttttttttttttttttgcgggggacgggcagggatggagtctctctctgacacccaggaatgatcttggctcactgcagcctctgcctccctggttccagagattctcctacttcagcctcccaggtagctgggattacaggcatgtgccaccatgcctggctaatttttgtatttttagtagagatggggtttcaccatgttggccaggctggtctcaaactcctgacctcaggtgatcctcccaccttggcctcccaaagtgctaggattacaggcatgagccaccacacccagccaccaaaagtattttatatatgtgtgtgcttttaataggacaagatgatttcaaagttgagctgaagacataagcaaaccagaaaagccaggaactccctaaaaaaaagagccatcagtagtgaatggccctccataagtcgtttattttgttttattttatttattcatttatttatttttttgagatagagtttcgctctttccgccctggctggagtgcaatggcacaatctcagctcactgcaacctccacctcccaggttcaagcaattctcctttctcagcctcctgagtagctgggattacaggcatatactagcacgcccagctattttttgtatttttagtagagatggggttttgccatgttggccaggctggtctcaaactcctgacctcaggtgatccgcccacctcggcctcccaaagtgctgggattacaggcgtaagccacagcgcccagcccaaagctcattttaaattttcagtgattacgactttgtgttactgctacatgcaaatacagatggaccgacagaacagaggagaaagctcagatatggatccaaatatatctgggaatttagtatatgataaattgtggtatctcagtccctgcgcaaagacagactagtcatttaataatattggaacagctggctagccttctggagaaaaacaaaaacaaagttgattcatacctcattttacacatcaggataaatcttcatgggtcaaaaacttaaatacacacacacacaaaaaaaaaaacccacttaaatataaaaaaatgaaaccataaaagttctagagcaggccggacacggtggctcacgcctgtaaccccagcacttggggaggacgaggcgggcagatcacttgaggccaggagtttgagaccagcctggccaacatggtgaaaccccatctctactaaaaatacaaaaaaattatccaggcatggtggtgggtgcctgtaatcccagctactcggaaggctgaggcaggagaatcgcttgaacccaggaggcagaggttgcagtgatccgggatcgtgccactgcagcctgggccacagagtgagactctgtctcaaacaaacaaaatttctagagcaaagaatcagcaaactcttttgtagcttctgtggggctagcatttatagctattgctcaagatgcagaagacataaaacaagattaatatatttgaccccataaaaatttttgtcctgcatggcaaaaaaaaaaaaagtcaaaagatgaaaacaaaaaggactggaaaactttgtgtaactcagagcactaataaaggtctactttccataacagataaaggacttccatgaaatagttcagtaaagaccaacgactcaatggaaaaatggtgactggataagagcagatagtttacagaaagggaaattcaaagggttcctaagtacatgaaaaaatgtccaatctcactcataataaaaactcaaattaagtcttgttatttttcatgaccaggtgcagtggctcatgcctgtaatcctagcactttgggaggcttgaggcaggtggatcacctgaggtgaggagttcaagaccagcctggccaatatggtgaaaccccgtctctactaaaaatacaaaaattagctgggtgtggtggcacatgccagtaatcccagctactcggaggctgaggcaggagattcactggaacctgggaggcagaggtcacagtgagccgagatcatagactccagcctgagctacaaagtgagactcaaaaaaaaaaaaaaaaaaagtatagcaatgtcaaataaaaactcaggcttatagcttctttcaaaaaaaaaaatcagaggatctggtcacactggacccacagtgatgcccagcagctgtggggcagctgagcagcggcccccttctgcacgggacctgtgtgctgctttcaccctgacccttcagccagctcaggctgctgtgctcatgttgcctccactggccctgagaagctctgcagcaccccctgcacctctgctttgctcctggaacgcgagagtgttttaaagaaaaataaactttcttggccggttgagatgtctcacgtctgtaatcccagcactttgggaggccaaggcaggcagatcacaaggtcaagagatcgagaccaacctggccaacatggtgaaaccctgtctctactaaaaatacaaaaattacctgggtgtggtggtgcgtgcctgcagtcccagctacttgggaggctgaggcaggagaatctcttgaacccagaaggtggaagttgcagtgagccaaggtcacaccactgcactccagcctggtgacagagcgagattctgtctcaaaaaatatatataaaataaaaaaataaataaaataaaccttcttatgaaacactggcaaaaaaataataagacgttgtttttcaattctcagattggcaaaactccaaaagcacagagcatatagttttcttgtcttttgtttttttaatttttttgtagcgatgcgggggtctcattatattgcccaggttggtctcaaactcctggcctcaagcaatcctcccttcttggactcccaaagtgcttggattacgggtgtcagtcactgcacccagccacgaatataaatttgaatttgtttatatatgcataaataagtggtcttgggaaaaatactgagacatgaaccaggcccatggggtgagggtgggagggagacggtacactggtatctttttttgttttttggggagaatttttttttttctgagagtctcactctgtcacccagacttgagtgcagggatgcaatcacagttcactgccgggctcaagtgatcctcccacctcacccccacaagtagctgggaccacaggcatgcaccaccatacccagctagtttggtaattttttgtagagattgggtctcactatgttgcccaggctggtctcgaactcctggtttcaagcaatccacccacctcagcctcccaaattgctgagattataggcatgagccatcacacccaacctactgggtatcttttaatactttaaaagtattttaaattttttaatactttatacgtttttgaatcctgcaaatgtgttacctattaaaaaaaactctattgaattcctgttttaaattgtaaaagtttctggcgttatatagtagtgatggttgcacaactttatcaagatactaaaagacacttttttttttttttgagatggagtgttgctctttttgcccaggctggagtgcaacggcgcgatctcggctcactacaacctccgcctcccaggttcaagcaattctcctgcctcagcctcccgagtagctgggattacaggcatgtgccaccacacccggctaattttgtatttttagtaggatggggtttcaccatgttggccaggctggtctcgaactcctgacctcaggtgatccacccaccttggcctccccaagtgctgggattataggcgtgagccaccacacccagcaaaaaaaattttatataaaaattaaaaaatagtccttgtcaaagaaacaatgagggctgagttagtcaggaacgaacaggaaggagagtgagggagctctcagggaagcagagagggaaagggggtttgggaggggtttggggtgacagcagggcacactcatggcagaagctgctgtttctccagagtgggggcttgagcccctggctctggcaggtggccccgaaggcttgcagagcctggcagagggcctggtagagacctccgaactcacagagggtgtttgcacagtccaccaggaagggcgtgaggtctatgcgggaggcgcactgggcccacacaggagcccggagcgctgcctcgcacttttcccgcgccctgcggaggtcggccgccctgcagtttccactcgggttctcctgctgttccgctggaatctgctgctcatctaccgggagactctgacaactgggaagggaaaagaatcagcctagggacagccgtccccctactatgacacaaaatttttttttctttagggggagtcttgctctgtcgcccaggctggagtgcaatgcaacagtctcagctcactgcaacctctgccttccctcccatgttcaagcgattctcctgtctcactcagccttccgagttgctgagactacaggcacccaccaccacgcccgaccaattttttttttttttttggagacagagtctcactctgtcacccaggctggagtgcagtagtgcaatcttggctcactgagacctccgcctcccgggttcaagcgattctcctgcctcagcctcccgagtagccgggattacagccacccggcaccatgcctagctaatttttggttttggtttatctggagacaaggtcccactgtatcgcccaggctggagttcagtggtgtgatcttggctcactgcaacctctacgtctcaggttaaagcgattctcctgccttagccttctgagtagctgggattacaggcacccgccaccatgaccggctagtttttgtatttttaatagagacgaggtttcaccatgttggcaaggctggtcttgaactcctggcctcaagtgatccacccgcctcggcctcgcgaagtgctgagatatcaggcctgagccaccacgcctggccctatgacaatgatctggtgctcccaaatgacccagagagacctctcagggattccccaccctcctaacccttctggtgttcacagggaagctggtctgagctctggccaatcttccatcggcctcgtcttctctcagatttccttttttgcttcccaatctgtcgcccagtctggagtacagtggtgtgatcaaggctcactgcaacttcaatctcccaggcccaagggatcgtcccacctcagccttgtgagtagctgggactaaccacacctggttatttttctttcttttctttttttttttttttctgtagagatgaggtcttgctatgttgcccaggctggtctcaaactcctaggctcaagcaatcctcccacattggcctcacgaagtgttgggattagaggcgtgagccactgcacccggctgtttttaaactttttaagacagcatcttgctctgtcatccaggctggagtgcagtgatgcaatcatagctcactgtagccttcaaatctcggactcaaccaatcttcctgctgaagcctcccaaatagctgggactataggcatgtgccaccatggctggctaatttttgtttttaatttttttgtaaagatggggtcttgctatgctgcctaggctggtctcaaactcctggcctcaagtgatcctccagtcttggcctcccaaagtgctggaatcacaggcatgagcctctgctcctgctcctcctccaaggtttctaagcgaggaaaggaagctttcacatttcctcaagtgggttctagcagccttgagatggatcaattacacacatcgccccagaatgcccagaagtcatcgccctcaaatcacacacacaaagcaacattctggcctgtaatcccagcactttggggggccgaggcgggaggatcatttgagcccaggagcttgagaccagcctgggcaaacgtggcaagaccctgtctctacaaaaaatttaaaaattgaagaagaaaaaaggaacattctggtcttcctgccccaggtgtgccctacagtctggctccctagctcatgttgctatgaaaagctggaggggtggccaggcacagtggctcatgcctgtaatcctagcactttgggaggctgagtgggtccgatcactgagggagcaggagttgaggccgtgagttgaggtcaggagttcaatgccaccctgaccaacatgatgaaactccgtctctacctaaaatacacaaattagccagacgtggggcgtggtggtgtgcacctgtaatcccagctactcgggaggttgaggcacgagaattgcttgaaccccggaagcagaggttgcagtgagccaagattgcgccactgcactccagcctgggtgacagagcaagactccatctcaaaaagaaaaagaaaaaaagaaaagctagagggtccaggtgcactcgctcatgattacccagcacttcgggaggccaaggcggccacatctcctgaggtcaggagctcgagaccagcctggccaatatggtgaaaccccgtctctgctaaaaactacaaaaagtagccaggcgtggtggcgggtgcctgtaatcccagctacttgggaggctgaggcaggagtatcacttgagcccgggaggcggaggttgcagtgagccgagatcataccactgcactccagcctgggtgacagagcaagattctgtctcagaaaaaaaagaacaaaagaaaggagaggggccgggcgcagtggctcacacctgtaatcccagcattttgggaggccgaggcgggtgtatcacgaggtcaggagatcgaaaccatcctggctaacaaggtgaaaccccgtttttactaaaaaaaaaaaaaattagccggcggcggtggcgggcgcctgtattcccagctacttgggaggctgaggcaggagaatggggtgaacccgggaagcagagtttgcagtgagccgagattgggccaatgcagtccgcagtccggcctgggcgacagagcgaaactccgtttcaaaaaaaaaaaaaaaaaaaaaaaaaaaaaaagaaaggagaggaagaaaagaaagagaaagagagaaaggaagaaaggaaggaaggggaggggaggggaggggagggaagggaagggaaggcagaaagaaagaaagacaaagaaagaaaaagaaagaaaacctagagggtcttaggggaccactaccttgggtcaatgtccttatctttccaactgttcacaaattcactgtcactatttgctaacttttcatcgctgggcatcattagttcgtcctcttcctcatcattgaagttcccacacatgccgcagacctggcgggggagagtggtttttcggtgctggggaagcacgagaacagtttttctcccttccttccttctttccttccctcacgagagcagttttcctccctccctccctcccttccttcaagtttcactcttgtcacccagcctggagtgcagtggcatgatctcagctcacttcactatccgcctcccaggttcaagcaaccctcctgcctcagcctcccgagcagctgggattacaggtgggcaccaccacccccaactaatttttttttttatttttaatagagacggggtttcaccatgttggccaggctggtctcgacctcctgacctcaggtgacccacctgcctcggcctcccagagtgctgagattacaggcatgagccaccatgcccgggcagaatggtttttcctgttttttcctggaaacactcttgtccaccctacacagaaaggcgcactcctccactgccctgctccatcctgaggagtggcctctttgggcaggcacgatgcgaacactgccccccatccctgccggccaccaatctccctggggctgcctccccagcgagaagagccagatgttttcctcacctttccatagtaggttgtggggatttcaatctctaagagatgattcccgtcaaacttgacttgcaccccgatcttgatgttaacaatggtgtagatgctgctggacttgacactgaccccagggatctgggagatggcggggagggtgacctgtttgctgttgatctaaacaggaggacagtgaaggtgagtaggagcagggacaagagtcccctccccagcactccctcccagccccggtcaccacacccagctcactagcacacggtggcccttctgcagggtgacctgggcatcgtacatgtcaatgtagacctcatgaaggcggaaagcctcagttccaccttcctccttctcatgcttggcactgatcttgaacaagggcaaggccatggcggggtggcacactttcaccaggacaagagtgcaggcgtccgggatagaatggttactaccatcaaagctcacgtagtgggactcccctgggagctgacacactcccacacctgggaggacagagagacagctgggctatgacgctcctctggcaggtacagggtccctgggaaactagtcctgggttctccctgccttccagaaaagagtcaagaccccaggtccggctgtgcgcagtggctcatgcctgtaatcccagcactttgggaggccaacgtgggctggtttgataccagcctgaccaacatggtaaaaacccgtctctactaaaaaaaatacaaaaaaattagggtgtggtgacgtgtgcctgtaatctcagctacttggaaggctgaggcaggagaatcgcttgaaccagggagatggaggttgcagtgagccgagattgcaccactgcactccagcccaggcaacagagacactgcatcaaaaacaaacaaacaaacaaacaaacaaccccagggccagggctaggaggcgtggtgaggtttacgggtggaggaggggcatgattctttggaggaaggatttttttttttttatttgagacatggtctctctctgtcacccaggctggaatgcaatggcatatggtcatagctcactgcagcctcaaactcctgggctcaagtggtcctcctacctcagcctccagagtatctgggactacaggcataaagtaccctattcaactaattaaaaaaaattttttttagagacagggtcttgttctgttacccaggctggcatgcagactctaattcctgggctcaagagatcctcctacctcagcctcccaagtagcagggactacaggtgcaatgtctttaattttactttttaactttttagcttttatttttttgtagagatggggtctcactatgttgcccaggctggtcttgaactactagcctcaagtgattctcccacttcagcttcccaaaccactgggattacaggcatgagccaccatgcctggcctccaggaaaagatttatttatttagagacggagttttgtcgcccaggctggagtgcaatggcacgatctctgctcactgcaacctctgcctcctgggttcaagcaattctcctgcctcagcctctcgagtagctgggattataggctaatttttgtatttttagtagagacggggtttagccatgttggtcaggctggtcttgaacttctggtctcaagtgatccgcccgccttggccttccaaagtgctgagattacaagtgtgagccatggcgtctggccccagggaaggatttataatatcccatctaagttggtggccgctacaggagaaggatgggtgagccccaaggttcccttctcagcagttggaggtcatcttacccaccagaagctcttggttgcagcagagttaccagtcaaaacctgaaacccagtgctacaggcagcagggagtctgttggggagttgggagagtgggcctcagggctgtggagtccccccatcaccgtggtcctcctacctgaggcccgacaatggagcagcccatccagggcccagcatatctggttgggtttgcaggtgctctggaagcaggtgatgttgttgtggacggagcaggtgcagagcctggtgcaggtgttctctgtgtaccagcgctccccgacctgtgggccacagggatcagctgagccaacagaaagttggaattgggagatgggccaacgccccagttgaagctgggtgcagcatctgcccttcctcctcgccccccagccttggccagccctgcccctcccaggttctgagccttcctcctgcctctcctgagcttgccctgaccccaaacatgtgggcctggaaagggcggggcccctcctagctggcctctcaccgggtggtaggagcccgctgggtcagtgcagccacactggccaaggggcacgcaggaggttccactcaagatgtggcctttctgacattcacagctctcagcacagggcagtgctttggggcagtccctcgggttgtttatgctgctgcaggtgtctgggcaggggctgctgcaggggctgtagctgctgccaggtgggcacctcatagctaaagaaaatgagagcattaggaagagtggggtggcatgtccagcccccaaaccttggggcatcaaaagctcctagtagtggccaggagcggtagctcgcacatgtgatcccagcactttgggaggccgaggcaggtggatcacctgaggtcaggagttcgagaacaggctggccaacatggtgaaaaaccgactctactaaaaatacaaaaattagccaggcgtggtggcacacgcctgtagtcccagctacttggggtggcacacgcctgtagtcccagctacttgggtggctgagacacgagaatctcttgaacctgagaggcagaggttgcaatgaggcgaggtcagaccactgcactccagcctgggcgacagcgagactctcaaaagcaaaaaaaaaaaaaaacaaacaaaaaaaaacagacataaaatctacaattttaacaatttaatttttcttggagacagtctcgctctgtcgcccaggctggagtgcagtggcatgatcttgggtcactgcaagctccacctcccagattcacgccattctcctgcttcagcctcccgagtagctgggactacaggcgcccaccaccacgcctggctaattttttgtatttttggtagagacggggtttctccgtgttagccaggatggtctcgatctcctgacctcgtgatccacctgcctcggcctcccaaagtgctgggattacaggcatgagccaccgcgcccggcaacaattttttaaatgtacacttcaacagcactaagtacagtcacattgtcgtgctgccattaccaccatctactgccagaactttttgttttgttttgtttttcactcttgttttttgtttcactcttgttgcccaggctggagtgcagtggtgtgatctcggctcactgcaacctctgcctcccaggttcaagcgattctcccacctcagcctcttgagtagctgattacaggtgcttgccaccacacctggccaagttttgtatttttaatagagacggggtttcgccatgttgaccaggctggtctccaactcctgacctcaggtgattcacccatcttggcttgaacacaggaggtagaggttgcagtgagccgagattgcgccactgcactccagcctgggcaacagagtgagactccgtctcaaaaaaaaaaaaaagaatttagaggaagaaagggagggcagaattctggagggtgcctatgggctgtgggaacaggtggccagtcactcacggcagaaggttctgttccgccaggcaggggcctggccagcctgggcacacagggacgcgtaggcctgcagggagcggcacagggctgtggtgtcgcccttggtcccacactgaccatgcacgcaactggcaaagctggactggggaggcaccacctggtgacattgagagaagggtcctgcaggaagagagaaggcacatgagccaggggaggggccgggaaggaacagggccatgtggcttccctggggctgattcgacatccacttcagtcaaaacctggattttcccgccaggcacagtggctcacacctgtaatcccagcactttgggaggccgaggtgggcagatcacttgaggtcaggagtttgagaccagcctgaccatcatggtgaaacccaatctctactaaaaatacaaaaattagcagggcatagtagagggcacctgtagtccaggcaactcgggaggttggggcaggagaatctcttgaacccaggaggcaaaggtggcagtgagctgagattgtgccattgcactccagccgggcaacagatcaagactccgtctcaaaaaaaaaaaacaaaaaaaaaacttcttggattttccagcctgagcaatacagtgaaactgtgtctgtacaaaaattagccggccatggtggtgcacacctgtagtcccagctactcagcaggctgaggcaggaggatgagctatgattgtgccattgcactccaacctgggtaacagagaatataaacaagacaaacaaacaaaacccagatttgtgtggtggctcccgcctataacctcagcactttaggagggcaaagcaggagaatcacttgagcccaggagttcaagaccagcctgggctgcatagcaagacctcatctccagaaaatatttaaaaattaggccaggcatgatggctcatgcctttaataccagcactttgggaggccaaggcaggtggatcatttgaggtcaggagttcaagatcagcctggccaacatggtgaaatgttgtctttactaaagatacaaaaactagccgggtgtggtggcacaggcctgtaatcccagctacttgggaagctgaggtgggaaaatagcttgcgcctgggaggcagaggttgcagtgagctgagatcacaccattgcactccagcctgggcaacagagtgtgaaaaaaaaaattagttgggcatggtggtgcatgcctgtggtcccagctactctgaaggctgaggcgggaggattacttgagcccaggagttcaagcctgcagtgagctgtgatcgtgccattgcattccagcctgggcaacagagtgagaccttgtctctaaaaaacaagaaaaaagaaaaaacggccaggggtggtggcttatgcctgtcatcccaactacttgggaggccaagggggaggatcccttggggtccatagttcgagaacagcctgggctacatagtgagactcccccatctctattaaacttttttttttttttttttttgagacagagtctcactctgtcgcccaggctggagtgcagtggcgaaatctcggctcactgcaacctctgcctcccaggttaaagcgattcttctgcctcagcctcccaagtagctgggactacaggtgcccgtcaccaggcccagctaattttttgtatttttagtagagacggggtttcaccatgctagccaggctggtctcgaactcctgacctcgggatctgccctcctcggcctcccaaagtactgggattacaggcatgagccactgcgcccagcctattaaaacatttttaataggaaaaaaaaaaagaaatcccggatttatctactgcctgagacacaaatacagacccatcagtcataggtcccaagaaggtgactgctggctggccctgtgttcccatttgccttcctcatgcttttccatctgtttctggtcttgttgtttctccctccctgactagactccctccccagcctcctgtccttcagggaggaaaaagggccagcagggacatgtcttaccctgagggtttattaagatcgcacagttcttgttccaggcgtctgccatgctgttctcctggcagctggagggcttgccacccacaaggaaacagctaaatgagagagaatagaaactgagggctacaggttgggtgcagtggctcatgcctataatcccagcactttgggaagccaaggcaggaggatcgcttgagaccagaagttcaagaccagcctgggcaacatagtgagatcctatctctacacaaaatttttaaaaattagccgggcgtggtggcatgtgcctatagtcccagctactcaggaggctgtggtgggaggatggcttgagcccagcagttggaggcttcagtgagctatgattgcaccactgcactccagcctgggcaacagagcaagaccctgtctcaagaaaagaaaagaaaaaaaggaaaggaaaggaaaggaagaaggaagaaaggaaggaagaaagggaagagaaggaaaggaaaggaaagaaaagaaaagaaaaaaaaagacgagaccagacctgagggcctgaggaaccatctcccaaaccgaagcaaaagtggacagggggctgtgtgcagtggctcacacctgtaatcccagcactttgggaggccaaggcaggcagatcacctgaggtcaggagtttgagactagcctggccaacacggagaagcgctgtctcaaataaaaatacaaaaattagccgggcgtggtggcgagtgcctgtaatcccagctacttgggaggctgaggcaggataagcacttgaacctgggaggcggaagttgcagcgagctgagatcgtgccactgcactccagcctgggtgacagagcgtgactctgtctcaaaaacaacaaaacaaaacaaaacaaaaagtggacagggaaagagagagggatacaggagaagaggacaaaacggtgccctcaagtagcaaggcaaggagatgcagcaggaaggaaaaaggctagacctcagggtgaacttcccaagtgggccctccaaagagatcactaagcatgggagaaatcagcaggcgtgggcgtgggaagtcagaacagcttcttaccaactccaatcttggagagtctaaacaggagagattgccagtttcctgccagttgggaggtacagcacagagggagtggggacacacagaggacacttccaagctgccccccgaggcccttcccaggcccagcccctcctgcctggctcccctgacccccagctcacccaggttcagaggattcaggtaacttccaggcggcccccagctgcatggaatcgcctgcaagctttctgtcggggcgcaggttgtcatccaagctgttgttgttgtagttccctagaggagggagtcattaaaacaggcaagaaggggcccccagcaggccaggcccagggccaccatcctcctggcaccctcacttttcattctacatagcaaggttaacccttttctgtctctttttcttcttttttgagatggagtctgcttcttgaccaccgcgctggccccttctgtgtcttatctcgtcttcctaatctaccttcatgcttaatgtcctcaacgaattagtcagttgacaagtacttagaacacctcacagagatgttggggagctgggaccagtcacacgcgtactcattgtcccagctttcccccgcaggtgcccaggaaactcaccacacagcccacagagctggccgccataggaggaggggactgtcaattccaccaagtggctcccgtcgtagcgaacttggagcccaaagttcgtgtagaggaggacgaggttgctgctgagccttatggtcacccggccttgtgcaagccacacaggtagggccacccgatggccattcagctgcagaggcagggaggacgtagaaaggagagtcaggaaagaactcgggataaaggcaaggacgggggctcatgcctgcaaacccagcactttgggaggccgaggcggaggatcgcttgagcccaggatctcgagatcagcctgggcaacatggagaaagcccgtctctacaaaaagtgaaaaaaaaaattagccgtgcaggtggtgcatgcctatagttgcagctacttaggaggccgaggtgggaggatcacttgagcccagggggtcaaggccacaataagctatgatcgcaccactgcactccagcctgggtgatagagcaagaccctgtctcaaaaaaaaaaaaaaaaaaaaaaaaacggcaaaaaactggagcaggagggctgtgctgtgggtatttcacagagggaggagggagtccagagaagagggtctgggtcagctgcaggtgcttcccaggtgctctaaggagccagagaggtgggcatccgggcaaggaggggcacaggagagaagcaagcaggctgggtgttcagggtccaggaggcaggaggaagacacccaccatgaccttacagcctctgagcagtgagatgctgaggtcaaagactgtcacgtggacggctttgatgtaggagacctccaggatccccccgcggttctcgttggtggcgctcacaacaaaatagctgtcttgggacctggaccagcaaggccgggtcaggacataggtgcaggtgcccatgaagtggtgcaaggcgccatcgaaggtcaggtagtgggggtcacccgaggctgtgcaggtggcggcacctgtggagaagaagatggagttcacagtctcactcctccatgccccggaagctttgactcagagctgccatcctggagagcccacattggcatggtccccacggcccacccacagatgtggtgtttccctaggaagtgtggttggcttggcttggagctgcctaagagaaacactgacgtccccaacctcaccctttgggtccctgaaaatgctgcccctgctgcccctcccaggccctggtggagactcagctgtctggggaagctgctttgggcaggacccatcaccttgcctggtgttgcctgggcagcccccagctcaccttccaccctgatggctcaccttgggcatggcagccatagataccatcctgttggccacagaactcctgggccctacacctccagggctggcagcgaattctgttgttgctttcacagacgcacaactctttgcagcctggcttgtaccaccgctcccctacctggggaagacagcagggaaggaagagaaagtgtttttttttgctttgttttgttttttcccagatctgacaccagagctcaccagagctgttcagatcactggcttaatagtggggagacatcctctcttcctgaagctccgagattcgctgcaaaagcttggcatccattcgttttttcagtcactacatcatttctgggtctgttcatcatttcaaccaaaattgatctatccgaggccaggtgtggcggctcacgcctgtgatcccagcactttgggaggccaaggcgggtggatcacttgaggtcaggagtttgagaccagcctggccaacatggagaaaccccatctgtactaaaaatacaaaaattagcctggcgtggtagtgcacgcctgtaatcccagctacttgggaggcttaggcgggagaatcgcttgaacctgggaggcggaggttgcagtgagctgagaccgtgccactgcactccagcccggacaacagatcgagactctgtctcaaaaaaaaaacaaaaaccaaaaacaacaacaaaaaaccaaaaaacaagggccaggcatggtggctcatgcctgtaatcccagcactttgggaggcccaggtgggcagatcacaaggtcaagagatcaagaccatcctggccaacatggtgaaaccgccccctaccccgtctctactaaaaatacaagaattagctgggcatggtggtgcatgcctgtagtcccagctactcgggaggctgaggcaggagaatcacttgaacccaggaggcggaagttgcagtgagccgagatcgtgccactgcactccagcctggcgacagagcaaaactccgtctcaaaaacaaaacaaaacaagaaacgaaaagaaaagaaagagcttgcagggggtgtgagagcagggagcaggccctttctagctgcagggctgagaggtccacgcagccgctcaccttgaagtagctgcctgcagggtggaggcacccacactgggagcgaggtatgcactcgaggccactgaggacgaagcccggattgcattcacaggcctccacgcaccggtctgagcagaacatgccggagaatcctgaatggcaggtgtcagggcatggcttcgcacacagggagtacttgctgttgggcgggcaggccattgctggtggagggagaagcttgggtgagaaggagacgaacaagccacggggctgggtgggaaacaggaaggacacgttcggaagggccccagctccaggcttctggccaatctcgagaagagagagtgactgtgagaagcttccccaaggagcctggctggctccctggggctgcagggccagcactaaggcgccggccctgagagacttagatagacctatggtgggagcagatggacccaccactggcagcgctgctgtgtagacatgccccaggtgagctgttggcccgcaggggaccggggccacctgtgaggtctgagtcaggggataggcctgccctaaagcagcttccccaaagagctgggccacaccaggagctgggaggcagcctcgttgcctcccctgcctagggcctgtaccgtgtgcctgcgtgtgatgacttgggctgcacagaaacacttttttttttttaaagacagagtttcgctctcactgcccaggctgtagtgcagtggcgcaatctctgcttactgcaacctccacctcccgggttcaagcgattttcctgcctcagcctcccaagtagctgggattacaggcgcccgttgccacacacagctaatttttgtatatttatttatttattatttttattattttttgagatggagtctcattctgtcacccaggctggagtgcagtggtgcaatctcggctcactgcaacctccgcctcccaggttcaagcaattctcctgcctcagcctccaagtagctgggattacaggtacccgttgccacacacagctaatttctgtatttttatttatttatttatttattttattttattttttgagatggagtctcactctgtcgcccaggctggagtgcagtggcgcaatctcggctcactgcaacctctgcctcccgggttcaagcgattctcctgcctcagcctccagtgtagctgggactacaggcatatgccaccatgcctggctaattttggtatgtttagtagagacggggtgttggccaggctggtcccaaactcctgatctcatgatccacctgcctcggactcccaaagtgctgggattataggtgtgagccaccgtgcccggcctctcctctgagtttggcacaactcacggcagaagtggggttccctccagggcttcacagcgtggcctgcgtcctggcaggtggtggtcatggtggacatgtgtgtgcacagcaggtgctgcagcccctggaatccgcacatatcaagcatgcagctgtcgaagaaggaagcggccttcacgtgcagcaggcatgtcctgaggggagtgaccaagtcagggggaatgcagtggaagggggtagagccttggaggagcccaggtgccaagcatcgcccctgtgcgaccctgcctgccctccttcatactcaaatgggccatgagtgtcgaccagccgtccacagaaccctggccccgacatgctgctctgcagagatgaatcacaagacggggaattcaccacctggtacttctgacacctgcaagagacccaccccaaactccctaaagacaaagctcgcttccagctcatccctaacccagcaggcagcaaggctggcaggccgggaccggcaaaccagcctgtcagctgggaaacccctcccagaggatgtttgaccactgagccctggccaggcactgtgggaggccgaggcagggagaattgcttgagcccaggagttccaggccagcctgggtaacacactgagatcccatctctttaaaaataaatatgaaattatttatttcatatttcatatggcgcacgtccatagccccagctactcaggaggctgaggtgagagaatctgttgagcccaggagttggagcctgcagtgagctgtgattgaaccactgcactccagcctgggcgacagagcaaggccctgtctctaaaaacaaacaaacaaacaaacaaaaaagaatattgagcaactgaaagaacaacttgaagtctccagggtagagaggagaaaggggcaatgccagtcattttttaaagggagggcacaggctgggtgtggtggtgatgcctgtaatcccggcattttgcattttgggaggccagggcaggtgaatcacctgaggtcaggagttcgaaaccagcctggccaacatgatgaaaccccgtctctactaaaaatacaaaaatcagacaggtgtggtggcatgtgcctataatctcattgggattgaggcgtgagaatcacttgagcccaggaggcagaggtttcagtgagctgagattgcacaactacactctagcctgggtgacacagcaagactccatctcaaaaaaaaaaaaaaaaaccgttggggagggccagcagcctggtcaaccccccatctggtgagaaccccatgtctaccaaaaaattttgttaaagttagctgggcatggtgtagtccaagctacttgggaggcagagaagggaggattgcttgagctcaggagtttgaggctgcagtaagccacgatcgtgccattgcactccagcttggaagacagagggagatcccatctcaaaaaaaaaaaaagggcgggtggagggctggacgtggtggtgtggtggctcacacctgtaatcccagaactttgagaggccaaggcaggtggatcacttgaggccaggagtttgagaccagcctggccagcatggtgaaaccccatctctacaaaaatactaaaattagctgtgtgtggtggcaggtgcctgtaatcccagctactcgggagactgaggcaggataattgcttgagcctgggaggcggaggttgcagtgagctgagatcgcaccactgcactccagcctaagcgacagaaggagactccatctcaaaaaaaaaaaaaaaaaaaaaaaagagagttccaggaaggggacggaaccttcccagggccccggtgggagggctccttgctcactcctggtcctcgtcctggtccgtctgccagctgttccccagctcctccttgtctcctgctgggctgccgtccaacttcaggtggtcattgtcactgttgccgtcatagttcccacacaaaccacagagtttgccagagtatgtgctaggggaacaggagaggagctggcgttaatggagagaagcagcctcggtcctcgaggggcagtggcagagaaggcaaggagctgggatcctaaaacagagggcgtgaggaggatgaagaggtgcggactggacaagaggaccccatggccctcccccaagcctccttcccctctgttcattgtccagccacagcaaaccccttgctggccctaaaacactcccactttatttatttatttatttatttatttatttatttatttatcctttttttcagatggagtctctctccgtcacctaggctagagggcagtggcgcaacctcggctcactgcaacctccaacctcccgggttctagagattctcctgcctcagccttccgagtagctgggattacaggcacacaccaccacgcccagctaatttttttgtatttttagtagagatggggtttcaccatgttggccaggctggtctcaaactcctaatctgcctgccttggcctcccagagtgctgggattacaggtgtcagccaccgtgcctggccaaattatttatttatttttttatttattttagagatagggtcaccctctgtggctcaggctggagcacagtggtgcaatctcggctcactgcagcctccaactcctgggttcaagcgattctcccacctcagcctcctgagtagctgagactacaggcaagtaccaccacgagaagctaatttttttttaagagacaggatctcactatgttgtccaggctggtctggaactcctggcctcaagtgatcctcttgcttcggcctcccagcatgctgagattataggtgcagccactacgcctggctaatatttaaatttttttgtggagatatggtctcactatgttgcccaggctggtctggaattctggccccaagggattctcccgtctcagcctcccaaagttcagggctacagggcgggaaccctgcacctggcctctataaagtatttttataaaagtctttctttcgccggggcacagtggctcccctgtaattccaagactttgggaggcgaggcaggaggatcgcctgaagtcaggagttcgagacaagcgtgggcaacatgatgaaatcccatctctagtaaaaacaaaaattagctgggcatggtggtgtgcgcctgtaatcccagatacttgggaggctgaggcagaagaattgctgaacctgggaggcagaggttgcagtgagccgagatagcaccactgcactccagcctagggaacagagcgagagatcctgtctcaaaaaaaagaagaagaagaatcttgctttcccttgttttgtccatctggggagccactcttccttcgagaatgggaccaggtgactgcccttcagaaagcctccagaactcactagtgctccttctagcacattcccaaagcatgtacatccatcctgctatctatcacatgccccgaaaccattttctcctgtctcctggtccaaagggatccctgccacttaagcagggtgcttcccatccgtgaatgcataaaggatcaagtagtggtgccagggatggaaggggagtgggcagggtgggcagcaggaagaagaggcagcaggaagaggcagcaggaagaagtggcagctgcctggctgggacactgccttacctggacacagtaacatacagctgctggtcaccatcccatctcacccgcaaaccgaactccgtctgcagctccacaaaccgcccgcttgcacccaggaagacgcctttagagggtatggctgggagagtaacttgctgacccccaacctggaaggcagggcagaggcaagagacagacagagctgggggtcaaggaggaccccagcagactttcatttccatagctgggaggcaggacaccatccacagcggcctaacaatctcatccaccaggagtggactggagcttcctcaccactgttttgtttttgtttttgtttttaggagacagtgtcttactatgttgcctaggctggagtgcaatggtgcaatcacagctcactgcagcctcgacctcccaggctccagcaatcctcccacctcagcctctggagtagaggggacaacaggcaagtgccaccacaccaggctaattttttctattttttaagagacagggtcttgctatcttgcccaggctggcttcaaactcctggcctcaagcaatcctcccactttagcctcccaaggagctgggattgcaggtcactgtcttgttgaaccccatccgtggaaaggttcagggattggaagggttggccaggacacacagtcagaccctgcaaggatggtgggggtggaatggggctcaccagagtgcgtctgcccttaagcagggtgacggtgctctcgggcagggtcacgtagactttgctcaggcaggacacgccttcctgtccctgctcctcattcttggctgtcaccctgaagaatgggtctgggtagggagaggaatgaagagagcccagtggctcatttctgaacatctgccgcgagcagtgccctgagcctggcgccgcagggagagatgagcgccaccgagacaccagccccaaagtccagtaggggaggccggatccacacaggagcagaccacgactgcctcttccagaagagcctgcagccgcagcgtgtctgtctccactcagtggctggaacatcctccagggcgtctgtgctccctaaccactaccactgccttctttgcttttttgtttttaacttcatttatgtgtgtatttatttatttttcgagacaagatctcactttgctacccaggctggagtgcagtggtgtgatcatagctcactgcagcctccaactcttgggctcaagcgatcctcctgcctcatcctcccgactagctgggactataggtgtgtcccaccatacccagctgattttttaatttttttttttttctgagacagagttttgctcttgctgcttaggctagagtgcaggagtgcagtggctcgatcttggctcactgcaacctccgcctcccaggttcaagcaattctcctgcctcagcctcccaagtagctgggattacaggtgcctgccaccaagcctggctaattttttatatttttagtagagacggggtttcaccatgttgaccaggctggtctcaaactcctgacctcaggtgaaccccccacctcggcttcccaaagtgttggggttacaggcgtgagccactgagcccggcctgatttttaattttttttttcatggagatgagagtcctgctgtgttgcctaggctggtctcaatctcctggattcaagtgatcctcctgcctcagcctcccaaagtgctgaggttaccagtgtgagtcactgtgcctggccttcaaccctcaccttacagaagaacttgctcctatcttgcctcttcccccatctgtgccctgccccttcctgccacccaccatgccccatgcctagcagcgctgcccacagaccctccccccaggccgcagtggcatctccagggcctacctgttgagttgccacagggctgggccaagatgtaagtgcacttgcccatgaagccaaagtgcctcccgtcaaaggtgacataatgagggtctccgtagaccaagcaggtggcagtgcctgctgggagggggaaggagaacaggcgaagctgcttctgtggctcctccaggctggaccgcacatgctggcccacccgctgcccggtggcaggcccccaatcctgtgctcaagcgagggattgggatcctggcgtcacgtctactccaactggctggcaggcagggacagcatggggaggggctctcaccgtaggggtggcatccatactggccattcttaagctggcacacggtgtgtgtcccacactgagagatttggcactcgacccgactgccgggccagcagcggcaatgttctgtgcagttgggggtgaaccactttgccccaggctgggagaaagggatgtgaggtcacacagtcatatagctcctagagtacttctccctttgcctttctttttcatttatttatttatttatttatttatttatttatttatttatttgtgatggagtcttgctttgttgcccaagctggagtgcagtggcgcaatcatggctcactgcagccttgaccccctgggctcaaaccatcctcctgcctcaacctcccaagtatttgggactacaggcacatgccaccatgcccgaattttttttttttttttttttaacgttttggagagatggagtcttgctgtgttgcctaggctggtgttgaattcctgagctcaagtgaccctcctgccttggcctcccaaaatgctggtattacaggcgtgagccactgcacccagccttatgtctgtctgtttttttgtttttttttttttttttgagacggagtctcactctgtcacccaggctggagtgaagtggcgtgatcttggctcactgcaacctccgccttcagcgttcaagcgattctcctgcctcagcctccagagtagctgggattacaggcacccgccacgacgcccggctaatttttgtatttttagtagagacttggtttctccatgttggccaggctggtctcgaactcctgacctcaggtgatccgcccgccttggcctcccaaagtgctaggattacaggcatgagccactgcacccagccaatatctgtctttacccaacatcttagccctcccatgagtgctctcattcagtaaatacttgctgaatgaaggagtaaaccaagaccccatgtgtctctctgaatctgagggcattatgagggcaaggaccacagcctattcgtggcgaccccagtgccagcagagtagaaagtactaagtaggctgggtgtggtggttcaccactgtaatcccagcactttgggaggctgaggtgggaggatgggttgagcccaggagttcatagaccagcctgggcaacagagccagaccccatctctaccaaaaaaaaaaccccaaaaaacaaaccaaaaaaacacacctttgaagaaagtactaaataaacatttgttgaatgcataaatgaatctattagaagtgaatacagccaggcgcggtggctcacgcctgtaatcccaacactttggaaggctgaggcgggcggatcgcctgaggtcgggagttcaagaccagccttactaacatgaagaaaccccatctctaccaaaaatacaaaattagctgggcgtggtggcgcatgcccgtaatcccaggtactccggagtctgaggcaggagaatcgcttgaacctgggaagcggaggttgcagtgagcggagatggcaccattgcactccagcgtgggcaacaagagcgaaactctgtctcaaaaacaaacagacaaacaaacacggctagaatggtttttgcatcaatagagaactgtgagtgaatagtttgtcaaaaaaaaaaaaacaaaagtgaatacatgcctcctagggcagagggaagagcttcttggtgccaatggttgtgacagatctttctgcccaggctgtggctgaagctaatctcagcagcaactcagagagacccaggagactggttaaaggaggcaggggaaagaaataatagtcccaaaagggacaagcagaagctctgatgtcaatgggaagaacacctgcagctgggaagaggctctgcacattaatgaatagcttaatgcacttttctttttttttttttgagacagggtgtcactctgtcgcccaggctggagtgcagtggcacaatcatagctcactgcagcgtcagactcctgggctcaaccaatccctccacttcggcctgctaaagtgttgggattacagctgtgagtcaccacgctgggccctttaatgcacttttaattaataggttgcatatatttatcataaattgctaatgataataattaacacttattaagtaattgtatgtgttaggacttaatttcatctttacaataatcttatatgaggtagaaaatcttactgtgtacactttataaatatggataaaagatttaaagacgtaaagaatatatggtgaaaccctatctctactaaaaatacaaaaattagccagggtggtggcgtgagcctgttatcccagctacttgcggggctgaggcagagaattgcttgaacccgggaggtggaggttgtagtgagctaagatcgtgccactgcactccagcctgggtgacagagctagactctgcctcaaaaaaaataaaataaaataaaaaaagaaatgtgcccagccagacacggtgacttatgcctataatcccagcactttgggaggctgaggcaggaggattgcttgaactcaggatttcaagaccagcctgggcaacgtggtgaaaccctgtctctaccaaaaatacaaaaattagctgggcatggtggcatgtgcctgcagtcccagctacttgggaggctgaggtgggaggatcactggagcccgggaagtggaggctgcagtgagccactatgatgccactactctccagcctgagcgacaaagcgagaccctgtctcaaaaaaaaagaaaagattgaatgaataacttcgccatcctgtgaccattgcttctgagctgaccccttgggactatccggtgatccctgttgccttcacatggggagcagatggagctggaacccaggtgttctgccatcaatctccctcatgggaccccagcatcccggggggcttacctcatagtagtcgttgttgtagcagcaattgcaggaagaggcctggatgcagtggttgtcactaaacaaaaagccagggttgcagacacagccctcccgacagaggggcccacagctaggcctggggctcttgcacgaagcaggacaagcacaggattcgtagcgggcatttggagggcagcgctctaaggggaaaacagcctctgtcatgctttcattccatggctttctcagggagtctccctgtctctcctctacccccaaactcaagttcttctctaggaaacaggaccatattatttagccataaaaaggcctgaaggctgggtgcggtggctcacacctataatcccagcactttgggaggctgaggcaggaggactgtttgaggccaagagtttgagaccaggctgtgcaacgtagtgagaccccatccctacaaaacaaatttaaaaataaaacaattttaggctaggcacggtggctcacgcctgtaatcccagcactttggtaaaccgaggcggacagatcacttgaggccaggagttcaagaacagcctggctaacagggcgaaaccctagagccgggcacagtggctcacccctgtaatcccaagactttgggaggccgaggctgaggcgtaattacaggattacacccctgtaatcccaagactttgggaggtcaagaccatcctggccaacatggtgaaaccccgtttctactaaaaatacaaaaattagccagtcgtggtggtgcaggcctgtggccccagctactcaggaggctgaggcaggatagttgcttgagccccagaggcagaggttgcagtgagccgagatcacacctctgcactccagcctgggtgacagagcgagaccctgtctcaaaaatataaaaaataagaaatactccatttatttatttatttatttttatttttaattttttgagacggagtctcactttatcacccaggctggagtgcggtggcatgatctcggctcactgcaagctctgcctcccgggttcacgccattctcctgcctcagcctccggagtagctgggactacaggcacccaccaccacgctcagctaatttttttgtattttcagtagagacggggtttcactgtgttagccaggatggtctcgatctcctgaccttgtgatctgcccgcctcagcctcccaaagtgttgggattacaggcgtgagccaccgtgcctggccagaaatactttttttaaaggaatgaagtcctgatgcatgctacagtatggatggcccggaaaacattacactcagtgaaagaagccaaacacaaaggctcacatgttgcatgattccatttgtatgaactgtccagaactggcaaatccatggatataggaaagaaatgtgtggttgccaggggctgggggaaggcggagtggggagtggctgctaataggtataggatttctttttggagtgatgaaagtgtttggattagaaagtgatgatggttgcacaaccttaggaatatactaaaacccacagaattgcttttgctttttttttttttttttttttttaggacgatgtcttgctctgttgcccaagctgaagtgcagtgacacaatcatggctcactacagcctcagcctcctaggctcaagtgatcctcccacctcagcctcccgagtagctgggactacaggcgtgcgccaccacacccagctaatttttttttttttttaattttaaagtggagacagggtctcactatgttgcctaggctggtctcaaactcctgagctcaagcaaccctctcgccttggccccccaaagtgctgggattacaggtttgagctaccgtgcccggcctagaattgtacactttaaaagggtgaattttatgaaatatggattatatctcaataacaaacaacgagaaggaagcctcgtggttcagtcctgacacccccacccactccagccctgccatccctctcgctctgggcagtcctccccatttcctctgaagtcgccatggactacttcagctctcctctgagagtactagaagcatctagaagcaactagaaggcttctaccagaagcatccctttccctgactgtctcctagtcattgtctctgactttcagccttggcccacgctccatccacctcatacctgtactggatctggaggttgtggtagtgcccagaatcacactggtcataggggtacttggagcatgtggagacatcaccaaggctgccagcccagtggctgtggggctgggatggggtggcctcagggctgtgagcttctctgtgggaatggtgggtttttctgtggggatggtgggtttttccgtggggatggtaagtttttccgtggggatggtgggtttttccgtggagatggtgggtttttctgtggggatggtgagtttttctggggagatggtgggtttttctgtggggatggtgagtttttctgtggagatggtagtctcttcagtggggatggtgggtttttccgtggggatggtgggtttttccgtggagatggtgggtttttctggggagatggtgggtttttctgtggggatggtgagtttttctgtggagatggtagtctcttcaatggggatggtgggtttttccgtggggatggtgagtttttccgtggggatggtgagtttttctggggagatggtgggtttttctgtggggatggtgggtttttctgtggagatggtgggtttttccatggggatggtgagtttttctgtagagatggtagtctcttcaacagaggtggtggtttcttcagtggggagagtgggtttttccatggggatgctgggtttttctgtggagatggtggtctcctcagtgggggtggtgggctcttctgtggagatggtgggtttttctgtggggatggtgggtttttccgtggggatggtgagtttttccgtggggatggtgagtttttctggggagatggtgggtttttctgtggggatggtgggtttttctgtggagatggtgggtttttctgtggggatggtgggtttttctgtgggggtggtgggtttttctggggagatggtggatttttctgtggggatggtgggtttttctgtggggatggtgggtttttctgggcagatggtgggtttttctgtggagatgatagtctcttccatggagatggtgggtttttccgtggggatgctgggtttttctgtagggatgctgggtttttctgtagggatgacaggctcttccatgtaggtggtggtctcctcagtgggggtggtgggctcttctgtggggacggtgggtttttctgtggaaatggtgggtttttctgagggaatggtgggtttttctgagggaatggtgggtttttctgtgaggatggtgggtttttctgagggaatggtgggtttttctgagggcatgttgggtttttctgaaggaatggtgggtttttctgtggagatggtgggtttttctgtgggaatggtgggcttttctttggggactgtgggcttttctgtggtgacactgggtttttctatggaaactgtaggtttcttggtggagattgtagggttttctgtgaggccagtggtttcagaagggccagtggaagaaactggagatacgggaggaagctctggtagcacttttactgcaaagaaaaataagaatccctggagtttagtcaaaaccataccaccaccctctttactgccatctaactggagtgggctcccatgggtggcttattcacacctctctttctactcccaaaccccaaccttcatccactcaacgaacactaatatatgtcagatattatgccagaaatgaataggatatgggtccagccttcaagactgcagaggaaggagttctggatccagcccccaaaatccatggtatcgaagccacattcacccaggcaaacatcttgaagtgcaggggaaggagaggtgtgttgaagatggaaaaccaagccagctgggtgagaattcgggctccagggaggactcacattttaagcagttcatagagagaactccagggaactcagggcaccgcccccttcctggagcctgggctttggtcttacctggacaagtcccaggattgatcaagatgaaacccatagcaaccacagaggccgtgttgcttccctggatgcccttgaaaataagctaaaggcgacaagggagagagacggagagagaaacaaaaatgaatctccagcaactctgtgattccactgggcatagaatctgttctctgccaaaatgtcgccttgttccagcctcaacagtccagccccatcccggcccctttctcactttctgtaacacgaagttccccttttctcggctctctttccagctttccacctcttcagcactggtggcgcccccagatcccaggcattggccctctcacctcacacagacaggacccccgcctccgtctctcacctgcatgggctgttggtgtcctgaggggacggtgacggaggtgttctgccagtaagggcgctgagaccccacgcgtttccagagaggaatcgggggactccccgcaggacttcccaggaggagttcgagcatagtaccctccccaaggccatacatgtggtatgcgaactccacgcagatgtcacctggggcgcagaagggccggctcaccagtctgactgactggcctgcgtgggagaactcgtcagcctcaaggtagatatagtgaccccctaggcaaaggaagggaacaggcaaggtaagaagcctgcacaggacatgccaactgctgctttagcaaagctttgctttctgaacgggaatctgagcaaacactcaaatttcccaggtcgtagcattattttttctgctcattttagacatctaactaaagaaggtgggatcacaaagaaagggaaaagcggccaggcacggtggctcatgcctgtaatcccagcactttgggaggccgaggctggcggatcacgaggtcaagagatcaaggccatcctggccaacatggtgaaaccccgtctccactaaaaatacaaaaattagctgggcgtggtggcccgtgcctggagtcccagctactcgggagtctgaggcaggagaattgcttgaactccggaggtggaggttgcagtgagccaagatcacgtcactgcactccagcctggcaacagagcaagactccatctcaaaaaagaaaaaaagggaataacaaaccagcaacctagattacattcattaatgtcgtgtgtgtgtgtgtgtgtgtgtgtgtgtgtgtgtgtgtgtgttgtttttttgatcggctcactgcaacctccctgcctgattctcctgcctcagcctgccgagtgcctgcgattgcaggcacgcgccgccacgcctgactggttttggtggagacggggtttcgctgtgttggccgggcgggtctccagcccctaaccgcgagtgatccgccaacctcggcctcccgaggtgccgggattgcagacggagtctcgttcactcagtgctcaatggtgcccaggctggagtgcagtggcgtgatctcggctcactacaacctccacctcccagccgcctgccttggcctcccaaagtgccgagattgcagcctctgcccggccgccaccccgtctgggaagtgaggagtgtctctgcctggccgcccatcgtctgggatgtgaggagcccctctgcccggccgcccagtctgggaagtgaggagcgtctccgcccggccgccatcccatctaggaagtgaggagcgcctcttcccagccgccatcacatctaggaagtgaggagcgtctctgcccggccgcccatcgtctgagatgtggggagcacctctgccccaccgccccatctgggatgtgaggagcgcttctgcccggccgagaccccgtctgggaggtgaggagcgtctctgcccggccgccccgtctgagaagtgaggagaccctctgcctggcaaccaccccgtctgagaagtgaggagcccctccgcccggcagctgccccgtctgagaagtgaggagcctctccgcccagcagccaccccatctgggaagtgaggagcatctccgcccggcagccaccccgtccgggagggaggtgagggggggtcagccccccgcccggccagccgcccggtccgggaggtgaggggcgctctgcccggccgcccctactgggaagtgaggagcccttctgcccggccaccaccccgtctgggaggtgtgcccaacagctcattgagaacgggccaggatgacaatggcggctttgtggaatagaaaggcgggaaaggtggggaaaagattgagaaatcggatggttgccgtgtctgtgtagaaagaagtagacatgggagacttttcattttgttctgcactaagaaaaattcctctgccttgggatcctgttgatctgtgaccttacccccaaccctgtgctctctgaaacatgtgctgtgtccactcagggttaaatggattaagggcggtgcaagatgtgctttgttaaacagatgcttgaaggcagcatgctcgttaagagtcatcaccaatccctaatctcaagtaatcagggacacaaacactgcggaaggccgcagggtcctctgcctaggaaaaccagagacctttgttcacttgtttatctgctgaccttccctccactattgtcccatgaccctgccaaatccccctctgtgagaaacacccaagaattatcaataaaaaaataaattaaaaaaaaaaaaataaataagtcagatcaagtcactgctcaaaatcctgcaaaggctccccattcacacagaataggaaagccacagtcctgacaatggccttcaaggctctatgtgatctgccgctcctgtggatctcaggtcaccctcttcatgctggccacatggctctttgctgtgccttgatcccctccttccccgacagccccactgctacctcaggacctttgcacagctggcccctcagcctggaatgtcctctgctactacctcacctttttcaagttcgtgctcaaatgtgtcctgaatgtgacctactctgaccagcctatttaaaatcggtaactcgcccaggcacagtggctcaacgcctataatcccagcactttgggaggccgaggtggccggatcacctgaggtcagcagttcaagaccagcctggccaacgtggtgaaaccccgtctctactaaaaacacaaaaattagctgggcgtggtggtgtacacctgtagtcccagttacttaggaggctgaggtaggagaatcaattgaacctgggcagcggagcttgcagtgagccgagatagagccactgcactccagcctgggagacagggcgagactctgtctccaaaataaataaataaataaataaataaattcttttgtagagatgggggtctccttatgttgcccaggctgatctcaaactcctggcctcacaccatcctcccaccttggcctcccaaggtgctgggattacaggcctgagccactgtgctgggccgagacctctctttaggcacggctgcttccagagtcaaagccctaatagctctacctggcagacccaatacagccagctcctcatctcctttctcattcttctttttttttttttgagacggagtctcactccatcgccaaggctggagtgcagtggcacgatctcggctcactgcaagctccacctcccaggttcatgccattctcctgcctcagcctcccaagtagctgggactacaggcgcccgccaccgcgcccggctaattttttgtatttttagtagagacggggcttcaccgtgttaaccagaaaggtctctatctcttgacctcgtgatccgcccgcctcggcctcccaaagtgctgggattacaggcatgagccaccgcgcccgccctggatcctcttcttgttgtgcaaggacggagagaaaagggtccgagggcaggcgggaggagggacagggactcaccgcgattacaggagccccggcggatagagagggcatccagggcgatgtccaggtaggcagtgctaccccgtgttccctcaaacatcagctgcaagaggataaggggaccccaaccccatgagcccctcagccaggcctcctggctcctagttttcttcctgaattcagatggcttggcccccacaatccctttttgccacacccccaccctcaggctctccaacacccagactcccccccgaggtcccacaatttgtccccggccttacccgggtgggcagggtgaaccctgcgggcacagtgacggtggtgagcatccaggagggtctctgggtgttccagtgtttccagagcacatcggggcggcggccctcttcacccgagagcagcagcagcctgagctgggcgccccaagacagcccgaacatgtggtgggcaaagtgcacacagagggggccttgctcccataggtcggggctgagcaggcgggccactcccccacggtggaagctgttcgattccatatgcagatagctgccctctgggggaggcagagcccaagacactgaggcccagccacctctgagggctgcccccacccatccccttctcagagcccaggcatccaggtctggctgcctcccttctctctccatctagccactcccgcctcccagccacctccctgctcatggtcccctggaaaccatagcccctcacctccgttagggtaccccccgggggccccggtggagccggtgggagagggcccactggctcgaacccagtcttcatcgtctgcggacacttgggaccagtcacagaggggtttggcgtcatcctcaaaatcacactgggtgaggacatctaggaagaatgggtcacagtgaggtttcagagagggcaggggcagggcccagagccacacagggagagggaagtagcaagattgctacacttagagaaagctgccatgaaatcagccgggtgtggtggcgcacacctgtagtcccagctactggggaggctgaggcaagagaatcgcttgaacccaggaggcggactttgcagtgagccaagatcgcgccactgcactccagcctgagggacagagggagactccgtctcaaagaaaagaaaaagaaagctgttgcaaagccttggggtccagagcagaaattgctcgtctgttttttgtggagatggagtcttactatgttgcccaggctgctctcaaactcctggcctcaagccatcctcccaccttggcctccctaagtgttgggatgacaggtgtgagccacagcacccggcccagagcagagatttgaaagagagaatcttttaggagaaattcggggctgggagagtggacagaatgacaaggtccggggtcatgaactgaggttggagggctggacttggcctggcaggacacattttgtagtcctggctgatgcccggaggggactggaggtggctgctcctgctaggaactcaggaactggcattctggtggcagaatgtgggttcggaggagggaggagaaatcttagcactcctggtttccaactcacagttgtccctagagctgcgaacaaccagcttctggtccggaggcttctctttccttgggggtcgtttgaagaaagcaaaaatgcaactcgtgtcattatcaagaattataagattcagtgactgtgagctttctgagtggtcacgtaaggatgatcagtgtttatgcagtgaatgtgtctgacttgactttttttctttttttcttttctttttttttttttccggcacccaggctagagtgcagtgatacaatcacagctcactgcagcctcaaacctctgggctccagcaatcctcccacctcaacctccccagtagctgggactacaggagcatgccaccacgcccagctaatttatttttattttttatagagatggggtctttctatgttgcacaggctggtcatgacctcctggccttatgcaatcctcccactttggcctcccaaagtgctgggattaccggtgggagccactgtgctcagccctctgttttttgttgttgttgaagttctacttgttcaaattctcccaaacacactgcaggacaccaagacatccatcatttctttttttttttcttttgagatggagttttgctcttgttgcccaggctggagtgcaatggtgcaatttccgctcactgcagtctccgcctcccgggttcaagtgactctcctgcctcagcctcccaagtagctgggattacaggcatgcaccaccatgcctggctaattttatatttttagtagagacagggtttcaccatgttggtcaggctggtctcaacacctgacctcaggtgatccgcccgcctcggcctcccaaagtgctgggattacaggggtgagccgccgcgcttggcctgtcatccgtcatttctttgctgcctcgtacttaagtctctctcatcagctgggtccaccctgggtcttgtccgtttcctgagggcctgacccctcaatccttctctcctaggcttagatctgtcttccagctctgcacctcctccgtcccttctcacattgtagccctgtcccgctcccagaacccgccccttaattcctgttcagcagtcaaggtcaacccatttccatcccaccgggtttcccccttcctctcaaggtctttttttttgtttttttttttttgagacggagtctcgctctgtcatccaggctggagtgcaatggcatgatctcagctcactgcaaactccgcctcccaggttcaagcgattctcctgcctcagcctcctgggtagctgggactacaggtgcacaccaccacgcctggctaattttttgtatttttagtagagacgaggtttcaccatgttggccaggatggtctcgatctcctgacctcgtgatctgcccacctcagcctcccaaagtgctgggattacaggcgtgagccaccgtgcctggcctctctccagatcttttgtagttagcctgctcgccccctccagctctgtccttccatattccttacagccaccctcagctgaccctggtttatcattaccccctgggcccagcttacctgaaaagggcagcccccaccagaagcagcagagtccagactggaggaaccatgaggaccctaagtggttgctcccaggggagaggggaagggcacagttgggagcctggactccttttattcccccctggcctccttagcttggcatccttccaaggatgccatgaagaatgaacagagaaacacagaaaagctctgggaaattaaaattatgagagttgaaagttaccatccagtagaagcatcgtagattgaaatcgagggaaataaactagagagaagagaaaaaaaaagagaaagaaacaaaaaggaaacaggtttggaggatcaatccaggaagtctaacctcaaacgaaaggagttcaaaaagagagaacaaaggaaaagaaattattattttaaaaagaaaaacgcacaagaaaatatccagaactgaaatatacaagtctctagattaaaaaggtgtccagggtgatgaaagcatagagacccatggaagcactggacttcagactatcaggggtgaagagaagatctgaaacactttcagatagaaaataacaagtcatataccaaggatcagaaatcaacatggcatccagcttttcaatagcaaccatggagtctaagagccagtggaacattgtctgcagaattccaacagaaaaccatttcaaacctaaaattctataactggcaacagtggcaactggagagttaggtgaaggaaggactgcaaacggctggacgtggtggctcacacctgtaatcccagcatttgggaagccaaggcgggtggatcacttgaggtcaggagttcaagactagcctaactaacatggtgaaactccatctctactaaatacgccacttcacttaagggttgtgcaggcgagtctcatacttgcgtcctcaagtgatccacccgtctcagcctcccaaagcatttttttttacaggtgtgagccactgcaccccaccctcattattgtctttttaaaaaattatttctttatatatatatatgtgtgtgtgtgtatatatatatgtgtgtatatatatgtgtgtgtgtgtatatatatatatatatatatttttttttttttttttgagacggagtctcactctgtcacccaggctggagtacaatggcgtgatctcggctcactgcaagctctgcctcccgggctcacgccattctcctgcctcagcctcccgagtagctgggactacaggcgcccaccaccatgcctggctaattttttgtgtttttagtagggacggggtttcaccgtgttagccaggatggtctcgatctcctgaccttgtgatccgccctccttggcctcccaaagtgctgggattacaggtgtgagccactgcgcccagcctctttttatatatttttaagacagaatcttactctgttgccccggatggagtgcagtggtgcgatctcagctcactgcagtctccacctcctggggtcaggcagttctcctgcctcagcctcctgagtagctgggactacaggtgcacgccaccactcccggctaatttttacattttttttagtggagtcagggtttcactatgttgcccagctggtctcgaactcctgacctcaagtgatccacctgcctcggcctcccaaagtgctggaattaaaggcgtgagccaccatgcctggcctatttttttatttttaatttttagagacaaggtcttgctctgttgcccaggctggagtgcactggttcaatcatagctcactgcagccttgacttctgagctgaagcgatcctcccacatcagcctcgcaagtaggtgggaccacaagcacacaccaccacatctagctaattaaaaaaaaatttttttttctagagatggggttctcactatgttgcccaggctgagctcagactcctgggctcaagcaatcttcccgtctcggcctctcaaagtgctggaattgcaggcatgagccactcataaacgtctagactgaaaatgaggtggtgggttttgaagctttgggctccatgaagtgagatgcctgggttttctcaggatttcagtgaccccccagccctgagaatctttaagttactctgctatctccacaattccagtaccatggaaaacttccgaaaaaaacacctgtggactgatcttcccactgcctgaaacaacgtctcccatcagtcacagcagccagcctgctacctgggagcagactgagtgatttcttggcgtgagcgctcctcaatctcctcacctgcattagggaaacctcccgcagggcccatgccatggacgggtccatttttatgtccgagggcccagtgtccaccatccccggaagtctggacccagtcacagaagggatgggcgttgtcttcaaagtcacactgaggaaaaccctctgggggatcaaaataggatatttgagcaagttgagtgacgctctccagccctcccccagcccaccccggattctgagagatccgggcctctcagggcctgctctcacccccacaaggagcaatgctggttgcatcaactgccacagctggctctggggtctttccaaaaacgcctaccacggcaaactggagagaaagggagatggagcaggagtgagcacacagcccacacccccaagcccctgatctaactcgactccattccaggacccagaatccctactccctgtgcccagaccctcaattcagttctttctttctttttttttttttttcagagtcttgctctattgcccaggctggagtacagtggtgtgatcatagctcactgcagccttgacctccagggctcaagtgatcctcccacctcaggctccctagtagctgggactacaggcacacatcactgtgcccgcctaatttttgtatttttttgtagagatggggtctttctatgttgcccaggctggtcttgaactcctgtcctgaagcgatcctccctcctcagcctcccaaagtattgggaatacaggcatgagccacagcaccaggcccctcaatttatttcaacattgggtgtgcctaccatgtgcaaggacctgaccccttgcttctctgtacctgtatccgtcccacggctgtgtaattgacagaaacagcctgccagttgggcccaggttgtcctgagaagagagtgtgtttccggatactccctgcagtgaaaggaattggaaggagaagtgagcttaaggggactgggaaacgactttgaactatacctaggaggatgaggagcagagggcatagctggggacgattaccaccaaatgaaagcacaatcttcttttttattttatttattcattatttttttttgagatggagtattgctctgttgcccaggctggagtgcagtggcactatcttggctcactgcaacttctgtctcccaggttcaagcgattctcctgcctcagcctcttgagtagctgagattacaggcgtgtgccaccacacctggctaatttttgtatttttagtagagacaaggtttctctatgttggccaggctggtctcgaactcctgacctcaggtgatccaccagcctcaccctcccaacgtgctaggattacaagcataagccactgtgccaggccagcacaactttcttttttatttgagagggagtcttgctctgtcaccaggccggagtgcagtggcgcgatctcggctcactgcaacctccgcctcccgggttcaagcgattctcctgcctcagcctcccgtgtagctgggactacaggcagctaatttttgtatttttagtatggacggggtttcaccatgttagccaggatggtctcgatctcctgacctcgtgatccgcctgcctcggcctcccaaagtgccctcccagccatgatttccacttcatggaatagtctcgcacatattccagacctccctagaccctgagggatgccccatgtttccccatcaagccaaccctgggagatgcgcccagatcagtgtaaatcccattaattctccgctctaacccaagactgaagcataaatgtggagggctgcaccaggagactggccccggaggatgtagtggaaggaaaagctcagacagccagaggacaggctcacggggctcaggaggacagctttctgcccaggtcttgcattcttggggtccaggagcatgtagcagccacctgtgaagcaaaaggccagggaactggggtggatggaattgagggaagatggcagcagagatagggccctgaggaggctgtggacttgtctctggggatccccaacagcagcctagaatcaggcagcactgaggtggtcctatcccaactgactgaggtcttcaacttttcctagaaatgcttgggctgggtaaggacccggcgctgccatgggaagcggcggacaccttctccaaagcagcaactagaactttgacctttgggtgctaactctttgttgttgttgttttgtttttgtttttgagacagtctcactctgtcgcccagtctggagtgcagtggcgcaatcatggctctcatggttcactgcagactcaacctccccgggctcaggtgatcctcccgcctcagcctccttaagtagctgggactacaggtgtgcgccaccacgccctgctaatttttgcatttttttttgaaaagatagggtttcaccacattgcccaggctggtcttgaactcctaggttcaaatgatccacgcaccttggcttcccaaagtgctgggattacagacatgagccatcacatctggcctgggtgctaactcttaaggtccactagagtcatagcctgttccttttcttttttcctttttcttttttgagacaaggtatggttctgttgcccaggctaaagtgcagtggcacaggtctcaaactcctaggctcaagcaatccttttgccacagcctcctgagtagctgggactccaggtgcggacctggagtccgcccagctaatttttttttttttaagagatgggcggtctcacgatgttgcccaggctggtcttgaactcctggcctcaagcaatcctcccgccttggcctcccaaagtgctgggattacaggcttgagccactacacccgattgcctcttccttttctttacccgctggacataacctattcacgcaaactggccagagatacagcggctctgacacagaggagcaagaggcaaaccccctctcacccaacaccacctcggcccccagctcagacagccaatcagcgtggacctcgctaggtgacgcaactggtagcgaaaaagaaaatgtaagcggctgccactcgtggggagcgcgctcgcgtgcgtgctcacgcccgagtccaagggagtcttgcctggcgcgcgctcactcctgcggaaggtgggatcctgagcggcggcgaagaggctggaatggcgggaatgggcgggaggaaggagaagaaaggaaacaaccgggaaggaagagggaagggaaaggaaaggaagtgggaaaatgatgaaagagaaatcaaggacacgggctggcgcggtggctcacgcctgtactcccagcactttgggagaccgaggcgggcggatcacctgaggtcaggggttctagaccagcttggccaacatggcgaaatcccgtctctactaaaagtacaaaaattagccgggcgtggtggcgggcatctgtaatcccagctactcgggaggctgaggcaggagaatagcttaaacccgggaggcggaggttgcagtgagctgagatcgcgtcaccgcactccagcctgggcgacagagcgagactgtctcaaaaaacaaacaaacaacaacaacaaaaaaaaaaccaaggagacctatgagaaacagaagaggagaaatgggagaaaaagaagtgaaaggtgaagaaaataaagacacagaatctgggcctcacattagtcttctaaatcactgggggcttcacttcccggctcttggcattgcacagattagactcagtcccataccaaaatgcacgtctgaattaatctgcgtcaaggccaggtgcagaggctcatgcatgtaatcccagcattttgggagactgatgagtggatcacctgagatcaggagttcgagaccagggtgccaaacatggagaaaccccatctctaccaaaaaacaaaacaaaaacaaacaaacaaaaaaacacaaacacacacacacaaactagccgggtgtggtggcatgtgcctgtaatcccagctactcgggaggctgaggcacaagaattgcttgaacccaggaggtggaggttgcagtgagctgagattgtgccactgccctccagcctgggtgacacaacaagaccctgtctcaaaaaataaataaataaaataaaatgaattaatgtgtgcctttttttgcccccaggaggctgcccactggccactgggctatgagtgtcatttcatgtctcctagcacttagtgcaaaggcttggttcacagtagccattctataaacttggaataaatgttttaaatgtttctaacgtacttgcctctcacatccatcccaggagtggtcagacagttcaggtttgataactactctttttgcgggggaggggatgggatctggttttgtcacccaggctagaatgcagtgatgtgatcacagctcactgcagcatctacctcccaggcttgagtgattctcccacctctgcctcctgagtagctggcactacagctgcatgccaccacatccagctaatgtttaaatttttttgtagagatgggggtctcactatgttgcccagggtggtctcaaactcctgagctcaagggatcctcccacctcagcctcccaaagtgctgggattacaggcgtgagccacaacatctggttgaaaattactatttttttattatattttagaaactgaaagcagtgagaagtctgaagacagttgtggaataagatcagtgaccctgaatcctgcagacggagaggagggaggcaaaagcgggttgctcattgatgagatgtttgagccttagactacaaatcaggctaagaggtggacagcctttgggattaggagtcctaaatcctgtgctcaggttctagctcagtctcttattagccagattccttcggcttaagaacaagcctcttagctccgatgtcagcagcctaagagggagatttctcctttactgactcacagcattcctggtgcaagaatcaaatgccatctgtggaaaccaccaatataaatgtgtattgaaatgtaccaaggctacagccagcctgattgctcacgcctgtaaacccaacactttgggagccgaggtgggcggatcctctgagctcaggagtttgagaccagcctggtcgacctggtgaaactccatctctactaaaaatacaaaaaattagccaggtgtgttagcaggcgtctgtagtcccagctactcgggaggctgaggcaggagaatcgcttgaacccgggaggcggaggttgcagtgagccgagatcgcgccactgcactccagcctgagtgacagagtgagactccattgaaaaaaaagaaaagaaaagaaaagaaaagaaatgtacaaggtcagagccctaaggatctatcgcttgtaggtttctctagcagttcctagtaagacctgaagagggcactgtagcccacgagccggttagaacagagggaaaattctcttgggtcctcccctttggcgactcctcgcatcccagctccacacctaccgccccgctccctacacacctgtcaagtaccctccaacctccaaaaccttcccgtaatttttcctgctgcggattgcaaaacattctctcccgtttgcatatgtgcaggggaacacaggctgaattctctacagttgatgatacaagcagaaagaccggccctcacatatgggataacaaccaggatcggggtcccatacagttgtttttgtttgtttgtttttgttttgtttttgagacagagtttcgctcttgtcgcccaggctggagtccagtggcacgacctcggctcactgcaacctccgcctcccaggttcagtgattctcctgcctcagcctccagaatagctgggattacaggagcccaccaccacacccggctaattttttgtatttttagtagacatggggtttcaccacgttggccaggctggtctcaaacacctgacctcagatgatccacccacctcagcctcccaaagtgctgggattacaggcatgagccaccgtgcctggcctcccatacagttttatgacagcttttgctgtctgcacaggtccctcctcagtggtcctttcccgctgaagcattatttttgagaaggaatctgaagttgtggtcagagtaaaggggaaaatgagaagtagaaatcaagagtggaagtagagttcatttgttccatgtcccccaccccaggggagtaaaggagcaggtagggattaggtagaaggaataaaccaggcgcaatggctcacacctataatcccagcactttgggaggctaaggagggaggatcacttgaacccagagtttgagaccagcctgggcaacatagcaagaccccatctctaaaaaaaataagataaaaataatttaaaaattagcagggcatggcgatgcatgcctttagtcacatctactcatgaggctgggactagaggattgcttgagcccaggagtttgaggctgcagtgacccatgattgcaccactgcactccagcctgggcaacagagcaagacactgtcactaaaaacaaacaaacaaacaaaatcacaaatatataaatggaccacctagagtggcccttgtccccgagcagatgctgtttatagaggtggctccaaccgcacctgtgtgtaccgccccttttgtgaatttcagaggcgagtattcatggtgacagtccccaggtgagtaaaggaggcagctggacttagcgaggatgtgcattgaggcggaaggctgatgctgggagtgtggcatcagccgaagagaccaaagaagaggcagaaattaacaagggccagtgaccagggttggcagctgttaccagcccccaaaactcccaaaaggacccgtcctctggcctccctctccttgatgacaatctcagcgcactgcagccttgccctgggcagggttggcagctgccttactgcggtgaggccttgaatggagacaccttattgaccagcgtaggcagagcttgtggcctcaggcccggtagggtcgagaggtcagacaggctgtgtgagacagcacgtagggcccagccccctccacccctcgtttcccggacctggacctgctgcactgctgccaggagtgggacagagccaggggatttggaggttcccagaaaacagaaaagccaagagtcatattggtggtttcagttcttgtcaatgaggttgaagaatacacaaaacttggaccccatgagagccagaggccagcccccatcctgtcttcatggttcccaccaccccggtgtcaagggggctcttgccaccaagggagtgcccatgcccgtgagacctggagaagtcacagcttgccacctaagttctccaggtcatcctgtccctgatggtaggtgcgaaaacaggtaaatcgcctccaaagcgtgtcctggcatcaaattttgcagggtgccgagtgagctcaggcgtcttcccagcatggctctgtccctgagtttaaagctgctctctgaatgcttcctgctctgggccctcaagttggccctgtgacatccttagatctcagagttgctctctggacagttcctctggcccctgagatgtcattgctggcactggagtgtccatgggacaggctggcgctgagctgagagcccctcgacggggttcaggagtggcgggggagggtgtggcacaagcaatgttggtgagggaggtggtggatatgcccaggtggacacacctggtcatctgtcccctgtcctgcaggcctcccctgtgtacagcttcagctttccccggaggaaattggagtagactcggaagagtttgcggaaagtgtcagcagtgattgttcggagtggagcagctgaggccgcatctggaggggagatggcttccttctgccaaggagaaaacaggaggtcgctgcagtgccacagaaagggaaggaatacggacagttcctgtactccttagcaagacccttctccccttcttacagaaagggcaagcagaagtgtccgctcctactcacctgggctcccagagcccgaagcagagtggtgaggctgcgaaggccactgacggctttatccacatgcagctgcaggggctcccacggctgggaagagttgaccaacagggcctggccccgcaggacagcttccgacagcagggccaggccctgccagacttctacggcctgctgcccgacctacagggagtggactctgggagtcagctgacccatgtcaccctctccctcctgcccctcagcagccccaagcaccaagctgagcaaacagaaggtatgcaataagacttgttgaatgaatgaatgaatgaatgagtgagtgagtgagtgaatgaataatgaatgtattccatacagccctcattatttttcttttttcttttcttttttgagacagggcctcactctgtcactgaggctggagtgcagtggtgtgatcacagctcactgcagcctcaaattcctgggctcaagcgatcctcccgcctcagccttccaaatatctgggactaccaccatgcaccacttcacctgactaatttttttaaatgtttgtagagatgggggatctcactatgctgcctaggttggtctgaaactccagggctcaagcaattctcccatctcggccatctcagcctgggattatagacgtgagcctctgcgcccaggcagcctcatctctgctgctccattttacctttccctcgatcattctccctttcatccaaaatcaggctcgcaaatgagattctccaaaagaaaggaaaaaaaaaaaaaaaggaactcacctccatcctcttccaggcatagaaattaactttggtgtctgggacagtgatattctcattcaagctgcagtgttcagcacagcccgtctgaaatgcacacagcccggggagtcaagggtccctgaaggctctggccctggcccacaggccgtaggatctgctggctttgctccttgcctagtttccaggtatggtttggggccaccagacttattcttatgtaggggggcagtgtctagcttcccaactccaccccaaaccaagtgccaggttcctggatctgggaggagttccctgaagccctgagcgtgagttctgtggaatgtgctggggaaggggtctcaccgtgatattctcggcctccttggcctccaagaggtacctctccaggactcggctgtcacagatgaggcgtggtggggcgcccaggactgggaggcccagagggagcgacagcagggacaggagaagccacagccaggcaggacattctagaacagatagccaggctgagagtcaggcggggagggagaagggtggctgtggaaggacagcttccttcatccccacgtctctgccccagctcgtccttcctgtccccaaccatgcaagcactcaggtgctgcctccctggccttcattcaatcctgctgccgtgtgcacaccccacccccagctaccagcatccacttctccggccaaacttcaatcctggtgtgacagaggcttcccctctggcagataagtggtggctccagcgcccaggttatcagcttatcagcttcctctccactggcacagcagaacccccaaaccttcttcccctcaacccccaaactgtgtccccttcacaggtcaggtttttgccatccccaaggactcccccaagtccccgctggcacgtggaggctgccccacccccctcccccttccggggtccttgacaagtcgccggtccttgaacccagccacctcctggccaatagccggggcgctaaatccccgctcaaacagggacccgggcgggcgggagcgcccagcccgcgagtactcaccgtgcacccccatctccgcgcctggccggggtccctcagcgacctggggcgcgccgggtgaccacaccgggggccctcatcccgggaagctcggcggtgcagggccagccccacgggcctggaggagagggcggctgtccagggggcgcggtgtcggagcagagcgggcgcggtggccccggtccggctccgggaggacagcgcggtgcggcgcagcgcagcgagcggccggggtggcccagggactctgcggctctggccgggggtcggggctgttatctgcatgtgtgcgtgcgcgggtgggggtgggggagaggctgtgtgcgtgaggggtcgccaggggtaggggccacccggggtcagagcaggggcaggacgcctgggttgaggctcgccggggcgtgagcggggctgctgcagacgtgcgtgtgggtcatgggggctgctcccgggccctgggtcgcgggaggggagtgcagccggttgcgcacccttgggactggcggagcgtgctatctgggaaaggctgggctcccggacacctcccctggggggcatcccggtcttgggcggagactcagagatgcctgggttgctgagttccgcaaagtagctgggtctggaagcccagaagctttagggaggggcaaatgagtggtctcccttcccacaatcccaggacatgttctagaaacaatgttgaccatgttgaggaatttgatgggggcaaatagggcaagaaatttggggttcttcctccccacctcactcctcaccgtctagtactctgcaaacccagacacttaactttttttttttttctggagatgtagcctccctatgttgcccaggcagtgcagtggtgccatctcccgttcactacaacctctgcctcctgggttcaagcaattctcctgcttcagcctctggagcagctgggactacaggcacacctttacacccggctatgttttgtatttttagtagagatggggtgttgccatattgcccataccggtcttgaactcctgacctcaggtgatccaccctcctcggcctctcaaagtgctgggattgcaggcgtgagccaccgcacccagcccccaccccagacacttaacttttagtgcacagagcacacagtccattgtgcaggacacacatgcaccttgacatctgtttatttgacctgtggtgtaggttagctaggctgcattgctgagttcttaagaacactgaaatacagctaacaccaagagtgatgggggctgggatttacagctaaggttttatggcttctggaaaccctgagccagatgagtgagattcccagagcaggagaccaagactagctggtctctcacaccttagaaagtggcctcgtccttgagccctcaatgtcctcatctgtcaaatgggtgtggtgaaactaccagcctatcccattcaggtttcataaaagacaggaaaggtccaggcgccgcagctgacacctataatcccagcactttgggagaccaaggcaggaagatcctttgagcccaggagttcgagaccagcccggacaacatggcaagaccttgtctctaaaataaataaataaataaaaaataattagtcaggtgtggtggctcacgcctatagtcccaaatatgcaggaggctaaggcaggaggatcacctgagcccaggagttcgaggccgtagtgagccatgatcgtgccactgcactgcagcctgggcgacagagtgagagcctgtctcaaaaacaaaaaaagactggaatgtgtagatctgagctgtaagagttagccgggagaaatcaagaaagatttgagggaggaggtgacaatgacctcagccttgaaggggggtaggacatcaatgggaagaggtatgaggtgggtgggggattgtcgattcagcaaagtgaatggagagtcaggtgagtattgcgggatctggccagcagcccgcaatgcaacagggctctctctttgttcccaggcggatcagcaggttgagaaataatagacacacacaagatagtgaaagctggtccaggggggtcaccgccttctggtcccgtggtgtcaacaatgcaccagatgtaccatcatttattattaagtttagtgagggcgggggtaggttagtgagggatttagggtcatttgattatgaggtgagatggtcacatggggatgaattaattctttaacataacatttatatgtagaagtacagtacctttgtatgcagaagtacagtatacagagataagaatttacaatatagtgtgtgcatcagtaatttctaacagagccttaaaacagaaacacaatctttccataacctatgattagcaagatactaatcagcagtaacaattgcaacaaaagctggttacagacaatccatggaaacaggacatgaagctagacaaccagttagaccagaaattctcagaagggagtatgccttaaccctaaagaggcctagaagagccatggcaagatgagggcgtttatagccctatcttatccatatggacaggtgcccccccgccatgcgtccgtttataggctctccacaagggtcgcattccattcccagagctatgaacatctgcttttctgggatagaaatcttggtgatgtgaaacctccctgactgcaggtccgttcataggctctccgcaggcggaagcacatcacaggctgttggctcattctggcagtccaacctggcattgtttgtacacaatcctgcatgcaattttgtatttacaataatcaggagcatttcatcttttattccgtagcagtagtttcagggggtctccctacaggtgagcagaagggaagatggagaagagagaggtggaagatgaggccagggtgctgcttagggaggagtcaggctgtctatggccttgaatgcctctctgaagaatttggattttgtttggaaagagtgggaaacattcactcattcattcaaaagatatttatggatttcctacctacccctggccaaggacctggggatagagcagtgaatgatacagccaggaatgcctgccctggtggagctgacgttctagtggggttgccaatgatgaacacaaaaatgggtacaagacagaggattttggctgggtgaggtggctcatgcctgtaatcccagcacttcgggaggccaaggcaagaggatcacttgagcccaggagttggcttgaccagcctgggcaacatggtgaaaccccatctttacaaaaaaatacaaaaattagctgggcatgatggcatgtgcctatagtcccagctacttgggaggctgaggtgggaggatcacttgagcccaggaagttgaggctgcagtgagctgtggttttgctactgcactccaccctgggcaacagaatgagaccctgtctcaaaaaaaaaaaaaaaaagaaagaaaagaaaagaaaagatagaggatttcaaatagccagaactaaggagaaaaggcacaggcagggttatctaaaataaggtagtcagagacactaggctgagaaactgacttgaataaagacctgttgggggtgagggaccatgagggtgtggtgaggtgaagagcttgatgggagggggatttgggccaagtgtagtggctcacacctgtaatcccaacattttgggaggctgaggcaggaggattgcttgaggccaggagtttgagaccagcctgggcaacatagtgagatcccatgtctataatttttatttttgtttagctagctgggcatggtggtgcacatctgtagtcccagctactcaggaggctgaggtcagaggatctcttgagcccgggaggttgaggctgcagtgagctatgatcacgccactgcactctagactgggcaacaaagggagaccctgtctcaaaaaaaaaaaagaaaaaatgagtggtttggcaagatggttgggtgggggtcaggagacagaggctggtatgcttctggctggcctaattccctcagaccctgctcccctgcatcctctgctcaccttgagccttcccaaaactgctgtccaggctcccccagccccactcggctcctggttctgatcccttccagagtcctgggacgtgcaccatcacactcacatccacacatggccgcacgtgcgttctgtcttggctgctccccttccccagcctctgctctcccaggaccctgactcctgcgtcaatgccctgacctaaccatggagagggggccggagacagatgggtggggtggacacagctggaggaggaggagccttttgggctgtgggacctgcccctcccctcacacagcttctcgggggtccctgcatccttgtctgcagttgaagaggagtgagagatgggccaggggcaccagcctctaaatgctgtagcctgctggataggagtagtgactgccttgtcccctggggcttctggagagagagctgtgattgcagcttgggagggaggagaggatcttggtccaccccatacccaatccgaagccatagtaattctctttttgagatggagtctcactctattgcccaggctggagtgcagtggtgccattatctcagctcactgcaacctccacctcccgggttcaagcaattctcctgcctcagcctcccgagtagctggaattacaggcatgtgccaccacgcccggtaatttttgtattttcagtagagatggggtttcgccatgttggccaggctggtctcgaactcccaacctcaagtgatccgcccgcctcggcctcccaaagtgctgggattacaggcgtgagccaccacaaccggcttgaagccatagtaattctgctaagaggggagaggctggtttggagcccagagcctcttggatactgagcaatgcagggtccattcatctgtccttgaggaacaggaagaaaacaagaagctccatggggctccccgaccaatgcccaccatccccctgcccagtgccccccacccccgtcatctgcctgctcttcatcttctagcagatgctgacccacaggcccaggaccactgcagagcatctcctcattgacccctccagttaatccctaaccctgctgctcaattaactttcccactgaacagcctcatttgtgctaattccctgagcaggaacctgccacggcttcctattgcctcagaactgagaccctccaaggtctaccattcacttcatgttccaggctgttctcccgctttgctcactcccactccctccaccacaggagatggtttgtgccttcctgcccttggctcatcctggattaccctcccacaccatctcctcgttttctttaaagcccaaatctgtgcatcgcctcctccatgaagcctttcttgatctcccagcaggaaatcgtctccttccctggcactgccgtcatttatgtacatgtcttaggcatctcactggcaggaccgccatggacagccgtcaaagctgagcactgcccaactcccaggggcatccatagagactctgaagggaatggtaccgtctggagtcacgtagtgcaggtgccctagtcatcgaagagagcgaagggctgcgtatggaagttctgatgcatttttctgtctaccaagcgtccagcatgtcccttttctgtggtaaccacccaagtgtggattgcattatgtggtccctccactacatgctcagagaagaacccaacctagagggggcactgagccatcccccggtcaacccagctccctgggatcctggggcgtgtgaagcttccatgcacttcctgagcaggcagccactgaggcagggtttgaaaagggccagttgtgacaggaggatggcgggcgtggaggcaggctctgctccacggattcctcctggcagtggattcagattggaaatccaagcagaagcaaatttacagccccccgagctgtcccagacccccaggcagcacggagccccagctgcctggagtcggacttgggaaggggggcctcctggcttctctttccctcctcatttccaagcagtggcttctcagctcagctcgagttcagccagaggcccagaagaccttctgtgctgggaggggaggtggctggggaccttgttgggtggcctttggggaactgtgaaggaagcaagaatgctggagggccaggcacggtagctcacgcctggaatcccagcactttaggaggctaaggagggaggatcccttgagcccaggagtttgagaccagtctgggcaacatagggagaccctgtctctacagaaaatttgttaggcatgctggcacatgcctgtagtcccagctactcgggaggctgaggttggaggattgcttgagcccaggagttggaagctgcagttagctatgatcgcaccactgcactccagcctgggcgaaagaacaacaccctttcttaaaaaaaaaaaagacgctgaagaagggattcctgctggagaaccaaaggaaaatcctttgccaaagtcctcaaaggaaaatcctttaccgcacctggcctaccaaagttttatgaagcctattcctgactgatcctttgttctctaagtaaggtgatcaaggagttagttatcaaactgatgaggggccgggtgaggtggctcacacctataatttcagcactttggaaagctaaggtgatcatttgaggccaggagttcaagaccagccggggcaacacagtgagaccctggctctataaaaaataaagaagttattttttatagagttatattttttatataaaaaataaagaagttagccaggcatggcggcacatgcctggtgtcacagctacttgggaggctgaggaaggatgatcatttgaacctaggaggtcgaggttgcagtgagctatgatcatgccactgcactagagcctggggaactgagcaagacccatctctaaataagtaaaaataaaactgatgagatacctcaagaagttattttattgcccgttccactaactaataaatatctgatgaatgaatgggtcagtggatacatggatgatgcagaggagaatggcttgctgtctcctctataacaagcctctgctcccttaagaaaaggcaaccgtcttgtcacttgaagaatgcaaacagagggtggactttcgccttcacaggacctgctagattccttccaactcagtctattagtcttgtttgctattagacaaatatacttccctgaaaagggaaaaattatttgctggttgatgaactaagacacgagcagaagagctcacttaggccgggcacggtggctcacgcctgtaatcccagcactttgggggctgagacgggcggatcacgaggtcaggagttcaagaccagcctggccaatatggtgaaaccccatctctgctaaaaatacaaaaattagctgggcatggtggcgcacacctatagtcccagctactcaggaggctgaggcagaagaatcacttgaactcgagaggcggaggttgcggtgagccaagattgtgccactggactccagcctgggcgacagagccagactctgtctcaaaaaaaaaaaaaaagcaacttttatgatgaacttttgctcattacaaaaacaatacgtgaccaaaattagaaaacagcgctaaactcaaacacataaactgaaaaacacccataatgtcattagggtcttgggaccttaagtggccattttcacaggcttccttctggtaggatgacctttgcctcatcccaaatctctgtgcaattggacatctgtttcctaaggaactacaattgacacgttctcgtccaacctctctagtggtttgagggtttgtgaaacaccatttttccctcaactcctgaccaagcaccagaaactcacctgggacaaagtgctgggcttctctagcaggatcatcagcctgatcaaaccacttaatatttcaaggtcccgtccccttccctgctatgcgagccacaactgagtctggctcagttgttagtttctactaataactcagacttgagaattaaacgcacacaaaattgccttccttcacttctccccattcctattaagaagcctaaaaccatttcttagcaaaatggcttcatactaaacaatactagctcttggccgggcgcagtggctcacgcctgtaatctcagaactttgggaggctgaggcaggcggatcacctgaggtcacgagttcgagaccagcctggcaaacacggagaaaccctgcctctactaaaaatacaaaaagtagccgggcttggtggaacgtgcctgtaatcccagctactcaggaggctgaggcaggagaatcagttgaatccaggaggcggaggttgcagtgagctgagatcacgccattgcattccagcctgggcaacaagagcacaactccgtctcaaaacaaacagataaacaaacaaagaaaacaatagtagctctttttttttttttttgcctgtagtcctaactacctgggaggctgaggcaggattgcttgagcctagaagtttgaggttgcagtgagctatgattgtaccattgcactccagcctaggctacagagtgagaccctgtctctaaaataaataaataaataaataaaatgtaaaaaggagggcagggcattgcatttgcacacaccttctgcctccatctcctcacccctctcccgtttttcaagcttttttctttttgagactgagtctccctctgtcacccaggctggagtgcaatggcacaatcttggtgcactgcaacctccacctcccgggttcaagcagttctcctgcctcagcctcctgagtagctgggattacaggcgcctgccaccacgcccagctaattttgtattttcagtagagacggggtttcaccatgttggccaggctggtcttgaactcctaacctcaggtgatctgcctgcctgggcctcccaaagtgctgggattacaaacagacgtggctcactgtttctggcctcccaagctttgacggaagtcactttggagagccagtagagggaggagaacagaggctggagctagcctccctacggtcgggcctgcaggcagggttccctgccccacctgccctgcatggactctagtagatgcaggagcctggttcacgcccccccacacacaaaagagtgagccccaggccccactcttccttcagtggcaatgtggaggtctgtttctgcagaactgccactgagggaagccccactggcaagcagtgagaaaacatggagtagaaacaacaaacaaataggctgcaggagggaactgccaaaacaaaccagatgggaaaggctgcctgccaccacctctgctgggctcaggcccggagcacatacgtgcagggagacacagctccatccagcttcctgccggctccccgctcggctattggggggctcccgggcaaggaagccttgcagtcaggctgatggaaaggatgtggcctgatagaaatgtccgcagccagccaggtacggtggctcacgcctgttatcccagcactttgggaggccgtagggggcagatcacgaggtcaggagatcgagaccatcctggccaacatggtgaaaccccgtctttactaaaaatacaaaaattagctgggtgtggtggtgcgcacctgtaatcccagctactcagctacttgggaggctgaggcaggagaatcgcttgaaccagggagtcggaggttgcagtgagccaagatcacgccactgcactccagcctggcgatagagactctgtctcaaaaaaaaaaaaaaaaaaaagaaatgtctgcagccttgtctcccagtacctcttgctttctagccacctcgagtccctccagtcccagaacgtagctgcctattcattaatcccctccctgcccactgttttttgagacaggttcttgctgtttcacaagccctcagtcacggcttactgcagcctcaacctcttgggctcaagcaatcctcccacctcagcctcctgagtagctggaccacaggtgcacaccgccaagcccagttaatttttaaatttttgatagagacaaagtcttactctattgcccaggctggtctcaaactcctgagctctagcaattttctctcttcggccttccaaagtgctgggattacaggcgtgagccaccgcgcctggctttttctttttttaagaagctgtgacccacaaatgggtcacaacccgctttgataaacattgctttagttgactttagtttgataaatatgaaaaatcaggtcatcccacaaatatccaaacagaaagtattacctgtgtgcccagtaattatttggagtgaggggttccttcgccactggagcagcccagtgagaagggtctgaaggccgggcgcagtggctcatgcctgtaatcccagcactttgggtggccaaggcaggcagaacgcttcaggtcagaagtttgagaccagcctggctgacatggtgaaaccccttctctactaaaaatacaaaaaattgcagggcatggtgatggatgcctatagtcccggctactcaggaggctgaggcagaagaatcccttgaacccaggaggcagaggttgcagtgagctgagatcgcaccactgcactccagcctggatgacagagtgaagctgtctccaaaaaaaaaaaaaaaaaaaaaaagggtctgaagggctctgcacctgaaagcccgggtatcatctaggtaggccctgcaggtccaggaattaaatgaagccacttgtcagtccctaccatggagcctgacactaagaaggtcctgaagtcttagtttgcttccttttttttttttttttttttttgagatacggtcttgctgtgtcagcaaggctggaggagtgtagtgcggtgatcacagctcactgcagccttgaactcctgggctcaagcgatcctcctgcctcagctaacgaggtagctgggattataggtgcaaaccactacacccatctagttttcaaaaattttttgcatttgggaggccaaggcgggcagatcacttgaggtcaggagttcgagaacagcctggccaacatggtgtttccactaaaaaaatacaaaaataattagctgggcgtggtggcactcacctgtaattccagctactggggaggatgaagcaggagaatcacttgaacccaggagccgaacgttgcagtgagccaagatggcaccactgtactccagcctgggtgacagagcaagacttcatctcagaaaaaaaaaaaaagtggtttttttgcatagactaggtctcagtatgtcatctagattggagtgcaggtggcatgatcataactcactgcaccttcaaactcccaggctcaagcactctttccgcctcagcctccgccagtagctcagactacaggctggagccactgcacccaactagaagacgaaaatctttaaaacaaacattggggctgggcacggtggctcacgcctgtaatcctagcactttgggaggccgagatgggtggatcacaaggtcaggagatcgagaacatccctgctaacacgctgaaaccctgtctctactaaaaatacaaaaaaattagccagggtgtggtggcaggcacctgtagtcccagctactcaggaggctgaggcaggagaatggcgtgaactcaggaggtggagcttgcagtgagccaagattgcaccactgcactccagcctgggtgacagagtgagactctgtctcaaaaaacaaacaaacaaacaaacattgggatgactgggtttctgcactgtactgttttgttacactgctcatagcataatctatgctctctatagaggcaagaaacacttgggttcccctttcacctagatacctgtagcgtttcctaccatccctattcaggcacacacagaatttacacaggaaagaatcagtggcagtgggatggcaggacactagtgcaacaggattttttatttatatggcaatagttacagaccgcatacacacactcaggaaggcccactaactgggcccaccaagagacaattacccccaccctcaatgcagagtcctttgggcttccagggaacaggccttttcttacatggctctggtccgaggtccagtactcagcatgcgaagagccatatcacggaggggataagtggaggagtgtcttttcaattacttgggtgtgaccctgaagactcggatgtggatggctgagttgttgcggatccgagtcagtggctcccgtgtgtcggtctctggctccagctcatcaacaagctccacggtggaggtattggcagccacctgcaaggacccgaagctgcccgcctgcagctgcagcgcgatgttgatggcgcggttgatggccaggcccaagccgtgaatgtagatctcagagcacgcgttctgaccccgggcccctccgtccagcagcttctggcagcgggccagctgggccttaaagtccgtcttcatgttgacataaatgtcattgggtctccggggcaggcggctgggaagccttttcctaagggtgtattccactggatccagttcagcctccacagcaccgcggggctctcggttttctgccatgctgtgtgccctggcgtgggaaagggacgcgatcagagggctcagagggacctcgaagcctttcctaccccttttcctgtacaaagggtgcacctggccgggcagtggctcacgcctgtaacctcagcactttggaaggtcgaggcgggaggatcactggagcccgggtgtttgagatcagcctgggcaacatagcaagaccctgtcttaagaaaaatttttttaattacccgggccgaggggggaggatcgcttgagatcgggagttcgaggctacagtgagccgtgatcgcgcccgccactgcactctagcttgggaaacagagcaagcctctgtctcaaacaaaaacaaaaacaaaaataaagggtgcacccgagaagggacacactcgatgtccctgtttccttccggcccctcgtcctctcccactcacctccagatcccgcgtctccccaccccccgttccgattcattcatcgcgtcgccctcaaactcgcgcccctccgccgcccctcccgtgcttactctcttcgttccacagggccctccaggcgcgcgaggcccgctccccgccaggccactcaagggttcgccggccagcccaagtaaccgcgaccccaggtcccagagaaagaaggatgtgggtgcaagcagccagccagctcgtgggcgccctgcccgcgccggggtcctgaacgggctgcggagtgcgcacgcgcgcccgtaccccgcgagctatgaatcgccttcccggcttccgttcgccccgccccttccctgagcgcaagggcgactgcgcgaggcgtttgagaaacgcgagacttccgggcgtgacgggatctacacgtgtacgcctcgggaactggcgggcggccgagggcgggaaccaggtccgagccggggaggagctagaaagggccgggtcggcgtctctaggcctggcggagttcccggccggcggaggggtagcgtagggaagacacctggaggggaggctgttctaggggcagggttcttccccatgggagcagggaaggggccgagttcaggagaccgcggtcgccaaggggcctgaactccgcgtccgtcgcagctcctctggtcagaagaggcctgggcagggctggcagaactgaccccctagtctaatgtccctgtggcccgaggaccgagggggaactgagggacatagccggtccccacctcgctggaggacagcgtcccgggactcccctgcagttcacgggaagctgtccgcctcctgtctgtgctggggacccacgctgtgagccctaagcccaggcttcacgggtccccaaggaacgctgacccacccacgcccctcaaccatctcccaccagctctgcagcaggcgaccccggatcagggacttgccgccccctggcgggcaaggtggggaggacgcgcgccggattcgtggctctcaggccagtggagtgggggctctgcccagatgggcatagtttctgcagagttcccttctgaaatgagtaggacctgctgcactggggaccttgaactactctgtttgcccagcattcaaatggggatgttcacaacagctccaccatattgcacatgcattttattgaatggctagctgtatagcttctgtctacaaacttgcatgcatttatttttgagacagggtctctgtggcccaggctggactgcagtggtgtgatctcagctcactacaacctctgcctaccgggttcaaacgattcttgtgcctcagcctcttgagtagctggaattacaggcgcacgccaccgcacccggccagtttatttcatttttttgagacagggccttactctgtcacccaggctggagtgcagtggcgttaacacggctcactgcagccctgaactcctgggctcaagcaattctcccgccccagccacctgaacagcttggactacgggcatgcactagcatataaagttgtattttagaagttaatccttggtattgaaattttcgatatgttggccgggcgcggtggctcacgcctgtaatcccagcactttgggaggctgagacgagcggatcacgaggtcaggagatcgagaccatcctggctaacacggtgaaaccccgcctctactaaaaatacaaaaaattagccgggcatggtggcaggcgcctgtagtcccagctactcgggaggctgaggcaggagaatggcgtgaacccacgaggcggagcttgcagagagccaagatcgcgccactgcactccagcctgggggacagagccagactccatctcaaaaaaaaaaaaaaagaaattttcgaaatgttcacataattgttgggagcgattcattcctccacacatgatgtgcctcctctctcccatatcctgttaattgtagcagttgcgggcatttgcgatgacaggatatacggatggtgccacacttgaccttgagtactggaatgctctgaggtcaagcatatgccacagtgcttgagactgtgggcatcacctgtagtgtctttttctccaactcctgtctccttggtcctagggaggtctggctctaattgctagtttccagagattcattcctttttttttttttgagacggagtctcgcttcgttgcccaggctggagtgcagaggcacgatctcagcttaccgcaacctctgcctctgaggttaaagcgattctcctgcctcagcctcctgagtagctgggattacaggtgtgcaccaccacgcccggctaatttttgtattttcagtagagatggggtttcaccatgttggccaggctggtctcaaactcctgatctcaagtgatcctcctaccttggcctcctaaagtgctgggatgacaggcttgagctattgtgcccagcctcatttttaagctttggatcacaggaagaagcaacaagaaactatacccaactcaaaacattttaggagaatcataaaattggtccatttagaaggtagagttgggtccattaagttattgttgcaagaggttgcatattcaatgatcagttatataaaataatgttctcgttagtatgcttttcataatctgttttatcatacatgtaacattcaaactgacaaatacactgacttgggaataaaggatatgaaaacactggtttaaaaaaaatggggatgctaattcctttcttgcagttgagttgtgaaacccaaggtaatgttgtaaactgtaaacctacacaggtgagttggcatatttatgtctcccaggcccttctcagttccctaggatggagtctgaccccatttgatcaaaggttgaagagagttcagattctagagaaatttgctcccagcaccccatttcaatcccatagttctttcctttacttcagattctttcattaaccacaagattgggattgaattggaagatccaacatattatagtaaagataccaattctcttcaaattaatctataggggccaagcatggtggctcacgcctttaatcccagcactttggaggccaaggtgggcagatcacttgaggtcgggatttcaagaccagcctggccaacatggtgaaaccccgtctctgctaaaaatacaaaattagccgggtgtggtggcacgtgcctggtactaatcccagctactcaggagactgaggcaggagaataggtggaacccaggaggcagaggttgcagtgagctaagatcacaccactgcattccagcctaggcaacagagcgaactccgtctcaaacaacaacaacaaaaacccaaattgatctataggcgtaatgcaattcctacaaaaatcccagcagtttttttgtattaaatatagatgtttattctaaactttatatggaaaggcaaaagaagtagaatagttaaaaccactttgaaaaagttgttggaatcacactacctgattttaagacttactatataaataaagttatcaagaaagtatggtttccccagtgggatagacacaaaaatcaataagatggaattgagagctcagaaatagattcacacaagtgcagccaactatctctctttaaaaaataattttttgtttgtttataagacagtgtctcactttgtcacccaggcttggagtgcagtggcacaatcttggctcactgcagcctcaacctcatgggctcaagtcatcttcccgcctcagcctcccaagtagttgggactatcagcacgcgccaccatacccggctaattttgttttattttttgtagagacgaggtcttactacgttgaccaggctgatctcgaactcctagactcaagcaatcctcctgcctcagctccctcaaagtgctgagattacaggcgtgagccactgccaaacaacttgtttttgacaaaggtataaaagcgtttcaatggggaaaggatgatcctttcaagtggtggtgaaacaattggacaaataggcaaagaaatgagcctcagccctatgcaaaaagttaatacaaaatggatagtagatttaggaaaaaacttcatggtgtagggtcaggtgaagagttttgtttttttgtttgtttgtttttttgagatggagtctcactctgtcgcccaagctggagtgcagtggcgcgatctcggctcacttcaacctctgcctcccgggtttaagagattctcctgccttagcctcctgagtagctgggattacaggcacatgccaccatgcccagctaaaggcgaagagttcttagacatgactccaaaagcacaatccataaaagaaaaacaattgggctgggcacggtggcttatgcctgtaatcccagcactttgggaagctgaggtgggtggatcacctgaggttaggagttcaagaccagcctggccaacatggtgaaaccccgtctctactaaaaatacaaaaaattagccgggcgtggtggcatgcgcctgttatcccagctactcaggaggctgaggcaggagaatcacttgaatccgggaggcggaggttgcagtgagctgagattgcgccattgcactccagcttgggcaccaagagtaaaactccgtctcaaaaaaaaaaaatgataaattggacttcatcaaaatgtttaaacatttgctgtgtgaaagatcacattaataagatgaaaagagtagccacagactggaagaaaatatttgcaaatcatatatccaacaaaggacttgtttccagcatatataaagcactctctaagctcgagaggtagaaaccgaacaacccaattagaaaatgggcaaatccagcctgggcaacatggtgagatcctgtctctacaaaaaatttaaaaattagccaggcctggtggtctgtgcctacagtcctagctactcaggaggctggggtaggaggattgcttgagcccaggaggacaacaccgcaatgaactgtgatcataccactgcactccagcctgggcgacaaagtgagggtctgagaaagaaagagagaggaaggaaaggaagaaaaagggaaggaaggaaggaagagaggagagaaagagagaaagaaaaaacagaaaaaaggaaggaaggagggagggaaggaaggaagcaagcaagcaagcaagcggtggctcttgcctgtaatcccagcactttgggaagctgaggtgggtggatcacctgaagttgggagtttgagaccagcctggccaacacggtgaaaccccgtctccactaaaaatacaaaaattagctgggcgtggtggcgggcgcctgttaatcccatctactcgggaagctgagacttgaaaatcgcttaaacttggaaggcaaaggttgcagtgagccaggatcacactattgtactccagcctgggcgacagagcaagactgtctcaaaaaaaaaaaaaaaaaaaaaaaaagaaaatgggcaaatcttaaacggacatttcagtgaaagaaagtataaaaatggtaaataagcacatcataagatgttcaatatcactagccattaaggaaatacacatgaaaaccatgacgagctaccaataacacgtattgaaatggctgaaatacaaaatacgaacaataccaagtgtggatgagaatgcagggaaactggatctctcatacatacactgcttgtggaagtggaaaatcgtacagccatcctagaaaacagtttggcagttccttctaaaattaaacgtacacttaccaaatgacccagcaagaacatttcttggcatttaaaaatctgtacatgaacatccatagcatttttttttttctttttttttttttgagatggagtcttaatctgtcactcaggctggagtgcactggtgcaatctcagctcactgcaactgctgcctcccagatttaagcaattctcctgcctcagcctcccgagtagctgggattacacacgcatgccaccacgctcagctacatttttttgtatttttagtagagacggggtttcactatcttggccaggctggtcttgaacttctgacctcgtgatccacctgcctcagcctcccaaagtgctaggattacaggcgtgagccaccgtgcccagcccgtccatagcatttttatttgtaatagcccaacgggaagcaacccagatggctttcttttcatattaatttattatgtagagatgggggtctccctatgttgcccaggctggtcttgacctcctgtacttaagcaatcctcctgcctcaccctcccaaagcgctgggattgcaggtatgagccaccgacctccggataacttttgatcagtgcatggtaaacaatctatggcacatccatcccatggaatattacacagctataagggatggatcaaggtgacctgttaggctgcgaacataccagttatattacataatactgtgctgaactgctcatattgtagtgtgcaagacaaggtgagcatgatcgcatgacctgtgctgaggggacatgaataggattgggtggatccccaaggagagacagccaatatcatcttgagggatccaaggttttccaagaggaagtaatgattaggcagagacaggaatgtttagcagtaggtcctatatcctgttcccttttttttgagacagggtctggctctgccacccaggctggagtgcagtggcttgatctccacttactgcaacctccgcctccctggcttaagcaatcctcccacctcagcctcctgagtagctgggactacatgtgtgcactgccacgcccggataatttttgtattttttgtagagatggggttttgtcatgttgtgcaggctgctcttgaactcctgggctcaagcgatcctcccgcctcagcctttcccaaagtgctgggattacagatgtgagccactgtgcccgacccatatcctgttccaatagggaggtctgagccctgggaggatggggagaagaggaggaaccagtaaaatctgagaaatagcagctagtgaggtgggaggaaaaccaacagaatatagcatccagaaagccaggtgaagatggtatttctggagggagtgaccgtctatgtcactggctggtaacaggtcatgtaagataatggaccagtagatttcacaatgtggaagtcattggtgacttacaacgcagttacgtttggttgagcaaagaacttagcgcagggccaaaagtaattctgaatgcagtaaattaattttaacgcccattatgtctgataattaacaataagcacagtttatgagctatcactccattactcaggtcatgtgtctttccatggtacctaaaatatgttttgcaaactctgatatccacataaatatcaaggctcgcaatttaggtggatgaagacaagctctgtaataaaccgatttgacaataaactgatctgacaacaagacagtccttatctccttgcatgcatttcttttttttttgagacggggtctcgccctgtctctcaggctggagtgcagtggcccaatctcagctcactgcaacctccacctccaaggttcaagtgattctcctgcctcagcctcccgagtagctgggattacaggcgcctgccaccacgcaggctaatttttgtatttttagtagagacgggggtttcaccatgttggccaggctggtcttgaactcctgagctcatgatccacctgcctcggtctcccaaagtgctgggattacaggcgtgagccaccgcatccagccctctccttacatttcatcaaaggaaaacactgaagaggaatctgccattaaaaaaaaaaaagtgggggcggggcgggcgtggtggctcatgcctgtaattccagcactttaagaggccaaggcaggtggatcacgaggtcaggggatcgagaccatcctggctaacacggtgaaaccccgtctctactagaaatacaaaaaattggccaggcgtggtggtgggtgcctgtagtcccagctactcgggaggctgaggcagaagaatggcatgaacccgggaggcggagcttgcagtgagccaagatcgcgccactgcactacagcctgggcatcagagggagactccgtttcaaagaaaagaaagaaagaaaaagggccaggaacggtggttcacgcctgtaatctcagcactttggaaggctgaggcaggcagatcacctgaggtcaggagtttgagatcagcctgaccaacatggcaaaacccatctctactaaaaatacaagacgcttgaacccggaggagcggaggttgcaccactgcactccagcctgagcaacacaacaagactctgtctcaaaaaaaaaaaaaaaagaaaagaaaaagaaaagaaaggcagaggctggctgtttggtctgcgtgagaccactctttcatctccattaaccttccaaacaaatctctttgtttagttaaaaagtttgcaaatttagaacacagaccaagacattttacagagcagcacctgaacaaacaaaaacacattagctccaaatgatttctttattttgagatggagtttcgctcttgttgcccaggctggagtccaatggcgtgatctctgctcaccgcaacctccgcctcctaggttcaagcgattctcctgcctcagcctccctagtagctgagattacaggtacgtgccaccacgcctggctaattttgtatttttagtagagacggggtttctccatgttggtcaggctggtcttgaactcccaacctcaggtgatccacctgcctcagcctcccaaagtgctgggattacaggtgtgagccaccatgcccggccaattaggtccaagtgatttctttgtaatttttaaattcttcatgggagactcacagttcttttttgttttttattatattttttcacttttctctctttttgagtcaagaactcattttgttgcccaggctggagtacacaaccttgtccttctgggctcaaggaaggacaaggtttattagcagcatgagaactgactaatacaatcacggtggaagaccagaggggtctccctggatctcctggacaccaatgtgtgactttggacaagtaatccccaccaactgtaaagtgtgaacactgatgctgaagtcagcagaaattaaagcctataaactccctctttgagaaaggaagctagctggcagggcacggtggctcacgcctgtaatcccaacactttgggaggccaaggcgggaggatcacttgaggccaggaatttgagaccagcctggccaaaacggtgaaactccatctctaccaaaaatacaaaaattagctgggcatggtggcgcctgtctgtagtctcagctactcaggagactaaggtgggaggatcacttgaacccaggaggtggaggttgcagtgagctgagatcacgccactgtactccagcctgggcgacagagcgaaactccgtctcgaaaaaaattaaaatattaaataaaatataaaaacagacagcaggacaggcacagtggctcatgcctgtaatcccaacactttgggaggccaatatggaaggactgcttgagcccaggagttcgagaacagcccaggcaacatagtgatacttcagtctgtacaaaaatttaaaagtaaaaaataatagctgggccaggcacagtagctcgtgcctgtaatcccagcacttttggaggctgaggcaggtagatcacctgagttcaggagttcgagaccagcctggccaacatggtgaaaccctgtctctactaaaaatacaaaaattagccaggcatggtagcacacacctgtaatcccagctacttgggaggctgaggcacgagaactgcttgaacctggggtcggaggttgcagtgagctgagatcacgccactgcactccagcctgggcaacagggtgagactctttctcaaaaaaaaaataaataataaataatacccgggtatggtggtgtgccactccctgcaatcccagctactcgggaggctgaggagggaggatcacttaagcctaggaggtcgatgctgcagtgagctgattgtgccactgcactccaggctgggcagcagagcaagaccctgtctcttaaataaataaaatagttaaaaaaggaaaacagacaggaaaactccaagtgcagagaagcctagtggtacttggtgggggaaacaaaagttgttccaggtataatagttcctgaagtcaacactctatcatggcaagacaccaggcactcaaattccaagtcatgaacttaccttttccttgttttgaggattacattgtgttgggcgacagctcttttaggcttctgggaagtaaggtatacattctggagtaacttccaaagaaaaaggtgaaagcatacgcggaacttttgagccttgaaaaagttcagcgagtcattcttgaaaagtcctttttttaaacaaagggggtttcagtcacctcacatttgcatagcagtttctctcttgtcaaagcctttcacattcacttattttaattcttacagcactcaaggaagagtgtggagttgggggtcgggggttgggtgcagagcagtgttaacatccttctgtaagagaaacggaggcttttgagaggccaggcgtggcggctcatgcctgtcatcccggcaccttggaaggaggatccatttgggtccaggagttcccggcactttggaaggaggatcatttgggtccaggagttcaagaccagcctgggcaacatgggggaaaccctgtctctacaaaaaaaaaaaaaaaaaaaaaaaagctgggcgtggtggtgtgccctggtagtcctagctactcagggtgcttgaggcaggaggattgcttgagcccaggaggcgcaggatgcagttaaccgtgatcgcgccactgcactccagcctgggcgacagagcaagactctgtcttggaaaacaaacaaacaacaaatacaataaattaaaaaaattagttgggtgtggtggcacacagctgtagtcccagctactcaagaggctgtggcaggaggatcccttgaggccaggagttcaagaccagcctgggcaatgttatgagacacgccacccgcccagtctttacagagaataaaaaagttatctgggcgtgatggtgcacacctatagtcccaacaattcaggaggctgagatgggaggatcgcttgagacacgggagttggaggctgccgtaagccgagatcgggctagtacactgcagctggggcaacagagtgagaccctgcttcaaaaaaataaataaataggggccgggcgcggtggctcacgcctgtaatcccagcactttgggagggcgagacaggcggatcacttgagtggtcaggagttctagaccagcctggccaacaaaaataagccaaacgtggtggtgtgtgcttgtaatctcagctactcgggaggccaaggcatgagaatcacttgaatccgggaggcggaggctgcagtgagccgagatcgcgccactggactgcaacctgggggacagagcaacactctgtctcaataattaaataaataattaaaaaaataaagaggctcctgagagtcaacttatttgcctgagccacttatttcacacatcccaggacgcctgatgaagggttctggattttattgtctcctgtcatccaggcgggcttcctggaggaaaccggaccgccagggaggccgcggcctcggtcccagaggtcgcgcgtcgcggggccgggggaggtgggggagaggaggccgctctggggccgatcccgcccgcagctgggggcccccgtcacgtgaccagccgggcgcccaggtcacgtgtcggggcggggaggggggggctgtcgggggcgacgggcgtccgggcagtggcgcgcgcggcacgcgagcagcgcacgaggagaggtggcgcgggccggagccgcggagggaggcggcggcggcggcggcggcggcggcggcggcggcggtggaaggggcggccccgcggccccgcgtccgcgtcacgtggtgcgaggcgggcagccatcttgctacaaacacaaacacagaggagccggcccgccgccggagccggccgagcttagagaagcgcccggagccaggcgcgcggggccgccagcgaggacctcccccgtctcctccccgaggccgccgcagcccggtgcgtcctcccgctctcccgcccgctccggcccatccccgccgccgggaccctcccccagagccggccagcctcggggaggccccgggagccggcgcccggcttagggggcgaccgctcgcccccctcgcacctggcgcccctccctgaagggcacgccgtcctcccgggccggcgcgctgccttccacccccgcgctcctaacggtcgcccccgggcccctgccaagccctgccctgggccgcctgggggcccccgaccctagcgtcctagggtggccgggccccgcgcttcccggagttctccccagcgcgcctttgggttcccctcggaacgagctgggccttgcggttccccaagtccaagcgttccacgactttggccaacatggaagccttgccctccacccaggcacctcgcctgggtcctcctcacctctgtttcctttcgctccggcgatcttagtgctgggtcattggggtctccttcttcccagttgctcggccgcgggaaataccttccttagcagagactgcttgtcctccccgtcccaggccaggcccttctcagctcatgcccctccgtgcagcagctccctggccacagctctcacactttgccttaaaaaaaaacaaaacaaaaaaatttccgagtaactttttaaaagcccctcgtctctcttctctgttatacagtcattactcgcattcccggtcagactccaggtctgttgcatcctagtgctaggaactaggagatgctacataaagacttgttagctggattggattttttttttccagccacccaagccttacttccctcctgcctctcaaagtgtcgttctggaagatcgtcagctttcccaccctcttgtgcactgcctcttcgagtctatatagaagtttcaatttagaaccccgccaacccctcgcctttggcatggaaacaccatcggtggtaccagtaagggtctctcctttgctgccgacatgggggatttggggttctttctccttcccatctttcctgtgccctttgcagacctaggctagccaccctccaccaggctagccagctccaatctgattttcttagattgtaggtcttggtcccccagcggtctgtcgtgccattgggaaggatttgagggtagacctggccttggtgtccctgccattgcctggggaccaggggccctgagggtcccacgtggtggttagtcaagtggaccatgtgcttaaacttctggactagctttttctgctgttggacacatcagtcttgtgttcgtgatctgatgcgttagccctaacttttacatctgctattggaatttgggaattaaagaaaaatagcccactttagaggagagaagatgagaggaggaggctagatgaaggatgttgaaagtctaacaaatgtaaaatggcttcaaactcacagaataatgcttgcgagtttgggatggttactgctaccgtgcgcacctccagtcttgcatagtgtcaaggatgtcggggcactctgtcggagcagcttcctccttcttttccctggctggagcccaaggctgggcaagtgggcaaaagggatcacaggaggtaaagagtgaaaatcctttgaaaactgttaacttgtagacaattgccaagcggtggtgtgatttgctgggatggctcagagaggagagagctgggataaccgaccagccgcgaagaatgcgggtttgcatctcttttttaagcctcagcgtcctcaccctaccacgcttggagaatctccatcctgagaaagggccaggtcccctccagcaggcctggggctgggcggttgttccagtgttgaggaattggggactgtgcttctgtttaagtggctctgttctgtgccaaggcacagtgctctgtgttggagctaattttaggggtgatggagtgaggagataatgttcttagctgaatgtgcactgggaccgcctgttctctgtcttttctttctctcttgagttctgagccccagagagcaggctccctttcccgcgcgccctggcgcctactggagcacccgggcccagcgtgtcctcgccccttgtctccggcagggggcagtctttcaaaagcattgattcagatgctgggggagtgagggtagacaggcccgagaaagagaaggggtggggaaggggcgaggagccgaagtaggccgaggcttgagggcagggccagggcgggggacaggctggaaggggcctgtgagaaggagaccctgagctgagaaagctcagccgggtaagctgagacgggcaggtggcagtaccccagcccccgccacctcctgctcttaccttcattggacagggatcagatacctggccctgagagcttgcaatagacaaacttaggcagtttttcttaaaaaaaaaaaaaaaaaaatctattcttttctcaaagattttctcctggcaggatttcagatttccctcgtgggacagtgtaattagggaatgatgtccctgctgttcagagaggagaatgacccagcgtgcacacacctgccttcccttgccttccccttggcccagtagacccccaagggctgtgcccatgctcgtggcgcagaggagggtgtctcagcactggcgcacttggtatctggagtcacatagctcttggctgtggggctgccctgtgcaccccctgcccagtggtgacaacccagaatgtctctagacttggccaagagccccctgaggagcagaggtgcccccagtccagaacctgttggagggtgggagccccatggtggcctgcaggtgtgccactagttcctttagtccaaggaaggggccaggcaccatcagcttccggcaccagaccctgctgtgggggtgcctagagagttaacctcactctcctggtttcttcccaagaaggcgggtggcatgggctttttcctgctctgggcctgctctctcccctgtcttggtgtcgctgtcctcagtctgcatgagccattctccctttgtgtgccccttgcagccaagacacagccaggatgggtgacttgagccggaggcacctaggagagctgcccttgctgcgcctggcagggggcagtgtgaggccatcgctttaaattttttttttttttttttttttgagacagagtcttgctctgttgcccaggctggagtgcaggggcgcaatctcagctcactgcaacctccgcctcctgggttcaagcgattctcctgcctcagcctcccgagtagctgggattagaggcacctaccaccaggactggctaatttttgtatttttagtagagacagggttttgccacgttggccaggctggtctcaaactcctgacctcaggtgatctggctgccttggcctcccaaagtgctgggattacaggcatgaaccaccacgcctggccactttttcttttttaaaaaatgtttagaattgtttctgtagagtcgtggtcttgttctgttactcaggctggtctcggactcctctcttcaagcctcccacagtgctgggattataggcataagccattgtgctggccaggtggtcccttttctgttctactctctcccaccctcatgcctccaggatgagcttctggccttctagaaggaatgaactggaggaggcccaaaatggcctctcctgaggctgatttgaaggaatgtggggtgtttttcttggagtggggaaaacttaggtatgcggtggttatctccagataccttttgttccctaaagcttttttaaaaaaatgattattgtggtaaaatatacaacaaaatttggagactttaactgtctctaattgtgccattctgtgttactaagtacactcacattggtgtgcggccatgaccaccagcggccccaggatcccctcctcagttgaggctctggacccttcagcaacagctccctgtcccctcagcccctggtggctgcccttctaccttcctccctcaatgagtgactgctctagagacctcatgaaagagaagtaaggggtagctctccttttttggctggtctgtttctcttagcgtgatgtcctcaaggctcatccagtccccagattgctctaggtggccacctgcagtcagtgacaggctggtggcttttcatgtcatggaacacaccaccactggagcatccagccgaggcagaggaaggagaggtcccaggggaggccagcctggccttgggttgcctctgagcccggtgtttccccctggagtgcctggactctgagcaggcctcggcttgtcatgggctgctggctcagctggggctgatggcctttcctcctcagcaccctggttgaacccgcttcctcttctttcccagactgtggcgtcctggagttgatgggagctgcagcaccaagccgggccagcctccctcccagccagtgacaacaccgcagcacctggaccccgcccacccgcttgagtcctctgcctggggccccagggatgcgcctcctcctgaaagtcccctccatcctcccttagaggaacaggctgccgccgcgcccccatcagcctccattgccctgaccttatttccacctgatggtgccagaggctgcttcccagctggtatcctgagatcctcgttcccttggtggcttggttgtttaagcctccattattgattgggggcggtggtctgggtgtgattcctgtgggggaaaccagcccgaggtgccttggctcaggcttgcctgcctggagtccttgtcgtgtacccgtctgtggccctagagtcacctcctgctccttttcactgggtttctccccagaccaagcccctggatttgagcttctgagcagccaactgatttttttcatgagggaaagaattttgctcctagatttatttctaatccttttctccgtaactgaccttttctctgtaagctatttgtggctctagtgggtttttgtttgcttgcttgtttttgttttatctttgccctgaacgtccatcctggcctcggctgcctccctccccgagttcttcactacacctcctgtctcagcctcccagagagggtggcgagggtgctgatgcccagagacaccatccggcgaatggacctctcctgtcatgcggggcagggcagggctgccggcagagccatgtcctgaaccctccctcctcccccctgctctccttaagggtctttcccagatgtgaaggtccctcccaggctctactgaggtcagaccaattcccagtggcttgggtaccctcgttcactccagcaccagcccctgccctccttcttcccgggccaggctgccaggtgagccccgggccaagggtggttgccctgctgaggccgaaaggactcgagcttcccatctcctcgcctcccccaggtctttcaccgtctggactcatctctgggtaactcatggtgtgagtggccacgtggctggctcaggtgagtccttttagaccccaggtgacccaccagctagtccggggcccattgttgtgcccactaggatgtcccccatggtgtcctccctgcgctttaaaggtctccttcgtgtgctgttcttcatggcccctgttcccccacaggtgtttggacagtgaacgccaggtcccctcctccccacccccggcctctcaaacacgcccagccccacgatggcagcagagacactcaactttgggcctgagtggtgagtcacttgtgcctcggctgccgtggagattcgagaaagcacagtcaggctgccctgacctctgtcttcttctctctgtgttgtgtccaggctcagggccctgtccgggggcggcagcgtggcctccccacccccgtcccctgccatgcccaaatacaagctggctgactaccgttatgggcgagaggaaatgctggctctctacgtcaaggagaacaaggtgggtgcgtgggcgaggggggttggcggtggtggcctctgcctgtggaggggatctggcagcatgtggtgtcttggctgtcccaacccactgccaggtcccggaagagctgcaggacaaggagttcgccgcggtgctgcaggacgagccactgcagcccctggctctggagccgctgactgaggaggaacaggtgggaccgggccaggagctgaggctgcgggagcctgggaggggaggccatgggttgggttaggaggagaggggccagcgctgaggagacaggcggggagggtgctgtggggtgggggtggaggtggttgggtgcctgggtcctcactcccgcccctggctccctcctcagagaaacttctccctgtcagtgaacagcgtggctgtgctgaggctgatggggaaaggggctggccccccccctggctggcacctcccgaggcaggggcagcacgcggagccgaggtagaggggtgatggcgtgtcctggggacgggcagatctgggcccctgacttcgagaacgtgcagcaggtttcattgtgcgtctggcctcttctctaggccgcggccgtggtgacagctgcttttaccaaagaagcatcgaagaaggcgatggggcctttggacgaagcccccgggaaatccagcgcagccagagctgggatgacaggtggggccgggagggggcatggcgcagagccgggcaggccagggaggggaggcctgggccctgtcgctagagggtaacagaggcccaccagataagccctgtccgagatcccggtgctcctgacccctggtttcgtttgtccccttcctccctccactgcctcagggcacagtggacaaggcatggggcggttgcacagggtggcaggggaggctgtactgtttctgacccacacgtttcccctgctgcagaggcgagaggcggtttgagaagtcagcaaggcgggatggaggtacgaggctgctgagggcggcggccggggcggcagggaggaccaagatgggtggcccagtctgggggtgcttatttcggaggtgttgggggcaggagggcctggagctggccccccaacgtttcttgagggtccaggcaccacgctgcctttctaataactgcccctgtcttcccgtctcccagcacgatgtggctttgaggagggaggggctggcccaaggaaggagcacgcccgctcagacagcgagaactggcgctccctacgggaggaacaggaggaggaggaggagggcagctggaggctcggagcagggccccggcgagacggcgaccgctggcgctccgccagccctggtgagattggggcctggtagcattggcgggggcagtggggagcaggaactgtaatgagagggtgggctcctgtagccacggggagggagcagaggctggctggtgtgggagtggccgggacagcagccctggaggtgctccgtgagctgcagcagagggggccgctggcttcgcttgggtacccactcttcttctccctgacttttcctgtgcagatggtggtccccgctctgctggctggcgggaacatggggaacggcggcgcaagtttgaatttgatttgcgaggggatcgaggagggtgtggtgaagaggaggggcggggagggggaggcagctctcacctgcggcggtgccgagcgcctgaaggctttgaggaggacaaggatgggctcccagagtggtgcctggacgatgaggatgaagaaatgggcacctttgatgcctctggggccttcttgcctctcaaggtatctgtgaggaggcgagggtgggaacctgcccttccggggtcctcttcctccccacccaccccagctgttctctgctccccaccccggccccatgcagaagggccccaaggagcccattcctgaggagcaggagctggacttccaagggttggaggaggaggaggaaccttccgaagggctagaggaggaagggcctgaggcaggtgagccgcggggtgcccagcgggcctggggctgggccgggcaggcactggtgttctttgccgggctgggcattggctgcccacctacctgtagaatcaggctacttagatctggaagaagagtgctgagaggtggggaggaaccagggggtagcagagccatgtcttcaaggcagtgtaccagatagaaatcaggcgtaatcaaaatgacctttgaaagtcccttgaagaagctgtagaacctggagtgacgtctgcggtgttgtgtggtgttgtgcgatgttgtgatatgttcctgccgcgtctggcagcgtggaggcgagggtcagggcaccacattccctctgccattagttgagttgacccaagtgaagtggtggactcggcctaagggagtgtgacccgcggttccagccacactcaagggcttgtgctaactcgcgtggcaggcccagcccttggttctgaactctggccatctccctcttctaggtgggaaagagctgaccccactgcctcctcaggaggagaagtccagctccccatccccactgcccaccctgggcccactctgggggacaaacggggatggggacgaaactgcagagaaagagcccccagcggccgaaggtaggaagggaggatggcctacctcccgggtgcgctggggctgtgggagaaagtgctccccactcgtgggggtgggcacacagggcattcacattgaggagccatggcaagagcgtggtgttctggagtgagagtaggcgaaagctatcttgtctcctccccgcccttctttccacctcctatctcatgccttccagatgatattcgggggatccagctgagtcccggggtgggctcctctgctggcccacccggagatctggaggatgatgaaggcttgaagcacctgcagcaggtgtgggggcctgagaaagcgggagggacccttcccacttctgacctgacctgcttggccccagccccggccccagctcaagctccatccccatccccatcctgatgttgctgagattggcagctgagcctttcttctttttctgggcatccaggaggcggagaagctggtggcctccctgcaggacagctccttggaggaggagcagttcacggctgccatgcagacccagggcctgcgccactctgcagccgccactgccctcccgctcagccatggggctgcccggaagtggttctacaaggacccacagggcgagatccaaggtacctgtgtgggatgggagggctgctcaaggccgttctggttcagggtgtctctggcataccctgtgaccccagtggttctcccgctccctcgctccctgtccaggccccttcacgacacaggagatggcagagtggttccaggccggctacttttccatgtcactgctggtgaagcggggctgcgatgagggcttccagccgctgggcgaggtgatcaagatgtggggccgcgtgccctttgccccagggccctcacctcccccactgctggtgagccgcttctcccctgcatggagggacagggtgtgaggggtgccggcaggagtccagcagagtcccctcctccctgctgggggcactggccgagctctcacctgagcagggaaacatggaccaggagcggctgaagaagcaacaggagctggccgcggcggccttgtaccagcagctgcagcaccagcagtttctccagctggtcagcaggtatggggggcctggggtgggctgggagaaggcccggcgctggctctgtggcccaccatctccactgtcccatttgcagccgccagctcccgcagtgcgcgctccgagaaaaggcagctctgggggacctgacaccgccaccaccgccgccgccacagcagcagcagcagcagctcacggcattcctgcagcagctccaggcgctcaaaccccccaggtgcgtggtgcgtgcgagccctcaggatacagggtgggggggggatgggggcagaccagagatggatttggggtcctaagaatccacaatttgctcctcagaggcggggaccagaacctgctcccgacgatgagccggtccttgtcggtgccagattcgggccgcctctgggacgtacatacctcagcctcatcacagtcaggtgtgtggcctgactggtccccacccccaaggcagtctccgggtgaaatggggtctggggtctgctccccacccccacacgcccctagctgccattctggctggggagcccactgctgcggctggactagatcagtgggcccaagtgcccacctgcagccgcctctgcccccctgccccctgcaggtggtgaggccagtctttgggacataccaattaactcttcgactcagggtccaattctagaacaactccagctgcaacataaagtgagtgggcatcctggggctgaggccctgggaatgaagggtggaccgaggcaggccccaggctgtcccctgcagctctcccctctgatgggccactggtctcagttccaggagcgcagagaagtggagctcagggcgaagcgggaggaagaggaacgcaagcgtcgagaggagaagcgccgccagcagcagcaggaggagcagaagcggcggcaggaggaggaagagctgtttcggcgcaagcacgtgggtgctcccaagcctcagctggctggggggacaaccctcgccaggtcccctcaccatgtccccctcttaggtgcggcagcaggagctattgctgaagttgctacagcagcagcaggcggtccctgtgccccccgcacccagctccccgcccccactctgggctggcctggccaagcaggggctgtccatgaagacgctcctggagttgcagctggagggcgagcggcagctgcacaaacagcccccacctcgggagccagctcgggcccaggcccccaaccaccgagtggtgagcaggccgggaacctcccgggctccccctacagtttccagggtggcacagggagggggatactgaacccagacttgtgcagccccagccccagtcccagcctctcctgtgatggcaacagctcttgtggccctcacctcacctgtctccctttgccacctaaacaagcctccccatccgcttttctggggtgcctttgtttgagccactctgatcttctgccatctgtagcagcttgggggcctgggcactgcccccctgaaccagtgggtgtctgaggctgggccactgtggggcgggccagacaagagtgggggcggcagcagcggcctggggctctgggaggacacccccaagagcggcgggagcctggtccgtggcctcggcctgaagaacagccggagcagcccatctctcaggtgggcgtggcacctggaggctccgggatggccctgagggggaaggtggcagacccccccaacccctgccagctgatttccaaccctgactcaccctcccccttcagtgactcatacagccacctatcgggtcggcccattcgcaaaaagacggaggaagaagagaagctgctgaagctgctgcagggcattcccaggccccaggacggcttcacccagtggtgcgagcagatgctgcacacgctgagcgccacgggcagcctggacggtgggcgagcggctcccaggaggtgggcgggacctgggtctccagacccggccagggggccctgacagccttcgctcatcctgcagtgcccatggctgtagcgatcctcaaggaggtggaatccccctatgatgtccacgattatatccgttcctgcctgggggacacgctggaagccaaagaatttgccaaacaattcctggagcggagggccaagcagaaagccagccagcagcggcagcagcagcaggtgaggcagccggcaccagcagctggggtgggcttgcctggtgcctcctgaccttcaccctcctctccgctgccttaggaggcatggctgagcagcgcctcgctgcagacggccttccaggccaaccacagcaccaaactcggccccggggagggcagcaaggccaagaggcgggcactgatgctgcactcagaccccagcatcctgggtgagctgggctggggcaggagcgggacttccttggcacagggcaggaggagcccaggagagagctcagacgcagcttctccccggcttcagggtactccctgcacggatcttctggtgagatcgagagcgtggatgactactgaccagcccggacccccagcccctgggctgtaggccagggcagccacagcggcgtggaccgagggtcccagcctgcaggctccccgcagagagcacaggaagaggcaggggcggggtccccagcacttgttacaaacacacgatgcaccttaactcacccaccacgaggcactttacagactgggggagggggtttttctttttattttttttttaattttaaacgactgaagaaaacattaggagaggcaaaaatattgttaaaaactagactctaaacaccccttcctgctgtgaggatagtgggtgtgacaatggaaggtccacagaggtttttgttttttggtttttttttttttttttaagaaaaaaagatgaaaaatgaaaaaaaaaatggttaggaggctgaaagaaaaaacacactgttattttggggcagtggggacacaggccccgtggacctgtcctgcctggcccccaaggccatacttaccccccagaaggcgggccatggggtaactggaagctgggggccagcagtttgcacaggaggcctgtctgagccccacccgccagacctgttgtgagcagctcctgtcactgaggctggctgaggtgtccggggtggggccaaagtagccccttggcttcgctgctttgggggacagttgcacaaattggacgagcggccccagctctctggctgccatcttgtgctggccgagtagacgggaggggccaagccgtgccaacctctctggctggcagggtggggcagcaggactctggctctggtgaggggcgtctcccactgctgccattttgggggacaccctgggtttgaacctgaaagccccagctctctgccttgccacgtgaatgtattctttgggccacaagcccccgcctcacccctgcctgagctgcctcacccctgtgagcggcgggggtggatgattgctccagaggctgcagagagaaggctgagctgtttctccagtgaagggggcaggaggaggggcctcaaaggcaaggagtgggtggctttgggcttagggttggagtagaggggctgccgcccggggccccaacctgtagccagctcgtaagatgtggaccacccagctctgcacctgacccttccgctgaccaaatgggagaggagcaggtggccttccgggtctgatatgatgcgctttttaccgttgggtaaggttggggtgaagagaagtgtgcggctcctgggtcagaggaggctgccccttctattgctcacccacttcttattcccggtcccctacttgggttcgtctccgcccattttgggttttgtaacagttttgtcttttgggtttctcatccagctcctcccattgacctcattgctcagagtgcagtattagggcaaggcttcgccactgcctccctccatgaatgtatttctccctcctgccctggggacatggggagtggcccgtttctttccccatctagtcccagaaagatggtgtttggttttctgttgttggattttttttttttttttttttttttgcaccaaagtggcaactaggtcagtgttgggggatcaagctggcctcggggtggggggcccccacctgcctctccctggttcccacagtgttagcgtccctgaaaagacaatattctctctaaagcaataaggggtgacgggccggggggagtgtttgctgctgctggcccccagctccccttccctcttgccaggtgtgggggagactcctgttgtgactgaatgtaacccccccacccctgccgcagccaatgcaggggaagggggacactcttcctgtctcttctccccagctaaagagactttggacttagggggcccatgagcctggagaggccttaaccctgtgaggaagtatagggggagccctctcccacccccatccccttctgagagtggtcaatgtttacaagcccctgagcccccctgcccagggactcagaccctgttgctgtccttccccggccccggtcttcctgggccctcgctgctcccctgcccttcctggggttggggtgggtgcaggggtcaccgtgttccctgtctgccttgtacccacagtctccccgccccctctccaccctgtgtgacttccctctcttttacctgctcctgtaaatactcccttctcccaataaaacttggtgtgtgttctcccgttccgcctccactgctcgttatctggggagagccatggggatgagtggctctgcacagagctgggaactaggagctctgagcagtgcccgcctggtcaggctggctctggtcagcagcctgacgggggaaaccatggtgagggctgcttatccgagaacctctggacggaaggctctgggctggggcttcagctttgctctgagggagagtggggaccccacccccagccccagctgcctggcaggccccataccttccccaccatccaccccctcagcagccctcaggcaacaaagtccagaaacaaggagaacacagcaagggcagagaccaggtacagagttggaattggctcctttatggaaaaactgaaaatataataaaaattaaaataaaaccagttttaaaaaagccagcccctggggtttccacctcctgcctccggccctccagaggggtgaggccccaaccccagggcagcagaaggatgagggcctcctgctcctcctcttcccccattccatccccttcttatctccacagtgggggccccgggaggaaccaaacctgggtgggagggcagggacccaaggccccgtggcccggggaagggggctgggattgcgccagccccgcagccctggcctgtagtgtgggcatgggcagggcccctcctggcctgggcccagtgggggtggggccattagttccagatcttgaggaaggagtcccaggagcccgtggccacagccatgccatcgtcggtgaccccgaggcagctcacgcggttgtcgtggccagcgaggactcctgtgaagaagagagaagtcagaacccattgggcctgggctccaggtccctgcccacccagcctgggccccagctgtcacctgcacggtcgcccttcatggcatcccagatgttgcagttgaagtcgtcgtagccagcgagcagcagccgtccgctgcgcgagaaggcaacagaggtgatgccacagatgatgttgtcatgggagtacatgaggagctcctgatcggcccgcaggtcgaagaggcggcacgtggcgtcgtcagagccggtggtgaaggcgtagccgttggggaagaactgcaggacacgggacccagatggggtgagggtgagggtgaggagcagggccgggagcctggtggggagggcctggcctagctcgccccaaaactcacagccactgcattgatgtcggattcatggccgatgaaggtctgtcggcacatggaatcccgcacgtcccacagcttgatagaggcatcacaggcgcctgacacaaacgtgcggccatcgggggccagggacagggacatcacatccccactgtgtccagcaaaacccactgtctgctggcctgtctcaatgtcccacagggcactggagaggtgacaggaagaaagaaaagataagagacagggcgaagaacagagtccctgttctccccgccccaccacgtgagcccaaccctgtggaagggtccagggaggctcttctcagagccttaggtggggaggggacgcatccctccctgacccccttagcgcccaccaggagagggaggctacggtgcatgctgcatgttgagcactgggacggtggcccctgaggcaggaagtgtgggtttgcccagactgcccagccctggcagagcctcaccaggtggtatccccagagctggtgatgatttggttgtcatccaggaagcggcaacacgacaggtaccctggggaaggagctggtcagccaggtctccacacggagggcagtgcaccccccaaccccaaaaagggcccgaactgggccaggcccctcaccagtgtggccaggcagctcccggctgaccctgacgttgccctcgcgggtcttgaggctgtagatggagcagatgttgtccaaccccccacaggccacaaagttccctgagggcgcgtaggcacaggtcattacccaggaggagcgcagcgggatggcgtggacctgcggagcaggggaagcgccggggtcagagccagccagggccctgtggccctgccccaccccgcagcccgcgccaccctaccttgttggtggtgtagctgtcccagatgatgagcttcccatcctgggaggcgctgaccagcagcctggtggggaacggtgtagggagagcagaagggtggcgtgaaaacaagacacacccccttccctttgggtgggagaaggtagggtctctctctgttgtgcaggctggagtgcagtggcaccatcacagctcactgcagcctggaactcctaggctcaagtgatcctcccacctcagcctcccccgcatagctgggactacaaggtgagcaccaccacacccagctcatttttcaatttttagtagagccagggtctcactatgttgcccaggctggtctcaaactcctgagctcaagtgatcctgccctggcctccccacgtgctgggattacaggcgtgagccacctgagagacagtctccagctgcagcccacaagttctcaccagcatggtcctgcctgtccaggtctggcggacatgtctgggagtcaccgtttttccagacgtacgctgggtattttggtggcctgcttactccgccagatctgaggctgctcccacggcctgctagaaagtcggcccacagcgccagcccgcgcacacacacacaccttgagtcggtcccccagtgcatggcatagatctttgccaggtgcccacggagggtcctccgggtcctcatctggattctccccactgggtccagcccagctgtgatctggaggtagagacagaatgcgctcggggaggcccaggcagcaggactgcagagggcagcggcctctgatccttgccccttcaacccctagttacgctctggccaccaagtgccctcacctgggtcagtgttgagtccccacatgcttttcgggcatcctgtaagggatggcagagccagagagacgcgagagaagacaggttggggaggaaagggagagaagagaacagaagacaggagtggacagggtcagattctgagccattaaggggccctccctcccccttcccccaccaacaccctcacccaacccggtccagggcaccgggcggtgtacacatgaatcgcccgccccgcaccaggccctcacccggatctggttccggagctgctcggcctcctgtctcagttgctccagctcactcatggcgccgggcccgtggggcagggttgggggcggctgggggccgcgggacgggggctgggggaggcagctcctggccgctggcccgaggcctgggggatgcagggctgacgtcaggcccgaggccgccggggaagtggggagaaaggcggggttgcagcgcggcccggaaggggtaagcaaggggagggggaaggggcggcgcggccgccgtccccgggcacaaccagggtctccggcaccagagacgtcgccgagtaagagccgacttccccaatcttcctcccgccccccggaaacggagcgggaagtgcaagaggaagcgcaggggaaacccctccctcggacacagcccgggcaggacacccgcggcaggaactggggcggggggggcgggggtgtcccttcgaaaacagacctggcttctgccccagcccgcacaggcaccgccctccaagcacctaattttaaaaggggcggtgcctcttgaaattcaccccacaaggcgcacaccctccacacacacccccagcttcgatggtggcgggtggggggagagaccagaggggaaagctgggctgttcgtggggttgcctaggcaaccgtcacccggaccgagagcacctcattggtgaaatgcccccaccctagccccgttgccaaggcaaccgcatccacggcagagacctgtagggtgggtgaccccacccccggccccatcgcccccgcccgacccagcctcccgccctccccagaaccggcccgggtggctgtttacaggatttgggaaaagccgattgggcgctaataggttctggacggctcaccccggataatccccggtccggctgcgccccattagccgtccgccgcgggtgggggtgacagcggcggggaaggcagccccgagccgctgctccctccagcgcagggaccgcccgccccgccgcgcccgcagaaagcccgtgggagccgctctcgagtaattacggctccgcaacgaggtccccggccccgaggcgcggaggtgctctctcccaggcgcgggcgggcggccccaggcggcctggccgcggcgccctggacacccggggggcccagcccgcaggctcggcgcccgggccccaggggcccggctggctccgctccgggagcctgagtccttccccgcccgcgggacacctgtgcgatccggccgtacacactgcacttggccggcccaggcgtcccccacccagctcccacttcccccaggcgcagggcgttcctcttccccactgacatttcccctccttgtaagttcagctttctacgccagtgccaaggggtgaccctcaaaatcgggggatggggggtgcgggcagaactccttactctacccaacccccaggcccgcacaaagcctcttccacctactagcagcccaggcctggcggcaccgccggaggcccagggcagaaggaagcacggctggaggaagaaactgggggcgggggcgacgttctcagccctcggtccccatcaccccccagggccctcagcagcccccagactctagggatatagcagccggcgctccatagagaaatgagggtgcaaccgcctccgcaggtctggcggggctcaggagagtgacgggagggtccctggatctggcagctggaaggcgcgggctggtgcggcgctgcgaagcgcagtgggcctggccctccagcccctacgacctccattttgcctaaaagaaagctgggcggggggcgggcgcctgggagctgggcttggggtgaggatctgtaaagggaatagggcgccgagggctccagtttcggcgagtggggccagaaaccacgggcagcacccaaatcgtgggtagggtggagacgaaaggaagggtggcgcgcggccttgcctgcttctccccgattttggagttgtgcaaggcgagggccggcaggggtgcgacagtggaggacacgaggggtgctccccgggggcaggcgggagggtggcggtggggaaagggggcggggcggggcctagaggaagcccggaatttagccccccaacttccgagggagcaagaggcagtcggggctgggctggggtctggggtcgggcaaaaacttcgctgatggtgcggggaagcgcacgcacggtggggggcgagggttccccagttccccttccgggtttgggagcgaccgggcaagaggggaagggagcggaggtctggggagttacgtccgctcccaggaggccagccccgggagaccgaaggaagagaggttcccctgggggaaattggggctggggggcgagaggactccttttgccagcgaaggtacctgtggcggtgggactctgcggcgggggtcgctggcggtgcgcgggcggcgctgtcttcctccgcggcggaggcggcggcggcggcggcggcggcggcggcggcgcggatggatttcctcagtggccccagccccgccgccagcgctgcctccccagagcggagggatcccgcccgccagtgacgcggctgccgccgccgcgcccaggacccggctgggcgagaccaactgcctcgcacttgggggaagccaggagacaaaaccccaccgagggagcaaagacgggcccagtcgctcccaaggttctcaccctacgctttgtggacgcaaaccgtactcaaagggtttgcttcacggaaaggagtaagacatcccccctctgggactggaggaggtggtactggcatatgaggagggtgagaccgctcgctggtcacgtgatcagcctcccgccccgcctggaatgggtggctccagactgggaaggggagttcgacgccccagttcccggttgggccacgccccggccctgaggaggccacgcccctcaccagggggcggagctaaagagacctggacggggccggcctcgaggctgctggaagaagaagcgcgattccgagaaagtccccgagccgggagtgggtaggggctgatgcgggcgccccgggaatgccatgagaagggtcgtgtccaggcatttcctcagcctcgcccactgggcctttgtagaccccctttcagggcttgccactgaaataacaactcatttattgagagccacactttttttttttgagacggagtctctctctgtcgcccaggctggagtgctatctcaactcactgcaacctccgccgcccgggtgcaagcgattctcctgcctcagcctcctgagtagctgggactacaggcgtgtgccaccacacccggctaattttttgtatttttagtagagacggggtttcacggtgttagccaggatggtctccatctcctgacctcgtgatctgcctgtctcggcctcccaaagtgctgggattacaggcgtgagccaccgcgcctggcccgacacttattttttaattggagtacagtgacgcgattgtaggtcactgccacctcaatctcctcggctcaagtgatcttcctgcctcagcctccctagtacctgggaccacaggcgtgccccagccaccatgcccagctaatttttaaatttttggtagaggtggggtcttgctatgctgcccaggctgacatatgttaagtctcacaatactgggaaattaagtgctaacattctccccattttcttttcttttcttttttttttttttggagacagggtctcactctgtcgcccaggctgaagtgcagtggcatgatctcggctcactgcaacctccgcctcctgggttcaggcgattctcctgcctcagcctctggagtaggtgggattacaggcgcccgccaccatgcccagctaatttttttttgtatttttagtagagacgaggtttcaccatgtcggccagcctggtctcaaactcctgacctcaggtgatgtgcccgtctcggcctcccaaagtgctgggattacaggcgtgagccaccgcgcccagccttctccccattttctaatagtggaaagagacctgaggctgcagagtttagatatgaacccaggcagccaaaactttactgtacattccagtttatctgtatgagcctctagatgaaccccttcctccagggaccttgcctgtaaagggacaagaacgtaggtctaggcctcagtttccacatctgttaaatggggatgttgacagcatctgccctccaagtcccggattcttactgagaaccccatcgattgtggaaatgctttgggaagttcaaggcaacgaatagccttcactgagtccttgtaatttgaaagtatcaaaacacgcagccataagaaagaacgagatggggctcacgcctgtaatcctagcactgtgagaggccgaggcgggtggatcacttgaggtcaggagtttgagacaagcctggccaatatggtgaaaccccgtctctgctaaaaatacaaacattagctgggcgtggtggcacacacctgtaatcccagctactcaggaggctgaggcaggagaattgcttgaacccgggaggcggaggttgcagtgagccaaaatcacaccactcactgcactccggcctgggcaacagagcaagactttgactcaagaagaagaaagaaagacaaaagaagaaaaagtaaaagaaagaaaaggagggaaggaagggaaggaaagaaaaaaagaaaggaaagagaaaggaagagagaaaaaagaagaaatcatgtcctttgcagcaacatggatgcagaaaagagagagagagagaaagagaaagaaaagagagaaggaaggaagggaaagaaagaaagaagaaacaaaagaaaagaaaagaagaagaaatcgtgtcctttgcagtaacatggatgcagctagaggcttttatcctaagtggataaatttctgcaggaacagaaaaccaaacactgcatgttctcacttataagtaggagctaaacactgggtactcatgaacataaagatgggaacaatagacacgggggattactagaggggggaagggttgaaaaactacctattgggtactgtaccccaggtgacgggatcaattgtaccccaaacttcagcatcacaagatatacccatgtacatgggtacattcatgtgcacatgagtcagaatctaaaaagatgaaattatattttaaaaagtatcaaaacatactcttcatttagtctctgtgaaagacattacaaatcacttttcaaaaacaattgttttttcttttttcttttttttttttttctgaaatggagtcttgctctgtcacccagagctggagtgcaatggcacaatctcggcttactgcaacctctgcctcttgggttcaagcgattctcctgtctcagcctcccgagtagctgggattataggagcatgccaccaggcctggctaatttttgcatttttagcagagatggggtttcatgttggccaggttggtcttgaactcctgacctcgtgatctgcccgcctcggcctcccaaagtgctgggattacagatgtcagccaccgtgcccagcctacaattgttttttccaaatcgaatatgttatgaacatagtagttgtctttgtaatgggtacacacactcacacacacagaatgatctgcctggtggggcagggaattgtaaacatgccaaagggaaaatgaaaaaagaatcctgtaggttttcattattttaggcaattatgtccatatcacttacaaagctattgccaaatctgtctaaggaagcagagtttgaaggtgggccgggggggacatctgggagaaattcgaaaatggcataacagagctctcaatatgagaaacaaaagcccaatatttttttaaagaaaatataaacaatcgtattcgtagttagatgcaaattctatttatgcatacctgccaattcagtgacatataagcaatagataacagatgtcaactacacatgagaatttgggagggacctcagagataattacgttgatttcctcaatctgtagatggccacgatgacttccctaaagtcacttaacaacaagcagcgcaggactacagcacaattttgtcaatctcaagagggcatgtgtgctgctttggtttctgtgctaataagctttcctgttttaactcattccgttgatatttactgaaccggatgatgtatcaggcactgccctaggcaatgaggatgcaaccttgaatgacaggtgcaccctcctcatggagcttgcaatctatagaggaggcagatgggcattgaaatatggattagggtcaggcgtggtggctcacacctgtaatcccagcattttgggaggcagaggtgggcggatcacttgagtccaggagttcaagaccagcctgggcaacatagcaagactacgtcgttaaaaaaaaaagagagagaaagaaagaaatacatggtggcgtgcgcctgtagtcccagctactcggaaggctgaggtgggaagatgacttgaactcctgaggcaaaggttgtggtgagctgaatttctgccaccgcactccagcctgggtgacagagccaggccctgtctcaaaacaaaacaaaacaaaacaaacaaacaaaaatgaaaaaataacagtgcttggcctggaggtattgtttacttcgagcagaacatttgagatggaacatattctgggaggaagatcaagagtttaagattgggaagttttaggtttgaagtgcctatggagaaaattttttttggtgtttttggttttgttttttttgagacagggtctcactctgtcaccaagactggagtgcagtggcgcaatcacagcttgctgcagcctcgacctcctgggctgagatgatcctctcacctcagcctccccagtagatggaactactggtgcacaccaccatgcctggctaattttttgtatttttttttgtagagacagggttttgtcatgttgcccaggctggtctcgaactcctggcctcaagcgatccgccagcctcagcctcccaaagtgctgggattaccggtgtgagccaccgcactcagccggatctcgctctgtcgcccaggctgtagtgcagtggcgcaatctcggcccactgcaacctctgcctcctgggttcaagtgattttcctgcctcagcctcctgagtagctgcgactacagatacgtgccaccaggcccggctaattttttgtatttttagtagagacggggtttcaccgtgttagcaaggatggtctcgatctccttacctcgtgatccacctgcctcagcctcccaaagtgctgggattacaggcgtgagccactgtgcccggcctctttttttgttttttttaacttttattttagattcacggggtacgtgtgcaggtttgttatatgggtaaattgtgtgacactgaggtttggaatacgattgatcccatcacccatgtaatgagcacggtacccaataggtagtttttctttttctttttttctttgagacagggtcttgctctgttgcccaggctggagtgcaatggcacgatctcagctcactgcaacctccgcctcctgggttcaagtggttcgtctgcctcagcctcccaagtagctaggattacaggtgtgcaccaccacacctggctaatttttgtattttaagtagagatggggtttcgccatgatagccaggctggtcttgaactcctggcctcaagtgatctacctgccttggcctcccaaagtgctgggattacaggcgtgagccaccatgcctggccccattaggtattaatagttttcaacccttgccccgtcttcttccttcttccccctagtggtccccagtgtctattgatgccgtctttatgtccatgagtacccaatgtttagctcctgtttacaagtgagaacatatggtatttggttttctgttcctgctctaaattcacttaagagaatggactccagctgcatccatgttgctgcaaaaaacatgtttctttgtttcttcattttgtttctttttatggctgcatagtattccataacatacatgtaccattttctttatccagtccaccattgatgggcacctaagctgagttcatgtctttgctcttgtgaatagtgctgcaaggaacatacgagtgcatatttctttctggtagaaggattttttttcttttgggtaaatacccagtaatgagattgctgggtcaaactgtagttctatttttagttctttgagaaatccaggagaaatgtttaataggtggctgtagacacagtcctggaattcagcagagaaatctgggttggaatagagccccaagagtgagtggcacattctagcagatgacgtcataaagaggtgcagggaaaagacaagatggcctaagaccaagctctgaggaactccgacatttagaggtcaggtggagaacaagttgccaaaggagaagccggcgaactaagaagaaaatcaggaggatgcggacttctggaacccaaaagaaaagagtgttccaaaaaaggaatgggaaactgtgctgaaggctgcagagacatgaagcaagcctgccctgagaagtgtgcagtggattgggtagaagccactgtagctctgcctacggcatttgcaatgggtgagtgagaaatgatgcagtggagaaaaacaacgtggaccagactttgggtatctcagcttggccggggaccatgtacaaagctggtgcagcagtgagaagaggaagtggaatcaagatagtcggggttttttaggccgggcgcggtggctcatgcctgtcatcccaacgtttttgggaggctgaggcaggaggatcgcttgaggtcaggagttcgagaccagcctgggcaacatggtgaaacctcatctctactaaaaatacaaaaaattagccaggcatggtggcgtgtgcctgtaatcccagctactcaggagggaggcgggagaattgctggaactcagattacagggagtcgagattgcaccactgcactccagcctgggcgacaagagcgaaactccatctaaaaaaaaaaaaaaaagatatgtatattttttaggctgggcgtggtggctcgtgcctgtcatcctagcattttgggaggctgaggcaagaggatcgcttgaggccagcttgcacaacacagcaagatctcatctctacaaaaaaaattgtagaaaccctgtctctacagaaaaattacatatatatatatatatattttttttttttttccttttgaaacagagtcttgctctgtcactcaggctggagtgcagtggtgctgcgatctcggttcactgcaactttcacttcccaggttcaagcaattctcctgcctcagcctcccaagtagctgggattacaggcatgtgccaccacgcccaactcattttgatatttttagtagagacagggtttcaccatgttggccaggctggtctcaaactccggacctcaggtgatccagtcgcctcagctccccaaagtgcttggattagaggcatgagccgccgcgcctggccgttatttgagttttgatgagagctactggagctaatttagatggtaatgaggagggcaggaggaaagagagaggaaaaagaagttggccagatgcaaggaaggacagagttgccaggtgatgaccaatgagtagccaacttatctgagcaggcaggaccctcgagagcaagtggcggatgtggctctgatgggtcacagggcctccttcctctacctcttctggcttcttagcatctcctcctcctcagggcactctgcaaacattgtttttcccagaatactgactttggcctcctctgctcactctccatgttattcattggtgacttcatccattactgtctccagcccagatgtctcttccccgtgtgccgacttggtgtacatccaatggctgactgaatatccccacttagatgcccgtggacagtggcatgctggcatccgctcatgccaggtcacgagtgcccattgtacacccagctccttattcagtgaaggcatcttggtagcagaaacttgaagagctgggcgcggtggctcacgcctgtaatcccggcagtttaggaggcccaggtaggtggatcacctgaggtcaacatggtgaaactccgtctctactaaaaaatacaaaaaaattagctgggcgtggtggcgggtgtctgtaatcccagctactcaagaggctaaggcaggagaaccgcttgaccccaagaggtggaggttgcagtaagccgagatagcgccattgcactctagcctgagtgacaagagcgaaactccatctcaaaaaaaataaaataaaataaaataagatagtaggaacttgaactcagccaaggtgtgactgtttacgtcatggacattggcaaatgcttccgatcagggctccccctttttgaagagctggttgttaggaatggtggctcaccaccaggagtttgagactagcctgggcaacacagcgagaccccatcttcaaaaaaaagattaaaaattatccaggtttggtggcatgcctgtagtcccagcaactcaggaggctgaggtgagaggactgcttgagcccagaagttggaggctgcagtaagctatgatcgcaccactgcactccagcctgagtgacagagcaacaccctgtctcaaaacaaacaaacaaaaaaccatttactacacaccactgttcacagacatttcacattcaacatattcaaaactaagttaatcatcttcccctgagcccaaccctgcccaaccttaccccttccctgaatatcctggcccagttgacagcaccagcacccactcagatatttcccatgccttccctccccatatccaaaggatggtcagttagggtataggcgaagcggctataacaaagaattccccaaaattcagtgacttaacctcaaaatagatactccaggactgtggggacatctctgccatcttttttttccttttgttttctttttgtttttgttttttttgagagggagtctcgctctgtcatccaggctggagtgcagtggtgcgatctcacctcactgcaacctccgcctcctgggttcaagtgattctcctgtctcagcccctgagtagctgggattacaggtgtgtgccaccacacccggctaagttttgtatttttagcagagacggcatttcaccatgttggccagactggtctcgaactcctgacctcaagtctgcccacctcgggctcccaaagtgctgggattacaggcatgagccacggcacccagctggtctctgccatcttaaacatgtggcttctatctctctgttccatggggcctaggcagaaatcaccatcatatctgaatgtgggaagggggttaaagcaggaagcacaggtcctttcctgattaaggacaccactaacctgctcagaagttgtccagatgcagctggacacagtggctcatgcctgtaatcccagtactttgggaggccagaagaaggtttgcttgaggtcaggagttcaagaccagcctggttaacatagcaagacccccatctctattatttaaatttctaataaaaaatgaattaaagtccgggcacggtggctcacacctgtaatcccagcactttgggaggccgaggcgggcggatcacgaggtcaggagttcgacaccagcccgaccaacatggtgaaaccctgtctctactaaaaataaaaaaaaaaaattaaccaggtgtggtggcacacacctgtaatcccagctactcaggaggctgaggcaggagaatggtgtgaacccgggaggtggagcttgcagtgagctgagattgcaccactgcactccagcctgggcaacagagtgagactccgtctcaaaattaattaattaattaatcaatcaatcaattaattaattaaaataaaaagttagtcagatgcaaggaaagctgggacatgtagtctctatccatgtacacagctaaaacattattaataaacaaagaaggcaatttaggaggccgaggcagggggattacttgagcccaggggttcgagaccagcctgggcaacgtagtgagaccctgtctctataaaaaataaaaaataataaaataggctgagcatggtgactcacacctgtaatctcagcactttgggggccgaaggagaaagattgcttgagctcaggaattcgaaaccagcctgggcaacatagtgagacttcatgtttgctaaagataaaaataaataaattaattaaccagatgtggtggctcatgcctgtagtcccagcaactcaggaggctgaggtgggagggtcccttgagcccaggggattgaggctgcagtgagctatgatcacacccctgcattccagcctgggtgacagagtgagaccctgtctcaaaaaataaaaataattgatgataacaataataaacaaagaagggcaatgggaaatggtataagagtagcagtctatgcctagtggatccatcatgtcaatgttatcgctctctctttttttttttttttttgacagcctcaacctcctgggctcaagtgatcctcttgcctcagcctcctgagtagctagaactacaagcacgcaccaccacgacaggctaattaaaaaaaaatttttttttctatagagatggggtctcgatatgttgcctagagtggtctccaacactggcctcaagtgatcctcctgcctcagcctcccaaagtgttgggattacaggcatgagccactgtgcccagcccaatgctatctcttgaatactgcttaaatccatcccttctacggtgtgccaattgctattaccttgattcctgcccatttcctggcctctaacttagtccctttctaatcaatctaccaaatggctgccagaggtatctttctaaaatgccaattgggtcaataaccctcctgttcaaaatcttgcagtagttcccaggggtttccaggagaagagtcaacttctttgcatgacacaaaggccaggtcttgtcccctcaactcagaaatgcctttcacccctcctccagctccacttccttgtctgccagaaaaacccaggccatttcctgggacttagtttaaatattgttttaaatgttgtttgtgccccactgcaatgctggctccattcctgttgaagcctttactggactgtgtatttctgggcacttgccatccatcctgggaccggggctccctgtgaagccaaggcacttggtttatctgacagaaggctgggtgaaggctgggtacagtggctcaggcctgtaatcccagcacctttcgaggctgaggcaggtggattgcttgaggtcaggagtttgagaccagcctgggcagcatggcaaaacctcatctctgcaaaaaatacaaaaatcaggccaggcacggtggctcacacctataatcccagcactttgggaggccaaggcaggcggatcacctgaggtcaggagttcgagacccgcctgggcaacatggcaaaaccctgtgtctactaaaaatccaaaaatttgccaggcgtggtggtgcgtgcctgtagtcccagccacttgggagtgagacagaagagtcacgtgaacctgggaggcagtggtggcagtgagccaagatcatgccattgcactccagtctgggcttcagagcaagactctgtctcaagaaaaaaaaaaaaccagttgggtgtagtggtgtgtgcctgtggtcccagctgctcgggagactgaagcaaaaggattgcttgactccgggagactgaggctgcaatgagctgtgatcacgccactgcactccagcctgagtgacagaacgaaatcctgtctcaagaaagaaaacaagggctgggtgtggtggctcacgcctgtaatccaagcactttgggaagccaaggtgggtgaatcacttgaggtcaggagttcaagaccagcctggccaacatggtgaaaccctgtctctactaaaaataaaaaaaaaattagctgggcgtggtggtgcatgcctgtaatcccagctactcaggaggctgaggcaggagaatcgcttgaatccaaaaggcggaggttgcagtaagctgatattgcgccacttcactccagcctgggcgacagagcgagactccttctcaaaggaaaaaaaaaaaaacagccagcttgggaaacatagcaagaccctgtttctaccaaaaacaaaaaaaaggccgggcgcggtggctcacacctgtaatcccagcactttgggaggctgaggcagttggatcatgaggtcatgagttgaagaccagcctggtcaagatggtaaaaccccatctccactaaaaatacaaaaactaaccaggcgtggtggcgggcgcctgtaatcccagctactcgggaggctgaggcagacaattgcttgaacccgggaagtaaaggctgcagtgagccaagatggcgctactgcactccagcctgggtgacagagcaagactccatctcaaaaaaaaaaggaaagaaagaaacaaaaataaacaaataaaaacggttgtaggcatgaacccattggttttatttttattttattttattttattttatttttaagagacagtgtctcactctgtcacccaggctgcaatggtgtgatcatagctcactgcagcctcgacctcatccagctggtcattaattacttcatctcatctcctcctgacactgacctctgtcagcggctcacatccaaccctccttctagactgaactcctatttccacatattccagaagttttcatgtccttagacctctgtccatgctgttctctttgtgggatatctttcccgctttcttcacctatgagcttctattcatccttcacggtttttgtttgtttgtttgtttttgagacgaagtttcactcttgttgcccaggctggaatgcaatggcacaatctcagctcactgcaacctctgcctcccaggttgaagtgattctcctgcctcagcctcccaggtagctgggactacaggcgcccaccaccacgcccagctaactttttgtatttttagtagagatggggtttcgccatattggccaggctggtcccaaacgcctgacctcaggtgatccacccgcctcagcctcccacagtgctgcgattacaggcctgagccactgtgcatgaactcatccttcacagtttagttccaacttcacttctagaagatttcctggattctcagcgacaggtaacccctccctcctccgggcatcttttttttttttttttaattgaggtggagtctcactctgtcacccaggctggagtgcagtggtgcaatctaggcccactgcaacctccgcctcccggttataatctattttcctgcctcagtctcctgagtagctgggataacaggcgcatgccaccacgcccagctaattttttgtatttttaatagagacggggtttcaccatattggtcaggctggccttcaactccttacctcaaatgatccactcgcctcggcctcccaaagtgctgggattacagacgtgagccactgcgcccggccctggcctccttttcacctctcttctgtgcgtatctgagctccccactgcaccaaagctccttgagagcaaggatatcccgtatgtcacccatctcagtatccctcctatgtctagcatggtgcctgccacacagtaggcatcaaagatgtttcttggccaggcacagggctcatgcttgtaatcccagcattttgggaggccaagacaggaggatctcgagcccgggagttcgaggctgcactgatccgtgaccataccactgcgctccagcctgagcaataaagcaagaccctgtctctttattttattttttgagacatggtcttgctctgctgcccaggctggagtgcagtagtatgatcatggctcactacagcctcaacctctcgggctcaagtgatcctctcacttcatcctcccaagtaactgggactacaggatcacaccaccatgcctggctaattttttagaaaactttttgtagagatgggttcttgatatgttgctcaagctggtttctaactccaaggttcaagccatcttcctgccttggtctcccaaagtgctgggtttataggcatgagccaccatgtccagcacttgtctcttaaaaaggaaaaaagggatatttgttgaatcaatgaatggataagtgaaatgtattaattgctttaccctaaccacttccataatacacagaatcttatgtcagatcccatgacaaaagaaaattggtcacagttgactggggttaaatcaagttctgccctgtagttagccaactgtagctttccccccagccatgagaagaaaattcactgcttattaccaaatagactgcaggtttccaacttaatgcataataatattaaggccttaaaacatccacagggacacttactgaatagtcctgtatgcccagctttcagccagacactgactccagaatcagatgggggcctcatcgccagctgtcctgtagatagagacagcacaacttggtgagaaacacagaggtgttaggaaacaaaggcatatctcaactgggtgataagagctgtgggttctaatcctggctctgatcccagcggactgtgtgatccaggacagagctcaggttctagctggaaaaaaaaaaaaaaaacaaaaaacaaaaaaaacctgtagaactcctacaggcacacaccagcatgcctggccagactggacaagtttccttttgtttttttattctttttagatggagtcttgctctgtcacccaggctggagtgcagtggtgtgatcttggctcactggctcactgcaacctccccctcctgggttcaagcgattctcctgcctcagcctcccgagtagctgggactacaggcgtgcaccaccacacccagttaatttttttatttttagtagagacaggatttcacaatgttggccaggctgctcttgaattcctcacctcaagtgttccacctgccttggcctcataaagtgctgggattaaaggtgtgagccaccattcccagccaagactggggaagtttcttttcttcttcatttttttttttttttttttttttggggagatggggtctgtttgttgcccaggctggtctcaaactcctggcctcaagcgatcctcccacctcagcctcccaaaatgccgggattataggcgtgagccaccacatgccctgcctgggcaagtttctaaatctgagatggttggggtggtggggaggaaagaagggatagtaggaattggcaaggtgaacttcagagtaagcgaggcaacatcattaaatgccaacaaaaggagagggataagatgaatataatcactttccaccccaacattcctttcatcctcacctcagcattttaaacgataagaaatgcaagcactcggctgggcatgctggctcacgcctgtaatcctagcactttgggaggcagaggtgggccgttcatttgagatcaggagtttgagaccagcctggccaacatggtgaaaccccgtctctactactactactactactaataataaaactagccaggagtggtggcacacacctataaccccagctacttgggaggctgaggcagaagaattgtttaaacccaggaggcagatgttgcagtgagttgagattgcgccattgcactccagcctgggcaacagagtgagactccagctcaaaaagaaaaaaagaaatgtaagcactttaagagatccactcaattcttccagacctcaatggactgacctagggtcactttggaaaaatctcactctcccagctcctgagtcggccctctcccctacagctcaccactcctgctgaaacctggaccctttcagtcttagaagccaagtctgaacttggaaccaaccctaggcattgaaatgccaccgtcgtcagtaggtaatccatgagccagctaaagccatctgtcctttggccggggaggggtggagtctcttccagggtgggcatgtggtgagcagagaaccttcaggggcacgcggacctcacatagtatccacttcctgtgctatctctggtctcaaagctccctcgcccccaaacaagtagatgggcatagtcaacacacacaagcattcagatgtgcatatgtacacacatgcacccatatgccaacacacatagacacatacatacagacacacacacaccctcacataagagtccctcacctaccccaagttgtcagagctgctcctttgcctttgctaccaaaactgtggtactgggagcccagaagaacctgggatccaagcagtagaaaaccctgttgttagccaggcgctgtggctgacacctgtaatcccagtgactgaggaagccaaagtgggaggatcacttgaggccaggagttcgagaccagactgggcaacatagttttttcttaaaaaaaaaaaaaaaaaaaaaaaagccaggtgtggtggtgtgcacctgtaagtcccagctactcaggaggctgaggcgagaggatcacttgaacccaggagttcaaggttacagtgagctataagtgtgccactgcactccagcctgggtgacggaagaccctaactcaaaaagaaaagaaacaaaaaccctcttgttgataaatgcctcctcaggagaacaggcgctgaagagagacagatggagaaaggaagctaaagccagatgggctgaatgcctgtgtgtgaacgtatgtacacatgtgtaagcatgtgtacacatgtataaggcctaggtactgcggggggtgggggggaaagcaaggcaaggaaaaaaggggccaacgaaagacaaaggagggaagttggacacggtggctcatgcttttaatcccagcactttgggactttgaggccaggagttcaagaccagcctgggcaaggtagcaagacccagtctcttaaaaaaaaaaaaaaggtaaaaacagagagagatggagacacaccccctttggtccctctctcaatcttcccttccctccctctcccggtgattccatttagaccttggtgattccatttaggcctgggtgtggcagaaccgggctcagagcagcctgaagatagataacccttctgggaactggacctctctccccaatcctgctttaaaaagtaagggggtagaggtcgggcgcagtggctcacgcctgtaattctggcatttcgagaggctgaggtgggaggatcgcttgaggccaggacttcgagatcaacctgggcaaaagagcaagaccccgtctctataaaaaatttttttttaatccaggcgtgctggcacctgcctgtaatcccagctacttgggaggctgaggaggatcgcttgagctcaggagttcgagaccagcctgggcaacatcacaagacctccgtctctaccataaaaataaaaataaaaataaaaagcaaggggatagggacctcatcagtcgtcctgcagagtcctggtctccgcctcttccctgctctcctctctgccgccagttccttagcgacggtctctaagtccctgctaggtgccccctgccccatctcctcctggccgcttaatagagtgtatcttcccctttaaagcagctgcccccggtcggtcattgtctcgcctggcagccaatcggcggcgccgttggagcgggggatccggcctcccaattggccgctgagagtcccgccccgccagggatcccgggagctgtccggccgcctcggtgctgatcccgccaccgcccacgggccgctagcagcgcagcgggcactatgagcgggggcgtctacggcggaggtgagcgagcctcgggcccccggctcccgcagccctgcgttccaaacccgcgccatccatccgagctctgggcaccccggggcctgtcacctccgcgcacgagcgggtcgagtctcaggctcgggtctcccgccacccctgcgctcggtcctccccagacgccccgcgcgcacagggccctaccttgcaacccacctccacctggccccgggccccttcctttcccgtcgggagggtgccctgagcaaggccattgggcaagaagggaccctggcggtgtgatgcccccacccccagtcccaggacctcggactccaggcccagctcccaccggccccagactggtgttgaaagtggcgagactgtggctctgccctgactttctctcggagctacctagcgggagagagttcgggggaggtccccttacaggcctgtctccccgcacagatgaggtgggggcgctggtctttgacattggctccttctcagtccgcgctgggtacgctggggaggactgtcccaaggtgagccttccagtctcctctccaaatcctaggggcttcggacccttcttcaggctttccagtgacccagggctctcccagatcgcccagaagctctgctgagcgggaatatgggaataaacccaggggcggtctgaggaccctgctgtggggctggacaggggcaagagggtgacctctctccctgccaatactcccccaacccttccccaccaggctgacttccccaccacagtggggctgctggccgcggaggaggggggcgggctggagctggagggggacaaagagaagaaagggaagatcttccacatcgacaccaatgccctgcacgtgcctcgggatggagcggaggtcatgtcgcccctcaagaatggcatgagtaaggggcccccacccatcacctcctgacagaaaaggagcccgctccccacaatctgggtcatagcagcccccactccccgcggagtcttccttgcagccccagggttcttctggctgccagggttcttctcgctgggttcccttcccaggggcccaccaggtttctgggaaggggggcgttcccctggagctggactcactgaccctcctttgggcttggcctttctccctccttttcttcctgtccctgtcccctgcctgccttcttgcgtctctgcacgctgctcttctggccccagtcgaggactgggagtgcttccgagccatcctggatcacacctacagcaaacacgtcaagtctgagccaaacctgcacccagtgctcatgtccgaggctccggtgagtgcctcctccatcctcatgtccaaccctgatctccactgcacctccttcccaccatccacctctcctcctctcccctcaagccactgctctgagccacttcccttcccttttcagactcccctcacccatcccaaacaatttccttccttcttggctaagtctccatccctcctgctctcttcttgctctatgcactctgctgcccttctctgtctccaagtcctttttaaattttttttttttgacacagtctcactccgtcacccaggctggagtgcaatggtgagatctcagcctctgcctcccgacatcaaaggaatctcctgcctcagcctcctgagtatctgggattacaggcacccgccaccacgcctggctaattttttgtatttttagtagacagggggtttcgccttgttggccaggctggtctcgaactcctgacctcaggtgatccacccgccttggcctcccaaagtgttgggattacaggcatgaggcaccacgcccagcctccaagtccttttttgaccttttcacttattattattattatttttattattatggtcaactttggtgagctggggatgttggctcacacctgtaatcccaacactttgggaagccaaggcaggaggatcacttgagcccaggagtttgagaccaccctaggcaatatggcaagacccgtctcttttattaaaacaataaaaattaaaaattttttgccgggtgtggtggctcacgcctgtaatcccagcactttgggaggccgaggcgggtggatcacgaggtcaagagatcaagaccatcctggataacacggtgaaaccccatctctactaaaaatacaaaaaattagccaggcatggtggcgggcacctgtagtcccagctactcgggaggctgaggcaggagaatggcgtgaacccgggaggcggagcttgcagtgagctgagatcgcaccaatgcactccagcctgggcaacagagcgagactctgtctcaaaaaaaaaaaaaatttaaaacctcatttaaaaaaatgttcttacccacctccttataaattcctctttataaaagcaactgtttttctcctttttagctaatgttgggggtattttcttccatatctctaatactacacttaaattgctgcctgtggagtgtttagttttaggtattatcgctgaattttccactttagaaaatgatcgcttagctctcttttcctccccagcctatgccacacgtatttcttatcaccctcctttaagtacagtgggttttgttgttgttgttgttgttgtttggggttttgtttgttgtttgtttttgagactttgcctcaaaaacagggggtctgctcagtttgtcacccaggttggattgcagtggcacaattcttcagccttggtctcctgggctcaagtgatcctctcatttcagtctccagagtagctggaactacaggcataagccaccatgcccagctgatttttaaattttttttagagacagggtttcatcatgttgtccaggctggtcttgaattcctgggctcaagcaatctgcccgcctcggcctcccaaaaggctgggattacaggcgagatccaccacacccagcccagttgtattttagactttaaaagaaatcagtattcagtatttacattctttttaaattagaaataattttaagagaatcttttgcagagatggggtctcatcatattgcccaggctggcttcaaactcctgtgcttaagcgatccttctacttcagctaacaaagtgctgggattacaggcatgagtcactgtgctcagcccaatatttacactcctattactatgtatgctaatcaggcctgagacaggcaatacaccatgatcacctttcctttcttgtgcaactttttgttttcctagaactggaaaaaaaatgtgttcaagttctttttttttttttttttttttttttttttttgagacggagttttgctctgtcaccaggctggagtgcagtggtgcgatctcagctcactgcaagctccgcctcccgggttcaagtgattctcctgcctcagcctcctgagtagctgggactacaggtgcgtgccaccacgcccagctaatttttgtatttttagtagagacggggtttcaccatgttggccgggatggtctcgatctcttgacctcgtgatccaccgaccttggcctcccaaagtgctgggattacaggcgtaagccaccatcccagccctgtgtttgattatatttggtctggttttctatctacttaacagtgtgaaccctaaatcattcatcaattgtatcttttgtcaagacgtcaattccattagatattttatcaatttctttttttttttttttttgagacatagtcttgctctgttgcccaggctggagtgccatggcgcgatctcggctcactgcaagctccacctcctgggttctcctgcctcagcctcccgagtagctgggactacaggtgcccaccaccacatccgactaattttttgtatttttttttttttttttgagatggagtctcactctgttgcccaggctggagtgcagtggtgcgatctcggctcactgaaagctccatttctcctgcctcagcctcccaagtagctgggactcacaccattctcctgcctcggcctcccaagtagctgggactataggcacccaccaccacgcccggctaattttttgtatttttagtagaggcggggtttcaccgtgttagccaggatggtctccatctcctgacctcgcgatccgccggcctcggcctcccaaagtgctgggattacaggcgtgagccaccacacctggcctctcatcaatttcatttcttgaagaaatttcttcaggagcccactgacctggtccagtttgcactagtagccctctgccaggggacagacctgtcatgctggcatcttccttcaccatcatcttgtagaatccttttgcctctgtcctggttagaagtcctgtttcctgtacttgactccttttcttgacttattcctttgttttcatggagcaggtccttcagtaactgccttagaaaggtcatgagaggccagagacagtcgctcactcctgtaatcccagcactttgggaggccttgagtccaggagtttgagaccagcctgggcaatatactgataccttatctctaccaaaaatataaaaattagctggccatggtggtgcatgcttgtagtaccagctactcggaaggctgaggcaagagaattgcttgtacccaggaggcagagattgcagtcagcctagatcatgccactgaactccagcctgggcgacagagtgagactccatttaaaaaaataattaattaaataataatctaaaaaaaaacttttttttttttttgagatgaagtgtcactcttgtcccccaggctggagtgcaatggcgtgatcttggctcactgcaacctccgcttcccgggttcaaggattctcctgcctcagcatcccaagtagctgggattacaggcacctcccatcacacctggctaatttttgtatttttagtagagacggggtttcaccatgttggccaggctggtctcaaactcctgacctcaggtgatctgcccgccttggcctcccaaagcgctgggattacaggcatgagccaccgcgcccagcatctaaaaaaaaaatttaaaataaggtcatgggaagtatattttttgagactttgtgtgtctcaccttgagttgatagcttagctaggtatcccatgccaggttagaaatcattattcttcagaatcttgaaggcacttttccattgtccttcttccagcatatatcgttgccatttagaaggatgaaaccatctgatttctgatcctctgatgtaatgtttttctttctgaaagtttatagaatttttactttatcctcagtgtggtgtattttcattcatggctctaggcacttagtatgtctcttcattctgaaaacatatgtctttcaattcagtgaaaaagaattatttatttaattatttatttctctccattttctctcttgggattttctgttattggattttgttgccccctgaattggtcccctaatttaattcccttttctcttatattttccatctctttacctttttcctttggtttccaagatattccctccactttatgttccaatccttctattgagtttttcatttctgttcatgtagttttaattcccacaagctccttactttaaattttttttttaatgagacagcatctcactatgttgtccaggctagtttcgaactcctgggttcaagcaatcctcctgcctcggcctcccaaagtgctgggattataggcgtaagccaccctgtctggcctgtgcaaatgttttaaatgcatgtgtgtgtgactgtgagtgtgaatatatgtgtatgtgtgtgtgtgagtttgtgtgtgaatgtgagtatatatgtgtttgaccgtgtgtttgtgagtgtgtttgcatgtgtgaccgtgagtgtatgtatagtgtgaatgcatgtgtgtgtttatgtgtgtctgtgaatgtgagtgtatgtgtgtgtgtttgagtgtatgtgtgtgtgtgtgcaagtgaatgcatgtgtgtatgaccgtgagtgtatgtgtgagtgtttaggttgtgtatgtgtgtgcaagtgtttggatgtgtgtgtgtgaccgtgagtgtatgtgtgagtgagtgggttgcgtgtgcgtggatgtgggtctgtgcctctcccttcctgaatcctccccctctgcactttctccacagtggaacacacgggccaagcgggagaagctgacagagctgatgttcgagcagtacaacattcctgccttcttcttatgcaagacggctgtgctcaccgcgtatcctctggactgagctgctctgactgggtggagggctggggtggggcctgtgctgagctcagctgtgatgagctggagggtcaggcctggttctctgaagatcagtgtcccaatgggcagacacctccctctgccccactagtgcagaaggcccagtggactgagcacctccgactctggggtggccagatcagcggcccctttcggttccccggatcaggctgagcagacagtgagctgggcccgggagagagtaggggctggaactggacagaggagggagacgtgtagaacactgcggcagtcccttcccaagaactccttcaacactgactgtttttaggatctgccttgcattgaaccctgtgctatgcactggggtgatagcgaccctaatttcagggaatctgtaggacacaaccaaaaataaaggggctggccaggcgcggtggctcacgcctgtaatcccagcattttgggaggccaaggcgggcagatcacttgaggtcaggagttagagaccagtccggccaacatggcaaaagcccgtgtctactaaaaatggaaaaattagccaggcatagtggtgggcacctgtagtcccagctacttgggaggctgaggcaggagaatctcttgaacccaggaggcagaggttgcagtgagctattgcattccagcctgggcgacaaaacgaaactcagtttcaaaaaaaaaaaaataactaaagaagtaactggggtcgccgggtgtggtggctcatgcctgtaatcccggcactttgggaggccgaggcgggcagatcacgaggtcaggagatcgagaccatcctggctaacacggtgaaatcccatctctactaaaaatacgaaaaattggccgggcgtggtggcaggcacctgtagtcccagctactcgggaggctgaggcaggagaatggcatgaacccgggaggcggagcttgcagtgagctgagattgcgccactgcactccagcctgggagacagcaagactccatctcaaaaaaaaaaaaaaagaagtaactggggtctcagagcctttctccaggagatgagtcatcaccagggggagagatttgcagactggggatgggctggaccccggtagagcagagagtgaccagacaagatctgggcccaggcccctcacttgctgctgctgtctctttgacttacccatccgatgccagctttgcaaacgggcggtccactggcctcgtgctggacagtggagccacccacaccacggccattccagtacatgacggctacgttctgcagcaaggtggggcttcggcagggggtgggggtgctccaggaggaccaggtcctgacagtgccttccttctaggcatcgtcaagtcccctctggcaggggacttcatctccatgcagtgccgggagctgttccaggagatggccattgacatcatcccaccttacatgatcgcagccaaggtggggcctctggggacatggagctgccactagagtcctggccactcgccccatggccgtcaaccctctgacacatgagatatcagagcagagagcagcaggctccccagtgggtcctggctccagttcctccttttataatcgaggcatccgaaatccagacaggctgagggatatgctgaggtcatgaaaccagctggcagacagcaggatgtgtgagggccagtgtggtgggttctagggtccaatatagacccaggttcaagttctgcctctgccgtgcaagagctgcaggaccggtcaggcatggtggctcacacctgtaatcccagcacttcgggaggctgaggcaggcagatcgctttgagctcacttcgagaccagcctgggcaacatggtgaagccacgtctctactaaaactgcaagaactagccaagcatggtggtgcatgcctgtagtcccagctacttgggaggctgagactggagaatcacctgaaccccggaggcagaggttgcagtgagccgagatcgcgccactgcactccagcctgggcgaccgagtgagactccatctgaaaaaaaaaaaaaaaaagagctgtgtgaccaacagcatgatatcaaagctccctgggcctcaggtttgtcttatgtaaagtggaacggcagtaggcagtagccagggtgctgtgagtatgaagtgacactgtgtgcttagctccattccgtgccctcacatggatcatgaccccctaggaggccattcccttgaggttctgtcactgctgtattcctggtgttctccagatcagctgcacccaccgcatgaaaggcacacatggagagagaggcatgccccattctctctcctctccatcagggaagggtgagaaacccctcttgcaggcagcacagcagagcctgcagcgccaggtagctgcagagctgggaacagtgccaggaaggtgggggtgggggtcaggtgggctaggaaagggtgttcctacactgtgcccccacaggagcctgtccgggagggtgcccccccaaactggaagaagaaggagaagctaccccaggtctccaagtcctggcataactacatgtgtaatgtgagcctctggagagggccacctgaaacccccctcccctgccatgaatcgggggcgggacagaggccccgcatgggagggggagcagggagggggagcggggcagggggtgctgctcacggggaaggcaggccctcaccacctccgctgggatttcaggaggtgatccaggacttccaggcctccgtgctgcaggtctcagactccccctacgatgaacagtgagtgtggctcagggctttggggtgggagagagggcagaaccggcactcttggggtgggctggggggctctggtgctgcccacgcactgatccttcttgagcaccccaggcagagtcctgctcccttctgggtagggtggctgcacaaatgcccacagtgcactacgagatgcccaatggctacaatacagactacggcgccgagcgactccgcatccctgagggcctgtttgatccctcgaacgtcaaggtttggctgtgtggcgaggactggggtgggtgctggctgcagtccctggatcctggggcgtgggggaggctgggaaggattgcaggggtctggggggaagggggagagagcccacagccccagtcacctctctctgcagggcctgtcggggaacaccatgttgggtgtgggccacgtggtgaccaccagcatcggcatgtgtgacattgatattcgcccggtgaggccaggccggagctgaggctcggcaaaggggcccaggggaagtggggagacggggttggggggctgcccccgcagctcactccttctccctgctctcagggcctgtacgggagtgtcattgtcaccggcgggaacacactgctgcagggcttcactgacaggctcaatcgagagctttcccagaagaccccaccggtaggagcccacccctgacccagagccctggacacccgtcctggctcagctgtccaggactgagtcccttcatccttcccatgtccttccttctgttctggccaccagagcagaacccctgcccctgtggcttcccaagtcttcccctctcccccaagccctgtcccttcccagaacctaggtgtctgcttcccccagcccctttttacccccagagcatgcgactgaaactcattgccagcaacagcaccatggagcgcaagttcagcccctggatcgggggttccatcctggcctcactggtgagaggaaagggacctggcctagcactgactgtgggggagaggggagacccagacagtgcccgccactttgactgcctcttcgttcattcattcattcaacaaacatttagttttgagaaatgtcagtcaatgaatgttcccagaagggtgaacaggacacaaatcggggggcaggggcccggtatggtggcccacacctgtcatcccagcactttgggtggctgaagtggggggatggcttgaggctaggagttgaaaacccagcaggggaacatagcaagacccatctctacttttacaaactggggagaagaggctgcgcacagtggctcatgccggtaatccctgcagtttgggaggccgagacgggtggatcacttgagctcaggagttcgagaccagcctggccaacatgacgaaaccttgtctctactaaaaatccaaaaattagccaggcatggtggtgcatgcctgtaatcccagctattcaggaggctgaggcaggagaatctcttgaacccaggagacggagactgcagtgagctgagatcgtgccactgcactccagcctgggtgacgcagtaagactctcaaaaaaaaaaaaaaattgggagtagagggacaggtagttggagagattggtcaggatgagattttggtgatacacccactgtgctcagtcagcagaggggagaccctgatgttttggggcaagggagtgatgtggcaatgcaggcatgattggaaagactgccaggcatgagtctttggggtcggggtatgagctggggtcaaggggaccttacaaggaggctgttttgattgtcccggagtcatagcatgggtagcagtggggatggggtggacagcaaggggcaactagtaaaggaggcaggcaggttggttctggggcaggaggtggtaagttcagtctggacctgctgctgggttcgaaggaaggtactgagcagggagctggagttgcaacccgcatctggagggtatcagtcacacagaggggacagtggggccatgacagacaaggaggacatccacgagaaaggaagtcccccagggagacagaaaccagggtcagaaagacagaggctggcagtctgaacttagctcagggctgaagcatgtcagccacacagttcttgtttttttcctttttttgtttttgtttttgttttcgagacagtctcactgtcgcccaggctggagtgcagtggagcaatcttggctcactgcaacctccatctcctgggttcaagcgattcttctgcctcagcctcccgagtagctgggattacatgcgtgagccaccacgcctggctaatttttggattgttaatagagatggggtttcaccgtgttggctaagcttgtctcaaactcctgacctcaagtgatctgcccatcttggcctcccaaagtgctgggattacaggtgtgagccaccatgcccggcctgaaattaagtattaataatatatcctggacaagtggagtggctcacacctgtaatcccagcactttgagaggccaaggcgggaggatcatttgagcccaaaatttctagaccagcctgggcaacaaagcgagacctcatctctacaaaaaatttaaaaagcaactggcaatgtggcgcatacctgtagtcccacctacttgggaggccaaggttggaggatcactggaacctggaaggttgaggctgcagtgagctgtgccactgcattccaacctgggtgacagagcaagatcctgtctcaaaaaaaacccaaaaaaattgggtgtgtattttccacttagagcacgtctcaatttggaccagggctggtgagctacaggaagctagtggccactgcattggacagcacatgtgtgtaggctgagaaagatcaaagaagcccagccgtggtagctcacgcctgtaatcccaacattatgggaggctgaggtggaacgattacttgagcccaggagtttgagaccaggctgggcaacatagtgagacaccatctctacaaaaaataaaaattaggctgggcgcggtggctcacgcttgtaatcccagcactttgggaggccgaggcgggcggatcatctgaggtcaggagtttgagaccagcttggccaacatggcgaaaccctgtctctactaaaaatacaaaaattagccgggcgtgttggcacgcgcctgtaatcccagctacccagcaggctgaagcaggagaatcgctggaacctgggaggcggaggctgcagtgagccaagatcgcaccactgcattccagcctgggcgacagagcaagactccatctcaaaaaaataaaataaaaataaaaataattaaaattaaaattttaaaaaaatagagagaagggacactctgagatgctcattgcaggaaccctcaaggggcaagttgtaatgccgaaggctgcagatggggtgccacagtgttggaatggtgaggtggagggaatatcttccttgggaaagagggagactggcggtgttccaaagccctgatggagtgagaagaggacacctggtggggaaggactgtgtgtgtgtagggggtgttgagtgccaggtgcaggttgcctggcctggggctgtgcgtgccatccccccagctcaggaacagggcctagctcagggcagagactgctgttcaataatacttgttgaatgaatgaattattgattgaatgatatgaagaggatactctccctctgaatatgaaaggggacagaccgaggaggggaggatgaggtggggaggggcttcagagggatgtgaacccaaggggtggttggggcctgttggaggattcccaggggctgcacctgcctgtccacacctccctccaaggccaccctgaccctgatattaccccctccacccagggcactttccagcagatgtggatctccaagcaggaatatgaggagggcgggaagcagtgcgtggagcgaaagtgcccctgatggcactcctccccacacacctgctcccaagctcagatggaagtcccttaacccccatgccacattgcccccctcctcctttccctcttgtcctcataaatggtgatgtttctgggttgaaagaagtaaaaatgttttaagaaaaaaaagtttggcctccgtggggtggggagtgggcacaggggtctggagggaggtgaggggagggagtctcacttctacacccatgccgatcccacagtgggtgctgggacacagccccaggggccatggattcctcaggtttcctaggggttgtgacccagggagggccacatgacgaggaccgggggttgggggagttgctgggggctaacagttgtggtgggaggtgggaggggctgcagggtgcagtggaggggcacggcctggggtgagtgtggcaggaggtgggtggagcaggaggtgaagcctggatgggcggaacaggaggtggggcctggtgggcggggcctcagcgtaggccttaggtctcaggggagcagcacgcctgagcaccccaggacctgcgctcaggtgagatgcgctatgccctccttcctggggctcttggtggtgacagacatggggcggggactagggcgctggtgcatcccagcagctcggaacttctctggacctgagtaggagctgatgttccccaggggaaacccgaaagggaaacttggtgggaccctgagccctcctcttcagagctacttgtcttggggccctcggaagggtttggggacctgcgccccctgcctgtttagcagtttatgcctgtgacatgtttctggggtgaggctaactggcctttcatcagcctcagaacccaaagaggtagaaacccatgtgatccaagtccttcggtgaccaaacgggccggtgcccagggaggaccatgacttgtccagggtcacccagctctgcccacaccttggcggggactctgatcactcctccccactgacccacatatccctgaccccaggacccctatctgggagctctcgctggtctcatctgaccatgtgctcccacctgtgcccctccttctccagcagccagcaggagtctgagaacgacctttcaaaagagacacacatgcacaccaccagaccagacccccaagtcacaccactgtggtgcctccagcttagaatgccactggggcaagtgtcaggacagggaggacagctgatatgtcacaggaccggggcactgggggactctgaaggccagatgaggaaggggcagatgtcttaggggtgaatcttccacctgggcatggcggggcttaggaaggggtccccaggatccagggaggggtaaaagcaggagaggggagggggcacccatgtctctgccctcccccactatcggcccccttcccccacccctgatgggaactaggaggccaaagtccgccccaaggtcaaaaaattgattgttttgcagggaggaggcaggcgtggggctgtggagagattggcaggggagagcacagccccttgtgctctggcctggacccgggggccacgtctggaaggctggactgaggccaggactgtgcccccacccttgggggtggtgaggagcagccttggttcaggctgcctgccaggactgataaggggccctcctagggctcccacaaacggtttatcggtttatcgctgggggacagcctgcaggcttcaggaggggacacaagcatggagcggctttggggtctattccagagagcggtaagactagtgggattgggaagaccccttaggccttctctctaagtccctcagccccctcccaagcccctgaggctggcccctcctggaccgtgtcctgacctcgcttcttcccacccctgcccctcccccacgcccccaccaccatgctcatttgacacccccaagtcactgacctcattattgccagatgcctccccaccccccaggcctcttgccccaatctcatgcccacctcgcctgcacagcaacaactgtccccaagatcctctcagaccgtctaccagcgtgtggaaggcccccggaaagggcacctggaggaggaagaggaagacggggaggagggggcggagacattggcccacttctgccccatggagctgaggggccctgagcccctgggctctagacccaggcagccaaacctcattccctgggcggcagcaggacggagggctgccccctacctggtcctgacggccctgctgatcttcactgggggtgagagccgtccccctccccagaagtgaagggcttgggctgggggagatttctggggtccagaggtgggcataaagagaatccccatcttgccacccgccagccttcctactgggctacgtcgccttccgagggtcctgccaggcgtgcggagactctgtgttggtggtcagtgaggatgtcaactatgagcctgacctggatttccaccagggcagactctactggagcgacctccaggccatgttcctgcagttcctgggggaggggcgcctggaggacaccatcaggtagggatggccctgccccatcctgttctcgagtgtccctcccctcatccgctcagactgggcctccctgcctcctggcccaggcctctggtgtctgggtccccctcctgagtcctcccatctgccttcctggcccccctgttcagcggtcctgggaaggatggcaggcattcggagctgaggttccaggggactgaggctctgagggtggcatatttgggaggtgagggagctgactgtctgagatcagaggggtgcagcatccagtatcagactggacagacccagaaaagccttgaatgcctcacccaggcgcctagatttggagcagggagcgctgaggggttctgagaagccgcattctagggaatcagaaaaccaagcaagcaagcctgggcaatacgatgaaaccccgtctctaccaaagaaaacacaaaaattagctggggatgatggcgagtgcctgtagtcccagttacttgggagcttgacgggggaggattgcctgagccggggaggcggaggttgcagtgagccgagattatgccactgcactccagcctgggagacagagcgagaccctgtttcaaaaacaaaataacggcagggtgcggtggctcaggcctgtaatcccagcactttgggaggcggaggcgggcagatcactaggtcaggatatcgagaccatcttggctaacacggtgaaaccccgtctgtactaaaaacacaaaatattagccgggcatggtggcgggcgcctctagtcccagctattcgggaggctgaggcaggagaatggcttgaacccaggaggtggagcatgcattgagccgagatcacgccactgcacttcagcctgggcaacagagcgagactccatctcaaaaaaaaaaaaaaaagaaaagaaaaaaagaaaaacaagtaagcaaatgcatttgtgggtgcagatccagaagctaggtccacccatagccctcttttgggacgggagtaatttttcagtggattcgcctgggttttctaagtaggtaatcagctaagctacagatagtaggagatggagattctcttttccaatgcttataccttctacgtttttttttttttcatttctcattgcatttgagaggacatgaatttaaggtaaccgtggcagtaggtatccttgcctatttcctgactttaatagcaatgcttttataatactttgccattgacaatgaactttgctgtgctccagacagctttttaaaattgaattaaggaagtttcctttcactcctagctcactgagacttttattgattgattgattttttgagacggagtctccctcttatcacccaggctggagtgcagtggtgcaatcttggctcactgcagcctccgcctcccaggttcacgcgattctcatgcctcagcctcctgagtagctgggattacaggtgtgtgccatcacgcttgattaatttttgtattttttagtagagacagggttttgccatgttgcccaggttggtctccaactcgtaagctcaagcgatctgccaaagcgcttcggcttcccaaagtgctgggattacaggcatgagccacagcacccagcctcttctttaatgtttatatagtaatttgtgttaatagatttccttatcttcctgagctcaacgctaaccttgatcaaggtgtatgattactcttttgatatgttgctgggttcacctgctgaaagaccttgagtctgtggaatcaacaatgttcagggctttatttttttgagatagggcctcactgtcacccagacagtgccgagatgatagctcactgcagcctccaactcctggacccaagtgatcctcccaccttagcctttcaagtagctaggactacagatgtgtgccactatgcccggctatttttttttttttactttttttgagacagagtttcactgttgcccaggctggagtgcagtggtgcgatctcggctcatggcaacctccacctcccaggttcaagcaattctcctgccttagcctcccgagtagctgggatcacaggtgcctgccaccacacccaaccaattttttgtatttttagtagagatggggtttcaccatgttgggcagactggtctcaaactcctgacctcagatgatccacccaccacggcctcccaaagtgcagggattacaggcatgagccaccatgcccagcctaatttttaattttttttagtagaaacgaggtctccctatgttgcccaggatggtctcaaactactggcctcaaacaatcctcccacctcagcctcccaaaatgctgggattataggaattaggtaccgcacccagcctgctcagggcttttaaattaaattacaggtcaggcatggtggctcacacctgtaatcccagcactttgggaggccgaggtgggcagatcatgaggtcaggagatcgagactatcctggctaacatggtgaaaccccgtttctactaaaaacacaaaaaattagctgggcgtggtggcgggcacctatagtcccagctacttgggaggctgaggcaggagaatggcatgaacccgggaggcggagcttgcagtgaaccgagatcgcgccactgcactccagcctgggcgacagagcaagactctgtctcaaaaaaacaaaacaaatacaaaattagccgggcgtagtggcgcatgcctgtaatcccagctactcgggaggctgaagcaggagaatcgcttaaacccaggaggcggaggttgcggtgagtcaacgtcgtgccattgcactccagcctgtgaaacagagcaagactccatctcaaaaaaaaaaaaaattaaattacattaattttttttgagacagggccttgctctgtcacctaggctagaatgcagtggtgcaatctgggctcactgcagcctcgatttcccaagctcaggtgattctcccatctcagcctcctgagtagctgggtctacagggaggggccaccacgcccagctaatttttcatttttcttttttcaaaattattattattatttagggacaggatttatttatttttatatatttgcaaccaattctcactctgttgcccaagctggagtacagtggcatgatcttagctcactgtaacctccgcctcccggcttcaggtgatttttgtgcctcagcttcccaagtagctgggactacaggcgtgagccaccatgcccagctaatttatgatttttttgtttgttttttgtttttttcttttttttttgtgagacagagtttcactcttgttgcccaggctggagagcaatggcacgatcttggctcactgcaaactccgcctcccgggttcaagcgattctcctgcctcagctccccgagtagctgggattacagtcatgcgccacgacacccagctaattttgtatttttagtggagatggggtttctccatgttggtcagtctggtctcgaactcctgacctcaggagatccacccacctcggcctcccaaagtgctgggattacaggtgtgagccactgcgcccggcaatttatgtattttttttagggacagggtttcatcatgttggccaggctggtttcgaactcctgggctcaagcaatcctcctaccttggcctcccaaatttcttggattacaggcgtaagccatggtgcccagcctgttcagggctacttttatttttttgagcagtatttggtcatctgggtacaggctgagcaggtagatagtttgacaggtctagaagcggggtgtggcactgaggcaaaagtagcagttttggggagagagcaaggatgttgcagtgagccgagatcgcgccattgcattccagcctgggcaacaagagtgaaacatggctctcggtgggatggagagggaagagaaagtggggggagatgatacatgtggagctataggacatttgtcatgttcaatggggttgaagagcaggtacagcgaggataactgggggagttggaacctgacagggtctactcagagagtaggattctggatccttgaaaacttcctgatacaatatatcctgtctatctcagagtctccagcacctaccacaatgcctggcacttactagatgttcagtagatcctcaatggataagtattccagagatggagtgcgggtaatgacaagatgcaggatacgggccaggcacagtggctcacgcctgtaatcccagcactttgggaggtcaaggcaggtggatcatctgaggtcaggagtttgagaccagcctggccaacatggtgaaatcctgtctctactaaaaatacaaaaattaactgggtgtgatggtgcatgcctgtaatcccagctactcgggaggctgaggcaggagaatcacttgaaactgggaggcagaggttgcagtgagctgagatcgcaccaatgcactccagcctgtgaaacagagcaagactccatctcaaaaaaaaaaaaaaaaaaaagatgcagggtgtgaccagggaagtggagtgcctggactggaggtgacaatgatgaagtaattaattcatttatccaacaagtattttggggcatctactacgtggcaggtactaagctaagcaggtggtggtgagatagagactaaaacagtctaactttgttctcatggtgcttacaatccactggagaaaaccaatactaaactaacaatcattcacgactacataattatgactggaatcattgctttgaaagaaaagcaaaggatgtgaggctcagtgtggtggctcacacctgtgagcccagcactttgggaggctgaggtgggaggatctcttgagcccagtttgagaccagcctgggcaacatagagagatcctgtctcttaaaaaaataataataatttgaccaggcacggtggctcacacctgtaatcccagcactttgggaggccaaggcaggtggatctcctgaggacaggagttcgagaccagcctggccaacatggtgaaacactgtttcaccctttttaggctctactaaaaatacaaaaaaaattagctgggcatgttggcgggcacctataatcccagctacttgggaggctgaggcaggagaattgtttgaacctgggaggtggaggttgcagtgagccaagattgcgccattgcattccagcttgggcaacaagagtgaaactccatgtcaaaaataataataataataataataataataattttttaaaaaataaaaataaaaaattagcccagtatggtggtgcatgcctagagtcccggctattcaggaggctgaggcaggaggatggcttgagcttaggagctgaaggttgcagtgagctatggtcatgccactgcactccaggctgggtgacagagtgagaccctatctccaaaaaaagaaaagaaaaggggccgggcgccatggctcatacctgtaatcccagcattttgggaggtgaaggtgggctgattgcctgaggccaggagtttgagaccagcctagccgacatgccgaaaccctgtctctactaaaaaaatacaaaactagctgagtgtggtggtaggcgcctgtggtcctagctactcaggaggctgaggcaggagaatcacttgtacccaggaggcagaggttgcagtgagctgagattgcacgactacacaccagcctgggcgacagagcgagactccgtctcaaaaaaaaaaagaaagaaagaaagaaaaaagaaaagaaaagtgtgtaaagaaagactataaccaggatcctgatttagattgcagttcagggaaggcttcgttgaggaactgacgagtctaaactgccaagatgagtaatttgccaggcaaagagactgtggaaaaacattcaggctgagattcaccatttgcgaagggtctgaaatgtgaagatggtggcctcttggaggaagggaaagatggtccatgtggccggtgaggtggatgtagctcaggccctaaagggccttactggctactttaactgttttgaattgaattttcctgcctcatccctgagtgatcctccccactcccctccccataagcaccttatctcacgcttttgatgtgtagctttaaatacacatatggggcgggtcgtcatggttcatgcctgtagtcccagcactttgggaggatcgcttgaggccaggagttcaagaccagcttgggaaacacagcaagacttctcgtctacaaaaaatttttaaaaatcagcggttggtggcgtacacctgtagtcccagctgctcaggaggctgaggcgggaggatggcttgagcccaggaaccggtgattcccctgagtaccttggtgtaaagtgtctccatgaggcccacgtggaggatgggggagatgaggagggtctgctgcctgcccagttagctctttcgaaggaaagtgtttgggtgctgtgtgtgtgtgtgtgtgtgtgtgtgtgtgtgtgtgtgtgtgttgacgtcgggaggaacgaggttgggggagagagtttggcttgagccgggaagaacctacaggatgatgggcaggacccccagctatgggaagtcaggttttaagcagagtgaggtcctgagagtctccggcgccgccctggtggtgatgggagaaaatgggtccgcggagggccctgcactgcggctcgcgcctgtaatgccagcactttgggaggccgaggcgggcagatcacctgagatcaggagtttgagaccaacctggtcaacatggtgaaacccgtctctactaaaaatacaaaaattagccgggcgtgatggcacgtgcctgtaatccctgatacgagggaggccgaggcaggaaaatggcttgaaccaggaaggcggaagttgcagagagccgagattggtccactgcactccagcctgggcgacagagcgacactccgtctcaaaaaaaaaaaaaaaaaaaaaaaaagcgtccgcggggagcgctcttttcctaaactcaggaacccctcgccgcccctgcccctggcgaccccacgtctctggcatccttccctcttccctccctctcctccgggcgcccagaaaagtccccacctctccccgcttaggcaaaccagccttcgggaacgggtggcaggctcggccgggatggccgctctgactcaggacattcgcgcggcgctctcccgccagaagctggaccacgtgtggaccgacacgcactacgtggggctgcaattcccggatccgtgagtgcgcgcgcgggcggggggcgcgcggggagggggacgcggctcggggcgctcaccagccccgctccccagggctcaccccaacaccctgcactgggtcgatgaggccgggaaggtcggagagcagctgccgctggaggaccctgacgtctactgcccctacagcgccatcggcaacgtcacggtgagcaccccctgcccgctcctaggatggggcgcggcacgagccctttcctgggtctcgaaggagggacgcggggagcgcgcctcaccgtcctcgtgtccccagggagagctggtgtacgcccactacgggcggcccgaagacctgcaggacctgcgggccaggggcgtggatccagtgggccgcctgctgctggtgcgcgtgggggtgatcagcttcgcccagaaggtaagtgtccctggacagagggagggcttgagcccgggaaccggagggtcggactgccagtgagaatcgttcagggtgctgtgagagggagacaggaaagaaccatgtggctggatggtaagaaaatataagctgggcacgatggttctcacctgcaatcccagcactttaggaggccaagacaggaggatcgcttgaggccaggaattcaaggcaacacggtgagaaccccctctctactaaaaaaaaaaaaaaaaaaaaggttctttttttttttttttagttagctgggctggtggcacatgcatgtggtcccagctactccggaggctccggtgggaggatcgcttgagcccaggagtgccaggctgcagtgagctatgatcgcgccactgcactccagcctgggcaagagagactctgtctcaaaaagaaaaaaaaaaaaaagagagagaaacagagaagggagggagggagggaggaaggaaggaaggaaaatgttggctggtctgggaattgaatcagaaggaaaaaagaaaatgttggctgggaacaaattgggtgttgggggaaatcagatggggaagggaacagaaacatggggtaccctggagcccggtggggtttgagggctgcctaggagctgctgaggttgggaagacacaggccaggtagtgcccccacatcctctccgtgggatggacagttgcaagcaaaggccttgccatttcctggtttctcctgcccttatgaatcgggtttttttctgggaggagtcctctagtcaccttcctccccaggtgaccaatgctcaggacttcggggctcaaggagtgctcatatacccagagccagcggacttctcccaggacccacccaagccaagcctgtccagccagcaggcagtgtatggacatgtgagtctggggaggctggtcgtgctgttcccaggtcccgaggccacaccttcttgctcagaatagggctggcatgtttttcgtttttcctggaagcccagctcgcagctttgcgtgggcacccctttccctgcaggtgcacctgggaactggagacccctacacacctggcttcccttccttcaatcaaacccagttccctccagttgcatcatcaggccttcccagcatcccagcccagcccatcagtgcagacattgcctcccgcctgctgaggtgaggggagtgttggggaccagaagaggaggaagcagagagaggaaggctgcagcgaggccacagggtgattgtgggtgaactagaaaaaggtgactcttgtttaagcctgcagtgagccatgactacaccattgcactccagcctgggagacagagagaccctgacctttttttttttttgagatggagtcttgctctgtcttccaggctggagtgcagtggtgcaatcttggctcactgcaacctccacctcccgggttcaagtgattcttctgcctcagactccagagtatctaggattacaggtgcccccccaccacgcccggctaatttttgtatttttagtagagggtttcaccatgttggccagactggtctcgaactcctgacctagtgatccgcccatctcggcctcccaaaatgctgggattacaggtgtgagccaccatgcctggccgggaccctgactctttaaaaaaaaaaaaaaaaaaaaaaagtgactcttctggatggacacagcctttctccagggtctactgtctggcaactaaagttcccactggattgcacacctacctcagctgagaaccatccaaggcagccctgactgcactgccctacccaggcagcgtccagaggcagcgatctggagccagaaagggtgggagggaaagaaataaggaaaagagtgatttggactcttctgggtctctctacaacttccccctttctgccttcctcctctccaggaagctcaaaggccctgtggccccccaagaatggcaggggagcctcctaggctccccttatcacctgggccccgggccacgactgcggctagtggtcaacaatcacaggacctccacccccatcaacaacatcttcggctgcatcgaaggccgctcagagccaggtatgctgtgtgtccagtatcactcacagctggtggtgggctgggggaatttctgcccatacaccctggcaagatagggggctggtgcacgaggccccaagaggggacaggagtggtgcccagaggagggaagctggcaagttgaggctgaactgggtctgatggtggcagcagtgaacagacctcaccttccagcctgtctagtgatggaatgggggttgttgcccagtagtgagctccccagcactggaagtgagtaagcctaagttggatgatgttgtaatagaaactcaagcatgggccgggtgtggtggctcacgcctgtaatcccagcactttgggaggcccaggcaggtggatcacttgaggtcaggagtttgagaccagcttggctaacatggtgaaaccccgtctctactaaaaatacaaacattagctgggcccggtggcatgcatctgtaattccagctattccggaggctcggacaggagaatcacttgaacccaggaggtggaggctgctgtgagccgagattgtgccattgcactccagcctgggcaacagagcaagactttgtctcaagaaaaagaaaaaaaagagaaagaaagaaagagagaaagagaaagaaaaaaagaaagaaagagagagagagaaaggaaggaaggaaggaaggaaggaagactcaagcatgaaagaaagatcagatcagattagatagaagcatagatggccctttcaagcatagctagatgtggatggcagtggagaattaaaataagtaattgacagatggggcaacaaagccaagacttcacaaaaaatttaaaaataagagaaattggctgggtgcggtggctcacgcctgtaatcccagcactttggaaggccgaggtgggcggatcatgaggtcaggagatcgagaccatcctggctaacatggtgaaaccctgtctactaaaaatacaaaaaaattagctgggcatggtggcaggcgcctgtactcccagctactcaggaggctgaggcaggagaatggcgtgaacccgggaggtggagcttgccgtgagccaagatcgtgccactgcactccagcctgggcaacagagcgagactccaaaaaataaattaaataaataaataagtaagtaagtaaaagaaattagccgagcatggtggcacacatctgtggtcccagctacttgggaggctcaggcaggaggatggcttgagccagggagtttgaagctgcagtgagctatgatcacaccactgcacactccagcctgggtgacagaaaccttgtaagtccagaatgaccgcaggcacccagctgaaggagcacaccatccaggaagggccaagtggggaggggcgccctctttagggactggagggactgcagggctagggttgccggaattgtgatgggctgagagacacaggcagatggaggatgcccccagggtgcagggtgcagtgtcagaagtgggtcccaaacatcccctccccagatcactacgttgtcatcggggcccagagggatgcatggggcccaggagcagctaaatccgctgtggggacggctatactcctggagctggtgcggaccttttcctccatggtgagcaacggtaaggtcagggccagggcctgggcctgggctaggcagcggtgggcctgtggcccgaggaggatagggcagagaggcagtgagggacacagactggccagtggtcacttggacctcggcatccacattgtacctgagtggccctgggccagtcacttcacctctatttcgtcacctaaaaatgaaagtgaggccgggtgcggtagctcacacctgtagtcccagcactttgggaggccgaggcagatggatcacctgaggtcaggagtttgagaccagcctagccaacatggtgaaaccctctactaaaaatacaaaaattagccaggcgtggtggagggcgcctgtaatcccagctactagggaggctgaggcaggagaatcgcttgaacctgggaggcggagtttgcagtaagccgagatcgcaccactgcactccagcctgggcaacagaatgagcctccatctaaaaaaaagaaagaaaagaaaagaaaaaaagtgacatgaatgataatcatagtccatgggtctgtgtcaagattaagcatgttgggctggacgtgatggctcatgcctgtaatcccagcactttgggaggccaacacaggagaatcgctggagaccaggaattcaaaaccagcctgggcaacatagggagactgcatctctacaaaagttttttaaaaattggctggacttagtggtgcatgcctgtaatcccagctacttgggaggctgaggcaagaggatgacttgaacctgagaggtcaaggctacattgagccatgattgcaccactgcactccagcctgggcgagagagtgagatcctgtctcagagagagagacagagaaacagagaccctgggggaccaggacagaagaagacaaggggagggtctttgcttggcccctgctaagcctgtcctccttcccctctgtccccaggcttccggccccgcagaagtctcctcttcatcagctgggacggtggtgactttggaagcgtgggctccacggagtggctagaggtgatacggggtcccgggcaggtcgttaggcattggggagaggtgggggtggggggttcccactccacactggtcacccacccacagggctacctcagcgtgctgcacctcaaagccgtagtgtacgtgagcctggacaacgcagtgctgggtgagctggggcagtgccaccacctggccccctggggtccacccttgcctctggggctgagccctgagcctggcatccctcccctcccctttttccaggggatgacaagtttcatgccaagaccagcccccttctgacaagtctcattgagagtgtcctgaagcaggcaagagcaccccaggaatagggggtgaaggggagtaggttgcggggaggagcagagcctgatcagtgcccttccccaacccccaggtggattctcccaaccacagtgggcagactctctatgaacaggtggtgttcaccaatcccagctgggatgctgaggtgtaagttgggggggtagggagagctggggagggatgtgggggagcctgaacccacagatggttccaacccacctgcccccaggatccggcccctacccatggacagcagtgcctattccttcacggcctttgtgggagtccctgccgtcgagttctcctttatggaggtgagacgtcctccccctgccccagacacagcgctagtccttcagcctgtctgcctccgccccagcgtccaccctgtcctggcaggacgaccaggcctacccattcctgcacacaaaggaggacacttatgagaacctgcataaggtgctgcaaggccgcctgcccgccgtggcccaggccgtggcccagctcgcagggcagctcctcatccggctcagccacgatcgcctgctgcccctcgacttcggccgctacggggacgtcgtcctcaggcacatcgggaacctcaacgagttctctggggacctcaaggttcaagaggcccaccccgctcttggtctctgggagtgggaggcactgcccaggccagggggtccagccccttctctctgcattccctggggtctaggtcctctctggcaatccagcccattaaccccctgcctccagtctcccagcccccagcatgtgccatcgcccaacctggcaggtgcaggatcttctccccactcccttcatcctgcctccagcactctgtcctcgtctacctcctccctcctgccaggccaggggtcccagcccccttccccatgctaggcgggggtccttgtccccatgctaggcgggggtcctggcccctgccgccagccccagcccgcgcctccccaccccaggcccgcgggctgaccctgcagtgggtgtactcggcgcggggggactacatccgggcggcggaaaagctgcggcaggagatctacagctcggaggagagagacgagcgactgacacgcatgtacaacgtgcgcataatgcgggtgaggccccgccctcctcgccccgcccccagtgtcccgcccctcccctggggctccacctcctggacctggccccgtctgcgcgctcctctctctccccgcctacacagtcccggtcctctggatgctctcttcccagtcctggacacgcagtgctcatagatcggtcaggctggaggacccgagcgatcaaagtgatgaaatggacagggagggccagcctcttggccacagtcgcctggtttacgcctggcagaactgggacaatccaccctcccccacccctccccgctgactcccctcctatagctcccactgcctcctcgacccttctggaaagaaaaagcatgtccacactggtccacaatacgaggttacaggctgggaagtgcagaaggctaaagatattcagagtaagagagctgttttccttctgataatgaaatgggtgaaatccagaaaggctgcctggaggaggtgtcacgtgaaagttaaacaagagcttattccctcaccaatcccttctgcttagctttgaatcctttgcagcccacaccccacctccagttccaactcctccacttccttccattttcttactccaagaactcaacccctcaaccctttgatgtcaagaaatgggtgagtagggactgtggccatggggaaaggtctgcagggcaaaatagtaaacaggatcatcctcaatgagtgtggggtgagctgggaactgcagtgtacacagagccacttgtgcacacacactcacggttttcagagccagcatggctaccccttggaggctcatgttatctctcctccttgcattttcctgcttgtgccctctgcctgtcccccttggccatttacaaacctattgctcttgctcgttctcccttgcccagactagagtgcagtggcaccatctctgctcactgcaacctccaactcctgggctcaagtgatcctcccacctcagcctccctagtagctgggagtacaggcacgtgccatgacgcccggctaaatttttctattttttgtagagacagggttttaccatgttgcccaggctggtctcaaactcctggcctcaagtgatcctcctgcctcggcctcccaaattgctggggttacaggcgtgagctactgaacctggccttctcctctccttcttatatctctttctccattcattcttctttaacctttgcctcctctactggaacaggggtgaccctggggtgaggcaataggttgggtatggttcattctcattcacagatcttggtttaacctcagctgtgtcagcatgcagaagacaaaaagacacccacctttcaaagttgccatacccctgtccccaccagggataaaagggacctgcgtgtaagatgcatgacttaggccaggcacggtggcttacgcctgtaatctcagcactttgggaggctgaggtgggcggatcacctggggtcaggagttcgagaccagcctgaccaacatggagaaaccccgtctctactaaaaatacaaaattagctgggcatggtggcacacgcctgtaatcccagctactcaggaggctgaggcaggagaatcacttgagcctgggagatggaggttgcagtgagccgagagcacgccattgcactccagcctgggcaacaagagcgaaaatccatctcaaaaaaaaaaaaaaaagaaaaagaaaaagaaaaagatgcatgactcaggctcagggatggagagggaaggactcaggacttcagagcctgcaatacaggattgggccagacccagtgaattttatggctctagaccaggggttggtgaactactgcccattggccaaattcaaactgccgcttgtttttttgttttttttttttctgagacggtctcactctgttgcccaggctggagtgcagtagcatgatctgggctcacggcaacctccacctcccgggctcaagcaatcctctcacctcacctcagcctcctgagtagctgggactacaaggacacactaccacactccgctaatttttaaaattttttgtagagatgggatctcactatattgtccaggcttgtctcaaaatcctgggctcaagcgactctcccacctcagcttcccaaggtgctgggattacaggcgtgagcctctgctccctgtttttgtaaataaagttttattgaaacagccatgcttattggtttcacgctctctatggctacttttgtgtaatagcagcaacgttaagtagctgcaataaaagcagcatggcctgcaaaatctaaaatatttactatctggcatttcacagaaaaagtttgctgaccttggctttagactgtgacttggatcttgaagaacaggcaggatgtggattgatgcaaagtaaagaggacatttcagggtggagagaccagaattcgggtgtggcagtgaaatcagtctggttttacttggaagcggggtgtggaccagcagagccagaacaggggccccatggagaggcagaggggagggaaccaccaaatgtggtgttatcgatcaactgtggggagcctcgaacaccaggattagaagtttggatgttaagggtcttagcatcaaggaaattagagaggtttttgagcagagaggtgatgtgagcaaaggggagtttttatttttatttatttttctttctttattttttggagacagtgtcttaatgtcacccagactggagtgcagtggcgcgatcccggctcactgtaacctctgcctgtcgggttcaagtgattctcccacttctgcctcccgagtagctgggactacaggcgcgcacaaccatgcctaattttttttttttttttttttttttggtagagaaggggtttcatcatgttggccaggctggtcttgaactcctgacatcaagtgatctgctcacctcagcctcccaaagtgctaggattacaggcgtgagctactgcgcccggctgggagtttttgtttttgaaatgaggtctcactgtgttgcccagactggtattgaactcctgggctcaagtgatcctcccaccttggcctcctgagtagctgggactataggtgcacaccaccacacccgactaattttttatttttatttttgtagagatgagggtttccatacattgcccaagctggtctcaaactcctgagctcaagtaatcctcctaccttggcctcccaaagtgctgggattacaggcaggagccaccatgctggacaacaaagtagagtttttaggagtgattttggtcagattgcaaatgtcttgagagtggcaggtgggagcaaatgctcataggtggggactggaccgatgtcaggtgtttagaaggagaaattgacagatttgatgttgagggaagaggaggagaataataataatagttgtcttagaatagaagaataataaaatagcagttgccatttgtttttgtttgttttttgagacggagtctcgctctgtcaccagactggagtgcagtggcacgatctcggctcgctgcaacctccgcctcccgggttcaagctattctcctgcctcagccttctgagtagctgggacaacaggcatgtgccaccacacccagctaatttttgtatttttagtagagacggggtttcgccatgttggccaggatggtcttgatctcttgacctcgtgatctacccaccttggcctcccaaagtgctgggattacaggcatcagccactgtgcccggcctgtttgtttgtttgtttggttttgttttctgagacagagtcttgctctgtcacccaggctggagggcagtggcacgatcttggctcactgcaacgtccgcctcttgggttcaggctattcttgtgcctcagcctcctgactagatgggattacagggacacatcagcatacctggctaaattttttgtatttgtagtagagacagggttttgccatgttggccaggctggtctcaaactcctgacctcagatgatccacccgcctcagcctctgaaagtgctgggattacaggcatgagccactgtgcccagctgcagttaccatagtagaaggttaccacatgctagaggatttatttcatttgcttcccccagcgctgaggttgctagtattatatccagaaactggggctaggagaggctaagaaacttacctgaaatcatatagttagtaagtggaagagccgaaattggaggccaggtagtctaccttcaaagcctgtgctcaccccatgctcactcccctttgagggtgacagcttgacacctgcagaaagccatgggccacatgagtgtgggcccaacgcccaggtttgggaagagatcggtactgatatgtccaggtgctcccaaacccagtggggaggtccagatggctggagggcaggattccagtgggtcattgggtggggagatttggcatctgtccccacagaggtcctggttgacatcaggggcacagatgagctctgtgagtgaatgatggaggccttaaaaagatgtgagcatctgaaaatcagctgggtatggtggcacgtgcctgcactcccaactactcaggaggctaaggcgggaagatcacttgacctctggggtttgggttgcagtgagctgtgattgcaccactgcactccagcctgggtgacagtgagaccctgtctctaaaaataaaagatgtgagcatctgagatcaccccctagagattctgattttactggggcggtgcccaggcaatgataatttaataggtacagagaagagggaggtggaactttgagacctgcccacgggtggaagcagaacaaaccagagatggggctaggagaggctaggaaactaggagaggctggcagaaaggagggaggagattaggtcaggagcaaggccgtctcaggaaagacggaacagcagctgcgtcagagggaggaaagccaggcttttcatgaggactggactgtccccttgaccttcgtctctgggctgtggacattggtgggggtggagaatgactcggtgtggggaggtgtggtgttaagaagggaacagcagggcgatagattgttctttgaggctttgagcattcactgaatgggtgaggaaggaagactcgggagaactacatgcaggcttaggggttctagagatagaaggggaggcctagcgcggtggctcacacctgtaatcccagcactttgggaggccaaggcgggcggatcacttcaggttaggagttcgagaccagcctggccaacacggagaaaccccgtctctactcaaaatacaaaaattagccgggcgtcgtggcgggtgcctgtaatcccagctactctggaggctgaggcaggagaatcgcttgaacgctgaaggcggaggttgcagtgagccgagatcgtgccactgcactccagcctgggagacagagcgagactccgtctcaaaacaaacgaacaaacaaaaaacaaacacaaaaagaaaacaaacaaacaaaaaaacaaaaagactggctggcgggaagggtgactcgggcctttgctcccgagccagagcccccaaccctgacctgatccccctctctgcgcaggtggagttctacttcctttcccagtacgtgtcgccagccgactccccgttccgccacatcttcatgggccgtggagaccacacgctgggcgccctgctggaccacctgcggctgctgcgctccaacagctccgggacccccggggccacctcctccactggcttccaggagagccgtttccggcgtcagctagccctgctcacctggacgctgcaaggggcagccaatgcgcttagcggggatgtctggaacattgataacaacttctgaggccctggggatcctcacatccccgtcccccagtcaagagctcctctgctcctcgcttgaatgattcagggtcagggaggtggctcagagtccacctctcattgctgatcaatttctcattacccctacacatctctccacggagcccagaccccagcacagatatccacacaccccagccctgcagtgtagctgaccctaatgtgacggtcatactgtcggttaatcagagagtagcatcccttcaatcacagccccttcccctttctggggtcctccatacctagagaccactctgggaggtttgctaggccctgggacctggccagctctgttagtgggagagatcgctggcaccatagccttatggccaacaggtggtctgtggtgaaaggggcgtggagtttcaatatcaataaaccacctgatatcaataagccacctgttgacatctgttattgataagcgccttcatgcttcttcctcaccctcatgcccatcccatcccatcatcccttcctagagacctagggaattgggcagaagggaccagagagggtgcacacaggaatgctgtctccacggggaaaaccgagctgtttctatcactcaaggaaaatgcctaaggaaatactgaaggccccttctccaaagaccaccataaagcaggtggtctttggagaaggggccttcggtatctttttttatttttgagacggagtctcactctgtaacccaagctggagtgcagtgacacaatctcggcccactgcaacctccacctcccgggctcaagcgattctcctgcctcagcctcctgagtagctgggactacaggtgtgcaccaccacgcccggctaaatgttttcgtattttagtagagacgggggtttcaccatgttgcccagggtggtcttgaactcctgagctcgggcaatctgcctacctcaacctcccaaagtgctgggattacaggcatgagccaccacacctggccagtatcttgtcctgggatgaggaatggttacataatttgcaagacctgctgcaaaatgaaaatgcaggaccccttgttcaaaagcagaaacaagctgggcacggtggctcatgtctgtaaccccagtgctttgggaggatgaggcgggaaggtcatgtaaagccaggagttcaagaccagcctggacaacacaggggagaacctgtctctacaaaaactaaaaaactttagttgggcatagtggtgtgtactgtactcccagatactcaggaggctgaggcaaggcagggataatttgagcccaggaatttcaggctgcagtgagttatgatcgagccactacactccagtctgggtgacagaatgagaccttgtctcaaaaaaaaaaaaaaaaaaaggaacaaagcttttttttgtttttgttttctacaatttctcaacctgtcatggtattcttttatttgatatttaatgttgcactcctttggatatggggacacactttcaaaacataaattcatgcttgaacccgggaggcagaggttgcagtgagccgagatcatgccactgcactccagcctgggtgacagagcaagactctgtctcagggtaacaaaaattattaggaatttcaaggttggcacagtggctcacgcctgtaatcccagtactttgggaagccaaggcaggcagattgcttgagcataggcgttccggagcagcctgggcaatatggtgaaatcttatctctacaaaaagtaaaaaaattgctgggtgcgctggctcacgcctgtaatcccagcactttgggaggccgaggcaggtggatcacgaggtcgggagatcgagaccatcctggctaacacggtgaaaccccgtctctactaaaaatacaaaaaattaggtgggcgtggtggcgggcgcctgtaatcccagctactcgggaggctaaggcaggagaatggcgtgaacccgaggggcggagcttgcagtgagccaagatcgcaccactgcactccagcctgggcaacagagcgagactctgtctcaaaaaaaaaaaaaaaaaaaaattagccaggtgtggtggcgtgcacctgtagtcccacctactctagggtgctgaggtgggagaattgcttgagcttgggaggcggaggtggcagtgagccaagatcatgccactgcactccagcctgggcaacagagtgggagagtggaaccctgtctcaaaaaaaaaaaaaaaagaaaaagaaaaagaaaaagaatgtcaacataacaatctcagagcattaaaccccaagcacagaacccccttctgagcatggggccctgtaagactccaacagtggttacacacattagatgattggccctgcctggaacatcctccaggatccccccgcctcctttttttttagacggagtctcgcactgttgccccaggtagagtgcagtggcgcgatctcggctcatggcaacctctgcctcccaggttcaagcaattctcctgcctcagcctccctagtagctaggattacaggtgcccgccaccacgcccagctaattttttgttgttgttgttgtatttttagcagagacagggtttcaccatgttggccaggctggcctcgaactcctgacctcatgatctgccctccttggcctcccaaagtgctaggattacaggtgtgagtcaccatgcctggccaggatcccctttgaccagtctttgtccagtgagggtggagacactgaagtgtaagctactggaggcagggaattctaagtgctgctggcaccgtgtgcctttaatcacagcttcaggaggctgtggtcttgacagctcttcaagacactgggaagtaaaagcttcttggtctaaggcttgggatgccacagggctctggatttcaggatgcaactgtaccctccttagccccctaagcttgacttgttgagttctcagaaccctgaattaggatcagaaacctcctgagctatttgcttccctgagatacagtccagacaagtgtcccaaagcaccttctcaacccttcttcactttgtccatttctccctgtggtagacagaataatgatctggacaaaaatgtccatatcgtaatccctgaaacctgtgaatgaagtccctaaaacggacattgcacatgtgatcttgagatgggtgaattaaggatcttttggtttgtttccttacttatcggaaatttttaattttaattcagcctccagagtagctgggattgcagacatgagccaccacgcccagctaagtttttgttttgtagagatagagtctcactatgtggcccaggctggagtgcggtgctgcaatcatagcttattgcaacctcaaactcctgggttcaagagatcctcccacctcagcctcctgagtagctgggactgcaagtgtgagccaccatgcctggctaattaaaaaaaaaaaaatgccaggtgtggtggctcatgcctgtaatcccagcgctttgggaggctgaggtgggcctgaggtcaggagtttgagatcagcctggccaacatggtgaagccctctctataattatacaaaaataagtcaggggtggtggcgcacctctgtagtcctagctacaaaggaggctgaggcaggagagtcacttgaacccaggaggtggaggttccagtgagccttgattgtaccactgcactccagcctgggcgacagagcgagactccatctcaaaaaaaaaaaatttttttttagagacaggctcttgctatattgtccaggctagtgttgaacttctggcctcaagctcttctcctgctctggcctctcaaagcactaggattacaggcgtgagcccctgcccccagcccctcagaaagccttcttgaccacaccagtaacaaggtcttttcacaagtactcacaagaccattaacctatgtggcacctcgaatgcgttttggggacctgggcgcatccagactggtgtgaacggatatcttccatacacatgtaatttagcaaaggggtttcctgggctatggcaagagctgtccccagactcctggacacaaacggcacacccattctccatgcagtatcagggccacaccccactggagccagttctgggtgtgagagggagaagactcccagggtagtggagcaggtcccaatgcccctaaagtaaagctggaacaactgatcaccttccagtgctgtgacagcctgggtctgtcttaatatcttgctgatctttgttcccagtcaaccatctgcccagagtcactggctctccctcctttttattttttttgtagaaatggggtctacgctatgttgtccaggctggtcttgaaaccctgggctcaggcaatcctcccaccttggtctctcaaagcactgggattacagatgtgagccactgagcctggccattctccctcttcctctgtttctcctcaccctgcacctgaaggagggcaggtgagctggaagcttgcttttgtaaatcttattcttttcctgtaccctagttttttctttttttttttttttcctggttaaggtgaggttatgtcaagcaatactatttcccccatattggtagggactttggtgtttctgatccatgggagttgaagccttgtttcttttttttagatggagtcttgctctgctgcccaggctggagtgcaatggcacaatcttagctcactgcagcctccacctctcaggttcaaatgattctcttacctcagcctcctgagtagctgggattacaggcacctaccaccatgtccagctaatttttgtatttttagagacaaaatttcaccatgttgggtgtattttttgtatttttagagacaagagttcaccatgttggccaggctggtctcgaactcctggcctcaagtgatccactcgcctcggccctgcaaagtgctgggattacaggcatgagccactgtgcccagccaagggagttgaagtcttaaaggaaagacccaggaaaacagatatagggtccaaaaggcagaaaaggattctaggggttgtaaacacccaggtaaccctggtgaaaggctttgttgcctccagatggtgggacaggagttccaccgcaggcaggattaggtggtattttcattcatttctttttaggttaatacattggcttagggacaggatcctattccagggctgaaggggatcttgagaatcaacttgcccaatgctctcattttgtaggtagaatctacagctcagagaaattaaataatttgctcatggtcacatagtttttcagcgcaagcaccaggagtgacctaactcttctaaatcctcgctgggcctcatcactgccccaagtgcctgggtcccctgggaacaggggtgggagaactagaggatgtctgagtaccaaaaaagaagtgggaagacaggggcaagtaccctacatttctgattatcattttaaaaatgtattttattcaacttggaaaatgagtacaaatccctgggtgttttttgtcagggaggagtggggagtaggcaggaaagagaagagggtaggaggcaaggtaaggtatgagcatcacagtggctgcctcaagaccctgcccagggagggtggggtgggctgggggttgagcacggagctcaggtccggaggaacaccatggtgaggaggcctggaggggggacaaagaaagaatagggtcgcatgggcagccctggggctctgttagctctcctcccgtcccttctccctttttcctggggcctgggtccctggccactactgtcctcacccaagacgtaggcggccaccaacttttgtcccagggagacgtgcaggacttgaggcagctggctgccgagttcgtccgggagtgggagcagcaggaaggccacagacacaatccccgtcagcaagaagaggaggaaggagctggtggccagttgctggcgggggtctgagaaacaagactcatcagatgctgcagcccccactcctgcccagcccaggtcctccagggagaagcctgaacaaggaagatgtatctactttttttttttaattatcttttattttttgtagagatggagtctcactacgttgtccaggctggtctggaactcttggcctcaggtgatcctcctgccttagcttcctaagtagctgggactatgggttcatgctaccatgcccggctaatttttaagttgtttgtagatggtcttgctatgttgtccaagctgatcttgaactcctggcctcgagcaattgcaatcctcccaccacttcagcctcccaaagcactgggattataggtgtgagtcaccacaccctgtatctacttttttttttttttgagacggagtctcactctgttgcacccaggctggagtgcagccacacaatcctgactcactgcagcctctgcctcctaggttcaagtgattctcctgccttagcctcccgactagctgggattacaggtgcgagccaccactcccagctaatttttgtgtgtttttagtagagacggggttccatcatgttggtcaggctggtattgaactcctggcctcaggttatcagcccacctcagcctcccaaagcactgggattataggcgtgagccatcacaccctgtatctactttttactgccctccaggggtacactgcaagtgtcctctccttcctacagcctctgtccccaccaccacaagaactctctcctccagtccctcagcattcattttctctcttctgtggacctatccgacaggcagggacctctcttgatctcatacccagcacacaacttggtacagggttaattgctcaatacaggtttcttattgaactgaactgagctaccacatgataggaagtactgcggttacagtcaaggaagaactttttcctctaagtagaagtcagaaaccagggaagctgtaagtcttttccccctcacctgatataaaatctcaactcggaggaatgtttccaccaaaagacaaaagactgaaccaggagacttcttcaaatccaatttatctcatctctagggaaatgctagttcctccctccctacagaactcaagatcccagtctcccaactcacgctcctggaagtgtctggccgtgggtggtggtgtcccagcaggaggccctgggcgaggcgctggatctggctgtccctgaagctcaagggggtacgctggggctctcagaatggaggtaatgtccttgcgtcccaccactcggccctcagctccttcctcagacagctcaatgcggaagcggtcctggacatcatagtggctgggaatgggtgccacatggcgaatcacactggtcccaaggtaggagagaagcccattggggtgaatgaggcagtaatccaaggaaatctgggcctccccccagaagtctctcccttaggggcacaggcagaggatagggcaaataggttaaagggggcaaggtctcagacctcagacaacaggtggcagcgacccctggcttccacaagcctccccaccctcccagctcactcacatgtcaatgcaagactggggcttcacatatccctctgcgtcaaacaccgtgtatttggcaggtgctgtgcacaggactgggggatagagacacacacagacaagccctgccatgtgggtcatttaagtcccctctgccttctgccccggaggctggacatgactttcccagtccaccaaagctggacgtgcaaccctacccatctgactcctccagccaacacaaccccccagtgtccggccaccagcccccacgaggcgccgatccctttacctcggaagcgaagcgcagttcctgtggggttatagagggtcagcagctgtcggggtccgctccgctggtccgccctgaatactagatccgggggaaagaccaggaccgggacaacgggtcccaagggaggaggggcgccccgggacccccgcccagggggccccggacccaccagctcctggtcctggggcgccccacggcgcatgcaggctctgggcggtcggacatccgagggcagagctcaggggacagggcctggagtcagagctggggggcgtgaggggcgaaaggggacaagatgagctcccggagcagggcctcgactgatgccgccgccgccttggaaccccgctagatggggctcccgcagacccaggcccagggcccccaagacctttcctcttccagctctgccccaggttccttcggacccgccgagccccacctcgacggccacgcccaccccgctaaacccggcccctcgcagctcccaacccggccttctcctcacgcccagctcacgatctccataagccccgccccgccgctggcctcgccccttccgggcgttcccggacgcccgcctcctctctccagccagactccgcccgctgcagcgggcgcctgcagagcgacctgtgacgccgcctgcttcctgggagacctgtgtttgcgtctccggcccctccctaagctcggacacgggccccatcgggcttctgcctcaaaacggtcgctcgcgttaggatgcccaccttgtggttaaagcacctgccagtcagcttgtggtcagattaatgttgccatgttccagagagtccttttctatacttccgccgtacggcctctgtcattggctaggacgtctttgtttctgccgtaactatacgccgattggtgtgctgaaagaccaaacaacgccctccttctgtcgtctgcgattggctggattccggtgacgtaacagttgtactggctcgaactcgagccctgaagtaactcagagaaccgggggcggggtttcgaactgggctttgttctttcctccctattcttgagatggtccaagtcaatctcccaccgggaagcccttttcctcctcttcattccaggctctagaagcctctgcaggaaccaagcctgttttctttgcttttttttttttttttttgagacgaagtctcgctctgtcacccaggctggagtgcaatggcacgatctcggctcactgcaaccaccgcctccagggttcaagcgattctcctgtctcagcctcccgagtagctgggattataggcgtgcgccatcacgcccgggtaattctttgtatttttagtagagacggggtttcaccatgttggtcaggctggtctcgaactcctgacctcaggcgatccacttgcctcagcctcccaaagtcctgtaattacaggcgtgagccaccgtgcccgccctcttttttgcttttttagagacagagtctcactctgtcgcccaggctggagtgcagtggcgctatcattgctcactgcagcctccaactcctgggttcaagcgattctcctgcctcagcctcccgagtagctgggattacaggcgtgcatcaccatgcctggctttttgtaattttttgtagagacgatctcgctatgttctgcaggctgttctcgaactcctgggcccaagcgatcctcccacttaagcctcccaaagtgcatgagagccactgttccttccccaggctcaaagtctgttttctatgggttggaggttcctcccatctgggactccagactaagtcttgcctcctgtttctcaccttcctgtgagggacgtgggaaatcactcacatttgcacagggaattaagatttgctgatttcaaacccatgttgtttgagtaattatatattttaaaaaaggatttgctaaaccctgccactttaattgcatcgaatcttcaactccttttacagcctggataaggtgaagaatctgggtctctgagggcacccagttagcaatggagcaaagacaaagttgatcttatctgaaagtctcctctgaacatcttgtgtagaatccccgtgttctcttttacattttctttttctttttctttttttttttttttttttttgagacagtcttgtgctgtcacacaggctggagggcagtggtacaatcatagctcactgcagtctccacctgcttggttgcgctcaaccaatcctcccacctcagccttctgagtagctgggactacaggcgcgcgacttcacacccggctaattgtatttgttttttttgttttgtttggtttggtttattttttgagatggagtctcgctctttcacccaggccagactgcagtggcgcaatctcggactgcagtggcgcgatctcagctcactgcaagctccacctcccgggttcacaccattctcctgcctcagcctcccgagtagctgggactacaggcacccaccaccaaacccggctaattttttgtatttttagtagagatgatgtttcaccatgttagccaggatggtctggatctcctgaccttgtgatccgcccgcctcagcctcccaaagtgctgggattacaggcgtgagccaccgctccctgccctgtatttgtttttttaatagcacttatagtgatacatgacctcctattttattgtttctctctcctccagtagaatgttttttccttttcacaagagcagggactttgtttagttttctgttgtatctttaggacttatgacagtgcctaccatttggaatgaacaaatgaatgagtgactaggatgaactttgagcagagatctgactggatttaggaagtgaaccatgagatatgtctatgggagagaattctggatagaggaaatagcaaaggcctaaaacagaagtgtactagaaatgggcaacaaggccgggtgcggtggttcacccctgtaattccagcactttgggaggccgaggcgggcagatcacaaggtcaggaattcgagaccagcctgaccaacatggtgaaaccccgtctctactaaaaatacaaaattagccgggcgtggtggcacatgcctgtagtcccacctactcgggaggctgaggcaggagaatcgcttgaatctgggaggcggaggttgcagggagccgagatatcgccactgcactgcagtccagccagatcatgccactgtgctccagcctgggtgacagagcgagactccatctcaaaaaaaaaaaaaaaaaaaaagaaatgggcaacaaactgaagttgccaatgtgactggaacagatgatacataggagataatagacatgaagctacgaggcaggagagagaatgcagatgatatagggccttgaacccttggtaagacttaggaaactacaggaaagttttgagtaaaggagggacaagatgtgacataatcggccgggcatggtggctcacgcctgcaatcccagcactttgggaggccaaggggtgtgcatcacctgagattgggagttcgagagcagcatgaccaacatggagaaaccccatctctactaaaaatacaaaattagctgggtgtggtggtgcgcacctgtaattccagctaatcgggaggctgaggcaggagaatcatttgaacccaggaggcggagtttgcagtgagccgagattgcgccattgcaccccagcctgggcaacaagagtgaaactccgtctcaaaaaaaaaaaaaaaaaaaagagtgacatattttcttttcttttttattttatgttatttttttcagacggagtctcactctgttgcccaggctgaagtgcagtggcacaatctcagctcactgcaatctccacctcttgagttcaagcaattcttttgcctcagcctcctgagtaacaggtgcccgccaccacgcccagctaatttttttgtatttttagtagagacggggtttcaccatgttggccaggctggtctcaaactcctgacctcaagtaatctgcctgccttggcgtctcaaagtgctgggattacaggcatgagccaccgcgccccgccaagacatgacatcttttctttttacttttttagagacagagtcttactcttttgcccaggctggagtacagtggtgtgatcatagctcactgcagcctcagagtcctgggctcaagcaagcctcccacatcagcctcctgagtagctgggaccacagatgagtaccaccatgcccagctaattattttttgtaaagacagaatctggccatgttgcccagactgatctcaaacttctgacctcaagtgatcctcccaccttagcctctcaaagtgctgggattacaggcatcagccactgcacctggcctgtgacttacattcttttttttttttttgagacagggtctcactgtgttcccccaggtggagtacagtggcatagtcacagctcaccgcagtcttacctccccgggatcaagcgatcctcacacctcaacctgagtagctgggactacaggtgtgcaccaccacgcctggctaatttttgtatttttttttgtggagagggggttttgccatgttgcccaggctggtcttaaactcttggcctcagcaatcctcctgactcagcctcccatagtgctgggattacagctgtgagcagccacccctggccacattcttaaacgattattctgtatagtaaatatgtgttgagttaattaattaatgaaaagaaatcctcaagatggaccccaataccataagcatggagatctgacccattcctcattaagaaacatttatttggataagaaagaaggcctgagggctaggggccggggctggcctgcgtctcagtcctgggacgcagcagcccgcacaggttgagaggggcacttcctcttgcttaggttggtgaggatctggtcctggttgggccggtggagaaccacaaagctctctggaggaaggacggggcctctgttctcttctacctggcccatcagcagataactgactcctggaagaaggagggaggggttgagatctcttattcttgagacctgtcagcaggtctcaagattccacaccttgatcatttctgtgtggcttagcttgacccatccccatttccccacatctctgttacctttcttcatgggggggcactgcttgcaaggcacgtaaaacttcagggaggcaccagtgggtggagaaggcaggtccagtcctccagttttataagcaccaataagactgacagtcacggcaaggccctcccctggctcccgaaccatggacttcactgtcgcagtcaccactgtgggagaatgggagtgagagatgaggagatgggaggttccagatggcaggactggaaacagaagcaggaggtggttcgaggagctggaatggggttgggggtattcttaccaaggctgctggcacagaagttgctctgcaaggtgcctgtccggcggcactgctttgggcaggtgggtgcatctaggagggaggagggtggagggtgacctgctcagcaggtaggagggagcactgtccccataacagcctcattgacttgaactgttcagagctctgtcaggcttccggtcctagcacccagtaggggtcatcggcaggaaggaggcaccagtgagtaccagatgaatcaatgagtgaatgtagccaaggaagaacttttttgtttgtttaagatggagttttgctctgttgcccaggctggagtgtagcggcacagtcatggctcactgaagcctcgaccttcccagctcaagcaatcctcccacctcagcctccggagtagctatgaccacacgcctggctaagttttttttttttttttgagacagaatctcactctgtaacccaagttggagtgcagtggcacaatctcggctcactacaatctccacctcccaggttcaagcgactctcctgcctcagcctcccgagtagctgggattacaggtgtgtaccaccacacctggctaatttttgtatttttagtagagatgtggtgttgccatgttagccggggtggtcttgaactcctgacctcaggtgatctgcctgccttggcctcccaaagtgctgggattacaggcgtgagccaccagcccagcctaattttttatttttgaaaagacagggtcttgctatggtaaactcctaggcttaagcgatcctgctgtctggacctcccaaaatgctgggattacaggtgtgagccacagcccaggtcagaactttttgaaatggcccccttcagtctgtttccccttcctcccctatcccagactcaccaggggctgaaggagattcctctgttttctccggaggttgggacttggggggcagcttgactttaggctcagttccccgtttggggccgggcccttgcccttctttggcagtgccccgcggcagggtcttgtaggaggctgagaagccatcagcggtgacactgagatctgagacgaactggacgaggagttcattcccttcggaggagatggagctgcaggtggccaccgagcattgggggaagtgtcagggcgggcgtgcaccacactcttctcagccccatgaccttttttgtttgtttgagacagggtctcactttgtctcccaggcttgagtgcagtggctccatctaggcttactgcagccttgaccttctgggttcaagtaatcctcctgcctcagccccgcaagttgctgggactacaggcacgccaccatgcccagctaattattttgtatttttggtacagacaaggttgcgccatgttgcccaggctggtctcgaattcctaagctcaggtgatcctcccgcttcagcctcccaaagtgctatgattacaggcatgagccactacccctggccaggtggccttttaacttcgtcccaacttcgcagagccccagtcgcctctctatccgcggaccccagacccggggccaaatctcctctttgcctggcctccaacctgctcccctcgccggtttggagccctggggttcagatcccgtccctttagctgaaccccgcccctccaaacagccgcgtgcgtgcggtccgccgactctctcccggactcgcccaggtcccgcccctcaccccgggactgcgtcgccgcagaacttccccagcctccgggagtcgtcgctcacggctccgttgaacacgctgaccgagtcatagcggcagtaggtgtccggctccaggtcaaacttctcgaaggtcagcgcgatgacctggcggcgggcggaggcggggactgcgcggcgggacacccctgggcgcctgcacctcatctcctactgggtgcctgcagcagctcccactcccacctcccgcgtcctctgggcccccctcctgaaggcgttcacaccacagcacggaggaccacacacacccatgggaccctgcaggggtgtcggtcgtcgtggttggcaaggtcaagtcctggcgcactcacaagtgacaggcccgcgtgttataccaggaccctgtacctcgctctcctgagacttgtctcagttgtaatttttacatttttgtttgcgtgcatgcaggggttggggctgttttgggtgcccaccagcgcaagcgcagtgctcgggacacagcagatcttcaataaatctctgctggctgcaagctggagggcgccgcctgggtcccctagggcagcccggggaggagggtcggtacctggtccgggggcgcgatgatgtgccaggaacagctgatgcccggggggtaatcggactcgggccagttgggcgtggtcagggttccctgggccttctccagccgccccccgcaaaattggtgctctggggaggggagagaggagcgggggtggggggcggtggagaccctcggtcagcttcaggagaactctaggctgggagccccggcaggcagctcggatgtctggggctcaggatgaggggacgagaagaaggggaggtaagatgggggcaggttaacagagagcggccgggaggagcgcggctcggggaagtctggggccgcagggcgcactggcgggcggtggaagcgggaggaggaactggctggacgcccccttctggcccctccccgacccgcggccgcaccgcgcctcttcccctaggagatcccatctccccggccctgcagcagagtcccctttcaggctggagagggtgtcctcgacttggggcacagcccccgaggacccctttagggaggtccccgcctgaaacattgcaagggagacttctgccgccaggagggggtgatgggaccgcaatcgggagcccagggctgggtgtaggggccccccggggttggaggaacctagtccccccagccctggggtgccccctcgcgcccgacggagggagcccgattgcggacgggggccggcagttactcaccgtcccagtaaccccaggccgcccattccacccgcgggtcggtgacccatttccgcctcgcgcctggggggggccctggaagagggatgggtgggtgcgggaggaggggagagaagacggggaggagggactgaaggggcggttagtgaggaaaatgggtcagggaggtagggggccctaggcactggggcgcggggtgggcggggcggaagttagggctgggggcggggctgcggccggggcggggcctggagggggggaaggcggaggtgagggagttctcaccagtgcccgaggtggcccgcccgctgtaccagagcaggaagcctcgtcctcctgtgccctcatccgtcgtcatcctcagggtcacctggttgccgggggcgactaggggcgcaggccggaaggtcccacaaaagcgtccgagccgctggccggaagtcccagacccagcgaagacctccagagcatcgtagcggcaggcggggtgcagctccaggtcgaagactcggaatgagagggacacagtctggccctcggggacctgatagcggggacagaggcggggacccacagagtcaggccccacacaacccagccagagggcagctcccctgccccaagcgtttcttgcagaaacggactgaatgggaaggggcctccatgtgagtgcagagcagagggcctggtctctgcagctctgctggtagcctgtgcaggggacaagagctgaggctttggaagaggagggagggccggggactggagaatgaagatttgagggaagggttaagatgatgcgtgttacggtgggaatgatgccttcagtgacagagggaagacacttggagctgccccaggttgagaaggtggtgcgggggggacggggggggggtcccttcgcagtcaggcctttttgctctgagactttaacaaggggtagtgcccagaggggtttctcaccgttatggtccagatgcactccttattaggggggtagaggttggggaacccctcacttgccacgtaacctgattcccccttcacatcccctccgcacaggaacacgggtctggagaacagaaaaggggtcaggaaagagcagggacgggtgggacgggggagcactggcaagatggggatgaggtgatgaggatgaaactccaaggagggaagctgggggatgaaatggaaaggccttgagagacctggggcagcttccaccagccaggacagggctggggtgtcccagactcccacaaagataagggaaaagtgggcctggcaactcgaccatccctccaaccccaagagtccccacccccaccccaacaggaattcccggaatcctcctcggccccccttccagactcccgcctcactctgcctggcagtccagggacaggagccgcctaactacttccagatgtggacacagccacgaggcggtaggggggagggggtggagagatggagggagctgcagtggcgatggccctctgattgaacctggaggccaggctccgcgagttccacaccttagccctgcccctgttccaaactacttcagattctgactcccaagtctccactcactgccccctcctccccctacaatccctctcgaattccttcctggaatccagctaccaggcaagttcaggagcttggctctctcttgggttctatggggggtcaaggatctgggtgggtggggagacttaagagaccagaggacgaaggtgggggaatgggagcagtggtggcctgcaggagaccaaggtcttgcagcagatggggaggatttgggggccagagaagggtgaggcggtggggaatctggggagtggtgtgtcagcaagggaacccaaaatatctccaggcataaccccaaaggaatcgggggtctgaagttcactggagctgtctggaagatgccaagagacctacctggtgtagttgggggtctggccctgggcaaaaggcagcagggcgcaggcagtgaggaggggccccaggagggaggctgtggctgcaggcagcatggccccgggggaaaggcgctggggtcctcaagacagaggcagcagctgaattttgcagagcagcagcagcggtggcggcagcagcaggataatcagcgccagatggggcagccttgggtgtgtgggcgtggggactggccagtggggcgggcaatggggaaggcgggacagtggcgtgtcctgggacctctctaggtctaggacacataaatgttgaccttaggagggggaggagcagtgaggggcagaggccgtctcccaggcctcaagtaacgtcatcgggaaccccactctgtccagtgagggagtatctccgggaacttctgaggactccctagcccccatcctccccccgcccctgcttcctcagctcaggagccctcattgctcaccccctgcctgaccacccctgccagctcattttccacttcaatttctttttttttttttttttttttttgagacagagtctcattctgtgacccaggctggagtgcagtggcgcgatctctgctcactgcaacctccgcctcccgggttcaagcaattcttgtgccttagcctcccgagtagctgggactgcaggtgcatgcctccacacctggctaatttttgtatttttagtagaggcagggtttcagcatgctgtccaggctggtctcaaattcctagcctcaggtgatccgcccacctcggactcccaaagtgctgggattataggcgtagccaccacacctggcctccacttcacatctccattgccttctctccagacctgggccagactaggccaaggagaaggaattctcacccatgacctcttccaactacttgaaggtacaggaagcaaggcaggaggcatggggtgtggatgaagggagtgtccttgttactcaggaagaggtggaaggagtagaaaatagagcccaaacctgggaggtaaacagaagggagagaggaggggggctggcttcaggccgaagggagatgggtgggaagctttcgggggtcaggaggaacaggctgcctcaggatggggacaagtctagtgggcaggggatcccagtggggtagccaagagcatctgtgcatagagttgttccagaaggtagggccagaacttcccagtccaaacgaccaggtgtgctcttgggagcagggagtggacaacaatgtgaagggttcaggcagcatcagctctgctgcacctgagacctggagctgcttgtgctgcctgcccctgcctgggctcctgccctcctgcacccaccaagccgggcacccacccaccccatccctgcccctgtccctcccagcccccaaggcttccacaccaggcctcgctgcagccttttattctatccatcaaatctcttgtccatgatagtcaggttgggggcccctcctgggcagccccctgaacattcttaccctggttagccgtccccaccccctagcaaccccttcccacacgcatgtgcacaatggtcattgctccttagtccctggcctggggccggactccctcctccagggactaggctagcatgagggggattaggtctcaggggctgggggccctacaccacccccgcctccttcagccctctgcagcatgtccagggcctcccagaagaagtccttctgtgcggccatcaggggcatccaccctacgatctccttcatcttctccgtgcggtcctgcaacgtttggcaactgtggatctggctgaggtactcctcgcaggcctgggccatccccccggggtcctggggtgctctggcccccaggctgggctcaggagtccccaccaccctgctggctggcaggtggcgatagggggcgtgctgctcaatgtcgtggctggacaggatgtataggcactccctggtggcacagagggcacaggcacacagagggaccttggaggaggagagaaagggggcatggctgagtggtgctttccttgcagggtttcccagggtgcccgggctaatctgcctattgcattcttccctctcacaccagccctgagccggctaagtcccaggggtgtgtgaggttgggcaaggccagcacagtctgctaagggagaaagcagagagcgtggtgtgcggcagaggagggaggtggggtggtgctagggaaatgggaccccctgggtccctgcaggagccccagctacagcctgtgggcttcctggttcatggctctcatcctccctgggtgcccactctcctgaccccgctctgaccttgacttggagcttgacgaaggaggcactccccttgggccagcctgggaggcggcccccagccccacagccgcagcccagcagctccttgctgaactctgagctctggctcagcaccagggagtggttgaggccgcaccacagggtgatgggccgctgcaggtaacaaacctggggacacacggccagggtccctgagcagggagcaccaagggacgggggggctggggtgggaaaaggttgactggaaggctcggggcagaatgaactggggaggaggaaatgggagccagcactgtcccacgccccaggtatgccctgctgacccctgcagcccccatactctaactggtcacatagggtcttgcacttctgttggtatctcatctatgcccccagaaaatcagctccttgcctgagcccagggcctgctgtggtgtacccctcattctcagcccacccgtctatgccagtccagcctctcatcctgcctgccagcctcggggagacttgcttcttgtgcaattccaggttagaccccaacaccaccctgaggaaggactttcccttccactatccctcccttcctgctctagtattatcttttctttctttctttcttttttttttttttgtttgagacagagtcggaaggctggagtgcagcagtgcgatctcggctcactgcaacctctgccttcctgggttcaagtgattctcccacctcagcctcccaagtagctaggactacaggtccttgccaccacacccatctaatttttgtatttttagtagagaaggggttttgccatgttgaccaggctggtctcgaactcctgacctcaggtgatctgcctgccttggcctcccaaagtgctgggattacaggcatgaaccactgagcccagcctccactctagcatttttattttctcttttctttttttagagatggggtctcattctgttgcccaggctgaaatgcagtggtgcaatcatagctcactgcagccttgacctcctgggctcaagccattcttctgcctcagcctcctgagtagttgggaatacaggcatgtgccaccacacccggcatgtgcctataatttttaaattttaaatttttaaattttctatagagatagtgtctcactatgttgctcatggtgatctcgaactccgggcctcccacctcagcctctagcattttttttttttttgtagagacggagtctcgctctgttgcccaagctgaagtgcagtggcacgatttcagttcactgcaacctccgcctctccagttcaagcaattctccttcctcagcctcccgagtagctgggactatgggtgcacaccgccacacctggctaatttcttttgtattttagtagagacggggtttcaccatgttgcccaggctggtcccgaactcctgggctcaggcaatccacctgccttggcctcccaaagtgctaggattacaggtgtgagctagttgaaatgcttagcctagcattttcaacttatcacataattcttttccaaaatggccaccctgtttttgaaaaaaaagcttctacttgcttcctgccgcttcctgcctctctctcttaagcagcagagttggttacatgaccaatctgaggctgaccacattactgttccttcccacagccagtctatccagcacctccctgggatctcgcttttctctctattacattactgacatgctctctctagaggcacttggcctctcagtggctaaatcccagggcgtcttctgccccctcattctcctgagcctgttagcgctttaattctgaagacactgataagtaatttatggtcattctagaaaaattatgaaacattggcaagcaaaaaattaattttaaaatcattggaaatcccaccatctactattaacatcttgctagatattcttcactgttggctaaacaaacaaatacacataaattgtatattttttattttttagagatagggtctcagtgtcacccaggctggagtgcagtggtgatcacagctcactgcagccttcaactcctggcctcaagcaatcctcctgtctcagcctcctgagtagttgggattacatatgtatgccaccatgatgggcaagttgtgtatttttaaacaaaaaatgggatggggccgggtgtggtggctcacacctgtgatcccagcactttaggagtctgaggtgggaggattgcttaaagccatgagttcaatataagcttgggcaacatagcaagaccctgtctctaaaaaaaaaaaaaacaaaaaaaacaaaaaaaacaaaaacttatctgggcgtagtggcgcattcctgtagtcctagctgcttgggaggttgaggcgggaggatctcttgagccctggagttgaaagctgcagcaagctacgattgtgtcactgcactccagcttgggaagcagtggagaccatgtctcaaaaaagtaataataaaaataaaaagaggctgggtgcggtggctcacacctgtaatcccagcactttgggaggccaaggtgtgcagatcacctgaggtcaggagtttgagaccagcctggccaacatggtaaaactccgtctctactaaaaatacaaaaattagccgggcatggtggtgggcgctgtaatcccatcttggcaggctgaggcaggagaatcacttgaacctgggaggcagaggttgcagtgagccgagatcgcgccattgcactccagcctgggagacagagcaagactctatcttgaaaataaaataaaaataaaaataaaaataaatggtactatgtaaaccatttcataaaagtctttttcacctaaaaatatggcatgactatcttttccatgtcagtagtaaatgtatcttacattgtcacaccatcaattaaccctaccacccaccccatttggaacttccttctcatgtggcttctgggacagtgttagaggggtgcacggcctgtcttagaggcacctcttcatcccctgtctaccacagggcctacttctcagagttgcttttcagtctctacttctgtttgttcaaccatgttcccaggtagaatctaattgccagctagacgtttccaattgagtgtggtttttgttttgttttgttttgagacagagtctctctccgttgcccaggctggaatgttgtggcacgatctcggctcaccgcaacctctgcctcccaggctcaagcaattctcgtgcctcagactcccgagtagctgggactaaaagcacccaccaccacacctggctaattttttattttttctagagacagggtttcaccatgttgtccaggctgatctcatgctcctgggctcacgtgatccacccaccttggtctcccaaagtgctgggattacaggtgtgagatatctttcttccagagccacctctgtcttatacccctctcttctacatctaatcagttttgaggccctattcattttcttcccaaatagctcctgtatccattccttcccattctcgctgcagcaccaggcgcttgtctcaagtgctgtcatcactcaacagcctcctggcgggctcccctccttggcctcctctgcacaaggctcctgacacattctcagtcacctcttgggggttgccttctcctattccagaacctgcagtgactcttccccaaatctacacctctctaagcttgtgcccacctgtaccacctcatacctcagtgattcccaagatgccttctgtgctttagtgagacccgtcttgtcactgtcccaggtatgtgcaagtttcgtgcctatccccctcctcatcacacagaatgccttctctatccctacctaagtcttatgtaacccacgatgccctgctcacatcttttttctttttctttgagacggagtctcgctctgtggcccaggctggagtagggtggcacgatctcagctcactgcaacctcagcctcccaggttcaagagaatctcctgcctcaacctcctgagtagctgggattgcaggcatgtgccaccacagccagctaattttttatatttttggtagagacggggtttcaccatgttgcccaggctggtctagaactcctgacctcaagtgatctgtccacctcggcctcccaaagtgtcgggattacaggcgtgaggctctgcacctggcccctgctcacatcttacctcttctagaagtctctagcctgcccaggtcacccaccctaccccttcactaaattcctattgcatttacagtgtgcactgcacagaatggacctcgtagtgccaaccctgggtaagacatggggtagtaccactggcattacatactgagtggcttaacttcccaaaggaacagaaattggattctgtggaatctggagaagtggacagatctgggggttagggaattggaggaaaggggttgggatgagagttgctgggaaatagtctcacctgtgtgggttcccctcggtccattttgtcccctgttcctagctgcccgtatctgttatttccttgcatgaagattcggccaaattcatccaccaggccaaggtggttgtagccaagagcacagaataggatctagcgtgcaagatagaaaggggatagggattccattccctccagaggaactctgagttccagagtctccaagccactaacctgccatccccagctgatctctttctatatatatattttagagatgggatctcactatgttgcccaggctggtctagagctcctgggctcaagcgatactccctcctcagcctccctccgcaccgagcccccagctgatctcttttggcatacctctccctggggatcccctgcccctctggatcaataatctgattcctataatacttcagaccttccaatccctacagcgccacccctctggtttgccccgtccctccaggagcctaccttggcaggcagtgagagagcaagcggcatctgctggtccagggggtcaaaggcttgaagggtcccaaagagatcgcgatacacccctggggtatgcacctcaaaatacactcccccctggtctggggggtcaggagccctcagctcagcagctttgggcacccatttcctagggataaggccccacctgggatgaaagctacaagatccaaggagtctcatacccactaggaatgcatcaactatgatgcctgggaactgaaaacacatcttttgagaccgagtctccctcggtcacccaggctggagcgaagtggcacgatctcagttcactgcaacctctacctcctggttcaagtgattctcctgtctcggcctctggtgtagctgggattacaggcgcctgccatcacacccagctaatttttgtattttagtagagatggggtttcgccatgttggccaggctggtcttgaactcctgacctcaggtgattcacctgcctcggtttcccaaagtgatgggattacaggcatgagtcaccatgccggccctaaacacatcttttcactaggatgccctcaggggttcaccatgcagctggagtaagggtgaagggtgttgatgtttagagggtctaaccaaggctgcgggcttgagccggggggaggtggtccatacctgtgacgtagagggtgctgctctggttggaagtcatgcaggccacgcgcaggtgaggcaggtagtgggacaccttcctcagggccagctgaaccgtgtaggagcgtggctggtcaagctgggtctcattcactaccaaagagtagatctttccttcctctgggggtaggggaagcaattagttggggaggggattctccaatatccacataaacatcccaagagactccctaggccatatgggtgacacatttactgccctagagtggggctgagaaagaaataagggaagagtgaccccaagtcccccagactccagttcccaccataaatcagggaagtacttcagcatgagagatgagcagagagaaaaatctagcagatttgttagaatccgatttgagtgagaggtctggggattgagggccctgcctggcattcagaagtttagaggtggtcaagtgtggtggctcacacctgtaatcccagcactttgggaggccaaggcaggaggatcacttgaggcagggagttcgagaccagcctgggcaacatagcaagaccccatctctaccttgctccaaaaaagaaaaaaatattttaagaaaaagcctaaagggtctcaggcctggggatgtggttgagtataaaggacattgggaaagtagggagcagtttggagtatagtgaggtggttggcatggaagctggggacatctgatttttttttttttttttttttttggagatggagtctcactctgtcacccaggctggagtgcagtggcataatctcggctcactgaaacctccacctcctgggttcaagcgattctcctgcctcaggctcccaagtagctgggactacaggtccatgccaccacgtccggctaatttttttttttttttttttttgagacggagtctcgctctgtcaccaggctggagtgcagtggcgtgatctcggctcactgcaacctctgcctcctgggttcaagggattctcctgcctcagcctcccaggtagcttagactacaggcacgcgccaccacgcttggctaatttttgtatttttttttagtagagtcaggcagggtttcaccatgttggtctcgatctcttgacctcgtgatccacccgccttggcctcccaaaaactgggattacaggtgtgagccgccgcacccgacctaatttttgtattttttagtagagatggggtttcgccatgttggccaggctggtctcaaactccagatctcaggtgatctgctcacctcggcctcccaaagtgctggggttacaggtgtgagccaccacacctggacagggccttttattcatataaaatattaagcagaatcctagactaggagacagagaagggcagagctgtttagatggagactaggataaggtggcatatggaacccagtctgaggggcctccctccccctcctctgcagcagggtctgaggaatctgcaggaaacagtttgcaaaagccattgctttgggccacacctgtgaggagcagtagagcccgctgggtctcctgaccaaccagcacgatctgcttgaaggtcattgagtggtggaatgtcatcttgaagacccgctgcccactagactgcagatagacctcaacacagtcacaggcccggctgctggtggtacccaccacttcctgcggctcccgagtggccaagacgtagaggtatttacggtaaactgtgtcacaccttgggtccgaggcaaactgggggaaaagatgagggcgtctgggatctagagtttcaaaatgggatggggctggggcagctggatcctggggtgggaagtgaaatgcttgggtccagagttgggaaatgagcccttgatttcaggttcctatgtgggagggcagaagtcataggaaagacacctcaagactgatgggggcctgggtcctcaaaagagaggtggtgatatggttaggctctgtgcccccacccaaatctcatctcgaattgtaatacccagtgggaggtgattggctcacgggggcagtttcccccatgttgttttcgtgatagtgggttctcacgaggtctgacggatttataaggcagttttccctgctcttgcttgtgtgctctcgcctgctgccatgtaagacgtgcctctttcccttctgccatgattgtaagtttcctgaggcctccccagtcatgtggaactatgagtcaattaaacctctttgccttataaattacccggtctcaggtatgtctttttttttcgagacggagtctccctcttgttgcccaggctggagtgcaagggtgcgatctcagctcactgcagcctctgcctcccaagttcaagcaattctcctgcctcagcctcccaagtagctggaattataggcacccaccaccacacccagctaatttttgtatttttagtagagacgggtttcgccatttggccaggctggtctcgaactcctggtctcagctgatccgcctgcctcagcctcccaaagtgctaggattacaggtgtaagccactgcacccggcctctggtacgtctttatagcagtgtgaaaatggactaatacaggtgggctctcagctgccagggttctgctactcacatccttggctccacgacacaacacaacatagcgacaggcccgcttccactgcatctggccgagggtggagaccagggcatttttgaggaagaagagggtccccacgtagtcaagaatgaagacgtgatccttggtgggcaagaagcggcggtagccgtgggctagcaagggggccacgctcttgctgagacatcggcggcggcctccaaatgcctggaaatacaggcccttcgtgtctggaggaaggaaggagatggaaggttcaagggatgagatgacacgagggagatgagttggagcttgggtagatttcttagacacgctggtttgtagttcctccccatccccaggacaggggaacaaacagaccccttatgaaggagatgtggaaaataagcttagattatactcgacatgtgaactttagtctccaccccacctcagcccagggtcaaacatttgcttcttagtgagcagttctttggtgcaaccttgcatcagtgatgttgaggaaaactctaagaataaagacacagaggctgcgtgcggcatccacccccctcaccctgagcccctcctcccatcctcacagctcagtgaatttttgcacgcctgtaatcccagcactttgggagcccaggagtttgagaccagcctgggcaacgtggcaaaaccccatctctactaaaaatacaaaaattatccgggtgtggtggcgggagcctgtaatcccagctactcaggaggctgaggcacgagaatacttgaacccgggaggtggaggttgcattgagccaagattgcaccactgtgctccagcctgggtgacagagcaagaccctgtctcaaaaaaaaaaaaaaaaaaaaaaaatcaaagaaaaagaaagaaaagagaagagacagaaacaggagtgaaaaggaatgattgatgaaggccggtcatcctccctcacccctagctttggatctgttttctgggtcccccttctcttttaatctcccagtgagtgtaagaagtacaccctgggggatccctggaggggaagagggtttatggcatggttctcaggctaggggtgattttgtccttcaagggcattggttgtcacaattaagggggatgctgctggccatctggtgggtggaggccagggttgctgcttaaacatcccaccatgcagaggacagctccccacatcaaggaattattttgcccagaatatcaacagtgagttcagaagccttgggttagaggagggaaaactccaggtttggggagtgagggatgcctctagggaaaaagcgggaagtgtctgtgtacagagggagacttggcagggaggccgctaacgggggctgtgggtggattccgaagacttggaggaagtactcaagggagaatgtttgaactggacccgtttcttccggagaaaggggccctggaagcactgttgggagtgtgggggtcatcaggggactttagagagcaggaaggctaaggcgggacagaggcaaggagaacgggaggttctggggaaggtgtacagttcagaatggcagctctcttccagggccggactccagaaccctgatcttggaggcgcggactgagtctgcgacagatgcgtctccacacgccttccccatcgcacacttcgtggaagtagcggcaggtctggccgagggcaacaaggtctctgactgggaggaatgagatgatatgctccacctgggagggaggagggaagaagcggggagtctttggtggcccctcggtgatctggcccccaatcctattattctcaatccccctccccaaggactcaccagctctggggggaacaactggatggaaatcggatttcctttccccctcttctcttcaaccccaagctccgagccacaagaagggcagcttctcttcacctacccaagaaggggtgcatagggtcccatgagggtcccacatccttttttcccttctctccgcctaccttggggctcatctgactctagctgggcacagttatttcctcccctctctctccagacccatccctaacttctccaaataactcctcccgatctcctgcggccaatccccctcacccggagcccctcctcccgtccacacagcctggtgaatttttgcagcttccgtctctggcttcccctgaccatcctgattgccccctccctgctcctgccctcctgtctcctaggcccttggcccccccgttcctgctggctttcccacaccatgtccccagcctaggcttgggggacctctgaggcccctctgcctcctaggcccctcccccatggagtctggggctaacaaacctctctgtgacctcactgtttggccactgtgacctgttccctttaatcttgcccaggacccatctcttagacagctcctgggttctagctcagttctagccatcacatggctcaagggatatgcattttactggagaaataaagtgtgaattactggtaggtgacatctttatttcagggagcaggaggaagttttcctatttgaggcccttttagcactaactctgtagagaaacactagtgaattcctcacatttcagcaggccaaggcctctagggattggtagctcaagagtatagactcaaaaaactataaactcagtttgacaggtgagatggagaggtgactgtgctaataatcgtttagctcacaaatgattcagcaaactctttagacttgtgaaaaaacacatccaaaaggagactgcagcctggtgccggtggctaacgcccgaaatcccagcacttttgggtggccatggtgcaaggatggcttgaggccatgggtttcaagaccagcctggtcaacatagaccctgcgtctattaaaaaaaaaaaaaaacttaaaaattacccaggcgtggtgatgcacccctgtagtcccagctacacaggaggctgaggcaggaggattgcttgagcccagtttgaggcagcagtgagctatgatcgtgccactgcactccagcccgggcgagaatgatacccagtttcaaaaaaaacaaacaaaaaagaagactgcttttgctttcctgagggacagtaacatcattgcatgtataaaggacaacctattaaggtgggagaaagggatggatttcctctgaaagcttaggatttctcccagggtctctgatattagctttgtcttatgtggggtgacatttatcaggagaaacagcaggggtcagggttgtgtctgtcccactcaggccagatctacaccaataaatccaaggagtggctggctcttgcaggggctcaaaggagtcccatcctgccagaccaccagccctcaccacacagtgtcacagatccgttcattgactgcaccagactgaccacccaaattcccttatgtatggtgcctagccatggctaggctgggatgcctgagatggaattttaattcttcagcaactactcaggaatatcaacctctgagatgtgaactaaggagaaagcaacttcagtgacttatttctgggcaacctaccacatagggaggggactgcattagggactcatgccacttagaaaggaagatctccaagtagacagaaaggtattttccattcctcttgcatttgggtcccctttatccactccatttcaccccaggaggcaaacgagaggttgtgaatagaaaaagtccactgtgggccaggctttgtggctcacgcttataatcccagcacttcgggaggccgaggtgggagcattgcttgagcccaggagtttgagatcagcctgggcaacatagtaggaccctgtctctacaaaaaatacaattagctggcatggtggtgcgtgcttgtagtcccagttactcgggaggctgaggtgggaggttgaggctgcagtgagctgcgatcaagccactgcactccagcctgggcaacagagcgactctgtctcaaaagaaagaaaaagtccactgtgggccgggtgcggtggctcacgcctgtgatcccagtactttgggaggcagaggcaggatcgcttgaggtcaaaagtttgagaccagcctgggcaacatagcaaaaccccatctctacaaaaattgaaaataaattagccaggtgcagtggtgccgcccgtggtcccagctacttgggaggctgaggcaggaggatcacttgagcccaggcattcaaggctgcagtgagccatgactgcaccactgcactccagcctgggcgacagaatcagaccttcttaaaaaaaaaaaaaaaaaggccgggcgcggtggctcacgcctgtaatgccagcactttgggaggccgaggagggcatattgcctgagctcctgagtttgcgaccagcctgggcaacacggtgaaaccccgtctctactaaaatacaaaaaattagccgggtgtggtggcgggcgcctgtagtcccagctactcgggaggctgaggcaggagaattgcttgaacccggacagtggaggttgctgtgagccgagatcgcgccactgcactccagcctgggcgactgagcgagactccatctcaaaaaataaaaaaataaaaagaggaagggaacggaagggagagggagggagggaggaagagaggaagggagtgaaaacatccactgtgaaaactgagggagcgggaaagggctgtgcgtggaggatccagagacctggtttctagagcaagccagctgtcaggaacttgctgttcgctcttgctaacgcatcaacttccctctgcctcagtttctgcattcgtagcaccaagggcgtgttctaggcggtgagatcctttctaagcctctaaaaccccgtggtctggtcccctctccattcctgtccaggggagctcctcgggtgagacggcagaccgtgcaacgctgcacctacaccctccctcctcgagctgggcatctccaggctctgggaagccccccgcccgcccccagcccgggggtcccgagacccctgccagaggcttcacagtcggaggtccccccgctgccccttcagctgcgacaaccgccagtgcactggcctcaagcagtcgcccgaatcccctcaagccctggacgccggctagccccctaacacgtccagctcgcactcgccactgcagcggcgaactgcgttcccggccggccaggggctccgcgttcattcttaacctcagtcttaaagttctagctcacccgcctcctccttagcaaagggaccgccttctcgcccatgctattggtaggtagagccgtccctcagagaagaggcaggtccagattcccttcggaggctctaattggccttcttgacagtcactcgcctgtatctggcttacgattggtctttgggggacgaggactaggcaccccctgcttgcggtccctcggcccgttttcctgctagtggagtgccggtgtcccctcctcttggttggacctgattggctccacctcccgatctgagcattgtgattgggtgcagctgcgctgggcgggacggcctggagcgtcggccgttggcgagcgctctatccttgttcccctcccttctctcgtcagactccggcgccggagctccacccccactgacgggttctgattggccgcttctgacgcgtctcggggccacgattggtccgtccggtcccggacaccgctccctcccccttgaggcaactacggcggctccaaggagggggtgggggaaggagggacggccggtcccgtcagtcaggcagcgggagccgccgggagcggatggcggcggccgtagcggctccactcgccgccgggggtgaggaggcggcagccacgacctccgtgcccgggtctccaggtctgccggggagacgcagtgcagagcgggccctagaggacgccgtggccaccgggaccctgaacctgtctaaccggcgcttgaagcacttcccccggggcgcggcccgtagctacgacctgtcagacatcacccaggctggtgagtgcagccgggccccgggcccaaccgggtccctcatttgcatagccccaccccgggccccgcccggcccggggagtcgggcccgccccttcacctggcggccaggttgctgcccctcctgattgccctaaacctgcagccatcttctcccatctttgagaaccccctagacaatgaacgtgcttctcgtttgcacagaacgccctgcgcctccgagcgttgggagagattcctcctttctctttatttgcatatctgcgcacctgtaggatggtcccgcccctcacctggttggcttatttacatgatctcttaacctcagctccaatcggtctatgaagcagtccccacgagctcctctaataactgctttctctccctcttcatctacacttcttaacccccgtcccaccgagatccgagcagccccgggcacccccttcccagtgactggcccctaagcccgaggtttctgctttctgtgccgcaaccccgccccctaaggtcctggccctctccactgtccacgcagctctccagcctatgggaaagaaacaaatctctacctcccctcactcttttctccctgagctcttccgcctattatccccaaccggcttatctgagattcctcctcctccttcctaagcctgtgaggtcactgtggagcctgtgacctcatagggatcttagaattcccatttcagtttctgctttcccccgggggagggacttgaggccgttgctggagggaaggaaatcttatctcctagctgggagtgctggccagctagagactgtccttccacgcctccacccgcaggatctgtccaaccatgcaccctccaccctggtgtctgtggatggtagggggtgggggacttaactgtgacaggtgagtcaagcctcagctactcaggaggcagcctatgaccttgggccggcagctgggggtggggatcaggatcagggaggaggactgcattcccgaagcctcaccccagcccaggcctcttcctcctctcatctgcacggtgggggaccagagctggaggatagtgcttacttctccctaagcaggtgcctgctcacctgggaacactcaggccggcactggcacacatcctcttccctcttctggggagaaccagtcgaaacctccccactgatctcgcctgctctgcaacacttgagatggggaatgagtgagctccaggagccattcctgccccttacagccctgttccctcccacccccacctaaccccacactccagattgacctcagcagctgtgtgacactcactgtctgttcccttcccctcccccttggttgttttttgacaaagaccaaatgttattctttacttccttaggctgtctctccctgtgtggactcttggggaaaactacccggagctccccggcccctcccagctcccgcccccggccccctcctcccccagcattccggctcagggtgcagccgtgctcctgtgagcttgggggggggtcggaaatcccagcttcccaagaaccctcctctgccccactctctacacagggcccaggttctaggccaagtggggtccctcttgtccagaattctctcctctgtcccctctccgcaagcagggacagaaaggggaagtgacaaaaacatacagttgcccataccctgccctccatctctcctcgccctccaagcagacgaaaagcatcagtgccttgctgcccggactgccttgagccttcccctcccgtctcccatctctttctgagtgtcttcgctgcgtgtcgcctagtcttgggtccctgatctcccttggactaggctccctggggtgatagtaggaagaatcctgaggtggcggggaggggccatcttgcaaaggagaagtgcagctcattctctcccagaccacatcctgtgcccccagtgccctgcctcctgcctgagctcccttccgctcctagcttttgtccccgccaccgcctaccccatcagaactctgagaactcggtctccacccccttcgtccacatgcacacacacaaacacatttgcagagaaagcgggcaggtggaggcgaggctgggaggggcaaatgccatccccccaccctctccagaacggtcatctctgaggccagggcttctgtctgtgcaccagggctgggcagagaggaagagaaaggggtcccggggcatcaggctgtcatccaccctggtaaacacggggcctaccagagccagaacctgacagattgtttctacttcatttcctgtcacaagactcatttccttgggggatatacccggcttctctcctctgcttgcttttgctggcctgcccttccctgagaagggcccttggagaagctcaccaggtctgtggcctgggactccgcctcgcgggccctgggcccctcccaggacaggctgggccgaggaaacagaaaggcaggcttctccaggtctaagccgttagtgggtccgtgctacagggaatcccaaggctgccagcctccgcatagcaaggcagtgctccagataagagggcgattgtagaccccaggccctcccacactctccaccctcgccgtgcctgagatgctcacacagttgctgatctcttgaagtctgtgtcagtaagagaggaagcagagccgggctgctagggctagcagagggtaggaaggatgcctgccctgggccagagaagcccagatgggagggacctgggaactccagctcccatctccaaccaggtcttcttgcccttccctcccagcccttgggaatcagtaactttatgattctttggacctggcttgctggtccttggggctggcgaaaaactcgtccggtgtcggggactttatctctagaaccaagatagagtgacctgtggtttttcccgtgttgaaaacacactggagtagggaagaagggccccgaggagggatgggcactccctgtggtttgccccaggggtttcccatcttccctccgggagccccccagcccctcgccttactgttttcccatgagcactgacccctcctctcaccttcggtcctccgcctcacctggcatctctgaacaggaaccacaggagttagagattccagctgctctccaggatagccctccattgacattccccaacccccaagtctgaggcttctctagcccagtgacgctaaggcctttgccttccctgtgccattctggtcacgcctggaatgtgctcccgttggcagaaggctttgttatctctcctgggaggccacattgatggccttgaatctttaggtgtggaggtgagggagtgggcagccggctctggggggactgaaggtcctgtccgggctgggcctttccgcaactctccccgacacctccttttccccagacctgtcccggaaccggtttcccgaggtgcccgaggcggcgtgccagctggtgtccctggagggcctgagcctctaccacaattgcctgagatgcctgaacccagccttggggaatctcacagccctcacctacctcaacctcaggtagggaggccgagccagggccacgtgggagcgtgtgcttctcagtctcaagtactactgagtgacccacccagtgaccccgagaggatggcagtgctgggatgccatgcctggggagccagtccgctgcctttctcccttccacagccgaaaccagctgtcgctgctgccaccctacatctgccagctgcccctgagggtcctcatcgtcagcaacaacaagctgggagccctgccccctgacatcggcaccctgggaagcctgcgacagcttgtgaggatggggacgggaccaggaaagggacccctgagccaggcagcgggaccttctagggggaggttggggagggcctggagcaaagacagagatgggagggtgggttctgctgggcctggtctcatggccccttcccactgccttcctgataccaggacgtgagcagcaacgagctccaatccctgccctcggaactgtgtggcctctcttccctgcgggacctcaatgtccggaggaaccagctcagtacgctgcccgaaggtgagaagaatgaagaactggagaggaggtgtttgtatgtgcgtcccagttggctcaggctgcggtaacgaaaacactgcagaccgggtagcttatacatggcaggcattcatttttcacagttctggaagctgaagttcaggatctgggtgcttccatggtcagcttctggcagggtgcttttcctggctgcagactgccggctccttgtggtactctccgatggcggagagcagagacagccctctggggcctctttgataaaggagcacaaatctcactgatgagggctccaccctcatgatctcaattacttccctaaggcctcgcttcctaatcccatcactttgggggttaggatttcagcagaggactttttgggtgacacatttcagtccataacagtgtatgtgctttgaagaagttacaggccaggaatcttcagaggagaattacaccttcattgtccaggcttttgcagtatataaaacaaactgtaaacgatctgatttgatcttgacctagcaaccctctgatgctggcagggcgcagatgagcagctgtgttagaaacgtggacacaggcacagaaggggagctggtgggtgcatcagctctaggtagactggcaaggtcagaaggggccttcaaggtcacccagcagccctgctcaccccagcaggggctctcaaacacctgagtcgggatgctccgccactcctcccggagatgccagggccagtgccagagcccaggtggcccatctaatgtgcttgttgtgatgcactgatagcctctgccccaaagcaggcatgccttttgttcagcaggcagcagcatgtgtgtgtgtctgtgtgtgttatgtcttgtgtctgcgtgcatgtgtgtgtctgtgtgtatgtatgtgtttgtgtatgtgtgtgttgtgtctgtgcatgtgtatgtgtgtttgtgtctgtgtgtgtctttgtgtgtgtgtttgtgtttatgtctgttgtgtgtgtttaggtctgtgttgtgtgtgttgtatgtgttgtgtgtgtttaggtgtgtgttgtgtgggttgtgtgtatgtgttgtgtatgtttatgtgtgtgttgtgcatgttgtttgtgtctgtgtgtatgtatgttgtttgtgtgtgtgtgggttttgtgtgtgtgtgtgtgtgtgtgtgtgtgtgtgtgtgtgtgatgtgtgtatgattcctgtgttgggatcaggtagatgcgggtgatgtgactaagatctggggccatctcttagggatttaatggcttcttgaggagagacagtcatagggaagttccgtcagggggttccccagacgggggctagagggaggtggcactggactctgcgtgggggtcctggggaagacttcaccggaggcgcaggcgcagtgggagccgaacattgaaggagaattccccagccttctgcatccaggcagaggacccagcatgtgcaaagcatggggttaggaaggtgagccaggcatggcaggaaggcctgtgccatgctcaagtgtgaacttggttttgaagaacaaggagggagtgaggtggtcatccactttccctgtctccctactccctgaccctttctgcacctgccctcttccttcccagtcaaaaggggtaggaagggctctctctgggccataaaaagaaatccaagcaagatgtcctggggacagaggcaagagcaatgagttccatccaatctgggatgtctggaacgatccaccgaggaggtggtgatgcttgagctgaaccttgaaagatgcatggatggggaaaatggagttctcccagctgagcaaacagcacctgggaaggctcagaagctgagggcccggaggggtgggcagtgaggtgggaaacgcgggtggagccaggttgtggaagccttcctcatgctgggttagggagctgtgggttttattctgtgcttagggccgccatgaatccagactgtgccttttttttttttttttttgagacagagtctcgctctgtcacccaggctggagtgcagtggcgcaatctcggctcactgcaagctccgcctcccaggttcacgccattctcctgcctcagcctcccaagtagctgggaccacaggcgtccgccaccacacccggctaattttttgtatttttagtaaagacaggttttcaccatgttagccagggtggtctcaatctcttgaccttgtgatccacccgccttggcctcccaaattgctgggattacaggcgtgagccaccgtgccggtcccagactgtgcctttttaagatgagcaaaaggcacctttccctgtgggcaggcagcatttcatgcagggtgcagtgctgggcccgtgctggggaaaggggactcccgggcggccacaatccgctcaacatctgcagccctggttgcatgtcacaggaggtgtttgaacagggtttgtgccttgtgctgatcatttgaaaatggagggtgggttcgagtgtggagtgggcaggcgaggagatgaggaggacagacagggctgggcgggacctgacgtccggatgggccttcccggggaagctgagctgacgtccagatgggccctctcagggaggctcgcttagaccgtggaccagaatcatgtggagagaggagcagggaggtttctcccggggaatgacttgagccacccaggggagaggctgtgctgggcccagggtgactggccagctggagccaagggtgagggagtgagcacgaggccacagccctgagcatgttcctgacttttcccttgcccacctgttccagagctgggggacctccctctggtccgcctggatttctcctgtaaccgcgtctcccgaatcccagtctccttctgccgcctgaggcacctgcaggtcattctgctggacagcaaccctctgcagagtccacctgcccaggtgaggcgggtgcctggggggccacgaggacaggggtgtggctaggcaggagtggggttggtccccttggatagctgagcaggatccggggagctgccctccctgccaactccctggcgtgtgctgccccgcacacaggtctgcctgaaggggaaacttcacatcttcaagtatttgtccacagaggccgggcagcgtgggtcggccctgggggacctggccccttctcggcccccgagtttcagtccctggtaagtcctaggtggggaggaaggaagccctgggatactgaatgccccttcccggccccaggcaccccctgctttctggcaggaggatggggggctgttgtccagcatcaggctgaccagatccgcctggctggccccagccctgcagaggatctatttccgggacatcggtacgatggtgggctggactcaggcttccacagcgttgatagtggcagcaagaggtggtctggaaatgaggtaagggcgtcctgtccatgggtgattgagggtgtcagccctgggagagcacctctgaactggggacctccaaattgcagggtgccaggcagaagctggagctgtcctcttccttccctctgcccagcatccagggaagggctggctcagcagagacctgagcttagtccacacaggacccccaggtcctgagcccccatgtacagagaggccatctcccatctctgcctctgcctttacagtcaacagatgaattttcagagctgtcattccggatctcagagctggcccgggagccccgggggcccagagaacgcaaggaggatggctcaggtgagtagcacggctggccgggagctgggctggaccagggcctgggtccccgctcacttgctgacatgctggcctccccagcggacggagaccctgtgcagattgacttcatcgacagccatgtccccggggaggatgaagagcgaggcactgtggaggtgagagcccagctatgcctctcccaagggaggggagctggaggaggggacagggcaggcgtgggcacaggcctgccctcagctgctctgctgttctctccttaggagcagcgaccacccgaattaagccctggggcaggggacagggagagggcaccaaacagcaggtaccccaagcccccaaactgacgccactgcccgatcctcccaccccccaaccgcctccttccctgaccccggggtctgcccctcttgccctgtcttggtccctcaggcgggaggagccggcaggggaggagcggcggcgcccggacaccttgcagctgtggcaggagcgggaacggcggcagcagcagcagagcggggcgtggggggccccgaggaaggataggtgggacccagggccgcccggggctgttgctggacactgagccctggaaatggggccaccgagccccgctgagccgttctgccttggggctagctgaccccacctctccttgttccagcctcttgaagccagggctcagggctgttgtgggaggggccgccgccgtgtccactcaagccatgcacaagtaggtttcctgccagcatcccctccccactcctcttcctatgaccatcatccctctaattcccttctgtctctcctcagcggctcgcctaagtccagtgcctcccaagcagggggctgcagcggggcagggagccccgcccctgcccctgcctcccaagagccccttcccatagctggaccaggtgggacagggattttgggaggaggatggggcctgtgttggtgagggctggttgggagagagggacacagaggggatgcctgtctcacctgcccctgtcgctgtgtccctggttccggccccagcgacagcacctgctccacggccacttggctccattcagagaccaaacagcttcctcttccgttcctcctctcagagtggctcaggtgggtgtcctgccctccccagtgctgacccagtgcttgccagcaccaacggctacatcacccttctgccctgggagccctctgggtctgttgtaccttttgtacctttgcgttgaaaatcccacaagcaagccgggtgtggtggctcacacctgtaatcgcagcactttaggaggcccaggtgggaggatcgcttgagcccaggaattcaagaccagcctgggcaacatagcgagaccccatctccatgaaataaaaaaaaatcccacaagcagagaggcaggaggtgtaggtgccaggccactgggacccagctacagagtcagtggtgagcagtggaggcagccccatgcccccctttttctcctaggcccttcctcaccagactctgtcctgagacctcggcggtacccccaggttccagatgagaaggacttaatgactcagctgcgccaggtgagcagaggcgggagctgcgtgggcaggggcctgggccgggcacctccttgtgttgctgtccttgggaccagcctccctccacatctctgtgcccactctggcacctcccctgaggacaggaagggacaggcacaagttccctgctagccctgagccccccactctccctgcctcccagacgcctctccttccctgacccctgctctatgtggtctacactgccaggtccttgagtcccggctgcagcggcccctgcctgaggacctggccgaggctctggccagtggggtcatcctgtgccagctggccaaccagctacggccgcgctccgtgcccttcatccatgtgccctcccctgctgtggtcagttggggctggggaagaggtgggggatgggccggggcgcctgtggcctctcccttaccacattttcttctttcacccaccccagccaaaactcagtgccctcaaggctcggaagaatgtggagagttttctagaagcctgtcgaaaaatgggggtgcctgaggtatgggggctgctttctaaagagtggtggcatgccggactcagccgagcatgtggcatggatggtgggcttccatttgcagcggatgtctgctctcagatgaaggcacaggctgcccctgccctgcccagcatgccccctgccctgcatgccccctgccctgcatgtcacctgtcctacacatcccctgccctgcaggccccatcttgtcctgcatgtcacctgtcctgcacatgccctgccctgcactcctcctgcactgcactccccctgcccagcacgtcagcatgtgggcgtggttctggccccagcacgtgagggcaggggtgggagggactgtcctgctgctgctgctgacgtctgtcccttgtccttgtccacctgctctcctctcccccaggctgacctgtgctcgccctcggatctcctccagggcactgcccgggggctgcggaccgcgctggaggccgtgaagcgggtggggggcaaggccctaccgcccctctggcccccctctggtctgggcggcttcgtcgtcttctacgtggtcctcatgctgctgctctatgtcacctacactcggctcctgggttcataggccccaaaatcggccctccctcacccctttcccttcctctctatttataaggtccctgctccacccgaccccacctgcggtgccttcagccccaaccaaagacactagtgcacccccttcacagacactgacctcagaggccccactctggtgcccccagaccctgggcccccagcctctggcctccctccagtagccccacgagtccccacctctcagtgctgacggtgccttcatgtccccgccggccctgcccctgccctctgtaccccgtgaggggtggcaggagctggagtctcccccttcctcctgtgccctccccttccccccccaacagctgctatgggggggctaaattatctctattttgtagagaggatctatatttgtaggggttcggggcccaggccgggtccctatctctgtgtataaactgtacagaccgtggccgccctgcctgtgtgtgtgtgtgtgcgcgcgcgcgcgcgtctgctccgcgtgttggtggctgtggccatggctctgtgcccaccagcatctccctcctgagatgccggcctctcatgctcccggagcgtccgccaaccccccgtgtcacctcccttctgttatcgctgacagctttcttgcgtctcatttgtcgccgagccccgagcgcacggtgatgctcgggtctgcccccgaccccctgccacaggccggaagccgcagggggcaccgtggggaagctaacccggccccttcccccaggagtcactgtgccagccccaccacatcctggaagaggagggggccccgggaaggggcctcccctacatcgctgctgtcgtccacgccctgctggaccggccttaggggtgaaggtgggggcacagggcccaccccgcccgggaccccgggagcagaagacgcgcctgggctccgcgctctcagagaagcacgtggtgagggtggcctgggcctgggcacccttggcctgccggcctggctgcctctggggtcgagggtctgggtggaaggaccgcgggtgtcgcaggtgtcgtgtcagccgcaataaacagaagccagaagccctctgggtggccctcaggtgtaactgtgtctgagagcacgtgcgtcgcggggttgttgggggggcctctgtttccggaattcaccgcccagtcgccagggggcgcccgcgggagcccggcgggggcacgcgccacgtggccgggagacgcacagggcgccagcgtcgccgcgaggcctctggggtgggttcgccaggagggcacgttcgcgccgcgccgcggagggaggctgagagggccgggccgggcggcggggacacggcggtaccgtcctgcgctcgggaacgcggaatgttgccctggtcgccgccgcggtggggcgcgggcccggaggaggcgcccgagggaccaggccttccggcgggcaaggaccagggcgagccctggagcgccggagcggacgcccccagggagctggggacacccccatgggacaggtgaggggctcggacggagccgtggggggacagagactgggggcctccatgcgttcaccacgcgctctacggaggcttctccattgtccctgctggagattgggtccctcggtctcccttgcaccaggcacccttgggctccaggggagggtgcgtgggggcggtgtggctgcagcctcagtccctgcccctccagcccacagcccccatcccgtagcccttcctggatctggagagagcagctgctgctgccccaccacctgccaggcccggccactgagcagccccccggagccccaggtaggacaggccctgctgcctctactacccctaagagcctctcactgactgtgagcctgttataatccccaagcgtccccccagatccccgttccccccaggtggcctgggaggtggccccctcgaggatgactccactagcgccctgggaccccaagtatgaagccaaagcaggacctcggccggtgtgggtgagttgggggcaaacctgtgggactggctggggtgctcagggagctgtgcggtggcctgaggctccagtgctctgtcctcctcaccctagggggccaactgtagctcaggagcctcgttctcaggccggacgctgtgtcacccctcattctggccgctgtatgaagcagcctcgggcaggggtctcaggcccgtggcccctgccacagggcactggaatggacagcaggcgcccccagatgcaggtacctcccttggtcccccgggggcgcaaggctgccccaactcctctgggaaccagtgcccaggggtgggagcccgcagcccgccaccctagtggtgtttcctcctagggttcccggtggtgtgctgtgaagatgtcttcctctcggaccctctgctgccccgggggcagcgtgttcccctgtacctgtccaaggccccccagcaggtgagagctctttcccctccctgtccttaccccagcctccaggcttgcctggcaggaaacacattccattctctctcctcagatgatgggctccctgaaactgctgccgccgccccccatcatgtctgccagggtgctcccccgcccatcaccctcccggggcccctccactgcctggctcagcgggccggagctgatcgctctcactggcctgctgcagatgagccagggggagcctaggcccagctcctccgcggttggccccccagaccatacctctgacccacccagcccctgtggtagccccagcagttctcagggtgctgacctctctctcccacagaccccagacacccattgtccatagccttctcagggcagagtgggctggttgtgttgacaataaaacagtgttggtttgcaaaacaggctccgtgtggctgggagcagagtaagtcatagaggcaggaatggggtctctttctgtctcactgcagatcaccccctgctgtgttaggcggagggcgagggtatccatgacctaaggcatttctgggctgactgggcagagcccctttaatgagtgggtgggtggtctgcatggcagtgcagggctgaatgtataggaagcaggcgggggagtaagtaggggcacctcacttttaggggacactagccccacacctcttgtgctggggctccaggagttcagttctgggctgggtggggtagttgtctggctcagaggagacacaaagaatgcactgcaggtgtgtgggggagggtgccggtccatgtaaatgtcaccactggcagaaaggtggccctgccgcagcctacctgagactctagagattcttgcacgaactctgtagagaaacaggatcagggtttcagctgagaaagcccagaagtgtgtagtctcggtggtttgggcggggataggttctagaattttctcccataaaatagcccaacttcttggagaaccttctactcaagacttaggtgccacagctggaagggacacagggggcaggaccccagcttgttgccctgcaggtcacttgtccgaggtggcatctgggccttaaagcccctcacacggtggggagttaggaggcagggcgggggcgttacaatgccattccctccagtccctccctcaaccacccccccatcagtcagcaggagagagctgcctgggtctcaggtctcctcaccgcatagctatgtgggcggagcgtgtgggccctggggacgtcaccaagtgcccccagagaaaggaccaggtccagatcgacgtagctgaggcagctcgtcaggggctctggcctggcggtgccggttccgaggctctctggggccgataacttggtgcacacttcactccctagccagctctgaggggggcaggagcagcgctgagtccctacccatccccagccagcccccacatcgcgatgggcactcctgggcctgtgtccaggctcctgaacccagacttgtaggaatgggctcatagtcactccctgctcccttggttatgtagcccccacccagccccttagggtagaaggctgctgtccccagcctcgccaaggtcttaagggctgcttgctcgatcccctctcccagacaccctggacggctcaggccaatttaatggtccgcaaaaggtggggtctcagggatggggaaaagggagtttgaagggggttataggagggtccccgagcacctgggccttgttattgggccgggaaaacttttttttttttttttttttttttttttttttttttttttttgagacagagtctagctctgttacctaggagtgcagtggttgatcttggctcactgcaacctccgcttccccggttcaagcgattctcctgcctcagtctcctgagtagctgggattacaggcatgtgccaccacgcccggctaatttttgtatttttagtagagatggggtttcaccatgttggccaggctggtctcgaactcctgacctcaggtgatacgcccgcgttggcctcccaaactaatgggattataggcgtgagccaccgggccgggcctgtgcccggagaactctaaacctgcccctttaatgtttgaactttcggcgacctgggggaggggcgagccacggagaaaccacagccagaagcccccgaggcccccggaagcccggggctcgggcctcaccggcatcaccgcgctcctcgagcagggtgttgtatcacgcctgctgctccgcctcgcctgccgccgccacgcgcaggctgctgtcgcgggtgtagaggacgatcaggtggtgctggcgcgcatctgcgcacttgctggtggtgcacgcacccgccaggctcaggctgcgctggagccgcgctcggcacgcgcgaaacttctgctcgctctcggaacactcgggacgcggcgggtctgcgcgcaggtggccgcagaaccgcacgtcggcagggcaggcccagggcagcggctggctgaggggcacggcggccattcccggctctccccggggccgccgcctgcgggcttcattcaggggcgaaggcaataaagtggctgcagaagaggcagagacggctgggtctcgtgtcttgagcacggggagaggccagcaggggtgggggtgaggtggcgaactcggcgggccgggagcagcggccgggcaggctgccacccgtcttgatgcccagcgtctctcccgggctcccgactggaagtttggggcaaggactctgcgcacagcgagtgtcccggtgactgttgcccctggcctgggctccccactacctccctccctccgccgaccgctccggaacccccaccccacgagactaatcctcacgtcgcccaggaactggagtttgagtagggaagtccaagagaggcggcctcgaccccaagactgagcctttataggggcagagagcgtgggggcgtctctaccgatcagctgactgcggtccggacacgtcgtcggggcaaccgagaaagcctcggtgtgaggccagtgatcggacttgtggcagcggtggtggcgctggcgattagagggctttggaacggggcctccatgcaccctgctggctcctgccacgccccgctcggcctgtaggtgtccttcctgtgtgtacccccttcccatccaggagtggttttgtgcccttccaagtaaccaaaggagccaccgccactgagcactgcgctggattatttctgagctggagattgagtttcttgaaagtttggggtgataggaggtgacttgggctaagtaagctcagggggtagtccctgtgcacagaccatacccgctggaacccagtcaagtggccactgaaggagacctcggaggaagaggccatctctcaggaagaccccttcgggctgccccattgctctgggcccctccttgccaccactgcccaaaaatactaccccgggaccacctgaaggctctgaccatggacgtgtggacttcctcatggaggtaccctttgcttcttgaaaaaattgcgattgggctggggactggacatttttgcactcagttctgatccaaggaccactgaccccctccaaggggatgggggtgaaggtgcaccagacaaaccagcaggtgacacctggtgggaccttagaggaccctgagatatcacccaaggcaagtaaggtgcctaaaggggaaagccgagggtcagggaggagaggccaacatgcagcccccataaagatggcattcagggaggagctccctcagggaaggaacaagatatgacaaagacagaacaagagaacagatgcaaggacccaaacctagcccaagggccagggcagcctgagcagggtgggcagggcttcccgccacacttcctgcttcctggggaaggggccccacgtgagtgggaatatgggaggcaagtgctgtgtgcatggagctggggtcctcacacacctattccaaggtcacattgagagggagatgcagggaaccaaccagcacccagccagcaggcaggtgggacccagggcctgctccaggtgacctctggtaagccaaagccccactggggtgcaggagaggctcgaagcacaggtggtgtggtgtggggcgggggggccgtggggcggggctcggcaactgcccagtgttgggtgttggccacagaggcaatcgctccgtaagtggccaacaaaaccggactgtgttcaaggccatagccccacgtggccaagggccttgatacaggcaccatgtgcaaaggggcagggacacaaaggacatgtgcacacccctccccctcccagtcctgctgctgcctcaaagaggccaccaaagggcccctgtccctgctgcactccgggcccaggagtcttttttactccctgaggcttgaagatacctgaggaagatctctttattccttccccttcccactccccatcaaccaggtccccctgcagcacccttccttgtgaaatcacagctgctatgacagtgaccagctccaaaccaccctgtgtcactgaaccttgggtgctgggtgacacatgggcaggaaaggcaggaagagcagggatctgagggcctgggggctgggcaagcctcaggggtggggtgggtgctgatcaatgccaggtgatcaatgccaggtgattggacccactgagtaccaggacaaacctggagtcacgcaactggcctacatcagttgccttggcaacacactgcccttgaccttacccggaaaagatttatttcagccggtagccctggtaacttgagtggctccccagggacaggaagtggcagaacctcaactctgcctctcctgacctgaggggttcacttttcatccctgtcagggacggggcactgcgttctcagcccctatggaagaatgttatgggtttgggggaatccacggggaggagactaggctgttccagcgtgcccctccttcctcagcctgaggccttgctcctctgtggaaggcaacacagggacagagccacacattcagcccctaccctcagccctgctcccatcccctggcccacaggtctgacccgcaagctccgatgtggagacacttggtggctgactcctgcttcctcacacatggggatggcccacaggtgaccgactggctgaatgctggggccatgctagaggactgctgtctgcagagcatggtccctgcattggccagaagttggtgtgagcccaggtgagtcactctagccccgtggtgtgtgtggtgggtttgaatctgcagctaccaggcaatgttttctccatttcctctcaagccaggcctttctccattctttgctactctccaggagaggcggctcactggagggctggagcctgagctgctggagctgtccccggccaaggagagcagctcctagtgtcagcctgtgcccagggaaccctggggcccgaggctgacctggcgttaacttcttactgctcatccagctctcaccagccagcaggctggagtccttgtgggctggaggggagggagtctgcagggaggacccgggcctggacccagatagtgaggagatgccgggagacagcacagggtgacagaagcaggagaaagcccttcggtttagcctcagttccaaacctcggcgctcctggcattaagggaagggtgatggaagctggggggaaataacagaaaggctcctccccctaatacaccataacagattccagcttccctccctccggctctaagcagaaaggaaagaactggtaagagaattaggtagagggacacagagataatctagggtggcgaagaggggagaaagagaagagatggaacatgcaaaggccaggagcgaagcgggagaccacccaggagacagaaggagggcagaggctgggagaagaacaggaacagacaggatggggtcctgattgttggaaaagacagggaggccaatcccagccttgcaaatagcagcagctagaggttatttccagaaaaatctgcaaagtaaatacactgatcacccaactcccatatctctttgctgctctctgtggaagactcagacaaaccccaagaatgaatggccacggggccagggcaatggtggaaagggaggggcctcacctggccttgggccaaacagcaaggtggcctctgcccagccaggtgaggtgtttgccacccaccccctgaccaggtctgtcttgtcaccacacaaatagcccagacaccacagctggatgttgtcacaacatccccaggtggaaagagcctggggcagagaatgttccagacccaggaggggtctacttccagcaccacattggcaccaacctcctttgcccaccctggccccagtgggcattcccctcacatccaacaaactccagtccccggcagtggtggctcctctcccgccacgcttcttctcattgctaatgcgggactcttgttcagacagggacgggctctgccctgtctctggccaatggcagcattatcactggcccaggcagtccagcccagcagagccaggtcaaggatcagtcatgttgactgacctgcaacccctcaaagtggcctgaagcaaaaccacaggcgccgttttctctttcgttcaaatgcagttcttttccaacattgcctgcaatgagctttggtgcagagatttggggacagggaggcacatggagaaaaaaaaaaaaaaaaaagaccaggcaattgcacaaagcctttccctggaaaacccaggctctggggatggtgggggtcaggacacatggctgccccccctccagccctggagctccggctttgatggtcgaggcacagatggggattcatcccattccccacatacgagagcagtctgggagcgggagatcggctgggtgtgtgtatatatgtatgtatgtgcatatagatagatctatttatatataataggctatattagaaaatcctctctatgtataaatataaaacactggtatccaaacatgacaccaacagctaactaaagtgcttgacaggagccgggcccgggtaagctcgatggtaaaccgctcatcctgggcgctggggaagcaaaacaatgggggaccccttcagcagggggtgctgcaggaggaaagtgtgtgctggccaagctgggccaccaagagcacttgggccacctgggccttctgggtctcaggactgtctggtcactgccccatcaacactgtgcctcatctttcccctaccttccccactgcgctcccgtccatgaggagcacagcgctggcgagctaggcccagggaagagctgttccacaggggactgatcatttgaaaaaaatccctccccctcaaccatcactcctccaggtcaggccctgcccgcactcctcctgggcttcctgcctgggtgggggtgggacgagggaggggagagaggctttgtggaatctgagggcagccacctttcacctgtaggccccaagcaaagcattagcacctccaccatccccaaggcccatagaaatgcccacaggcaagtggtcaccagagctctagggagcagaggggccccagaaggcagggaagaggccccccaaaaacacagtgctacaagaaggggttggtggttggaggtttggaggcgaatgggcttgatgagggtccagtctggaaagaaagaacaatacattttccagttaggggagaggaactggaagcttagaagaaaggcagccaggagtcctttctcctgaaaaatcgctatgctgagggcagtgggaaagtgagggagaaaaggccaggcacggtagctcatgcctgtaatcccagccctttggcaggccaaggtgggctgatcacctgaggtcaggagttcaagaccagcctggccaacacgggaaaaccctatctctactaaaaatacaaaaattagccatgtgcggtggtgcacacctgtagtccctgctacttgggaggctgaggcaggagaattgcttgaactcaggaggtagaggttgcggtgagctgagattgggcctgggagacagagtgaggctgtctcaaaaaaaaaaaaaaaaggaaagtgagggagaagggagccaagggcagggctggaacagcatgggagatgccagtgcccagaagagctgaggcccaagctcagccctggcttggacaacgcagaccttcacgaggaaggggcacaggggccacctcacatcagcctcttctggaaggattgtcccagagggaaagcccacgagccctaccacagcacccctgctggcacactcaccatgaaggggttggtggagatcccagctggctggctcagtggcctctgccccaacttggctgatcctaagtccccgaaggaagagcctagggggcgagagcagtcactcagctgacaccagcctgccttcctgcaggcggacagcaaggggggccctcctaaactgggggagtaagggaacagagcagtggaagtacccgggcgggtctggtgcttccctggtcccccctgctggtcagaaagggcactgcatgggctctgatgaggtcggaggaacaactaactgatctctatgcagagatgggatggggtgaaagggtttgtccatctacagctcttaccattctgctgctgaacaagcggggtctgcggggggaacagcggtgctgggaaggagctggcaaaggccccagtgggtggcactgcctgggggaagccaggcccagcactgctcatcccaaagccgggccctatggagtgaaagacgggaggctcaggtgaacttctggaaggtgggctggagaactgtttttcctaagtccctccaagatgggaaaatgggatatagttttttcctgacatgaggaacgagggacccagccatggaactcttctgcttctcacaccaccaaacaaccctgccctctccctgcccgggggtacgtggcagggagggcatggtagttccaggcacgggcgcggtgcaggactgggctagcctcccactaaactgcaaaaacagcacaaacttctaacgctgtctgtgcttcagttctcatctctaaaatggggacagtccgtctcatagggctactgtgaagatcaaatcagggccacgaagccctcagcactgggcccaccacacagctcttctgtgtttgctcttattcctctctccccagcctcaaggcttcagccagcatgagtctgaggggagagcagcagaggctggggagggccagggtgagagaagacaacaggcctggagttgatggaagcagggaacagcgtgagtgtttcaggtggcttaagcttcgggacacagaagggactggggctgggtgcccaaagggacactgctgagggctggagacaggagaatcgctgccactgtcagtcaactctaaaacagtcttcagtgcggtctccggtaagtagccacctgtgtgcttctaattctaaaatctggctctgtgacctgggtgctaggtggcctggcaccgtgtgggcaggggaagaaccaggctgtctgcttctcctgacagcgtgagacaaagggttaagggagaggctgcagggtaatgtgtgccttggaagtctcagatggtcaggacaagggaccatgctggaggcttacctggcgccaagccattgggctggaacgggttggtggaaggcagcggggactgggcggcgggagctgtgaaagggttagtgaaggctgcccaggtggaatggggagcggcaggaaagagagagatggttactttttttctcacgtgcttcatcctgtgatgcctgagcattcctctcaatctctccccttcccaccctgtccagagtccttagactcctcctggcctcaggtcccctcccctgggtctccacaggcaggactcacctccaaaggccagccctgtgctgctgccgccgccgccgcccatcgtgacagactggagcggggggacctggccagccatcccgaagaggctacaacacggggagagagaagtcatacacagctgccagggccaatcaaacctgagcaaggggccaggagatgccaaccctgctctccagggtgagtaagggagaggaggggaggggagaactgccaggagatgccgatggggctgggaggaacatggccaggcttcgggcggctctcctgccctacagcagactgcccactgtctgtacctacctgctaggaacacctgcagcgggcaccccgggtcccaggaagctgcccacgtctgcgaggctgtttggctgactggcgggtgccaggggagtggcaccaaatggagtcccctggctgctccctgggcagttgtggaaaatacaacagggagagctgaggtaagacagggcgggaggggcaggagagcagatggaggtggtggtggtgatggattggagtcatggcatgacaggtgcctgctgggttctctgaggcagcccattttctcagggaccacccagttcaggaggtcttgtctcccaccaagagttctgggcaaggtgacagcccagcccttctccgtgtcccctgcgctcaaagctgcgctgcggagaggaaagcagctcgtccccaggtcaggctgtcctcctcctgctccagtttggctttcatgtcccacttttccctcaagagatggaaaagcctgtcctttcctcaagcccgcatttccatttatcagaacatggcagggaggggcaggcagaggcaccatggaggacagcaagtcccatcacactcaggaggctcctggcctgtgcagcctccagctatcagcactgtcccttccccatttagccgctgcttctcgggaggccgccccagtgccctgagcctggaggcactgttcatggggccagccccgctgcggggttctcctgccctgcctcttcttcagagccaaaaagaaaaagcacagagggcaaggcccacatggaaatcttacaaaacagctgagggccaagagtcctggaaattccaagcaatcttgtctcaggggaagaggctgagtccctgtcattttaagaaagcctcctgtctgcacatcaaagtctcgtctctatcttgggaccctatcgaccacactgggctgctgtgaatgtaaaaggagggtccagatggaaagaggctttattgacaggacgcggcagttcatgcctgtaatcccaatactttcagaggccaaggcgagcagattacttgaggtcaggagttcgagaccacccttgccaacatggtgaaaccctgtctctactaaaaatacaaaaattagccaggcatggtggcaggtgcttgtaatcccagctacttcggaggctgaagcaggagaatcacttgaacccgggaagtggaggttgcagtgagctaggatcacaccattgcactccagcctgggcaataagagcgaaactccgtctcaaaaaaaaaaaaaaaagggagatctggccaggtgtggtggctcatgcctgtaatcctagcactttgggaggccgaggagggcggatcacgaggtcaggagatcaagaccaacctggctgacacggtgaaaccccgtctctactaaaaatacaaaaaaaaaaaaaattagccaggcatggtggcgggtgcctgtagttccaactactcaggaggctgaggcaggagaatggcgtgaacccgggaggtggagtttgcagtgagccgagatcatatcactgcactccagcctgggcgacagagtgagactccgtctcaaaaaaaaaaaaaaaaaaaaagggagatcttccacatgccaggcactatgcataaataacagcgacccgggccctaaatgggtgaagctgagaatctagtagggaagacgaagtgcccagtgcctacctgctgccaggtcctgaagccccgctccctctcactgagtgtcggcacttgtaagacagtgctctcctttgccacctccttcctaaatgcctgggctttctagatgaatgagtgctggctgccagcttcctcctgggcaaggctacaatgccactgtgcttacttggtcatcaatcctttctaatccacaggatgcaagacaggctagaaagccacctgggtggggccaggcccagtggctcacacctgtaatcccagcactttgggaggctgaggcaagcagatcgcttgaggtcaggagtttaagacaagcctggccaacatggcaaaaccctgtctctactaaaagcacaaaaataagctgggcgtggtggtgcatacctgtaatcccaactacacgggaggctgaggcaccagaatcacttgaacctggaagaggaagattgcagtgagccaagattgagccactgcactccagcctgggcgacagggcaagactgtttccaaaaaaaaaaaaaagccagcagcatggtgttggatcctctactgactctcccagccgaggcctttccctgcctgcctgcctccaagtacagtatgtggaatttccacgcaagcacggctccctttcctcggatggctgactctttgtgctgctgtggtcctgcatgttccaggagcttcacccagtgaggaccaggctgggagagaggctgcaggccatgctgtgcctccctgtggacactagggggcagaaccatccctagcccaggcagggttggccctttgcacagagggtgcattctcacaaaggaggcggtggcccaagaaacacctgcactcctgtttgcttttcatttcatgcactttttttttttttttttgagacagggtctcattccaattgcccaggctggagtgcagtggcatgatctcagctcactgcagcctcgaccttcagggctcagctgattctcccaccttagcctcctgagtagctgggactacaggcacgcaccactatggccagctaattatttgtatttttggtagaaatgaagttttgccatgttgcccaggctggtctcaaactcctgagctcaggtgatctgcccacctcagcctccccaagtgatgggattacaggcatgagccaccacacccggccttcatgcgcttcttataccacgcagctagatttctaccctgccttatcacagtttgagggagagaagcagttttgaaaacccctctctccatactccccctcagaaatataaaaataaaagcaggtttgtcagaagagacacccacctctcaaaatctcctctctcagttcacacccaacagctaagtcacactcacgggaacacctgcatgatcatggtgtagtgggaagcggttctgccaattatcagcattagatctgggccaagttgagccagtttcctgcaaagggaagctctttccttcctcatggacataatgcatgaaggcacccaacaatggcaggatcctcggaaatgttccttggctctgggtttggctgtagattgactgtttttgttttgtttgagacagagtcttgctctgtcacccagagtgcagtggcgcaatctcagctcactgctacctcagcctcccgggttcaagcaatcttcctgcctcagcctccccagtagctgggactacagtcacgcaccaccatgcctggctaatttttgtattttggtagagaggggtttcaccatgtaggccaggctggtttcaaacttctgacctcaaatgatgcaccccactcagcctcccaaagtgccgggattacaggtatgagccactgcgcccagtgactgactgctttttgagacagccagatagtggacaaaaggtttaatgcttgggacatccgtggagctgagcccttccttctctctgagtctgccccaaaaactgtctttacggtgaaaccctgtctctactaaaaatacaaaaaattagccaggtgtggtggcgggtgcctgtggccccagctactcaggaggctgaggcaggagaatagcgtgaacccgagaggcggagtttgcagtgagccgagattgtgccactacaccccagcctgggtgacagagtgagactccgtctaaaaaaaaaaaaaaacaaaaacaaaaacaaaaaaaactctgtctttagagcaatcaattgtactgggaaggcatttcaaaagggacgcatctataacaactttatataggctgttccctcgagtgctcccattcctaggagcacacctttcttactaaaaccgaatattcttgcaccaaggtgcaattctgcaaactgcgcacaagaaggtcatttttcccccgacatataatcccagaactttgggaggccaaggcaggcggatcacttgaggtcaggagattgagaccggcctagccaacatggtgaaaccccgtctctactaaaaatacaaaaattagccgggcatggtggcatgcgcctgtaatcctgctactcaggaggctgaggcaggagaatcgcttgaatgagatcacgccattgcactccagcctgggcagcagagtaagactctgtctcaaaaaacacacaaacaacaaaacaacaacaaaaaccaaaatgtgacctatgtgatttgtctttgttagaatttatggagattttgtttcctatagtttatttcttacttgtctattagtcatgtgggaaagcatattatagtctcctagtcctttggcttattaaattctgattgtgtctaatagtttttgcttcgtgaatctcatgggtatgcggtcagttattttaagtacatgattttgagaacctctttgtgaattttaacttttttttttttttttgagacaagagtcttactctgtcactcaggctggagtgcagtggcaggatctcggctcgctgcagcctctgtctcccaggttcaagtgattctcctgcctcagtcccctgagtagctgggattacaggtgcctgccaccatgcccagctaatttttgtattttgagtagagacggtgtttcaccatgttggccaggcttatgtcaaactcctgacctcaggtgatctgcccacctgggcctcccaaagtgctggcatcacagatgtgagccaccacgcccagccaacttttatcaatataaaatgtttcttcttatagccctccaaaacgataaaataaaaacaaaagcagctaatcagctcacagtggcacagtgagaaggctgtgggcagagcatgagtcaagaagtctgggctctggtctcagcttggtcgctctgtggcctgcatgactagggaaattgcttaactgccttatctgtcaaatggccaaattttaagggttccttccagccctcaaaactctatgatcagaggcacttgggtaggctctggggtggggataataacttaccaaagctgtaactttcagttagcatccgactggctggcagtgagggtggagaagagaagggtgggtagaggaagggagaaagaaagagtgtatgtcactggcttttccccagacatctgagcctgacggcgagcactgcagctgccctcccatgtgtccaggatgtccaatggcagaaggcacccaaaggctatgaagactcaatgtgtagagcttaggaaggagcagaatgctttaagaaggcctgaagagtctcttgcaatggctaaataacatagtttatttggttttgtttgttcgttcgtttgttttgagatggggtctcactctgtcacccagactggagtgcaatggcacaataatcactcactacagcctcaaactcctgggctcaagcgatcctcccacctcggcctcccaaagtgttaggattgcaggcgtgagccattgtggctggcagcaacatagagtttacaggcctttggtcttagagggatggatgaggacttctggagactaccttgacccttgaccctttgggacagcgtactatgcagacaagagcaccttagagaaaaagtcacgtccattttcaatttttctaggactcaggtcttccatacttcctagtgaaaagtttcctagtgtataacccacacagctcctgctgcaatcttagtcattttcctttcatgaaaaagcagaacagtagagccccctctccctgacaagaatgtgtcagacacgctcatcctctcctggagctgcttctctttgtgctttgctgctttgagcagttctttaggatagtgaggatatgaatggtgatttatagacatgaacaaatggacacggttggaagagaaaggaagccagtggggcagagtttacctgcaggagttggctgggcctggaacgaggcttgaccagctggagggaggcttccaaacacagaagagctggggccactgctaaaggcatcaaagttggcaaagcctccttgggaaggtgtctggcctgtaggtggaagaaacataaaggttatatagaaaattgtcgggtgtggtagctcacgcctgtaattccagcactttgggaggccgaggtgggcagatcacttgaggtcagaagttcaagaccagcctggtcaacatggtgaaatctgtctctactaaaaatataaaaattagctgggccttggtggtacatgcctgtaatcccagctaccttggaggctgaggcatgagaattgcttaaacctgggaggtggagctagcagtagccaaactcatccactctactctagcctgggtgacagaatgagactctgactcaaaaaaaaaaaaaaaaaaaaaaaaaaacccgctctcacacaacaaaaaaaaaaaaaaaaatgtatatgcctatccatgtaatatagctactaattctaaaggccaaaggccactcttatgggacatctgcctttccacagggttctcttcagaaggaaatgggtggggcctggggccaagagccatacccacacaggggaacaggggcacccagggcctccaggttcactccctgccctcttctgtccttactccatgaggcattaacatttttgtcagggcctagtttggagcatgaaaattttttttcatggaggaaggagcttgaattttttttttttttttttttttttttgagacggagtctcactctgtcacctaggctggagtccagtgatgcaattgtgattcactgcaacctccacctcctaggttcaagcaattctcctgccttagcctcccaagtagctgggactacaggcacatgccaccacacttggctaattttttttttctttttagtagagatgaggtttcaccatgttggccagactggtcttgaactcctgacctcaggtgatctgcccacctcagcctctcaaatgctaggattacaggtgtgagccactgtgtctggcttgaaaatttttaaaaagggaaaacagattctatgctgctgaaccctctactggctattgctgatttgggggaagaataatctttggtgaactggaacacatgataatccccctcctcccattttaacagagacagaaaataataaaaaaggctatttccagtgttctaaaaggaagtgctaggagccctcaactataatgttttaggatcaaacccccaaacataatcctggctgtacttatttgaccccagtcctcccagcctcactgcttcagagtgaccctcacatttgtttgcatgagaagatctagagccatggttacctccagggactggatctctcatgttgtaagcatatacgctgtagggagggtcccatcccaaaacccacttacccccaaaggcagggaatgcagcaaaagctggtgccatctggggtgcagcaaaggggtctccaccgatgtcagccagcaggtcagtactggcttttttgacagaggagtggggaggtggctgagtgctccgggcatgggatgtccgagcgtgagactgactgacgggcttggaggagaaggaatgcatacagcccttagaatcccagacatgccccaggcctctctggctctcgagttgcctcagataggcaggtagagagagaagacagtgagtaactgccctgaacatagaagattcctgggcaggagctgctttagcccttctcagagctcatatcatcctcatcttctcagtacacgtgctccaagaaccacacattttacagcacatgagccaaggtaaccctgagatatacaggaatactgcccaatactgcccccagggctgttactcctcaaccttcccaggtattggacaccatattccagccccttctgtgtttctttgatggaatgctcaggtttggagctgatattctgactttcctaaataccacttcgtgttaggttctgacttccaaaagatatgaggtccagaagtgacaaatacaagatacaggttaacagcagagccgagacccaactcacagctcctgcactgttgtctgctaagtccggggaatctgattcaggaaactgacactcctgtctcccaaatctcaaaagaaacatgacgagcagatctgagagttacctggctcgaggtggaggcagcaactgagagagacggtgcaggatcacccagaagtgtccgaaggggcttcccttctgggatggagccctgcacaggggtggaggcactgcctttggtataagtgggccccttgacttggtctggggggacatacctttgagaaagaatagttaggctgtaaagagagggataaaactttggaccacgctcagctgagatgtttgggaagacacaggagtcaaaatctatgctcatttttctctactgattcccttttttgaagggaaccgagcaacttagcaaagttctgcctatcttgagcatccccttgaacatcttttggtttttttgagacagggtctcgctgttgcccagggtggagtgcagtggggcaatgttggctcaacacagccttaactacctaggctcaagtgattctcctgcctcagcctcccaagtagctgggaccacaaacaagtacatgctaccatgcctggctaattttttaattatttgtagagaagaggtctcactatgttgcccagggtggtctcaacctcttggcctcaggtgatcctcctgccttagcctccaaagttctgggattacaggcatgagccaccacacctggcaaaggtccccctcttttatttcctgggtgtttcttcagactccttcttctcagctccatagaaaagctgcctgccgcctcatcctctaggtgctcacaatccacacttccatcctgccagctcctgccgggacaattcccttccactacagtgtatgtggcccctactctgtaagtgtcagcttaatcctgaggacatccctaggagggactccacagtgtggtcttatccacatcaatctctttgttctctgcattctcttctctacctcacagttacctcccaacatgtacacaccccagagatcccacaagaagtgataccaggggagaggaaaggtaagggagaatggagatgctgtttccttcatcaggaagacaaaatatagttgtcccatggtatcctcagggaactggttccaggatccccctgacaattccataatcagaggacgggacactcaagtctcttatataatatggtgaagtatttgcatcaaatatgtatatcctccaatatactttaaatcatctctaggttacttataatacctaatacaatgtaaatgccatgcaatagttgctatattgtattgctttttatttgtattattattttttttttgagacggagtttcactctgtcacccaggctagagtacagtggcacgatctcagctgactgcaaccactgcctcccgggttcaagcagttctctgcctcagcctcctgagtagctcggattacaggtgcccatgaccatgcctggctaattttttgtatttttagtagagacggggtttcaccatcttggccaggctagtcttgaactagtcctgaccctgtgatccacccgcctcggtctcccaaagtgctgggattacaggcatgagccaccacacctggccttatttgtattattttttattgttggattgttattttttgtgttccccacttttttttttttttttttttttttttgagacagtctctctctctttgcccaggctggagtacagtggcatgatctcagctcactgcaacctccgcctcctgggttcaagcaattttcctgcctcagcctccagagtagctgggattacaagtgtccacccccacacccagctaattttttttgtatttttagtagggacggggtttcaccatgttggccaggctagtctcgaactcctgacctcaagtggtctgcccacctcagcctcccaaagtgctgggattataggcgtgagccaccttgcctggcctattttcccaaatatttttgatgtgaggttgattggatcctggttggcggaatctacagatacagagggctggactgtacatataaatcatgaaacacgccggcacggtggctcacgcctgtatcccagcactttgtgaggccaaggcaggcagatcatttgagcccaggagtttcagacccgcctgggcaacgtggtgaaacctcatttctacaaaaaatataaaaattaaggccgggcgcagtggctcacgcctgtaatcccagcactttgggagccaaggtgggcggatcacgaggtcaggagatcgagaccatcctggctaacacggtgaaactctgtctctactaaaaatacaaaaaattagctgggtgtggtggcgggcgcctgtagtcccacctactcgggaggctgagacaggagaatggcgtgaacctgggaggtggaacttggagtgagccgagatcacgccactgcactcccgcctgggtgacagagcgagactctgtctcaaaaaaaaaaaaaaaaagaaatatatatatatatatatatatatatatatatatatatatatatatataaattagccaggcatggtggcacacacctgtagtcccagttactggggaggatgaggtaggaggatcacctgagctccaagaagctgagactgcagtaagctgtgactgtggcactgcactctagcctgggcaacagagtgagaccttgtctcaaaaaaaaaaaaaaatcataaaatgatgggttaaaggaataaaactataggatgtgtgcttccagccatctctccccatacataagatcagctgagctataaaaatgaacacccacaggcctacctcccgactccaatcagtctactatctctccaaaagagaggacataaaatctgcagggttagtgactgagaacaagttgtcctttcatgtagatttattttagccgtaactgaatgtgagtggaacagaatcgacccaagtctagtcttttgtgagaaggccaaattcaactctagaaactggactgtcagatgaagaatgtcttgaacacgtttccatagcaacctctttcctactccttaccatctcttcttctcatatttttcctggagaaactccttcactttctgaggatccctggaatctggtactaaagatgtccgagcatcaaacagacccaaccaaatcttccggcaaacctaaaagaatgaaggtgtcagaggagtgggagcagaaagcaggaaatacaaaaaataccacttccttttttttttttttttttttttttgagacggagtctcgctctgtcgccgggctggagtgcagtggcacgatctcagctcactgcaacctccacctccggggttcaagcaattctcctgcctcagtctcccaagtagctgagactataggcatgcgccaccacgcccagctaatttttgtacttttaatagagatgaggtttcaccatgttggccaggatggcctcgatctcttgacctcgttatctgcccacctcagctacccaaactgctgggattacaggcatgagccaccgcgcccagccaccacttcctatttattcatcagtaaatacatattggctggatgtggtggctcacacctgtaatctcagcactttgaaaggccgaggtgggtggatcacttgagtacgggagttcaagagcagtctgggcaacacagcgaaacccactctctaaaaaaatacaaaaattagtggagcatggtggcatgtgcctatagttcgagctacttgggaggctgaggtgggaggatcgtttgagcccaggaggttgaggttgcagtgagccaagattgcaccattaagctccagcctgggtgacagagcaagcaagagcttgtctctgataaataaataaataaataaataaataaacaaatattgagcatggacacagtgctaggatctgggtctacctacaaaccagatatgattcctgtcctcgcagagtttataatccaatggggcagtcatatcttagataaataaaactaaagttataatcacattttgtgacatgtattgaaaaaggaaaatagagggccatgagaattatggagaattaaatttcactaagggtagggtccaggacaattttcagagctctggcttccaggacacctccagaggcccttgaggataccctctaagtaaaccaatcacccataagctggggtactgctaacgccaaggatagcaacttctgatcggcagatttagctagggaaggggtttaagtcactttccagtacaagatatgcacttaaatccaggttgtcgaggctgaaggcagcagagctggctccaggaaagcttcctcagaggggctggcccagtcaactctgaatgctcacgctctggagctctggtcattctacccctccattgctcaggtgccacatcctacaacgatattgctacttcccctgactcctgaaaaggaggcctagacaaaccatgatttgtataacagaataaagattctgtaaatatacctaaggaaagaaatcatacatatgaaaaaattaagagaaactcaaccaaaaataaaaccgtaaggtttccctacaatcttgaggcaaagccccacctgcagataggtgaccttctcaccactccatcggtggcagctcacctcatttccacgggattgcaggaatactacttcaggctcagtgaaagttgtcatggagattgacttgacacgatgaggggggttcagccctctcctatgggagagaaacaggaagaaagagaagtataatgcagttagcatggcaggctgttcatgggaggaggaggaggagggagaaagggtgaaagaatagcatataaactaagctcagatagaacccccccatctgaagctacttcctaattccaggaaagaagggaaatatttggaatattttggagatattagaagtctccaaagagaggccaggcacagtgactcacacctgtaatcccagcactttagaaggccgaggcaggcagctcacttgaggccaggagttcgagaccagcctggccaatatggtgaaaacctgtctctactaaaaatacaaaaattagccgggcatggtagtgcacgcctgtaatctcagctactcaggaggctaaggcacaagtatcgcttgaacctgggaggcagaggctacagtgagccaaaatcaccccactgcactccatcctgggcaacagcaagactctgtccccactcccaccacccccctccaacccccaaaaaaaagaatctccaaagagacagggaagagagagtcaggaacatcctgtgatcccagtagttctggagaggaaaggtagagcctgcccatccagaagcctcctctagcctggctcagatcccagtagtttcagtgttcagcctgtaggccgaggggggtacttctgggaactcagacacgtgaccacttcccacttcctactttatcattgttttagacctacagcccatcccaaggtccagggcccacaaaaacacaaatccttcaagcatgagggaaggcaaaaatgaaggcccactactattcttgataacactaacaaaaacaggatatggtgacaaaaaacagtctctagccagctggtctccttgtgtctacaaagaaggtggagtggtggtgggatggacaggtcctctctttcagaagcctctctagaaaagaatatttgatttcttatttctgtatctctcaataaagcaggaagaagtcaagttcaaccatgagctataaggctggcatgggcgaggaatatgtaacctgtggcaatgcttttgtgcctcctctgtatgttctgttaactccctgggaatccagttctgcctccaggaaccctgtggagattataagagaagagaaggcttccttgtccccactcaactggtctcaggagtgttctaatacaggaaacttggggctaagccaggcagggcttcataggttcccctgtccttgcaccttaagtattattctggtctaggtctactaccctcactggattaaacaaaactgcccaaaccaaaacaagctagatcctgggacaggagggaagcagtctcagcagatgaggcctcttcagacttttactctcatggaaaaaaaaaaaatggccaaatcgagttgctcaaataaaaatccagaatagggtcctggctgacatcctcaggaagcgcaaagggggaaaaagagacaaaaatatttaacagatgaaaatcctgaaaattcacaaagaaggtggggaaaacatacattcacactaacaggtgcacacacagaatccaagtgctcctgccaagtctgggagaacagcagcgaggtgtaagcaaaagcagcggtggtgggggtggggggcagggagtgggcggactcagtacagagtgaacagtaagggcggccaccctgcggatgataaattactcattatgggattttaacaaaggacaggacactggaggctccagttgacgctgtttgcagcaattctgctgctagacctttaggtataaagggtctcaaaaatgctcttataaaagacaagcaatatcaaagaggactgatgcccccaaggaaagataagctcagggaaaaacgaaagcaaggctttgttactacatatcaaacaatagctcttaagcttggtctgccccgaagactgtcttccgatc

SEQ ID NO: 1358 - protein, 2379 aa, Homo sapiens
MLLDPKNARPGQKAVLLSPVSLSSGCLSFSFHYILRGQSPGAALHIYASVLGSIRKHTLFSGQPGPNWQAVSVNYTAVGRIQFAVVGVFGKTPEPAVAVDATSIAPCGEGFPQCDFEDNAHPFCDWVQTSGDGGHWALGHKNGPVHGMGPAGGFPNADVLTQCDFEDDAKPLCDWSQVSADDEDWVRASGPSPTGSTGAPGGYPNGEGSYLHMESNSFHRGGVARLLSPDLWEQGPLCVHFAHHMFGLSWGAQLRLLLLSGEEGRRPDVLWKHWNTQRPSWMLTTVTVPAGFTLPTRLMFEGTRGSTAYLDIALDALSIRRGSCNRGGHYIYLEADEFSHAGQSVRLVSRPFCAPGDICVEFAYHMYGLGEGTMLELLLGSPAGSPPIPLWKRVGSQRPYWQNTSVTVPSGHQQPMQLIFKGIQGSNTASVVAMGFILINPGTCPVKVLPELPPVSPVSSTGPSETTGLTENPTISTKKPTVSIEKPSVTTEKPTVPKEKPTIPTEKPTISTEKPTIPSEKPNMPSEKPTIPSEKPTILTEKPTIPSEKPTIPSEKPTISTEKPTVPTEEPTTPTEETTTYMEEPVIPTEKPSIPTEKPSIPTEKPTISMEETIISTEKPTICPEKPTIPTEKPTIPTEKSTISPEKPTTPTEKPTIPTEKPTISTEKPTIPTEKPTISPEKLTIPTEKLTIPTEKPTIPTEKPTISTEEPTTPTEETTISTEKPSIPMEKPTLPTEETTTSVEETTISTEKLTIPMEKPTISTEKPTIPTEKPTISPEKLTIPTEKLTIPTEKPTIPIEETTISTEKLTIPTEKPTISPEKPTISTEKPTIPTEKPTIPTEETTISTEKLTIPTEKPTISPEKLTIPTEKPTISTEKPTIPTEKLTIPTEKPTIPTEKPTIPTEKLTALRPPHPSPTATGLAALVMSPHAPSTPMTSVILGTTTTSRSSTGMSCPPNARYESCACPASCKSPRPSCGPLCREGCVCNPGFLFSDNHCIQASSCNCCYNNDYYEPGAKWFTPNCTEHCRCWPGSRVECQISQCGTHTVCQLKNGQYGCHPYAGTATCLVYGDPHYVTFDGRHFGFMGKCTYILAQPCGNSTDPFFRVTAKNEEQGQEGVSCLSKVYVTLPESTVTLLKGRRTLVGGQQVTLPAIPSKGVFLGASGRFVELQTEFGLRVRWDGDQQLYVTVSSTYSGKLCGLCGNYDGNSDNDHLKLDGSPAGDKEELGNSWQTDQDEDQECQKYQVVNSPSCDSSLQSSMSGPGFCGRLVDTHGPFETCLLHVKAASFFDSCMLDMCGFQGLQHLLCTHMSTMTTTCQDAGHAVKPWREPHFCRELSMACPPNSKYSLCAKPCPDTCHSGFSGMFCSDRCVEACECNPGFVLSGLECIPRSQCGCLHPAGSYFKVGERWYKPGCKELCVCESNNRIRCQPWRCRAQEFCGQQDGIYGCHAQGAATCTASGDPHYLTFDGALHHFMGTCTYVLTRPCWSRSQDSYFVVSATNENRGGILEVSYIKAVHVTVFDLSISLLRGCKVMLNGHRVALPVWLAQGRVTIRLSSNLVLLYTNFGLQVRYDGSHLVELTVPSSYGGQLCGLCGEFPGHLRGKAGTMSTRVTGNYNNNSLDDNLRPDRKLAGDSMQLGAAWKLPESSEPGCFLVGGKPSSCQENSMADAWNKNCAILINPQGPFSQCHQVVPPQSSFASCVHGQCGTKGDTTALCRSLQAYASLCAQAGQAPAWRNRTFCRECPPGSSYSPCSSPCPDTCSSINNPRDCPKALPCAESCECQKGHILSGTSCVPLGQCGCTDPAGSYHPVGERWYTENTCTRLCTCSVHNNITCFQSTCKPNQICWALDGLLHCRASGVGVCQLPGESHYVSFDGSNHSIPDACTLVLVKVCHPAMALPLFKISAKHEKEEGGTEAFRLHEVYIDMYDAQVTLQKGHRVLINSKQVTLPAISQIPGVSVKSSSIYTIVNIKIGVQVKFDGNHLLEIEIPTTYYGKVCGMCGNFNDEEEDELMMPSDEKLANSDSEFVNSWKDKDIDPSCQSLPVDEQQIPAEQQENPSGNCRAADLRRAREKCEAALRAPVWAQCASRIDLTPFLVDCANTLCEFGGLYQALCQALQAFGATCQSQGLKPPLWRNSSFCHECALLSPQTPPKPPFPLCFPESSLTLLPVPLECPAYSSYTNCLPSCSPSCWDLDGRCEGAKVPSACAEGCICQPGYVLSEDKCVPRSQCGCKDAHGGSIPLGKSWVSSGCTEKCVCTGGAIQCGDFRCPSGSHCQLTSDNSNSNCVSDKSEQCSVYGDPRYLTFDGFSYRLQGRMTYVLIKTVDVLPEGVEPLLVEGRNKMDPPRSSIFLQEVITTVYGYKVQLQAGLELVVRAGPGP

SEQ ID NO: 1359 - DNA, 232 bp, Homo sapiens
  misc_feature (13)..(13): n is a, c, g, or t
  misc_feature (40)..(40): n is a, c, g, or t
  misc_feature (60)..(60): n is a, c, g, or t
  misc_feature (82)..(82): n is a, c, g, or t
  misc_feature (93)..(93): n is a, c, g, or t
  misc_feature (201)..(201): n is a, c, g, or t
cctcgtgcaaggngaatcccgggagtggtccggccgcctnggtgctgatcccgccaccgnccacgggccgctagcagcgcangggtcactatnagcgggggcgtctacggcggagatgaggtgggggcgctggtctttaacattggctccttctcagtccgcgctgggtacgctggggaggactgtcccaaggctgacttncccaccacagtggggcttctggccgcggagg

SEQ ID NO: 1360 - DNA, 340 bp, Homo sapiens
  misc_feature (13)..(13): n is a, c, g, or t
  misc_feature (51)..(51): n is a, c, g, or t
  misc_feature (77)..(77): n is a, c, g, or t
  misc_feature (259)..(259): n is a, c, g, or t
  misc_feature (279)..(279): n is a, c, g, or t
tggggtaggggcngcgcgagtcgggggagggggctgtgcgccgggctggcnccgaccccagccaccgccctgcgccnagcgcagtcccccgactcgccgcccggagaccccgaggctccaacgagttcagaaatgtccagaaatgacaaagaaccgttttttgtgaagtttttaaagtcttcagacaattccaaatgtttttttaaaagctctcgagtccataaaagaattccaatcagaagattatcttcagattatnacagaagaagaggcattgangataaaggagaatgataggatcactttatatctggtgaccctttttagtggcgttgtcttt

SEQ ID NO: 1361 - DNA, 3306 bp, Homo sapiens
gcagcgcctccgcacctggtaggtgctcagttaacgtgggagaaatgaagagtgaaggtgccgcacatcttggatattctccaggacatggtgggcgggtgctatgagttttcctgttctgcagaatgaagaggctgcggctcaggaatatgaacaacccggccaaagccacaaaacaaggaagcaccggcagggccgggattcaggtctgggtttgtctgactccagagcccagtgccttgttctccatggctgctgtgtgctacctctttgatgaacatctagatttgtgtccttctctgaggggtccccagatttcagcagttcgaggccagctcagcttttcctttcaccaatggcctagaagaggccaacaaggtagctttgaggctgccccaaagtggagagtggcagtgaaacattggacgccagagtgagggccacagcgcagtggcctatatgggtttagagcgtgaggcctccacgtggacttgaatgcagaccccaggcctgcccgtgttgaccttgggcaagtgacttaacctctctgagcctccattgccccacctgtaaaatgaggggtttatagtacctgcttcataaagttgctatggagatgacacgagaagccataggaccccggtgccatttggaggacccgtcgtggggggcacttttcccaggccaggcacccccttcatcccggagcccctcagtggcttggaactcctccgtctcagacccagcttcaacagagtggcccagggctgggtccgtaacctcccagagtccgaggagctgtagccctagcctgaatcttcagttccccagtctcgggggcctggtaacatccggagccaagacttgtggacagcacttcacagttgaagaagggccttcacacacaaaacctgattgcaaatggcttcagaggtcaccaagttcagtcgtcccaaaacatgggtgtgtttcaaaattacctggggatgttgttccaaatccagacaactggactgtcccagacttgcagcatcagagtctcctgagtcgaggaatctgtattattaatagcaaccagggccgggtgtcgtggctcacgcctgtcatcccagcactttgggaggccgaggcaggaggatcacctgaggtcaggagtttgagaccagtctggccaaaatagtggaaccccgtcgctactaaaaatacaaaaatgagtcggacatggtggtgcatgcctgtaatcccagctacttgggaggctgagacaggagaatcacttgaactacgaggcagaggttgcagtgagccgagattgcgccactgcaccccagcctggacaacagagtgagactccttctcaaaagtaaataaataaatagcaaccagtactccaggtgattccagcataacttatccatggtttgtgtcattaggagtccacatccacacctctgctctttcctgttcctgtagtgtacactcccccggtgacagggtgctcactggcaccccatcttcctgtgaataactcaaataattagaaaatgttccttttactgagatgcagttggtcttcatctattcatgctctaaacagttcctaagcgctgactgtgcgctagacactgccaggcccgggcctcgaggaggaaaagacagtagggaagacattatagagcatgaagtcaccataattttccctaaagcatgcttattgacaattgaggaacaaagtgttgtggagcagaagaaggagtccctcaccctaggtgtgagatgggattctggaagcttcctgaaggatttgagtgggaccttgtgggaggcgtgagagtccatgaagggggtgtgagggggagggtatttctggaaagtggaccagcatgtgcaaaaatatggaactgagcacgggtgcagggtgttctgcagaagggagaaggctgtgctagaggagccagtgagggccagcatggggtgggcttcactaaggaaatggggaaggttttagtgatgggtcttgctgggtgctgtgtggggcgcatattggagaagggtaatgccagaagccaggaagcctgcaagggatgaggccatgggaatggagagaaggggccacccactgggcacctaacaggacaggtgcaaagtggggtgcttattaagattccttctttccactccattttgagcaggctgcttaaagtggtggtgatgatgatgatgatgatggcagctttatatcgagtgcctcagtgcttgggctggtagtagtttctctacatatcttatttctaattctcagaacaaccctgagagaaagatattgttgtccccactttacagatgtggatatttaggccaaaaggaggaagtgacttgtccaggggcagacaccaaatgggaatctgattccagtggatgtctcttttcagtgcactgggtggtcaatgcccactcgctctgaaatcatctgactgtgatgccctgccttggagtttagaagttgagtgcaggcttgggagtcagactggatggggtaggttctaactctgccactgctagccggatgaacttgagcaagtcatttcacatctccgagcctctgtttctccaagtgtaagatgaggacaagtataaaacctcctttatgggtttgttgtgaacacagtgcagggcacatttataataagagctcagtcaatggtaggtttcatgcaactgctgctctaggctggaaaagttgttcttgcactggatgcagcatgagaagctggctgctaagatgtcactgggggtcactaaagctgaagcctgaaggaaagcctctcattgctgtagagctctccctgcctctctctctgggggcgatggggaaggtcaggagtccagcccattcccagggtgtgtgggatagcgattgcattttccttttgctctggagtttcactccccttctgggtcccaagggcccaatggcctgacttttagaattgcttgcaattggtgttttctcttgaatttgggggctgccatttaaagccaggtttccatgagctgaagaccagccattcaagaatctgaaaagtagacaagaggactccagttgcctcaggttggttctgctgtgctctggaaagtaactgcagccaccaggtatgaaaaggagcctggtggggagaccactgcacccaaaacaaatcctttcttcttctgagaatgtgactttttctggtgttgtaaaaaagaaaaaaaaaagaatgctcattgtaaaaataaaaaaataataataaaaaaaaaaaaaaaaaa

SEQ ID NO: 1362 - DNA, 2067 bp, Homo sapiens
ggaattccaatgaatgaatgaatgaatgagtgaatgaatcaacgaaggagtgagtcaaggcccgggaaccacagactccaagcctacgcagagcccgggaagggggattccggaggggcggggcctctttccggaagcgcccgccgggggcggggagggggcggggccatccgcgtgaggcgaccctgttggtccggaggggcggggcgaggaggaggacggccttgggcggttcggctgcccacagtaaccgctgggtggacctggccagcgctccgaaccttgtcctcgctgcgcgccggcccctcggagccccacagcccgggaaggaggcggccgcgggcggggcgcccgctctgccaagcggacccgcaacccggaaaggcggcgcggcggagcctggagccggatcctgctcagaccgggccccggccggccagagccgcgggcatgtcggaggcgcggaaggggccggacgaggcggaggagagccagtacgactctggcattgagtctctgcgctctctgcgctccctacccgagtccacctcggctccagcctccgggccctcggacggcagcccccagccctgcacccatcctccgggacccgtcaaggaaccacaggagaaggaagacgcggatggggagcgggctgattccacctatggctcctcctcgctcacctacaccctgtccttgctggggggccccgaggctgaggacccgcccccacgcctgccactcccccacgtgggggcgctgagccctcagcagctggaagcactcacttacatctccgaggacggagacacgctggtccacctggcagtgattcatgaggccccagcggtgctgctctgttgcctggctttgctgccccaggaggtcctggacattcaaaataacctttaccagacagcactccatctggctgtacatctggaccaaccgggcgcagttcgggcactggtgctgaagggggccagccgggcactacaggaccggcatggagacacagcccttcatgtggcctgccagcgccagtcttggcctgtgcccgctgcctgctggaagggcgggccagagccaggcagaggaacatctcactctctggacctccagctgcaaaactggcaaggtctggcttgtctccacattgccacccttcagaagaaccaaccactcatggaattgctgcttcggaatggagctgacattgatgtgcaggagggctccagtggtaagacagcgctgcacctggctgtggaaacccaagagcggggcctggtacagttcctgctccaggctggtgcccaggtagatgcccgcatgctgaacgggtgcacacccctgcacctggcagctggccggggtctcatgggcatctcatccactctgtgcaaggcgggtgctgactccctgctgcggaatgtggaggatgagacgccccaggacctgactgaggaatcccttgtccttttgccctttgatgacctgaagatctcagggaaactgctgctgtgtaccgactgaagccaggcagggtctgggatcctcagggctccacctctccatctggaagccggagccataactgctgcagtttgggcccaggctatgtgctcttctggtgccctagggactgctgtggccagagcctggggccagccagtacagtcctgagccgaggaggagggactgcaagtggaagagagccagtctggaaggaagagctttccaggtggacagggcttcttggaagacccccaaagccccaggtatcctgggtgaagcctgtttgcctctcttgaaaatggcaggtgctcttgttttacccatgttgggtcagcctgaaactgccaaccagtaggaagcatggactctcctgagtgagaagagactgaaataggagcaagcagaaccctgagaggtgtccatcttcttgctgttgaggaccctgaaacaccgttgtttaaagacttcacacagaaggctctgaactgagccactggggaagggaagtttcagtaacatgacactaaaatggcagagacgttaaaaaaa

SEQ ID NO: 1363 - protein, 500 aa, Homo sapiens
MNQRRSESRPGNHRLQAYAEPGKGDSGGAGPLSGSARRGRGGGGAIRVRRPCWSGGAGRGGGRPWAVRLPTVTAGWTWPALRTLSSLRAGPSEPHSPGRRRPRAGRPLCQADPQPGKAARRSLEPDPAQTGPRPARAAGMSEARKGPDEAEESQYDSGIESLRSLRSLPESTSAPASGPSDGSPQPCTHPPGPVKEPQEKEDADGERADSTYGSSSLTYTLSLLGGPEAEDPPPRLPLPHVGALSPQQLEALTYISEDGDTLVHLAVIHEAPAVLLCCLALLPQEVLDIQNNLYQTALHLAVHLDQPGAVRALVLKGASRALQDRHGDTALHVACQRQSWPVPAACWKGGPEPGRGTSHSLDLQLQNWQGLACLHIATLQKNQPLMELLLRNGADIDVQEGSSGKTALHLAVETQERGLVQFLLQAGAQVDARMLNGCTPLHLAAGRGLMGISSTLCKAGADSLLRNVEDETPQDLTEESLVLLPFDDLKISGKLLLCTD

SEQ ID NO: 1364 - DNA, 399 bp, Homo sapiens
  misc_feature (362)..(362): n is a, c, g, or t
taaggtcttgtaagctgtctctggctttttcttgggctgtgtggaggaatccactctgtatggagaatgaagctgacgggcagagagaaatagagatccaagaaccttcttgtagggtctggattgggacccttttctggtaacatcttcctggtgaccatgaagggacaatactgaagagacccctgaccctaaggaaatagactgcagcaccaatgggccaactttggggcgatcatcttgcccagaaacatcatgttgaaactcttggtcagaggttggatgaaagctgacagggtccatccagggagcaagttttgagccttgccagttccctttttgggtgctgagttggagtggcnattttaggcaaactgttgatcttttggctgctgttca

SEQ ID NO: 1365 - DNA, 520 bp, Homo sapiens
  misc_feature (507)..(507): n is a, c, g, or t
ttttttttttttaaaatttgtaaagtttattcacaatgcagttgttgaaaggaataaaacagttggcaatggcatctcgcttctgaatttgatttataaaaacattagggagctctttttttgtattttgctatttcactggggaatgatgaaaagagagtctttttttatacttataaatttcagactttgatgtcatttatcacagtatcgtctggaattctgaaaatgttgtgtcaggggtgatctgcgtatttctggagttgacatttgatagaagttgggtagccgaatatcatagtgatatctttttcctatatataccctgtcattcaaggcatagagtttatctgcaatgtcactgccaattagcactgaaaaaaggcgggagatgtagcgatgctgagcaaagagcagatataatttctttctcctccaagacacatatcgacaatcagtttctgcagtgagggttacctgaaaaatgccttcctctgtgggtctcantgaatcccactca

SEQ ID NO: 1366 - DNA, 352 bp, Homo sapiens
  misc_feature (100)..(100): n is a, c, g, or t
  misc_feature (157)..(157): n is a, c, g, or t
  misc_feature (159)..(159): n is a, c, g, or t
  misc_feature (162)..(162): n is a, c, g, or t
  misc_feature (240)..(240): n is a, c, g, or t
  misc_feature (337)..(337): n is a, c, g, or t
aagcaaccatgcaggtgctaaccaagcagttaccccaagaacttgcctgctgaccgtcatggaccggtatgcagccgaggtgcacaacatggagcaggtngtgatgatccccagccttctgcgggacgtgcagctgagtgggcctggggcaggcagngnctngaggcccctgatctctacacctacttcaccatgctcaaggccatctgtgtggatgtggaccatgggctgctgcgcggngaggagtggcaggccaaggtggcaggcagcgaagagaatggcaaccgcagagacagaggaagttcgaggacgagattgcctcaggagagtttggacntgggaagcccagttt

SEQ ID NO: 1367 - DNA, 3291 bp, Homo sapiens
gccaaaggcacggagggagagacagcaagtgcctttccaagccttggtggacaccacacctgcagctctccccttggccacagcaagtcacgtggctgggctcagcattaaggggtgggggacaggcctgccactttattgtccgctctgcacagtcgggtggcagtaggctgagaatttggagggctaaacaactgggactctggagagtctgtgtcctaataatgcctgctttggagcactccttccccacccgcctgctccaggggaatagcgtccctggtcctagcatttcactagatacctcgtgcctttgaaccgctgtgtttgggagggaggaagaggatagacaggtccagggctcccctcacttgggaaggtcctagtagaaggcattccttctgagtctcctggccctacagcttctcacccctgctgctccccaagacctgacccggaccaatcagctgcatctctgcaccaagtgccacccccaccgtgcactgctcgcacctcacgctccccatgggctggcccggaccccagtgaggtctgcacctctcggaccagccaggacctcggaagccatgacctgggtgttcagggcttggcggaggagacgctgctccgcgggggatggagaagccccgcccctccacaactcccttaatctggatgcaattagaggaaaccagccaaaaaccccgcggcagctgttgccccgggattattcccagccagcgagaggcattagggcgataattcagtcattagacttctagccttcccaccgccagaacgtgcaaataggggataatcagccctgcacggccatcctcagcaatgctgcttatttaacccattttttaaaatgacacttaatgttattggctggcgtacgtgtgtgcgcatacttaaaagttgatgcgtggtgcagctctgctgctaatgtctgctgacagcgtcgcccgatgttgctcagggcctctgggaagaggggacacctttgatgtgggcgtgctggcacccaagaggcagcgtggtcaggctcgatgcttgccagccctggaaggtcccgccagggttggggggtcgggtgagcactcagagatctggggaggaagcgaggagcctggtgtcctcaccaggtgcagaggggaaatgcgtactgctccagaaggttctgactcaagtctcggccctgaggactcagaactcacaagtcatggatcaagtacagagggagggagggccccagcccacccctgcgggggaggaggagggtctgaaggtgggagggcagctccatgagcagccactgttcctgaccagccgaagtgccaggcagggggaggtttccatgtccaggagggagaggacctccaccctctgacctttcagttttccatagcagcccagtgtgaagctcggcgggggtgggcagggcatcaggacaagatgaagatgctggctctggaatgaggactccccttgggctaaggggtagtggctggcagaggttgcccagctcttttggaggccacagggaatagaggtggggtggcaacaggaaatagggtgtgggctgtagaccatagtgggtggggtggtgcttccgttcctgtgaggcccgcccccctgagccccctcgtctgcttcttgtttggcagaaatagatgtggggcacagcccctagatgatgggaatctgcccacgctgtgccctctggggaatgaaatcttgctcctcgtgcagcctcccctttcccttgcggggtgggggctgggggtgccaaggctccacccttggagggggttgctgggggtgccaaggctccaccctttgctcgctgggcagagggaaggaagcacctccctgtatgctctgcaggggcccctgcaggccactttgcctcagaggaaaggaggagaggtcccctgggaaaatgcacacacacacacacacacacacacacgcacacacgcacatgcacacacgcacgcatgcacacacacacacacacatatgtgcaggggtgcagcctaagtcagtggagccaggactggctgcgcagctgggcctgccccattcttggagtccccagggaatgagcctcaggatccacttcgtcccttgtttctaagccaggctgcacggccgttcctgggtgtgaaagcattctgtcctgtctccagtcagagggaaccgcccccaaactagaaagctaatttcccccgaaggttcatgaagccagaggcatgcccttgggggttggtcgggagaagggtgagaggcagtgctgtggaaggggcctggcccctgctgcctgcgattctccccgggtatgtggccttctgcctccttcagcctcagtttcctcgcctgtaacatgagaacaatgatgcctgcctgcccaggccacctcctgggactgcagtggggactctaagtgtaaaactgtcatgaggatggtttatgaagtcccagggaccacacctgccactcagggaagagaccgctgacctcagccatcagccatgtgcatcgtgaggggcagcgagctcaggacggagagctctcccttggttcggagtcagcacacctgcactcccacacgcccacccagctgtgtgtcctccgccgagggtgagcctctctgtgactcttctgtaaaatgcaccccattctgcccactcctgccacgagacccatcctctgcgatcccgccaggcatgtgtgtgtgaatgcatgtgcaaagctctccatcagaagggtggtgtgggccctgcaggtcctacccctcggccttgaagctccctcgggctgcggactctgcctcctgggtctgagcattagaaccaggagaggggtgtccctgggcagagccaggggtgcaaacagcctgcagccatctggccttttaagtatagtgtgtcgcatttccgggtaggaaggtagcatttcaagttcaaagagaggtcaagtcatgcaaccatctttcctccagcacttttggggtaaggaggacagtttttgttatggtttaggggaaattttcatgaaattttcaccattaccaatagattactgatgtccatggcaagtgatctgttcttggtattttgttttgttttgttttggtttttaaatgtaatcacccattggtcaggcccaggactggtcaccatgagctctgctagccacggccccaacgatgcttccggctctcatggattccacagcaaataaaactgtgctgacaacagaaaaaaagaaaaaaaaaaaaaaaaa

SEQ ID NO: 1368 - DNA, 468 bp, Homo sapiens
  misc_feature (339)..(339): n is a, c, g, or t
  misc_feature (442)..(442): n is a, c, g, or t
  misc_feature (460)..(460): n is a, c, g, or t
gcagtggaccggcccgtgtgagccgcacccacagcgccgggatcctaggaccttgccggatggggcaactccgcccttgaaagactgggaattatgctagaaggtcgtgggcactaaagaaagggagagaaagagaagctatatagagaaaaggaaaccactgaatcaaagagagagctcctttgatttcaaagggatgtcctcagtgtctgacatctttcactacaagtatttctaacagttgcaaggacacatacacaaacaaatgtttgactggatatgacattttaacattactataagcttgttattttttaagtttagcattgttaacatttnaaatgactgaaggatgtatatatatcgaaatgtccaattaattttattaaaagcagttgttagtaattttcacaacgtgtttttaaaggttagggttttaaantaaaggctgttatacagnggcggttt

SEQ ID NO: 1369 - DNA, 491 bp, Homo sapiens
tttaacgtggtaacgatttacaggaaagaacagctggaactcgtgctgggataaccaggtacaagtgctctctgcagagaataagtgcacacaggttggtgtcttctgaccgagagccctcctgaagggaggtctgtacctcctccctcatctcattttacacaaggcgacaggtcagaggccagggtgggacgagagcgagggagcactgtctctggcagcagcacttgccactccacaatgtggagaccagaacggcaccccagagagcacgggggaaatggctcatctttaaaacaatggcagaagaaatccagccaaggtcacttttcctgtgtgagcatgtttaaggccagagagtggctacttctctgcctcctgcagctccctcagtgtggcttggaggagtcggcgaagcttccagaacacgctggaggctgctctccgggtgttcccactggggaccccagggtctgcacattcctgcaccg

SEQ ID NO: 1370 - DNA, 2309 bp, Homo sapiens
tttggccttatagcagttatccatggccgtactgtagtaaagttccttagaactttgccaggagtgaactagaaaaaagtgcttactagggcctaagagttgctttgtgccgtgtagtctggcctttgcactagtagatcattgctgacataggtcagtttagagacctttctgtgttaatgcctcctggtactgtcttaagatacgtacagtgtctgtttttagatctatgcatatgtcatgaagctccttgtgggctctgcatgaagctgctgctttgtttttgggttaacagatgtgcctgtcaactagcatgtgtattgtccaaattccataaacttaaggtttttaagggctgtgtggtttctgagctctatgtgtctttcctatccttgtaccttcaaagggtgagaaatgagatttatacatccaaagttagtctgataaatatggctttttgtttctccatgtaacctagactgtcaaaaataagtgatggtgataagtaggcctggagcctcagcttctgtaaatctcattcctaaaattttgctagactcgtgttggcaaaaacaaatacctgtggattgtccttaaggcttttaatcagatacctgtgttgctgttagctgaactgtagtgaagcatcgatccaaatcggtcttctgaagtatcagttatgcttttgagtttagaaaatacttaggtgttagtctagtcttcccattcatgaatcagtgtatgtccatatcagagagcctcaacttcttttttcttcctttttaaaaatgattttagtgttttgatttagtgtatactacatagttcagtattattggctttaccagtgttgacagaaaaattttaaatctccagttgcaaacagcaatggattaggatatggaaataaaatcatggtgacatcactgctgagttatcttaaacctctgctacttaattctccatattgaaatgcatactcctccacatacatggcttccaagtaaaggcaattgtagaggggccctgtctatcccagtatggttggattttaaacatatctgtgtttccgttattttgggaactgattaatatttacaattttttttgtttatgagttattttgatactaagaaaagagagaatctagaacatcttgaagttgaaatacaaattttattcttttggtcttgggagaatttaagcagtctatgcaactcatcaaatggtgagaaatagccctccgaggttccagtaagctttcagtgactttgatacctccccaagtttcttgagttgctgcttgtcaacacccagcttttaactgagtgtttgctcctgatggtttaggagattttcatgttgtatcacactgtcaagttttattttgtctttttatccctccgtggatgtgagtttgaaacaagcacggtacagtaatcctgcctgatagagtagtctggaatgagaattactttttgggtgagagagttctccattttaatgtttctaaagtttttcatatgaacttggcattggaaaagggaggtaaagaaaaaggacgtttactaaaagcagtgtctactcttcccctttgtgagtgtttattcatggctaatgaaaaaaagagaaggactcttgggttttgtgttgccatgttaagcatggagagggatgcttgacagcatgctaattgaagccagagcaagtatgtccttcatcaggtaatcaggaactcttcagttgaagctgaggaactaactgattagttgttgatcataatataattggttacaaagtggaagtgccagctggcttaagtacccaaagaaaagaatgcagcagcctaacttagtgttaccatatgttactgaatttgaaactgaccttttttcccaccctacttcacacacctaaaactcttttcttgtcagaccaaagagcgaaaagaaaaaaaaaaagtaaaacactttaccaatctgtcactcaggtacaattttgtggtgagatttttgtctgttctctttgtattgctcttaagagtcctttctcagcatattattctgccattgcctctgtcttccttggggcacctcagctctggatgctacccctgggatatctactgctgttatgtgaatgataggaggtaagtgaccattatagtaagggctctttgtaaaaaaattcaaaaaatttaaaaaggatgtatacattttatagtctggctatcagtttgatatcttgctgtcaagtatgtttctcaatctgtatttatccatcccatcaataaatgttaatggtaaaac

SEQ ID NO: 1371 - DNA, 398 bp, Homo sapiens
  misc_feature (373)..(373): n is a, c, g, or t
ctgctgatcctgaaattgtaccagcggcaagatgtggcctggaaggggactttaagttctccacaactgccagcaatccttccaccaggcaaaacacatcatctaaggaaaagaagtgaggtttgcttagggcgtggcagcttcggataaacgcaggactccgcctggcagcccgatttctcccggaacctctgctcagcctggtgaaccacacaggccagcgctctgacatgcagaaggtgaccctgggcctgcttgtgttcctggcaggctttcctgtcctggacgccaatgacctagaagataaaaacagtcctttctactatgactggcacagcctccaggttggcgggctcatctgcgctggggttcngtgcgccatggcatcatcatcgtca

SEQ ID NO: 1372 - DNA, 465 bp, Homo sapiens
tttttttttttttttttaagcatataaaaattacactcaaggtactttacaaattaatgtgttgaaaatctgatgtgaaataaaagttcttcaagagttgacagttacgttaccaaaaaaaaccaaacaccaaaacaaaaacacaaatcttcagacttttaccctccctaagaaagtgaacagatgaaaaaataatttcttaagtcatgtaatcacacatcatcagctggcagggatgggatgcttatctttgctctggtgaagtaggcaatcttctccctagagttggggtgagaaataaattgacttatatatgatgctaaaaatactctgggaccattaaaacagtccccaagacctgcagtggcagtgatgtctctgcaagcacaggtagaagctcttttccttacgcagaactccatttaaaatcaggagagcctctgcctgcttaaagggggggtatca

SEQ ID NO: 1373 - DNA, 4650 bp, Homo sapiens
agaggctgatgacctctcacagctgctggccctggggacctaggggatccctttgggaatcccaggtcaaccgggtgccagctccattgctctggctgtgtgggtggtggtgggtggtgaggcacatagaaagtcaccagcgccagggaagggcagctcagaaatcctggtcatgccaagtgccactcagggctattctcactctagtgagtgctcattggttcttcccgaagtccagagggaaggacgccatcgggggcgctgtatcccacccggcaccattagcccctgccacccaccacccagcagctggattcccacgggagttgcgggtgggggcggaaccggctgaggtctgggggcggggcgtccgggcgcggggcggggctggcgggaatgtgcgcacccccgcgcggggccccgcccgagcatcccgcgccgacggggctgtgccggagcagctgtgcagagctgcaggcgcgcgtcatggctgctttgagacagccccaggtcgcggagctgctggccgaggcccggcgagccttccgggaggagttcggggccgagcccgagctggccgtgtcagcgccgggccgcgtcaacctcatcggggaacacacggactacaaccagggcctggtgctgcctatggtgaggggctgcacggggagcccctagcccgccgccgcctgtcccggccgccgaggagggcgggcctcggggacgctgggggcgagttcttcccgcgggagatgtggggcgggcagctgcgcctggagcaccggtgcacggaagagtccccgggacaggctgttccccacgttggaagggaggaagcgaggaagtggccgggagagggtgcgcggccgcctcttggctcaagcccgccctctgggggctggggctcctcgccttcaacctgggagcatgttccccttaaactgtgaggccctgtgtgccacgcagaaggggacactccgcgcctccggccaccgtggggccccaaccgcagacctgggcgaacgtagccttctggcccagcccgttcaatttacagaggaggaaactgaggcctagagaggcccagtgaactgctggaggtcacacagcaggttcttggcggggctgcgacttgggagtgaggactcccagctttcagcggggggcgctttccgccccatctgcagcttggggagtgcacaggtacaggatgtccagagccaccccaaaatgtaaaggctttggagctccagtgatctgttttccctttgggctagctctcccccttgccccacagctcagggcagagtccaggtctgtgctccagctgcagccgccccgcccctgaagacctaagggggcagggctcaagcccccaaggtcagctggccctcaggatcttccctgcgacgctgaacctggaggttcagaacctgatgactgtggaggcatcagaacctcggctggaggcagtgtcattggagaggcttactccagctggcggaagcctcacgtactgcttgtctctcctgccaggctctggagctcatgacggtgctggtgggcagcccccgcaaggatgggctggtgtctctcctcaccacctctgagggtgccgatgagccccagcggctgcagtttccactgcccacagcccagcgctcgctggagcctgggactcctcggtgggccaactatgtcaagggagtgattcagtactacccaggtatggggcccaggcctgagccaagtcctcactgatactaggagtgccacctcacagccacagagcccattcatttgtctgatacactgtggggaaggcttgtagagtggagcatcccattgtacagatgaggaaactgatgcccccagaaggtcgggaacttgccctgggtttcccgtgacctgattggaggagccaggatttgaaccccagccttttttccctccagagccctaaaccaggaggacaattagaagtgtcccagcaacctcagagggtgggaaaatggagggcagtgggtcccttggcccagcaggttggtggcttctgacaattgagacacacaccctagaaacagctgctaggccgttgctgcccttcccgccaggacacctgcccttcctgtgccatcctcccaggcagcctctcttaccatcacctgttctttcccctgcagctgcccccctccctggcttcagtgcagtggtggtcagctcagtgcccctggggggtggcctgtccagctcagcatccttggaagtggccacgtacaccttcctccagcagctctgtccaggtaccagctaggccccagccctgacccagccctccttccctgaggtctccaggtggtcccagcttctactatgccttatggagggggtggcagggaatctccctggagtgtcattgaagccactgctgcttccaccagccctagcctccccacctcaccctgtactgcagactcgggcacaatagctgcccgcgcccaggtgtgtcagcaggccgagcacagcttcgcagggatgccctgtggcatcatggaccagttcatctcacttatgggacagaaaggccacgcgctgctcattgactgcaggttgggctcgctcccctcgtcccctcccgccctgcactcagcagctcctgggtggagtgtgcccactgcctggcgcagcaagcacacgcttggcctcgtcatctcccccattgtaactccaccccaggtccttggagaccagcctggtgccactctcggaccccaagctggccgtgctcatcaccaactctaatgtccgccactccctggcctccagcgagtaccctgtgcggcggcgccaatgtgaagaagtggcccgggcgctgggcaaggaaagcctccgggaggtacaactggaagagctagagggtgagaactgccagggtgctctatcctggaggcggctgtgctccctgctggcgcctcagtgtggccttgaccctgcctgggaccccgatctccagggccttctgccatgctctccccagtcccttcaaacactgcgcacccagggttccaatctcagcagggctgcttgaaatcctaaaatggtcttatctaatcagaaaaatcatgtttccattgtggaaaatgtagaaaagtacaaagtagaaaataataagctataaggccactacccagagatagccactgctgacattttcacgtttcctttcagtatttttccacatctgtcttcaaagctgagtatatgtaatatatcatcactttccccccccacccccttttttttaagaggcagggtctcattctgttgcccaagctggagtgtagtggtgtgatcatagcttactgcaaacttgaactcttgagctcaagggatcctcccagctcagccttccaagtagctgagattacaggtgtgccaccatgcccggctaatttttatctttgtaaagacggtcttgcagtgttgcccaggctgatcctgaactctggcctcaagtggtcctcctgccttggcctcccaaagtgttgggattataggcatgagccactgcgcccagcccatttgccgtgttttttttttggacacagagtttcggtcttgtcacccatgctggagtgcaatggtgcgatctcagctcactgtaacttctgcctcccgggttcaagtgattctcctgcctcagcctcccgagtagctgggactacaggcgcccgccactacgcctggcacattttttatagttctagtagagactggggtttcaccatgttggccaggctggtctcaaacgcctgacctcaggtgatcctcccgcctcagccttccaaagtgctgggattacaggcgtgagccatagtgccggtctcttttttttttttttttaaactaaacataatctcagaacccagaaccctatcttatcttatgccatgaaaggcatatctcggtgtggctctttttttttttttttcttttttttttggtgaggtggaggcttgccctgttgcccaggctggagtgcagtggcgcaatctcggctcactgcatcctccacctcctgggttcaaatgattctcctgccttagcttcctgagtagctgggattactggcacccaccaccacgcccagccaatttttatatttttagtagagacggggtttcatgttggccaggctggtctcgaactcctgatctcgtgatctgcccgcctcagcctcccaatgtgctaggattacatgtgtgagccactgcacctggcctccgtgtggctctttaaagctccacaatattttagcattcaggtgctctgtcatttacttaactattttctgatacacctcacactgtgattaactttttttatttatcttttttattatttatttatttatttatttgagacagagtcttgctctgtcacccaggctggagtgcagtggcacgatctcggctcactgcaacctctgcctcccaggttcaagtgattctcctgcctcagcctcctgagtagctaggattagaggcatgtgccaccacacctggctaatttttgtatttttagtatagatgaggttttaccatgttggtcgggctggtcgtgaactcctgacctggtgatctgcccacc

SEQ ID NO: 1374 - protein, 264 aa, Homo sapiens
MAALRQPQVAELLAEARRAFREEFGAEPELAVSAPGRVNLIGEHTDYNQGLVLPMALELMTVLVGSPRKDGLVSLLTTSEGADEPQRLQFPLPTAQRSLEPGTPRWANYVKGVIQYYPAAPLPGFSAVVVSSVPLGGGLSSSASLEVATYTFLQQLCPDSGTIAARAQVCQQAEHSFAGMPCGIMDQFISLMGQKGHALLIDCRSLETSLVPLSDPKLAVLITNSNVRHSLASSEYPVRRRQCEEVARALGKESLREVQLEELE

SEQ ID NO: 1375 - DNA, 536 bp, Homo sapiens
agaaaactgaccagatcctggatctgagctgcctgctccaggcctagaaatccccaaaggctggcactgagctgtgactgctttaacagcccccaagatttggtcagtttgaggtggtggagactcagatttgttgctgaaagttcagtaacacagtcctggtctttggccctagagaaactttttatatgagaagtgttctctatatacatgtttgaggtgactctggaatggattatgaggtcatatctcaaaatgtcagaaaacgttatagagcactcgaacttttgtatttgctgcttaacctcaatattacagccacaaacaaggggtaccaagacaaagtataactgagcataagcagaaaatgttaaccctccaggtttctttcttaagcacaataaaagtgggagcgaacaacacaaggatatttttacatttgacccgtctcaaaagtagcacaccctatccttgtgccattatttgtacaaggaaatatatgattagaaggaatagaacccgcagttgtcatcagc

SEQ ID NO: 1376 - DNA, 3546 bp, Homo sapiens
atgcccggcgtggcccgcctgccgctgctgctcgggctgctgctgctcccgcgtcccggccggccgctggacttggccgactacacctatgacctggcggaggaggacgactcggagcccctcaactacaaagacccctgcaaggcggctgcctttcttggggacattgccctggacgaagaggacctgagggccttccaggtacagcaggctgtggatctcagacggcacacagctcgtaagtcctccatcaaagctgcagttccaggaaacacttctacccccagctgccagagcaccaacgggcagcctcagaggggagcctgtgggagatggagaggtagatcccgtagccggcgggcggcgacgtcccgaccagagcgtgtgtggcccgatggggtcatcccctttgtcattgggggaaacttcactggtagccagagggcagtcttccggcaggccatgaggcactgggagaagcacacctgtgtcaccttcctggagcgcactgacgaggacagctatattgtgttcacctatcgaccttgcgggtgctgctcctacgtgggtcgccgcggcgggggcccccaggccatctccatcggcaagaactgtgacaagttcggcattgtggtccacgagctgggccacgtcgtcggcttctggcacgaacacactcggccagaccgggaccgccacgtttccatcgttcgtgagaacatccagccagggcaggagtataacttcctgaagatggagcctcaggaggtggagtccctgggggagacctatgacttcgacagcatcatgcattacgctcggaacacattctccaggggcatcttcctggataccattgtccccaagtatgaggtgaacggggtgaaacctcccattggccaaaggacacggctcagcaagggggacattgcccaagcccgcaagctttacaagtgcccagcctgtggagagaccctgcaagacagcacaggcaacttctcctcccctgaataccccaatggctactctgctcacatgcactgcgtgtggcgcatctctgtcacacccggggagaagatcatcctgaacttcacgtccctggacctgtaccgcagccgcctgtgctggtacgactatgtggaggtccgagatggcttctggaggaaggcgcccctccgaggccgcttctgcgggtccaaactccctgagcctatcgtctccactgacagccgcctctgggttgaattccgcagcagcagcaattgggttggaaagggcttctttgcagtctacgaagccatctgcgggggtgatgtgaaaaaggactatggccacattcaatcgcccaactacccagacgattaccggcccagcaaagtctgcatctggcggatccaggtgtctgagggcttccacgtgggcctcacattccagtcctttgagattgagcgccacgacagctgtgcctacgactatctggaggtgcgcgacgggcacagtgagagcagcaccctcatcgggcgctactgtggctatgagaagcctgatgacatcaagagcacgtccagccgcctctggctcaagttcgtctctgacgggtccattaacaaagcgggctttgccgtcaactttttcaaagaggtggacgagtgctctcggcccaaccgcgggggctgtgagcagcggtgcctcaacaccctgggcagctacaagtgcagctgtgaccccgggtacgagctggccccagacaagcgccgctgtgaggctgcttgtggcggattcctcaccaagctcaacggctccatcaccagcccgggctggcccaaggagtacccccccaacaagaactgcatctggcagctggtggcccccacccagtaccgcatctccctgcagtttgacttctttgagacagagggcaatgatgtgtgcaagtacgacttcgtggaggtgcgcagtggactcacagctgactccaagctgcatggcaagttctgtggttctgagaagcccgaggtcatcacctcccagtacaacaacatgcgcgtggagttcaagtccgacaacaccgtgtccaaaaagggcttcaaggcccacttcttctcagacaaggacgagtgctccaaggataacggcggctgccagcaggactgcgtcaacacgttcggcagttatgagtgccaatgccgcagtggcttcgtcctccatgacaacaagcacgactgcaaagaagccggctgtgaccacaaggtgacatccaccagtggtaccatcaccagccccaactggcctgacaagtatcccagcaagaaggagtgcacgtgggccatctccagcacccccgggcaccgggtcaagctgaccttcatggagatggacatcgagtcccagcctgagtgtgcctacgaccacctagaggtgttcgacgggcgagacgccaaggcccccgtcctcggccgcttctgtgggagcaagaagcccgagcccgtcctggccacaggcagccgcatgttcctgcgcttctactcagataactcggtccagcgaaagggcttccaggcctcccacgccacagagtgcgggggccaggtacgggcagacgtgaagaccaaggacctttactcccacgcccagtttggcgacaacaactaccctgggggtgtggactgtgagtgggtcattgtggccgaggaaggctacggcgtggagctcgtgttccagacctttgaggtggaggaggagaccgactgcggctatgactacatggagctcttcgacggctacgacagcacagcccccaggctggggcgctactgtggctcagggcctcctgaggaggtgtactcggcgggagattctgtcctggtgaagttccactcggatgacaccatcaccaaaaaaggtttccacctgcgatacaccagcaccaagttccaggacacactccacagcaggaagtgaccactgcctgagcaggggcggggactggagcctgctgcccttggtcgcctagactggatagtgggggtgggcggaacgcaacgcaccatccctctcccccaggccccaggacctgcagggccaatggcctggtgagactgtccataggaggtgggggaactggactccggcataagccacttccccacaaacccccaccagcaaggggctggggccagggagcagagcttccacaagacatttcgaagtcatcattcctctcttagggggccctgcctggtggcaagagggaatgtcagcaggaccccatcgccatccctgtgtctctacacgctgtattgtgtatcaccgggggcattattttcattgtaatgttcatttcccacccctgctccagcctcgatttggttttattttgagcccccattccaccacagtttcctggggcacaagtgtctgtgcatgtcccccaggagccaccgtggggagccgatggggaggggatggagaaacaagacagggcttctctcagcccatggccggtcagccacaccagggcaccgcagccaataaaccgaaagtgtt

SEQ ID NO: 1377 - protein, 986 aa, Homo sapiens
MPGVARLPLLLGLLLLPRPGRPLDLADYTYDLAEEDDSEPLNYKDPCKAAAFLGDIALDEEDLRAFQVQQAVDLRRHTARKSSIKAAVPGNTSTPSCQSTNGQPQRGACGRWRGRSRSRRAATSRPERVWPDGVIPFVIGGNFTGSQRAVFRQAMRHWEKHTCVTFLERTDEDSYIVFTYRPCGCCSYVGRRGGGPQAISIGKNCDKFGIVVHELGHVVGFWHEHTRPDRDRHVSIVRENIQPGQEYNFLKMEPQEVESLGETYDFDSIMHYARNTFSRGIFLDTIVPKYEVNGVKPPIGQRTRLSKGDIAQARKLYKCPACGETLQDSTGNFSSPEYPNGYSAHMHCVWRISVTPGEKIILNFTSLDLYRSRLCWYDYVEVRDGFWRKAPLRGRFCGSKLPEPIVSTDSRLWVEFRSSSNWVGKGFFAVYEAICGGDVKKDYGHIQSPNYPDDYRPSKVCIWRIQVSEGFHVGLTFQSFEIERHDSCAYDYLEVRDGHSESSTLIGRYCGYEKPDDIKSTSSRLWLKFVSDGSINKAGFAVNFFKEVDECSRPNRGGCEQRCLNTLGSYKCSCDPGYELAPDKRRCEAACGGFLTKLNGSITSPGWPKEYPPNKNCIWQLVAPTQYRISLQFDFFETEGNDVCKYDFVEVRSGLTADSKLHGKFCGSEKPEVITSQYNNMRVEFKSDNTVSKKGFKAHFFSDKDECSKDNGGCQQDCVNTFGSYECQCRSGFVLHDNKHDCKEAGCDHKVTSTSGTITSPNWPDKYPSKKECTWAISSTPGHRVKLTFMEMDIESQPECAYDHLEVFDGRDAKAPVLGRFCGSKKPEPVLATGSRMFLRFYSDNSVQRKGFQASHATECGGQVRADVKTKDLYSHAQFGDNNYPGGVDCEWVIVAEEGYGVELVFQTFEVEEETDCGYDYMELFDGYDSTAPRLGRYCGSGPPEEVYSAGDSVLVKFHSDDTITKKGFHLRYTSTKFQDTLHSRK

SEQ ID NO: 1378 - DNA, 525 bp, Homo sapiens
taaagaccaagtaacattttgtgagtgcccctacctgccggggcacatagaaacgtgttttctcctcacaggaactgggcatggagcctagcccgtggtgagcgctcagcaaacatgcacgcagtacacacctcgcttctagtggaaaggacaatactgaccacgaccaaggaaagagggtctaccttgtaagagagatgtactcagcctttttaacagttcaagtggaccattgaattgtaaaataaaattcttgatacttacggctcttgctgctaatgtcattaacacccctgttagcaacgttagataatatcctgggtataccccgtgccaaatggcagagagaatgaacgtctggattgttggactgaaggaggttcgttcataacacacccttttgagccaaagagctgtctgaatattccaattatcaagaaacatcttgaaacttgttgacatctctatttgttgaattctcaaattggaaattaagtcccaacgagctgctccattttcgtcata

SEQ ID NO: 1379 - DNA, 823 bp, Homo sapiens
aaacgcgggcgggcgggcccgcagtcctgcagttgcagtcgtgttctccgagttcctgtctctctgccaacgccgcccggatggcttcccaaaaccgcgacccagccgccactagcgtcgccgccgcccgtaaaggagctgagccgagcgggggcgccgcccggggtccggtgggcaaaaggctacagcaggagctgatgaccctcatgatgtctggcgataaagggatttctgccttccctgaatcagacaaccttttcaaatgggtagggaccatccatggagcagctggaacagtatatgaagacctgaggtataagctctcgctagagttccccagtggctacccttacaatgcgcccacagtgaagttcctcacgccctgctatcaccccaacgtggacacccagggtaacatatgcctggacatcctgaaggaaaagtggtctgccctgtatgatgtcaggaccattctgctctccatccagagccttctaggagaacccaacattgatagtcccttgaacacacatgctgccgagctctggaaaaaccccacagcttttaagaagtacctgcaagaaacctactcaaagcaggtcaccagccaggagccctgacccaggctgcccagcctgtccttgtgtcgtctttttaatttttccttagatggtctgtcctttttgtgatttctgtataggactctttatcttgagctgtggtatttttgttttgtttttgtcttttaaattaagcctcggttgagcccttgtatattaaataaatgcatttttgtccttttttagacaaaaaaaaaaaaaaa

SEQ ID NO: 1380 - protein, 179 aa, Homo sapiens
MASQNRDPAATSVAAARKGAEPSGGAARGPVGKRLQQELMTLMMSGDKGISAFPESDNLFKWVGTIHGAAGTVYEDLRYKLSLEFPSGYPYNAPTVKFLTPCYHPNVDTQGNICLDILKEKWSALYDVRTILLSIQSLLGEPNIDSPLNTHAAELWKNPTAFKKYLQETYSKQVTSQEP

SEQ ID NO: 1381 - DNA, 4034 bp, Homo sapiens
cccggctcctgcgcccctcctagctcccagagagcgtggatcgcgggcggggctcaccgagcgaggttacctctcttgaaaatacttaaacactttttttcctctccactgaaatctcaaaaaacagcccattttgaaccagaataatttagtctgacaacagattcttcctctgttcacagctgtcccagagggaggagctgaaatctgaacctctcagctgtgattggatctttcttgcaaaagagaggaaaaaaaaaccctcccagccaaaacgggctcagttcgtaaaggagccgggtgacttcagaggcgccggccagtccgtctgccgcacctgagcacggcccctgcccgagcctggcccgccgcgatgctgtagggaccgccgtgtcctcccgccggaccgttatccgcgccgggcgcccgccagacccgctggcaagatgccgcgctccttcctggtcaagaagcatttcaacgcctccaaaaagccaaactacagcgaactggacacacatacaggtaaaaagagaaaaatatatctagaactacgtatctagagctttgcaaatatgaatctacgtattacccttcaaataccattacaaaagagccaaagattcaactgttttcctttttaacagtgtcctgaaagggagcttacattcttttgatcatttagggttcgttttaattcaaaacttttaaaattcttgactaacaaggaacatttcattcaaatctcgcagcttcgtttgctaaagcctgtgtatacatgcataatgagtatgtgaaagatgagcaacataaggattgaattactgcgtttttcatgcactaagtctcctttcctttagaaggcggcttgatgcaggcatatctttgtactcacggtcgtaatacacctaaatagcccatacgtaacatggaaaacaacttttctgtatgtttaaaaataatgttgaggctctccttcctcaatggggacggcgaaggcactggcttggctgcactgtctgacttcagagcacctatagctccgtgcagctgtcagcctatgtgtgcattaagtacagtaactccgtaggtgccagggtggaaatgaaacattttaccagtgtgtatgccctcctaaatgggtctatcttcttcctaagaaaatcacgtgtgtgttgctaaatatctttccagtgtgtgtatacttgcgtgtggatttatttttaattatttttgccttaatcttctctccctcccttttctttcccagtgattatttccccgtatctctatgagagttactccatgcctgtcataccacaaccagagatcctcagctcaggagcatacagccccatcactgtgtggactaccgctgctccattccacgcccagctacccaatggcctctctcctctttccggatactcctcatctttggggcgagtgagtccccctcctccatctgacacctcctccaaggaccacagtggctcagaaagccccattagtgatgaagaggaaagactacagtccaagctttcagacccccatgccattgaagctgaaaagtttcagtgcaatttatgcaataagacctattcaactttttctgggctggccaaacataagcagctgcactgcgatgcccagtctagaaaatctttcagctgtaaatactgtgacaaggaatatgtgagcctgggcgccctgaagatgcatattcggacccacacattaccttgtgtttgcaagatctgcggcaaggcgttttccagaccctggttgcttcaaggacacattagaactcacacgggtaagagaaaaaccataggcaggaatgttactctgagatacaatgaagccctgggctggctgttggatttgcatgaagttgtgacatagtgcttttaatgatggacagtcattgatagctacttcctgactactcaaaaagttgttagggcacaaagtgctccatttcttgctaacaacctctgctccagggactgcaaacagcatgtagactttggaaagtagattcagaaggtttggtctcaaagatcagttagaaaatcaggaaagatgtgcttgaatgtgtgttctgtgaaactgcccccagtaatcagcaaatacaaatgttgctatcttaatcaattgatttggttaatagatgaaggcttttcctacagttttctgttagttacattcttgctctgatatttgtcacccgtgggtgacttggatagttgaaactaaatttactttgcctctcttgctttgtttggggattttttgctccttaatttcttattcgtatcacagaattattctgcagggtatcatggcacttagaccaccttaatcatagtacagaaagagggaaaaggggaaatattgggaaatgttgggaggtgctcaacattagctgcatctgctaaagcagaaagctttaagaagtgaaagtccaagaactacgtaaattatttctgtatgattggcagcagtaataatattcgtgtatgatttttaaatgcaatattcaagtttatcttaaaaattcaggtatttttaaaagtgtctattatgagggattttaatcaggttttgctgcttctcattatttaagcaaaatgtgattgacttttgttaacatgattttactttatgtttcctctaaaaacactgactgtctttctttttttctcccactccacccccaggggagaagcctttttcttgccctcactgcaacagagcatttgcagacaggtcaaatctgagggctcatctgcagacccattctgatgtaaagaaataccagtgcaaaaactgctccaaaaccttctccagaatgtctctcctgcacaaacatgaggaatctggctgctgtgtagcacactgagtgacgcaatcaatgtttactcgaacagaatgcatttcttcactccgaagccaaatgacaaataaagtccaaaggcattttctcctgtgctgaccaaccaaataatatgtatagacacacacacatatgcacacacacacacacacacccacagagagagagctgcaagagcatggaattcatgtgtttaaagataatcctttccatgtgaagtttaaaattactatatatttgctgatggctagattgagagaataaaagacagtaacctttctcttcaaagataaaatgaaaagcacattgcatcttttcttcctaaaaaaatgcaaagatttacattgctgccaaatcatttcaactgaaaagaacagtattgctttgtaatagagtctgtaataggatttcccataggaagagatctgccagacgcgaactcaggtgccttaaaaagtattccaagtttactccattacatgtcggttgtctggttgccattgttgaactaaagcctttttttgattacctgtagtgctttaaagtatatttttaaaagggaggaaaaaaataacaagaacaaaacacaggagaatgtattaaaagtatttttgttttgttttgtttttgccaattaacagtatgtgccttgggggaggagggaaagattagctttgaacattcctggcgcatgctccattgtcttactattttaaaacattttaataatttttgaaaattaattaaagatgggaataagtgcaaaagaggattcttacaaattcattaatgtacttaaactatttcaaatgcataccacaaatgcaataatacaataccccttccaagtgcctttttaaattgtatagttgatgagtcaatgtaaatttgtgtttatttttatatgattgaatgagttctgtatgaaactgagatgttgtctatagctatgtctataaacaacctgaagacttgtgaaatcaatgtttcttttttaaaaaacaattttcaagttttttttacaataaacagttttgatttaaaatctcgtttgtatactattttcagagactttacttgcttcatgattagtaccaaaccactgtacaaagaattgtttgttaacaagaaaaaa

SEQ ID NO: 1382 - protein, 268 aa, Homo sapiens
MPRSFLVKKHFNASKKPNYSELDTHTVIISPYLYESYSMPVIPQPEILSSGAYSPITVWTTAAPFHAQLPNGLSPLSGYSSSLGRVSPPPPSDTSSKDHSGSESPISDEEERLQSKLSDPHAIEAEKFQCNLCNKTYSTFSGLAKHKQLHCDAQSRKSFSCKYCDKEYVSLGALKMHIRTHTLPCVCKICGKAFSRPWLLQGHIRTHTGEKPFSCPHCNRAFADRSNLRAHLQTHSDVKKYQCKNCSKTFSRMSLLHKHEESGCCVAH

SEQ ID NO: 1383 - DNA, 3484 bp, Homo sapiens
cactctctgttgtccaatggacacacctgtcgtgttttgagccagcgagagatgcagtggaagtgaaaagcatggttacagactccccatgcgacagtacactcttctgaagtagcggacgcctggttagcttgacattctatgcaaagatccataatgtggttcctgcagatggcacagttatcaaccacaatatcccaggcccagagggctactgcattccactttttcacttcaaagcgcttcttgcccgcgccgctgttggtgccgctcggggtatccacatccatcgctgcgggctcacaaagcggccagacgctcggcggcggcgtgtggcaggagcgcaggggcgcgagccggcgatcagccttcccggcgaccgtgccgcgggagctcgagcaactcggactaggggacccgggccggcccccaagatgccggcgatcgcggtgttggcggcggccgccgcggcgtggtgcttcctccaagtcgagagccggcacctggacgcgctcgccggaggcgcgggccccaaccacggcaatttcctagacaatgaccagtggctgagcaccgtctcccagtacgaccgggacaagtactggaaccgctttcgagacgatgattatttcagaaactggaatcccaacaagccctttgaccaagccctggacccatccaaggacccctgcctgaaggtaaaatgcagccctcacaaagtgtgtgtgacccaggactaccagaccgccctgtgtgtcagccgcaagcacctgctccccaggcaaaagaaggggaacgtggcccagaaacactgggttggaccttcgaatttggtcaagtgcaagccctgtcccgtggcacagtcagccatggtctgcggctcagatggccactcctacacatccaagtgcaaattggagttccatgcttgttctactggcaaaagcctcgccaccctctgtgatgggccctgtccctgtctcccagagcctgagccaccaaagcacaaggcagaaaggagtgcctgcacagacaaggagttgcggaaccttgcctcccggctgaaggattggtttggagctctccacgaggatgcgaacagagtcatcaagcccaccagctccaacacagcccaaggcaggtttgacactagcatcctgcccatctgcaaggactccctgggctggatgttcaacaagttggacatgaactatgacctcctgcttgacccttcagagatcaatgccatctacctggataagtacgagccctgtatcaagcctcttttcaactcgtgtgactccttcaaggatggcaagctttctaacaatgagtggtgctactgcttccagaagcctggaggtctcccttgccagaatgaaatgaacagaattcagaagctgagtaaggggaaaagcctgttgggggccttcatacctcggtgtaatgaggagggctattacaaagccacacagtgccacggcagcacggggcagtgctggtgtgtggacaaatatgggaatgagttggctggctccaggaaacagggtgctgtgagctgtgaagaggagcaggaaacctcaggggattttggcagtggtgggtccgtggtcctgctggatgacctagaatatgaacgggagctgggaccaaaggacaaagaggggaagctgagggtgcacacccgagccgtgacagaggatgatgaggatgaggatgatgacaaagaggatgaggtcgggtacatatggtagtgcccacaagaaagaggacacaagttttgcacaaaattgcaagtcacttcctattcctgcatttgtatctaagactccaaggcaccaaggtctcttctccattgttgctctctatacccgacctaaggtttggaagacaactgcttgttcccagaggattctgattttgcatatgtttgtatgggagaaagggtgttgtgtttttttttttgttgttgtttattttttggatagggaagtcattggcttaattagagcctccttcctttctgtgagatttttccaacaagcatgtgatttacgtggaattctgacagtgcagggagcccccaccctcttaaatgtcaaagaccctttttgattacccacactggtggttattacagcatggttcccagccttacagtgtctaagtgcttctcttgtgtcctgtagatgttgtgaaaaagaaaaaaacaaaaaatacaccacactgtactttttccccctgcccccgttactgccggtgattattattaaaaattagtttttttcacatcattctatctggcttcctataaacaacagccttaattcagtcaagactccctttgggaattcattttattaaaaattggtgtctggatacttccctgtacatgcataaatatgcatgcatgtacagaaagactgtatgtgtgtgccttgcacacacacccatacctctcagaaaaagtgtttgggtatcttaaaaactcgaaaaacaatgataaatttctcagcttgtccagacctggaacaaaatttctggaataagaaatttgtattaaagtccttttttgcactaacagttggctcttgtagcctgcaggctgaggaagtctcttctctgtgcatcagcagagttactgaaagcctctgattgagaaaaaacctccgtctgcctaaatcacttttctcgcagaagccatgcgactcccacacgacacgggcagcttcacaagccatctctttcatttctgcttgaagccccttggctgcagcaatcctgtctgccataggtttcttccttccttacctactcaagggctttttctaaggcatgcacacatatctcctgttctctgagagtaccatggtgttccttaaaagaagaaaatttctaattctgaactcaatgttttgcttttactccctttctactgacaaatcatgataagggcacaaaagctgtacagatttttttttttaaccactcaatcccaaatggaggcctacaaagaacatcgtaataacacatggaagcaaaccccgggtttttaagagcaaattctgtccccccctcactcccccaagtgacaagatactaatgaagaaagttcttcaccatagtgtttgttttaactaaactcattggagtctagttccaaatttggtagggtcatcatctctacattccttaggatttctctccctatcaagctggcccagatacaagtaccaaacagtagtctctgaagttcccatttccttcagtaccagtctataagctactgtccgccactgattttcatctatcagggtgtcctaatcagaatcagccacccaagcaagcctctctggcccacatatctatctcttgccttcccccatgaacttcagcctgtccacacaaaagccacataaactcaagcaagaaatatgttcagccaaaacatgattatagtggcagctgaccaataccccacccc

SEQ ID NO: 1384 - protein, 439 aa, Homo sapiens
MPAIAVLAAAAAAWCFLQVESRHLDALAGGAGPNHGNFLDNDQWLSTVSQYDRDKYWNRFRDDDYFRNWNPNKPFDQALDPSKDPCLKVKCSPHKVCVTQDYQTALCVSRKHLLPRQKKGNVAQKHWVGPSNLVKCKPCPVAQSAMVCGSDGHSYTSKCKLEFHACSTGKSLATLCDGPCPCLPEPEPPKHKAERSACTDKELRNLASRLKDWFGALHEDANRVIKPTSSNTAQGRFDTSILPICKDSLGWMFNKLDMNYDLLLDPSEINAIYLDKYEPCIKPLFNSCDSFKDGKLSNNEWCYCFQKPGGLPCQNEMNRIQKLSKGKSLLGAFIPRCNEEGYYKATQCHGSTGQCWCVDKYGNELAGSRKQGAVSCEEEQETSGDFGSGGSVVLLDDLEYERELGPKDKEGKLRVHTRAVTEDDEDEDDDKEDEVGYIW

SEQ ID NO: 1385 - DNA, 234 bp, Homo sapiens
cccgcccggtccggaattcccgggtagaaaacgccaatgttttatgtctttgcccatctcaaaagctaatattgattcttctgtcccatcagctttcattgttaagtagaatatgtatgttgcattttatccataagaaataaagagaaaaaaactaaaaaaaaaaaaaaaaaaaaaaaaaaaaaaaaaaaaaaaaaaaaaaaaaaaaaaaaaaaaaaaaaaaaaaaaaaaaac

SEQ ID NO: 1386 - DNA, 161 bp, Homo sapiens
ctttttttccccctaaggaatgtgttatataaggtcaacatgtttttagtgcttcagtttgacttgtctacatctaaaggtaactctttaaggcttacatttatgattataattccttccatcgggggtttagtctccatattgtcatgttctggattttt

SEQ ID NO: 1387 - DNA, 399 bp, Homo sapiens
ttaagagttgcatattttactttatttttattaaattaaaagctacagtctggcagcgattccagaacagggtaaggaggttcctcacaggggtcagagaagagcggagaaagacagactgacggagactgagacacaggagagaaaggacaaggttaagggagaactgtatctgatgaacacacacagccggctccatggcgggtgacggggagctcacatcagcccaatttctcctccccggcacccgaagttcagcggtggagcagtatgtgggggcggttaggaatcaagagaccctcccttccccaccctaggtcctttctcggcttggtcgtggagcacagcacataccagaaaaagccaagggcaatggaggggcagggaaaccgggagtat

SEQ ID NO: 1388 - DNA, 365 bp, Homo sapiens
aaagcataatcccacaaggacaaaggaaacaagaagaggatgacagcaacaaggtttcagaagccagaaagctgatgaatgatcagtgcctaacagcatgagagaaaaacaaatgctaagacatcatggaaatactggaaggtgaccgagtgtacactgttacggaatcacccaaaggttcgggccttagtgaccttgcgcactacaggagtgggggcaggaaagcgggttatgaaaacaggagcgctggttgaagtctcttcaagaagcagttattgagaatccctctcccctcggccaagggagtgtcacagtttcccctccattccaaggtttcatgtcaagagaggacagagttacaggtg

SEQ ID NO: 1389 - DNA, 2679 bp, Homo sapiens
cacacccagccgcacaagaacccctcctgcattccgtcctcacacgcaggcctgtccatctacttgctactgtcacactcttgccagcagaagaggcccctgtaatggccgatatcaccacccagtctatcctcaccccacagctgtgcagcgggaacctcctgctggcccacgtgcttgccacagcccatgctggcacgacgctccagcaggtcggcgtccctgcgggccacactaccggtgacatggctagcatgaccctccttcctggcagtgacactgttgatgtgaaccccagtttcacatctgtcatttgtaaataggaccattttcccttttcgctctcccttccattcacagggcttttcattctctctgtttctgcctccgtttcagatatttactcacctttttctctctcactatgtctgccgtggtctccatgagactacgccacgtaagattcccccattaaaggtcatgaattgagtggcttttagtatacctgtggttgtgcacattcaattttaattcgcaatccattgtaaaacgtcttatcacccccgaccagagaaagaccctgtagacattagtcactcctcattctgtctcaaaccctctccctgaccctcagccctaggtagcaactacctagtgcgatcaatcccatatgcatagatttccatattgtggacatttcctataaacggaattgcacaataggtgagctgctatgactgacataacacgtagcacaatattttcaagattcatccacattgtaggcttacccacagggggaaaccattttttggggggttttagtaacaccggtgttttctccttcctttcatccttctttccttccttccttccttccttccttccttccttccttccttccttccgtccttcctaccccaggagtgtctccgctgcctgctcctgcagccttcccacccaccccacagtctgtccccagcccagcccccacccccttccccatagagcttctacccttggggtattcggagcctgcctttgggccttgcttctccatgcccagaggcaagccccccgccccattccctaggggacagaaagccagcccccctaccttagcccctgccactgccagtccccccaccactgcggggagcaacaacccctgcctcacacagctgctcacagcagctaagccggagcaagccctggagccaccacttgtatccagcaccctcctccggtccccagggtccccggcagtgaacggcggctgtcaggggacctcagctccatgccaggccctgggactctgagcgtccgtgtctctcccccgcaacccatcctcagccggggccgtccagacagcaacaagaaccggcgtatcacacacatctccgcggagcagaagcggcgcttcaacatcaagctggggtttgacacccttcatgggctcgtgagcacactcagtgcccagcccagcctcaaggtgagcaaagctaccacgctgcagaagacagctgagtacatccttatgctacagcaggagcgtgcgggcttgcaggaggaggcccagcagctgcgggatgagattgaggagctcaatgccgccattaacctgtgccagcagcagctgcccgccacaggggtacccatcacacaccagcgttttgaccagatgcgagacatgtttgatgactacgtccgaacccgtacgctgcacaactggaagttctgggtgttcagcatcctcatccggcctctgtttgagtccttcaacgggatggtgtccacggcaagtgtgcacaccctccgccagacctcactggcctggctggaccagtactgctctctgcccgctctccggccaactgtcctgaactccctacgccagctgggcacatctaccagtatcctgaccgacccgggccgcatccctgagcaagccacacgggcagtcacagagggcacccttggcaaacctttatagtcctggccagaccctgctgctcactcagctgccctgggggctgctttccctgggcacgggctccagggatcatctctgggcactcccttcctgccccaggccctggctctgcccttccctggggggtggagcagggtccaggtttcacacttgccacctcctggaggtcaagaagagcagagtccccgtccctgctctgccactgtgctccagcaccgtgaccttgggtgactcgtccgctgtctttggaccgctgtgtttcaatctgcaaaatggggatggggaaggttcaatcagcagatgacccccaggccttggcagctgtgacattgggggcctaggctggcaactccgggggctcaacggtggaaagaggaggatgctgtttatctgtcacctccacttgctccccgacaggtggggcacagacctctgttcctgagcagagaagcagaaaaggaggttccctctctctgctccttcactgctgacccagaggggctgcaggatggtttcccctgggagaggccaggagggcctgatcccaggagacaccagggccagagtgaccacagcagggcaggcatcatgtgtgtgtgtgtgtgtggatgtgtgtgtgtgggttttgtaaagaattcttgaccaataaaagcaaaaactgtctgctggttaaaaaaaaaaaaaaa

SEQ ID NO: 1390 - DNA, 456 bp, Homo sapiens
cacgaggaatattccaaattcttaatgtaacatgaaaagagaaatacaatttttgcttaaaagacattttttaaagagcgttcaattcagtaatcatttctgttaatacaggaagtttttttggcttgccagttatatactgtgggtattttttaaaatgtgctacccttgggttgtctcatatcaccttgcgtaatcatgtattacaaaggttgataattgtcatttctcagatgtctgtatgttacattggcagcagtaaaatgttttaatgttgttaccttttaaataattgtgttgtattaacatgcctcatattttctggggaaacttgaaatatatctaaacaaaaaaggtccgttataaataggaattggcatttcattgttaatgttttttcctcataaaaatagttacaccaaaagtgacatattgtctattacatgggcccaatca

SEQ ID NO: 1391 - DNA, 304 bp, Homo sapiens
  misc_feature (12)..(12): n is a, c, g, or t
  misc_feature (67)..(67): n is a, c, g, or t
  misc_feature (81)..(81): n is a, c, g, or t
  misc_feature (103)..(103): n is a, c, g, or t
ggcacgaggccnttaagccccgggacggcgaggcaggcgctcagagccccgcagcctggcccgtgancccgcagagacgcngaggaccgcgacgagtcgtgtntgaacccggcttttccaattggcctgctccatccgaacagcgtcaactccatggcgcggttcctgacactttgcacttggctgctgttgctcggccccgggctcctggcgaccgtgcgggccgaatgcagtcaggattgcgcgacgtgcagctaccgcctagtgcgcccggccgacatcaacttcctggcttgcgtaatgg

SEQ ID NO: 1392 - DNA, 505 bp, Homo sapiens
  misc_feature (479)..(479): n is a, c, g, or t
ctcatgtataaaacacatatatccacatatgggttagtagtagtatttgttgaacacaatttttggttttcacacaaatgcaccttttcaaaaatcaattgttccttctcccaacataccccaggctggcaaatgacaaatgaaaataaaatccctgctggaaatagtggtataaaaagcattttccattttatgtgcacttttcaacccagagaaaataagaaatttgttttatttttgtgcagtagtttctaaaatataatcggagagatgctagtaaacatttaactttagattagctttctcaaaacttttaagcgctggaatgaaagatttgcttacattctgaagctggtgcagggtatcttttttaagccttctttggcatctcattttcacgcaccatctgagatgacttggaaaacaccagaaaataacaacactacttccacaaaacaactgcctggacagtgcctatntctacagccatcatttatagaactct

SEQ ID NO: 1393 - DNA, 1740 bp, Homo sapiens
ggggaatataatccaaaagaaaacaaaaacaaaaacaaaatcgaaaaaaagtaagtcaaatgtaccagacattcactgcagcattatttaaaacagggaaaaaagaaacaatcagggaaatacttaaatcatgatacagccactggagaactacgcagtctttgatgtcgcaacagagaaatgttatttgaaaaaggaggatacaggccaggcgtggtggtctgatgctgtaatcccagcacattgggaggccgaagcgggtgggatcacttgacctcaggagttcaagaccagcctgggcaacatagtgaaaccccgtctctacgaaaaataagaaaaaaaaaaaaaaaaagaaaaagaaaaaattagccgggcggcatgcgacctgcaggcatgcacttgtagtcccagctactcaggaggctgaggtggaagcatggcttgagcctgggagcagaggttgcggtgtgttgatcgcaccactgcactcccgtctgggcaacagagagaaacctcgtctcaaaaaaaaaaaaaagaaagaaaagaaaagaaaaaggacacgaaattgtgatacgacaactctgtgaagactactagatacattacaaaatttttaatagtagtactctacgtggcaattctggtagaaatgatttcctttcctcaaactccccataatattgttacatggtttttatacggtctgggggatgggggataacattaaatgacaccttttatgttaaatcacaaacgctggagtcaacaaaagttctttaaattcctccagcagtagagcaaacttggtattccaattccctccaggctttgaccaagagcgcacacgagggccaccgccttcgtgatcagaagcgggtatgactgggcaccggttggtccactgcggctgttccaagctgcccccacagcctcaccccaggactccaccaggagcacagggaaggggtccccgaaagtgggcgaggtcgctgcccggaggtaatgaccactccaaggtcaccatggagaacccgcagacagggctcggtgtggcccaggactccaagactcccgactcttaagtccaggtctcagctctctgcgccgccgcgcccctcgccccatcccgagcagctaccccgaacgtcccaggggctgcccgaggcgaatcctcacattgcggcgtggtggccgacaaaacccgggaacccctgatcttggcgcctccacgcaccgcccggagccaagacccccgagcgccgcagcatagcgtagcccagaccagtcacctcatcctttttcgccctctcaacccagcttttccgactccgggaataaccgggaagagaaggcggaggggagcgaagcgctgataaatactgtggcccagtcccgcccccctaacgtcacttccgccccaagatgcccccaggccctgccacgcagacttccgcccggcgcgagaagaccgaagctggcggctggtcggttgcacgtgaggttgtgaggcggtgtggagccgcggcccgggagtctcgccacgtgggaggggaggagctgagaggccactggagggacgcaccgactgggggaccggaaagcaagggggtggggttccgccaggtccgcgtgtcagtcccctctggtgatctcgtcgcccttctctcccaggcaacatgtcggaaggaaacgccgccggacgcccagcacggtcagggccccgaccattcctgactgggg

SEQ ID NO: 1394 - protein, 12 aa, Homo sapiens
MSEGNAAGRPAR

SEQ ID NO: 1395 - DNA, 483 bp, Homo sapiens
tttttcaccaaaaaaaaaacaaaaacaaaagaaaacattttattgcaatttgattaacaaggagacaggagcccagctcaaatctgtcccattgtacttattttaaagagttattttagtagaaaaggtgtagggagtggattctgtgattagtaggtgattgatagaaagaaaaggaagggctggaaaatcctcgggcatgggcagttacctcttcatgcctcctcatgggtcccatgtgcaaactcagagggagttagtatgaaacatgcggtacaaatttaggctgtgtgtcagcaagctcattctgcacaaactctggttttatctctttatcttgacacctgaagggtgtgcataatcccatcactccccaaaatatgccctacatgcagaatttaaattcatcctgcctccttgactctgagggccacttcctaccacagctagggtcccttttctgtcagcattctttctggagct

SEQ ID NO: 1396 - DNA, 300 bp, Homo sapiens
acaccgacctgagtcctttgaaatctccttctgacatctttcccttctgttgtgaaatatgttaagccacaggccaaactgctataagatcgaagttctgtttttttctcacctaataatagagaggtaatcagatggtctagggcagatttaactctacaaggttatcaggaactttgtttccttctgtcttattcagccattcccagtatgttttcttacccataagatcaaagcagactcatcagctccatatctgcattccactggggaaagagagagagaaaagagcagatttta

SEQ ID NO: 1397 - DNA, 520 bp, Homo sapiens
tttttgtccagaaaaggagcgaatttttgctgtatcagttaaggtagactgttatgacaattaaatacatagatacaatgaagtttacttcttgcttgtgtgattttctttagtgagatgggtctcttcaaatggttcttctaggacttgagttcctcagcagtgtggtttctccaagacgtgaggcttcgttgtcatttgtttccagccagcaaaagggagaggattgtgggggctgaacacggcaggtttctatgagccagtcctgaagaagcaccattacttctgttctcagaactaacaacaggggagtctgggacagaccatctaactccattttgacgaacacccagcaagcagtctcttccattttcactttatgagaggaatatttatcttatcaaaataatttgttttgaaatttaaaagccactacatttgtaccgtttttcatttttactctttcggatgtgaaaattcttcttcatcaaaattcttaattggccaatgtcctatgtat

SEQ ID NO: 1398 - DNA, 581 bp, Homo sapiens
gttgttatgaagaattaataataagatatgtaaaaccagcagcaccaatagtgcctgacaaaatataactgctcaataaataacagtgaattattataacaacagctaatggtattctattggaacacatggtctgtttcttttccaattctgagtgatctcaacagcctcacggcacattgaaaataaaagtcaacttcctcaccttccccataggccatggactttcccatctctacccacttgtgcagtttctcctctttcctctctcctcctcagttactaaagcaatcttccttcaaacacttctattttccattacatcacttcattcaggttggtgatcagctgcaacttcctcagaaagaccactgctgcttccagtgaccctggctttgtcttgctttgtattagattactcagctccctggtattattgttgtctttatcgcttattagaatgtaacccttaatgggcaagaaattgtcagtcttgttcatttatcatcgtataaaaaatgtttctagcacacagaaagtgaccaataaatatttctggaatcaaaaaaaaaaaaaaaaaa

SEQ ID NO: 1399 - DNA, 1145 bp, Homo sapiens
aggactggagatgtctgaggctcattctgccctcgagcccaccgggaacgaaagagaagctctatctcccctccaggagcccagctatgaactccttctccacaagcgccttcggtccagttgccttctccctggggctgctcctggtgttgcctgctgccttccctgccccagtacccccaggagaagattccaaagatgtagccgccccacacagacagccactcacctcttcagaacgaattgacaaacaaattcggtacatcctcgacggcatctcagccctgagaaaggagacatgtaacaagagtaacatgtgtgaaagcagcaaagaggcactggcagaaaacaacctgaaccttccaaagatggctgaaaaagatggatgcttccaatctggattcaatgaggagacttgcctggtgaaaatcatcactggtcttttggagtttgaggtatacctagagtacctccagaacagatttgagagtagtgaggaacaagccagagctgtccagatgagtacaaaagtcctgatccagttcctgcagaaaaaggcaaagaatctagatgcaataaccacccctgacccaaccacaaatgccagcctgctgacgaagctgcaggcacagaaccagtggctgcaggacatgacaactcatctcattctgcgcagctttaaggagttcctgcagtccagcctgagggctcttcggcaaatgtagcatgggcacctcagattgttgttgttaatgggcattccttcttctggtcagaaacctgtccactgggcacagaacttatgttgttctctatggagaactaaaagtatgagcgttaggacactattttaattatttttaatttattaatatttaaatatgtgaagctgagttaatttatgtaagtcatattttatatttttaagaagtaccacttgaaacattttatgtattagttttgaaataataatggaaagtggctatgcagtttgaatatcctttgtttcagagccagatcatttcttggaaagtgtaggcttacctcaaataaatggctaactttatacatatttttaaagaaatatttatattgtatttatataatgtataaatggtttttataccaataaatggcattttaaa

SEQ ID NO: 1400 - protein, 212 aa, Homo sapiens
MNSFSTSAFGPVAFSLGLLLVLPAAFPAPVPPGEDSKDVAAPHRQPLTSSERIDKQIRYILDGISALRKETCNKSNMCESSKEALAENNLNLPKMAEKDGCFQSGFNEETCLVKIITGLLEFEVYLEYLQNRFESSEEQARAVQMSTKVLIQFLQKKAKNLDAITTPDPTTNASLLTKLQAQNQWLQDMTTHLILRSFKEFLQSSLRALRQM

SEQ ID NO: 1401 - DNA, 622 bp, Homo sapiens
  misc_feature (16)..(16): n is a, c, g, or t
  misc_feature (515)..(515): n is a, c, g, or t
  misc_feature (522)..(522): n is a, c, g, or t
  misc_feature (582)..(582): n is a, c, g, or t
gtatcctgcacgtggnaatattcagaattgtagatagcataactctccctgctcctattcttttgagcctaggtataattttttttttttttttttagaaaaagacatatttagctttaatttctatttatgctaaacatatttataagtagtctgtcaatataataccaactatttttatttttacataattcaattatttcatttgacatgtctggcagactcaagacattaagtaaaaaattggaactatgatttttctttgtcattttttaaaaaagaattattttattaacctgctggcatataatctggagttcttttcacaaccttactttttctgatttgctttattgaatgattgaatactcatttctttctaaaaatatgttgtaaattctcccttggcaagatttctccctatgaggggagttattatttgagtctgccaagtggttaccatgggggcaaggtgccatgatggtattcctggggtgcattgggtttttgcgcantggaaanttaagacacctatagtaagtggactcattcatagatgaggttcagaaccctttacggtcncgggagaaggcctctgtccggacaggcagaagagtggttt

SEQ ID NO: 1402 - DNA, 2263 bp, Homo sapiens
gcacgagaagaatttaggaatttctgattcatttaaaggatttacaaattcatcaacccctgaaaactaaagcaaattgaacaggaaaaaaaaaaagaagatgggttttttaagtccaatatatgttattttcttcttttttggagtcaaagtacattgccaatatgaaacttatcagtgggatgaagactatgaccaagagccagatgatgattaccaaacaggattcccatttcgtcaaaatgtagactacggagttccttttcatcagtatactttaggctgtgtcagtgaatgcttctgtccaactaactttccatcatcaatgtactgtgataatcgcaaactcaagactatcccaaatattccgatgcacattcagcaactctaccttcagttcaatgaaattgaggctgtgactgcaaattcattcatcaatgcaactcatcttaaagaaattaacctcagccacaacaaaattaaatctcaaaagattgattatggtgtgtttgctaagcttccaaatctactacaacttcatctagagcataataatttagaagaatttccatttcctcttcctaaatctctggaaagactccttcttggttacaatgaaatctccaaactgcagacaaatgctatggatgggctagtaaacttgaccatgcttgatctctgttataattatcttcatgattctctgctaaaagacaaaatctttgccaaaatggaaaaactaatgcagctcaacctctgcagtaacagattagaatcaatgcctcctggtttgccttcttcacttatgtatctgtctttagaaaataattcaatttcttctatacccgaaaaatacttcgacaaacttccaaaacttcatactctaagaatgtcacacaacaaactacaagacatcccatataatatttttaatcttcccaacattgtagaactcagtgttggacacaacaaattgaagcaagcattctatattccaagaaatttggaacacctatacctacaaaataatgaaatagaaaagatgaatcttacagtgatgtgtccttctattgacccactacattaccaccatttaacatacattcgtgtggaccaaaataaactaaaagaaccaataagctcatacatcttcttctgcttccctcatatacacactatttattatggtgaacaacgaagcactaatggtcaaacaatacaactaaagacacaagttttcaggagatttccagatgatgatgatgaaagtgaagatcacgatgatcctgacaatgctcatgagagcccagaacaagaaggagcagaagggcactttgaccttcattattatgaaaatcaagaatagcaagaaactatataggtatacacttacgacttcacaaaacctatacttaatatagtaaatctaagtaaacatgtattactcaaagtaatatatttagaattatgtattagtataagatcagaattgaatttaagttgttggtgacatctgcatcatttcataggattagaacttactcaaaataatgtaaatctttaaaaatataaattagaatgacaagtgggaatcataaattaaacgttaatggtttcttatgctctttttaaatatagaaatatcatgttaaagaaagtgagtgtatcatttctattaacagtaatttttctaaaaatgaggaaggaagtagcattagcagtaaagacccacaggccacgaccctcctgatcactctgaggacaatatttaaatgacaggaaggtatattaatgtaacaagcattcatttaaggaatagaccattttctctgacctcttcttcaggaaagctttcacactggtatttgtgatctcaccattatgacatccatccccctagctcaccacatagcacatagaatgatatttttgatttgtaagaggccatccaggtactaaggacccaaggcatacagattcacaaaattaactaatctttttgcctcagaataccaaaacaacaaaattataaagctgttatttggacaactaaaaaacaccaaactatctcattgcaatttgtattttagcagatttcagcaactatcctaaacaatgttattgtgttccattttaactgggataaatgtttttgtaaaaatacaaccatagaaaggcctctttgttacaaaatgatttgcaaagaaataactgctttgtttgcaagattaaattagtgttggcaaaataaagttctaaagat

SEQ ID NO: 1403 - protein, 421 aa, Homo sapiens
MGFLSPIYVIFFFFGVKVHCQYETYQWDEDYDQEPDDDYQTGFPFRQNVDYGVPFHQYTLGCVSECFCPTNFPSSMYCDNRKLKTIPNIPMHIQQLYLQFNEIEAVTANSFINATHLKEINLSHNKIKSQKIDYGVFAKLPNLLQLHLEHNNLEEFPFPLPKSLERLLLGYNEISKLQTNAMDGLVNLTMLDLCYNYLHDSLLKDKIFAKMEKLMQLNLCSNRLESMPPGLPSSLMYLSLENNSISSIPEKYFDKLPKLHTLRMSHNKLQDIPYNIFNLPNIVELSVGHNKLKQAFYIPRNLEHLYLQNNEIEKMNLTVMCPSIDPLHYHHLTYIRVDQNKLKEPISSYIFFCFPHIHTIYYGEQRSTNGQTIQLKTQVFRRFPDDDDESEDHDDPDNAHESPEQEGAEGHFDLHYYENQE

SEQ ID NO: 1404 - DNA, 4321 bp, Homo sapiens
aaaccaataaggttaggacaagagaatagctgtggtttgcgttgcaaaaaccaaaaaaaaaaaaaaaaaaaaaaagaaagccccgaggctccatgggcagacctacaaggctgcgcaaacaaatcgagggatgagattctgctgtttctttgtctagggttctcagatgctatctgccgctgctgtttggtggggaaggagcgctgggcgcaaagctgttaccaaacagaacggtgggagctgatggctccgagtttggggcgaggtagaaactctccagtgccacttccgactttaagccttcctgttgccgtccactgtggcgggtttcttcctggggaacacgttttcgctcagtcgctcggcagcccgagcctgcggcagcggccaggcgcctgccccctgcgccgagctttcccctgcagaggcgctccactcccagaagcgccgcggctgcaccagagcgcctgagagcccccgcgcgtacccatccaggagcaaaactatgtcaggaatggaggtttgctaacccagaaaattcgaaggaacacattaaactggtggatgcagcagatgtaagcgctgtgcaaacatctcaagccagttcagatgttgctgtttcctcaagttgcaggtctatggaaatgcaggatctaaccagcccgcatagccgtctgagtggtagtagtgaatcccccagtggccccaaactcggtaactctcatataaatagtaattccatgactcccaatggcaccgaagttaaaacagagccaatgagcagcagtgaaacagcttcaacgacagccgacgggtctttaaacaatttctcaggttcagcaattgggagcagtagtttcagcccacgaccaactcaccagttctctccaccacagatttacccttccaacagaccatacccacatattctccctaccccttcctcacaaactatggctgcatatgggcaaacacagtttaccacaggaatgcaacaagctacagcctatgccacgtacccacagccaggacagccgtacggcatttcctcatatggtgcattgtgggcaggcatcaagactgaaggtggattgtcacagtctcagtcacctggacagacaggatttctcagctatggcacaagcttcagtacccctcaacctggacaggcaccatacagctaccagatgcaaggtagcagttttacaacatcatcaggaatatatacaggaaataattcactcacaaattcctctggatttaatagttcacagcaggactatccgtcttatcccagttttggccagggtcagtacgcacagtattataacagctcaccgtatccagcacattatatgaccagcagcaacaccagcccaacgacaccatccaccaatgccacttaccagcttcaagaaccgccatctggcatcaccagccaagcagttacagatcccacagcagagtacagcacaatccacagcccatcaacacccattaaagattcagattctgatcgattgcgtcgaggttcagatgggaaatcacgtggacggggccgaagaaacaataatccttcacctcccccagattctgatcttgagagagtgttcatctgggacttggatgagacaatcattgttttccactccttgcttactgggtcctacgccaacagatatgggagggatccacccacttcagtttcccttggactgcgaatggaagaaatgattttcaacttggcagacacacatttattttttaatgacttagaagaatgtgaccaagtccatatagatgatgtttcttcagatgataacggacaggacctaagcacatataactttggaacagatggctttcctgctgcagcaaccagtgctaacttatgtttggcaactggtgtacggggcggtgtggactggatgagaaagttggccttccgctacagacgggtaaaagagatttacaacacctacaaaaataatgttggaggtctgcttggtccagctaagagggaagcctggctgcagttgagggccgaaattgaagccctgaccgactcctggttgacactggccctgaaagcactctcgctcattcactcccggacaaactgtgtgaatattttagtaacaactactcagctcatcccagcattggcgaaagtcctgctgtatgggttaggaattgtatttccaatagaaaatatttacagtgcaactaaaataggaaaagaaagctgttttgagagaataattcaaaggtttggaagaaaagtggtgtatgttgttataggagatggtgtagaagaagaacaaggagcaaaaaagcacgcgatgcccttctggaggatctccagccactcggacctcatggccctgcaccatgccttggaactggagtacctgtaacagcgctcggcactttgacagcgcacagctgctctgtgaccagggacagatccagcaggccccagtctcgcatcagcgccggcctccagaacttagcaatttccgcctggtgatgcgcagttgctgtcagtcttgacctctgcctttgtggtgaatggaggaccacgtctatttcatcagaacagctgttgactctagtactgtgaatccagtgaaaataagccatgagaatgttttagcacagcgttatgtgtctgccacattaactacacggttcaaacctgtgaagaaaggacctgcaaacgcttcagttgttagcattttcaatgtgatataaacagcttctccaatacagcaaacctaattgcacaacagagactgaaatgtgtttcctgaataccagtggaggaattttcttgtaaagaaggtttactttttggtgtctcatacccagggtaatctgtacatctctacttatttatgaacagactttttttaaaaagataaaaaaacagctttattgaggtataattcacccaccagacttttttaaacatcaaataattgaagagacaatagcattagaaataagtgattaaaggcctctgcctcacaacatggcaagtacagtactttgaattttagcacattgcataatagttttaagtatgtctaatttaaacgtataatatgtacatcactgagacaatcatgtacagaaagaatttttggtgtaaatttgtaataatggataattcttttacatattgtttagggaaatgatattgaaaggtagcaatgcctggatagtgaagcatgaggcagcacgtgcacaaattcatgtgccgtgccttatctgagttttcggtataaatatgtagataatggatttttttttagataatgttgtcaagaccaaaagcatggatgtcaagtgtcagtaaggattttgttttctaaaattttttcctgcatcagttcttctgagggccttgatgaaataacacagcagtttcttaaacaatttgaaacaaaatgagctctcctaccacctcactttttcatttccacactaatgtattatatgtaactacttggaaaaaataattattcaaatgcttcttcccacaaagaatatagatgatagtagatatattttattaataaaatggttcatgaatcggagactaacaaagttttcatgtgctcagaattattaattatcgtgtctgcattttctttcgataaaggaagacacacgatgctaatccggaaatcagcaaactttgcattactccctatgtgcgtattttctctttcttcctgtcaccctgaggaaggttcattgccattgtcatcaccatggaaacaacgttcctctccacctgcattatgtactacatgacaggcatcaatctggggaaataataaaattatcacctttgtcagaccataagagtttctccaaaagtggtcagtttggctgggcaatattttctctcatctaacaaacacaatccattgtcatgaaattacccttaggatgagtcttctttaatcaatcatatattgggcggaaaaaacaccagctttgacccgaagtagttgaagagctacttcattcttttctgaagttgtgtgttgctgctagaaatagtcatttgtgaattatccaaattgtttaaattcacaattgaattagttttttcttccttttggcttgaagcaaacagttgaccatttttaaccttttcattttatgtttttgtactctgcagactgaaaagacaaagtttatcttggccttactgtataaaggtatgctgtgtccaccgttgtgtacagaatttttcttcattaattttgtgtttaagttaataaaatttatttgtgatgtactgtaa

SEQ ID NO: 1405 - protein, 592 aa, Homo sapiens
MEMQDLTSPHSRLSGSSESPSGPKLGNSHINSNSMTPNGTEVKTEPMSSSETASTTADGSLNNFSGSAIGSSSFSPRPTHQFSPPQIYPSNRPYPHILPTPSSQTMAAYGQTQFTTGMQQATAYATYPQPGQPYGISSYGALWAGIKTEGGLSQSQSPGQTGFLSYGTSFSTPQPGQAPYSYQMQGSSFTTSSGIYTGNNSLTNSSGFNSSQQDYPSYPSFGQGQYAQYYNSSPYPAHYMTSSNTSPTTPSTNATYQLQEPPSGITSQAVTDPTAEYSTIHSPSTPIKDSDSDRLRRGSDGKSRGRGRRNNNPSPPPDSDLERVFIWDLDETIIVFHSLLTGSYANRYGRDPPTSVSLGLRMEEMIFNLADTHLFFNDLEECDQVHIDDVSSDDNGQDLSTYNFGTDGFPAAATSANLCLATGVRGGVDWMRKLAFRYRRVKEIYNTYKNNVGGLLGPAKREAWLQLRAEIEALTDSWLTLALKALSLIHSRTNCVNILVTTTQLIPALAKVLLYGLGIVFPIENIYSATKIGKESCFERIIQRFGRKVVYVVIGDGVEEEQGAKKHAMPFWRISSHSDLMALHHALELEYL

SEQ ID NO: 1406 - DNA, 551 bp, Homo sapiens
tttaaaaagaaattattcctgcttttttaaaaagctataaaaggccatattatagaaatttggaaaagtggtcaaattatatacttatgcataatttttttattttactttcaataagaattacaattcaaagataaacgagaacccctgcagaattaacagtaaaatgaagatacaacaaagacagaaattgaaaaggtactctggtaaagtcaaaacactcccgtagacaaatgctcacatactttcaactaatagtagtatgttatttaaagaaaaacaaaaaagatacaatgtaggtggtcaataaatgtttgttgggcaaacggatgaatggatgattgtaataagaacaatctatatgaatgtcaaaaaagtatgtattttcctgcatgtattggagaggaaaagaacagaaaaacaagtaacttcaagtacagataaaccacttgggggcttttccagatttaaatttcacattaacatcactctaatgtgacttctatgacaagatattttacactgtacattcctaaaacatgagatccaga

SEQ ID NO: 1407 - DNA, 454 bp, Homo sapiens
  misc_feature (187)..(187): n is a, c, g, or t
  misc_feature (337)..(337): n is a, c, g, or t
gagaagacgacagaagggcaacagtacaggaagttgggtagatgtggggacaacagagagactgtggcagaggcaggactgcagatctatggaaattgcctggaagagtcagctgtaagggatgagaatcctgagggtaaaagagaaaagggaaagactcctctttgatcttatgaagctgaatacnaagatctaacatgagtgagattctgttgccccactttaagtgactttaatccaaaggtaaaacccgattggttttttagtttgataggggaaaatgaaacctctttttgagctcaaaaaaaaaaaaaaaaaaaaagcgttccccatggangcgacatgatgagaggaatgtgaccgggattcgggaacgtctgggggggggccacttcctttatggggaggcgattaattctgcgatcatggaccaacctgttccccgggggaaaaa

SEQ ID NO: 1408 - DNA, 2404 bp, Homo sapiens
cgaggaacgagtgacagccggacagtccgccgggcggtgatccggggccgctcccgggcgcgccctcggctccaggtcctacccggagccgctgccatgggagagccagccttgggcgctggggaccagccgccgcgcccgcctcggagtcgcggcccgagtcccggcgccagcagccagcccgctgcgtccccttcccgggctgcagggctgcctccgccgcgccgccggcccggattgtgcctgtgatgagccgcagcccgcagcgagctctgcccccgggcgcgctccctcggctgctccaggctgcgcctgcagccgcgccgcgtgccctgctcccgcagtggccccggcgcccaggacgccgctggcccgcgtcccctctcggaatgaaggtgttccgtaggaaggcgctggtgttgtgcgcgggctatgcactgctgctggtgctcactatgctcaacctcctggactacaagtggcacaaggagccgctgcagcagtgcaaccccgatgggccgctgggtgccgcagcgggggcagccggaggcagctgggggcgcccagggccgcctccggccgggccgccccgtgctcatgcccgtttggacctccgcactccttaccgccctcccgctgccgccgtcggggcggctcctgcagccgcggcagggatggcgggggttgcggcccctccaggcaatggcactcggggcaccgggggcgtcggggacaagcggcagctggtgtacgtgttcaccacgtggcgctctggctcgtcgttcttcggcgagctattcaaccagaatcccgaggtgttctttctctacgagccagtgtggcatgtatggcaaaaactgtatccgggggacgccgtttccctgcagggggcagcgcgggacatgctgagcgctctttaccgctgcgacctctctgtcttccagttgtatagccccgcgggcagcggggggcgcaacctcaccacgctgggcatcttcggcgcagccaccaacaaggtggtgtgctcgtcaccactctgccccgcctaccgcaaggaggtcgtggggttggtggacgaccgcgtgtgcaagaagtgcccgccacagcgcctggcgcgtttcgaggaggagtgccgcaagtaccgcacactagtcataaagggtgtgcgcgtcttcgacgtggcggtcttggcgccactgctgcgagacccggccctggacctcaaggtcatccacttggtgcgtgatccccgcgcggtggcgagttcacggatccgctcgcgccacggcctcatccgtgagagcctacaggtggtgcgcagccgagacccgcgagctcaccgcatgcccttcttggaggccgcgggccacaagcttggcgccaagaaggagggcgtgggcggccccgcagactaccacgctctgggcgctatggaggtcatctgcaatagtatggctaagacgctgcagacagccctgcagccccctgactggctgcagggccactacctggtggtgcggtacgaggacctggtgggagaccccgtcaagacactacggagagtgtacgattttgtgggactgttggtgagccccgaaatggagcagtttgccctgaacatgaccagtggctcgggctcctcctccaagcctttcgtggtatctgcacgcaatgccacgcaggccgccaatgcctggcggaccgccctcaccttccagcagatcaaacaggtggaggagttttgctaccagcccatggccgtcctgggctatgagcgggtcaacagccctgaggaggtcaaagacctcagcaagaccctgcttcggaagccccgtctctaaaaggggttcccaggagacctgattccctgtggtgatacctataaagaggatcgtagtgtgtttaaataaacacagtccagactcaaacggaggaagcccacatattctattatagatatataaataatcacacacacacttgctgtcaatgttttgagtcagtgcatttcaaggaacagccacaaaatacacacccctaagaaaaggcaagacttgaacgttctgaccaggtgcccctcttcttctttgccttctcttgtcctctttctcctatttcttaccctgtcctccacctgccttccattttgaagtgggatgttaatgaaatcaagttccagtaacccaaatcttgtttacaaaatattcgtggtatctgtgaacatgttaagagtaatttggatgtgggggtgggggtggagaaaggggaagtggtccagaaacaaaaagccccattgggcatgataagccgaggaggcattcttctaaagcagacttttgtgtaaaaagcaaaggttacatgtgagtattaataaagaagataataaataaaaaaaaaaaaaaaa

SEQ ID NO: 1409 - protein, 530 aa, Homo sapiens
MSRSPQRALPPGALPRLLQAAPAAAPRALLPQWPRRPGRRWPASPLGMKVFRRKALVLCAGYALLLVLTMLNLLDYKWHKEPLQQCNPDGPLGAAAGAAGGSWGRPGPPPAGPPRAHARLDLRTPYRPPAAAVGAAPAAAAGMAGVAAPPGNGTRGTGGVGDKRQLVYVFTTWRSGSSFFGELFNQNPEVFFLYEPVWHVWQKLYPGDAVSLQGAARDMLSALYRCDLSVFQLYSPAGSGGRNLTTLGIFGAATNKVVCSSPLCPAYRKEVVGLVDDRVCKKCPPQRLARFEEECRKYRTLVIKGVRVFDVAVLAPLLRDPALDLKVIHLVRDPRAVASSRIRSRHGLIRESLQVVRSRDPRAHRMPFLEAAGHKLGAKKEGVGGPADYHALGAMEVICNSMAKTLQTALQPPDWLQGHYLVVRYEDLVGDPVKTLRRVYDFVGLLVSPEMEQFALNMTSGSGSSSKPFVVSARNATQAANAWRTALTFQQIKQVEEFCYQPMAVLGYERVNSPEEVKDLSKTLLRKPRL

SEQ ID NO: 1410 - DNA, 511 bp, Homo sapiens
cttttttttttttttttttgctgtctgtaatataaacatgacccctacttacactgtcctacctatgtggccaataagagtgttgtcttcgcagttggaacccaaaagccctatgggatggaggatatgcactgtacttctttgtaaaagtgtcttgacaaagctgatgtccaatcaacatttaattaccagactgtccaagctagaaatgaaatacagttgattgcctgagtcctgataatcttgctaacaaaattataaaaggcctatagtatggccaatatatttggctaatggaaatgattttcttaaagccagaaaattcagctacccatagtgcttaaaaccagccttaaaagaacatgaacaggatggttcccaccttatcgagatcactggcattccatagtatccattcattcatatcctcctcctaggccgcatgaaacacctaccacatttccctacctcctaaagcaaacaaaactcttttcctccctcttgctgcaaa

SEQ ID NO: 1411 - DNA, 1665 bp, Homo sapiens
tacaaatcattcatgaaactgaagctcagtctcccaggggtaagtcctgggccacgtgcaaacaatggcaaatccagctcttccatgatagagaaggcaaacacacccaccttcatcctgagcctaaaaggccacctctgagcacttgggcagccactcctctgggcctcagagggccatgagcttggccaggtaggcacagcggcggggaagtcacagctgtcaggtaccggccatggtgcaggtgggaataggagatgccagagctgctttagctgaggaaagcaaacagtcagcagtgctcaaaggagcaaaacttcgaatgtgcacattgacccctgacacctgcaagcataacacagatcctaagactagagtgaagtaggaagaagaattagaaaatccagtggatgtcctgagtatagggaaccagggccgttgaaaatcagtaaaggttgattacctggggcgagaccgggtgactgtggcagtgcaggtgaaggtaccctggaccttctcagttcgctggcacataaggctccgccaataaagcgtggttctctctgtcatacacacacacacacacacacacacacacacacacacaatgattggagggctatatgatccagcattagcttcctggtgtgccaagcatgcttgatcgggaatttttttttattattattattttttagctgtacctgaaggcatttctcggatgtggagaggagaatggaaatcgcagaaccaaatcagtttgccctgccatatttggctgtggtctgtcattgggcatttctgatgtgcttttctggattcaggaagagctgattgtcctccgagggttgaaaaaaaaaaacagtttcagaaacctgaatccagggccttatagttctcctcattatctatcttcttctcccttccctcgcccaagggagtgggggaaacacttttcattgcagagtttgctttaaagttttcccatcttgcgtgcattatcccttgatattaaaattattttctcagtttaatccaactcctgctgagaagctgtgtgagatttaggctgtggggtttttttcttgtactcttttggatggtgttgcatttttcactcttaacccgagggtgtgtttcagcttatgttcgttctgtttcatgcaggtttatagcacggtagagtagaaggcggcttctggtttttagggtatttttagaattcattcctgagtgaggggttcagacacccagtctcctcggaacaggggtgaggggtcgactgagctttgttgagaagcctccagttaggcttcgggcgggtctccatgttatattgtgtgtttactgagcttcccactggtagaagatgacacatttgtccatcgtcctgtgtatctgctttccagaggacaccggagcattctcctggggtcactcccacatggctgcctcacatagctgttttgcaacagcctttattgccaacacccttggaagaacatctcctgtagaagtacaagttttgcaatatggactttggaagtggttttgtgatgttcgaattttctgttagcctattgctcaagcactacagaatgtacatagtccctttggccatcctctcaccccagaatatcctaataaacattgttttcttttttt

SEQ ID NO: 1412 - DNA, 2588 bp, Homo sapiens
ggaggggagtcgagactcccgcgccccaccacccccggcggagctgctgctgagccactcaatctgagccctggctactaataaaatttgagagggaagatctgatctcctagaattagagttggtacagaaaccatttcagctccaaaaatgttggaggaagatatggaagtcgccataaagatggtggttgtagggaatggagcagttggaaaatcaagtatgattcagcgatattgcaaaggcatttttacaaaagactacaagaaaaccattggagttgattttttggagcgacaaattcaagttaatgatgaagatgtcagactaatgttatgggacactgcaggtcaggaggaatttgatgcaattacaaaggcctactatcgaggagcccaggcttgtgtgctcgtgttctctaccacagataggggatcttttgaagcagtttccagttggagagagaaagtagtagccgaagtgggagatataccaactgtacttgtgcaaaacaagattgatcttctggatgattcttgtataaagaatgaggaagctgaggcactggcaaaaaggttaaggttaagattctacagaacatcagtgaaagaagatctaaatgtgaatgaagtttttaagtatttggctgaaaaataccttcagaaactcaaacaacaaatagctgaggatccagaactaacgcattcaagtagtaacaagattggtgtctttaatacatctggtggaagtcactccggtcagaattcaggtaccctcaatggtggagatgtcatcaatcttagacccaacaaacaaaggaccaataaaaacagaaatccttttagcagctgtagcataccctaagatgttttgggaggaaaacaattgaattacattgtgcaatgcattaagaaacccatccagctgtcatggtatgttacaagggtttcagcagactttgctcctaatggctctctgaaagtgacagacttaaatattgctctgcagtgctttttcagaatgtatagttaggacctctggtggaaaaaattattgccctgtggactcctttaattttttttacattagacgaaagctttcttcctggtttgtaaaagggaatgctattaagaaatttcaaaaccacagggttttggcggaattttaaatgcttggaaaaacataaatgaaatgcctaaatatattgttacagattttaatactgtggatcaaggaaagatagcaagcattcttttcctgaaattgggtcatgtaggcttttctgcggaaatagtattgaatctggaatactttcacaaaataatactgaagggtaaacccttaaatcttgccagactgcattaggtatttgggcattgaacttgtgcaatatctgtgtaatgtagaatgtggggtgtgcatgcagatgtctggtactggagtaagctgaaggtatgtgcagtatttaagaaaatgacattctaattaattcacttataaaaccatttacatattgtgtatatgtttttattttcaaatgataaactctagacatatattttgcaaaatgagcttgggtttaaaaagtgctttgtgccaaaaatatcatacctaatttttatagtgctttactatcagaatttatattgtttattatatcttttaaaagcagtaagcagttttcatctgacagcgtagataaaagaggagtataggaatttgaatgctagagcatctcccaggtgagccttattgcagatctttttgatatagtcacccataagcatggtgagctcctgctctcataaggtcagccaaagccccttaagaaggtacacagcacatctgcagtcattcaggaggtcctgtgaagtgtggtgatgcatctaacaccttttgctgctcactgagaacccagctttgaacttacaagattacactaaccatttttaaagtgcacaaaaatattatatattagtcttaactaaaattacatattttataatgccctgcaactctaaaccatccttttgtttacacatctttgtatggtattttaagattatcaatcacttcaacatttctataaccttgtttgtatagcctttctcaagagctgtcagtcccacataccagaatcatttcttttaccaaaatgatttaatatgtaatcatgtgtcaggacataaattttgtcacttgggacagtagctttccagctaagataattgcgtgaactctgttaaaactgattatcactcatcaatggctttatttttaacctataaataaccctttcaatatacctggtttttacagcattgcaaaatctgtaaaaataacttttattggaaaatgtcatgaagtcatttttcattatttgtactaaacaatgttttatgtactccttttgtgttttatcttttgtttttccatctgtactcccctcatcctcctaatgttgagaaaatcaaatttcctgggtgtgtccttgttaagtgatcaaaagtaaatgttctctttgccattttagatggaaaaataaaaaaaattaaaaagtaaaaaaaaaaaaaaaaaaaaaaaaaaaa

SEQ ID NO: 1413 - protein, 237 aa, Homo sapiens
MLEEDMEVAIKMVVVGNGAVGKSSMIQRYCKGIFTKDYKKTIGVDFLERQIQVNDEDVRLMLWDTAGQEEFDAITKAYYRGAQACVLVFSTTDRGSFEAVSSWREKVVAEVGDIPTVLVQNKIDLLDDSCIKNEEAEALAKRLRLRFYRTSVKEDLNVNEVFKYLAEKYLQKLKQQIAEDPELTHSSSNKIGVFNTSGGSHSGQNSGTLNGGDVINLRPNKQRTNKNRNPFSSCSIP

SEQ ID NO: 1414 - DNA, 239 bp, Homo sapiens
  misc_feature (34)..(34): n is a, c, g, or t
  misc_feature (59)..(59): n is a, c, g, or t
  misc_feature (196)..(196): n is a, c, g, or t
  misc_feature (228)..(228): n is a, c, g, or t
  misc_feature (234)..(234): n is a, c, g, or t
aactgagcaccagctgtgctaagcctgccacggngtatccttgcagcctcacaacagtnggaggtctgtatcctgaatgtcctcattttacagatgaggacattgaggagaagagacttacccagggctcacacagcagctcagcctgttccaggggcctggtcagtgcgtgttctttgccacccagccttgtcanttccagtggccagcttccagaaaccggaaggntttttnccttt

SEQ ID NO: 1415 - DNA, 455 bp, Homo sapiens
tttttttttttttagtgactcagttttttattgaataaaatggcctacagctgtatgacagtaatatggcccttggtgtttgaggaaaatatcatgttgtaggttggccaaaaaggagatagcagtccagctgaaatttgttttcttatactggctttaaggcagtgattagaaaaggcctaagaggtgggttctgtaagggattgctggaaggaaagtaggaatatggaaagtcatgagacatatactgtcatctcttcttgcttcctctcaagtcacatgcaaattcagggagagttagtatgaaacacacaatggaaatttgggctctaacatatgcaatctgattcttcatggacttcatttggccatatcagttccaacaatttcagccaatgtttagaaatcttataagcagataacattttaatgtttcaacaagccatttcctatct

SEQ ID NO: 1416 - DNA, 292 bp, Homo sapiens
  misc_feature (237)..(237): n is a, c, g, or t
  misc_feature (256)..(256): n is a, c, g, or t
  misc_feature (264)..(264): n is a, c, g, or t
tttcttggcactctgtaaggggccaccttaatcataccaaatattggggaaagtgggataaagggaggaggaggagctagcagacacatccagtatctccttctggagcacaggatgaaataagggagctgtattatttcatgtctttgtcacaaagaactttcctctcaaggaaaggtgacctttctcctgtcttcattttcctccttccagggcctcctcgctcacccacccctncctctcttccaaggagatngtcagctnagctcattcttggggcagatgttttggg

SEQ ID NO: 1417 - DNA, 337 bp, Homo sapiens
aattaattgagcaaacgcccctttctgggcaggagcaaggttcgcggctgcagatatctcaagctgaaggcaagagcccaggcatggcgcaggcaggccacgtggctgttccctgctgagactcgcagctttggtcttggaaacctcagggtgtggagctgcttgggccgactgaagggttcagctttttgggagaagtgagggcgagtgttatttctccagcgaggtgtaaacaagactgtgctttcatgggagggacaaattgcagagttgatcccttaccatttttacagaaatactcagaaagtgactacagcttgtcaactggcctgtttag

SEQ ID NO: 1418 - DNA, 288 bp, Homo sapiens
  misc_feature (262)..(262): n is a, c, g, or t
  misc_feature (267)..(267): n is a, c, g, or t
  misc_feature (283)..(283): n is a, c, g, or t
cccactctcctctttccggtacctgtgagtcagctaggggagggcagctctcacccaggctgatagttcggtgacctggctttatctactggatgagttccgctgggagatggaacatagcacgtttctctctggcctggtactggctacccttctctcgcaagtgagccccttcaagatacctatagaggaacttgaggacagagtgtttgtgaattgcaataccagcatcacatgggtagagggaacggtgggaacactnctctnagacattacaagactngacct

SEQ ID NO: 1419 - DNA, 3806 bp, Homo sapiens
cttcttgtaagagagtgctaggcacatagtcccctcctattcctaatcctcccaccaaagaaagaggcacagagttcattacttagtgggggccagctgtgatcggccaactgccagctgccttaaaaaggaagaccagtgatgctaggatggagtgaaacccaagaggaagtgccatcatgaggaatcaatgagagatctgtgaagagagagggctgggtgggagcccagaaggatagaacctggaagatcaatatctcccgtgagggaaataacaatggagccaggttctaagtcagtgtctaggtcagactggcaacctgaaccacaccagaggcctataaccccgctagagcctgggccagaaaagacacccatagcccagccagaatcgaagactctgcagggatccaatacccaacagaagcctgcttcaaaccaaagacccctcacccagcaggagacccctgcacaacatgatgctgaatcccagaaggaacctagagcccaacaaaaatctgcttcacaagaggaatttcttgccccacagaagcccgcaccacagcaatcaccttacatccaaagggtgctgctcactcaacaggaagctgcctcccagcagggacctgggctaggaaaagaatctataactcaacaggagccagcattgagacaaagacatgtagcccagccagggcctgggccaggagagccacctccagctcaacaagaagctgaatcaacacctgcggcccaggctaaacctggagccaaaagggagccatctgccccgactgaatctacgtcccaagagacacctgaacagtcagacaagcaaacaacgccagtccagggagccaaatccaagcagggatctttgacagagctgggatttctaacaaaacttcaggaactatccatacagcgatcagccctagagtggaaggcactttctgagtgggtcacagattctgagtcagaatcagatgtgggatcatcttcagacacagattctccagccacgatgggtggaatggtggcccagggagtgaagctaggcttcaaaggaaaatctggttataaagtgatgtcaggatacagtgggacgtcgccacatgagaaaaccagtgctcggaatcacagacactaccaggatacagcctcaaggctcatccacaacatggacctgcgcacaatgacacagtcgctggtgactctggcggaggacaacatagccttcttctcgagccagggtcctggggaaacggcccagcggctgtcaggcgtttttgccggtgtacgggagcaggcgctggggctggagccggccctgggccgcctgctgggtgtggcgcacctctttgacctggacccagagacaccggccaacgggtaccgcagcctagtgcacacagcccgctgctgcctggcgcacctcctgcacaaatcccgctatgtggcctccaaccgccgcagcatcttcttccgcaccagccacaacctggccgagctggaggcctacctggctgccctcacccagctccgcgctctggtctactacgcccagcgcctgctggttaccaatcggccgggggtactcttctttgagggcgacgaggggctcaccgccgacttcctccgggagtatgtcacgctgcataagggatgcttctatggccgctgcctgggcttccagttcacgcctgccatccggccattcctgcagaccatctccattgggctggtgtccttcggggagcactacaaacgcaacgagacaggcctcagtgtggccgccagctctctcttcaccagcggccgctttgccatcgaccccgagctgcgtggggctgagtttgagcggatcacacagaacctggacgtgcacttctggaaagccttctggaacatcaccgagatggaagtgctatcgtctctggccaacatggcatcggccaccgtgagggtaagccgcctgctcagcctgccacccgaagcctttgagatgccactgactgccgaccccacgctcacggtcaccatctcacccccactggcccacacaggccctgggcccgtcctcgtcaggctcatctcctatgacctgcgtgaaggacaggacagtgaggagctcagcagcctgataaagtccaacggccaacggagcctggagctgtggccgcgcccccagcaggcaccccgctcgcggtccctgatagtgcacttccacggcggtggctttgtggcccagacctccagatcccacgagccctacctcaagagctgggcccaggagctgggcgcccccatcatctccatcgactactccctggcccctgaggcccccttcccccgtgcgctggaggagtgcttcttcgcctactgctgggccatcaagcactgcgccctccttggctcaacaggggaacgaatctgccttgcgggggacagtgcaggcgggaacctctgcttcaccgtggctcttcgggcagcagcctacggggtgcgggtgccagatggcatcatggcagcctacccggccacaatgctgcagcctgccgcctctccctcccgcctgctgagcctcatggaccccttgctgcccctcagtgtgctctccaagtgtgtcagcgcctatgctggtgcaaagacggaggaccactccaactcagaccagaaagccctcggcatgatggggctggtgcggcgggacacagccctgctcctccgagacttccgcctgggtgcctcctcatggctcaactccttcctggagttaagtgggcgcaagtcccagaagatgtcggagcccatagcagagccgatgcgccgcagtgtgtctgaagcagcactggcccagccccagggcccactgggcacggattccctcaagaacctgaccctgagggacttgagcctgaggggaaactccgagacgtcgtcggacacccccgagatgtcgctgtcagctgagacacttagcccctccacaccctccgatgtcaacttcttattaccacctgaggatgcaggggaagaggctgaggccaaaaatgagctgagccccatggacagaggcctgggcgtccgtgccgccttccccgagggtttccacccccgacgctccagccagggtgccacacagatgcccctctactcctcacccatagtcaagaaccccttcatgtcgccgctgctggcacccgacagcatgctcaagagcctgccacctgtgcacatcgtggcgtgcgcgctggaccccatgctggacgactcggtcatgctcgcgcggcgactgcgcaacctgggccagccggtgacgctgcgcgtggtggaggacctgccgcacggcttcctgaccctagcggcgctgtgccgcgagacgcgccaggccgcagagctgtgcgtggagcgcatccgcctcgtcctcactcctcccgccggagccgggccgagcggggagacgggggctgcgggggtagacgggggctgcggggggcgacactaaaagcctgttgttcccatctgcgccggcctccgtcatgaatgccttccgggccgggcggaaggggacgcgggctgtgccttacttaagtcgggggtggcaagggggcggggcgggggcccgaaagctgagaccctcgccacggggagggggacgcgcacacacaccggtcaccgagacggctggacctgcacgccaccgctgccttttgctgctgctgctgcggcgaccgccgcagggacggggactggccctcccttgcaggtcggtttggtttgttgtaaataaaagtatttaatta

SEQ ID NO: 1420 - protein, 1076 aa, Homo sapiens
MEPGSKSVSRSDWQPEPHQRPITPLEPGPEKTPIAQPESKTLQGSNTQQKPASNQRPLTQQETPAQHDAESQKEPRAQQKSASQEEFLAPQKPAPQQSPYIQRVLLTQQEAASQQGPGLGKESITQQEPALRQRHVAQPGPGPGEPPPAQQEAESTPAAQAKPGAKREPSAPTESTSQETPEQSDKQTTPVQGAKSKQGSLTELGFLTKLQELSIQRSALEWKALSEWVTDSESESDVGSSSDTDSPATMGGMVAQGVKLGFKGKSGYKVMSGYSGTSPHEKTSARNHRHYQDTASRLIHNMDLRTMTQSLVTLAEDNIAFFSSQGPGETAQRLSGVFAGVREQALGLEPALGRLLGVAHLFDLDPETPANGYRSLVHTARCCLAHLLHKSRYVASNRRSIFFRTSHNLAELEAYLAALTQLRALVYYAQRLLVTNRPGVLFFEGDEGLTADFLREYVTLHKGCFYGRCLGFQFTPAIRPFLQTISIGLVSFGEHYKRNETGLSVAASSLFTSGRFAIDPELRGAEFERITQNLDVHFWKAFWNITEMEVLSSLANMASATVRVSRLLSLPPEAFEMPLTADPTLTVTISPPLAHTGPGPVLVRLISYDLREGQDSEELSSLIKSNGQRSLELWPRPQQAPRSRSLIVHFHGGGFVAQTSRSHEPYLKSWAQELGAPIISIDYSLAPEAPFPRALEECFFAYCWAIKHCALLGSTGERICLAGDSAGGNLCFTVALRAAAYGVRVPDGIMAAYPATMLQPAASPSRLLSLMDPLLPLSVLSKCVSAYAGAKTEDHSNSDQKALGMMGLVRRDTALLLRDFRLGASSWLNSFLELSGRKSQKMSEPIAEPMRRSVSEAALAQPQGPLGTDSLKNLTLRDLSLRGNSETSSDTPEMSLSAETLSPSTPSDVNFLLPPEDAGEEAEAKNELSPMDRGLGVRAAFPEGFHPRRSSQGATQMPLYSSPIVKNPFMSPLLAPDSMLKSLPPVHIVACALDPMLDDSVMLARRLRNLGQPVTLRVVEDLPHGFLTLAALCRETRQAAELCVERIRLVLTPPAGAGPSGETGAAGVDGGCGGRH

SEQ ID NO: 1421 - DNA, 226 bp, Homo sapiens
tttttttttttttttttttttctaaaacaatattttcttttgggaaatgcccgttttggcaggaatacattttggctccgctgtgctgtgaattcggaggaaaagtagggagggccggaaagcccagggcttcatgcagagtaaacatcaagaacccacctgctctggagtcttggtgggcaaggggaacgaaccttccagtccatttctaccgtcaccataattc

SEQ ID NO: 1422 - DNA, 685 bp, Homo sapiens
tccgcccctcagcgcatgggtggcggtcacgtgcccagaacgtccggcgttcgccccgccctcccagtttccgcgcgcctctttggcagctggtcacatggtgagggtgggggtgagggggcctctctagcttgcggcctgtgtctatggtcgggccctctgcgtccagctgctccggaccgagctcgggtgtatggggccgtaggaaccggctccggggccccgataacgggccgcccccacagcaccccgggctggcgtgagggtctcccttgatctgagaatggctacctctcgatatgagccagtggctgaaattggtgtcggtgcctatgggacagtgtacaaggcccgtgatccccacagtggccactttgtggccctcaagagtgtgagagtccccaatggaggaggaggtggaggaggccttcccatcagcacagttcgtgaggtggctttactgaggcgactggaggcttttgagcattccaatgttgtccggctgatggacgtctgtgccacatcccgaactgaccgggagatcaaggtaaccctggtgtctgagcatgtagaccaggacctaaggacatatctggacaagggcacccccacaggcttgccagcgaaagatcaggatctgatgcgccagttctaaaagctagattcttcatgcattgctcgtccc

SEQ ID NO: 1423 - DNA, 382 bp, Homo sapiens
gagcggccgccctttttttttttttttttttttttttacatagaaaaaaatgtatatttatatccctaaaaggcaatacagaatttataaccaaaccatgtgtgagaactgttaaattacattccaaataccagcagtggaacaaacagaaacacagagatgttttaaaaaacatgcagcacgttacaaagaggccgtgtaataattcacaacttttgttagcagccgttaagtttgattagtattaagcagcaatggtttaagcaattttaaatcatgatatgatagttacatatatgcattttactgttccaattatagtttagtaataggtcaggggtttgagcaacattttaagcattataattttctcctaaattat

SEQ ID NO: 1424 - DNA, 1581 bp, Homo sapiens
gagagatggttggtgccatgtggaaggtgattgtttcgctggtcctgttgatgcctggcccctgtgatgggctgtttcgctccctatacagaagtgtttccatgccacctaagggagactcaggacagccattatttctcaccccttacattgaagctgggaagatccaaaaaggaagagaattgagtttggtcggccctttcccaggactgaacatgaagagttatgccggcttcctcaccgtgaataagacttacaacagcaacctcttcttctggttcttcccagctcagatacagccagaagatgccccagtagattctctggctacagggtgggccgggaggttcatccatgtttggactctttgtggaacatgggccttatgttgtcacaagtaacatgaccttgcgtgacagagacttcccctggaccacaacgctctccatgctttacattgacaatccagtgggcacaggcttcagttttactgatgatacccacggatatgcagtcaatgaggacgatgtagcacgggatttatacagtgcactaattcagtttttccagatatttcctgaatataaaaataatgacttttatgtcactggggagtcttatgcagggaaatatgtgccagccattgcacacctcatccattccctcaaccctgtgagagaggtgaagatcaacctgaacggaattgctattggagatggatattctgatcccgaatcaattatagggggctatgcagaattcctgtaccaaattggcttgttggatgagaagcaaaaaaagtacttccagaagcagtgccatgaatgcatagaacacatcaggaagcagaactggtttgaggcctttgaaatactggataaactactagatggcgacttaacaagtgatccttcttacttccagaatgttacaggatgtagtaattactataactttttgcggtgcacggaacctgaggatcagctttactatgtgaaatttttgtcactcccagaggtgagacaagccatcccacgtggggaatcagacttttaatgatggaactatagttgaaaagtacttgcgagaagatacagtacagtcagttaagccatggttaactgaaatcatgaataattataaggttctgatctacaatggccaactggacatcatcgtggcagctgccctgacagagcgctccttgatgggcatggactggaaaggatcccaggaatacaagaaggcagaaaaaaaagtttggaagatctttaaatctgacagtgaagtggctggttacatccggcaagtgggtgacttccatcaggtaattattcgaggtggaggacatattttaccctatgaccagcctctgagagcttttgacatgattaatcgattcatttatggaaaaggatgggatccttatgttggataaactaccttcccaaaagagaacatcagaggttttcattgctgaaaagaaaatcgtaaaaacagaaaatgtcataggaataaaaaaattatcttttcatatctgcaagatttttttcatcaataaaaattatccttgaaaaaaaa

SEQ ID NO: 1425 - protein, 233 aa, Homo sapiens
MFGLFVEHGPYVVTSNMTLRDRDFPWTTTLSMLYIDNPVGTGFSFTDDTHGYAVNEDDVARDLYSALIQFFQIFPEYKNNDFYVTGESYAGKYVPAIAHLIHSLNPVREVKINLNGIAIGDGYSDPESIIGGYAEFLYQIGLLDEKQKKYFQKQCHECIEHIRKQNWFEAFEILDKLLDGDLTSDPSYFQNVTGCSNYYNFLRCTEPEDQLYYVKFLSLPEVRQAIPRGESDF

SEQ ID NO: 1426 - DNA, 374 bp, Homo sapiens
tttttttccttgataagatccttaaaaagtatctttaattgatgccaaatatgaacagatcgtaaagtgacagaagcaagtaaaattgcatagatgaaaactatgcgcatcaattaggttctcaattcataacattcaatgtccttgacctgacatattacacagttagagaagggagaatgcgcagtaggtgaagatgagacacgtccttaactcaaggtggaagcaactggcaaactcaagaaataaaatagcgttttttcagcttaaatggtttgttgtcctgatggtgcactttaaattaatactactcaatttttatttttaacctcagtaatactttatctttactattagaggcatgtcacatggag

SEQ ID NO: 1427 - DNA, 482 bp, Homo sapiens
ttttttttttttttttttcttggaataatgtttatttaaagttacatttcaaaggaaactatcttcaggagggcatgaagcctattttggctactgcaaaacaaccaaaagttttataaaatatttctgatttaaattactaaggcactataaataggcccctatattacatacaatcttcaaacatttttaaaagttgaaactatgtattagttgatatctaaaatattaaagcccctgacaaactgaacggctaaaaacttgacaaaatgagatgcctgtttcaatgattctgttgccagcatattaattaaaatacaatttgagattctaaattacacgatccagccttagtccagggaccttgtgatgatagttgtattaaacttcaaaacaccctttccgcaggaaagggcatttttcaagatggcaactgctgtgtcatcattttcccttttctggactgtatcagaaatccttca

SEQ ID NO: 1428 - DNA, 360 bp, Homo sapiens
catccggcgccggctttcggcgcgacggtcgccgcgttccatcgtcgcgcggcccttcgggcgcccgagcccgcaatgtcgggccccaacggagacctggggatgccggtggaggcgggagcggaaggcgaggaggacggcttcggggaagcagaatacgctgccatcaactccatgctggaccagatcaactcctgtctggaccacctggaggagaagaatgaccacctccacgcccgcctccaggagctgctggagtccaaccggcagacacgcctggagttccagcagcagctcggggaggcccccagtgatgccagcccctaggctccaagagcccccaaccgggacccaaccctg

SEQ ID NO: 1429 - DNA, 430 bp, Homo sapiens
tttttttttttttttttcagcaattgtaaacagtacatatttttaacttttgtgtctacatgttcatttctaggaggtagaaacaggtttttgtgtgtttatcttgcacccgagattttgctggactccctagttgtctgctttctgtagattcctaggatttcccacatagacaagcatggcctctgcatgagaatacctggatcctcccctcagggcttctgacttagggtctggacatcaggactttttaaaccttcctggtgattctgataagcagctgaggtggagaaccactgctctttgaccttgtcgtcagtgagcagaggtgccttaagcacaaaagcctagtgccaggaccccgcatcccgcccactctgcactcggcctatcttgctgtcggccggcatggctaacaggcgtgggccct

SEQ ID NO: 1430 - DNA, 417 bp, Homo sapiens
  misc_feature (383)..(383): n is a, c, g, or t
  misc_feature (401)..(401): n is a, c, g, or t
ggccagcggcggagtctccaactgggagagctgcagctgccgagaggaggagaacgctgaggtcggtcggaccaacggacgcgctgaccgctgccaactgcagctcgcgctgcctcctgctcgcgccgtgccactaaggtcactcccgcctccgagagcccagagccgagatggaaacggtccaggagctgatccccctggccaaggagatgatggcccagaagcgcaaggggaaaatggtggaagctgtacgtgctgggcagcgtgctggccctcttcggcgtggtgctcggcctgatggagactgtgtgcagccccttcacggccgccagacgtctgcgggaccaggaggcaagccgtggcggaactgcaagccgccctgngagcgacagggttttcangaaacaaagccctgca

SEQ ID NO: 1431 - DNA, 906 bp, Homo sapiens
gcgctaggtacgaggcctggtgttcgaagaacacaatggatctggtgctaaaaatgatgccttcttcatttggctgtgataggtgctttgctggctgtgggggctacaaaagtacccagaaaccaggactggcttggtgtctcaaggcaactcagaaccaaagcctggaacaggcagctgtatccagagtggacagaagcccagagacttgactgctggagaggtggtcaagtgtccctcaaggtcagtaatgatgggcctacactgattggtgcaaatgcctccttctctatgccttgaacttccctggaagccaaaaggtattgccagatgggcaggttatctgggtcaacaataccatcatcaatgggagccaggtgtggggaggacagccagtgtatccccaggaaactgacgatgcctgcatcttccctgatggtggaccttgcccatctggctcttggtctcagaagagaagctttgtttatgtctggaagacctggggccaatactggcaagttctagggggcccagtgtctgggctgagcattgggacaggcagggcaatgctgggcacacacaccatggaagtgactgtctaccatcgccggggatcccggagctatgtgcctcttgctcattccagctcagccttcaccattactgaccaggtgcctttctccgtgagcgtgtcccagttgcgggccttggatggggggaacaagcacttcctgagaaatcagctctgacctttgcctccagttccatgaccctagtggtatctggtggagctgactcttcttaccctgggctttgggaccggttgggacctgatctctcgggcacttgggtcctctactttactggggccggcccgtcactgccgggtctgcgggtgcctccctc

SEQ ID NO: 1432 - DNA, 6160 bp, Homo sapiens
tcaggccggcagcggggagccgagtggaggctaattttacttgctgggagcgaggagagtaatcctcctgccccccactcctgccccgccccctggctggctcagcagggcagctcagccgacagcctcagccagcctagtccccaaggcgggggcattggggacacagggaagggaaagcactggggtgggggagcaggagaaagccagattcccagggaagccatggagccatcctcaccccaggatgaaggcctgaggaagaaacagcccaagaagccagttcctgagattctgccaaggccaccccgggctttgttctgcctgaccctggagaaccccctgaggaaggcctgcatcagcattgtagaatggaagcccttcgagacgatcatcttgctcaccatctttgccaattgtgtggccctggccgtgtacctgcccatgccggaagatgacaacaactctctgaacctcggcctggagaagctggagtatttcttcctcattgtcttctcgattgaagccgccatgaagatcattgcctacggcttcttattccaccaggacgcttacctgcgcagtggctggaatgtgctggacttcaccattgtcttcctgggggtcttcaccgtgattctggaacaggttaacgtcatccaaagccacacagccccaatgagcagcaaaggagccggcttggatgtcaaggccctcagagccttccgagtgctcagacccctccggctggtgtcgggggtgcctagcctgcaggtggtcctgaactccatcttcaaggccatgctccccctctttcacatcgccctgctggtcctctttatggtcatcatctatgccatcatcgggctggagctcttcaagggcaagatgcacaagacctgctacttcattggtacagatatcgtggccacggtggagaatgaagagccatcgccctgcgccaggacgggctcagggcgccggtgcaccatcaatggcagtgagtgccggggcggctgcccagggcccaaccatggcatcacccacttcgacaacttcggcttctccatgctcaccgtgtaccagtgcattaccatggagggatggactgacgtcctttactgggtcaatgatgccatcgggaatgagtggccctggatctattttgtcaccctcattttgctgggatccttcttcatcctcaacctggtgctgggtgtcctgagtggggaattcaccaaggagcgggagaaggccaagtccaggggaaccttccagaagctccgggagaagcagcaactagatgaggaccttcggggctacatgagctggatcacgcagggcgaggtcatggatgttgaggacttcagagaaggaaaactgtctttggatgaaggtggctctgacacagagagcctgtatgaaattgcaggcttgaacaaaatcatccagttcatccgacattggaggcagtggaaccgcatctttcgctggaagtgccatgacatcgtgaagtccaaggtcttctattggctggtgattctcatcgttgccctcaacaccctgtctatcgcctcagagcaccacaaccagccgcactggctgacccgtttgcaagacattgccaaccgggtgctgctgtccctcttcaccactgagatgctgatgaagatgtacgggctgggcctgcgccagtacttcatgtctatcttcaaccgcttcgactgcttcgtggtgtgcagcggtatcctggagatcctgctggtggagtcgggcgccatgacacccctgggcatctccgtgctccgctgcatccgcctcctgaggatcttcaagatcaccaaatattggacgtcgctgagcaacctggtggcatccctgctcaactccatccgctccatcgcctccctgctgctgctgctcttcctcttcatcgtcatcttccgcctcctgggcatgcagctctttggggggaggtatgactttgaagacacagaagtacggcgcagcaactttgacaactttccccaagccctcatcagcgtcttccaggtactgacaggggaagactggacctcaatgatgtacaatgggatcatggcctcgagcgggccgtcctaccctggcatgcttgtgtgcatttacttcatcatccttttcgtctgtggcaactacatcctgctcaatgtcttcctggccattgccgtggacaacctggccgaggcggagagcctgacttctgcccagaaggccaaggctgaggagaaaaaacgcaggaagatgtccaagggtctcccagacaagtcagaagaggagaagtcaacgatggccaagaagctggagcagaaacccaagggtgagggcatccccaccactgccaagctgaaaatcgatgagtttgaatctaatgtcaatgaggtgaaggatccctacccctcagccgacttcccaggggatgacgaggaagatgagcctgagatcccgctgagcccccgaccacgtcccctggctgagctgcagctgaaagagaaggccgtgcccattccagaagccagctccttcttcatcttcagccccaccaataagatccgtgtcctgtgtcaccgcatcgtcaatgccacctggttcaccaacttcatcctgctcttcatcctgctcagcagcgctgcactggctgcggaagaccccatccgggctgattccatgagaaatcagatccttaaacactttgacatcgggttcacctctgtcttcactgtggagattgtcctcaagatgacgacctacggagccttcctgcacaagggttccttctgccgcaattacttcaacatgctggacctgctggtggtggccgtgtccctcatctccatgggacttgagtccagtgccatctccgtggtgaagatcctgagggtgctgagggtgctccgaccactcagagccatcaacagagccaaggggttgaagcacgtggctaggtgcatgttcgtggccatcagcaccatcgggaacatcgtgctggtcactaccctcctacagttcatgtttgcctgcatcggcgtccagctcttcaaggggaagttcttcaggtgcaccgacttgtccaagatgacagaggaggagtgcaggggctactactacgtgtacaaggacggggaccccatgcagatagagctgcgtcaccgcgagtgggtacacagcgacttccacttcgacaatgtgctctcagccatgatgtccctcttcacggtctccaccttcgagggatggcctcagctgctgtacaaggccatagactccaatgcggaggacgtgggtcccatctacaacaaccgtgtggagatggccatcttcttcatcatctacatcatcctcattgccttcttcatgatgaacatctttgtgggcttcgtcattgtcaccttccaggagcagggagagactgagtacaagaactgtgagctggacaagaaccagcgccaatgtgtacagtatgccctgaaggcccgcccactgaggtgctacattcccaaaaacccataccagtaccaggtgtggtacattgtcacctcctcctactttgaatacctgatgtttgccctcatcatgctcaacaccatctgcctcggcatgcagcactacaaccagtcggagcagatgaaccacatctcagacatcctcaatgtggccttcactatcatcttcaccctggagatgatcctcaagctcatggccttcaaggccaggggctactttggaaacccctggaatgtgtttgacttcctgattgtcattggcagcatcattgatgtcatcctcagtgagatcgacactttcctggcctccagcgggggactgtattgcctgggtggaggctgcgggaacgttgacccagatgagagtgcccgcatctccagcgccttcttccgcctgttccgtgtcatgaggctgatcaagctgctgagccgggcagaaggagtgcgaaccctcctgtggacgttcatcaagtccttccaggccctaccctacgtggctctgctcatcgtcatgctcttcttcatctacgctgtcatcggcatgcagatgtttgggaagatcgccttggtggatgggacccaaataaaccggaacaacaacttccagaccttcccacaagctgtgctactgctcttcaggtgtgcaacaggtgaggcctggcaggagatcctactggcctgcagctatgggaagctgtgtgacccagagtcggactatgccccaggggaggagtacacatgtggcaccaactttgcatactactacttcatcagcttctacatgctctgtgccttcctggtcatcaacctctttgtggctgtcatcatggacaattttgactacctcacccgggactggtccatcctgggccctcatcacctggatgagttcaaggccatctgggcagagtatgacccagaggctaaggggaggatcaaacacctggacgtggtgaccctgctgagaaggattcagccccctctgggctttgggaagttctgcccacatcgggtagcttgtaagcggctggtgggcatgaacatgcccctgaacagcgacggcacagtcaccttcaatgccacactctttgccctggtccgcacggcactcaagatcaagacggaaggtaactttgagcaggccaacgaggagctgagggccatcatcaagaagatctggaagagaaccagcatgaagctcttggaccaggtcatccctccaataggagatgatgaggtgacagtggggaagttctacgccacattcctcatccaggagcacttccggaagttcatgaaacgccaagaggagtattatggctatcggcccaagaaggacattgtacagatccaggcagggctgcggaccattgaggaagaggcagcccccgagatctgtcgcacggtctcaggagacctggctgctgaggaggagctggagagagccatggtggaggctgcgatggaggaggggatattccggaggactggaggcctgtttggccaggtggacaacttcctggaaaggaccaactccctgccccctgtcatggccaatcagagacccctccagtttgctgagatagagatggaagagatggagtcacctgtcttcttggaggacttcccacaagatccacgcaccaaccccctggctcgtgccaataccaacaatgccaacgccaatgtcgcctatgcgaacagcaaccatagcaacagccatgtgttttccagtgtccactatgaaagggagttcccagaagagacagagacgcctgctaccagaggacgagcccttggccaaccctgcaggtccctgggaccccacagcaaaccctgtgtggagatgctgaagggactgctgacccagagggcaatgcccagaggccaggcacctcctgccccctgccagtgccccagggtggagtcctccatgcctgaggacagaaagagctccacaccagggtctcttcatgaggagacaccccacagcaggagcaccagggagaatacttccaggtgctcagcaccagctacagccctgctgatccaaaaggctctggttcgagggggcctgggcaccttggcagctgatgcaaacttcatcatggcaacaggccaggccctcggagatgcctgccaaatggaaccagaggaagtggagatcatggcaacagagctactgaaaggacgagaggccccagacggcatggccagctccctgggatgcctgaacctcgggtcctccctgggcagcctcgaccaacaccagggctcccaggagacccttattcctccaaggctgtgatgcccacacagcatcagcatgggcttagagctggcatgaccaatgggggtggggaagttgctggggtggagaagggctagcccaccgcagcagcctccctccctctcagcagctagatgcatgcctgaggcagggtggtcaggaaccacctcaaaaagtgcggaggaagtagctggacaggccctgcccctcaccagcaagaggcatgattggatggagcttctaatgtcattcaaaaaggcctggtcagtgcctgtccctagggccactcccacctgcaggacattaaaatctccaggcctgtgacactggc

SEQ ID NO: 1433 - protein, 1873 aa, Homo sapiens
MEPSSPQDEGLRKKQPKKPVPEILPRPPRALFCLTLENPLRKACISIVEWKPFETIILLTIFANCVALAVYLPMPEDDNNSLNLGLEKLEYFFLIVFSIEAAMKIIAYGFLFHQDAYLRSGWNVLDFTIVFLGVFTVILEQVNVIQSHTAPMSSKGAGLDVKALRAFRVLRPLRLVSGVPSLQVVLNSIFKAMLPLFHIALLVLFMVIIYAIIGLELFKGKMHKTCYFIGTDIVATVENEEPSPCARTGSGRRCTINGSECRGGCPGPNHGITHFDNFGFSMLTVYQCITMEGWTDVLYWVNDAIGNEWPWIYFVTLILLGSFFILNLVLGVLSGEFTKEREKAKSRGTFQKLREKQQLDEDLRGYMSWITQGEVMDVEDFREGKLSLDEGGSDTESLYEIAGLNKIIQFIRHWRQWNRIFRWKCHDIVKSKVFYWLVILIVALNTLSIASEHHNQPHWLTRLQDIANRVLLSLFTTEMLMKMYGLGLRQYFMSIFNRFDCFVVCSGILEILLVESGAMTPLGISVLRCIRLLRIFKITKYWTSLSNLVASLLNSIRSIASLLLLLFLFIVIFRLLGMQLFGGRYDFEDTEVRRSNFDNFPQALISVFQVLTGEDWTSMMYNGIMASSGPSYPGMLVCIYFIILFVCGNYILLNVFLAIAVDNLAEAESLTSAQKAKAEEKKRRKMSKGLPDKSEEEKSTMAKKLEQKPKGEGIPTTAKLKIDEFESNVNEVKDPYPSADFPGDDEEDEPEIPLSPRPRPLAELQLKEKAVPIPEASSFFIFSPTNKIRVLCHRIVNATWFTNFILLFILLSSAALAAEDPIRADSMRNQILKHFDIGFTSVFTVEIVLKMTTYGAFLHKGSFCRNYFNMLDLLVVAVSLISMGLESSAISVVKILRVLRVLRPLRAINRAKGLKHVARCMFVAISTIGNIVLVTTLLQFMFACIGVQLFKGKFFRCTDLSKMTEEECRGYYYVYKDGDPMQIELRHREWVHSDFHFDNVLSAMMSLFTVSTFEGWPQLLYKAIDSNAEDVGPIYNNRVEMAIFFIIYIILIAFFMMNIFVGFVIVTFQEQGETEYKNCELDKNQRQCVQYALKARPLRCYIPKNPYQYQVWYIVTSSYFEYLMFALIMLNTICLGMQHYNQSEQMNHISDILNVAFTIIFTLEMILKLMAFKARGYFGNPWNVFDFLIVIGSIIDVILSEIDTFLASSGGLYCLGGGCGNVDPDESARISSAFFRLFRVMRLIKLLSRAEGVRTLLWTFIKSFQALPYVALLIVMLFFIYAVIGMQMFGKIALVDGTQINRNNNFQTFPQAVLLLFRCATGEAWQEILLACSYGKLCDPESDYAPGEEYTCGTNFAYYYFISFYMLCAFLVINLFVAVIMDNFDYLTRDWSILGPHHLDEFKAIWAEYDPEAKGRIKHLDVVTLLRRIQPPLGFGKFCPHRVACKRLVGMNMPLNSDGTVTFNATLFALVRTALKIKTEGNFEQANEELRAIIKKIWKRTSMKLLDQVIPPIGDDEVTVGKFYATFLIQEHFRKFMKRQEEYYGYRPKKDIVQIQAGLRTIEEEAAPEICRTVSGDLAAEEELERAMVEAAMEEGIFRRTGGLFGQVDNFLERTNSLPPVMANQRPLQFAEIEMEEMESPVFLEDFPQDPRTNPLARANTNNANANVAYANSNHSNSHVFSSVHYEREFPEETETPATRGRALGQPCRSLGPHSKPCVEMLKGLLTQRAMPRGQAPPAPCQCPRVESSMPEDRKSSTPGSLHEETPHSRSTRENTSRCSAPATALLIQKALVRGGLGTLAADANFIMATGQALGDACQMEPEEVEIMATELLKGREAPDGMASSLGCLNLGSSLGSLDQHQGSQETLIPPRL

SEQ ID NO: 1434 - DNA, 104729 bp, Homo sapiens
gatcttaagaccttaagcacataatacaatggtcatgaagaaaactctatttttagagcatgccatttcactaagctagatggttctggagaatgttagacctggagggaaccatttcctcccttatctcttttaacagcccccagatagctggctgatagatattattatcatcagttacagatggcaaaaccgatacttagaggattaacaagagtggatcaaatgcattagtcacaataacctgggttacctatgttgacaaacaatcctaaaatcccagtgcctcaacatacacgtgtgctcttgctcacatggtatccaacatgagttgcacaaaattctgctctacagccctgtttgggacctaggatggaggctctttcatcttacagccacagcatcaaagcacacggccttctcatctgggaggctggcgaacacgtgtctcctccgtctcacggtgagagaaaaggaggcgaccagcgatcaaagtgcttcacccacacagagcacaagtcatctccactcactgcctgttgggcagagttggccgcgtgactgtccccgagcagtggctgggaagtacacttctctttgtgggcagggcaggagagaggctggcgacgtccaccaagccagggcaggcagcagcagagctgggtccagagcccaagcatattagtctgttctcacactgttataaagaaatacctgagactaggcaatttataaagaaaagggatttaattggctcacagttctgcagactgtacaggaagcatggtgccagcatctgcttggcttctggagagtcctcaggaagcctacagacatggtggaaggcaaagggcaagcagacacctcacatggccagagcaggaggaagaaggagggggaaatgccatacactgttaaacaaccagacctcatgagaactcactcactatacagtaccaaatgctaaaccatgagaaaccagccctgtgatccaatcaccacccaccaggccccacctccaatattggggattacaattgagcatgagatttgggtggggacatagatccaaaccatatcaccaagtcctctggatttccttccaatgttcctattctgtggccagagtaaatggctcaagtgaaaattcaactaggctctaatccaaggaccttgggttggtcacttacctacctgagacaacgtttactcacttataaataggaataataaaagctaccccaaggcctattgtaaggattacatgagataatgaatattaagcacttactatagtatcttgcacataatcggccctcattaaattcttgttgctgttgagattgtagctgtaaagccaccgtggcctttgacgtcatgaacagtgtcggctaggtgatcgaaacatctgcctcttctctgcagatgtcagacgttgtcaaagtcaccctccaatgacccaactttacttctggcaccatcctgggactgacaatttgtcacgcagacacaaagaaaaaccttctcatggaccctccaaggagtctaggttcttattatgaaccctcgttttatctgttaattcagtacatatttatgaagcacctcttctgcatttattccctatgctgggaataaaattttagaaaaaacaaacataactcatggcatttatggtctttgtttttaattttttatcttattttatttttaattaattaatttttgtttttttagagaccaagtctcactctgtggcccaggctagagtatagtggtgcaagcatagctcaaggtagcctcaacctcctggactgggagcgatcctcccgcatcagcctcccaagtagccaggactacaggcgtgcaccaccaagcccggctcattttttttttttttttttcgagatggaatttcactcttgttgcccaggctggagtgcaatggcgtgatctcggctcactgcaacctccacctcccaggttcaagcaattctcctgcctcagcttcccgaatagctgggattacaggcgtgcaccaccacacccagctaattttgtatttttagcagagacggggtttcacatgttggtcaggttgctctcgaactcctgatttaaaaaattaaaaaaaaaattttgggtagatgggtcttgcttgttgcccaggctggtctcaaactcctgggctcaagtaatctgcccacctcagcctcccaaagtgttgggattagtgagccactgtgcctggcccactttagagtctttgaagaaacacaaagttaccttgcagtgtctttggaaataagtaggcatagaactcaccctttgccagtgaagtggactggcaaacactgctgtcacattttgtacccacgcagagcaccgcttcaggcacacttggtccaggcacacttggtccacgtgatctttgtaggtgaaccctgcacgctgagtcctgtggtggcccctggcccctgccaccctcccgggattgcacgctttcacagccacagcaagctcagccagcgttcactcttcttctagcccatcctacttaccacagtcacttaactccgaaaaatcctggcaccttctcactgcctgccaagttgtactccactggcacgtggatggtgtgactgcctttacacgtgactgggaatctaaaccccaccctgctcagcgccatggcggggtgtctgatgcagcagccgcagcaacagcttcccaagttgtcagagaagagccttaagcttccttgctacatgggactccaggagtcccctgggaagttcaggctagagcctgtttgttcaccttccccatgattccataaaccatttaatatcctgaaataaatccctttctgctctgctctgtaactgaaccctgaccaacaccgagactggaatcaggagaggtcgtaggactgagtcttaggaatcaaagtctcagctccctcggctgggtggttttcaaactcctgggtccaaatgtatacacataatttcaaagaaatcaatttccagatccttacctcctttatacactcttgcctcaaggcaagtgttcaaaagcacactttataaaagaaagcactagccctcagccttcccaaacttactccacgagggtttctaaaccctcaaatgccaaacacagggaaaggctgtcctgataaccaagcaaggccccaccaccctctgccgttccagctttccctgcctcatggtactttctgctaaggaaggggcctggcttttggcccatgttgggatgttctgaattcaggtatatgatagtgagctggtgagcagtgacaagcgctgagtaacgacctcatctctgacgtatctatctaccgtcaaaggaggcatcgttctgcaggaggagtcctgtggggacctgggtaaggaatgctaggtgatttgggggaagagaaagaggaaagaattgggagaattgactgatatttctataagaaaccttttccattcccatcagcttaattttgtgatcaggctttccagcaattatacctacgaagcacaaaaagtaggaaaagaatccaggcagaaccatctggcagtggtagattctggcggtggtagattcagtcatacatttttaaaataaggaaattccagctgggcgtagtagctcatgcctgtaatcccagcactttgggagcatctcctgaccccaggagtttgagaccagcctgggcaacatagggaggcctcatctctacaaaaaaactttaaaaattacctagacatggtggcacgcacctgtagtcccagctactcaggaggctgaggtgagaggatcgctcgagcccagaagtttgaggctgcagtgagccgagattacactactgcactccaggctgggcagcaaagtgagatcccgagagagagaaagacagagaaaattttaaaaactcatcatgtaagtgagacatttccaataaaatttcactctttgaattaacacaatttttttagcaacgtttataacatttatgttgttttcataagttgcatgataacaaccattgtaatcatgacccagaaaatactttaaattcctaaagtcttttggtggcaggaaataaagaacactttacaatttcgattcacatacatttttggttgcagaaaagggtgattaataaatgtttcaagcgtaagtataggatgaaccttgtaactgaaggaagccagtctcaaaggatagcatactgcatgattccatttacatataaatgcttggagtgagcaactccatagagacagaaagtgaattaatggtgacctagaactgggtggggttgagggagatggaacaattgccggggtgatagctgaggggtgtagggcttcttttgaaataaaaatgttctaacatatattgtggtcacgatgtaaaagtctgtgaatatattaaaagccattcaatagcacactttacttatgtgaattgtacaatagataaattatatcttaataaagctgttaaaaatatacattaggctgggcacagtggctcacacctataatcacagcactttgggaggctgagatgggaggactgtttgagaccaggagttcgagaccagcgtgggaaacacagtgagaccctctatctctacaaaagaaatgaaaaagcaattagctgggtgtggtggcacatgtctgtaaccccagctggtcaggaggctgaggtgggaggatggcttaagcccaggagttcaaagctgcagtgagctgtgattgcactacgtacttcagctggagcaacagagtgagaccctgtctaaaaatatatatatacatacacacacacacacacacacattacattatgaaggaatcctaagaagaaagtgaaatggaactttatatgttcaagagtaaaaagacaaattttcaaaattttgaaaaattttcgaaaattaaagagattgttcaaatatttcaaagtaaatgatgatggatagcatgtcattatagtgtttaggctccatggatacttttcacaaagttacatgacatttttatcataatgtccctattgacagtgcagcggtagattcaccccgtagctaacaaaccccaatcttcagaggctttcactagcacaggccacccccaaggcctagaaatggctcttctgggtcacatattttagtaaaatttacaagagtaagacctttcaaccttaaggattaatacctctttttacactcccctttgtctttcttctccccatgtgtggtggcattgcagtggccatgggtgcttttgaaagtccactaattgaattgggataaacaagttagttggggtttcagaggatgtatttactggtgcagtaacttccacatatgattatgttattgctagcccctctagtgtaaaaatgatttctagaaatactccctctgcccacggtcctgaggaccagaagtcatgctgtgatattcattttctgtggtgaccagcaccatgaatgtgtggacagtagagaagaaataaggttggaaatgtacacaaccagaagccagtctacgtaaaaacataatagagatgaatcaggcagatcttcaataaaaagatctctttcttaggttttgtcatgttagctttttttaaacttctaatgttctgtgatccatttcaactatttacacttatcaggaaaaggtgagatgtcaagttaaaaagtgggtgaaggtgaggtcaggagattgagatcatcctggccaacatggtgaaacgctgtctctactaaaaatacaaaaattagccaggagtggtggcgcatgcctgtagtcccagctacttgggaggctgaggcaggggaattgctcgaacccaggaggcagaggttgcagtaagccaagatcctgccactgcactctatcctggcaacaaagtgagactccatctcagaaaaaaaaaaagtgggtgaagggtacattatttttctaaattttttctaaattgtcttcaggagtgtatgcagaaaaaaatttgaagaccactaagttatctgacttggctgggcttgaagcacaggaggtctcattcacatcagaaggtgggaccctggtgctctgtagcaagaggtgacgcaacagttgcttgaactctgctttcagagttggggttataggagtcaagtgataagtggagttttggctcacgtgcttctcatgatgtaccttgtaggtctataaacttatcctgtagcatttcctgggtttctgaatgcagagcactctctatgcagaaactctatgaatgtatgcagaaacacccagctacagaatccccacactcatccctggcccaggaagtgaggactatttaggtaagaaggagcaagtggaaaaccctggaaccacttcttcctatcaagagttatcaaaagcaacatcacatccctgaatgaactgccaaagacttgaaagatgtagagatggccgggcgtggtggctcatgcctgtaatcccagcactttgggaggccgaggcaggtggatcatgaggtcaggagatcaagaccatcctggctaacacagtgaaaccctgtctctactaaaaatacaaaaaattagccgggcttggtggcgggcacttgtagttccagctactcgggaggctgaggaggagaatgggatgaacccaggaggcagagcttgtagtgagccaagatcacgccactgccccccagcctgggcgacagagtaagactctgtctaaaaaaaaaaacaaaacaaacaaacaaaaaagatgtagagatgacatttcctattacggccacttaactcccctgcttcacctatgtagaacacatatggctgttggaggataataagggttcactgttaatttagtcaatagatggcttccattgcagcttttgttctagacatagttttatgactgtagcaaatcaacacagcccccagcacccaatatgcagctatcagtttggtaaatgtgttgtctctttcccaataaaaccaccagaagcaatattattttacctggtagggacagcaatacacctccacagtcttaccctgtgtcaggactgtgccttctctcccaattacatctgcagggaactgtgttcatgtgaccattccagaggacaccacattagtaatacgattcttattgcacctagtgagcggaaacaagtacattatgtgcctacatgtgtgccaaagagtggaatgttgtgtcacaagaattcaagaacctgctctctcagcagaattgctgtgcccagtgatctggtgagcgatgggatatctctctgaatcttgcaccccctactgctaataaagagctatagcacttgatacgactctggattggggaaccaatatgtactgtgtgtgtgtgtgtgtgtgtgtgtgtgtgtatgtgggtgtgtgtgcagctctgacccatattctgaataacccattagtctgccagctttgagaaaatcccagggcaggccaggcatggtagctcatgcctataatcccagcactttgtgagggccaaggcagtaggatcgcttgaacccagaagttcaagacaagcctgggcaaaaaaaaaccatgactctgtctcaaaaaaaattttttttaattagctgggtgcatggtggcatacacctatagtcctagcttctcaggatgctgaggcaagaggatttcttgagccccaggagttgaaggctgcagtgaggtatggttgcaccactgtgccactccagcctgggtgacagagagagactgtcttaaaaaacaaaaacaaaaatttcaggccatgtgcaagcagctttaccaccacttggatccgtaacagatctaatagtgctggaagcatccatagccaatcaggatacgatggtgtcttattttaaaatgttaggtcttattttaaaaatgtaagactgaacataccactgccagaatatgccactgcagaacccctcaaggaaaatcataggcaaggctgtatgtccaatcacagagttggtggaagactacagcatctcaatacaagaaagaccacacagaaataggacctctcaggaaaaaagacttagattgctccactagataaagagcactaaccagcagaggcgccggatatggtgaaaggaaatacatgccaggataaagcaaggatgctcaacagtccaacctcagactcacaagccttggaaaaatgaggactgtaatagcattgttttccttcttttctctatcctagtcaatttatatttgtcctccccgtttcccttaacattttatattggatgtgttttatataagatgtgactttataattaggtctacgggttataagatatcaagggaggattatgactgaactcgaatgaacaccaggacagaatctagaacatagaacctccgtgacagcaggatgcagtggctcatggcacttccccattttgggaagaaagtgagttccatgttttactgcagggggaatcattgccatttggaagtgtacgtatgagaagagaggagtgcatgggagttgagtaaccaggtggaggactgtgatgggaactgcggattgagtcaccagcaaccatgctgacatcatcctagcatgccttcatgtattgtaggagctgggacgctggagtttttactatatttccccaactcccttgcatctagggttctacggtgatttagattccactattcaggagaattagtgcgagattaggaaggcatgtttctaatattctgctgacaagcaccattgtgaaggtacctggtttcgctctgaaagcgggaggagaggtctcagtgtctacttactggctttgtggagtattaaaaagcactgcccagggaacctatttgctggtgtgggttatgccaggggtgtcacggttttagagttggcagcactagcagtagctttcggcttgggggagtttcttgactatatcaattgcctgtcatggtggtttccgacccgggcaggtggcatggttctggggctagcagctgtggccaccgtttccctacgccactggtgtctgctgaattcgaggaggggcattagattctttagttcttcagggtggctttgggtcgtgttcttaaaagatcagtctggaatctgatccttcagtcttcccaaagagtctgtaaaccacttaatatcctgccgcaaatccctttctgcttaaactaactagattgaattccgttctctgcaagccagcctgggcgatagaccacagaaccctctgcgctgttcctctccctgtggattcttttttcccaaaccaagtcactacacgtggatctagaatatattatttattcttctcggccaaaccacaggctttcctttttacaaaatcaacttgaggtttaccctctgtgaagccgtttcaaatgaggtcgaacacgcttctcacttcctctgcaactgtgacccggacactttggtaacggcttactgggggctctaagaccattaatcggtttcagaaccggagtccctgtgcctcccttgggaagcacttttcacataaagtaaaaagttcggtgaccttagcagggcagacgaggccttaaacactgcagtttaaagctgggatggcaaaagacgtggccacctcttcctctagtctttccaactctctctcttccgcttccttctccctccccttctcacgacgcccggccattgcctctgaagctggatggtggctgggcacgccccgccaggacattcgttcaggggaggacgcccgaatctgtcagcaaagcatccctacctgcaggaggcctggagctcagcgcagccccccacgcctgcccgggtccccgaaacgcggctgctccagcgccgggggcgcacaccgccccctggaggcgggccctggccctgagccccgcgctcccgccggcgccgactccacttcgcggctgcgcactttgcacttggcgcccagccctggcagatcgggacgcaaacacacacgcacccacggtttacaagaaagactcttcaaaggaaaactaaatggggggtggtcgttctaataaatataacgtgcaaggctcaactatgtgagtaatcattagaaaatgcagaaaatgtgtttctctttatctgccattcccattccaattcactgcttttttaaaacccatttatgcccttctcagaagcctcctccgtgagcaatatcatccaacttcgacagcagcgtcaaccactttagaaaatgaaaagagataataattggcaattaacatcatctacgttttaatacattttacaaaattaaaataaaaatgcaaggcagccgggcgcggtggctcatgcctgtagtcccagaactttgggaggctgaggcgggcggatcgcctggggtcaggagttcgagaccagcctgaccagcgtggagaaaccccgtctttactaaaaatacaaaattggccgcgtgtggtggcgcatgcctgtaatcccagctactcgggaggctgaggcaagagaatcgcttgaaccagggaggcggaggttgcagtgagctgagatagtgccattgcactccagcctgggcaacaggagtgaaaaagtccgtctcaaaaaaaaaaaaaaaaaaaatgcaaggcaaactagttggtcaattgtcatttgtgtcatttgtgtctatgtgtcatttccaaaactcaatattctttgaataataaaaccaacgctttctctaacaacttgtgtgacatgtccccgaatcagcatttaagatttcgaactaaaacgtaatccgaagagattccttaatgggaaggttggcaaacttgccaaggacatagacctgttcctgttcttacttcagctgggctttcttttaatgagtggattgcattatacacttttttgttatgttttgcattcacatatgcataaaatgcttttcactaggaatcaaccagatattaaaagaacgtaaacatattctggccataaatgataaaagctgcatttgtagacatgctcagcatatctattattggccactgggtcaatgttgagaattcccaaaagaagtccccacctacatggcaaagctgatggagcctacaaaccgggaacatcgtaagtattaaccatcctgaagtatattctctcttacaagacgttggaaaaacaaacgatgggcatctagaatgacaatagcttcctactcctcctgcagttaagaaagacaaacgctgagaaccgttggaaaggcaaacaaaattgtatgcgaaggtcacattcagccagaagaggtgctcccaattacgtttacttaaagggagaggtccagacacatttttggtatcctcctttaaaaaatgttgcagtccttaaaatttggtaagcttctgtgactaaaagtatctttactgctacctaaagtatgtacatatgtgcatgtttaaaatcccttcttttcatcattttcagagacactatttcaatttcctgccctgaaacatgtggaatttcattttaaacaaaagtctcctttcagggacttgcaggcttggtgtggctgattggtgctggaggccgctcaggacgcagtttctcacctcgtcacacatgacctcagacatagcaagtgccgtgcagagtgagctcttgctcttcaactcagatgataaccagaagcctgggccgtgtcttccacattctctatagctgctgcatggtgcctgtattatcttttttttgtttgattgtttgtttgtttgtttgtttgtttgtttgtggcagggtctcactctgttgcccaggccggagtgcagtggcatcaatcctagctcactgcagcctcaacctcctgatctcaagctatcctcttgccttggcctcccaaagtcctggaattacaggcatgagccaccatacccagcccatattatcgttataatacacacagggatcccaggaatgaataagagctagtacatgtagagcatattctatgtgccaggaatgtattattacatggaatctctcacagctttgtggaaggtagggactgaaattgcctccattttccacctgagtacactgaggcttatagatgatagttactgggcccgaggtaaaggagcccaggggtccaacccggcaccattatgcttggcattatattgttttcttttaataactgcctttaattaattaatcaggcacattattcttcccttagacctgtatgtaatcgacagtcagtaaatgagaaataagaatgatggttgcaaagccaaataacaccaatgtgctcagataaaagagtttttaaaatttagttcatactgaagacctttctacagtgagttattcccagagttttacaattaacttatcaattgagactataggccaggtgcggtggctcacctgtaatcccagcactttgggaggcagaggtgggcggagcacttgaggtcaggagttcgagaccagcttggccaacatgggaaaccctgtatctactaaaaatacaaaaattagccaggtgtgatggtgcacgcccgtaatcccaactactcaggaggctgaggcaggagaattgcttgaacccaggaggcagaggttgcaatgagccaagatcacaccactgcactccagcctgggcgacagagcaagactctgtctcaaaaacaacaacaaaaaaaattaaaattaaaattaatgaatataaaaaataaatttagactatatttcaacttaactcataatgaaacatttcagcatttatttatgtcaggttaaattaagtctaaatggatcatgaagtctttatgcttcccctgaaaatgaaaaacgagggctacataatttttacatgtgaaagatttaagctttacaatgccatataacaaaaagatttcccattccaagacagtgttcccaaggaaattaagctttcttttctccaccatgatagtttactcaaacaaacaaacaaacaaataaactaaactttgaaagaataataagtttaagagagtgggagaatgaatgagttcaggcttttatgtaattgtcattccaccaagggggttcaggcagcgtcaagacagttagactaggtagtctttattgcctctgtttgggtggtttggatctgtgtccccgcccaaatctcatgttgaaatgtgatcctcattgttggaggtggggcctgagtcacgggagaggatatctcatgcgtggtttagcaccattcctttggtgctattctcgtgacggtgagtgagttctctcaagatccggtcgtttaaaagtgcgtgtggcacctccccgccccctgctcctgctcccaccgtgtgagacatctgctccctctttaccttctaccatgactggaagcttcctgaggcctccccagaagcagatacctgtgtatcttcctctgcagcctgcagaaccatgagccaattaaacatcttttctttattcatagcaatgcaagaacagcctgatatacctctccaatttttctagctttttattgaaaaaaaaatatatatatatttgagatagagtcttgcttttttgcccaggctgaagtgcagtgatgtgattttggctcaccacaacctccacctcccaggttcaaggagttcttcttcctctgcctccctagtagctggaattacagatgcaagccaccacacccagctaatttttgtatttgtagtagagatggggtttcaccatgttgctcaggctggtttcaaactcctgacctcaggtgatccgcccacctgggcctcccgaagtgctgggattacaggtgtgagccaccatgcccagctgaaaaatatataaaaagtagagagaatattataataattcctcccatagccttcacataattcaacagttaccaatacattgtcatgtattatttatatatacgtttatctaattcctccctccctcagttaccttgaagtaaaacaagatatatcatttcatgcaaaatatttcagtaggtatttctaaaatataatgactctttaaaaaaaagcacaactatattataattatcacacctaaaacaaagtaacagcaatttattaacatcatcaaatttcctgtcagtgtttaaatcaatcatttcatcatttctttttatgttctgttcaaatcaggccaaaagcccatgcataatagttggcttacatgtttcttagcacattttaaatctatagtttctctctctttctttttccttgtaatgcatttgttgaagaaatcaggtcatttgtcctacagtgttttctatgatctgaatttcctgattgcatgctggtgatttcattgaaaagtcccctgtactttgtgtaagctgataattgtatctaggtccttcataagattcactgtaacctcttctgaggttgttcagctttatgatttgctcttccccttgaaaaggtgtctcagttatgccatttctaactactatgaataaggatgtcttttttctgtgcaatttcttagtagggaggatacacaaagtcttgcatggtctaacggaaagagcacaaaatttacagcctaacagatttctgtggaagacccactgcctgtgaactatgtgatcttgggcaagctatttataccataattatatcatttattaaataggaacaataatgactgacttatgaagttattgtaaagagtggcaagagaagcacatataaagcatcaatcacatcatacttttttatatgaagtacagaaatctatttcttacaattctggaggctggaaagtcctaagtcatgaggcttgcttctggcaaggggcttcttgctgtgttgtcccatggtgtgaaagatggaagggaaagagagtgcatgtgtgcatgagaaagataggggagaaagaaatgaaaatatgaaacttttcattcatttaagcatgaaatagtgatgggcatagaactaaaacatcactagggcccaattattaaacctattactcacatgatgttgacattaatccattcacgagtgcagaactctcatgacccaatcacctcttgaaggtcctgctgttgcattgaagatttagtttccaacacaggaactttggggaacacattcaaaccacagtacctgccatatcttgctgtaacttaacctgagttctcagttctgcatgttcatgtgcatacatcatctttttatccacacagtcatgctcttcctgcacccatattgctactttcctttcctacacacaatttgagaactatatttttaaaatcaccacagataggaagattgtttcctgaaaacagtcttttttcaaatgacatccccagaatttggaccatttttgaccctaacaagcctgcccctgatttgaatgacatggcttctgagtgcagtgcttgtcctggaagctggtcttgtcctgggaatagcatgtcagtaggcagagcctcaggtgggcaggatggcaagctgtaagacaggaggcaggagagggcgtggggcaggcatgggatggggttcaggcatgagcagctcaagagccggggcagatggagtcaaggcagaaagggcttgctggaaattgggagccaggcattgaatgaacagtcagggctgagggtttttgtagctgggttgaatccagaaggcgagggcctggaaccaaggcagctaagctcaatgctgtattgagagcccaggcaatgtaatatctcaggacccaggagagagaccttctggggaccttgcatgagactgtaaagccagactgtctgggtttaaatcttggctctgccccttatagctgagtatctgggagcaaattatttcacttctctgtgcctcagtttccccatctgtaaattggatgactataatagtaccttcctcagggggctgtttaagtgagtcaaaacaggtaaagttcttagaagtggtagttggcccatagtgccatcagattcagctattttcttttagaagttaaccattagaccactttgcatatggaggattcttctccaagggtatgtcacaggccctgagcagcctctgatgctgctgaaaggggagcttatcttatctccaacccaggggagtcttggccttggttagcaagataaatttttagtaatgtgtgttattattctaccattatggagatatcaacaatggctctgttctcttcctgggatgttcctctccaacctgtcctcctaactccatgcggcttttcaacatttcagtcaaccattacctcttccaacaggtcctcccaagcccccaggcggagctgccagcagctgccctgtcttttgtgttatcagcatttatcaaaccactcttagtttgcttgtttctcttcctcactaaaatgtgagctattatactcacagataatgcctctgtgttttttatttaaatgttgttttcatgttaaaatatttcatgcagaaaaaaatatataactgacacttaagtacccaccaccaaaattaagcaaaaattgatagtttgtctatttggcttcatctttcttctttaaaaaaagtaatgttaccgaccagataaagcctcacccccatacttccctcatgctttccttttcagaggaaatgcccatcttacagcatgtttttgtaattttatttcacacatacaaattcctgatcaagatatactattgcatgtattggatctttaaggtctatgtaaatggtatcaggctgggtggatactttagctactttcttttttttagaactgatgtttttgagatttattcatggtataatatgtaccttttttcatgattttaacagctgtattatattcccttctgtgaataagttaccatttatttagccattttcctactcagggaaagttgaattggttccttttgctgcttcaaacagtgctccaacggacaactgtgagcatccatctttgtgcacacatgtctgtgagctaatacttgtcagcgtttctctgggggaagagatgactccacattgcttactcccaacacagtgcctgaaatagcaaatgaccagtcaatgtttgttgaaggaagaaatgaaaatatgaaacttttcattcatttaagcatgaaatactgatgggcataaaactaaaacattgctagggcccaattattaaagatataattatagctatgcaggagcatttacaaatgtgaatgggctgctatttcttggcttaagccacagaaattcctgttcaaatgaattatgggggaaatgaagatataatgccagagaaaagcagtcactccctgggttgactttagctatgtatccagttcagttctgaagacagagcttcaattgttattgcagatgaaactgaagggccaagtcaaccacagggctctgatttatggcactatgagttgcaaagggatctaataccttgcattacaatgaggccttattcgctttcatgcgaatgatcagggactggatcacacataaacagatacactttgccttaagaggctacttggggcatatgatgccacatgttggaacaacattgagatcactgagctgcttaagctaaacattattcagcttctgatgctgctttagaaactaaattataaaacctcataactttgttgttttccacctttcccaggtgagaatctcccacatgcaaaggtagtgtcaaaaatccatccatcccaaaccatgggaatacctatgctttccttaactaaatcattagcaatagagatgagattatacttataccaattagatccactccataaagctaagtagagaattagctttcccataagtcatatgaaagcgaataccacatgggaaggtagatgcctgaactttcctcttaagaggaaagaagcaagggataaatcctgagaagacaatcaactgtgtcaactatagtccacccctttagcttcctgatatccgtactcttcttgctcatgcctacatgaaatgtactcaatgaaactccagttctctgtgtaatgtacagtcatcttcatcaagtggtttctcatgttcaaacaacacacgaaacccaagagagttgtaattaaaaatcaaaaaatttgagtacaatataggagatcaggaaaggcagcatttctgctgcaatttgaaaagctaaattggaatgatcatgtttctaaaggcactggagagacgcaaaagcaacaataattagatgaaataaatttcaaataagaaagaagtcctttcaaggtaatccaagggtcactggccatttttttttttcctgggagcatttgccaactctgaccccaaaaagaggtgctaggctcaggtaaggagatgccataagagcttttggcagttgcatcaaaccagcccaaagaattggaagtgagagagggccaaatgcaaagctggctttcctcattagtcattggctgaatgcaggggtggtgtagaagactgcggagtctggccagaaagacagagtaaaatcttccacagtctcagagtgctgtgaagataatgtcctgctagagagaaggagcctagaataaggaaacaacaggtcttcattacaacatgtttgtcagattttgaagctacatctagcagcagagggtaaaaaactaagctaaaaccttggaatgacaaaaagtctaaggctgaagagagaaagaatagctaggctcaattcaaagcctaaaaggaccacagccaaggaatagggattaaccagagctgaaccaagttttactaaaactgcaacctagtcccagcccagctcagatccccttttcatttaggtaatcataggatgctacacagaagaaaatgaagactggccaggtgcggtggctcatgcctgtaatcccagcactttgggaggccgaggcaggcggatcacgaagtcaggagatcgagaccatcctggctaacacggtgaaaccctgtctctactaaaaatacaaaaaaaaaaaaaaattagccaggcgtggtggcgggcacctatagtcccagctactcagaggctgaggcaggagaatggcatgaacccgggaggtggagcttgcagtgagccaagatcatgccactgcactccagcctgggcgacagagtgagactctatctcaaaagaaaaaagaaaaagaaaaaaagaaaagaaaagaaaatgaagaccattcctgattttaaaaaatcatatggagctggtgtagttattttgtgtgtaagcacacaacaacaaagagacaggaaggtatgatcaaaaatcaagacaaaaatgaacaatagaggcaaacttaccaaaaatacagggtttggaattagaagggaaggatattcaaatacataacattatattaaagaaagtagaggaaaagatgaacagaaatcaacagaaagtagaggaaaagatgaatggaaatcaacagagaattggaatctatacaaaacaatcaagtcaacatgataaaactgaaaaactatctttaattaagaatcttaatttcttaatttcaggtgggtatcataaaaggctggaaacaaaagaagtcaagttagagacaaatagaaaatatatacactgaagcacagagaagaaaaagaaggcatgttgaggatataattttaaaacacaatatatacgtaaccaaagtcctagaagaggaagagcaagagaccagagaagaagcaatacatggggcagaagatataatggccaagaatattccaaaatttatgagaagacatcaacgcacagattttaaaatctcagaaacccaaagcaggataaatcaaaggaaacacgcctaccatcctatagtcaaactactgaaaaacctgagaaaagtgacaatcacaggaagagaagacacattaccttcaaaggagcagcaataaaactgatggctgacttttcaacagaaactggaaaccaaaagacaatagaatgacatctttacagtgctgaaggaaacggccaaccttgaattttatacccagtaaaaatgttatttgcaaattaaggtgaaatatggttggacatgatggctcatgccttgtaatctgagcactttgagaggctgaggcaggaggattgcttgaggctaggagtttgagaccagcctgggcaatactccatctctccaaaaatagaacataaacttagcagggcatggtggcatgtgcctgtagtcccaactactcaagaggctgaggtggaagatcacttgagtcctggagttcaaggttacagtgagctatgatcccaccactgcactgcagcctgggtgacatgagcaagaccctgactaaggaaaaaaaaaaaagaaaagaaaagaaaagaaagaaaataaattaaaagtgaaataaagacactttactgaaaaacaaaagctgagagaatttatcatcagcacactggcagtataaaaaatgctaaaggaagttcttgggttgaagaaaaattgtcacagacagaaacataaaactgcagcagagaattgaagagcactagaaaggagaagaactatctgctcaaggccagctttgaaggaatggatcctggtgcataaggcacaagctctgtaataagttttgaattcaggaagtgtgggtccttcaattttgtttttctttttcaagaacgctttggttatcctggatcctttgaatttccatatgaatttgagaaccagtttgtcaatttctacaaacaagtcagctgggattaggatacaaatcactttgagttggtaggtcagtttgggaggaggtattagcattttaaaatattaaatcttctgatccataaacacaggatgtcattccatttattcaggtctttttcaacaacattttgtagtttcaatatatgtattttatttcttttgtaagtttattcctaagcatttcattcttttgcagctatttagatttcagaaagtgtgagtcctggcctggctctgtggctcacacctgtaatcccagcactttgggaggccgagacgagtgcatcacctgaggtcaggagtttgagaccagcctggccaatatttctactaaaaatacaaaaaatttctactaaaaatatacaaaattagccaggcacagtggcttacacctgtaatcccagcactttgagaagccaaggcaggcagatcacctgaggtcaggagttcgagaccagcctgaccaacatggagaaacctcatctctactaaaaatacaaaattagctgggcatggtggcacaggcctgtaatcccagctgctcggaaggctgaggcaggagaatcacttgaacccgggaggcggaggttgcggtgagtcaggatcgtgccattacactccaacctgggcgacaagagcaagactccatctcaaaagaaaaaagaaaagaaagtgtgaatccttctagtttgttcttctttgtaactggaattgtttcttttcttgctccttatttttatgtaccagttgtatgtttttagatttgagattaccatagacttgcaaataatatcttataatccattattttaaactgatgacaacaccgattgcataaacaaacaagtaaaaagaaaactaataaaaactctatacttcaactttgtctcccttctttttacctttttctttttgtgagacagtatctcactctgttgccctggctggagtgcagacaatcacagctcactgcagctttgacttcctgggctcaagtgattctcgcacctcagcctcccgagtagctgagactacaggcacacatcaccacacccagctaaatttttttataattttttgtagaaacagagtttcaccatgttgcccaggctggtcttgaactcctgggctcaagcgatttgcctgctttggcctcccaaagtgctgtgattatagacgtaagccactacacccagactttttaactttttgttgtttttatttatatcttattgcactatgtcttgaaaagttgatgtagttattttttctgatcagtttatcttatcatctttctacttaaaatatgagtaatttacacaccacaattacagttttataatattctgtgtttttctgtgtgctattactagtgagttctgtaccttcagatgacatcttattgctcattaatgttattttctttcagattaaagaactccctttggcattatttgtaggacagatctggtattgagatccctctgcttttgtttgtctgggaaagcctttacttctccttcgtgtctgaaagatattttcactggatatactaatctagggtaaaagtttttttccttaggcactttcaatatgttatgtcactctctcctggcctgtaaggttttcagtgaaaagtctgctgccagatgtattggagctccattgtatgttgtttgtttcttatcccttgctgctttttggaaactttctttatcctttaccttcatgattgaattattagatgccttgaggtcgtcttcttcgggttaaatctgctaggtggtctagaaccttcttttacttggatattaatatctttctctaggtttggaaagtcctccgttattatcactttgaataaacgttctgctcctgtctctctaccacctcttcaaggccaacaacacttggatttgcccttttaaggctatttcctatttttttttcctttcttttatgatgtctttgtttggttttggtatctgggtaatactgacctcaaagaataccttggtaactgttccctcctattctttttctttaaaaaaaaaaataatttgtattaactctattttaaatgtttggagaattaaaaagtgaaggcttttgggcctaggccattttcgtgggaagttttcaaactgctaattcaacctcttcattttcacgggtctatttaggttatctatttcttcttgattcagttttagtagtttgagtttcctagaaacatgttcatttcgtctaagttttttgaatttattagcatataaatgtttatagtattcccttataatccttcttatgtctgtgaggtcaatagaattgtcatcttttttattcctgatgttagtaatttgagtcttctttttcttggtcagtctagctaattgtcaattttgatgatcttttcacagaaacaacttttggttttgttcactttctctgttgtttttcttctggttcgttaatagccgacctaatctctattactttcttccttttgcttgttttagattgaatttactctccttttttcagtgtcttaaggtggaaaactaggctagtgatttaaaatctttcttcttttttaacagaggtattaacagctattgaataccctctagacaccgcgttagctgcatcccgtaagtttcaacatcttatatcttcattttcactcgcctctaagtgttttgtaatttcccctgtgatttctttattgatgtattggttacatagggatgtgtttttaatttccacatatttgtaaatttcccaaactttctgttattgagttctagtttcattctattgtagtcagagaacatactttataggattttagttttttaaaaaaatttcttgaggcttgttttactgcctggcatatggtctcttatggcaaatgttccatgtgcattcgagaagaacgtgtatcttgctcttgggtgaaatgtgtatttcaaagacctagttgatttatggtgttgctcaagtcttctacttccttgcttcttctacttccttctgctttgttgttctagccattactgaaagtgggatattgaagtctccaactattattgttgaattgtctatttttcctttcatttctgtttttgcttcatgtttttaggaggctctattattaggtacatatgtgtttataattattacatttttctgataaatttgatcaatttaaatgtttgtatttgcctttagtaacattttttgttttacagtgtctgatatcagcagagctgccacttctttcttatggttactgttcgcatgataaatgttttttcatctttttactttttacttatttgtattgttagttctaaagtgtgtctcctacacacagcttatagttaggtcttatttttttattcagtctgaaaatatcaacctttttgttggattgtttaatccatttacatttaatgttattttttaaagttggacaaatgggtgcagcacaccaacatggcgcatgtatacatatgtaacaaacctgcacgtggtgcacatgtaccctagaacttaaagtataattaaaaaaacaaataaataaataaagttggacttatgtctgtcattttgctctttgttttctacatatcacatatctcatgtcttttttgttcatctatttctcctttactgcttcttttgcattaagtaaatattttcttgtgtaatattttaattgctttaataatttttcactgtatttctgagttattttcttagtggcttttacatggtttatcatatacaccttaacttagaatcaacttcagatttatagtaacttaatttcaataagatatagaagtgttgcttctacatagctctatacctttccatccttttttatgctattatatatatatatataacaataatagcacatatacatatatatatataacaaacccaatggtacagttatacttattgcattacataattttatgtcttttaaagaagagaagaaaggagaacaagtttataattatgaagtttgttacattaaccttattatttaccatttatagccctcttcatttgttcctgtacattccagttgccatctggtgttattgtcttacacaaatacagctttgttcacattcacatccttgatactgttcttgtcaaatatattacatttctatatgttttggctcaacaatacaattaaatacatattgttttataccactgcttttcaaataggttaagagaagaaagaataaatatccatttattttataattacatccacgtcttttataattacatgcttacctttactgatgccctttgttttttatgtaaactcaaaattccatctggggtcacttgtcaacctgaaaatttttcccttgagtattcttgtgagataggtcttccagcaataaaatctcttagtttttgtttatctgggaatatttttattataccctcttttttgaaggattgattttctggatataagattcttggttggattttttcttttagcactttgaatatggaatcccattgccttctggatggcactatttctgatgagaagtcaactgttaatgttttggagggttaacatttttaatatgatgtgtctgggcatggatttgtttgcattaatcctacttggagtttgttggggttcttggatatgtatattaattttttatcaaatgtgatacatttcagccattacttattcaaatattttttctgctctttcctctccctcttcttcttatataatcatcatgtatatctgtacactttatggtgtcccacatttctttgaggttttgttcatttttcttcattttttatctctctgttttttatttcacagtctctattaatatatcttcatgtttgctgattctttttttctggcagttcaaaccttctgttgaactcctctagtgaattttctactttggttattatacttttcaactccagaatttccattcgaatctttttaatcatttctgtctctttattgatattctctatttaatgagacagcatcatcatctcttctcttacttccttaagcatggttgccttcagttttttggatatatttgtgatgattatctttgttaagtcttgtgtttgggccctctgacagtttgtgttatctgcttttacctcccatgtatgagtttccctgtcatgtttatttgtgtgcctcatgattttttgtcgaaaatttgacattttagataatatactatagccactcagaatactgattttccctgaagcccctgtctctggagattgttgttctttgttgtttatctgtttagtaatttgactggcccatctgggtgaagtccacttttcctgcagtgtaaaggcactgatgttgctccttagaaagcacagccttgagcacgtacatagtcatcatgggataacagtggttttagcaggattctctttcactgtttgtttacctgatctgtctgtaagctgtctatctctatgtctcttgatatctcatccagctattagactctactaattgcctgttggttgctctattgtttgtgatagtgtcctggtgcatacattgctccacggtctcagtcaatcaagttcaagcccctttgcaaggatagtttttgagctagctttgagattttttgtttttgtttttgagcctcaagaaggcccttcttagatgtctctttccatggttatttttttataatctagctgatccacagtttcacttgttgctctcatggagcttccagcctcttcttcagtgcttaccaccagaatgtctattgtttttgagagctcccttaggcgtgaacttcccccacattctgttctaaataaagtcagctcatttacggaaagcttcagaggtctctgttcttaaggcccactttctgccaggcaaaaatctctccccactgctgagcaacaccccatctttaagagcagcatcctgggcagggaaagtagcctctctgatctttttgccttgcccctcccagcatggaacttctacccaatgagtgagctgggcaaaagcaactggggtcacagtattcctagcctgccacatctggggtagagcttccactctatgaaaaagagctgaatggaggaagggagcccctgacctcagccacactcacatggaatttaacctattcaacacagaacttgggaagatgtgaaatgctggtggcctgccccttctgaataggtacagtagcccctgactgagagctggtgggagaggaagccccatgtcttgagcacacacacctggagtgtgactgccatcatgatgagctggtggggagagcaggttgcggcttaagttccacagacccttgctcttcttacagagatttaatagagtttcttgaaaaaactatttgttaattcatttaatgctcttaagacaacatccacaagttttaaatggttgagctttaacaaaataattctaattagctatggttgtttggctagggaacatgtccgtggaactcctcacaccaccattccagaagtgagttcatcatatgtgcttatttacgcaaaatcatgcttaggggagaatatttaagaaattgttaatggaaggatggagggggagataaaattactttcatttaaaaccaatctgtattggaatatgtttttccttttaaaaataaaaaaataagcaatttcaaagctagatcataaaatatcatgcagattctgccctgtctgatgaagacttgctgtaggaatcctcagctctcttgtgagatgtctggctatcctgagcctgccatactataaggaagcctaagccacatggagaaacccagctaagccaagccatcaagtcatctcagcccacatgccagccccaaacatttaaatcgtccccagctgttcagctaaggaccagacattgtgcaacagatacaagctgtccttgccaagtcccaaccaaaatctgacccacagaacctgtcagacaaagagaatgactgttttaggccctgcagtttggggtggcttattacacagcaaaagataactggaactgggggtaacattcagaatgtgttccagtgatagttctgttctcagatttgcttccttctcttatacctcctgatcagcaggtggaaattaaaagagcattgtgagatgctggagagatccagaaccacttgccatcaacggctggggaatcctagccagtgagctcgcaggagttagagcagctttttcagttagagcagttagagcctctggccaggcccctcgattccgtacagatgccagttcctacagttgtcgatgctaaaaaggaagggatacaatgaggtagggggttgaagtgttgcacaaggtagagtttacttggttgcattcaccacagtccagagatctggtgccttctcttattcagggtggtcagtactgaagccaaattataatagggaagttgtttggtgagcaaagaatcaaagggaggggtattcacaaaaatgcaaatattgaacggggattagattcaaataggctggcagatccagctgcacaaagaggcacaggtgagcagagcaggagcaggcatccgtgtgctgccctttctcatggtctgctttctgattgaggatcatccgcagatgtgttcatagcctccccaggttcacagggcttcccgtcaccaattgtcatgtggaatgcaggtacagtattgccagatggtctgacttttgaaacagaagctagagatccagactttaaatattcctgatttttaaaataatgattcagaatgtttggaaacactatgtggatccaacaaaacacatttgcagaatgaatccaacctgtgagctgccaggttgcaacctctgggtgaaaagtcgggtctcctcatcatgtgtgggcatggccaggcctgctcacggaaagcccctagcaggcatcagagggaaactcctgggcccagagaaagggaggcagcccagcaatcactctgcataaacctcagcgcccctcacgccagccttgggggacatgcctcaccaaggagaagcgttgccttctatggttgtctctgctgtttctggggctgatgtggctagaaatataaaaggcagtgagcacacggttcaacattcccccacactggcagtcgacccacgccgtgcagcctgccaagagcagggagcttgggcacagagctgagaaactcacagggacaaggggagccacagctgccatccacaccccatctcctttatattctttgcactgctgtttcctacttcaagggcaaacaacttaaagcaagattgcaccaactaggcccagttcttgcccatctgcaatcctgggccagacttgacggcctggaacaggaacgggcaactttgaataatcctcactcagcgatttctctcccaccccaggtttcccagcttgcacaattgcccccaaggcatccactctcagctgaatgagctccaggccttgcacccacaatgggccccatccggaccagcagccttggcaaatgacccaggcggtatcctttccccatataatgacctgatggccacagctctgattttccagaacagtttaaattatgaatgatgagttcctttatcagatcatgatcagattttttggctctgaaaatttcttcgatggccctagaaaggcagttcccacaggggaaaggcacggtccctgactcaacctttgtgaaccctgtgtccctgagctccacgctcaccctcctggagtctcagctttctcatctgtgaaaaaaacagcagagccttctcagccttgcatcttctaagtgtctggagaatgcagggagggctgccttggcgtttgctcactaggtctctccttcccgcgccttgaagtgttaatcactgtcccagctagcaactcaataaacctgagctcccttcctcctaatcccccgcactgattttatcttcacacaacccccctccaccccccaacaagggcagagttctgttaaggccctgggcttgccctgtggtgtcagggccatgaccacccacccacacaggagcctggagccttcccccagtgcctgccctggccaggcctcctctgtaggtgtgggtaggcctgggaaccccggccctgaacagcctcagagggcttcggtgttggagtgagctgggaccataaaactcacaagctccaagttcccaggctctttgtcagcccacagagccctgtcacctcacagctaatgcaggcagtggccagcgatcccctgggagcggtttaaaagcgcaagtctggtttttagaaaaagcagctgaggttatagtaagcagctgacagttcccccacagcttcaagctgtaagcagcaaagtgaaagaggggaaggagcgtcctgagtggcgttctcataggagagtcatgtccacctgggaagcagggagatttgggcaatcatcccactcttccaggaagacagccaaaacccccactgccccacagcctccccacgccagaagccagccccactccagcctcagcccaggcgtaacactgactcccccacgggccacagaggctgtggtctcagggcttcagactgcatttgctcctgttcacaaagaaaaggattccagtaacaccagaagttctctctccaaaaccggcggacccggaagccctattttgaaacgtttcttcacacccagacctcagccaaagcaggaaagacggcactcagtggggaatgaaaggctggccttgttctgatgggaaagcagcactgtggctccccacaatccgaaaatgcagttttgatgattaaagtgcacatttcaacaggctttgtgacagacactcctggcggcaaggtctgggaaaaggaggctgccagtaaaccccctgctagccttgttttctctgaacttctggccccagtgggaaaggaaattaaaacttcatttttaatttttagttatgacccattgtgctgcagggtcatggccgggggtttagaacacctagcctcgaaaagggtctgagacactgtctttgaggtcagttcacaagcccagaagcacccgaggcacagctggcggggtcggggggcgcagaatgtttgcataggacagagacctctgcagagatcccataaacatccctgagaccgggaatgcacttacatttgcaattgacctaatggtgcctacaggactttctcacttgttctcacaacccagcttgatggacttcggctctcaaattctatcatgctattttactacgtatttcttagaggtcagtttatgaaataacatgcagaacaactagtcctggcaataatgaaagaggaggagttggaaaaagacacagccagggcccacactccagcattgctcagtggataacctaacttaatgggtacgttaactcccaggaagttaagacaaagctctttaggaaagaccacctagtgtctcttcttgacttcacggaggaagtctagaaaatactagtgaccatgggaaagcaaacagacccaaaatggtcgtgtttggccttcagggaattttgttggttctttgaaaaaggtgaattagtcgccaccattgaaagtcccggtttcctgctcctctccgtggattggaaaatgaggcttcgtgaggcccaccgtcccgtgtggcatcatctgtggggctgacagcacctgccccctaggtcggttgtcccactcccactcagcacagccgccacgccaggctgctgggagtgtctgagcttcagaaccctgttctggagtgaatggaacatactcgacacccttggagccaagcaactgagatggaccattttcaatagacttcagggccctatcagaaaatgccatcaaatgattctgttatgtgtaacaaatacatagacagagagcaaatggaaagggcccggccagggggcccccagcctagacagcctccacacgccccctcagaggtaccacttcccaccactgctttggcctgaataccccctcactcagccactccttctggctgcggcccctccagcttctgctagcaaatgtcccatagagggtcaagggacactcctccttctcccaggacactggctgcccagatctccccctgcctgcagccggggacctgaattgggagaggtgagatattagcatcccctggtccatttcaggcttcaggagccccgcaagctgcaggccaactttggaagacatttgtggtgtggagacaaagccgagccccggctggtcatccccacccgtcggggcagctgtgcctgccagccctgcctgcccctgccatgcctgccacactcctacctggcccaggctggaaggcatccaggacagatcaaaagtcccaaatgaggatgaatatctgaaaatgggcactgaaagggggcggaatacacgcacactaaactgcatgtagctgtcaaagcatttggaaacaacagcggcctcaaagctcaatgttatatttccacactgtgatcattaaacggtaagaaacaaccgtcccaagaaggacgaagagaaccttggatgccatctgtgtcaagctgtccctggaaagaaggaacactgagtcctgagggcaaaggcgagaataaacaccgcgcaccctcagccggggccccgtgttcctccgtgatgttccacttttggaaaggaagctggcacttgggtatgcaacaacctgccttcaaacgccagtggcgggatttgtttttacatttacattttattattttgtgtagaaaatcctgcttttgaacacctcaaaaatgaaactgcaaggaaaagccagtgagacgcaggaggggtgagagggactgcgcggcagccggcgctctcggggagaaggcctgccgctctgctttctgcatttctttgctggaatttattgctcatccaagcacaactgataattgagtgggttactccaccagctctccaaaaacaataatgccacatgtccaaaattccacggttgcaagaaccttgtatccaacaaattataaagagtccctctatggtaaccatctcataccaaataaatcctcctgttgtcacagactggccacggttctttccatttcttacgtgggctttgaacagaccataaattcattgatgaattagtcagattttgaccacagtcctttccacagaggctaggctaggtatgatgaattcaagcctagtggccacgcacaggaaaaatcatacaaattccctcctcataaattgaggatgaggcattgtggggaaacgcccggtgagttctcgcttatatcagatttattgatcatttattagctgtttgaacaaatggtccggaaaacatcctgcatgggttctggtccagtgcaccagcagctaaccacgactgtggtcaggtcacatgtgtcccctctgatgctcagatgccccggctctaaaattagtccctaataggcttctggcctgaaactccatgatcttaccttgtaatttgcaagaaaaaaatcaggtaatatcttggaagaaatgagcaagaaagaccgaagaggaactgatgatgggaataacattgaccctatctcccctaacaggagggaaaagggatccctccagattctgaaatcagagttcatcctttctgatttctagagagattctgcagcctgagtttagcaccccagtaggcaaagagacctgggctgagatgcaccccattccccaggctgaaaagagaccacggatgggacttttctttacctgggaagaacatactcatcaccacatcaaagccctccaaaggcagagaggccacatttttattagttcatgtctgctccagtggcagatatagagaaacagtgggaagatgatgggggaaagcaaggttccaggaatggtctgggtgtatcagtgaacagcagagtcattataaatacataatgtaatgtagtcacagaaaggaattttttttaaagacatgatacactgggtgcatacaaagaggcaaacactgcaggcttcggtgagaacaagacgtcctttattctgcagatcccaaccttagctcagccccaaaagaagaccgcagacagtttggagcaccccaagttcagaggaacattgagacactggaaaccttccagaaaggagccacaaagctgagttgcaggctgcgagggctgagcagtggagagagggtcaacagcattaaacactgagtaagtgctgtggctgtaagtcaaccggggcaagaatgacctacaaataatcccagggcctccccgatgaagaaggtttccattctgcccaggatggagacctgggcagctgtagaccacacccaggctcagggccaaggagcccatgatatatttatacacttgcagcttccagggcccgtggttgctggcctgcctgtgctacgaatagcaaggtcaactgtcagggacattgtcctacagggggtaacaagctccaaaagaagcagcccccagggacaggggagtgagcccaggttagtgtcaggtgcgttcccccctcatttcacccctcctcacttccagcccttcccccctttcctgtgcgctccttcctcccccctactccttgcaaggacccttctgttacaccagcttccctagtccaggaggacaatgagatgatgaagaggtttccctgaaggtgcgagtagctctgaaaattcacctccgagagggaagcacctgtgcagatagtgaagccagtggacttggtggctggggacggtcctgggccactgtcctcccctgtgtgagctcctcgcttagcctggagccaccgcagcatcaggggcagagaccaaggtctgctatcttccggaacgagccgtctatcctccccttcccacaaccatcccaagcctatctttccctgaaacacacaaccgcttgctctaaatttttaaaaaaagatacacaaagatgtgagagagttacctgctgttttccagctttgaaatcaatggtctgagagaaagcagctttctggtccactaacaggattgttacttggagcagcttagggatggattactcatgccccagctggggaacactctcatgagtctactttaaaaaaaatattactactgcattggctaaaaacaaccaaggtccaattttatatgaagtgataaaatcagcgtagagaaaaatccatgagccagcaaacctggacgagaggtcgtggatgacttacctgggagcccagcttgcagggtggccggaaagcaccccatgctttgctggtggaactgggggccacaaagggaggggaaagccagaactctgggatcagaatcttcagaacctgtgtctactcttctgccttagaaagaagcctttagaagcaaaagaattatcttataattcaggcttggtcaggggcacaggtccatcccgcggtggtctcccaccatggaaaggcacaggatgggacgtcggctgacccgagccatgagtgggctgaggaggggaaagcagtgcagccggcttgggggcaagctggggcatgtgagtgtgtgtttcgcaacatttccagctacctcggttccccctggcatcctcctgccttcctgcagcccctggccctccttcttctacctgagcctttgtcttgcaggctctgggatggtggggatcctctacaccagggtctcctgctcgtccttgtactaaagcagcagctgggcattgtcagaatggctgaaggagggactcagagaggctgcaggagggagtcaggcctggggcgggtgagggctactgtcctatgagaccaggagagcagatgaaggactcctgagcccagagaggacttggcctgcccagagttacccaagatgcctggggaggtgaggcttggagagctcatggagtgagtcccaaagaccccagcagagacagtgggcagaaagactcccgggccctctctgtggggctgattcacccacgcgacagccacagggtggggaggggctggccacagcggaggggtgcactgacctgagagcccagtgctgggaggctggctccgggcacgtcaccgcccccgtcatgtgctctccttgtgccgccgtcccagcagcgccccatctcaccaactcccaccttcatgtgtggccgcccacctagagccatgcctgaagccactgtccctgaccacaaagcttttggctgataggaagcatgacagcactggggccctacactggaagcgggaccgtccagagaagaagactgcgcacagggatcgggagctgggacacacgttagtcaaggtgtacgagggaggaatcaccgccatgtggagccactactcggggaggacgtgggccacccggagctcagtgacagtactcccgggagtgtacatcgttggtaatgtccacgacagtgtccctgcctgtgacccaataatttcccatccagggacacacttcacagaaatgcacgcacaggcacaacagcatcgaatgggagagctgcacagagcctcttcatagcatccccaaactggaagcaacccaaacacctagcggacacaaatgagtagaaaatgaacaaaggagcattataagcaatgaaaacagtgaaccagagagacgcacatgagacaggctccatctcacaagcctgaggtttaggaagagaagcaaccaagaccccacgttggccaggcacggtggctcatgcctgtaatcccaatactttgggacgccaaggcaggtggatcacctgaggtcaggagttcgagaccagtctgaccaatgtggtgaaaccccatctctactaaatacaaacaaattagccaggtgtggtagcacatgtctgtaatttcagctacttgggagactgaggcaggacaatcgtttgaatccgggaggcggaggttgcagtgagctgagattgcaccactgcgctccagcctgggcaatacgagcgaaactccatctaaaaaaaaaaaaaaaaagcccaggcaatatgacgccacttccagaaaactctaagacaggcacaagaaagaccactaccctgtatggtttaggggttacatctaggcggcaaagcaaacatctacagagaagggagacaaagatgcgactgggaatggcccatggcagctgccttcctggggcgggacacagttctgggggggttcataaggtctcatttcccatatctcgggtggtttcactcagccattcatacacaggaaaaacataacaagaaatgtgtagacctttaggatgaaacttcaaaatgctcctgaagaacacagggtacagctgtgtggatggaaggacagaccttactcatctcttgttaggaagactcagcattaaagggcatcaatggccaggcacagtggctcacacctgtaatcccagcactccgggaggccgaggcaggtggatcacctgaggtcaggagtttgagactagcctggccaacatggtaaaaccctgtgtctactaaaaaatacaaaaattagccaggcctggtggtgggcacctgtaatcccagctacttgggaggctgaggcaggagaatcgcttgaactcgggaggcagaggttgcagtgagccaagattgcaccactgcactccagcctgggggacggagcaagactccatctcaaaaaaaaaaaaaaaaaaaggcatcaattatctctaaggtcacttatatatgaacatcatctccatttttaaaagaggatttttctggaactagacatgtagttttaaagttaatatggagaaaaaaaggaagaagcaagacaattctgaaaagaaagaaaaatgaagaaggaccagccctcagaggtattaaaacatattctaaaggtgttaattaaataattaaaactgaaaggcagacctgtggaaaagagtcaaaaactcagaaggagggtcaaatgaatatgtgaaaccaatatatgatcaagactacatcttagcttggtggcagtaaagatggacttttaaataaaggaggccggtgccatcaggcagccatctggaaaaaggtaaagtggacccgcccttcccagaatgtgccggagtaactccaaatgtatcacagatctaaacattagaaagtagaagcacaaaaagtagcagaaaaattcaaggtcagatatctacctttaaagccttgaagagggaggtctttttaactgtaacgcaaaacttcagtagccatttaaaaaaagattgagagatattggctaatctaaacataaaaatcaaaaacttctatgtggaaaacaccatagatagtatggatgtgagatgatattaaggaattattgtaaattctcttggatgtgataatggtatgatgagtgtataataaaacgtccttatttttagaaggtacacacagaagtccttggtgtctagaagcacacaaacacacacacacatgcccacacatgagcacacacacgtgcgcacacacagagataaggcagaagcggtacccgatgtcaattcaaattgttgaatttagagggtggacatacagctgaccattgtactattctttccattatttatttatgcataagagaaaactgaaaaatacaccatcaacgaagtcaaaaggcaaatgacaaactggggaaaaaatgtttgtaactcatatcatagacaagggttaatcttcctaatacataaagaacttctataaatcaggaagaaaaagtccaataacccaataggaaggtggacaaatgaataaatagttcacaggaaaagaaatagaatgtatgaaaagaactcaaaggaaattctaattcaactacattgagataacatttctcacttatcagactggcaaaatccaaaaactggtcagcatgttcggttggtaaggctgtgaggaaacagtccatctccttgtggctggtaggagggcagggaggtaagacactggtgaagagggattttctgtttatcagagctgtcagtgcgtggccccatgacctagcaatctgactttggagattgaccctgtggatgctcccacttccatacttaatgacatatggccaaggcgctctgttgaatccgtgtttgttatggtcaaggctggcaacagcacaagtatccatctataggggccgtgttaaatcaactgaggcctctccaccccatagaataccaggcaattctaaaaggggaggccctgtgtacaaaggggagaccaacaggatgccatattaagtgaaaaaaagcaaggttgtattggtcatgaaagaatgaaaaataagaattttcaaaattatgaatatatttccataagggatggacgtactcccacctgccctcccacaaaactaatcgaagttatatttgcttagtagttatatttggcggtgggatttggacctgaatgggagaaaggcttctcaatgcctatcttcttaggtcttttttctatttaaatcatgctcatggtttgctattcgaacaataaaatttgatttaaaataaaaacagagaactgtcagaaaaactcaaggctttcttttgatttttgaaaaaagtttcttaaatgttggtaatacttattttgaagggtattctatgagttgtcaggtcaaaacctttactctcaacattttccataaccttggttgtctcttaaattgcgcaaaataaagagccaatgtttcagcgggtgagtttagtgcttatagggagctcactgtaccaattcagagcatgaaaaccctctcttcggtggcaaggaacaggggctttcctctgcgtgtcccactggccctcccacatggctttgcttgtggagacattgcccggcttcccccaggggcccctggaactctgtctcggtaagctcatacaatcacctttccagataattcataaacaaatacggaggtgagaagatcaacagcacaagagtgttggctgtcattcaacagagagggaattagaattgctccactgggtcttgtccaaaaaaccaactctaagcacctctcctcccctctgagccaccccagtgcccgaaggccacatgtacggactccatttgttctagttcttttcataagagagaagaaccgagtgtttcacatgcctgtaacacgggcaggaaatgctaggatccatgtgaaacccaccaccctcccccagaagctcctggctttagcatggaatactctgcagaacgtagctgccgtgaagatgatggccctgaactgccacactccccagcgaggtgacaggctagggactgaggctcgggcaatcccgccaagtatccccccactctccccacattctgacaccctactgggggctttcatgcaggtgaaatctggttaaaagaaacagttgggaagagactaaaacactcaccagaaagcccctgcagccaggaggaaagtgtctgtagaaggaggtggtgcatttccttggccaccgtgggttccccgactagctcaaggagaaagggtctttcatggatgcagcagcaaaggtaactctgccgacccggcaggggaccatggctactgctcagcgcccacagggcagggcctctcgtgcagccgattgagccattctctgcatcctcagtccccacccggaggacaggtcgggcactggctccctggagggtcggcacagcctctgaattcccgatgaacacccggttgttccagccaggttctccctggaacaagccaagccaacctcagcattttattttcttcttcaattcatcctcttaaattctttgcccttttccattctgtgacttttgcctttttctgttttccttttgcagaataaaagaacaaggcaatataatttttcaatatggaaaattagagaattcagttttttcccaaatcaggtcatgttagtgtccagttatttttcagagcccttgtgaagagagtttcgggttgtaaaaaggtctgttaagtaaaaaactattagttatgattgttgctctcccagaaccatacctctgacggactagaagtcacttcattcatcaagccagcacttttccctccagacagctggagctagtaattgctactgactatagctcttgacaagtggcatccactcaactgagtatggaaggcatggaggaaacggaggacgacacagaggcaggctggtgctcacctccatagccggggtgtagccacagtgccttcctccttcctcttgttttcaagggttactatttcctaccaatataaaaatgtaggtccggggggttgcccctctccccctcttatgtggtaacaggcattgagtgaatgtgcccaggactcagcgttcactgctgttcccattcaagttcacgctcctgctttttttttttttttcttttttttttttagagacagggtctcactgtgtggtccaggctggagtgaagtggtgtgatctcagctcactgcagcctccaattcccaagctcaagccatcctcccacctcagcctcccaagtagctgggactacaggtgtgcaccatcacacctggctaattttttttctaattttgtgtagagacgggtctccctttgttgctcaggctggtctctaacacctgtcctcaaacgatcttgcctcggccctgcaaagtgctgggattgcaggtgtgagccaccgcacccaggccacactcctgcttttgaagcagcaggcaaatgagtgcatttgtttgttgctgagaaagaatggagggcatgatctgatgagtctgtctgctcctccagcctccctttcccacaggaccaggtgcgagagcctgcagtgcccccaagggaaaaatgaccctgtggttcaggtttgcatggtctagaccaagagtgtaggccctgcatgtgtgtgtgtgtgttcatgtgtggtgtgtgcgtctgtgtgtgtggtatagtgaatgtactgggtgtatgagagtgtgcatgagggtgtgtgttgggtgtgtgtgcatatgagtatgtggtgtgtgagagtatgggtgtatgtgagtgtgcatgtgtgtaagttgtgtgcaagtgtattgggtgtgtgtctgcttatgtgtgtgggttgggtgtgcatgtgtgtattcaagtattggtgtgtgtgtgtatgtgtgagagagagagatcttctgggtgactgggctaagtgctgaattaccagagaaccgacgccaacaaattcaaatgaagaatttcttttttcattgattcaagaaaggcttaatagctctggcagaaactctccagaaaaatttacctttgggcagtcatggcccagcaccagacaagaaagctttcagcctcaaagaatttggcagaaagttatgaacaagtgaataaaggagctggaaatgagactccatagatcactgccacgaacctgtttgctcctgttaacaccaggcagcgccggttctagtcttgactccggcacaattccccaggcagtgagacttggctcacctggcttggcagctgcagcgttacaacccatgaaggcttttgtgcgcttatgttaagtgacctttatggaaatatcatgtgctgtcgacatcacaggaaaacccatatacttatcctaaagccatctccatgcagaaccttgcctgctcagaatcaatcccatggtaacccttcctgcaaaatatagacccacatctaagagcaagttgtcctgagttcatggtaagcgtttgtaatgttcccgaacttccgccaatccacaatgtggaaattcacgtgaaagtaaggacattttccaaagaatatgtggccccaaactatctgtgcctgaattatcaagataatgcgtgctaatacccggcactgccttgatttatctgatgactcgactcaagtctccacgtcagtcacacgtcattagttctccaaatgagcaaaataaacaagtctaaaagttaaaagtatgaaagtgactgtctatctactctattttgccgagtagttaattgttatttcttacttgagtcatcatcatcgatttttgtttgttggttggtttttttgttttttgaaacgaggtcttgctctgttgcctaggctgcaatgcagtggcacaatcccggctcactgcgacctctgcctcctgggttcaagcaattctcctgcctcagcctcctgagtagccaggattacaggcgtacaccacaacacctggttaacttttgtatttttagtacagacggtgtttcaccatgttggccaatctggtctggaacccctgatctcaagtgatctgcctgcctgggcctcccaaagtgctgggattataggcgtgagccaccacgcccagcccatcattcattgttaacaaacatttatcaagtgtgtgttctgggccaggtactgagaagacaaagatgaataagaaacagatgttgcccggcattataattacaatgggcagtgaaggctattttccttcactcttaccacaaggccaatgctgtacaaggtgctttgcaatttcatttattccccaacaattatagtcaattccattcaaaaaatctttgtatgaaacattgccagcaatatgagagtgattgttcagagcaaaccttcagtcttcaagcagtgtttggtacagagtgggtatttgataaacggcagctgtaattgttactgtttacttctttcaattgggacagaaattacatctcacgggctgtctcctagtactcagcacagtgactggcacataagaggcctttaactacaatgccatcatgttttctcatggacagagatgactgatatgaagtctcaaattgcgcaaagtaaaagaggcacattgagaattcatgactcccttgattgattggttgattgattgactccccttccaaaagcccattttagagcaatcttttaaacatactattatgatctggtggctgggcatgtgacactgtccacacaagacatatgaacagggaaggaaaagccacagcatttcaacaatagtcattacaagactgggattggccggcagtgaacttcggccaaggcactcctgaaatctttgtgtttggtaactgaggtggagatgattatcaacgcacccagaaaagcaagatcaaagggaagtcactacgagtttctttcttctcttggcaactccaggtctcattcacctgtgcactgcccacaccaggcagcgtctgctcctcatcatggttaataaatgcttcttacacaatcaggcatgagagaggagcgtgtccatttcagtgcctgaaaaccaggcaatgatcccctaatacctacttaaagagaaaagagagcaaccatcacttcacttacgcaagacaacgggagggaatctttcatttcattgtggccgccaccctgcctgccctctatccatgagggaaacaacaccagaaaccaagcactggggcagcacctcagcctcggacactccctgtgtattctgtgcaccatccatccagtccttatcggggtgtttcccaaaataagcctagagaacacaaatccaggagatcatcccatggtcaactctgtgagacgccttccataccttgtgatttcaaaaggtacattagctgctgaaggctctggaaaggtctgcagcaggaaacaattcaacgtcgctcataattcccaagtttatacaattgcataacccgtgttgctggttctctacggcactcagcttagggaatggtgccctacgggggcagcgtcataatctcacttaggaaaaagttgataaacctcccttttcatgaaaatgtgaaaaggccacatgaaagagatcctttacgtgaaatatttttccctaatatagcccaagagggcaaaaacgccatccctaagtgaaattatcctctcccccaatttgttgaacatgctcatattcctagttcaacgatgatgaaatgctggtctttaggacatcccagaactctgttattgttggcaggtaaatgaggcttaacaccaggtccttctgcacacccagggatgcagaaggtgtttggtgggtgatttccttgatggatgtagaaagacaacctggagagacaagcttgaaagacttcaaggggcaagaaaagtaaagagttatttcccaagtcatgtcttcaccaacaaaacactgtataaatgcaattaatttttttaatggtttgacattagataagacccaaaactcacttcctaggagttaaccattatccacaatcaacagatcttaaaaatgcacattggctgcatcaatatatgatcagccctcatgacccacagattccatatatgtaaattgttctcctaactaaaacttattcgtaactcccaaatcaaccctggtgctgctttcccagttattcgtggacatgtgctgagcggcaaaacgttggagtttcctgatgtgcatgatcctggctgaccatgccacgctccagctcatgtggtaaacacgcaccctgtccacagctgattgagtgccccattttcacgcttgtgttggtggtttcaagtccagggtagccccaaacacagtgctgagctatgtagtgtttctgagcacagaaggcgagaagccaggtgtgtcggtgaaactccattcaggcacaagtgctggtggtgtcactctgagtttaatgttcatgaatcaaaatcatatattaaatatagtgaccttaaacaagaacacacataaaacaaagtgtaggtcaggcatggtggctcacgcctataatcccagcattttgggaggtcgaggcaggaggattgcatgagcccaggagtttgagaccagcctaggcaatatagtgagccatcatctctatgaaaaaaattttttttttattagccaggcatggtggtgtgtgcctgtagtcccagctactcgggaggctgaggtgggaggatcacctgagcttgggagacagaggctgtagtgagccatgatagtgccactgcactacaatctgggcagcatagtgagtccctgtctcaagaaaaacaacaacagaaaaaaaactaacaaacaaaaacaaagtgtagtggtcagtggacaaaaatgtgaccagaggcttgcaggaacccaaccctgtgcttctcctaggagcaatggctcatgatgtgctgagtcagtgttcgtggtgactttgcagaacgtaactaccgcgatcatgagaatcaggtgttgtatttggatagcaatgaacaaagtttctgtcaagaaaatgtcttacagaagttgaacaggatggtttcaagaaagtgaacagactatgggtgagcctgggtgctgtgagatgccaaacctggggaagaaaacagaagccgtcatccggctgccaggcattcttcctcgggccctttctgatagggcatgcaggtaaatgtgctatttgcactcaatctgcagccagtctgtcaaccctgtgtgtgacgctgtcttctttctaattctttctcattctaccctcagcagttttttttttcaattcctaacagaaacaaccaaatgatgccccagatgcaaaacagtattcccagcagggtggctgccatgctaaaatattgttcttttctcggctaatttgtggtcaagatctactacattcgaaacatcatgacaataaagtacggctgtaatcgcaagcagctttaggaaggtctgcaggcatcagcagacatttttcacacagcagtctcccccttttctctaaagaattttggagatcatttctgaatgaggccaggctcacctaacagtggctgcatcacctgcagctgcgccaggccaggccatgcagcttccactgacttcaaggagaactgggcaacatggcagagggtcgagtccacacagacaaagctcctggcaacatcagtcatcacagctcagccatcatggaactccacaaacaccagcgtggcccacattcaattctggaggacaaaaagctcaacatctacagtcctacttccttccggtatactctacctacccctctccacacacacacacacacacacacacacacacacacacacacacacacacagacaaaacatcctcagcaacatggatcttgcttaatctttaataaaatacaagcttcttcccatgcagccatagaaaagaatgaaatcatgtcctctgcagcaacatggatggagctgggggccattaccctaagaagcagaaaatcaaatatcttatgttctcacttatgaatgggagctaaacaatgggcacacgtggacataaagatggaaataatagacatgggagactccaaaagcggagaggatgagaggagggggaggggcaaaaatacctattgggtaccatgttcaatatttgggtgttgggtacattggaagcccagttcccaccatgacacaacagacccatgtaacaaacatgcatgtgtaccccggaatttaaaataatttttaaatgtttaaccctaatataattgtgaggaaataatttaacaaatccagatggtggcacattctactagacagctgatctggactcttcaaaaatatcaataacatgaaagaccacaaaaagcaggggctcattctaatcgatttaaacaaaacttaaataacatgacaactgaaaaaagcatatgcatgcccctagactcagcccatgagcagaaggttgcagccaggtaagtctgattttgaggtatattcagtggaaaagacactacaaggaaagcgctttctgatcatcccccgcccccaggtgcggcatgcacagtgcgtgatgtgatgattctgcggctagaaaggggtacattcatggactgaaagagcacatttttcctttgaactaaggaaaagatccttgggtgatgttgaaggctgtgcggagtgtttgtgaggagtgaggcaattcccagggatttttcttctacaaacacacaacgggggtgagaaaatcagacacaaagtcaggcttcatgaggctaaggaagaacttttcctcctttagcgaattttctggaagccctgccgaggctacccccaccccatgaacgcatccaatgcttttgggaacctgtgctaatctgtcgggtttctgcatatctctttgcccaaccaaagggaccccagaccctgccacctttgtccggaagagctggcctcggagggacagagactctgagcctgcgtcccaggaagaaagtcacaggtaggagcttcgggccccctcgctctccccagcagcaccacccactggcaaaggacccaggtctctttctccaagggacaggggggtcgggaaaaagaaaagacaagactctcctgtgggaaagaaacacatgtgagggtgctggagggtttccttccttcttctggagttttaacaaaaatagactctgggatgaggttgtaggacaaggaagtgctcccttgcttgactggtgttctttctgccctcactggaatctgcttggcagccgagggcggtgacgttcctgtagcttccgtggggaattcaggtgcgtgtgtgtgcgcgtgtgtgtgcgtgtgtgtgataagctgttttcattttaccatcctaaaaaaagaaaaagtcagacgaaggcacagaaaacggctgaggaattcctggcaagggcagactcacccacttactagctttccgcttagcttgccaccgggacacttcgatagtccaggagacaaatctgcttcctctctggggctctcccggttgagaggtcggcggagttagccgtcatctttccctgtaggttctgagtctatcaaggtgcagcccaaatgcagaggaagctcccgcacccagggtttcccctggcgagtgaccgagcccctctgaccaaacgcgcgctcaggcgccttatggatcacacggttccaatggcccgggagacaagcaaacgtgccaagcgtgggcttcgatagaatactcgcctcaccaccgtggcacggagagaaagccctgatttctctttcattcctaaagggctagaattctgtcgtctaaaacctgcctcatggaagcccgtggaaaaaactgcctgcggaagagacgaggttgtgagcgcttatagcacagatggagcagagtgaccacagctgagggaaaacaatgaactttatgttcttccagaacaaattacacactccccccagcccataaaggctttttatgtaactgcagtcaggcaatacctgggcagggagcgactgcgggggatcccacatccctgcgcggctcttgcctcgggcagccccaccacgcccctcccagcacccagggtgtctcggccctgcccagccgggacccacctcgcaggccctttttcccaccgggattcaggcgtttcatgctgacttgggccctcgggggccacgggccaagggaggagggaggggcaggcacctcgccatggaagctggtctctggaggagcccccagcctggcagggcgctgggtgagacaggtggctggccaccagccgtggtggcgaggaacagcgtgggctgcagcgccctcaccataaccgatggcgacaactgaggcaggcccaggacttagaaattagcattcaaaatgtacagcctaaacaccctgcaccaaaagcccagcctgctctctaggcgttccatcagccgtccatgctgaaatgtccttcaacctcaccgccccctgcaagccctcccgctctccagccgtgcgcaggcaggccacggtcccccccacctgtgtctcgtgtgacaacaaagcagaggaggaaagggaggggctgagcttgtcacgggggggtgggggcctgcgacacaatagcgcgcagtcctagctgctttattgaggatactgtgttgaataaaccaatgactaagagagacgaaggtgagctttctgtaattcccgggaatcgtcggaggcagttacaaacattttgttttatcagttaatttcacccatcatgccccctcgtgggaaccacaattgaggtctctccacaggctgtatttttaggtgacgcacccacatctaaggcagccaggatggtcggaaagtgtctgccagcagactggggatccccaggggccccatcagcccagggctgctcctcaggatggccgcggggccgtgccggccggggcacaccaggccagggtgggcggctgttcctggaccccagcgggcgtctgcctcccctacagcgggtccgggcaccccgggtctacttccagttcagaagcgcagcactgagtagggtgaggtggtcatggccccttcttctctcagtgagcatctggaccctgggggccacgtgcctcacacagactctccagcagctgcctaggtgtggatcgctttaggaaactcagctcctagctccctaacttctgcacacactcttccctgaaatcactgggcctgagattgctcctcggggctctccttcccacctccctccgcgggtgccagcctgcactttgcaaaccacggggggcttgcacctcccctggccctcctccgccttcccaccctcttctctccccgcctccactacccaagtttaccgtggagcaccaaaagaacagcttggtttagggggtcttctttgaggaggggtaacaacggggtcaatattaattttggagataatgtgagccacgctggccaagcacagccctcagccctttcagcagagccgtgtgctgcacacacatcttcagcttttctgggcctccgttgcctctgggtacatttggatttgaagctggagagaaccgagcagaaagcaaggaaaacgaagttcatcgagggctttttggcccgcggtaggggaacaggcccaccgaagcacaccccggtttcccacagtgacgttcagctgctctctctccctcatgagctggagtcacgctacggacccagccgtaaagcccttgcggtgtatttccactccaaatgtggtaggaaggtccttggcttgcaaatgctttgtcctaaggctcaaggacttcacctggcaaacacatctcaccaccttgctggtgcgaaaccgcctgggctttcactccagccgaggcgaggcatctaagtgcgcttctccgggttgccactagatggcatcagagctccatcacggtccctgcccaccggcgcctcaactcagactggattcctgctggggaaaccgaaaacaaaaggaggggagggggcgcgggtgggaaataatttgccaatactttcttatgaagttgagaaataactaaagccaccggttccagtcttgaaaaccaaggcccattggcagtgggttatcagaacttactaactttagagtcactgaagttggtatacaatgccccactgttaaattggtaaataatccaaacaaacaaacacaaaaaacaaggtccaattctagcttatttggaatcataagagaacaccatgcattaaacccatagcaactaagtttgcaacaaataagtacaaaagatggaagctctctttaatttgtagccccaaataaaatgccactgatcgcatccagcatgtctgaaacaggctagtaaataacggatttttaaaagcaatttcttttctgtagacgctgatggacaagaaagctcatcttggctggagttgaacatggggaacttcttggttcctctcactctttcctattctcagagcctctcttctgtttaagacatcacctaagatcccaggctcctcctccccctgttacaatgtgcagagtgaagttccaatagtcaacttgccaagagacaaggcttcatgaaaattctccccctgggaaagccagagtcatttgccctggaggctcacagggacacacacacacacacaaccagcccagaaaaaacaaaagaacagccctcaaccctccttaccagccccctccccccagctccagttctggccccttccctgcctctgcacctccccacgataagccccagagataagattatgccaggtgacaagggaaatccacactcccgaagactgtgcccctaactatcccccccatcctcatgttaattctcagtgccttcattttgtgaatcagcaaatgttatataaatgatttaccatttaaaggtgcgataacatcagaccagagggagataaggggctttgtgtgacacttgaagccatggtgttgggagtcacggaggctttccttctctggcttcccagggctttaggccccttgtttatctcttcctctcaccaaattacttcgggccatttacacgtctccttcccccaccagctcagcttccttctcttcccacgccttctgtgaggctctctgcctgtcccaccgctggtcccatgcttattggtggggatttctcagaggcttctctggatgtgttctgagctctcaaatggcaaacagtgtttttccaaattctgttttcccactgtgtaattttaaaacctacacaatcatacaagcatcaccccctgacctcggccatcatttttattttgcattttctttaacattctccatccaaatgaatccatctgcagctcgccattccaggctttgcaaagtcctcattcttcttttttggtgtgatcccattaagttgatgtttttagtagtggacatctagttggcttaaaatatttcactgttgaaagcctcacttgtgtttaacatcgaactcacactggagtaaactagtatgatatgcatgttagtcatttatgcatatttacaaatctaaatatctgttgcgacatataaaggatgacttttcctagacttcatagctccctttgtttcaaactatgatgcaattttttctgaagctcattgagacggcttatacacaaactatgatgggggagaggcacaggcaggtgctctgaggggaagacttccttggccctgcaggcatctgagcctctcccagccatgctgcccgcctctgtctgcggcttctttccttagcagagtgagacgcgaacacacggctcccggcagcatggggacccttcgactctcgcgacagaaccataacttcagagccccaccacactctctcacttgcggtttatcctcgtgttttaatttcctgtatttacagtttttctcaaaggcattccgaaggttctccattgaatcatctcactaaaacccctcttaaaagacagctcaaacgtctaagttataagagatagatatgattcattcctttgagaaaaaataaactgaggcacagctaagcccgtcgtgcccctgggcctgatgggccggcggggccttgcactgcctggtctaacctgtggctgctggtgaccaggctgtgtcccccggacctcctcggccttcaatggaggaaggtcagatttctcagtcagattttgcttggagagcccagctatttcgttccattgaaataattggagaagttcttttttccacaggcatcctgcctgcacttcatcgtgtgtattattttggatttgcttcagaaagaaaaatggcctttcacggcgtttacggaatgtgggcagaaattggaccgggcagacatagagctccgcacagagatggaaaatattcagggtgaacacgcacactcgacacccacgctcccgcagagaagcgagccccagcgctggccccacacctgagtgcctcctccgccggagacccgccagcggccaggcagcctctgctccccaggccggcctccgcacctgctttatccgcccttgggtggctgcgataggaaggtccagaagtttcctgcccgtgtgcactaaagtgctccgtgtgcctgcgccccgggacccacctgcggaggcctggagaggcccagccagcccagtctcctctgcacctgaggaaaggaagcggctgcccctagaacggaggagctggctgagaagctcaaatcctgggaccgccccctgcccccctccaagttctggatgccagtgggtgcgggtttcccctgctgtcttcaccagaggggccttctctacgccacctcctccctctgtcccttctcctccccagggcccagggtctctaatgaaggaaacgattacgtcaaagcaatcagcaccgaagtttcagagaggtcctgtatcttttaaaacagaaaggacagaaggcgtctcaagctgcagccagaaggtccgcaatccagccagcagacgccaagggacgctctgtgcatggccatcccgggggtttcagaggcatcaccaaacaggggaaggggagcttccctgcgacgtctctccctgtcacacagtttgctccctatggtcatcaatgagcccttccaaatatgagggaatttgcaccacagtcctcgtgcttcctcagagaaggtcgtcgcagtaaaaggcccatcacactctttcttcacagttctggactctgatctcttttctgatgccacccccattctgtcttctatccctccacatccacctaatgtcaaactttaaaaataatgcatattaaatggccagcaattggtcacctgggggaagatgaattgaggccatccagggacacaccagagtgaaccctcaaaattccagaaactcttcctaagagaaagaaattatgcatccatcattttctttttgccccaaatgtagacacaacatttgtttgcctggtggataaaactgaaagttatgctaatattggaaacccagatctgggcatatcagagaaatttgtttttaaagggacattgctaaggactttgaatccagcacttgacctgtatttcatattactctgatctagtcggggatgccttctaggttctaaatgcttaattggaaaatgtctggcacagccagaaaataaagcccaactctccttttatgagatttacagcagactgtcaacaccatctgataattgaatctccttgaaatcggcagagctatagagatatcatcaggaaagctgatgtacaaacaagcaagaagaaaaaaaaagaattagaaaaactgattttactccatttaatgcataatcaagggaaatgcaaaatttgcccaactaaggagaaagagaaatacgaggtatagttttctcaagctttgtttagaagcaaaaggatccctccactacactccagcctgggtcactaagacacacacacacacacacacacacacacacacactctctctctctctctctctatatatatatacacacacacacacacatatatgtatttccatatatatatggaaatattattgtcatgcattagctcttttaaaatatccaaagacaacctgaaatgaacaaagcaggaggacctgggtgagtctgagcccattccagaaaaaaacagttggcagcagtaagagtggtgtttactagaaaattaacctacttccagcagacagtagacaatgtgactgatattaaacaaaatgcgtggatgtgtttgccttgatgttcgaagggtggagctgcatctgttttcctattatgtaaaacccctgccccgctcctgccaaaacattctcccagtgacacgtctgcccgcctctggatgcgttccttactaaaacaaatacgcctaacaccgcatctttgatagcaaatgctcacaaaggcaaacaatgaaaactcctagggtgcgtttcttgggatggcaccgggcaccatgcggaattgccacacacaaaagcaaaacagtgctcctggctgactgggccaggccccagaggtcagcaacttttagtaacttgctctttctcggcgagtaactaatttcccccgctctgggcatcccgcagtccttccctaagaagtcactctgtgtgtagatgttgtctctttgaggagagtgataactactcaagcaaaccattcttataagcgcacactctcacgaataaaaggagagtgtctcatggacgatactggcaccctataaaagtgcaattcagccttatctaatctggtgcgtgtttcatcacagggacatgcaataatggcagcctttgtgctgaaggaagaaggaaaagctctcacgcgcgggcgaggtggcgggggtctgtgacccggcccggactttgtgcccagctctcagtgaggacttcgcggtcctggggccagtaggtgagaaaatgatggatgggccgggtgggcgacggcaggaacggcctggagaaggcttcctcctcccatctgctcaggaaggacctcagcgccagactaaacacaggccggcgcggctgcggtgtgcgagctcgcgcgccggccgccggcctttaaaagcaccttcctgcgcacgacggggagacaccgggagaccaggcgccccgacccatcggctggtcttgaggagaagcaggaccgccccagactgtcgccgcggccggcagggccgggcgctccgcggggaatctgggccgcggtgccctgtgccccactccggcaggactgggcttccccggctcttcgagggaagaccgcacagagaagaccctgggcacccctgtggcgggccggaccccgggaaagtagggcccctgctgccccgcgcacttggtggccaaacacctccggagcctgaggtcttgggcctcctctggctctgcgtccggggttctcttctctcccccaagggttggcctttgggtcaatcgtccagacccaagccaagcttgtgttgggcaagggaggaattcctggaaaaggaaaaagcccctgccaccctccgcccttcattcatcttccctgccacccactctctccttttccctgctcctaccccaaccctgaccctcaaggcctacctggccaaagacaacagctgcgttagtcgctaggccttggtgggactgaaggcggaggagcctgggcatctgctgggggaaggccgcactagactgcaagtcctgggtagaagccctccccatcttgggccagctctcttctgagagcctcagtttccctctctatgatgccaagggcttgactttggtgacttctggacagccccggcatggtgtcctggaggtgagctacaacctgaaacccacctcctgctgcccatccctcctccagcctcctctggctgacgtctgccatgggtccgagaggaactgctcctgcttcctcagtgttctgaggctcctggcctgcctgcctgcctgcccatctgtctggagctgtgggtaagagcgggcccaccattgaggcaggggcagaaaagagcctctctgctttatttgctgtgttttctggagaatcttccttggggaaactaaatgaagggaaaagcaggagaggagccaccagatagcatccaggaggagagaacaatgcattcaccagcaggtcctttattcgtttatacagaatgtctgtgtccaaatatataccatttttctgtgcatgcgcgtataccagtttctcctcatagcactggcgtgagcatctctagaagagtatggaagtgtgcagataaaccagaccagtgcaagtcagtatgtgtacacatatataatagattcaacggttgctgtgggtaaacatccttcccataataattagtatttagcttcatggatgtctgcaaagggtgctctgttacacacccagctgctagaagaaagccaaacacggagcaggcctctatgtgtttgttgattacatggattagtaaacgtatcatcgatctgaaatgcacattttttttttcattttagcaactgaaacggagatgagatttaccactgatgatatttaataatttagttttttcccctcttagtggctcataagcactgtaccttatcataagtggcgtcttagatccagtgagcctgtgcagagtgcaactgcgagggctgtgtaatcttgggaaagctctctcttttctttaagctcagtttcctcatgtgtaagatgtagatcataatatccatgtcagcgtccttgtgaggattaggtgaaaggagtgtttaaagcacacagcaggatgaccgcatactaagtgttctgtgcatcctaccagtctttataattgtggttatgagtgtccgtgtttaagattggagaaacatggaataaatttgcctctcattagcgtgcacactctgccccaaacccctttttttgtggggggaggtgctgctccatctagtgagtggggagattttctaattcccactggggtccttgtgaccccaagccaaagcggacctttagtaaatgtaaattctgcatttctctgctgccttcatttatagtcaacccggtcggactaaaaagaactaccagggcgaccataactaaacactacagagcaagtgcctcctttcctcgcagacatttatttctgtggaaattcgcctgtttgccatagtttgtcttttcttatttcttcacttccaaactaaacagccctaatccgagcgcatacctctctgtgtgccaacgtttcgcctgtgtctgtgtctgctgcgtatgtaaatacgggcgagcctctctgtgggcaaagccataggtgtgcatggtccttgttcccataggcgacatcggggtgtgtgattgcacgtgggggtgtgaggcctcgccagcaccgccactcactggtcctgttctcgaaaccggttctttggaggctcagtttttggtaattaagactaaggagtgtttaaaaaacagaagtacattttcctggaaaccagcagtctttatttgcaacttttattggcaaacctggctgccagtaaatacattccttggcatctcccacaatgtaattcactggatggagcggccttgctttttctgtaacgtgtacgtcaattaaaagggccgcctggaaggaatgcgtagcggtggctgaaagccccagtctcgggtcacctccctccactccaggaacaaaagcgtccgtggtctgtgcctggaagtctgagagggtctccccgatggggctgttcccgcccggaccctgagggatgagagttgcagcctagaaaaccaggtgccaggccctgcggggtcccacgcgggcggcgcggtcttccccaggcctccttctctggagacccggttcccaggggacgctgtgcggggacaggcggagccggcccttggagcccggcgcgggcagaggcgccgcggagacaacgcctccgacggcagggggcgctcgtagcacgcgcagtgcgcggtgcgggcgcccaggacggctgcctggccccgggttcccgaggcgcgggacctgccggggtgaggtgcccccagcctgagagccccagcctgggtcggccaaggggcctccgggcttccacatcgtccctttttctgctgacgctcgcggggaagcggcgggaagcctgtgaggggcggcctgggagcagacggaccaccaggtcaccggcgcgcgctgccaggcgccgacccactcgcgaggaccagcggttcccggaggcgtcggccctcaggtcctcgggggaggccggctgcaccgagccgggtgtcggccttgtccctgtcctgagaggtgcaaacaccggccccggcccaggcccccggggctcctgcccagaaggctcagagctgggggccgaccgcgccttacccgcaggaggcccggcggtgcgtccgcgttggtgccactccccggccggggtgagggacgtcggaaggaaggtcccagggcgcagggttccgcgaagggagcactcggaaggaaggctggctgcggccccggcgcctgggtccgctgcggcgccgggccggagacctgggaacagccagccacctgcaaggttgcagcccacctcaccccgccggcggctccggggctgtctgtgggtctgtctcacggggcaaagcctttcttcccacacccacagccaaggcgcgtccgtgcaggggcacacgccttctgctccagccccaggaaggcgctttcgccctgcagtcctccgacggccggctcccgccgcaccgcgcaccctggctccggcagactctggggcctggggactcgcccaccctgcgcggcgcgccccccacatgagccgaggttgggaggctgcggggcctctgtcctcccaggccgtggagtgcggcggccgctctgagtccgctggggacctggatggagagaaactggggctcgttcgcgcacacatgcaccatttgttctttccgatcatctatccctttacgaattttatttttattccggattgttaatgcaagacgacagtttgaatctccatttacctctgcctgaacacaagaagccctgagtcttttgaagccgggcaccaaagttaaagattcacttcccgcattccccatggccccctcttgcagcttagctcggctctgagcccccgaaacgcccttcgaggcgggggctttcctgccaaggggcgataggtgggccatcccgaggcgggaacgatcaggtaggtgttggctggctttctcctgggtgagtagttaggggaaccgcccctccaggggacttagatgacattaaattatcccatcacacaaacttcccgtggaggtctgcccccaggagggcaactatcggattaatccaaccatgtagacaggcaatatggatcactttgtctttaaaacaatcgaaaaccaaacgctcttttcgtttattgtagaaatttttctactaaggacggggctgaattggagggactgtgctgacaaatcctctacttgaaaatcccccagctaaggagtatctgcccaaggtcgcggccacccagatgttcggtccccactccttcctccgctgaaaagtcgcaccgatgactaacgttgcctgccggcctggtggtttgaaaacgaatgccgggcattgatgcaaggatatcctcccctacccctgggattctggtctaagcaaaggaggccgaatggagaactaagacaattatctaagtaatctaaaaagctcaaagacatccccaagcggaccttgctccagtggtctgtgatggcagcctagtggacagttttctagtggccctctggggttaattgccttaatcttccactctgtctgccccagcaaagggaaagatgctaaagcagctgtggacttgcagcctccctcctgtgtgtgcagagcccccaggaatcactgccccagtgcagcaggagaagcgccttccctcatgccctaagcctgccttttctgttgtcccccagctcctgggccaggtggagccccccctgaagctggtttctacctgccctcgcctccccactgcagcccacagttcggctttcagggctgaacccagagcccagaggatggagaagccagaaagcggggaggtaagggagagggcgtctaggcacaccacagaggtgattgggctgtgacggggacaatccgcacaacacgagctaagctcacacccctagggagtgatttttccggactgcccccatcccaatctccacctcctctgctttacttgaaaaagaaaaagaaaaaagagagctccttctggctcctggtgacccatatttaggacaccatcccatcccccagcacacacattcctacagtgtcacctggtccccaatccgagcatttcctggagtgctcgccacattccccttcctggtgcttttctatggtggggccaggggaggccttgttttgaacatcgctgtgacgtcactccccctcctccgagctaagcacccctcggtgggccctgggaattgttgcccggcctgctggggaggggcggagtgtgggcccagggagggttccaccaaacatccattaccgctgtcgcctgcggggccttcaggctgcaagtacgtgaggtgtcagaaaagaagccgaagggttcccgtgggggctcttctgccaaatgagtcaagagatgtgcggaagcggatgattgaagtaccccgtggagtagcagaaaggggcatcaaaaactgtaacctgaaaataaaagctttaacctgttccccaaaagacttcatgcctgcgtcttaatgttcaaataacaccactaacaacaaaaatgaaataagaaaagtgcttgaaatacaatcaagccgcttactggaggcttgcttccgagtaagtttataaaacacaaatgcaaatatcttttcctggcgaatatccagagctaaaccagtggaaagttgatcttgataaaactacgtccctccattttttctcgcacgccagacactaatttcacaacggcgacttttatacccaaaacggagagctgagaacaccgctgcaggtcgatttgcaatttacataacaagctgtttacacttcactgggccgatggagggaggaggcagggaagagcaggaggcgacaggctggtgggggagggggcagcggggcaccattgcctgttgcaaaactcggggccgaaggcgtttcccgcattcggaaaacaaagcatccgtaatcgctgcgttcatctccgcgcaccgctagcagtgtaaaaggcagcttcaagaccgaactcaccacttgctgaggtgttcagggagaccacttaaatctcctccaggctgaagccacagcactccttaaagcctcgaccaggcgggctgataagaccttcagggtgccgggctgggggctgaacaggaattaagtgttcaggtcctggggcttcaccaccaccctcgcccctgtctagtgtccttggcaaccagcaagtgctgagcctcctgttggtgcttctccaacccaccagtgacttggcccgcaaaccacctggaaaaggagtctccagagaccccggcgcacagcaggccaggaggcagctgccccgggattcagagcaacctcggggcaaccctccctcctccaaaggctaattctagaagaggcaggtcctctttccttcgatgtcaatgtccattatgaaacagtaatttttaaatattcaggtgacacggagatgcgcctgctacacgtcagcgtccttcacatgtaacagccgaagctgcaatttgaattttcctgccaacgtgaggaagccgggattcgaaccggggagacaaaaggggtcccgaacatgtccttggatttaatagatggtcggaaatcaggggcagcggagctgttaaatgcgtcacgcacgcttcttcgcagtctcctgagctcgccacttcccccagcttctagtgaacgacttgggattcagcctccgggagggtctctcctcaagtcgctaaaatgcagaatcgccgtgccgggggagggaggcctggctctttcccgctccttcgtttctttccctcatttctcttcttcctgtcccattccaaccacccagcgacggcgaatctcaggcgtgtgcacaacgagcgggggcccttccgtgcgtgtccccccagaatccttgaaccgccctctaggtgcgaccctggacgttcccccagacacacccgttgtctctgcgagccggcagccccgcgcatgtggagatggagactggcctggggaagcgttaagctcttagacatatttatttgcttcttgtcatcacacctgctaatgtcaccgagcccgcagcctgacccctcatctgagccgaaacgggcctgacgggatcagagggggcggcggcgcggcgagccggtgggaccctcgcgggcgggcaggggagcgcggggcagcagccgggctccggcagccctcgccgcccgcaccctcaggccgccaagggccggccccccggggaggggggcgagaagcagggcggcccgcagcggggcgggctcatccttcgcgggtgaacggccgtcggaaactcccagcagggccccgcaccccttgccttcatttcggctggggaggggtcatggaggggggccagatgggcgacgaaccttcttccccaccgcgagcagggcctggctgtgaccgagccctcaaaatcatgtcctttgtagccgagttcaggacaggagaacctccaagtggagaaaagccggagacgtcagtgacccgagtgagactggcgttggagaagggagggaaggggctgcgggaggggagaggcggcggggaggagaggctggggcaaccccagcgctggcgtcggcggggctggcgaaggaatgagagcgagccagcacgaggcggggcggagacgccagggccactcgggagccgtgggcgaaggaagggtctgcacggggtcccgggaggacccaggaagtctgcgcgaacggcgggcgtgggtccggagggcccggggtgggaggtctgccgggcgccggcggcaggcaggtggactgcggggggcgaaccgacggcgggccgggcgccggcgcgggcgcagggccggggcccgggccagggcggccggcgcgcgtgtggtcagccccgcggtcctccggcctccgggagcgggccggcagggctcggcctccggctcattcggaggcggttctcacctcccattggctgccgccgctggcggggcggggctccgctgcccggaaaaaagtgtaactgcgtaaaaaagtcctcgcctgggtgacggatgctcaaaagttcagaagttttcccaatgcttccttaagcggctggcgcgcgagagaccgagaaaaggtgacgcggggcccgggcaggcggccggcgcgcggccccccccccccccgccctggttatttggccgccttcgccggcagctcagggcagagtctcctggaaggcgcaggcagtgtggcgagaagggcgcctgcttgttctttctttttgtctgctttcccccgtttgcgcctggaagctgcgccgcgagttcctgcaaggcggtctgccgcggccgggcccggccttctcccctcgcagcgaccccgcctcgcggccgcgcgggccccgaggtagcccgaggcgccggaggagccagccccagcgagcgccgggagaggcggcagcgcagccggacgcacagcgcagcgggccggcaccagctcggccgggcccggactcggactcggcggccggcgcggcgcggcccggcccgagcgagggtggggggcggcgggcggcgcggggcggcggcgagcgggggccatgcaggcgcgctactccgtgtccagccccaactccctgggagtggtgccctacctcggcggcgagcagagctactaccgcgcggcggccgcggcggccgggggcggctacaccgccatgccggcccccatgagcgtgtactcgcaccctgcgcacgccgagcagtacccgggcggcatggcccgcgcctacgggccctacacgccgcagccgcagcccaaggacatggtgaagccgccctatagctacatcgcgctcatcaccatggccatccagaacgccccggacaagaagatcaccctgaacggcatctaccagttcatcatggaccgcttccccttctaccgggacaacaagcagggctggcagaacagcatccgccacaacctctcgctcaacgagtgcttcgtcaaggtgccgcgcgacgacaagaagccgggcaagggcagctactggacgctggacccggactcctacaacatgttcgagaacggcagcttcctgcggcggcggcggcgcttcaagaagaaggacgcggtgaaggacaaggaggagaaggacaggctgcacctcaaggagccgcccccgcccggccgccagcccccgcccgcgccgccggagcaggccgacggcaacgcgcccggtccgcagccgccgcccgtgcgcatccaggacatcaagaccgagaacggtacgtgcccctcgccgccccagcccctgtccccggccgccgccctgggcagcggcagcgccgccgcggtgcccaagatcgagagccccgacagcagcagcagcagcctgtccagcgggagcagccccccgggcagcctgccgtcggcgcggccgctcagcctggacggtgcggattccgcgccgccgccgcccgcgccctccgccccgccgccgcaccatagccagggcttcagcgtggacaacatcatgacgtcgctgcgggggtcgccgcagagcgcggccgcggagctcagctccggccttctggcctcggcggccgcgtcctcgcgcgcggggatcgcacccccgctggcgctcggcgcctactcgcccggccagagctccctctacagctccccctgcagccagacctccagcgcgggcagctcgggcggcggcggcggcggcgcgggggccgcggggggcgcgggcggcgccgggacctaccactgcaacctgcaagccatgagcctgtacgcggccggcgagcgcgggggccacttgcagggcgcgcccgggggcgcgggcggctcggccgtggacgaccccctgcccgactactctctgcctccggtcaccagcagcagctcgtcgtccctgagtcacggcggcggcggcggcggcggcgggggaggccaggaggccggccaccaccctgcggcccaccaaggccgcctcacctcgtggtacctgaaccaggcgggcggagacctgggccacttggcgagcgcggcggcggcggcggcggccgcaggctacccgggccagcagcagaacttccactcggtgcgggagatgttcgagtcacagaggatcggcttgaacaactctccagtgaacgggaatagtagctgtcaaatggccttcccttccagccagtctctgtaccgcacgtccggagctttcgtctacgactgtagcaagttttgacacaccctcaaagccgaactaaatcgaaccccaaagcaggaaaagctaaaggaacccatcaaggcaaaatcgaaactaaaaaaaaaaaatccaattaaaaaaaacccctgagaatattcaccacaccagcgaacagaatatccctccaaaaattcagctcaccagcaccagcacgaagaaaactctattttcttaaccgattaattcagagccacctccactttgccttgtctaaataaacaaacccgtaaactgttttatacagagacagcaaaatcttggtttattaaaggacagtgttactccagataacacgtaagtttcttcttgcttttcagagacctgctttcccctcctcccgtctcccctctcttgccttcttccttgcctctcacctgtaagatattattttatcctatgttgaagggagggggaaagtccccgtttatgaaagtcgctttctttttattcatggacttgttttaaaatgtaaattgcaacatagtaatttatttttaatttgtagttggatgtcgtggaccaaacgccagaaagtgttcccaaaacctgacgttaaattgcctgaaactttaaattgtgctttttttctcattataaaaagggaaactgtattaatcttattctatcctcttttctttctttttgttgaacatattcattgtttgtttattaataaattaccattcagtttgaatgagacctatatgtctggatactttaatagagctttaattattacgaaaaaagatttcagagataaaacactagaagttacctattctccacctaaatctctgaaaaatggagaaaccctctgactagtccatgtcaaattttactaaaagtctttttgtttagatttattttcctgcagcatcttctgcaaaatgtactatatagtcagcttgctttgaggctagtaaaaagatatttttctaaacagattggagttggcatataaacaaatacgttttctcactaatgacagtccatgattcggaaattttaagcccatgaatcagccgcggtcttaccacggtgatgcctgtgtgccgagagatgggactgtgcggccagatatgcacagataaatatttggcttgtgtattccatataaaattgcagtgcatattatacatccctgtgagccagatgctgaatagatattttcctattatttcagtcctttataaaaggaaaaataaaccagtttttaaatgtatgtatataattctcccccatttacaatccttcatgtattacatagaaggattgcttttttaaaaatatactgcgggttggaaagggatatttaatctttgagaaactattttagaaaatatgtttgtagaacaattatttttgaaaaagatttaaagcaataacaagaaggaaggcgagaggagcagaacattttggtctagggtggtttctttttaaaccattttttcttgttaatttacagttaaacctaggggacaatccggattggccctcccccttttgtaaataacccaggaaatgtaataaattcattatcttagggtgatctgccctgccaatcagactttggggagatggcgatttgattacagacgttcgggggggtggggggcttgcagtttgttttggagataatacagtttcctgctatctgccgctcctatctagaggcaacacttaagcagtaattgctgttgcttgttgtcaaaatttgatcattgttaaaggattgctgcaaataaatacactttaatttcagtcaaaaactgctctacgtggcctgtgattcgctcggtcccctcccccagggtcgtaacctaatcgccgggaagatcgcagcggcgctggcgcgggtgtctcctcggggcaggcgggctgggggtggcctcacggccccgtttaaatctcgctgggctgtcgcggcgctaggtcccggggctgcctccagcttcctcgggttacagcctctttcggggcgggggaaggggagggggtgacggtagagactccaccgccagtctccaggagtttggtgtgatcgctccactttggggagcccggcgaggagctgggatttgcggacaaagggcccgcggccggagctggggtgtcgaggcccggaaggggagctgcagcaggtgactcacggccctgtccccacgggcgggctggcccagcccgaggcggagcagctcggccgccggagacggtaccgttctcgacgtgtccggtcggactctgtggagtagggggtggcgggtggagacccgcgcggcccacgcctggctttccggctggggcgtttctcgcaggcccggtcccttccgagtcgcgcccgccccgacgccggcctcctggacgccgctcgcgacggcaacgctctccagctaatgagctgtaattacccgcggcggcgcggggcccggcttcggtttgcgtttggagctccttcctccccacacccccctccccagattagccccggcctccgcggcctcctcctgaaattagtcgttggagaaaagcgagtcaaagggagacccctgttagtttcgctgggttcctcgcgggctgggtcggggtgccgggaagcgcgcgctgagggagggtggcaggcgcgcggtgccggggacggggacggggcggggggcgccgagccgggagaagcgccctcggggctccggccgagaagctcggaggagcccgctccctcgcccggtcaccccgcgtctccgcctggcgccgcagggccccgccgagctctcacttcctcctcgctggcctcctttgttgtgaagacgcacgtgtgtttaggagcgcagctggggtggaaaggtcagaggcacttcattgctcacgggtgacagctcgccccgcgccggcccgcagcctccaggcgcgggacccggagctgcgcgtttgcagggccacccccggcccacccgcctcggcctggccgcaccagacctgcccgggccggcgctgcggccccaggcggcctccccggcagggctgcgtcctcgcgcggtgtgtgaggtttgcagaggccaccagtcgcttggcagtggccgtgcggggagtcgctcggcctcaaggatgccagaagccctcgggcgagctgcaggctcagcgtgttccgagcccacgtgcctgcgactctccactctccttgggtctcggctttgcggcccggaggaggtggcggccgcagtcagccccggcctaggcccaggtcggcagtggaaagctcggcgggcttttctgcaccgttcccagcggcgggagcgagctgggaaagagtcgacccgctcccggctgggggccctgccgagtctggcctgccgaggagtgggccgagagcagcccctgtccttccttgcggggctccagtcccagctgcaggagaggaagcgggtacggggcgaagcgcggtgcttcggtttccgtggccagcgaggagcccctggcccacaggtcgagagtgtttataggcgtgcgcgagcaaagcttcttagcaacttgctttaccctcttctattcgaatgtttgaaaattaggcatgaaacacacatgtgtctaagaaggtgtttgtgttaaacatacatgacgtagtcatttctgcactcgttgcctgtgcaagtttagaagctatgttgagtggaaggagagaagttctgctcattattcggattttaaaaaccacatctaggtaatgtctcctactatcagtacattaccttttcgattctcacacccgatttaagaaaaccaacttctgccaaccttatttaacgtggcactacttattccttagaggtttgcacgtttggtttgtactgttttaggaataaggataattttcctgtgaaatattctaagaaaaactccttgatagtttaactaatagccagtacattttgaaattagcctgtgacagcagtccagatccatggcggggaatcagctaatttttaaaatagcctctgtaaaaagctttaggagagtaagtattttgtcctttatgcagaaatgggcacatttattttaatagcaatttatgccacgactacacaaatgccagcatgccacatgccataggcagtcttgcatttggcatgttgcacgtgtgggagggaccggtgctgacttctccagggttgtgtagttagcagacctttttctccagactgagtgcaaacaagcatgcattttacaatttattattccacaaaatttgtgtcattaataatcgatgcttgcaaaggaatagggctcgattgtactggtggcctgtaagctcctggctgtttcctgccgggtcagaaacaagggtcaggaaacaagagtgccttatagtcctattgggctctccctaactttgataggcgaggaaaggacatagggcaggggtctccgtttctaaggcggaatgtcattagttttgttcttaatggtgcaaaacccaagagactctgaaccctctgcaggtggaggctgcctggacagattgcccaggagggacaagaggtatccatacttgatcaggcctcaggcacccacaccagtgttctctgaggctgttagtggcacccaaagcaaggccagttggagtgacagtttccctctactcctgccccacctctgagagctctgtgagaggggctctcatttgcgaggccacccccccctcccccaaccccggccatttgcttcagagcttagctccgagtcccctgctccttgggcctgcctggtattgcagggccttctccactacaggcatttcatggacagttcatgaagccattagcccttcccacccgtcataaacaaatgtcgtgttaggggcaagattgatggtggccaagtcataaagctggccaggcaggacagaatatgattgtgtgcgggcagccattcttcagccaagcagagagattggggtgtaggaccaagagactgtgtcagtcttccccccacccatctgaggggggagctcaggagagctcccgacagggaagtttaatttattctgacaacgtccacttaggcaggaagagaaacccactgagatttgccatggggccctaaatgccagcttcagaaagcccactttctgaaatcttctatttccatttataacaaagccaaaagtttccctgcaaagagcttttattattgatgctttccctcccaccttaaccgaatgtcttcctttgcagctggggctctgtcttcttgtctgaagcttccgaggccttgatttcccaccctcttttatcccatctcccccttttcggtgggaatgcatcataaccattaggctctgtgcgtctttgtgtctgtctcttcgtctctgtcacttttccccatccttttcccttcctgcccccacagaaggctgtggggccccaaagtttctctgggatgtccccactccgagcccagctcaggggcctgcatgcctgccctccactgcaccatctgggggatgggccggatgcagccctgatgcggagcttgcgcccaggcctcaacagacttggggccacactgcagccggacaggcaggttccaggtcctagtcggctgggaaagaaacaatacttaagtaaatgaattccagctccaaaacccatttaggaaaatgaaagcagcttctccacgaaccttctcaacgtgattacgactggaaaattgagcaaaatgtaccatatctaccttattggaaaccaaagtacgacgcggggagcgtacggctcaatttaagacctttgttgtgctcctttcccatcttaccctggccccaaagagaccctctggtttatattacttttttggttgtttacttgattttttccctcactgatttcaaatttgcagcatattgagcgtattacgggagatgcagtaggatctggaatttccttgcacatagacctggccctgtcttggagaaggctggagctcacacagggagacacagccagagagaagaggctgggtctgtgtggtcctcggggagggcttggaattgctcccagctcagaatctccctgcctggggttgggagggtgacctggcaagcctcaatggggcttctcccgggccccctcctggtccagaggatgcctccctttctccaaagagcatcttctttctctggcgtgtccgtgggcccctccaagcccactggtccccatgggtgtcattaggacttgacgggcccaccctctcctgcagctgccactgcaggccgctcctactgaggggactcagtgggctgctccttggccccctaagtcaacacagcttggtgctacttgggtgggcatgggagagcaatttgtgagcccagcaagtgagcatcagagcgggagccaggaccaggcagtgaggcctctggcttgacccaagtggtgggaccccaggcagggcctagagaggcggaggaggctccagggaggggctccagcggggtggttatgtggttccctgtactcaaggttgggaaaggaaggagttttttggagagctttgaggacgacttagatcccgagatgggggagagggagatggaaagagagggggagggaagacgtggagagagggacatcccccctcccattacctaccccggggaaaaagcaggaaaaccaacacatttagcgccattaactcttaaggcctccacatttccttcggtataaaagcaggtcattggtcccggaggctgtgccggggctcgtcaaaggctacaaacaaaccggacgggtgggaagcacgtttcagcggcgactggatttttaaaaatctgctggtagagtgaaaacaaaaattgtcctccaagttggcaaaatcggcgtcccagacggtgcgcaggagggccctgcgaggcctgtccccggagccccgcgccagtcctgtaggcccggctgggtccgcagcccggtgttccactcgtgggtcgggcccggctgcggggtctttccgcagccgggacacccaggacagcagcggctggggagccggggccaggggcttccttgcaattccaatgatttttattattatcactcgcaaaggacaaacgcggccaaggccgggcctcacagtggctgtgctggtcatcgcgtggaggagtgtgcgctaacccaggggcgaggggggcgcgcccggtgtcccggggagagcttagaaggaagacgccccaccgtggtccctacagtcagggacagtctgggtgctagaaattcccagagagaactcgaggggctgatgtcctgggtcaccagtccctggtgcctgtggggcttcctgcgcgcccacccccatccccctcccccctctcaggttcgacggattctcccggaggcttaggacagtgatttacagtaagtggtgacagtggaataacgtgacagtccgctgcatttgccagctggctcctgggcaggcctacccgccgggcccgaccccagagtcgagtcctcggagccgccgggtaaagccccctcccccgccccggtgcagccccgcgttccccgcgcccggcgctgccggggaaaagtggcacaacaggaaagcctcgccagagggcccttcccagtcggcttcctcgccataaaaagccagactccagccgaggtcctgaccccttccaaatatacgttcccttgcccgcggcccgccactcccgcccgggcctcgggctgtgcagcttcctcctaggcctgcccgggcccatgcctcccccgaagcggcgggagtcggtgcagcctcaacttctactgcgtgtcccaggtcgccaaccagctttgctcgcgtgccgttggcccggaggctgccgcgccagtctctgcgtgcgcctgagcgcgctggagcatttgcgaggccagggctgccgacggcgagaggatactttgaggaacacggtgcttcagtcccgcccccgctctccgcccgagctggaggttggggcgcgctgagccgcagcgcctggacaagtgcgcgggccggagccgcccaggcctgcacccgggggctcgcggccgacgcatgcgcacgcgcggtggcgggtctgcaggcccgaaggcccggcccctccctcaaacccggagcggggaagcccaggggctgagagcctcggcccgggtcgcaggagctggggagcggggacgcgggcaggctaggtcttcccacctgccgtcggggctcctccccgcagcagcaaaggggtcccagtgcccgtggcagtgcatgccccagcggacacgctggctcccaaattcagagatcagaggggcggctgagaacggggcgtccgctgtgtgtgacccctgaccgtggaggaagggcgggagccgggagtaggcggtggggcccggggtcaggccgcggtcgtcggctcccggcaaaggcgctctggccggggaagggggcgagggtgggcggccggcctctgccgtcgtagtcatacctgggacgttgaaatgggctttggggatagagctcactcccagcgcgccccacaggagaagcccgcagctcaggcctgggccgtgcagaccgctgggcgggctcggggcccgaggagagcaacacggcgcgaggtccagtcgcgagtaataaccccgacagcacggcccctcgaagacgtgttccgggcaccggggttgtgagcgggggagcctcgggccttgggcccgcttggcacggggcgggggcgcctcctccaactcctggagatcaggcccagaccccgggtgttctcaggggacacactgtggacggtggaccagttcctagcgccgttttgtcccccattgcccctgctgcttgttaaaagtattagcgacccccgtgatggcaatccacaatttttggagggtgcgggtggcatgtacggacgtgaaggtctctttgtgaggcacgtccacgcacacacagggacactcattttgtaaaacctagatgggcgctgccaccacccctccatgccacccgcgtaccaatcaaggatgcaggttgtagaaaacacctggacgtgtgtgggctgcaccttaaaacagaattcacccagtaggcactcccaaatccaaataaagtgcgtagggtgctttgagacttggggggaggggtgttaaaaagttacttgtaaacaatacatttaaggttattttcaagtgaatgtttaaagtgctgcctgctccaagctctaataacacattagtgcgataataacactccttgcatctgccaggagccctccaactggctgccagaggttccacgaggttcgcggtggttggtgtaggcgaaggctactaaaaggggcgaaaaagaacccaaagccatgcctgtggggtttgccagcgccgacccgctcctcgccagcgcccgcggccaagcggacccggccttccgaaggagccatcttgcgcgcagcagcagcagcggctgagcctgagcccctaaacagctgcagaggtgtgacaggtttattatgctgggcctagctcgctcgcaattccttaaagacaaagggcagcagagagagcccgcgacggggcctggcctacccgggttccacgcacctcctgcacaaactcgggcaagattgctttgccatggtatgtgagtttaactgaaggtttaactttctcagtttttccttaaaaatatcaaggtggaagatgttttgtaacatttgaaaccaacagccaaagtctggcagagcaggaaaaaataagtttactgaaatttaattgagatttaagatagaagaaaccctgtaataagaattgtcttgaaggatgtccaaatgaatttctctcatagcacagaaatagataaaaaatgccgaagtaaatcgattctccttttctccttttaaaccacatacaccaggaagccaaatgaactcccgctccttccattactcagggtgcaggagcagtgagaaggttgcaaccaaaaatactttttagtttccttcaaacatggatgctgccatccgtttggagaagtagaattcaacatcatggctcaactggagctgcataaacccctgcctagaatctctcctgattctaggtgtccaaacaagcaacactgaattaaacagggccatggcaagcctgagggcccctggaatagtctctcctgggtgtgggaagggaggttccggtggtcagaggagagggggtgcctgcccatcagggtcaaggctaagaggaatgtgactctttgtgagatttgttggaggatgtgtgtgacagtgggtttgggagttgggtttgcaagtgtttgtgagaatgtgtgactgtgagatggcatgtttgtggagtgtatgtgcacttgtgaatggatgtgcatggatgtttgtgttcgagccaatgtgtgagtatgtatctgtgtgtgtgcccactatcccgcccaggctgaggcccggcctcccagcaaccatgtgtttccaattagcagcatcccgcctgggagtgcagagaaggcgagtcctgggacagcttctgaggagcgggtgggctagctcaggccccccagttctgctccatcgagggcgaggccgcccggccagcaagctttcacagcaactgggcagccacacaaagagccctctctcctgcgccagtcgttggagactcggtcctcccccagatcataaacctgcctgtgaagacgttcagaaatagtttacccgcactcacacacacatgtgcaaaggctggaattccatttgctataaagttttattttattttgcttggaaggggagtgagggggagaagtgtcctgacctaatttgttctagggcaaaatactgtatttcatgtggaggtatacacctgtacatgaatccttgcttgctgcctgtgggtgtcctgcacatgtgtgcgtcagcctacctgtagctgtacaccatacacagctcaggagcacacacctgtggtcttacccaggccacctaaatgatgcatgcaaacaaaccagatccagagatctgaggctgagccttaaacctttttattatagcttcaaattaacgctgatgtcgttcaagtgcatagcacaatgtctggcatgtattaggcacttaacataaatggctgaatgaatacattaaactgagatttaaaaagtgacctagtagtcataagaagaggctgcaaataagcactgtgtaaaagattctagaccacaaggaaaggcacaggctcagagacctctaggtaacttggtggctttgccatggaatgttccaacagtatttgcttaccttcaagtttcttcttctgacccccctctatttctcaagacttctttttcagatgggtgagagcccttgggttctaattatagtcagcagagaccagccagggtgtgaattcctcccttctgcaggaactaggtttccagagtgacttgtcaccaggagggggaaagaaatgtcccaggcaaagactaaggaggaggctcgccggagcacccccgccccccttagccttgcaggagtcctcccaccaagggctttctcaaaacagggcaaggcctgaccacagcgatctcattccaaggcctggattgtggggttgtttggggacccctatagccgtgttcataacttgggagaaaacatccacactgaccctgtgaatgctagttcacagaaagaccatttttaatatgaaaagagaaaaacaatttgaaggccccacaatttgttgtgtaacaacataatttcaagtaaagtgaatgtgattaaaacatcttgatttcacaaagccattcagaggaggcttcgacaaacgcaaagcgacccaaaccctggagggtcacatcccggctgctacaaacctcggcggggcggccccgctcttgcggccgggacagcgcagcggcagcaggggccgcaggggacccgcagattggcacgccgctccccatccccgcagcgcgtctgcaccggagactctgcggggattgtagccggagggcgggccgggctccgaggcgctgctcaggcattggggtttgtcctcatgagctccacgtcggcgtgcaccatctccctcaccagctcctgcaacacaggggtgggcgtgagggaggagcttctgccactctctcctggtgacaccccaccccgggtgtcggccccagagaggcctccgcgtccctcgttccagctcccctcacttctcccgcaccccgccttccgggctttgggcatcgcaggcgcctcaggcgcccgaccctgagagctgccgccctgcagcccggggccccgcagcgggcggcgtgcgccctaagagatactcacatcgaaagcgacccggggcttccagttcagcttctgtttcgctttggtgcagtcgccctgcagaaagtcctagggaagaagagggggagacgaagcaggcgtgggtcgtgggggtgggggcagcaggtcccgagccccgggaactcccaccgttccgctccctctgggcgcacaaggctccgggtttccctgctttcggtccctgctgtgcgcgttcagttgcggctctcggcgccgtaaatcactaggtcgcggttaagaatgtgctgtgcggacccgtgaggaccgtgaccgcgatccacccccagctacctccacacctcttctccccaaggcgtcccttgggctcttaatgctttttttttttttttttttttttttttataacatgaagttgtcagggacgctcctatgagaactgtttggaattgctgcacttctctggctaggagggaagtgagtaaatcaccaggcgcccctcccagctgcccgtgtccctgcgccgctcagctcctgccgcagggctggccgcgccaagcgcgcgtcctacccaaagccaccagccccgcggggaagggactcgggctgtggggcgcgaggccccaggactcggggacccctctacctcggcggcagcgtgcgaccctctttctaacgcggccgtggatgtttcttcccgggccgcagccaagcgcggttcttcctgggcggtggctttgggcttttcgtacccacagtcaagtcagttcacgtcgcctcccgcacacacgcgttcataaaacgaaactggagtttcacgaagcaattcttaggcttagcgtccaggaacgctgtagacggtctattctattctacccctattctactcggttcgattctgttcctaagaaaatgccgatctcgacccacttgtacttccacgagcggagctgcagccagcagctctgcaggaccccgcactgcccgccaccgtcccctctggcagtgccttcctcctcccgctttccccaactgctccactcgaggaaacaagggcatttcatctccatcgacttaagaggcttccctggaaggaaggctggctaaaagaaaaccagcggagaagaacttaatcctgctctcagcccctactcaccaatgtctttcttacagctctgtgaagactgactgacatgaaggttgagatgagaatttcaagatgaattacaaaataggaaagaaggaagaaaggaggaaaggagaaagggaggaaagaaaggagggaagaaagaaaaaagactttgagatacataattgctagaagtgagataaatatttagcttttgcatacacaaatgtactcgtcaaataacacatcagatgtgattcctcgaaataaaccgaacgcaaaggccgtacgaaaatagccgatctttaaaggtgagaaatactcgatcattctatttcagctacatacaaattaaagaacagcctaaaaggagtttcatcgtgtgaaagtaacagccagtcaagctgccactgaaagcctttcctgcttattttcttcagacttccctgaaacttggcaggtggggaatttgttctagattcatgatggtcgagagggcaggggtgggacctgctttgccctgggtttggagctcaccttctctgctgagccttctagagcagaggctgtctggatcctgctgaatgtctgcaccgtgggcttgcaatggggctgcagcagtacacgcagcgactctcgctgtcgttctcatcatccatcactactttttcaaacgctttgcatttcgcaatacactgaagtaccagtttcctccccagagtgttaatagtactaaaacaagttatttctgctggccctaaaagtccatatacagattcttcaggaaaagtagaatacaaaaagtagtaattagcaatttaacatagcgctacaaggaaatagcaatataagcagaaaaacgaagtaatttatttttctttcccctccctaaataaacttgtatatatttctacaggcttctattttgctataagcgtcacacaaagatactcattctttttccccagaggaagctgtgcaatgtggagtcatgcagcccatccctcccctctctcaatcctatagcggctagacggtgtggagaaacatggttattgtttaatcacatcacactggctgtaaatcaaccagcacgacataggatgcatttcatggctgtgaactcatagtcagcaaaaccctaaaacccagtttggcttcaaataatcttggtaggcttgggaaatggagctttgtattgtaattatgtttcctgtagttttctacaagtagctcacaatataaaaacaaccagggaactacaattaaggaaaaagaaaaatgtttttcaaaggcttagaaacagaccttgctaccatacactgtaaaagtatttcattgaaaccagagacgcacccagttaaacttctcaatttagttttgagcctagctccaatactgcagtctagctgcttcctttaaccttctgccaaggctctgtctccctgaaatttaattagaccaagagaccttgggaagaaaaaggatgaggtcccctcagaacaaaacattggctctctatgccagctgttcctaggctgacatctggactgggcagtaagcttatgttccaatcaacttttaaggaaagactacgagcatcccagcttgttttacacttaactgttcctgaaggaatttcttacttcttcccattgtgtcatttatagaaaagatatagtcaatggttcatcctgcaaggttctaggcacaggacatacttaaagggtggcgtggggagggcctgtgtgggaaagcgcacacagctctagaaggagagcaaggatgtggattcccttccttaaataaggcttcctctgggctgagaaggaattaggtggtggcaaatgctcatacaacggggtccaaactgctgtgctcagatacagaactgtgaggagtgagaggggagcgtgggccatgatacacgtccctttaatctttacctccctcttaaagatttttgaacttccacaaatcccctccaatagggtataatcagctcctaaggacaagagagaagaatgagcttatctactgtgctcttttcttcttttttgacagttcgtttccttcattatacatatgcttacagccttagtatgacaatgggggcaaaagctgaattaaagtgatgattttatgtacagcttcccaaaaggacttccaccagtgcaactgggtggtctggagcttttcttgaaaaaagagaaaataaagctttgagaaaaatttaaagtatttctatgtgaatatgacatttcctgaactctggcttctggtgtcttcactgttttcattgctattccttaggtgaactatacggtttcaatatgtaatttataattgtcaaattcaattaggtttcactgagcatttcacagcagcaaaacagcaggagcaatgtctccgtccacacagccctccagatttctgactcacggactgtgtgtattcatttgaccttcgggagttgtcctttagctgtaccatccaggcatacatttacagagctgcaaacagcagcatggaggagggcatgtttggctgcagccattttttaggctttcctggcttacgttcttgttaaagtgaactgataaagcgccagaccaaatgctggaaaagtcattaagcctgtttctgagcccacagtagttaacgcaaactccagaaaaggagagaccatagtgtgccattatcttctaccctaacgacaggtccctttcctcagatctctcccatctagataacaacgcagctttaaaatcacactggttagttttcattccttcccccgatgttattttgatccttctttaacacatttattgcctgggatcctcccacctccatatcactttctctaaaaccattgtggggaatgctattcaacagactgtatcacataggatgattttttgaggttcacagtctcatttcattttctccccttttcactgagtttgctttgggaaaactttaatatttagttcaaactaggtgttggatgccacatttcctcaacaggtctgcttataaggtttgcaaagaacatctgtttaggtggagaaatattctaagagtatgagatcttttggcagattattgttaaatttctaatgtacatcttggaagaaattgactcttgatgccctaaataggagaagatgtatggacagggatgttaataaggaaagccgagactgatgaaagccttggcgaaatatcttcaggaatttaagatacagagctgtgaggggcgcttaatattctttttttcccttctacttttcttagaaaagcaaaattgaggaatagctcaggttccaagggaataaaagaatgccagtgaatttggttcttgatccaactttctgctagtgtagagtgaataggaaagcttgactcttggggcaatgtttctttttcagaaaggcagagctgctaaacaacaacaaaaagcctcaggaaaaagctctcaagtctcacagagtatcctagtcaagattccagatagttgagaataagactgggaaataacaaaaaatgaattctgaaagatcccccagaaaatttgcaatatacgacatctcttcttgggtgtagcttgaagccttacatgctcacgaatttatcctttggtttaatccttcccaaagagggagcgaatgtccgagcagtaagaaatgctgtggtgttaacagcggtaatgaacatttcccctctgttcccttactgctgtctatccacacaaactgaagtggaagtcagacctctcctttcatgacaaggggcaataagagaggagaagaaaacagcaggcggtcctgtctgctcaggaagcgggactcggtgggactgtccgtaggcagagctcaaacaatgctcaggcagcctcagggaaatggagtcagtcagcactggcccgaggagggtgcaggcagtggagaggaagtggcagagggaggagcaggccctgcaccatggcctcgtccgtggccacccttatggaggctgccgtgtggcaatcagcgacggtgtagacttggaataaaaccaccactggacactcccactgtcgccactgtcacctctgctgggagcctccttagatgactccggacgtgcggtccagtcctcctgcatggtgcctaatgggcactttaaaatcctctgaccacccctctcgccgatcccacttttctgatgggatctcggtagaatttgtcatttgggatcagcggctgttaagcactactaaacaaatggaaagaaatgcatccatccgtatgcatgccccagaaaccagcgacaaagtccggctagtacagtagagctttcgtggaaagtaaatgagaacgtggtcttcattatatgcctacttgtcaataaagcttagggtggtaaaaaaagttacaggtgttcacttcaggaaaggagaacttaatggcatgtatagtgcaacctacatataaatggatcttttttcatttatattttaaaaatatggttgacatagttgacataaaacaagaattgtagttaagcaaaaagggctcataagctacacagacaacataattatttaggagaaatacaggatttaagcaagttaacttccttttaaacaaagttttaaaacatattctggagaaagccctttctagcagacatgctggagatgtgtggagatgagtgcggcggtcctctttcctccatgggacgaaccgcatgtggcctatgcagtttatgccaccccaaagcttgttcctttccccagaccaggcggttgccctggctgtgtccgcctgcccattggctgcctggcctttgactgggacagaggagcatgctccccacctcctgagtggggcccagcccaggaacatgcccactgtctgccctgtccagccctgtgcaactttgaggccttccccgttcaaccaggcagcagtctgagccagctgagcagaggaaagcacttctcagaggctgcgctgggaagcttttggggagctgcctactcataggtaggtgtctaacaggtttctttaaatgaaataaccatataagactttggggatgtcatcttgcatcatacctatttacaaggtgctgcgtctgtctgtacctgttctacatctgaattgcaatcgtggagttaattttttgtcagctttatttcttgatccggtgcttacagtagcatcagcctggggaaagctagattaatgactgtaactagagccctcttggttccggttagttcactgatctccactctgacgagctgagatggggggtggctgactcatagttgtgatgcgggggccatttaatgaaaaggagataaggttgtcagtgacctcagcattccaggcttcaaagccagcaccatgttggtcggaaattactggttactgttaataactggatctagggtgtaaagatttacccatgctggaaggaggtggcaaaaccccgaggacaggagataaagcgcctttgagtggaccgattagggactcttgtgacatcgctggcaagtggcaccctggatacaagaggaaggccgctgtgctcttgccacttagggctttctaccctcaaagcgctttatagacatcagctaattaaaccacaaaacaatcacatccaaaatgcaacttaagagattttgtatctgttgcaggtggcctctttcctagagatgaaagttctgtgcaaagcaaagtatctcggaggtaaaagctaaagtacttgtcatctggcttatctttaccccgcaccttctcatctaggaatgcctacctaggccacaggggatcctgaattgcataagaggaaggtaattttccttaagcttgtttccttctagtttgttaggaaatctacccacctcttagaaatgtccccccctccgccccaccaccactgcttcggacatgagtactacacagtacaatgtagatggggtttttttcctttgtggtttttctcaatgtatacagtatattaagtcctccaattcaacacacctcacttcaataatccttccttcctccctccctccctcactccccttcctccttctccccaatccaaatataaataacgtaacagggtcattcaaacagggtctatcaaacatatacccacaggctcctccaaatattcattccctcagccacttcttaagcaactcaaggcctagccaaacacctgaccacatccagattcttgctttttggccatttctctggggacttttatattggagaaaagattaagacaattactgtgatatctgttagcaaatttttggagaggtatggagaggagatgagcatgatgacaactctttaggtttactataattctgttatcactcatttggccacccatcatcacaggaaggctcagagggttttgtcaggtgtctatactacatggtcacctggcattccttctttacatcttcatgagaggaacaaagtcctataccgaaatgtatctgcagaggtatttcagccaagtacttgagaatgtcacaaagtcatctagtggtcaggttctgccattcctagtccagcagtcacaacactcaataggacaaaaccctctgtagaatgtgttgtaaacaatacactttacacacattaatttgagtggcaaagaggtctctaagtaatagatggtatcaacacacagaaatatcaacttaatgctggatggaaactgacacagaagagtccatattgtacatattgtatgatttgctgtatgtgaggtcccagaagaggcatccatggttatagaaacgagactggaggacaggggaggagtactgactgggaaggttcaccaaggaactttctggagtgaggaaatgctccttatatgaataggagtgtcggttacaagagtgtgtgcgtttgtcagaacagatcaaactgcagttcaacatttgtgcatttcacagtatatagattttatctcaacacaaaaacgtggccaggcatgatagctcatgcctgtaatcccagtgctttgagaggctgaggtaggaggactgcttgaggccagaagtttgagaccagcctgggcagtatggcaggaccctgtctctacaaaaaactttaaaaaattagctgggtgtggtggcacttgcctgtggtcccagctacttgggaggctgaggtgggaggactgcttgagcccaggagtttgaggctgcagtgagctatgattacaccactgtactccagcctaggtgacagaatgagacttcgcctctaaaggaagaaaaattcgtggacacaaccaacatggcggcattgctggagagacctggaatcacaacgtggctcaaccacttaactctttcttaataactctgagattcaggttttaaatctgtaaaacggggacagcaaggcttgcaaagttgtgtgagaattcaaaattgcacagctgcttttaacagctagaaccatttctaattcatcctatacaggctttccattgaggctattatttatcactaaaatgtaggaaaaacgattcttttcatttcttgcagtaacatcatggatgaagatgtaatatttttaagtgggctgttttatagtttttctttgatacttacatgcaacttttaccctgcaccccaacccttcctctaattttagataatcattttctgaatagctgtaacagagtgtagaagattttgtactctgctgtccctcaatttctgcaaacatttcacagtctcttgcttgcttgttgccacatatttactgctttaagccttggagaagcaaacgtggacaagagaaggccgtggctgtcatgaagcccatgttctagggtctggcagcacaagagttggcggagacctgagtttcggctgatgggagtgcgagggagcgactgcagagggggctggcttgttggagggcgggagggcactctgtactggctgggcggggaaggccttccacagaggtcactggatcagagatctgcacaatgtgcacgggccggtcacagaaagatctggggtgtgagggtctcttggggacactgcaggtaaaaaggccttaagggaaccccggagagaaggctgctgtgactgggcatggggagtgacggggagaggagcccatgaccacgaggctgggagggacacagaggcaggcactgttggcctcccgggtggtttctgccatggagcccaggcctttcccagcaaagccacgtggtcacaaggctctgctgtctggtcacagtgactgccttggagtatctaccgcctgcaggctgtggctggaggttggaaagctggctacctcaacctgatggagcttacaattctgactttctggtgccaatttttgaaagtatggaactgactataaactgtcatttagctgtgtgtctttttaaaaaggtggacgagtcgttcttgccctgcatggcccaactctaatacataatccctcttcccctggaaaatctgccactctttgatgtgcttggtccacctaacctaaaagcacctggcgactcaggtgctggccactgcagcgggactgcacccagctggccctgaaagacatggagactagggatcaccagaggcagtaacctggccatcctattccagcacctgctagggtgtgctgtgatagggctgtccctcttctggccaaatgaggacacgctcagcctctgaaggctactgagatgccgctccacccttcatttcctcctgcctgaagtgaagctgtgaccctgagctccccttgctggttaaaggccttctcctttcccagtagctctcaagaggatgaggcacagcactgaaacctgtctgtgttttgaaaacatttttaccatactcttgtgtgtatgtgtttttctctgtctctctctgggtgtgtctctctgtgtccatgtgcactatgtaaaagtccactcgtttacagtgagaacccgctcactttgaactccatcctttaccggcccagcacatccaatatggagtctgggctttgcttagagccacagtggggttttaagtgctgggggcatatgctgcgatgcatgagttcaaagatgcctgcagatgctgcctgtgggttagaaagaggggcaagagcaggggagagaccagctaagagactccagtcacagatgtggtgagagacgatggtggcctggacacgaggggtggggaggggacatagcgacggaaaggcgtgggtgaacttgagatgatcttggagaaagagcagaaaaggcctccctggggttggaggcggtggtgggggaaagaggactgacagagaactcctaggattttcatctgaatgagaacgtttttattgctttcaaagacattctacgaatcaacaatgccagaagcgaagttctcctagtggagtctgcgtgtgcctctcaccacagccctgccagcattacgtgtcatctcctttttcacgatttcaagattagagaacagggactcttccaaaagattacttctagagaatcacctgtgatctctcatatcattccatggagcacgccttcttgttttgatcctgatttgaggccaaagcctctctgctgagcaagtctgcttagctctgggaaaggggctccgtttcacatgtcctggctatgctcctgtgaaaggcaggctgaggggaaacagcttgtcttcttccgtgaccctggtccacgggacaggcgaggaaagggttaaggcaagctgtgtccactgcgcaaccaacatggcccactttcatcctccggctgcagcaggaggaagtccgagagggggcctttcacatgacatcataaaagcctgatttatcgccggccaccaaacatctagaaaatcataacatcctttcaggaaaatgcagtggaaaataatcaggctgactttgatgggagctttggtggggactccgagggcgacactgtgcggcgacccttggcaggtgctttgtttgccgtcggggccagcctcactgacaaggctgagggtctgtgctgtgcaaagcccaccggggggtgtggccctcaagtctgcagatgcaaacgagagcctggttcatactctgccaacttgcctaaaatgatactgcggtggatgtgaaggcgctttggaaaagacagctctatccaaatgtgagaaattactgattacagccttgtacataacccacagccactccaggcaagcagggcccagcctcggcacctccagcactgcgtctgggagctgctcttctctgctctcagctggggctatctttaggacactactgtttggttagagccctttcctcacaaggcacttttcctacgtcgcatttccagagtaacctgccaccgtggcagccctcctcatcacaaagaggactaggagacgacagaaaagagacattcccagaatgtcagcggaaatagaaataaagggatgagatccgcgtgccacgaggaatctgttccaggaatgtctgcatctcttcggtgcttctcttgctcagtaatttgatgaaaccaccagcaggaacctcttctttgatgtgcacaacatgctctccaaataaacacaggaaagagggacaagggtggcctagagtgtgggatagttctagaaatctggccacatcaattctaaaaagcctgttggcgtagaaagtaggcccatctttgcaaagtaatgcccactctgaaggtcttgggattcctgagtttggagaagacagacaatataaagattgagccagggctgacaaagggctagcctgaggctgaagttgggcaaaaatcaacccttggactcaatcaaagttactttcacttcatttaactgttatacaaggaagcgtgcagcatgaagatcactcacaagatgatcaagagactcatgtgagaacacagccaccaacacctctctggccgtcctgaaggtgcctggaaggttggtgctgatgcggcccccatggaggaacgggctcccatggagggatgagcccccaggatggagagctcagggcctagcctgacaccatgagcctaggattgggggcactggctgccacacaggcagcccttaccacgctacggttatgtccttgcaagtttgattcttacccgtaccagtgggccccggaaggtctgcccatgcctcacctgcccaaggttctgtgcaggaatgggaatggcgtggaaggcagcagggaggagaggtgaggcctaggcctggccctgtagcacaagctctgaacctgggcttgcctcacctgcacacgggggatcgctgggaccggaagaactctaacggcccctctccaagctactgcttgccattctgccaggcctgctggtgctcgcataacaccttgagactgcttcttgccttggggaccccgcactgtgcctcctagcccagcgccaggcatggctccaggcagctgtggcagcagagtggtaggactgaaggtgtcccagctgggctccatctggctcgttgtctgcactgagtctgagtcaagccaggtgtctgggggagctgggtgactcagcagattgtcaggtggcaaagggtggagaggcctcccttggccctggtctccctgcacctctgcccagtaaggcctttccaggcatctctccaggcccaggagccccgcagctgggcatgtgcttcccggccggccccgcagacagcacttgtgaggaggcaggtggcctggagggcagaggtctgactcagttctggtgtgctgaacaaggccccgaggaaactactgcttcaaactctcccccgtgaaggcacggctggacttccggggagctgtcacctgtgccaagtcaggctctctgggtgcttatgctctctcgtggctataaagcggacacttgtggcaccttattgccctgggtggagcaggtcactgaagcacttgcatcacacataaataatggcacaaggggaagcacgttccgcaccagcacagatcataaccaaatgcctgacctactgcagactgttgtggggacagaggcctccatgcagaaggctcccaaggggagttccctctgcagtgggccagtcagtccctgcactggctgttcagaatgggttttttaccagtttagacaagggttccccgagggcccttagaccagcagcaacatgccccctgtccttcagccttctaacagtcctacgaggtaggcaaggaaacggcggtgctggtaagtgggtaacttgccgtgtgccactcgaggtggatcctggattcaaacccaggcttatctgactccaaagactaggttactagcccattaacctagaccacctcccctgagggtcttctctctttagttatgtgtgctgacacttggtaacaataaatgcaaagccatgcgttcaccaccaggtagaggctgaggtgtgtaaagaaagcatttgccaacaacacggacagaagagagagaatgtgcttctgcgctacaggggtccagattagattagagcagagacaggaatggaacctaagagttagaaacaaaggtggggggcatgagagacaccaggcagaaatgagcatggtctcttcatgtcaaagccccacactaaaaaagcctgatgccgccctgggtttagagcaaaacaaaaattccactgcttttctccagctggagatgaatggtttcacagagggaaccctggctgaagaaaaagcatctttgatttggttaattaacgtagctttctcgaaaacactgatcagctcctcgagtgccagcaggatggccatgatcctgaactttatacttatgagcagcttaaacacaggccactggctgtgtgcccatggattcattctatgccccacccccccaacccccgacactatgaggccgtgagactcccagacttcctcaggcaggactgggctctggggggcattattcaaggaagtattgcctttgaggatggcaaggaacactcagagccacctgacatgggaactctggggtttgggatactaccaagggacctttgcttggtatctgttcccttcagagcactcttttctatgaaaggaacccaagtcacagaattagaaagaactctctgggtcttattaatgctaccaccatgactactaacagaaacacaaatattccttagggtgtggagactgagggagaccatgttttcaggtcaatgggacctgcatgagtagagtgagtctggaggtacataaagactttatctacaactacttagctcatgagtctggatagtgagagtgcagaaagaaagagacaccttgaaatcttcttattccatcctggccaacattcgttcatacatgcagtcagcccagaagctcaaggtcagtgatggagactgacatagatggtgatctccgacaggtacctgtgtctgcggcaggcaacaagggcaggctagcagataaggaggtgggtgcctgtggatacggggagagggctcaggcttgaagaggagcaggagcggaggagagagggctgtgtggtggcctccacaacgcaccatgttaaggatgccactgaggcacttgcagaaacagatactgggtgacgtgcctagcattttcccactgggggaagtggaaggattaagctaccttcacagtgggacgcaggaggcgctcacaggccagtgaagtgagggctcttgggaaatacttcccagagaagatattccctgagctgggttgtgaggaacgagcagaaggtagggagacgaagtgcaaggctaacagtccagatgcagacagctgttcaaggacccagtggtgttagagaacctcccagaactgccccgtttagtacggctgggggccaagtggaactctctcgtttgctgaatgtggaccccccaggtgcaaagcagtcatcgccagctgagcatgagctttggagtcagatccaagctgaggccgggcacggtggctcatgcctgtaatcccagcacctgggaggccaaggcaggtggattgcttgagctcacaagttcgagattagcctgggcaatatggtgaaagcccatctctacaaaaaccagccgggtgtggtggtgcatgcctgtaggctcagctacttgggaagctgaggtaggaggatggcttgagtccgggagacagaggctgcagtgagccaagatcataccactgcactccagcctgggtgatagagccagaccttgtctcaaaacaaaacaaaacaaaatgaaaacacagatccaagctgaattccagttctgccacttacttcctggatgccctgaacctcactgggcctaggttccatgatgtataagcctgttgaatgatatcgaccaatgctaaagatcagagataaaatcagtgcctgatgttgggtaagtgcccgacagacagcagctcctgccactgcacagtcagtgacggctctactggggcccaggggatgcagttagaccccagaaggatgtaccagtccatggcaccagctcggcagcactgttgcccaaggctcccccacatcactcttcagttctagcaatctgctgccctcctcatgcagttggttcccgacagcctggaatatgcttcctcttcttcactgaaactgtgcccgtggagaagcacatgggatttagggtcacagagacttaggttgacactagattcaccacgtttgaggtggcttggtgtcctcatcctcaggcatgccacacctgcaggtgtgttatgcacctgtcacggggtaaggccttccacgtatgctcgctctcctcctgcctcaggtccctctttaagtgttggccactccccagccttgaacctccctgacctctctgctgagcggctctctgaggctatcccatgcccgtggaacatgctggatgtggctgtgccttctaggtgcccgttttggagagaatacatttcttataaacagcagggcaggctgtctcaggtgtggttccagagcacatggaatgtgcccttgcatccccacagcgcaggcccagggctgccgacacagcagccaaccagacacacggggagctcatgttctactgtgggggcactgtcagtaaacaggcaatcaaggaaacaatcaggtggttacaaggcctctgataaaaagaaaattgggtaatggggggggtcacgaatgccaacacggtactgtttaggcagagttatgattgacagtgggggctgccctgggtaaagcttgaggtggagggagcaggctgggctagggccctgaagggccggctggttagaaaccctgaagtccagagtgaccccatggggctggggtcagggaagctgttacaggtggcgttggctccacagctgtgagaattatttctggcttcctcaggaaagatccctgtatatatttcttcctctgggtgctcattagaccctttgcctgcagatggtcttaggagttcccttggggaaactggtggctactcacatgctggagattggactggactcattttgggacatcctgagacatgctgtcattcaggggcttctggggctcagtgaggtcctcatccattcctgtgcaccctggaggtcctgaaggatgtaattcaggggctagtcttgtgttcctcagggacaatctatgtcactgtcacgttagtgaagataaatggagagaaatatgccctgccagctggtggcactcagaaagtgccatggagcagcacagcctgcgtctcagaatggacaggaaaaaagctttatcttcttcctgtcaaaggagggaaataccttgtggaaggtcagggtgccgtgcacctggcaagtgcctgcctgaccccagcctgtggcagaacctgaagggccactgcgatctttatcaggtgactcagtgcttagcactggggaagggcggagcatggagcaggcacagaaggtcccgtggagaggccctgagcagcccagacaggagcgctccattctgctgctcaaggcattacctccagcagtcaggcgcgtacagctcgcgtctctcggatgatttctctctctctctctctctctctctctcttttctatccctcttctctctccctttccttcttcaggatttaattaattgaaagtcaggtttttaaatattggtcagcctcctgttggatatttggggtctgccctggggctcccccacgcatctctctgacttaccttcatgaaaggtgaagcggaaataccccaacaactcggcacacttcttttgtcccaaacagtggaagcacactaggaagttctcagaaccccgaagaaggccctcgtttcacctgctccttcaggatgcccctgtcctttcctactggcccctggctcagaaagatcgccctgcgtagcactctccttttcatcctgtcctcgctcacttggaaccctgctcttcagaaactaaggggagcgcagcaagcctcaattctcttgaaatctgggcagtttccatctttttttttttttttttttttttttaagaaaaaaatagagtctcactctatcgcccaggctggagtgcagtggtgtgatctcggctcactgcaacctccacctcccaggttcaagagattctcctgcctcaggttcccaagcagctgggactacaggaatgtgccaccacgcccggctaatatttttgtgtctttagtagagacagggtttcaccatgttggtcaggctagtctcaaactcctgacctcaaatgatcggcccacctcggcctcccaaaatgctgggattacaggcgtgagccaccacacccggccagtttccgtctttaaacctaccccaaaggttctataactgttgctcagatttgtctgaaaattttggttttgtcagggagaaaataaatttctccttcaaaatctccaccttccccctaaggtgaaggtcaacctggtctttgtcctctaggttggagaacggggttccatggtgaccatcgtcctgagtccttatgcataacagacgtggagtaatattttgactttataaagcctgcttcatgatggcttcttgtgtctttgtgaatagcacaggtgggcagctgtgctggtcccatgtgggcgacaggcaagctgggcctggacggtctgtctctccaagtccaacaggaagatcaggatgggcctcggatctctgctcctaaagccgggccccacgaagccccttccctttactccttatggagtccccttcctcactgagttttttcccctattttaaaatagctcttcacagagaatctttgggggcttttaaacagccctggtcttagcagagttaacacaaccacatcatgagggatctgctgacgaggggggcatcctgcagagccggtccatacttccttttattttcttatcctgagtctcttcccctgagtctccccagagaaactggtgattctcaacacatcctgtggagtttgtgaaaagtggagcttggtgaggtcctcagccaggtgagatgtgccggaatctccaagggtgccctcatagaaggtgtctgaggattgattcaccagaccagacaagtgtggggggcagggacagcatctcactcagcttggtgtccctgagacccagcccatttggcaggacacacaggcattgtaaggaaatgcaatttccttacgccttcctgaaaacgaaccctgactgcccacggggcagctgagcccccgaggctctgttgctgcaactgtgctcatctccaggtggctgtcaaggtgctcatgccttcctcggctcccatggcataaatgaggcaaggagagccttcgagagtccttttagtagagtaggatgtggttaccagggccttaggcagttgtggggatgctggtcaaaggatacacacctatagctaggtggggacagcggaagttcagaatcagcagatgcatagagacaggggtggagaggtgaccacctgggccacggtgggggggacactggggactgctaatggttatggagtttttgcctccggtgatgaaaatgccctagagttgattgtggtgatggctgcacactgagcagactaaaacccattgatcatatactttaagtgggtgaactgtatgatgtgtgaattatacctcaataaaattgtttaaaaattaaaaaaagttgaaagtctcttcccagctcccctcccctctaaaaaaaaagtccttttaaaaaccctgagaggaaacaaaggagcaaagcaccctgcaggtgggccctctctagaggccaagcctgactcctcagctgacaaggctcccagggcggacggcccttacccagcccccgttgtccccagacacctcccctctgagccccagggcccagcgctgtgactgacattgccccgtgtcctcggcctgctcttctggcaaggaacccccggtctgaggtaggtcagcacggcacctcagcctgcagatactagtagcctgcagccaccagtatgaggatccactcttcctccagggacccacgcggggagggccctccaccgccaggggagacccctgattccacccgagcgaacgtgtgaacgatagcggatggcactgcagctgtgactagggcctgtcaggtggactgcagattgccacctggaagccctctgctgggcatccaaacctgccctcaacacagccagagccttcctgccttcctgttggcgtctcaccattgccataaataggctgcatatgagccgctaggctgcactccccacaggctcaaaactttgctgctgcctgcactttgctcctgcctttctcaccaccttgcactttttcctcccttcccaagttccccagctgaaattctctccactttagaagaccaaatttgtgctctaagtcagccaacatttctcagcatctcctgtcgggaggagccaggtaccgtcccacagggagctgctctaatccctgctgcccgcccaggaaggagatcccaaggtccctgatttatggcgaagaggagggactgtgaggttttctggtgaccacagagccagggttcacggccacccccactgccgtttcttgcacctgtactgtgagccttgcacccactgcaagctctgacagctttggctctcagggcctggccagcacctacattctgcagatgaggaagctgaggcttagtgagtaacttgcccagagtcacgaggttaggaagtggggtgtatcaggatgagattcagactctggtcctttttttttttttttttttaaacgagacggagtcttgctttgtcgcccagcctggagtgcagtggcgtgatcctggctcactgcaacctccacctcccaggttcaagcgattctcttgcctcagcctcatgagtagctgggattacaggcatgtgccaccacgcccagctaatttttgtatttttagtagagacggcgtttcaccatgctggtcaggctggtctcgaactcctgacctcgtaattcacccacctcggcctcccaaagtgctgggattacaggcatgagccaccgcgcccagcctgcttgattcttataccctgtcatccagcacacttccttccccaaactgaatgcaagccccccatgggcagagaatctatggtgcccattttcagtcacccgtgctgtgcctagcatagcttcctgcacccatcagcgctaaaatatcccacggatgctgtcttgatggcagaaggcacttttcaatcactgtgcaaatggcgccttctacccccatgatggcatgtgcacggcatgctcgagtgcccggggacgctcaccctgtcctcctggaggtccggagccctcgcctggtgttccctgtgctgtccttgccttgcctcacttgctcttttcctcccactctccgggtccaaccttggctttagtgtctctgctttctgcaggctctcctggggcgggcccctttctgcagacaacttcaactatggcctctatgtgaggacatcactctatcttcagcctttgcctttctcctggattccagggctgcattcttctttccagcctgacaactgcagccagtgcccatggccaccgcagcgtcaccctgtctacagcaagcatctcctgtgagaagtctccacatgcaacttcgcttctctctagcacagtgtccctctcatttctctgaggacttgttaacaatctgtggttattttgccaatccacccactaccctgtcgtctgcctccctagaacatcagtgctgagtgcactatatggacctctgtcttcaggacctggcactgtgcctggcacgcagaggcactcgatcggtatttgcagaatgcctcaagggatgtttaaaactgaagtcaatgtatctccccccaactaaatgcaattgttcttttcctgttgcactgttaccattcctctcactcactcccatccttgagatttaaaatcttagccacctttagctccttcttctctattttgccacttccagtacctctggcacccaggctttccttgcacctcttctgcatcactgctgtggcccaagccctcagttcccgtgtccttggaggatgacagcatcctcccgcttcacagaccagccctcccctgctctggggtccgtgctcattccacctagggcttttctgtgacagtcccttagtcaggaccctccattacttgccaaataaaagccaaactctcaccctgacctccaatatctgaccactgtgttttgagacagggtctggctctgtcacctaggctggagtgcagtggcacgatcatggctcactgcagcctcccaagcagccgggactacaggttcatgccacggcacgtagctaaattgtgttatgttttttttagagatggatttttgccatgttgcccgggctggtctcaaactcctgggctcaagcaatccacccactttggcctcccaaagtgctgaaattacagtcatgagccactatgcccagcccagtatctttcaatatgatcccaacctccttttccaggtttatttcccatttttttccacctatatcctgcattcaggaaaagtcagattaaccaggaatcaggcataggctgaagactccccacttctgcacatttagaaaactccctgaagaggaattcattgaatgcctgggtcctgggcaccccatgtggtggggggtggggtggggaggttagttcaaaagccaggtcagagggggcctactgggctcactcagtctcttacaaaaagaccaccttgatggctcctgtgggcacgggtggtagccaggcctcttgccccttccttgccctggctagggaggaaggatggcggaaagggctggactgctttgcataaaggtgacaagggctgctcagggcagctgggcaggtgcagagggagaagaactccatcccctcccagaggaaccagtgttctgcaagaaacaatgaccaggaagcttcgagaacaggcctgtccacgatgtggctttaaagtggtttcttaaccaagacataacccctccgctgaacacctgcagttatagaacatcttatttgctgtggaacgtaggaaatggaggctgcagggcattcggagtttcactggagccaggtgattctcagagctactggggagacatggggtttcctgctggatgggaacaggaatttaagcagcttctccccacccccaaatcctaaaaaaagagtgtccccagcaggctgaagggtctggaagctgatacctgggatactgaaataagaattaataccttcagctataccagaggatatggtcactctctcaagagatatattttgagtactcactacaggcaaataggtactagactctgaacagggtggctaatgaacaaggtcaaggggacacagacacatatgccagtaactgccatgtagtgtgacaagacactgacttagttcctgggcacagtggaaggaaagtaggaaagggtgtgagtcctcactcttgtgtggaacggaatgctctggagagaaggagtcatctgggctgagtcctgaggaatctcggacacattctcaggccggagtgggggaaggacaagcccttccttcctcctggaatgtccttctcagcatccggacctaccgacactgtactgatccctccagtgccagccgaatgccacctcctctcagagtacaacgatgctagcggtctggtcttcccttgaaccacagctgttctcatctcagggaccagcacagttcccacatccctgatgctcgggtgctctgtacctgcaggggcttctcgacggtaaaggaactcggtcttgttcattagccaccctgttcagagcccatacctatttgcctatagtgaggactcaaaatatatctcttgagagagtgaggacatcctcgcctaaagctctttctcctgattagatggaataggcctggggctctgtaatttgggcaatggcttatcatatcctctctcctcaggatctcctcactattactcttcagaagtgacaatataaacagtgtggttgttctgtgtggcagatagcagtggaagttacgctggatacatttcatgtttccaatatatctggacatttcaggttctaccttggtcggaaggaaacctttctctccagcgtcatgctttctgatgtagctgcccacttatttgaagctgcctatgatctgtactcagtaacacaagagactctaaagattattttacatcaccactaagggcagctccataaagtatggcttaatttcacaactagcctcacaatgctactgtaatttatgtggggaaaacttagaacaagtatcaatagcaaggaatcattttgaacacgtaaagaatatgcgatgaagtcttcctctgcacacaaaaaagcatggctcttgcctccttctttgcaaagagaactgtcagatccgttagtttcataatactttaatcatacattgtctagctaattaccactcccaaataatgaaacgtaactttcaacgatttagaatgccacagttttttgtaaaatagctccgttttactggtctaagtttaaactattacggcgatcactggcctgctgcctccctgtttgatttctccactagctgtcccagagatcttgctgataaaagatctaaaacatacagtcttccgagagctcttatttgacttttttgctccacatttccagatataatggttctcaaggcaacactatacagaatcagagagagaacatgagcttacgtttaaggcagtcattcacatttacacacatataattacaactcttatttttaaaaagtgtaaatttatgacactgtccttcaaatattattcatacatcaggttttgggttatgctgcaaatcacttgccagtaagtctagggttcatggggcaggaatgacacgttaaccctgtctagccactgggggtcctggtttggaataatactgtgatgtactgtcaggaagtaagcttgggtactaggaagacattagccgattactcttttggggttttatacagtcttgctgtgattcacctcaacccgtgtttcaagtgtatgtcattaactcttcacagacaggaaaactcagtctcagaggtcaatgacttgcctttagttcaaattgaggtcagaatatctgataatttcccaactctaaatttaactcatgatacttatgccatgaacattaaaactgactgtacactgtgcatccagcctatttcaggacacatttaataatacactttaattttgctcataatacgccattaaagcaagagtcctagaggaattgaaatctgctatctttgcaccttgtaacatgaaggcacgttatccaaggcacagatgcactagatccaaatgctcctgccctaattactgcatctttatgtgcaggccaaagggcatctttttccctttgctacattccaactcattctcaaacacaaggccaatgaccccaggttctttccaaactgtctcttctttagttttaaagaaagtttattgcctccttctccaatcaagacatttttactgcacttcgaagacaccccttagatatcatgctcctgacagctctgcaggaaaacagttttaggtgacttgtcactttatgagggtggccagtgcctggcttcacagttttctaaatccctctgtcaagagaggccttgaaagagcagactggaactttccagcagtctcctggccagtgaatgtgcaccttgccttctgaaagtaacttccgaagtgatgatc

SEQ ID NO: 1435 - protein, 553 aa, Homo sapiens
MQARYSVSSPNSLGVVPYLGGEQSYYRAAAAAAGGGYTAMPAPMSVYSHPAHAEQYPGGMARAYGPYTPQPQPKDMVKPPYSYIALITMAIQNAPDKKITLNGIYQFIMDRFPFYRDNKQGWQNSIRHNLSLNECFVKVPRDDKKPGKGSYWTLDPDSYNMFENGSFLRRRRRFKKKDAVKDKEEKDRLHLKEPPPPGRQPPPAPPEQADGNAPGPQPPPVRIQDIKTENGTCPSPPQPLSPAAALGSGSAAAVPKIESPDSSSSSLSSGSSPPGSLPSARPLSLDGADSAPPPPAPSAPPPHHSQGFSVDNIMTSLRGSPQSAAAELSSGLLASAAASSRAGIAPPLALGAYSPGQSSLYSSPCSQTSSAGSSGGGGGGAGAAGGAGGAGTYHCNLQAMSLYAAGERGGHLQGAPGGAGGSAVDDPLPDYSLPPVTSSSSSSLSHGGGGGGGGGGQEAGHHPAAHQGRLTSWYLNQAGGDLGHLASAAAAAAAAGYPGQQQNFHSVREMFESQRIGLNNSPVNGNSSCQMAFPSSQSLYRTSGAFVYDCSKF

SEQ ID NO: 1436 - DNA, 469 bp, Homo sapiens
gtgacaatcgatagagatcttgcagcaatatttggctattggttttattaacttaaaattcaacagaaatggagtaattaaaaaaaaaaacaaaaaacagagaagaattgcaaaatctgaagtggaatggcacttccttgggtatgtaagggttgtttttagataaaactcccgatttgttcttcctacactttaatagtctcaaattctttctggggaagcaacgtcagtgtctacctccacagtaactatgatataggaaattgtcctttcagtggtttctaggtataacaaacaagccgttaaaaatgagtgaccattttgtaggttacagcctcagcaatctgtgtcatttgaaagcaaatatcctgatatttttaaataaggtgagcagggcaggcaggaaaccaatatttagtacttttgtgattaaacattctagaccaggcttgttgatatgtatgccaat

SEQ ID NO: 1437 - DNA, 326 bp, Homo sapiens
gcacacttctggctgctggtcttcatgcctctcttcttcgtgtcccccgtgtccgtggctgcctgcgtctggggctttcgacacgataggtcgctggagctggagatcctgtgctcggtcaacatcctgcagttcatcttcatcgccctaaagctggacaggattattcactggccgtggctggtggtgtttgtgcccctgtggatcctcatgtcgttcctttgcctggtcgtcctctattacatcgtctggtccctcctgttcctgcggtccctggatgtggttgccgagcagcggagaacacacgtgaccatggctatcaagtt

SEQ ID NO: 1438 - DNA, 5725 bp, Homo sapiens
cctggaggagggctctggaagtcacgtcaggttggctcttcaggttcatttccatagttccctgcggcctctgccttggggagttatgttttgttaccgagatccgcgctaccagattgcaccggggctgatttgggggctgggaatttgccattctgctgtacagacactgatttttttttcttctttttaaaaagcaaggtttgttttcattttggattttaggtgatgggcaagtcagaaagtcagatggatataactgatatcaacactccaaagccaaagaagaaacagcgatggactcgactggagatcagcctctcggtccttgtcctgctcctcaccatcatagctgtgagaatgatcgcactctatgcaacctacgatgatggtatttgcaagtcatcagactgcataaaatcagctgctcgactgatccaaaacatggatgccaccactgagccttgtagagactttttcaaatatgcttgcggaggctggttgaaacgtaatgtcattcccgagaccagctcccgttacggcaactttgacattttaagagatgaactagaagtcgttttgaaagatgtccttcaagaacccaaaactgaagatatagtagcagtgcagaaagcaaaagcattgtacaggtcttgtataaatgaatctgctattgatagcagaggtggagaacctctactcaaactgttaccagacatatatgggtggccagtagcaacagaaaactgggagcaaaaatatggtgcttcttggacagctgaaaaagctattgcacaactgaattctaaatatgggaaaaaagtccttattaatttgtttgttggcactgatgataagaattctgtgaatcatgtaattcatattgaccaacctcgacttggcctcccttctagagattactatgaatgcactggaatctataaagaggcttgtacagcatatgtggattttatgatttctgtggccagattgattcgtcaggaagaaagattgcccatcgatgaaaaccagcttgctttggaaatgaataaagttatggaattggaaaaagaaattgccaatgctacggctaaacctgaagatcgaaatgatccaatgcttctgtataacaagatgagattggcccagatccaaaataacttttcactagagatcaatgggaagccattcagctggttgaatttcacaaatgaaatcatgtcaactgtgaatattagtattacaaatgaggaagatgtggttgtttatgctccagaatatttaaccaaacttaagcccattcttaccaaatattctgccagagatcttcaaaatttaatgtcctggagattcataatggatcttgtaagcagcctcagccgaacctacaaggagtccagaaatgctttccgcaaggccctttatggtacaacctcagaaacagcaacttggagacgttgtgcaaactatgtcaatgggaatatggaaaatgctgtggggaggctttatgtggaagcagcatttgctggagagagtaaacatgtggtcgaggatttgattgcacagatccgagaagtttttattcagactttagatgacctcacttggatggatgccgagacaaaaaagagagctgaagaaaaggccttagcaattaaagaaaggatcggctatcctgatgacattgtttcaaatgataacaaactgaataatgagtacctcgagttgaactacaaagaagatgaatacttcgagaacataattcaaaatttgaaattcagccaaagtaaacaactgaagaagctccgagaaaaggtggacaaagatgagtggataagtggagcagctgtagtcaatgcattttactcttcaggaagaaatcagatagtcttcccagccggcattctgcagccccccttctttagtgcccagcagtccaactcattgaactatgggggcatcggcatggtcataggacacgaaatcacccatggcttcgatgacaatggcagaaactttaacaaagatggagacctcgttgactggtggactcaacagtctgcaagtaactttaaggagcaatcccagtgcatggtgtatcagtatggaaacttttcctgggacctggcaggtggacagcaccttaatggaattaatacactgggagaaaacattgctgataatggaggtcttggtcaagcatacagagcctatcagaattatattaaaaagaatggcgaagaaaaattacttcctggacttgacctaaatcacaaacaactatttttcttgaactttgcacaggtgtggtgtggaacctataggccagagtatgcggttaactccattaaaacagatgtgcacagtccaggcaatttcaggattattgggactttgcagaactctgcagagttttcagaagcctttcactgccgcaagaattcatacatgaatccagaaaagaagtgccgggtttggtgatcttcaaaagaagcattgcagcccttggctagacttgccaacaccacagaaatggggaattctctaatcgaaagaaaatgggccctaggggtcactgtactgacttgagggtgattaacagagagggcaccatcacaatacagataacattaggttgtcctagaaagggtgtggagggaggaagggggtctaaggtctatcaagtcaatcatttctcactgtgtacataatgcttaatttctaaagataatattactgtttatttctgtttctcatatggtctaccagtttgctgatgtccctagaaaacaatgcaaaacctttgaggtagaccaggatttctaatcaaaagggaaaagaagatgttgaagaatagagttaggcaccagaagaagagtaggtgacactatagtttaaaacacattgcctaactactagtttttacttttatttgcaacatttacagtccttcaaaatccttccaaagaattcttatacacattggggccttggagcttacatagttttaaactcatttttgccatacatcagttattcattctgtgatcatttattttaagcactcttaaagcaaaaaatgaatgtctaaaattgttttttgttgtacctgctttgactgatgctgagattcttcaggcttcctgcaattttctaagcaatttcttgctctatctctcaaaacttggtatttttcagagatttatataaatgtaaaaataataatttttatatttaattattaactacatttatgagtaactattattataggtaatcaatgaatattgaagtttcagcttaaaataaacagttgtgaaccaagatctataaagcgatatacagatgaaaatttgagactatttaaacttataaatcatattgatgaaaagatttaagcacaaactttagggtaaaaattgcgattggacagttgtctagagatatatatacttgtggttttcaaattggactttcaaaattaaatctgtccctgagagtgtctctgataaaagggcaaatctgcacctatgtagctctgcatctcctgtcttttcaggtttgtcatcagatggaaatattttgataataaattgaaattgtgaactcattgctccctaagactgtgacaactgtctaactttagaagtgcatttctgaatagaaatgggaggcctctgatggaccttctagaattataagtcacaaagagttctggaaaagaactgtttactgcttgataggaattcatcttttgaggcttctgttcctctcttttcctgttgtattgactattttcgttcattacttgattaagattttacaaaagaggagcacttccaaaattcttatttttcctaacaaaagatgaaagcagggaatttctatctaaatgatgagtattagttccctgtctcttgaaaaatgcccatttgcctttaaaaaaaaaagttacagaaatactataacatatgtacataaattgcataaagcataagtatacagttcaataaacttaactttaactgaacaatggccctgtagccagcacctgtaagaaacagagcagtaccagcgctctaaaagcacctccttgtcactttattactcccagaacaacaactatcctgacttctaatatcattcactagctttgcctggttttgtcttttatgcagatagaatcaatcagtatgtattcttttgtgcctggcttctttctctcagccttacatttgtgagattcctctgtattgtgctgattgtggatcttttcattctcattgcagaataatgttctattgtgggacttattacaatttgttcatcctattgttgatgggcacttgagaactttccattttggcgctattacaaatagtgcaactatgaatgtactgcatgttaccatcttacttgagcctttaatggacttatttcttcaaatccttccaaaaattattataagcattgaaattatagtttcaagccaactgtggatacccttaccctttcctcctttatcacaaccaccgttacaagtatacttatatttccctaaaatacatttaaaacttacctaagtgacatttgtagttggagtaataggagcttccagctctaataaaacagctgtctctaacttattttatttccatcatgtcagagcaggtgaagagccagaagtgaagagtgactagtacaaattataaaaagccactagactcttcactgttagctttttaaaacattaggctcccatccctatggaggaacaactctccagtgcctggatcccctctgtctacaaatataagattttctgggcctaaaggatagatcaaagtcaaaaatagcaatgcctccctatccctcacacatccagacatcatgaattttacatggtactcttgttgagttctatagagccttctgatgtctctaaagcactaccgattctttggagttgtcacatcagataagacatatctctaattccatccataaatccagttctactatggctgagttctggtcaaagaaagaaagtttagaagctgagacacaaagggttgggagctgatgaaactcacaaatgatggtaggaagaagctctcgacaatacccgttggcaaggagtctgcctccatgctgcagtgttcgagtggattgtaggtgcaagatggaaaggattgtaggtgcaagctgtccagagaaaagagtccttgttccagccctattctgccactcctgacagggtgaccttgggtatttgcaatattcctttgggcctctgcttctctcacctaaaaaaagagaattagattatattggtggttctcagcaagagaaggagtatgtgtccaatgctgccttcccatgaatctgtctcccagttatgaatcagtgggcaggataaactgaaaactcccatttaagtgtctgaatcgagtgagacaaaattttagtccaaataacaagtaccaaagttttatcaagtttgggtctgtgctgctgttactgttaaccatttaagtggggcaaaaccttgctaattttctcaaaagcatttatcattcttgttgccacagctggagctctcaaactaaaagacatttgttattttggaaagaagaaagactctattctcaaagtttcctaatcagaaatttttatcagtttccagtctcaaaaatacaaaataaaaacaaacgtttttaatact

SEQ ID NO: 1439 - protein, 750 aa, Homo sapiens
MGKSESQMDITDINTPKPKKKQRWTRLEISLSVLVLLLTIIAVRMIALYATYDDGICKSSDCIKSAARLIQNMDATTEPCRDFFKYACGGWLKRNVIPETSSRYGNFDILRDELEVVLKDVLQEPKTEDIVAVQKAKALYRSCINESAIDSRGGEPLLKLLPDIYGWPVATENWEQKYGASWTAEKAIAQLNSKYGKKVLINLFVGTDDKNSVNHVIHIDQPRLGLPSRDYYECTGIYKEACTAYVDFMISVARLIRQEERLPIDENQLALEMNKVMELEKEIANATAKPEDRNDPMLLYNKMRLAQIQNNFSLEINGKPFSWLNFTNEIMSTVNISITNEEDVVVYAPEYLTKLKPILTKYSARDLQNLMSWRFIMDLVSSLSRTYKESRNAFRKALYGTTSETATWRRCANYVNGNMENAVGRLYVEAAFAGESKHVVEDLIAQIREVFIQTLDDLTWMDAETKKRAEEKALAIKERIGYPDDIVSNDNKLNNEYLELNYKEDEYFENIIQNLKFSQSKQLKKLREKVDKDEWISGAAVVNAFYSSGRNQIVFPAGILQPPFFSAQQSNSLNYGGIGMVIGHEITHGFDDNGRNFNKDGDLVDWWTQQSASNFKEQSQCMVYQYGNFSWDLAGGQHLNGINTLGENIADNGGLGQAYRAYQNYIKKNGEEKLLPGLDLNHKQLFFLNFAQVWCGTYRPEYAVNSIKTDVHSPGNFRIIGTLQNSAEFSEAFHCRKNSYMNPEKKCRVW

SEQ ID NO: 1440 - DNA, 331 bp, Homo sapiens
tttttttttttttttttcaggtcaatttcactgtcttttatttgacagctagcgcagtctttggggaaatttgtgggtgatttgagtagtaacagcaaggacatcactgtaattatgatagtgccttatatttttctagcacctctcccaaggacttatgaagacttttagattcttcatcccttcacacaacattgcttcaaggtagggccaaggcagaaattatcatcactgttttacaaggaaagacactcctgtgcggtctcaaagcaaatgcttttaagagctaaaaattcatttcctagttctgttcaccaaatgcctcgtgccg

SEQ ID NO: 1441 - DNA, 468 bp, Homo sapiens
taagtttgactatatttattccagtctctgtgacaccaaatctcatgattttctaaaaagatgtgactcaaaattagcaaacactgcaaagaagacacacgtgctatttatgagtgcttttaagtctcttagcagagacacatttggaagctaaatggaatcacagtgactaaaactttttctgaaatccccaatccgatgttgagcacatggctcagaaacaatctcaatatcatcaaataactaaaccacaaaaaagaaaaagaagctctcaaatatccctttcccaaacggtttcccaaatgtatacacatatgtagacagtagaggctagaactgggaattgtttttgcctaaacatttgctgcccccacgtgtccctttagaaaactgagtgttaaagctaaatcatgttcattagcaccttctatacagcattcggcggggttagggacgcctaagtggtga

SEQ ID NO: 1442 - DNA, 377 bp, Homo sapiens
tttttttttttttttttttaagaagcatttttttttttcaatccgttggagacagatcatctcccactttcaaaggcaattcaattgtggtttttgttgttggtttttttgtatttttttgtatttctttttttttttacaagtaagcgtctatgcaggcatcacaaactttggcggatacagtagatatgtatttctttgatgctgaaaggtcagtccctaagacaaaatcaaatgtctcaaagaattaaaagcaaaatgcatgtgtcttcctggcaaaggtttccatttgcaatgtaatctgcatttctacaaatactcaatgtccaaggccactagagggtgaaaaaccagggcagcgtcttccagcaggagtc

SEQ ID NO: 1443 - DNA, 403 bp, Homo sapiens
ttaaagacatccctggcaggcatcagaactattttgcacatgatttttaaaggtatttattagaaatcaaagaacactcaaaataaactcagtgctcaaagggttaagtctatttgaaaaggttaaaaaaaagaacaacaaaaaaaaaagaacttgtactgtatttcctaaacattgataaagcctttaaaatgtttgtactgtaatactttgcttaaaagtcatgaggcattctgtgatccaacctctttcacttatttataagccctcttggttgctattccatattgtaggatgcctttctatttcaattggtaactttctgttttgttcttcctaattattctcccaagatcccacactgcagctttatctttaggcttatgaaaggtaacccgtggtt

SEQ ID NO: 1444 - DNA, 290 bp, Homo sapiens
tttttttttttttttttaaaaagtgaaacaccaatagtttaattgaaatttcagaaaattgaacatatgaacaaggcaaataaatactaagtaagttaaaaacacaaaatatgtccaggaagtatcgatgagaatgttcaagttaaagttctccaatgccattgctacagcaacctcaaaccctaggttctctctgcactattaacacagacatctcaggacatggtttgcttttttttaagacttaaataggaaactaatttttctttctttaaagcaattgcgttctt

SEQ ID NO: 1445 - DNA, 2346 bp, Homo sapiens
acggcccgggctggtctgattaatgtttgataattaagcatttttatgtgattcatctcaataagagcccaagcaaggtaatgtaaacaatgaaggcataaaaaggtggaaggagatgtgaatactacaccaagtgggccacatggacctaaggaaaaagaggagctgagttgaagtcaggagctgattcagataaagcagcttcaactctactacttcttactcttagatgggctccagaccaccttgagggatgggattatatttattttatagatgcactcctttctcccactaatacagtcagttaggaatgtatagctaagaatgagccaaccattactattcgtgtctatggctacagaaactcaataaatcaactcactattctgggtcaataaatgaactcattatactgtttcttcatgaagtaaatgtgtttctaaaggaatgtattaaaattacatttttaaaaatctatgtattttgcatatatttgattgatacagaaaaggagtctactttggttacttttctttctttctacaaacttcattcattggtgtgatctgaaaggggataatatttcagaaagcaaaaatatttttaacaacaaaactttgtatttccagtgtgatctaaacacaaaattatgcaaaacacaactaatatttctctcctactggctaaatcatgccagttgtttaggtgcaatcaaaaataagccactaatgttatttttataggaattggcaagtaattgccaactatagctattaaaagtttatatttgccacaggagcctgtgattttaaatactgttcaaatgatttatgcttgagagttatacatagcacaaatacatacatttgtatctacaggtctaaagaggaaaaattagacaaaaagcaacttgaaaaggaacccctttatttttaatgacctacctttgtgctgtattgagaaaaagtataaaaattatttgggaggaagaaaaatatttctaagcactaatttcataggcaaaagccctattattttttatgataggctaggggaaatcaataatgatttaaaagcaaacagtaaactgctcacatttaccagtctatactcagtattaattctaccctgcagtgtatgctatagaaggtaatgaaatgctgatgttttctggttttccacttcaatctgctccagctttatcctaaaccttgtcagcaacagaagttaccccccagcaatcatacaaacctaataacggcttccctggcttaatttgatctgctccaatcacaaattccaatccacatactttcttctgttatggttgtgtctgtatgtgtttaatgtactttttataaggcttttttacaacaagcgcatggtttttcattcagccctctaccacataaacagaaccactgaagagcatttttgttcatataaaaatgttttagttattcatagtgtatgtcttcaattggctgcagattacagtgaacaaaagtattgctgccatcattttacatttctcctgttactgtgccctatctgctgtgtacccctgtccccaaagcatttattataatatttgctgcttgctctcagttttggactgagatgcttgggggtgggaaaacttaaaacttgcctgactcaagtactctctaagctttgatcccagcatcctgctttaacctgctcctgttggacctctgccactttactgaccccataaaacaaacagagctagcaaatgcatcaaacagcctccttcaaaatgcagcttgaccgtgattcatggcacaaagctggaataaccctgccagttcttagaagctttaagattcatcgtcttgaacttgatacacatagtatagcaccttaaaaacgaatcatctgctagttcagtattttctacttacaatcactccctcccagggcatgtaattaatttactgagcttaaaaaaaaatatcaggattactcacacagtcttgaagatgcaatgtcagctatttaggacagaaacatccaaggccgtgtcagaactcaattacgactacatatgcattaaggcaggaactggcaggcctcagggtacgccaactataggactcgtgcttctcgtacgctgggctataatctatgaaactgagctccagagccagccaatcacttagctcctcataacaagtctaactggctctggaaagctgaaagggctgcactggaacaacacagatgagatattctacacattaatctacttatctggaatcactttgcctctaaaggccagagaaaaatcacagcttccttgtcggaggggaaaagaagggc

SEQ ID NO: 1446 - protein, 59 aa, Homo sapiens
MQCQLFRTETSKAVSELNYDYICIKAGTGRPQGTPTIGLVLLVRWAIIYETELQSQPIT

SEQ ID NO: 1447 - DNA, 2338 bp, Homo sapiens
aagagatctgagtatagtttgactgtaatcgctgaggacagggggacacccagtctctctacagtgaaacattttacagttcaaatcaatgatatcaatgacaatccaccccacttccagagaagccgatatgaatttgtaatttcagaaaataactcaccaggggcatatatcaccactgttacagccacagatcctgatcttggagaaaatgggcaagtgacatacaccatcttggagagttttattctaggaagttccataactacatatgtaaccattgacccatctaatggagccatctatgccctcagaatctttgatcatgaagaagtgagtcagatcacttttgtggtagaagcaagagatggaggaagcccgaagcaactggtaagcaataccacagttgtgctcaccatcattgacgaaaatgacaacgttcctgtggttatagggcctgcattgcgtaataatacggcagaaatcaccattcccaaaggggctgaaagtggctttcatgtcacaagaataagggcaattgacagagactctggtgtgaatgctgaactcagctgcgccatagtagcaggtaatgaggagaatatcttcataattgatccacgatcatgtgacatccataccaacgttagcatggattctgttccctacacagaatgggagctgtcagttatcattcaggacaaaggcaatcctcagctacataccaaagtccttctgaagtgcatgatctttgaatatgcagagtcggtgacaagtacagcaatgacttcagtaagccaggcatccttggatgtctccatgataataattatttccttaggagcaatttgtgcagtgttgctggttattatggtgctatttgcaactaggtgtaaccgcgagaagaaagacactagatcctataactgcagggtggccgaatcaacttaccagcaccacccaaaaaggccatcccggcagattcacaaaggggacatcacattggtgcctaccataaatggcactctgcccatcagatctcatcacagatcgtctccatcttcatctcctaccttagaaagagggcagatgggcagccggcagagtcacaacagtcaccagtcactcaacagtttggtgacaatctcatcaaaccacgtgccagagaatttctcattagaactcacccacgccactcctgctgttgagcaggtctctcagcttctttcaatgcttcaccaggggcaatatcagccaagaccaagttttcgaggaaacaaatattccaggagctacagatatgcccttcaagacatggacaaatttagcttgaaagacagtggccgtggtgacagtgaggcaggagacagtgattatgatttggggcgagattctccaatagataggctgttgggtgaaggattcagcgacctgtttctcacagatggaagaattccagcagctatgagactctgcacggaggagtgcagggtcctgggacactctgaccagtgctggatgccaccactgccctcaccgtcttctgattataggagtaacatgttcattccaggggaagaattcccaacgcaaccccagcagcagcatccacatcagagtcttgaggatgacgctcagcctgcagattccggtgaaaagaagaagagtttttccacctttggaaaggactccccaaacgatgaggacactggggataccagcacatcatctctgctctcggaaatgagcagtgtgttccagcgtctcttaccgccttccctggacacctattctgaatgcagtgaggtggatcggtccaactccctggagcgcaggaagggacccttgccagccaaaactgtgggttacccacagggggtagcggcatgggcagccagtacgcattttcaaaatcccaccaccaactgtgggccgccacttggaactcactccagtgtgcagccttcttcaaaatggctgccagccatggaggagatccctgaaaattatgaggaagatgattttgacaatgtgctcaaccacctcaatgatgggaaacacgaactcatggatgccagtgaactggtggcagagattaacaaactgcttcaagatgtccgccagagctaggagattttagcgaagcatttttgtttccatgtatatggaaatagggaacaacaacaacaacaaaaaaccctgaaagaactggcattgccaaatagttgcatttatcataaatgtgtctgtgtatattgaatattaaatactgtattttcgtatgtacacaaaaaaaaaaaaaaaaaaaaaaaaaaaaaaaaaaaaaaaaaaaaaaaag

SEQ ID NO: 1448 - protein, 709 aa, Homo sapiens
KRSEYSLTVIAEDRGTPSLSTVKHFTVQINDINDNPPHFQRSRYEFVISENNSPGAYITTVTATDPDLGENGQVTYTILESFILGSSITTYVTIDPSNGAIYALRIFDHEEVSQITFVVEARDGGSPKQLVSNTTVVLTIIDENDNVPVVIGPALRNNTAEITIPKGAESGFHVTRIRAIDRDSGVNAELSCAIVAGNEENIFIIDPRSCDIHTNVSMDSVPYTEWELSVIIQDKGNPQLHTKVLLKCMIFEYAESVTSTAMTSVSQASLDVSMIIIISLGAICAVLLVIMVLFATRCNREKKDTRSYNCRVAESTYQHHPKRPSRQIHKGDITLVPTINGTLPIRSHHRSSPSSSPTLERGQMGSRQSHNSHQSLNSLVTISSNHVPENFSLELTHATPAVEQVSQLLSMLHQGQYQPRPSFRGNKYSRSYRYALQDMDKFSLKDSGRGDSEAGDSDYDLGRDSPIDRLLGEGFSDLFLTDGRIPAAMRLCTEECRVLGHSDQCWMPPLPSPSSDYRSNMFIPGEEFPTQPQQQHPHQSLEDDAQPADSGEKKKSFSTFGKDSPNDEDTGDTSTSSLLSEMSSVFQRLLPPSLDTYSECSEVDRSNSLERRKGPLPAKTVGYPQGVAAWAASTHFQNPTTNCGPPLGTHSSVQPSSKWLPAMEEIPENYEEDDFDNVLNHLNDGKHELMDASELVAEINKLLQDVRQS

SEQ ID NO: 1449 - DNA, 7433 bp, Homo sapiens
gttttgatgaacacctggctttattcttgcaatgaagaaaggttctcaacaaaaaatattctccaaagcaaagataccatcatcatctcactctcctatcccatcatctatgtccaatatgagatctaggtcactttcacctttgattggatcagagactctaccttttcattctggaggacagtggtgtgagcaaattgagattgcagatgaaaacaatatgcttttggactatcaagaccataaaggagctgattcacatgcaggagttagatatattacagaggccctcattaaaaaacttactaaacaggataatttggctttgataaaatctctgaacctttcactttctaaagacggtggcaagaaatttaagtatattgagaatttggaaaaatgtgttaaacttgaagtactgaatctcagctataatctaatagggaagattgaaaagttggacaagctgttaaaattacgtgaactcaacttatcatataacaaaatcagcaaaattgaaggcatagaaaatatgtgtaatctgcaaaagcttaaccttgcaggaaatgaaattgagcatattccagtatggttagggaagaagttaaaatctttgcgagtcctcaatttgaaaggcaacaagatatcatcgctccaagatataagcaagttgaaaccgcttcaagatttgatttctctgatcctagttgaaaatccagttgtgacccttcctcattacctccagtttaccattttccacctccgttcattggaaagtttggaaggtcagccagtaaccactcaggatagacaggaggcttttgagagattcagtttagaagaggtagaaagactggaaagagacctagaaaaaaagatgatagaaactgaagagcttaagagcaaacaaacaaggttccttgaggaaattaaaaatcaagataaattgaataaatcattaaaagaggaggccatgttacagaaacagagctgtgaggaactcaagagtgacttaaacacaaaaaatgaattgctaaaacagaagaccatagaattaacacgagcatgtcagaagcaatatgagctggaacaggaattggccttttataaaattgatgctaaatttgagccactaaattattatccatcagagtatgctgaaattgataaagccccagatgaaagcccttacattggcaaatccagatacaagagaaatatgtttgccacagagagttatattattgacagtgctcaggcagtacagatcaagaagatggagccagatgaacaacttagaaatgatcacatgaacttgagaggccacacaccactggacacgcaactggaagacaaagaaaaaaaaataagtgcagcacaaactcgactatcagaactgcatgatgaaatagaaaaggcagaacaacaaattttgagagctactgaagaatttaaacaactggaagaagctatacaactaaaaaagatttcagaagcagggaaagaccttctttacaagcagttgagtggtagactacaacttgtaaataaattacgccaggaagctctggatctagaactgcagatggaaaagcaaaagcaggaaattgccggaaagcagaaggagattaaggacctgcaaatagccatagatagcctggattccaaagacccaaaacattcccatatgaaggctcaaaagagcggtaaagaacaacagcttgacattatgaacaagcagtaccaacaacttgaaagtcgtttggatgagatactttctagaattgctaaggaaacggaagagattaaggaccttgaagaacagcttactgaaggccagatagcagcaaatgaagccctgaagaaggatttagaaggtgttatcagtgggttgcaagaatacctggggaccattaaaggccaggcaactcaggcccagaatgagtgcaggaagctgcgggatgagaaagagacattgttgcagagattgacagaagtcgagcaggagagagaccagctggaaatagttgccatggatgcagaaaatatgaggaaggagcttgcagagctagaaagtgccctccaagagcagcatgaggtgaatgcatctttgcagcagacccagggagatctcagtgcctatgaagctgagctagaggctcggctaaacctaagggatgctgaagccaaccagctcaaggaagagttggaaaaagtaacaagacttacccagttagaacaatcagcccttcaagcagaacttgagaaggaaaggcaagccctcaagaatgcccttggaaaagcccagttctcagaagaaaaggagcaagagaacagtgagctccatgcaaaacttaaacacttgcaggatgacaataatctgttaaaacagcaacttaaagatttccagaatcaccttaaccatgtggttgatggtttggttcgtccagaagaagtggcagctcgtgtggatgagctaagaagaaaactgaaattaggaactggggaaatgaacatccatagtccttcagatgtcttagggaaaagtcttgctgatttacagaaacaattcagtgaaattcttgcacgctccaagtgggaaagagatgaagcacaagttagagagagaaaactccaagaagaaatggctctgcagcaagagaaactggcaactggacaagaagagttcaggcaggcctgtgagagagccctggaagcaagaatgaattttgataagaggcaacatgaagcaagaatccagcaaatggagaatgaaattcactatttgcaagaaaatctaaaaagtatggaggaaatccaaggccttacagatctccaacttcaggaagctgatgaagagaaggagagaattctggcccaactccgagagttagagaaaaagaagaaacttgaagatgccaaatctcaggagcaagtttttggtttagataaagaactgaagaaactaaagaaagccgtggccacctctgataagctagccacagctgagctcaccattgccaaagaccagctgaagtcccttcatggaactgttatgaaaattaaccaggagcgagcagaggagttgcaggaagcagagaggttcagcagaaaggcagcacaagcagccagagatctcacccgagcagaagctgagatcgaactcctgcagaatctcctcaggcagaagggggagcagtttcgacttgagatggagaaaacaggtgtaggtactggagcaaactcacaggtcctagaaattgagaaactgaatgagacaatggaacgacaaaggacagagattgcaaggctgcagaatgtactagacctcactggaagtgacaacaaaggaggctttgaaaatgttttagaagaaattgctgaacttcgacgtgaagtttcttatcagaatgattacataagcagcatggcagatcctttcaaaagacgaggctattggtactttatgccaccaccaccatcatcaaaagtttccagccatagttcccaggccaccaaggactctggtgttggccttaagtactcagcctcaactcctgttagaaaaccacgccctgggcagcaggatgggaaggaaggcagtcaacctccccctgcctcaggatactgggtttattctcccatcaggagtgggttacataaactgtttccaagtagagatgcagacagtggaggagatagtcaggaagagagtgagctggatgaccaagaagaacccccatttgtgcctcctcctggatacatgatgtatactgtgcttcctgatggttctcctgtaccccagggcatggccctgtatgcaccacctcctcccttgccaaacaatagccgacctctcacccctggcactgttgtttatggcccacctcctgctggggcccccatggtgtatgggcctccaccccccaacttctccatccccttcatccctatgggtgtgctgcattgcaacgtccctgaacaccataacttagagaatgaagtttctagattagaagacataatgcagcatttaaaatcaaagaagcgggaagaaaggtggatgagagcatccaagcggcagtcggagaaagaaatggaagaactgcatcataatattgatgatcttttgcaagagaagaaaagcttagagtgtgaagtagaagaattacatagaactgtccagaaacgtcaacagcaaaaggacttcattgatggaaatgttgagagtcttatgactgaactagaaatagaaaaatcactcaaacatcatgaagatattgtagatgaaattgagtgcattgagaagactcttctgaaacgtcgctcagagctcagggaagctgaccgactcctggcagaggctgagagtgaactttcatgcactaaagaaaagacaaaaaatgctgttgaaaagttcactgatgccaagagaagtttattgcaaactgagtcagatgctgaggaattagaaaggagagctcaggaaactgctgttaacctcgtcaaagctgatcagcagctaagatcgctccaggctgatgcaaaggatttggagcagcacaaaatcaagcaagaagaaatcttgaaagaaataaacaaaattgtagcagcaaaagactcagacttccaatgtttaagcaagaagaaggaaaaactgacagaagagcttcagaaactacagaaagacatagagatggcagaacgcaatgaggatcaccacctgcaggtccttaaagaatctgaggtgcttcttcaggccaaaagagccgagctggaaaagctgaaaagccaggtgacaagtcagcagcaggagatggctgtcttggacaggcagttagggcataaaaaggaggagctgcatctactccaaggaagcatggtccaggcaaaagctgacctccaggaagctctgagactgggagagactgaagtaactgagaagtgcaatcacattagggaagtaaaatctcttctggaagaactgagttttcagaaaggagaactaaatgttcagattagtgaaagaaaaactcaacttacacttataaagcaggaaattgaaaaagaggaagaaaatcttcaggttgttttaaggcagatgtctaaacataaaaccgaactaaagaatattctggacatgttgcaacttgaaaaccatgagctacaaggtttgaagctacaacatgaccaaagggtatctgaattagagaagactcaggtggcagtgctagaggagaaactggagttagagaatttgcagcagatatcccagcagcagaaaggggaaatagagtggcagaagcagctccttgagagggataaacgagaaatagaacgaatgactgctgagtcccgagctttacaatcgtgtgttgagtgtttgagcaaagaaaaggaagatctccaagagaaatgtgacatttgggaaaaaaagttggcacaaaccaaaagggttttagcagcagcagaagaaaatagcaaaatggagcaatcaaacttagaaaagttggaattgaatgtcagaaaactgcagcaggaactagaccaactaaacagagacaagttgtcactgcataacgacatttcagcaatgcaacagcagctccaagaaaaacgagaagcagtaaactcactgcaggaggaactagctaatgtccaagaccatttgaacctagcaaaacaggacctgcttcacaccaccaagcatcaggatgtgttgctcagtgagcagacccgactccagaaggacatcagtgaatgggcaaataggtttgaagactgtcagaaagaagaggagacaaaacaacaacaacttcaagtgcttcagaatgagattgaagaaaacaagctcaaactagtccaacaagaaatgatgtttcagagactccagaaagagagagaaagtgaagaaagcaaattagaaaccagtaaagtgacactgaaggagcaacagcaccagctggaaaaggaattaacagaccagaaaagcaaactggaccaagtgctctcaaaggtgctggcagctgaagagcgtgttaggactctgcaggaagaggagaggtggtgtgagagcctggagaagacactctcccaaactaaacggcagctttcagaaagggagcagcaattggtggagaaatcaggtgagctgttggccctccagaaagaggcagattctatgagggcagacttcagccttctgcggaaccagttcttgacagaaagaaagaaagctgagaagcaggtggccagcctgaaggaagcacttaagatccagcggagccagctggagaaaaaccttcttgagcaaaaacaggagaacagctgcatacaaaaggaaatggcaacaattgaactggtagcccaggacaaccatgagcgggccaggcgcctgatgaaggagctcaaccagatgcagtatgagtacacggagctcaagaaacagatggcaaaccaaaaagatttggagagaagacaaatggaaatcagtgatgcaatgaggacacttaaatctgaggtgaaggatgaaatcagaaccagcttgaagaatcttaatcagtttcttccagaactaccagcagatctagaagctattttggaaagaaacgaaaacctagaaggagaattggaaagcttgaaagagaaccttccatttaccatgaatgagggaccttttgaagaaaaactgaacttttcccaagttcacataatggatgaacactggcgtggagaagcactccgggagaaactgcgtcaccgggaagaccgactcaaggcccaactccgacactgtatgtccaagcaagcagaagtattaattaaaggaaagcggcagacagagggcactttacacagtttgaggagacaagtagatgctttaggggaattggtcaccagcacctctgcagattcagcgtcatcacccagtctgtctcagctggagtcttccctcacagaggactctcaacttggacaaaatcaggaaaagaatgcctcagccagatgaggaatactgtcttgtgtaaatatattcaaggaaaacacctccactacctcactgacttcataattggaatgtcacatggtttttttaatcaagatgcagtgaactgagattctgaaactccactgtagtttactttgcctgtaccattaatgccaatgtttttataaatcacttgtacatagtacatatgggaatagttgcatatgggaatttaaaccaacatgtggctgagcctttttttttttaatcttcgtaacatgtttaaaaaaaaacagtgattttaactgcatatttgaacctacaaactggtaaatcttattaacaaaaagaatgtacttaaggccctctttatttatagtgtcgagttatttttgaattttgcttaaaatctatttttcatatgaaaataaaagataacaatcaa

SEQ ID NO: 1450 - DNA, 517 bp, Homo sapiens
cctccacagcaacttccttgatccctgccacgcacgactgaacacagacagcagccgcctcgccatgaagctgctgatggtcctcatgctggcggccctcctcctgcactgctatgcagattctggctgcaaactcctggaggacatggttgaaaagaccatcaattccgacatatctatacctgaatacaaagagcttcttcaagagttcatagacagtgatgccgctgcagaggctatggggaaattcaagcagtgtttcctcaaccagtcacatagaactctgaaaaactttggactgatgatgcatacagtgtacgacagcatttggtgtaatatgaagagtaattaactttacccaaggcgtttggctcagagggctacagactatggccagaactcatctgttgattgctagaaaccacttttctttcttgtgttgtctttttatgtggaaactgctagacaactgttgaaacctcaaattcatttccatttcaataactaactgcaaatc

SEQ ID NO: 1451 - protein, 95 aa, Homo sapiens
MKLLMVLMLAALLLHCYADSGCKLLEDMVEKTINSDISIPEYKELLQEFIDSDAAAEAMGKFKQCFLNQSHRTLKNFGLMMHTVYDSIWCNMKSN

SEQ ID NO: 1452 - DNA, 166181 bp, Homo sapiens
gatcctgtggggcacgtggatgagcattaggcccacttcacaactgaggaaactgaggctcggggaagttaggagcttgtgcgaggccacacggccagagggtgaggctggcaacctctaagccggcctcggataagctaaccagcattcaggctctggcagcctggggggaaaccaggggatttccccgcaacaggttagagcctggaattgagaactgtctgggcaaaagttcagcagtttcttcatccaccaagaggagagggagggctctgggctccagagcacccagaggctccagagaagccgaggccagagcgcgagggactcggtgatccaagctggtccagggccaggcctgctgttactcccgggcaggctccggctccagagcccagcaggggccaggcttccccggggggaagcagcaaagcgttcccagctgcccaaaccatttttgggtttccaactgctctcagggcagcagccccatccgagagctgagatcagaacagcctcctcctgagagccactgaagggatgaagagcagatacgttagggccacatcaaaggaatcctcagggatatgttggaagccaagattcagactgtggtttcctgagccagttctgaagcaaaaaccagacccgaaggccttgaagaagtgatggggacccggggcgccctgggcggggtctgcctgggttccaggagtgcttcctttggtggtgcccactactgcactctgtcctgtcttaggtgaccctcacggtctctgcaggcaggtgccgttaatagccccactgcacaatgaggaaacggcagcacagaaaggcgcggtggctcacgcctggaatcccagcactttgggaggccaaggcagagggattacttgaggtcaggagtttgaaactagcctggccaacatggcgaaaccccatgtctattaaaaatacaaaattagctgggcgtggtggcacatgcctgtagtcccagctactggggaggctgatgcaggaaaattgcttgaactggggaagcagaggttgcggtgagccgagatggcaccactgcactccagcctggttgacagagcaaggctccgtctcacaaaaaaaagaaaaagaaaaggaaaaagaaaggctgggtgacttgtgcagaaagggctctaggacttgagctgggctctgatcctgaagccacactctgagcagctgggctgctctgactcgttgttcataagcaaggaaaaggaaatgaggacccggagtgtggagggagagctgaaggggaaggagagctgaggggaaaggaggcccagttgtgagctccctttgtgaacccagcagccagcaccctccctgaagctgcttacgagccccatgcagccgccccctcttcattcagagccaagggtgaccgcagggagaggacctttaccccattctacagagaagtaaaggacggtcaagggacaggaacgttcatacaaggtttatcttcccctgtggagccagccctgggtggcagctacctgaggggcagtgggtggggaagtactgcagggccaccagcccccagccagcagctgcagcaccacctccacaagagaagcgagatgcagccgcacttcctgtccccgcactgcactggcatagttctgagccaccagcttccttctgttttcctctcagaggcaaagcatgggggcacaggagccggaagtgccagggcagcctgcagcctgggcctggggaatggaggaggccctggggccacacagggggctggtcctcactcttcacggcaggggtgggagacaggttcctgtccctcaaggagggtgttcaggcagccttaacctcccccgtctcaagtgatcctcccatctcaggctcctgagtagttgggactacaggtgtgtgccaccacacccggttaattagtttatttttagtagacacacggtttcacctgtgttggccaggccggtattgaactcctggcctcaagtgatccacccaccccagcttcctaaaatgctgggatgacaggcatgagccactgcgcccacctctttttggttttgagatgggggtctcactatattgctcaggctggtctcaaacttctggcttcaactaatcctcccatctcagcctcccaagtagatgggaccacaggcattggctaattttttttccttttattctttaggggtagagtctctatgctgccagggcttatctcaaaccccagcttcagcctcccaaatagctgggattacagacattagccactgcacctggctggtgtctccattttacagatgaggctgtcaccccccaatatcacacagccaagtggcagagttgtgttcaaatgctggcagtcaggccatgctctgtctgagtccagactctgccactttctagctgtgtgttctcgggcaggttatttaccaactttgagtccattttcttatccctaaaagagggctgagaagctcacccctacctttgaaggttgtttgaggattaagcaagaccagcatctgaagggcctgaagcatctagggcatcatcagtgcactttatctctggcctctaagaagtgcatctagaagggacccactgtcacagcttcctggtacccttgcctttgcctgtcaggtagcacttcggtttggacctcactttttcaggatttgttggaaacaagatcccttatcttctctaggtcagatttggggtgaacttggctgacagtattccagggcaggcagaggtcaggctggctggtgacctgctgcctccttcccatcggcagctagttctagggccatccacagggatccccagccctccatagtaccagtgagcctcactggcatgtgccagggccaagagggccttcagcgtcgcctccagtccagccctgtcctcgtattcttggggacactgtggctcagccagcacagtgcctagcccacagtcacccagcaggcgtccctcgagtgggccagtggcaggcacagagctgctctccccttgcctggatgcgtgaggaaaggaacctcttctccctgcagcccagccctgcaggctctctgctgccagatgacgagtgaagatgaaagtcctgatgtctattgtctgtgtgcacagagctttggagtggcctggccaggaagaggggaagcgtgtgtggggtcagcacaaggggttgccgggatcttggttactggttctgctctgctgctggttccctctgaaaatgtgggtttctcccctccgtgctgagcctcagaaaggggtagggagccccatgccagcacacatggcccctcggctctctggcctctgcagggtcagcccagctccttcacctctctcctgctttcccctcaggcctcagtgaccccacacccccttcaggcccaagcctggatggtaccggatggaacagcttccaggtaggaggggaccacaaactagtctggcctgtcccagtcccagggtcagggcagctgggacaagtggcctggagaaactaaaaggatggatgggctctactcaagagcccagggccagggggtggcccaggggcctggagacacccacccagggtacagggcctccccttacctccagctgtatcttccccaagtctcagccttggggctgcagcccagcctttgggattgggattgagatgggcaatccctcttcctttcccttgagggtgacagaggtccctggattgtagaacccccaaccagacccagccaccctgcatcatggacatgggtggtctggggtccccacctctgtggctgctttcccagatgtcatttgcaaggaggacactgagcctcagggcaggatcaggtgatgctgacacctctctagacagccccaccccacctgcatccttttccccacagtcgtcggatgccactgagcccccagcccctgctctggcccaggcccccagtatggaaagccgacccccagcgcagacatccctgccagcaagcagcggtctggacgacctagacctcctggggaagaccctcctgcagcagtcgctgcccccggaatcccagcaagtgcggtggtgagggcccaccatggctggcatggggtggggagcactccctgttcccacaaaccagcaacttctcctgggcttgtccaggcccagcagggagaggctcgttgctgtcttgttttgtaagcagcagatgccaagcagtgcacctgcctctggaaacacaacagtgcccaaggcagacctgggcccactggcctggcctccccccaggtgttcccagctcccttgagaaaggtccagagggccggcagaggggaggacactgggctggagtgaataggtggggtgcagggtggagggagaacacgagctgctccttctaaaggtaagacccaaggccagagagatagccacacgtgccagcctttcctgtgcccctgatctctccatcaccaaagaatcactttttctttttttgagagggagtctcaccctgtcacccaggctggagtacagtggcatgatctcggctcactgcaacctccatctcccaaactcaagcgattctcctacgtcaggctcctgagtagctgggaccacaggtgtgcgctaccacgcccagctagttttttgtattttttatacagaccgggtttcgccatgttgcccaggctggtctcaaactcctgagctcaagcgatctgcccgcctcagcctcccaaagtgttggaattacaggggtgagctaccacgctggccaagaatcacttcttaatgcactgtcccccgattaagggagaagcagcagccaaccccccggctcacactccgggacctgcagaataagagcagcagctgcagctcccccagctccagcgccaccagccttctccacaccgtgtccccagagccccccaggcctccgcagcagcccgtaccaaccgagctctcactggccagcatcactgtgcccctggagtccatcaaacccagtgagtagggctggggcaggtgcaggctgggttgggtcagcttgctgccctgtcaggagctctgtctggggaagctagtgggaaagcagggctcccctggctctgccactggccaaccagaggggagctctgaacaaggccctccccttcccaggagtcagtttccttatctgccccagagcaatcagaggactgctgtacaaactccaggcttatataagcaagaagacctctagggagtaggctctgggccccttccatccccaggaaggcagggcccaggacacagagaggtttggggtctcccccagattacagaactgaaccatgataaagacccagatccaaggctgggtttttccagcccaggagcagtaaggggaccatggcccagccccgggccccaagcagacacatgaggcctggtggtcctcagcattgccctctatgagctccctgtgaccaaagacactacccccacagtgtctcccagcagtgggcagagctgcccctctcaccagtaggagaaccctgagctcagagaaggggagtgactgccgcaaggtcacacagcgtgagactcaccctcaccaagtccctcaccccagcactccaggcagcagccacacagcatcgggggaagctgggctgtgactcggctctggggtgggtgtcctgcctccactatcagactgggggttcacctgccctctctgggcaccgctctgtgcccctgcctgcactgccacccagggtccaggtaaggccccaaaggaggactttgctcttgttgccagtacagcagccagctcctgaggccagccgggtgggggctgggggctgagcggatgtgctgcagctcagctgtcccatcgccctcccaccttctcccacaggcaacatcctgcccgtgactgtgtatgaccagcacggcttccgcatcctcttccattttgcccgggacccactgccagggcgctccgacgtgctggtggtggtggtttccatgctgagcaccgccccccagcccatccgcaacatcgtgttccagtcagctgtccccaaggtgacaagccagtcggacagggcatgcctccctcctctcaaggcagggtgacatggagctgggtggggagccacctgtcagggggcaggtctccctcccttgctgggtggttggtgtagaagggaccagaaggactgagccccaggatccccggaggggagctggcaggctgggcctggttcctcagagcaggacaagcagccagggctagctgtgcccatcctgccatctgcccacaggttatgaaggtgaagctgcagccaccctcgggcacggagctgccagcttttaaccccatcgtccacccctcagcaatcacccaggtcctgctgcttgccaacccccagaaggtaaggggcccccaggcagtgctgcagggtggggacggccacttctcctcctctgacccctctgcctttgccatctcttccccaggagaaggttcgcctccgctacaagctcaccttcaccatgggtgaccagacctacaacgagatgggggatgtggaccagttccccccacctgaaacctggggtagcctctagaacagaggggctggggagaggaaggggcagagggaccggtcactgtccagcctggagggaggcattggtggccaaggacaccctttgttgcccatggccattcacccccaggcctggtgcttctccccacacccctgtaggcctcaagtgactcttccccctcctgctccggccccgcccctgctgagccaaacccagtaggaggctgggcctgggtttgtgccgctggggtctccatcaccgggacctggagagggaggggctgtgtagccttggaagaacttgggtcatggggaggaagcacagctgttggggaagggccaggacctcaggcccagccccaaccccagctggggtggggtcttccccacctgtctcttatgccttatgggaaggcccagccataactcgggggccatgctggagctggggaccagcttaggcctcctccataggaacccagtgactggggggtgacgcctacacccccagctatttgcactctggtgtgtggtttgactctgcttttcttccggattggccctgtggtcacagcctcagggggccaggctgggggaacctcacctggcccgtactcctgggggtttccctttgccattgggccccctgagggactgtgggggctcaagggtaatgccagaggcccatggccccagcgaggggctgtggggcacctagagttctcggtgtgtctccttcattcattggcctctgctggggcctcctatgggtgtcttacgtctgtccatccatctgtccgtggtcagaagtggggtcagtgtgtgagtgagagcaggagtatttatgaaaataaaacgtcgtttttcctggaccagctgctctcgtggccctttggaggttgagggagatgggaggggttgagtccatgttccctagggctgccctgtagacctctccacttccgtctttggaggtcaggccgtgggccccctccccaccaccccccgggccctgcaccggaaaaggccctgcaaaggggcctgtggccagtgctgagtcaccagagagggcgctgggctgtggcggaccaggaccgtcccagctggaagtgggcgaccgccagggcctggcaggagccccagctgctacagacaccgagggggaggcccctggctgctcacgacttcctcctgctgtgctcagccctccacacaacctcgatgctgcagcaccccagagggaagtccaagcccagcttctccctccccccagacatcactcccttgcccagcaccaatcgcagtttgtttgggagcagacccagggaccctgagctgggcccctgccactcgcagcggcagctctcccccacacagtgctatcagttttctccaaccaggaggctggggtccaagcttgggcgtggcttcgaggccacacagctgggagcgagggggcgctggtccaggcagatgggccctgttgtgtgggaggccagccctgcgtgtggctctgcaggaaagtgttccctgctcagatgagtccagggaggctgcgcacggtttctcctgagtagatgagcccatacagaccctgggaagtccctcatttaagaagccattttcactttgtctaatctagtgtttcccaatctgaacttggccgctgaacccttctccttagatatagttgtgacatgctggagaattgcccagcacacccgcatcccagcgtgtgtgctctttaacactcatcagcaagcaaggggcccctctctgctgggcccacactgaaagcgcaggctgagagctcctccatgtccgccttactgctgaggggacaagaggcattagctgcaccctgcgggagcctcctatcagatccctacagtgggactcccaccctggcacagccctccagacagaggctggcccctggaggcttccagacaccctgtcccagccacgtggcctcgttcctgttccccttccctaccctgcaggactcgcctccacacttgtgatgtctcctgaagataactccggttggaagtttcttctacctgaaatgaaaccataacccctgcagcatccacttggggtgccagagtcccacctccagcacagtcttcattactggccatggcagggaggagtacaggttggcatggggaacaggtgggactgtgagctgggagtctgggggctggttctggctgggtcactggcttgctgtgtgattttgaggaagatgctttcctttctggaaaaggggagagggactcaatgagctataaggtccctctgaggagtccttggacaaaggagccaggctgtcagctttggagtgacccaggatattccggggacgggaaggtggggtcccttcagcctttggaccttgtcccttgccttgtccttaacccacccatcctgtcagtcatgccagtgtttcctgagcagcccctgggccagcccctgtcctaagagttcacaagctggcaaggacttgggagccagtgtggcaccctgagagcaaagacataaggtaccacagaagccctgcatctgtctgagagtctggggtgggttctaaccagaggaaaggaccctgggcctccactccctggaggagtccttccccaaataccgtgttgctgcacagaggtccgggccactgcgctctgcagtctcaggggctgggatgcagtgcactggggaggcgtgtgctctgtctcttgaagggtgacccccagtgccatgccaagaccagtgggacttcccagatctcgaagccccacttccatttctgttgatttggccgaggcaccagttaattttggttttcagcaaccgcatcacactgttcgtctgtttatggcagccaggagaagtggcaagggcctgggagcctgctcctgcctagtcggttttttgttgttgttgtttttacggagtttcgctcttgttgcccaggctggagtgcaatggcacgatctcggctcaccgcaacctctgcctcccgagttcaagcgattctcctgcctcggcctcccgagtagctgggattacaggcctgcgccaccacatcctgctaagtttgtatttttagtagagacggggtttctccatgttggtcaggctaactcccacctaaggtgatccacctgccttggcctcccaaagtgctgagattacaggcgtgagccaccacacccggcccccagtcagttttttggtttttttgtttgtttgtttgaggtaaggtctctcacccaggctggagggcagtgttgtaaacacagctccctgcagccctgacctcctcggcgcaggcaatcctaccctcttagcctcctgagcagctgggaccacaggcgcgtgccaccatgcccggctaatatttttattttttgtatagagtttcgccaggttgcccaggctggtctggaactcctgagctcaagcgatccacctgcctcagcctcccaaagtgttgtggtgagctactgtgcctggtctgcctggtctctcgacataccccctcccccagtctctctgggccttgcaaccagggcaccagcccagcaaggcaggcaagaggagcccccggacctgatgcctatagcctcccatcttaagcctctgaaatgccctgtgaaatgggaagtgaggctcagagaagtcacacattatgggctgagtctgggccagcagtcttgaggtgtctaccaggatggcacattgccccatacctcccaagtcctccccccagcctctgtcgggctgtcctctggggctgggctcagggtacacactcctccagggctatcaggattaaaatggagttctcagccttagggccaccccaggatttcctggaaagtcctttgggcttggggagggaggtgagggagtttttagagccccagagatctcactatgcccctagctgctctgggtggaagtccacacagagggcagcaccgagggatactacaaacaggcaatttgtcaaagtgtctaaaatgggatgtttctgctcctgcagcccctgcttccgacccccgttaccaccaccactcagctgctgacctccctgcccacatcctgctcaagccttactagcacatgctacccagactgtcccaggctttcacagacaaatctgcacagaggctgccaggccctcaaagcaaccacaggggttaaggcagagccaagggccagcatttctggagctcccaggcaaggctgtctgggtctggcacagcaggagagcccacgtgggcttaggagactgtcagatctgtttcctaacttggcctctaccacttttccagctggggaccttaggccaggggccttgggctattcacctgtaaaatggggacagtgataccaccctcactggaggatatgctatagcacaacaaaaagtcccattgtcctaaggcagctagacacacacaggggtcgttggggcaggaatgggggtaaggggtctttccattcctgacttggcaagctgaataatgatggtaacaagaaacaacgcaaggcactttataagcatcttgcatctattaattcacctaacgcttctgtgaggtaggtactattatttccaatttactgaggaggatgctgaggttcagagacgtgaagtgtcccacttaaggttacccagctaatgacagccacagcctggccagctagcctcctccacacccttaagctctctctgttcctgctgcctgagccactgtgacaggcacactgccgggtcccagaggctttagcaggagccagctaagaccagcctggtagagaatgacccaagccaacaggcccctggattggggaagggccccacgaggggttggctggggagctctgaggtaccccttctgtgtctgcagtttagaaaggccatgatcccaacacccactgatcaaaacttctgagtccgtaagtctctgattacaattccttctaaggaacagcctataaccctaacccaacctttggggagtccatccttctatgattcaacatccaggtgtgacaagggagggcctaaaatctacccatcacccagctaggaggcacagcagccccacccgaatccgactcaaaggcccagggtgtctctcctgcccaggacccttaggtctggctggaggggagtctggagaccagggcaggagcgcggggcaagagctcagttagactgataatatggctcaggtagtttccaccacagctgcggctacaacccacgtgtactgacccctcaccaggccggagctggggctcaggactgggcaaatctaggagagacagaggtgtaagccaaaccttgccttcaaggactttcagaccagctacagaaccagacaagcccaggcccggtgtggtctgggctggaggcttggctggaacagagcaggggcaccacatagtccagagacttcccgagggacaggaaggatggcacctgaggttcccttgccatgccacccatagtcactggccagcagccttcctgttgggaaaagggagatgggggagggaaccttgcctgacatctcatcctggcctgagctttgatcttggagcctcccaacttcccaccaggattccacactcaggtgggctcccatctgggaggctctggccatagcaggcagctgttgggttcccttctcagctcctcccacccccaatgagtcctgcctcattagggaggagagaagcagccagtgagtgtgccaggccctgggctaggtgctgggagtatggagatgtgtggggccaaggtcctgcctctgagaggcgcccagtctgcaccggcacacagtctgcaccggcacacagtagtggctcaaatagtctcaaactaaactgaaactaacaaagcaaagtgcagagggtgtggcaggactctggggcacaccctcccctcttccccacgcctgcggctcctgatgccacaggggtgcagggtaaggagagcctactgtttcctaaaggcgctcacatcttgtaaaaccagcagttatggagcacttactgtatgcctaactctgtgttgagtggagggccaaagaggagaactactgagtttgggggcagtcagagcagcacctacatcattgccctacaagaaggaagggggactgaggctgtttgccaggaggaatgagaggagacgggcttcacagatggagcaaactgccaggagatgtggagaacagggtgtcgcgaaccgctctgggagggttcctggtggctgaggggtggcacgcacctcccttaaagggagctggcaggggtgtcttgtccactctgcagaatgggcaggcccaggacagctggcccatcagaccattagaaacagcgagtccggagttccaggggcttgtccacggccacacagcagcccgtggccccaggaagccaaagctcccagccagtcatccagtggtggggggtttagttccagggggccagaggtcctctgcggaagagagtgcaaggcagtatccgcggcaggcccagagaggccaggacaggtcagaaaggcctacccctctttcgcttggtaccctttcctctttgcgagggatgcaaaggttatttatacttcgggtctgcaggctgcgggtggggcaggcaccccgcctggggcgggttgcgggcgcaggggcaggaatgggcttacctgcttcccgccaccggggctgggcggggcgctgcggggaggaggagccgggcacaacctgtggacggccgcggccggcggacacacagcagcgggggcccggccgggggtcgcccgggggcccggaagccggggaagagcgaggaaaccaacttggagagaggagtgacctgggggccgggggcggagtcgtgagcgggggaggagagagccggccgccagcaagagccgcgcggcggcccaggaagcgagagcgccgcccacccatccggggcaagagccgcgccgcaggagaggcaggctggaccgggggctccccgggcccgcgacccccgccgtgaccccgcagcccccagctcgcccccaagatgatgaagaggcagctgcaccgcatgcggcagctggcccagacgggcagcttgggacggtgagtgtcacccgcttccagccccactcttaccccggcaggacttgaggggtcgtaaaagggtcgggggagacgggggtgggggaggctggggacagctgggcagccaccctctgagcggccagactcctgctctctcttcctcctctctgaacgccgcccccgtctctcgggcagagctggaggagcaagggtggcctttgggggaagggatgcccccccttaccggattggagggggcttcaggcgggagaatgctctctgccctaggacgctgggacttctctgcctccacgagtctctaagtggatggtcctcctgacctcacttgtcccctctggacaatgggacagttcaccacctctgcttgctgggccggggagggaggagggtcgattagggccacagacctggggcgaggggaggagatgggtcctggcctggtgggaggaggggcctgcccctggcctgcagcgtccctccccctccccctccccccagcccaggggcctcctgcttctgtctcgtttctgcttttcctggactcaggtggaaatatccccaggtctcccagctcccacccccagcctctgagccggtggcacggaggccggaagtttggggagcctctcagagcctgtcttctctgctcctcttcccccagcctcaggagttccccattctctgggtccagggaggggactgggtgtccagagacctggttctagtctcacactggcacagatgcctacatagcctggacagtcagaccaccttgcagtgggccttggcatcccccatgtgtccccaggtgggggccaagggcctgtgcacccctgcccacagctgtagtccagagtgctgtgtgactgtgcctaggagtctgagctcctgcacttcccgttcttggggccagctaatactcctcatcccggggtgggctgaggatttgggagtgggcagaaaagaggcttctgtgtcccaaagctgggccccgggtgggtctctcagcctcccctttagtttcatctgtccgccctctctcaggacacagccctgggtggaggaggaaaaacccatgtatcctattcccacccccatggaatgtgctccgactgggatgaagcaactgggccacccagggcaggcctcagctgggagggacagtggaagcactggggtccaggtgccctgctgcggggaagggaagtagggggcgttctaacccaggcaggctcagcagaagcactctcccccccccccccaccactccccgcagcaccccggagaccgctgagttcctgggtgaggacctgctgcaggtacgtgcctgggccgggcaggtgggaaggcaggcctgtgcaggctgtctcggagcagagggccggggcggggacgccaggtaggggcctgggttgagtcattcctcaagctgttggccatggggtccccaggggacaggagaaagtttcctgctcagggggagacagcctctcttgatccttaacctccatacctccttcccaggtagaacagcggctggagccggccaagcgggcagcccacaacatccacaagcggctgcaggcctgtctgcagggccagagcggggcagacatggacaagcgggtggtgagtggggggtcccgggaaggaggggcctgagcaggagacttccatccaatggggaagcaaggtcggggctggggtttccttgccagtctgagtgtctggcaccaagggcatggagactgctctgttccaaggcccctctggcactgcactcaagaggccctataccttccccatcacctttaccccacttccctgtgcaccagttcccataagccaaggccaggcttctgacagcacctgaacttctctgtccaatcagtgcgcaagagcaggctgtcaatggggcggcctcagagggtttcctgaaggaggtagcaattgagctggcttttgagggatacacgtttattaatcaagaggcagcgtttattggctgataaccgccagcttgttactaacatatgagtgcactgtctcatggaacactggcacaaccctaggggcaggcattgctttacacatgaggaactggaggctcagagataaagtcacttgtccaaggtcacatagctagtaagtggcagaactgaggtttgaaccctggtctctgatcccagagcaggcattccccgtaactccagatggggtgggagtgtggggccatgttttggaatcagttgacaattcagtgtggccaaggcaaggaaattgggagccatagagcgtttgaactcagcggtggctaggtcagccatatataccctgggacaggggaaagagctcccgctcccattctccctccacctgtgtgacctggggcaagctccctgccctccctgcatcttagtttcccagtctgcagtaggacttggtcattccttcctgcccagtcaagtggcttctgggaagaggaaagggcacgccagatggagaggggctccatccatgctctcagggaaatgtcacccccaccacgccttgtcatcttgtttccactctcatctgggactgtggccctcctgggttccctcctcccctgccccaaggggctggcctggtgctcaggcagggtggagggaggcacggacactcatcgccggccccaccctccctgcagaagaagcttcccctcatggctctgtccaccacgatggctgagagcttcaaggagctggaccctgattccagcatggggtgagcacagacggggcccagccctcacctggggataccaagacgtgatctcagctgggagggggtccaggtggtgagggcatccacatcagaagaatgaccaggctggggacagttcccaggtcagtgagggtggccaggcctgggagggtgttcagcttagcagagatgaaggatatctaggaggggccggaagtgagggaggagaggccccaccaagtgtttccagtggaggtgagggcagcgggcgcctggacccatggggtgccgtgtccacaggaaggccttggagatgagctgtgccatccagaatcagctggcccgcatcctggccgagtttgagatgaccctggagagggacgtcctgcagccactcagcaggctgagtgaggtgagcctgtgccctgctttcagcccccagcttccccagcttctggctccctcctcccccagcacactgacccccccatgcccatccccaggaggagctgccagccatcctcaaacacaagaaaagcctccagaagctcgtgtccgactggaacacactcaagagcaggtgggagccccagccgctcagggggctcatatctgggtcagcccacagagatggtcatagagctttgaggccctggccacaccaggaggatgctgtggggtctgctgagtacagtgtgtgtacttgtgcacgcctggtccctaggagcacaggtggttagcgtatctgtgagggtgtgcccgcgtgtgtcacagctggtgctggggcaaccctaaagcctgggatcctgtaaacagtcctgcggcagccctgttctcccctctgtggagtggctgtgatcaccaaatctgccaccagggggcaacccagagcactcatggcccagcctgggcagaggccccggccagtggagctctcagatctgcagctctaaatcctagaatcccatgtggtctgctgtatggaggggacacttggctctggacatgcaacagggcaggtgaccagctcaccttgggatcatctccaggctcagtcaggcaaccaagaattcaggcagcagtcaaggcctaggaggcagcccgggtagtcacagccatacgaccatggccaacaaggtggagacgctgaaggaggaggaggaggagctgaagaggaaagtggagcaatgcagggtgagggccatgggggtcccctggatatgtaggggtggcaggggtgggtcctggcccatctcacaggcaaggaagctgaagttcagagaggtgacatgacttgcctaaggccacgtggctaggagccagcagagctccgccattccctcgtagcctcttctgtctgtaccccatgcataacttgggaaggcagagacttggtctgttccctgagtctccatgtgtttgtttgctgagcgagcgagtgaatgaataaatgaagagtgaatgaaagaatgactgaatggtgaataacaggtcactgtgcaaggccaggcgcggtggcttacgcctgtaatcccagcacttggggaggccgaggcaggcgaatcatgaggtcaggagttcaagaccagcctggccaacatggtgaaaccctgtctctactaaaaatacaaaaacttagctgggcgtagtggcgggcgcctgtaatcccagctactcaggaggctgaggcaggagaatcgcttgagcccaggaggcggaggttgcagtgagccaagattgcaccactgcactccagcccgggcaacagtgtgagactccgtctcaaacgaaacaaaacaaaaaacaaggcactgtgctaagtctatggagacacagagatggggacgagaagccagaaaagtttgagggagttcccaggggctggccccaagcaccaaccttggcagagagaggagcctggctgggaccttccacctgcagttgtgtggcctgggggaggtcaccaacccttccaagcctcctcttcccctctagaccccacagcctcacccaacgtaagctctcccctctctgtccccaaggacgagtacttggctgacctgtaccactttgttaccaaggaggactcctatgccaactacttcattcgtgtgagtccaagaccgggccccagccatccagagttcaggggctgaatgccagagccaggggccactggggctctaagatggtggagggggcgtctgctctcaaggaccctatagaaggctcagcttcccccacttccgctcagggtgtcccttcatccccacagctcctggagattcaggccgattaccatcgcaggtcactgagctcgctggacacagccctggctgagctgagggagaaccacggccaagcaggtggggacataggcccggcgataccacacccctgaccctgccctgctcggggcttattgagaagctcgcacttcatcctgaaaggtagcaggaagctgtggatgggttctgagagctaggctcaatctgtgatggagaggcagctctggctactgtgtggagggtggagtgaagcgggcaggactagagccaggcctgtgaggcagaaggaggcaacggtggcctggactaggacagaggcagtggaggcgggctgattcgagagatgtgacggatgatttcagatgtgtgcctggacagtcagtggcaggtggtaccaccttgaggacatgaagggggggtgcccctgcctgactgctcggggtgggaaggccctgggccgctgatctgtttcatccctgcagaccactccccttcgatgacagccacccacttccccagggtgtatggggtgtcgctggcaacccacctgcaagagctgggccgggagattgccctgcccatcgaggcctgcgtcatgatgctgctttctgagggcatgaaggaagaggtggggtcccctggggcaggtggggaaggagcactggggccctcattctgtcccaaaccgcccacttgctgccctttccgggtgcctgtaattccctcattcgagcccagctccctgggagaagacatgactgcctcctgcggcatccacactacctcccccgtgtcaatgctcgcgtgggccaagcgctgtactagaagcctttgcattccaggctccatttcacaatttcacaagagggagacagaggtagagaggtaaccatgcccagagtcatttgagaaggtgacttctcaaaccaggggctccactgccacacactggctggatctgctgtgaatacattgcccccctgtcctgaagatagaccctagtggtggcagataccccaaaacagttctgcgctgctcagcaatcctgctgtgctggggcctcctttctcccttacacttttttttttttttttttttttgagatatggagtgttgctctgttacccaggctggagtgcagtggcgtgatctcggctcactgcagcctctgtctcctgggttcaagcgattctcctgcctcaacttcacaagtagctgggactacaggcatgcaccaccacgcccagctaatttttgtattttttagtagagatgagattatgttggccaggctagtcctgaactcctaacctcaggtgatccacctgcctcagcctcccaaagtgctggggttgcaggcatgagccactgcgcccgaccctttttttttttttgagacaggatctcgctctgtcacccaggctgtagtgcagtggtgcgatcctggctcactgcaaccttcacctccctggttcaagcgattgtgtctcagcctcccaagtagctgggattacagatgcccaccaccatgcccagctaattttttttattttagtagaaatgggatttcaccatgttggccaggctggtctcaaacccctggcttcaagtgatccacctgcacaggcctcccaaagtgctgggattacaggcgtgagccactgcacccggcccctcccttccacttctgactgggcttccatttccccatgatttttcccgcctcctcccagacttcccagccctgccctttgctcagaattctagaccttgaaggttgaagcccgtggacaccgtggtgcccacactgccagccagaccagcggggacacaggcctagcaaaggccagtggcacaccccaggctacaagtgcgccagggtgtcctgccctgcccacccctctgtgacccttgcctgcctcctctcgaacccagggtctcttccgtctggctgctggggcctcggtgctgaagcgtctcaagcagacaatggcctcggacccccacagcctggaggagttctgctccgacccgcacgctgtggcaggtgcctgatccggggagccctgggcaggaggttgggggggagggggtgcagtggcttgaaacgatcccaagatagcctggctttaagacttgatattctgttgagactgaggacactcgggttcttaatgtggggtccatcatgagccccccgaaaatgtttggcatttttctggggacaagatggctagccttcattttctcaaaagggcctacagcccaaagaaactgtcagacctagacacgttagtgtgaacaagggccggaggttccttctacagggagagtgggagagcgggtgggggctgcctctgaccctccccacacccctccttcaggtgccctcaagtcctatctgcgggagctgccagagcctctgatgaccttcgacctctatgatgactggatgagggcagccaggtgaggatgttggaggagggaggggatggggaggaggaggatgcaaaggtgtagccctgcgctggctgacaggtctctccactcccccccagcctgaaggagccaggggcccggctgcaggccctccaagaggtgtgcagccgcctaccccccgagaacctcagcaacctcaggtgagcccgagcccgcctccccagcctgccgcagagccagagcccagctgaggtcacggaccctgggaccctgggcttgagcctggccttgccactgtatcctaagaaatattactgaaaatgcagctttgatggattagtcatttatatatataattttttttttttttctgagacagggtctcactctgtcgcccaagctggagtgcagtggtgcagtcttggctcactgcaacctccgcctcctgggttcaagcagttctcctgcctcagcctcccgagtagctaggactacaggcgcctgccatcacactcggctaatttttgtatttttagtaaaggtggggttttaccatgttggtcaggctggtcttgaactcctgacctcaggtgatccacccgcctcagcctcccaaagtgctgggattacaggcgtgaggcactgcgcccagccggattagtcacacatttttatgcgaagcattgaaataaatgagaccttgaacttttgaagccataccgcctggcttcacatgccacctctgggcaggccactcagcgtcatcatctggaaaatgcagactgtaacaatctctaccctgtagggtggctgctgaggactcagcttggctcagtgcccactgcagggttggcactcagtggataagctgatttaactgtgacaatgttaagaccattctgggcggtgtctttcacactctttggaaaccctgggctggagaattctcagggctgggtgcgttctgcccctggcctaagcctgcctccgcccttaggtacctgatgaagttcctggcacggctggccgaggagcaggaggtgaacaagatgacacccagcaacatcgccatagtcctgggacccaacttgctgtggccacctgagaaagaagggtgaggggccgcgggctgggggaggtggcaggaggaaggcagatcccatcccaactatctgttgtctatttttccccggggccttggtgtccccatttttggagtgggttgagcagctcctgtttttgaggctgccgtgaggaacaggccaaaggggctgtgcaggccacagggctttggagagaggcaattctggcattttggccagtggtggtgatgaggtgtttagtggcatgggggagctgggagcccagagatcgggttcttttttttttttttttttttgagatggagtcttgctcttgttgcccaggctggagtacagtggcgcaatctcggctcactgcaacctccgcctcccgggttcaagcgattcttctgcctcagcctgccaggtagctgggactacaggtgcgcaccaccactcccggctaattttttgtatttttagtagagacagggtttcaccgtgttagccagggtggtctcgatctcctcagctcgtgatccaccagcctcggcctcccaaagtgctgggattacaggtgtgagccatcgcgccccaggtgtgagctgccgcgcctggctcgatcaggttctactaatagctccacccctccaccttccagagatgggcctgaggaagacaccctcagaacctcgatttcctcatctgtaaattggggagaaatcatacaaactttgagggcttttgctttggggagtgagtgatatgatgaattggaaaatgttttagaaactgtgaagtgcaagccaggtccagtgtcatgcctgtaatcctagcactttgggaggccaaggtgggaagatcacttgaactcaggagtttgaaaccagcctgggcaacttaatgagaccctgtctctacaaaaaattaaaaagattagccaggcatggtgcacacctgaagtctcagctactcagaaggctgagatgggaggactgcttgggcccagggagtcaaggctgcagtgagccatgatggagccactgcattccagcctgtgtgacacaatgagaccctgtctctaaaaatgaagaaataggccgggggcagcggctcacagctgtaatcccagcactttgggaggccgaggtgggtggatcacctgaggtcgggagttcgagaccagcctggccaacatggtgaaactccgtctctactaaaaatacaaaaattatctgggcgtggtggtacgcgcctgtaatcccagctactcgggaggctgaggcaggagaatctcttgaacctgggaggtggaggatgcggtgagccaagatcgggccactgcaccccagcctgggtgagagagcaagactctgtctcaaaaaaaaagaagaaataataaaattaaagtgtaaagtgcagtgctatgtgaggagtcatcattatttacctggccacagatggcaagatttcctcccacgtgctgattgcatttgcttggtagaggctgtccagatcacaactatgaggaaaagggtccttgattaattagtgatgtctgtcagggtgaaggaagggggacatttggcatgtgagtgacacatttaccatcaactggtggtttgtgggctttttgagaacaaggactcaatatgatggatccttgtgtctccattgcccagcacagagccagccagagagttggggtcacaaaccctttgctgagcagatgcatctctttgtcccagggaccaggcccagctggatgcagcctccgtgtcttccatccaggtggtgggcgtcgtcgaggcgctgatccagagcgcagacaccctcttccctggaggtgaagctcctgcctgcatggacgccctgctgggtgccctccttctgccctgctccctcccctgtagccccacaaactcaccataagtccaggaggaagtctgagcctcagtttctcatttttacaacggggatggtctgcctgctttgtggggtggtggtgaggctcacacgggagtggggaagctgaacatggtccagatgggttcaggggaaggggaaacggtcccggccagtggagtgaggagcctggcgcggtctctgagagccgtctccgctccttctgtctccagacatcaacttcaacgtgtcaggcctcttctcagctgttaccctccaggacacagtcagtgacaggctggcctctgaggaacttccgtccactgccgtgcccaccccagccaccaccccggctccggctccggctccagctccagctccggccccagccttggcttcagcagctaccaaggaaaggtgaggactgaggggcttgaatggctcctgtggtactcccacaatcagcctgcctgaggcgccatgtctcagagctggaagctgaatttttggaaatgtaattattagtgttttcatcccaaagaccggatctcctagtttggagagggtggggcagagactcagaggcggaatttgtctcagccactgatgtgtgccctattcatcatgtagcaatttcctgagcacctactatatgccaggctttgtttccagtcctagggaactcaagagatgatcattttggaatctataaataccttccagttttgttttgttttttttttaagacagagtctcactctgtcgcccaggccagagtgcagtggcacaatcttggctcactgcaacctgtgcctcccaggttcaactgagtctcatgcctcagcctcccgagtaactgggattacaggtgagtgccaccacacctgtctaatttttgtattttaagtagagatggggtttcgccatgttggccaggctggtcttgaactcctggcctcaaatgatccacccaccttggcccctgaaagtgctgggattacaagtgtaagccactgcacccagcctcttttttttttttttttctgagatggagttcactctgttgcttaggctggagtgcaatggcgagatcttggctcacttgcagcctcccgggttcaagcaattctcctgccttagcctcccgaatagctgtgacttcaggcgtgcaccaccatagccggctaatttttgtattttcagtagagacagggttaccccatgttggccaggctggttttgaactcctggcctcaagcgatccgcctgcctcagtcccccaaagtgctgggattacaggcatgagccacagtgcttggccaccgtcttctctttgatcgtttaaatctggaagggcttcgtggtaccgtggtgcctccataccaagcagctactattcaggataccacagagcactgcggctcacaccttgaatttcctgatgagcaagacaaatgctcacatttcagggcacagggagagagagagacagcatcaagcacagccaccagtgcgttctctctatagtgtcaggtggagaggcgctgctaagggagggggagcaggttaagggggagcgtgggggctactttagctgtggggccaggaaagacctcgctaaggaagaaacgaccaagcagagacccgaaggcagtgaggaatgagcctaggaccccctctgcttctcacccactctctggcttccagtggccaaagcatctcataaagatcacgtggcccggcacggtggctcacgcctgtaatcccagcactttgggaggccgaggcaggcgagatcgagaccatcctggctaacacggtgaaaccccgtctctactaaaaatacaaaaaattagctgggcatgttggtgggcgcctgtagtcccagctactcgggaggctgaggcaggagaatggtgtgaacccaggaggcagagcttgcagtgagccaagattgcgccactgcactccaacctgggcaacagagcgagactccgtctcaaaaaaaaaaaaaaaaagatcacttggaggcagattgggcaacatagcaaggctgtgtctctacaaaaaataaatgaggtcggtgtggtggtgcacacctgtggtcccagctacccagaaggctgtggtgggaggatttcttgaccctaggaggtcgaggctgcagtgagcaatgattgtgccattgcactcagcctgggcaacagagtgagatcctttctcaaaaagaaatggccaggtgtggtggctcacgcctgtaatcccagcactttgggaagccaaggcaggtagatcacgtcaggtctggagtttgagaccagcctggcaaacatggtgaaatcccatctctactaaaaatgcaaaaaattagccaggcatggtagtgcgcacctgtaatcccagctactcgggaggctgaggcaggagaatggcttgaaccggggaggcagaggttgcagtgagccaagatcgtgccattgcactccagcctgagcaacaagagtgaaactccatctcaaaaaaaaaaaaaaaaagaaaaagaaatggccgggtgtggtggctcacacctgtaatcccagcactttgggaggctgaagcaggtggatcacttgaagtcaggagtttgagaccagcctggccaacatggtgaaaccccatctctactaaaaatgcaaaaaattagcagggcatggtggcgcacgcctgtaatctcagctactcaggagaccaagacaggagaatcccatgaacccaggaggcggaggtcacagtgagccaagatcatgccatcgcactccagcctgagcgacagagcgagacttctcaacaacaataacaaaaaaaaacaagcctaggtggcgcacacttgtaatcccagcactttgggaggccgaggtgggcagaagatcgcttgagaccaggagttcaagaacaacatgacaaaaccccgtctctactacaaaaaaacaacaacaaaaaaatctgggcatggtggtgtgtgcctataatcccagctactccagaggctgaggcaggataattgcttgaactttggaggtggaggctgcagtgagccaagatcgcaccactgcactccagcctgggcgacagagtgagactccatctcaagaaaaaaaaccacatggaggccctgagctgaggcagaggtcaggccctatgtcccacctcccatcctggccctacctaccaggcaggtggggctccctcctggtccctagaggaacatggactctgtcacagggtcacaaagcagccaggggctcagtggatgcagaccccaaccaatgccagaagcatcttctgggaggggtgcgtggcatggggacagagtgatagagagcgagtgctgggaggatccggactccacctggcagctggagactcctcaggattccatgagacttctgggaggtggctaagtctgccccatcctctccttccctctgcaggacagagtctgaggtgcctcccagaccagcctcccccaaggtcaccaggagtcccccggagacagctgccccagtggaggacatggctcggaggagtgagttggctgtgggaggggaggaggggacagagggtgggcggggagaggggacaggcagtcccaggtcctcctatctttttaggcagccaggggaggccaggagtcaaggtgataaagagcccaggtcttgccacctggcactctgggtttagatttgaccttgggcaggtgagttcacctgtctgagcctcaccttcctcctctgtgtaatgggacagtgtctgcacttaccttatggggctgcatggagcctgcagtggtgctgcaggaagagtgcctggccctggcacacagcacgtgcccactaagggggagccggcgtgagtactggggtactggagtcccgtccctccagaagcccagaggtcacagactacagtggaaggagggagtcttcaaagggcagtgaaggggctgggcacagtggctcacacatgtaaacccagcactttgggaggctgaggcgggtggatcacttgaggccaggagttcaagaccagcctggccaacatggtgaaacctcacctctactaaaaatacaaaaattagctgggcatggttgcgggtgcctatcatcccagatacttaggaggctgaggcaggagaatcacttgaacccgggaggcagaagctgcagtgagcaaagatcacgccactgcactccagcctgggtgacaagaatgagactctgtctcaaaaaaaaaaaaagaaaaaaggcagtggcagtgaaggagaggaggtggcaggggtgggaagaaaccaggggcctccttctgagcccctctggcacactcacctgtcagtttggcccagagctgaccaggtgagagagtgactgacactcagtggaggcaatgagcagtggacagccaggaataggcggaacagctctgggagcctcgtgaccagggctggtaggtagtctacagtaaaataaaaatgaacaagataggccggggacagtggcttacacctgtcatcccagcactttgagagaccgaggcaggaggctagcttgagccctggagttcaagaccagcctggacaacacagcgagaccctgtctcaaaatttaagaacttttaaaaattcaaaataaatgggcaagataatttcagagaacaaaaagtcctgcgaagaaaatacatctggaaaatgtgacggagcagctggggtggggcatggggtgggactctaactagggtgctcggggagggcctccaagggggcaaagggcacaaggagaggcctagacgatgaggagccagccgcagaaacggtgttcccggcagagggaacagcagatgcaaaggttgtgagggggcacggagcttggtggattcaccacaggccacgtggacactcagcctccctcaccctttccttcctcaacagccaagcgcccggcgccagcccggcccaccatgccgcccccccaggtctccggctcccgctcctcccctccagccccgcccttgccccctggctctggcagccctgggaccccccaagccctgccccgacgtctggttggcagcagcctccgagcccccacagtgccacccccgttaccccccacaccccctcagcctgcccggcgccaaagccggcgttcaccagcctcccccagcccggcctccccaggtccagcctcccccagcccagtctctttgagtaaccctgcacaggtggacctgggggctgccacagcagagggaggagcccctgaggctatcagtggggtccccactcccccagctatcccccctcagccccgccccaggagccttgcctcagagaccaactgagtggctggtttctccctaagcagccctcagcaccccctccctccccacctggccctcccaggacagctctcgccccccacaaaggggcatgggcctccagcctttgcccacaagtgcctcagtgcccactgggtcggcccccatggccaggagggctcaggacaatcctctatttcctgaccttttcctcgtccaccctgggcttggggacccccccaccggactctccactctccggcaggtcctaggggagccaccggaaggaaggagaggtttgcctgctcctacgggactgattcttctcttgccgacatgttttttgtaaggctggtaaataaattattttggacaaaactggagcagctgcccaaatgatagttttattttctgtccttgaaataaagaagccaattttataaaggggaaaacaatacatattctttgcctcctttcttcctgtctgaagtgagatcacagcagacatttttagagctttctctgcactacatgctgtgctgttctgtggatgatttccacttaatcttctcctactgcaggaaataccattacctcttagcagtgaggagactgaggcccagacagaagtgacctgccaaggtcacacggcagtcaggcaggggcctgggattagagcctaggtctgactccaaagcctggcttgtccctcacattctgggcaatttacttaacttcttggtatcccttttcctcatttgtgaaactttataacaattccctccacagaggtattgctctccattgaaaaccaaagcaccacccttggcccacagaagcccctaccgctcccactgtttcctggacccctcactctccttccgggaggaggctgggaagcctccccaaggagcagggatggatctgtcctcaaaccttccctaaatctgctctgtgccaggccctgagctagctccaagacttaaccctacacccaaagagttcccaaacagacaggcagaagcaaccattagaatcaagtgtctggccaggcacggtgtctcatgcctataatcccagcactgggagcctgaggcaggaggatcacttgagcccaggagttctagaccagcctggacaacatagtgagaccctgtctctacaaaaaaaaaaattttaattaactgggtgtagtggcgtgtgcctgtagtctcagcaactaggaaggctgaggcaggaggatcgcttgagcccaggagttggaggcttcagtgagcagtgatcatgccactgcactccagcctgggtgacggtgtaagaccctgtctcaaaaacaaaaaaaatcaagtgtcattgcactgggagcccatattagccaagttaggggtggccatataacctagactcatggtatggggtgggtggttaagaacggcttcctggagaaggtgatatttaagggaagtctttcaggagctgacctgaaggtgaattttgtttatttttatttattttatttattttttattttttgtttatttttttttgagatggagtctcgctctgttgcccaggctggagtgcattggcacgatctcaggtcgctgcaagctccgcctcctgggttcaagcaattctcctgcctcagcctcccgagtagctgggactacaggcacccgccaccacgcctagctaatttttttctttttttttttttttttttttgtatttttagtagagacggggtttcaccgtagccaggatggtctcgatctcctgacctcgtgatccgcccacctcagcctcccaaagtgctgggattacaggcgtgagccaccgagcccggccctgaaggtgaaatttttaaaggaaaaaggaacattcaggccaaggagactatctatgcaaaggccaggagcaaaaggcttagggcacttggggaataggagctagttgagcttccaaggttgggtacaaggtacagtttttcccaagtcgttggagctccagttgctcctgggggtcacagccttatctgaagttggcagacaacttcaaaactgtgacaccacagctcacaattcattcatccccacactgcagaccagtggctcctcaaaggtcccaagacctgtggttgcttccagatcacaaggcctcctccctaagacagggacccagccaacctgggtcaccccattactattctgggcaattggccacgaccattctggatcctgccctcccggggcgtgctgcagtgacagcctaccagcctctagcccagtgcttccctaccctatcctagctcacggtagaatccctggaattaaaccaactaaccaacaaaccaaaaaatgcccagtcttcacccaaaacacttacatgaggatctgtcctgctacacatcggtgatttcaaaagcatttgtcaagacattgaactgtacatttaagatctatgcattttactatatgtaaatgatatctgaaaataagttcccaggggactctaacgcagtgtgaagaactactggtctagaccgagggctccagcacccaagaagacaccatgtgcctcgtaccccatcgtacacacacgtttcttgggacttcgctctgaactggagcgtccacgattcagggggcaatgagattcgacccaaaggcagttcatttaacatctgtttttctcccagcaaccagctcgcctaagcttctgattggctggagggcacggggcctttcgcttcgcgttttgtttgtagattcttattggttaagaagagcgtcagtctcccaccgcgtaagagtgtagtcggcgttgaaactcggcggcgactggtccagcagaaccagggacggggagaaggatcaagctagctcttcattggtcccttcccctcggtgttggccacgaatccgcccctctctccaagttccgttagctcgcggcttcgctcctctcccagactctcgcccccattggctgcaggccacgccgtcgccccgccccccggtccttccagcgcgccaattggcggctgcgtggaacgtgccagggagagcgcgccgtgcccgcggagagagcgcggcgcgggaggccggcggccggccggctgcatggcgcgctgcgagaggctgcgcggagcggccctgcgcgacgtgctgggccgggcgcagggggtcctgttcgactgtgacggggtgctgtggaacggcgagcgcgccgtgccgggcgccccggagctgctggagcggctggcgcgggccggcaaggcggctctgtttgtgagcaacaacagccggcgcgcgcggcccgagctggccctgcgcttcgcgcgcctcggcttcggggggctgcgcgccgagcagctcttcagctccgcgctgtgcgccgcgcgcctgctgcgccagcgcctgcccgggcctccggacgcgccgggcgccgtgttcgtgctgggcggcgaggggctgcgcgccgagctgcgcgccgcggggctgcgcctggccggggacccgagcgcgggggacggcgcggccccgcgcgtgcgcgccgtgcttgtgggctacgacgagcacttctccttcgccaagctgagggaggcgtgcgcgcacctgcgcgaccccgagtgcctactcgtggccaccgaccgtgacccatggcacccgctgagcgacggcagccggacccctggtgagcgcgggaatggcggggaaactgagatgggggcgacctgcgcattcgcctccacgcctaagggtgaggggcggggaagaggcgtctccaggtggcaggtggggaacaggagagtgcgagggaggcccagggtgctttggtgtggggggcggttgatccctgtagccgtcatcctgtgaggcgcagcagtgtggtccctgttggacagatgaggaaactgaggccctttgtaacttagggagttgggcggaattctgccctacccaccatcggggtggggttggagaggaagcctgggaggattgtccccctgtgtgagggttgaaacaccattcccagaggcagggtgtaggcaggtgtgtggggagcaaaggcggtggagtttgacctcagttccaggtccagctccagcttcacagctgtgtaatcgtgttcagttacataacctccaagcatctctgcctgggtgagaaatggcagtgctcagcatgcccggtgacggtgatcagggtgagtgcctggcacatagtaggtgttcagatgatgtaagttgtagccagagtcccccatgttacagagaacttaatgaaacagctttgtgtgtgttcttctttggtttccaaattactctggagatggaagttattgtcccatttctcaagtaaagagactgaggcagccggatgcagtggcaacagcctgtagtcccagctactcgagaggctgaggcgggaggattgcttgagcctaggaggtcaaggctgtagcgtgctatcattgcatctgtgaaaagccactgtacttcagcatgggcaacatagtgagaccttatctctaaaagaagaggaaagaaactgagactaagagaagggaagtgagctgcccaagaacagatatagtgagcccctccacctcctgtgtccccacacacctgcctccatcctgcctctgggaattggtgtttcagccctcacaagtagggacagtcctcgcaggcttcccctccaaccctccaaccgcaccccaatgatgggtggggcagaattctgccagcaactctctggcagagtgatagagcgcgggaacctgaatttggcctttgtgacaccgacctccagggcagtcttcactgctgtcatcttgcgagttcagccctgcaggggaggcagaagcaaaaggaggctcctccattgtggagggtttgcgttagacaagagcaggtggcagcagaggctaattggcagtggtcagtgtgtgtggacaggttaatagcccagtcagtatactggggccgtggacagatctctgtcactccgtctctgttggccactgacccggacagtcattgatattaaatcctgggggtacaggatggtattgagtggagagaagtagacacaggattatggtggggtggtgagcagggcctagtgccaggggcacctaggaagacttcctggaggaggcatgatgcagggcagtgataatacaccaggagatgtaaacccagtgttatggcatggcagagagggattctgtagtccttggcctctcctggctgtgctgcacacctgcttggtatgtgggcgggctcacctcagcctcagtttccctataagtctgtgttgagggctctctggtcagggctgtcagcggcagcagctcctgcctgccttaggctatgctatgaaaagtttttcccaggaggcctcaaggctcaggttaaggctgtgggttaagaggttccccagggctcaggaaggctggttgtcaaggagctagggagaaaccaggccctgcccacacctgccttgcaggcgtctgtggaatccagacccctttggtctcagtagccacctggctgtgcccacccatcctgctgtcactcccatagcctagagggggaggcagaggcttaacaaatacagcactgcgatcatgtttgtgcacagcttgatgcagctttcaaacagtgtggtgtggtgtggtgtgtgtgtgtggtgtggtgtggtgtgacaatattaataaaagcccccatgatgtgtatgtctgaaataatgcaaatatctcacccccaactcctcctcccctgccccagggacctccgaaattgtgtgtttatcttgtcaccacatggcagccacttgagctgacaaatagaaaggcctgctgtcttaggaatacgtcatcagcataacatgcagagcggtggattacagagtggaggggagtggaatgatggtggcctgggagacggcgatgttcccagatgcccctgctaggaggctcgctcccctgaggtcaggatctttgtagtgttgactgctctatcccgtgtctggcatgtagttgggccttagtaaatattagctgaatgaaggatgtgggacacagggcccaaaggtgaacagctccatcctggtggggaaggacagagttggggccattcttgagctcagaagaacattttgggatgactcagtggaagccctttctgtcccagaaggaatcgctcaccaacggagcacgtggcttttattctctctctttttctttaattttttttttttttttttttttttttttttttttttttttttgagacagagtcttgctctgtcacccaggctggagtgcagtggcctgatgttggctcactgcaacctctgcctcctaggttcaagcgattctcctgcctcagcctccccagtagctgggattacaggtacccaccaccacacgcagctaatttttattctctaccaagttcttaaaataggcaggtcacaagatgtcagatgaggggagaactcccaggggtgttgccctgggccagcctgaaagcatgagttctggcccacctcggccttgatcttgtgagcctgggaagtttctcttcctcatctggggacagcagggctgaggattcttgctctccccgcctgttttcccctttgttccccttccccatctttgcctttggcttaactgagtggagtgttgtcagccttgggaagggagacaggaggcccagagcatttggggtcagaccagtggtgcgctgagaaacatggaatagcagggaaagccatgattataccatgtgctggcttctgtggtgtaaatactcccagtacagccgatcttgagctaccaacgtgcagtcagtccctgaacgtggggtcaggaagagatgtgcagtagcacacaccttcatacaggatttccaccatcacaggtacggtggaacctcaagagcaaaaagagcagaggctagtgtggttcagtaactaagaagtgatgagttttgagaacttactacctttgttttaaacattatcatttaggtcgggcacagtggcgcatgcctgtaatcccagcactttgggaggccgaggcaggtggatcacttgaggtcaggagttcgagaccaccctggccaacatgaggaaaccctgtctccactaaaaatacaaaaataagctgggtgtggtgacacgcgcctgtaatcccagctacttgggaggctgaggcaggagaatggcttgaacccaggaggcagaggttgctgtgagctgagatcgctccattgcactccagcctgggtgacagagcgagactccatctctaaataaataaataaataaaagattaccatgggccggttacagtggctcacacctgtaatcccagcactttgggaggcagaggcaggtggatcacgaggtcaggagatcaagaccatcctggctaacacagtgaaaacccatctctactaaaaaaatacaaaaaaaattagccgggcatggtggcgggcgcctgtagtcccagctactcgggtggctgaggcaggagaacggcatgaacccgggaggtggagcttgcagtgagccgagatgacgccactgcacttaagcctgggcaacagagcgagactccgtctcaaaaaaaaaaaaaaaaatcatatagttgtaagtttgtaagctgacttttttttgagacagggtctcgctctgtcacccaggctgaagtgcagcggcaagatcacagctcactttaatctcaaactcctgggctcaggcactcctcctgcctcagcctcctgagtagctgggactgcaggtatatgccactgtaccccactataatcctgtgtccacttctcttcactcaatatcatcctgtacccccaggatttaatatcaatgactgtccgggtcagtggccagcagagagggagtgacagagatctgtccacacccccagtctactcactgggctattaacctgtccacacacactgaccactgccagtcagcctctgctgccacctgcttttgtctgactcaaaccctccaccgtggaggggcctccttttgctcctgcctcccctgcagggccaaattcgcaagatgacagcagtgaagagtgccctggaccggatgtcggtgttacagaggccaataatttttttatttttcgtagagacggggtttcatggtgcaggctgggccttttatttatttattttaaatgcagctgtgcctggaatacgttgacttttttttttttttttttttttttttgagccagagcctagctctggcgcccagactggaatgctgcagtggcgtcatctcagctcaccgcagcctccgcctcccgggcttaagtgattctcctgccccagcctcccaaatagctgggattacaggcatgcgccgccatgcctggctaatttttgtgtttttagtagagacggatttttaccatgttggtcaggctggtcttgaactcctgacctcagatgatccgcctgcttcagactcccaaagtcctgggattacaggcatgagccacggtgcccagccagcttttctttttttttttaattttttaaatatatatgtatatttaagtagagatgggatctccctgttgcccaggctggtcttgaactcctgggctcaagcaatcctcccacctgtgcttcccaaagtgctgggattacaggcatgggccactgtacccagccataaagtgactcttaatagtaccttcctttaacaaccagctcataaaattcctgcataggaaacaatctgtactcccaggtcagagctgggttggacccacccgaatgcaaatccttttgctgccacttatgaagctgtacaaccctgggcaaattacttaatgtccctgagccttggcattctcatctgtaaaatgggcttccagaaacacccagcacaggccaggcagtttagaatgtgcttagtaaatggtgattatcatcatttgttcagggacattagcatgaaggccgaatgttctggcacaaagacacgtctgtgggacaggcacagtggacttattgtgtgaggcaggatggtactgggctggaagacaggactgtcctttagttctaaacagtcctcctattgttggacactcgggagtgttccacagtttggcttatcggttactgtagccacagacgtcttccagcctgcagctttttgtctccagctggaattctcttcttgtgatcactttcccgggggacgcggactgggtcagaggtgcgaacatttctgtgccccgctgtgttccaaaggggctgtgccagtttctaacgccagccgcgtgaattcctgcagcagtaaccacaactgctatttgttaagtgctgttccatttacaaagcacttgcccctgtgttgcccagcgcccgtttggaggtaggcattacttggattccgctttctcaggagtccggagaaacttggggtggttgagtggtttgtccaaaggtccacggctgtcagggtgaaatcgcgaacctcaggcaggactgaccgagccaggccctgtttacctgcagtagctccacgcatcctcacagtacccacatgagataagtgccgtagacatccccatattagagatggggaaaccaaggcacagagaggttagctagcctgccaagaacggtggagatggagtccagatgccggcatctggttgccgtctctacccttaaccactacagtgagactcggaagtgggctttctggctcctgtcagcagccgatttgaccctggcacaatccacctccctggacttccagtttcagggcctgacgctgtccctgccgccctcctgctgactgcgtctccatctccctacaggcaccgggagcctggccgctgcagtggagacagcctcgggacgccaggccctggtggtgggcaagcccagcccctacatgttcgagtgcatcacggagaacttcagcatcgaccccgcacgcacgcttatggtgggtgaccgcctggagaccgacatcctctttggccaccgctgcggcatgaccactgtgctcacgctcacaggagtctcccgcctagaagaggcccaggcctacctagcggccggccagcacgacctcgtgccccattactatgtggagagcatcgcagacttgacagaggggttggaggactgagcccactgcacctgcagccacaggcccacccctccccactccctgatcccgtaggtggaggcgatgggtcacgagccatgttaagcacaaccggctccttggtccagttctgcaccggggtggggctgggacccggggaaggtttgagggcccttgcaaccccctcccagcagtggctgggcactctttgctgccccagaagctggtcccctatggattcatcttggcctgacccagccaggtggccttatttcttccctgtcacctcccctccttgaaatctgggccctggtgcctgctgaagattccctctatccctgagtacttagtcttctcccccttccctggggcttctagagctctctctgcccctcaggtcctggcccttgggtccttgtcaaccagaggtctagggaaccacaacccttattgtcctgggtggaccaatccaaaggctaagtgatagtgactcatcaatgttgggtcctgtggggtaccagtttaggttcctaagtaatagtgaccctttcacgtcctggagcccgagtggaccaatcggaagcctaagtgacgatgaccctcgcatgtcctaggtccctgggtggacccatcaggaccccaagtgatagtgacccagtggtcttttagatcctcagtagaacagtccagaagcctgagagacagtggccccttgataatctgggtctcacgggaccagctaggggtccaggtttcagtcagtaaataagagtggtccacgtcctaaagacacctctcctttacaaagacttgtgatgctctggggcttctgtggccaagccccaccctttcctggtcatggtacccgtacagcgttgatggccacagctcgaaggggggctttcgtgtccccctgtgcggtcagtgttttcagtaccacctctctcccgtgcccacttggctatttacttatttatttattgtgtgccagtgatggtgggtgggggctgggccttccccgccacctccacccctgttgtgacctgtccttccgtacttaataaagtgcgcgtgggagtgttcacctgtgtttgagtctatgtttggggagggaggaggaccccctgctggagtgtgctctccctggacctggcccaccacattgttctctgcatgaaatgacccattcctgttcctgagtgtcttctgtgtgtagcgatactttgagtcaagagtgctttatagccaggcgcggtgactcacgcttgtaataccagcactttgggaggccaaggtgggtggatcacaaggtcaggagatcgagaccatcctagctaacacggtgaaaccctgtctctactaaaaatacaaaaaattagccgagcgtggtggcaggcgcctataatcccagctactcaggaggctgaggcaggaaaacggcgtgtacccaggaggcagagcttgcagtgagccgagatcacgccactgcactccagcctgggtgacagagtaagacaatgtctcgggaagaaaaaaaaaattagccaggtgtggtgcggtgtgcctatagtcccagctacttgggaggcaggagaatcgcttgaagttgcagtgagctgagatcacgccactgtactccaggctgagcagcaaagcaagactccgtctcaaaaaaaaaaagctcaacatggctaaggcttagggggtttcggtctgctccctgaggtggtctagcaccctccaggtatatccttctcagttctgaatccccaaccaacatcctagggcagattctcattggcctggcttgggtcatagcccatctggatgggacacagctattggtccatgtgaccctacccccctttcccttccccttccaccagtaaggaaatggttgcctccacacagtcttgcctcagcctcccaaagtgctgggattacaggcgtgagccaccacacccagcctaagcacagaatttttttttttttttaagatagtttctccctccgtcacccaggctagagtgcagtggtgcggtcttggctcactgcaaccttcgcctcccaagttcaagtgattctcctgcctcaggctcccaagtagctgggatgacagacgcctgccaccacacccagctaatgccaccacgcgtggctaatttttgtattttgagtagaggtggggtttcaccatgttggtcaggctggtctcaaattcctgacctcaagtgttccccaacttggcctcccaaagtgctgggattacaggcgtgagccatcttgccccgtctctaagcactgagtcttaatgagtttaaagcttgagtgtaaaccaatcgcagtaatttgattcctctgggtcagtgattggctaatcttctgaccaatgaaacatgaagagaggtctggaatgtttgcctcattcttttttttttcctcttctttttttttttttttttttgagacagagtcactctctgtcacccaggctggagtgcagtggtgcgatcttggctcactgcaacctccacctcccaggttcaagcgattctcctgtctcggcctcctgagtagctggggctacaggcgcaccctgccatgcccggctaatttttgttgcattttagtagagatgtggtttcaccgtgttgcccaggctggtctcgaactcctgagctcaggcaatccactggcctcggcctcccaaagtgctgggattataggcgtgagccaccgcgcctggctgtttgcctcacttttaaaggacatagaggagggagtcacttttcctggctttgggtgtggtcctgggagccgttgcagccattctgtgatcaggaggtatggctgagcatttaactcaggtgaccctgttgcaggtagcagagcagaaagacggcaagaacttactgggtttgtttttccccaacttgtaatttagaaaagttccaaattaatataaaaggtgcaaggataacaatgaataccgctacatccttcacctagatttaccagttgttaatatttgcccagtttgcttaactgctctttatatatgtttactttttgttactgttttagagatggtctcactctattgctgagtctagactgtagtggtgcagtcacggctcattgcagcctctaactgctgggttcacgtgatcctcctgcctcagcctcctgagtagctaggagcacaggcatatgccaccacacccagctaattttttaaaaaattttggccgggcgcggtggctcacgcctgtaatcccagcactttggggggctgaggcgggtggattacgaggtcaggagatcgagaccatcctggctaacacggtgaaaccccgtctctactataaatacaaaaaaaaaaaaaaattagccgggcgtggtggtgggcgcctgtaatcccagctactcgggcgcctgtaattccagctgaggcaggagaatggcatgaacccgggaggtggaggttgcagtgagctgagatcacgccactgcactccagcctgggcaacagagtgagactccatctcaaaaaaaaaatttgcagaaatggggtttcccttttgttttgttttgttttgttttgttttgttttagagacagggtctcactatgttgcccaggctggagtgcagtggctattcacaggcaggatcccactgctgatcatcgtgggagttttgacctgctctgtttccgaccagggccagtacagtcctccttaggcaaacttgtggttgcctctcccaggaggtcaccatattgatgccaatcttagcacactacagcccacgattcctgggctcaggcgatcttcctgcatcagccttccaaaacgctgagattacaggcatgaaccactgtgcccagcttgtttacattttttaactgaaccatctgagagtatgttacagatgctaacacagttcaccgaaaattcttcagcttgtatgacctaagagcaaggacagcctacacagccaccatccaggattacacgagaacctagacatttgatgattttattgagtcactgaattaatgtgctatggaaactcccaactgcagacttttttttttttttttgaggcagagtcttgctctgtcggccaggctggagtgcagtggcgcgatctcggctcaccgcaagctccgcctcccgggttcaagcaattctcccacctcagcctcctgagtagttgggattacaggcatgcccaccatgcccagctaattttttttgtatttttagtaaagataggggtttcaccatgatgaccaggctggtctcgaactcctggcctcaagtgatccacctcggcctcccaaagtgctgggattacaggcgtgagccgccatgcctggccagatattttctaaactctttttttttttttttttttgagacagagtctcactctgtcgccaggctggagtgcagtggcgcgatcttggctcactgcaacctccacctccctggttcaagcaattctcctgcctcagcctcccaagtagttgggactacaggcacacgccaccatgcccagctaatttttgtatttttagtagagacagggtttcaccatgttggcaaggatggtctcaatctcttcacctcatgatccacccgcttcagcctcccaaaatgctggggttacaggtgtgagccactgcgcccagactctaaactcttaaaaagcttttagatttcctttgtgtctataattattttcaaaataaaatgctcactggacacagtggttcacacctgtaatcccagcactttaggaagcgaagatgggaggatcgctcgaggctaggagttagagagcagcctgggcaacataacgagatcctgtgtctccaaaaataaaaataaattacccaagcccagtggtgtgcacctgtagtcagtccaagctcctcaggaggctgagtcaggaggattggttgatcccagaagtttgaggttatagtgagctataatccactccagtctgggtgacagagtgagaccctgtctcaaaagtaaaataataaaatataaaataaaataatataaaataaaatgctaaaagcattgtaaaggttcaggcctgagtctgggagggctgtgaatgaaaggacctggcccccacccagaccttacctgagaggagcggcggggccctaaccgagggctgaggcctgcagtcagaagagatacagacaagaagtgggaaggccaatggcaggtgtggagggggctgtctggacaaaggctgggaggtgagaatggatgagcagggttgaaggggcgggctgaggtgccacctggctggaaaagggcccaggttgccaggggcatcccccaccttcatagagtaggagggaaaagatagcttttcaagcccaggtatctttagttcagcagatgaaagcgggtcggccctagctacctgtgtgactttggtcaagtggccaccctctctgggtggtttccccgaccttaaactgcatcattaaatgggggagcaggtcaggcacggtgtctcagggttcctccctgctctgacttctaggactcagaagctggctctgacctcccctaccttccctggctggagcacccaggttggctgcgggtgtggatggcgcctctgtgggccgccctccttcagcaccgccagctgaaggaggtacagcttccctttccccgcctctgccccctgtccctggcagggcgggaatgaccgagctggcctggatgacttgtctagaccaagctgagcccatttctcatggcagcagccaagatccagcccaggacaaaggaattccagagagctcactgcctctatttcaggacagttataacgtggggaggagaatccctggggtggtggccttagcctgggggatgcaggagggagcactaacatcgagcccctccttagacatcactcctatcatcctccaagcagtggccttattcccatcttccaggcctggaaacgggttcagagaagccaaggacctcagctacagctgcagccactcagcccccaaaccagaactcaccactcgtctcatctcctgattctttttttttttttttgtgatggagtcttgctctgtcacccaggctggagtacagtggcactatctcggctcactgcaacctccatctcctgtattcaagcaattctccctgcctcagcctcctgagtagctggggttgcaggcacccgccaccacactcagctaatttttgtatttttagtagagatggggttttgccatgttagccaggctggtctcgaactcctgtcctcaggtgatccacccacctcagcctcccaaagtgctgggattacaggcatgagccaccgtgcccggcctcttctgattctaactgcagcttcatttccctgtgcagaaattcaaccaagttggcagacacaaagtaggggcgaggggaagatgagaggggagataatgaaagcaaggcgccgggcacagggcctggcaagataagtgggcgctgccactaggaggccctgaggactagggggaggaggcccacgatgcacctgtgtccctgccttccctccccgccaggaaaaccgcagctcctgtcacaggggacactggaatctggagagacttcttgccccaacctcggcaagaggagactgttggggacctgttgggcatgacatgtagacctcccagaggtgctgcaaagacctagggaaggtaacagcctgggaagagacaagaaggaagtgaaaaccttctgagcctccatgaaaacacgaatcatctgtttagtacaacagacctcagttccaccctgtattcacctcgtgcaaggaaagcaggatttcatctccccaatttacagatagggagactgaggcaagtgggagaagcagcttgccaggaggctctgaggggacatagcaagcagggccagcacccgcgtgtctagactcccaaataggcctttctagggacctcttcaccatgccaccctgcctccctgccagccccactcatgccagacgctgcagaggagtaaattgtccctccatccaacagcaaacagtccctgatgccgggcccattttccagggtggaggaggatgcaggagcagctcctgaggctacaagaacccaattattgggctgggctgggaaagtggccacacccacccgcccgcagcccggcgaggaccacacctgaagcgcctctgaccctcggtctaggactccgcctgagatgccccattccttgatctggcagagaggggaggcatgggggaggggcagtggaactaggctgggccccatccagcccttcctatggttgaggttttggggaggcccggaggaaaaagtgaagctgctgtggttggtttccaagcagccacttggtctggaaggaggggtaaggcactcacaggggtgcaaccccatcccctctctgggtccgccttgcggccctacacactcccctctcatcctgtaccagagtgggctttgggcatctggaggaaggtgcccctgagaggcagggtgggtgtgttggcctggcttccagatgtgagtcactcctggtccgcatcttcgtccctctttggtgccagcagtttcagaagggggacggccaggtggagaaggaggtccccgtgacaaccccccagcatgcccctcattttgcccagtgctccccacgccccttcctccaccaggttcctgagtgtaaggtgagcacccctcccacccaccctcaattctctgccacagtgatcttccctagagcccaaatctggcctcagtactcaccctccctctagccctggctccccagcctcctcccatacaacaatgtccaagccctgtgcccagcccatgaggccctccatggtccaggtcctgttggcttcccagcctcatccccgtttttcccccacatgcccggaacactgttctccagccctggccttctcattctggagcttctgcccatggtggaaagccaggcacttctccgcctacccttcacgacccacctcctttactcatgcagccgccagcccaccatagcactttctcatggcttcccttacagccatcatcatctacttctttttatttttatttttattttttattttttttaattgagactgagtttcactcttattgcccaggctggagtgcaatagactgatctcggatcactgcaacctctgcctcctgggttcaagcgattctcctgcctcagcctcaggagtagcagggattacaggcatatgccaccatgcccagctaattttgtatttttagtagagatggggtttctccgtgttggtcaggctagtctcgaactcctaaccttaggtgatccgcccgcctcggcttcctaaagagctgggattaccggcgtgagccactgcgcccagcccatcatctacttcttaacgtggttgtggtcagattccaccccaactatgcgctccttgagagtggggactgggaggggttcagctttgaatcctcagagcccagggccaggtacatagtaggtgctcagtaaaatacctgctgaacactcagggaagggagggctgtgccgggcctcagaggagatgttaagagagcagacagggtggccaggcatggtggctcacacctgtaatcccattactttgggaggctgaggcgggtggatcaactgaggtcaggagtttgagaccagcctggccaacgtggtgaaaccccgtctctactaaaagtacataaattagccgggtgtggtggtgggggcctgtagtcccagctactcgggaggctgaggcaggagaatcagttgaacctgggaggcagaggttgcagtgagctgagatcacgccactgcactccagcctgggcgacagagcgagactccatctcaaaaataaatatataaataaataaaaataaaaaagagaaaggacagggtgcacagagccaggaccccaccccctcctggtctggaccaccctgggccatctcctaagcttgacactctcaggcctgaggctgtcaggccagggcgctttgactatcccctgcctgcccctgaacgcggccaagcccgaggccttagccaagccctgcagcctcaggcttggcgcccggcccagcctttctttagccttcccgaggagccagcgagagagcgctgcagcagccgcagtccttgcttccggggaaggcccgggtggggccagggcctgtggttaagtcagtggccctctgcagacgcgcacgcagcaggagccacgccctggtccctgcccgggagtggcctggtctcccccagctctgattccctgaaggaccctgcacctcctcagccatcttctctgggcaccccctgagcccagcctgctggccacaggccccttcccgccaacttgtgggcctagctcatcatcaaactattttccactggcttcccccaatctctgccacagcacaattttggtggggaggtggagagggatgaaggagaataggaggtggagcttggactctggccgggggcggcggggtgagggggggcagcagctcgccactctgattggtcacctctgctccaaaactggcttcaaaattccacggactccgcccccagtggcccccagccctatcctgacttgcaattggctgaactttcagggggcggggctcacccggtccggtccagttaaaagggtgggagcgtccgggggcccatctctctcgggtggagtcttctgacagctggtgcgcctgcccgggaacatcctcctggactcaatcatggcttgtgtgagtgtggggacccccccccaaggtccaggggatagggcaggaactgatggccagaggagagctgggcagatcgggagcagattctagccccagctgtgtggcctggaaccagtgccttctcttttctggacctcagtggccacatctgtaaaatgggggtgggcgccatggtccctcaaggccttctctgcattgataattgtctggattcctccagggtctgaaagcacagttatttctgcccagggttgacattctgcagctctctgagaagtgagcgtgggaagggtgtggccaactgggggacacccaggccactatccctttccccctcctccaccccaaagagcctcctgtcccctcccccctgcagctgtcccggtcaccaggccagggcagagttaccctctgctccagagaacgctgaaaagttgccaggacccgagacaagctgcccaggatgggcccttctaggtcgggggtggagggtggttgtgtccaggctggtggcggggggggcgggggaaattcccttccaccacccccaagctgggaggttggggtggcagggaggtgagaatcttcctcgggccccagggaaagggttcaagtttctggcagaagaaaccactcaaaccagttaactcttgcccacccactcggggtgccagggaacagcagtgcccagcagtttgctcaatcttgttaaccctgagccagcccagccacagcccgactgcagggctattctccctaatgcagagaggccgtgtttttcagggtctcctctctagcccctgggcctctttgcagagaggggcttgaaggagaatagtggggtcgcccgcccctagccacttcctctccagcagaggggccggcccctccattcagtgtgacggtgggccaagtgtcggcccctccccagcctgatcctctccatctgcgatgggacagagcaccccatctcccaagtcactcttgagtccaaaattcccaagccaatctgcaaaatcttctagagcctgtcttctagaaccttcacgttacagactgaagccaaccccggtgggaatagggactttcccaggaccacatagacaatcggaggctggaaattacagctcaatcctttccccaggcttccccttggcttggtcagaggatgccgggcgggaacaaccccactcccacccccagccacccccggacacttcgagcagtggaggccttgtcctctaacccggctgggccggggcttgtctgtgcagggtctggtcgccagcaacctgaatctcaaacctggagagtgccttcgagtgcgaggcgaggtggctcctgacgctaagaggtgagaagtgaagtcggggtggtgggcggcagggacgggcttggtccagcagggagggcgtggccggccaagcccacatctcctccctggccgggagcgggttaacggccagccgccgatgctgcgttttctgggtgactcacttcccccgcagggtctgggcgcccccaccgttgccgccccctcccccgctccctccctgctgtagcctcttaaactaaaccagctgcagcctcgtcatctgtaataccttgactcccccgcccccacccctttccggtctgggcgggacctgtcgctggggagggcggggagaggagtggggcgggcgtcaccgccgccttccccctgagtccctccttcctgcgtctggtcattcattcattcactggctcagtccggtccttcttccttcacttctcattcactcagacggctgccttattttctcggcagttaggtgaccttggaccagtcaaccaacctcacctagcctcagtttgttagaaaaacaaggggggaggtggttgtgtggaggaagtgagatgcggctggcgcagtgacagtgaggaggatgaggatcagctgatattgttaagagccgcacacttctcatgcactaatttcatttcaaccaaaccctcagaggcaggtattgctattatcaccactcaacaaatgtatttattattttatttatttatttattattttattattttatttatttattttttgagacacagtctcaccctgtcgcccaggctggagtgcaatggcgtgatctcggctcaccacaacctccgcctcccgggttcaaacgattctccggcttcagcctcctgagtagccgggattacaggggcccaccacaacgcccagctaatttatgtacttttagtagagacggggtttcaccatgttggccaggctggtctcgaactcctgacctcatgatctgcccgctcgcctcggcctcccaaagtgctggggttacaggcatgagccaccgtgcccgggagtattattattattatttgttaattcgccccataattactaagcatctttttctggtgtgccccacttgtgctgggcaccgggaatacagagatgtacaagacaggacgggaggtcaccatctggagggagtcactgaccttgaccaaacgggctaggatgctaatgacttcaagaatcaagcgagccctcctgtgcagcccccattgtacagatgagcaaacaggggaagaggggcaggagcaggtggcatggccagagctagaatccaggtttcttgtctctgttagtgagttcttccagcaaggtgcgttcatgggatactgagtgacagattagtcggtcagtggggctggagctggccgaggtggcctcatgcccacccgttaccccccagcttcgtgctgaacctgggcaaagacagcaacaacctgtgcctgcacttcaaccctcgcttcaacgcccacggcgacgccaacaccatcgtgtgcaacagcaaggacggcggggcctgggggaccgagcagcgggaggctgtctttcccttccagcctggaagtgttgcagaggtgggctgcagaccggaaccggggaccagggacaggggctgggtgggctggggcggggctgggttagtgactagagaccttggccctgcctgctctttcccctccccttccctcccttcctgtgtgatggccagtgtctgcccctctttgaacctcagtggttgattacaataaaacgaaggggaaaaaaaaaggctgggcttggtggctcatgcctgtaatcccagcactttgggaggccgaggcgggcggatcacctgaggtcgggagttcgagaccagcctgaccaacatggagaaaccctgtctcgactaaaaatacaaaaaattagctaggcgtgatggcgcatgcctgtaatcccagctactcaggaggctgaggcaggagaattggttgaacccgggaggcggaggttgcagtgagccgagattgcaccactgcactccagcctggccaacaagagcaaaactctgtctcaaaaaaaaaaaaaaaaattagccagcgtgctggctcatgcctgtaatcctggcactttgggagaccaaagtgggtggatcacctgaggtcaggagttcgagaccagcctgaccaacatggtgaaaccccgtctctatataaatacaaaaattagctgggcgtggtggcacacaactgtagtcctagctactcaggaggctgagacaggagaatcacttgaacctgggaggcggaggttgcagtgagccgagattatgccactgtactccagcctgggcgacagaggagactccatctcaaaaaaaaaaaaaaatctatcataggattagagtaaaaagaaagaaaaaatattataaatgtacctccgcaggctcagccacaaactggggctgtgtcagggccacatgaggaacgggttctggaagggcccatggcatgtgggcccggctcactgctctcctctacccccaggtgtgcatcaccttcgaccaggccaacctgaccgtcaagctgccagatggatacgaattcaagttccccaaccgcctcaacctggaggccatcaactacatggcagctgacggtgacttcaagatcaaatgtgtggcctttgactgaaatcagccagcccatggcccccaataaaggcagctgcctctgctccctctgaaccagcctcgtgtgtgtgcttgtgcgtgtgtgtgtatgtgtgtgcatgtgtttgtgtgtgtgagaggggtcccccacctccaggcctgcccccttccttcacttccattcgctttgtccacgggtacctcctcagttccaatgacgtcttccgctgggtcccccagacaaagcacacagagtttggcacatagtaggagggtcagtgaccactgaataaaagtcagtccctgccctgaaactgtttttagcctagtgggccctagcacacagcagatgctcaaaggatgttgcataaatgacatcaagggggaaagaggcaaggacagaccaattcgtgtgtagtgacggggcagaagacagggaggtggagggaagaatacgagacccctctcatttgccttcatgagctagaaagagatttggagtcagacaacaacgggctgccagctatgtggccttgtgcatgttaactgacctctctgaacctcagcttattcctttataacaaggaggataacacaaacagcctatcaaagagttgttccaaagaccagtcacttcttggccttctggctgagatcaagtggagattaaatgaggtgttgcatgaaagaagccaagttcaatacctggcatatggtaaatgcttagtggatagtggtttcccatacctcgtgcacggattatttttttttttatttttatttttttagagatgggggtcttcctatgttgcccaggctggagtgcagtggttgttcacaggcatgatcatggcatactgcagactcaaagtcctgggctcaggcaatactcctgcctcagccttctgagtagctgggaccacaggtgtgtgtcaccgtacccagatccctgcaccacttttgaggtgctattactccaattgaaggggaagaaatgggctctgattgatgaaatgactcccggatctgtaccaggtccagctgagcctgcggggctcctcagggatcccggctttgtgggctcaggccatgcaccccactttgctagactgtatgggcaaccaaaggactagtctggaagctgccggctctcattcctgggcagatgcccccaccccaacagtgggtttgggtgatgaccctggcaccccattgccagcccgtttctgtggtaggaggagctggggttgggggctacgtcagcctctgcagagaaccaagaggtaaaagccagccaacatgaggcccagcctccagactcccgcagcctcctccttggggtacagagtaggggtgactcactcaacctgagatgaggtctccatgagcctgttctctcctggtttccaaagacagtgtctcctccaagaccagcccaggctgttaccttggagggtaatgcttaacccaaccccatcaaacccacccatcacaactgctggggcctgagtggacggctagggtgccctgcagactgactacttccctgcaccttttccttcctgcttgctgctgcagtcagatcttcccagggcccctacctctctgggaaccagctgcaggaactgagccaaagttcagaaggttagaatgagaacatcattaggctcccccataaccccaaggcacagtctcctgaggcatggtgcgtgggtgggggggtcttggcaaatctcactttctagggcaactggcaccagctgtgagtaggtctcttatacacccagcctcagtttcctcatccataaaatgagacccattttgggtagatgatttccatctcagtgggtgccctgggacctgggtggaagcgggggtcatgtatctctctatgaggtcaaagaggatggaacacacatgctgagaactcccatgagccacacccaatctccaggctctcctggggctcccaggtggccacccagaaacagcttcagaagcctggctgcagatggagtgccctctgctggacattggagaacacgtcccccaggctgccctgccttgtcctcagttcacccacattgattctcccctacactggctgacactcacaggacactaggactggggccacaaccgggcagaggaaagtcctggggcaggtaagagaggccactgggtgtggaggaaggaagcccggctcagcgtcagacagacctgtgtttaaaccccagctctgtggctgtgtgcccttggaccagttattcaacgtctctgaacctcagtttcctcatctggcaaactttgttaagactgcactagttggccaggcacgctggcccacgcctgtaatcccagcactttgggaggccgaggtgggtggatgacctaaggtcaggagttcgagaccagcccgggcaacatggcgaaaccccgtctctactaaaaatacaaaaattaggccgggcatggtggctcacgtctgtaaatcccagcactttgggaggccgaggcgggtggatcacctgaggtcgggagttcgagaccagcctgaccaacatggagaaaccccgtctctactaaaaatataaaaaattagccgggcatggtggtgcatgcctgtaatcccagctacttggtaggctgaggcaggagaatggcgtgaacccgggaggcggagcttgcagtgagccgagatcccgccactgcactccagcctgggcgacagagcgagactccgtctcaaaaaaaaaaaaaaaaaaaaaattagccgggcgcagtggcgcgtgcctgtaatcccagctactcaagaggctaaggcaggagaatcgcctgagcccggaaggcagaggttgcagtgagccgatattgcgccattgcactccagcctgggtgacagagcgagactccatctcaaaaaaaaaaaaagactgcactagtattggctgggtgtggtgggtcacacccgtaatcccagcactttgggaggctgaggcaggagattcatttgaggtcaggagtttgagaccagcctggccaacaagtgaaaccccgtctttactaaaaatacaaaaattagccgggcatggtggtgcatgcctgtagtcccagctactggggaggctgaggcaggaaaatcacttgatcccgggaagaggaggttgcagtgaaccgagatcatgccactgcattccagcctgggcgacacagcaagactccgtctcaaaaaaaaaaaaaaaaaaaaaagattagctgaggtgatgtatagaaatgcatggtgcctggcacgcaataggggctcggtgagtgttggttcccttcaccccttttaaggcttggtgtgtcccaagggcctaggaaactaggtccagataagttaagtcaatctctgtccttaggccacctgcgccccaccctcagcacctgtttttgcctgtgtgacctcagacaagtgactgcacctctctgagcctcagtttcctcctcagtaaaatgtggattgtacctcaaaagagatcatcataagccaggcacagtggtgggcacctgtggttccagctactcctgaagctgaatggggaggatcgcttgagcccaggagtttgagaccagcttgggcaacatagtgagaccctcatctctataaataaataaataaataaataataaaatcaataatctaaagagagtaaagagctaaataaatgtcagctgctcttgttactctttttcctcattaagtttatcatcacttcttttcttattgtttttgttttttgttttgagacagagttttgctcttttgaccaggctagagtgaagtggcgggatctcggctcactgcaacctctgtctcctgggttcaagtgattactcgagtagctcagcctctcgagtagctgggattacaggcatgcaccaccacgcccggctaattgtcatatttttaatagagatggggtttcatcatgttggtcaggctggtctggaactccgaacctcaattgatccacccaccttggcctcccaaaatgctaggattacaggcatgagccactgcgcctggcctgttttttttttttttctttttttttttcagagatggggtctcactctgtcacccagggtggaatgcagtggcatgatcacagctgcagtgcagcctcaaacttctgagcttgagtgatcctcccacctcagcctcccaagtcgctggactataggagtatgtcaccacgcctggctaatttttaattttttgtagagacagggtcttactatgttgctctactgtctgtcgccaggctggggtgcagcagcgcaatctcggctcactgcaaccctcccgggttcaagtgattcttctgcctcagcctcccaagtagctgggactacaggcgtgtgccaccatgcccagctaatttttgtatttttagtagacatggggtttcaccatgttggccaggatggtctcgatctcttgacctcgtgatcctcccgcctcagccttccaaagtgctgggattacaggtgtgagtcaccgcgcccggcttgagccttcacttttcatctccaaccactctgggtgggagtggagccctggcaaaccaagcaggtcgaagcctgggactgggaggagacagaccagctgcagaaggtgactctctgggcaccttcagccagggtgatgcctctacccaggaaggtgccaagggtggctttaaggcactgccactaaggggcagaagcagctggtcagaggtgcagtccagcaccctaagggagccccctgcattgctctgggccacagaactgaaaggccaggcctgtagtttaagggtaacttccagctgggcgcggtggctcacgcctgtaatcccagcactttgggaggccgaggtgggtggatcacctgaggtcaggagtttgagaccagcctgaccaacacggagaaaccccatctctactaaaaatacaaaattagccgggcatggtggcacatgcctataatcccagctactagggaggctaaggaaggagaatcgcttgaacctgggaggcggaggttgcagtgagccgagatcgtgccattgcactccagcctgggcaacaagagtgaaactccgtctcaaaaaaaaaaaggtaacttcctctcaggatcccacatagatttcccaagcagaggagctgtatggaatgaattcagcattctggagtgctgcacttactgcctgcctccttccaaaactcagagtcagggtacaaagatcagctgggcgtgctggcaggtgccagtaatcctagctactcaggaggctgaggcaggagaattgcttgaacctgggaggcggagactgcagtgagccgagatcacaacactgcactccagcctgggtgacaagagcgaaactctgtctcagaaaaaaaaaaaaaaaaagcggatgaaggattctggcatacaatccaagtgactaaaaatccccttcaggcgttgtttcactgcaatctttcacaaccatgccctcattctcagtcaaggatgttattatacactcattccacctttgggcaaagtgaggcacaaagagggaagatggcttgtgcagaaaacacatgtatgcgtgccttatgttagacaaactttacataattaacttcctcacaatcacagctgtcaaggtttagtccacggaccagcagcattagcatcacctgagaacctgctagaaacggaaatccactcagaaacctctatcggatcagaaactccggggtggggcccagcgatccaggtttttagccctctaggggattctgatgtatgccaaagttccagaaccagtgtctacaacaaccctacgaagctactatactttcccttattttacaaatagggtgaggcaccgcgaagaccattggtctgggaccacacagctgtaggtgtgatgccagtatacaaatccaggcagtttggctccctcttggagactaccaacgagttgacatcagcatctaaagtaggggccagcacggtggctcacgcctgtaatcccggcactttgggaggccgagatgggaggaccacttgcggtcaggagttcaagcagtctggtcaacatggtgaaaacttgtctctactaaaaatgcaaaaattagggagtatggtggcgcacacctgtaatcccagttactcaggaggctgaggcggagaattgcttgaacctgggaggcagggattgcaatgaaccgacatccgccactgaactccagcctggacgacagagcgagactccatctcaaaagcaataataataaattaaaggaaaaaaatatccaaagtagggttagtacaggaaatttgggccattcacgagtaactccatattgagtgtgtgccaggcacagtcctaggcagtggggtccaggggacctcgctctcattgaagcgaggctggggaggggctggagctgggagtcacggagagatcagggaccagcgcgtcatgcatgggaagagggaagaaaaggagctgggaggtccctttaaaaggctgggcctggtggacggaacttcggtgcgacgctaaagtgtgcgcccgggaggatgagtacgctacacccggaagtgtcttcagggagaggaagccggcggcctcactgctatgggccgcaacaagaagaagaagcgagatggtgacgaccggcggccgaggctcgttcttagcttcgacgaggagaagaggcggtgagtggcaaagccggaccggactcccctcgagctgttcttcgcggccaaggccaggtctggggccgagcacgctcccgccgggggctcttccggtcccgccccctggcgtggctagagaacccctctcggccttccagcccgcgttcccgcttctcccttctcggccgccaccttctcccttcttgacctccccacctcgcctagtgtctgtgcgccgccagatagccggaagctcgggtctcagagcagtggcttcgaccaccctagcccagcccagtccatcggtccggcacacagcaggcgcccagccgtggttgataaatgatgagccaatgaaatgagagtggcttaagttcattcattcgctccctagacatttattgggctcctttggtgtgccaggtcccgtatcaggaagcagaacctctgagcctcagcgtctggccagataaataaatggcacatggtagcgggtcagcgaaaagcccagtgctggaccgtgggacaaaatgggaacagagcagctagcactgtggagatgagaaggggctgagattagaccgagggaaggaggtagggaaatgctgggcatcatcaggaaactcctagcgtgcatcaacaggccctacaggcgagtttagggtcaggtgtcctggggacatgggtgttggtccagtgcagggtttccgaaggtctggatggtggtggccctgaaaaccctgttgagagagtaatgaggtttgtaggtgtggaaggggttacctcatgtactgtgtgtggcccccccccccacccgccccacagcctggccctgttgcctgaacctgagatccctggagagtattgagtggaaagaggcagtatctcccttattttcctaaatgtatcctttctctaaccttgggcaagtaacctagactctgtgactcaacgttcccatctgtaaaatggagattgatacccaccgcacaggttattgtgagggttttttgtttgtttttgagatggagtctgtgtcgtccaggctggagtgcagtggcatgatctcggctcactgcaacctccgcctcccaggttcaagcaattctccccgctcagcctcccaagtagctgggactgcaggcatgcgccaccaagcccagctaatttttgtgtttttagtagacacggagtttcaccatgtttgccaggctggtcttgaactcctggcgtcatgtgatcttcccacctcgaccttccaaagtactgggattacaggcgtgagccaccatgcctggccattgttgtgaaggttaaatgagctaatacttacacttttttggaatggtgcctagcacatagtgagcgcggcattagccatttttctcctagagcgagcccttctctccttgtataatgactctcctgtctctgccggcttccttcctgtagggagtacctgacaggcttccacaagcggaaggtcgagcgaaagaaggcagccattgaggagattaagcagcggctgaaagaggagcagaggaagcttcgggaggaggtacgcagggggaaggtgggagggaggtctttgattcttagggcacttgcagccttggatttccctaatagaggcagctgctggcatggggcgatgtgtgtgtgggcaggactggggaatagtttatacaggtggagactctgtgggcccgggtctgggagtgatggaagatggagtctcctcctgatcttgcagtatggatcatggtctccctcaccctgggggtgattaataccccagcctgaggttggactgagaggccatactcactgtgttccctgcctgtgtggtttcagcgccaccaggaatacttgaagatgctggcagagagagaagaggctctgggtaagtggcatgcttggcctgacctggagaacagctgatgggcctggtttatacccttggtgggtggaagggatagaagctgacctccttggccctagggatcttggggggtaccctggggccaggggtggtcctaagcacctctaagtgcaagtggaacagagaccaggagaaggagtcccaaaccccatggttaaccaagcctgagaagagagcccagtttttaaggatggaaaggactaggggtggaggggagggacagcagtagctgtcacagagggtttgtctgacatggggaccagctagagcatgaaggaaacgggatcattcacaacattcatccacagaccaggctctacagccagtgaccttgtggatgcgctccacgtccacagagtagagggggcactgcactccagggcgggagggaggctggagcctggtcactcgttcccgtgactgagaccaggtctgtgtccacccccacagaggaggcagatgagctggaccggttggtgacagcaaagacggagtcggtgcagtatgaccaccccaaccacacagtcaccgtgaccaccatcagtgacctggacctctcgggggcccggctgctcgggctgaccccacctgaggtgggtcccagtctcagccctgggaggaaggggcgtgggggcagaccagcttgtcagggttgctcagtgctggcccatgtcatgggtatcccactgccagccctgggaagaaggggcgtgggggcagactggcttgtcggggttgctcagtgctggcccatgttgtgggtaccccactgctggggctccttccctttggacccttcattccctgcttccggggtgctgcaaagaccagccccactgctgagcggctgaggagcttgggcaggctccttcaccttgcctgcttccctttctccatcagtgaactgggggttgctgatggtggcacctgccttgtgggattggtatgagggtgaaagtggttaatccatgtgagtcacctggcacagtgcccagccctgtcataagtgcttcacaaaaggtagccgtttgttgtgatcgttccctttgtgcgattcgcagccctggcacgtctgtgtgcactaagtgggttttcaacctgtgggttgtgaatcatgagtaggttgcaatcagcataaaaaaaaaatataattgaaaatatccgaaagtgtcatgttaaatattgtttcatgagacagctgtttccactggagttgtatctgggtgtgcctaaggatttatggacatatatgcacacaattacgatataaaacacatttccttgtgtgggttactgtgttcttaagtcctggagccactcccctatcacatccatactgatctcagggccaggcatggtggctcacgcctgtaatcccggcattttgggaggccaaggcgggcgttatcacctggggtcaggagtttgagaccagcctggccaacatggtgaaaccccgtctctattaaaagtaaaaaaattagccagggggccaggcgcagtggctcatgcctgtaatcccagcactttgggaggccgaggcgggcgaatcacctgaggttgggagttcgagaccagactgaccaacgtggagaaaccctgtctctactaaaaatacaaaattagctgggtgtggtgggacatgcctgtaatcccagctactcgggaggctgaagcaggagaatagcttgaacctgggaggtggaggttgtggtgagccgagatcgtgccattgcactccagcctgggcaaaaagagcaaaactccgtctcaaaaaaaacttagccaggcatggtggcgtgcacctgtaatcccagctactcgggaggctgaggcaggagaattgcttgaactcaggaggcgcaggttgcagtgagccacgattgtgccactgcactccagcctgggtgacagagcgagactccatctcaaaaaacaaaacaaaacaaaaccatactgatctcacaccggtctttcattttatgctcactattctgcaagttctgatacaaagacaagtcttgtccccgttttgctaggattttcattcctgaatgtttaagtatgtcctggaagcttctaggggcaggaaagggtttggaaacagaccttcccctgtgtaatccttgctttagggcagatagacttcttccatcagaagccttctctagtcccaacccaggcctgtgatgcagcagggcgcgccaccacttgccagagccatggtggctcggggtgcccagcccaggtccccccagctactgctccatgtaagtcattgtcttgtgcctctttagggaggggctggagacaggtctgaggaggaggcgtcatccacggagaaaccaaccaaagccttgcccaggaagtccagagaccccctgctctctcagcggtgagtcttggcctgctgcctccccggtcccacccctcctggctggcagtagtgacctggcccttagggtggtgtggagcaggtgtagggcccggagcagccctctgcctgtccagtgatcctctgcctctcctcattgccccgtcctgtcccacccacccctgatagtgtctgacctccagtgcttttcgtgcctgggtgaagggcctgtgtctctgagctgagttgctggcaggcactctggaggtagagcaggccaactctggcatgaacttggcggtcctggcattcgcaacctgtcctgacatcccctccgtgagccaggtggtgagtcaccccacaatgcaatcttaaactgaggctttctgccctcccctaggatctcctccctcacagcatcactacatgcacacagccgcaaaaaggtcaagaggaaacatccccgacgggcccaggactccaaaaagcccccaagggcccctcgtaccagcaaggcccagcgccgccgtctcacaggcaaagcacggcacagcggggagtgagaccgagaacgaagcggtgccccagtctaggctgcggggacctgtccttgctcagcttggctgtccctgtagcccagcctgcacctaggtaatgactgcacagctcaaggttgggaagccaggacctctctggcctggggccagctgcctttgcctggggtcagctgcctttgcctggggtttgaattcccgaaggagcaggcagctgagagcaggcctcccccaggaagagccttcagagccacgtgggggcatcttcccaaatgtgcaccccacctggcactcatcagatttgtgcgcttgtgatttgtttgtccttgataccacgcacaagggcaggtttttggggtggtggaaatggccagggcccatgggtctgtctccagcagttagccctgtggctgcaataaagtacagttctccctgtgttaagatcctaaccagggttaaggatcagtgtgtccgttgctagaatccagagcccacctgctgctctgaaaagcaggctcctgaggccagtgggggagcagtgccccccatgcccttcaccgaggagcctctgtgcctgtcccttgtcctcggccccaggagtctcctcaactgacactgaagtggtggaagcagttgagtgccaggtcatcccccatcaccacactggggcagcgtccccaggcttccagcagctcccaggtgggtcccaacgtggaaggattaattaattctttctaaagcagttgcagccgggcttggtggctcacgcctgtaatcccagcactttgggaggcccaggcgggcagatcacttaaggtcgggagctcgagaccagcctggccaacatggtgaaaccctgtctctactaaaaatgcaaaaattagccaggtgtggtggcacacgcgtgtaatcccagctacttgggaggctgaggtggaagaatcacttgaaccctggaggcggaggctgcagtgagccgagatcacgccattgcactccagcctgggcaacgttgtgaccttgtctcaaaaaaaaactaaaaaataaagcagttgcatcttgactcgtacaaaagtagcccccaccagagtagaccctgcgggtgccagctagaactccacaaggggccatgtcttcacactccttccagatggatgagttgatggaaaccctgtcccttccttgtcccagcttgtcagtcctgggcaggagagaatttcaggttgtgccttggttagaggagctgtgttgggtcctaaacactaggaccacaaaggggagtgaactgtgttcccagggcttgctgacgcccgtggactatggagtcaggatgacaggacagtgcggtgaggggcatctgcgacaggactgcgggctctacccgccctgatgtgggagctcctggagtgggggtgagcagtgagccagggtctgcagggctgtcctctctccacagccaacagccaggccttacagtggggcaggcttagtgactgtgcctcagttatgctgtacctgggagtgggcaggccctctcccatgtcaccatcaaaacccactgatgaaggctggtgggagtctgagggctgcacccgggtatggtgagttcccctcagggattgtgctgagcgccttggcctggcttcttggctccgcccacctgctctccctgccaccaagttgtcttccccgggtggcatgtgccacttggctgcctcgtgcctgggcacagtggtgcctattatgggccctccaggtggctctggtgctcagcctgctgtgagcaggaacagctgagtcccaggggttcttgcacacagcagggctcgggtttgaatccaggctctgctgcttggtcgctgcatgagcttctgctgtgctgacctctctggtttgtctcgtcatgtgtaaggtgacaccagatacctacctcttagggctgccccgagactaaaataagaccatgtgcatgaaccacttaccaaagtgcctgttgctctccaggtgtgcctaccgcatgttgccgctgctgtttctgctgggacgtctgactccagttccttctcccctctccagtgacaaggtcatttacaacttacatttacaatttatagtgtttaccagtattaaattctcagccactcctttccatgtgtgccttcatttcttccagcagaccagggaagttgagtcacagtgatttgaccaattctaggatcagggtggtggattcagagccctctggagaacttgtcttttctccaggagcccctcaccattgctgtggaggcacctgggctccttcctcctgtcgctttccagagttgggcctctgagagatgtatgaggaagagttaagtttagctgcatatactctaaaacaaaattgaaaaacaactggcttgtgtaaaagagttcccatcccaaagatgggaggttcccagcctggagctgggaaggctggaggctgggatgccgggcttctaactctatgctgtgttctatgttgtgtgccattttcaacacatggcccctgcctcacagcacaaggtggctgcttgagctgcagccattatgtctgcatttcagccagcaggacagaaaaggggatgaagaacatgcccctccttttgaaaacatttagggccaggtatggtggctcacgcctgtaatcccagcgctttgggaggccaaggcgggtggatcacctgaggtcgggagttcgagaccagcctgaccaacatggagaaacccctgtctctactaaaaatacaaaattagctgggtgtggtggcgcatgcctgtaatcccagctactcgagaggctgagccaggagaattgcttgaacctgggaggtggaggttgcggtgagccgagatcatgccattgccctccagccttggcaacaagtgtgaaactccgtctcaaaaaaaaaaaaaaagaaaaattggcacttggcatgtcctgttggccaggcaggaggcaaagcatgaggcagaggcaagggagctcttagctacaagacaggctaggaactcttctatttatttattttttgagatgtagtattgctcatcatccaggctggagtgcaatggtacaatctcggctcactgcaacctctgctccccggattcaagcaactctcctgcctcagcctccccagtagctgggactataggcacctgccaccacgcctgactaatttttgtgtttttagtagagatgggattttgccacgttggtcaggctggtctcgaactcttgacctcaggtgatccacccaccgtggcctcccaaagtgctgggattacaggcatgagccaccccgcccggccaggaactcttctattctgggaaaccaagtgctcagatgagaattggggattgtgttagaaaggagagaatggggcctggcacagtggttcgtgcctgtaatcccagcactttgggaggctgaggtgggccaatcacctgagatcaggtgtttgagaccagcctggccaacgtggcgaaacccgatctctactaaaaatataaaaattagccaggtgtgatggcaggtgcctgtaatcccagctacttgggaggctgagatgagaatcacttgaacccgagggccagaggttgcagtgggccaagatcacaccactgcactccggcctgggtgacaacagcaagactccatctcaaaaatgagagaatgaggccaggcgcagtggctcacacctgtaatcccagcattttgggaggccaaggcgggcagatcacgaggtcaggagatcaagaccgtcctggctaacacggtgaaaccccgtctctactaaaaatacaaaaaattagttgggcgtggtggcgggcacctgtagtcccagctacttgggaggctgaggcaggagaatggcatgaacccgggaggcggagcttgcagtgagcagagatcgcgccactgcactccagcctgggcaactgagcgagaatctgtctcaaaaaaaaaaaaaaaaaaaaaatgagagaatgggtgttggggtataatcagcagattatttcacagaagccaaatatataaagggctgtcatgaggggatccatctgtgtggagctaaagtcacagcagacatttatccatcctcggttttcacaccaaggtcaggccctgtgctagtacatgatgagctgtggccatagttacctgaggctgggctcagcccattaaaataaaacttcttttggtacgatctgttttggggtggcctgagctctccccaggggggtgaggtgaggaactgtgggggcaggtgttctggggtcatataagcctcagcgtccatcctttccaaggtcccagtggtgctgacgaccttgacgcccccaggtttgagccattgaccttcctttggcttgcaggtggctctggtgaggggcttcagttcctcctgagcttggagagctcactgcctgctcccttgtgaggactgctagaaatgcccgccttgttctgagctagcattggcctcccccagccaccttcagaggtttgcaggctgttctcagcctttctcgatctcctcacctttgagccacctccaaggagaagccttctctgccttcctcctttctccacctgacctcccatgatagtaggtgtttccttcttttaaacactgaacacagtgaatcctggtttgtccctcgaaccagaccagagctttctgagtgagaaattgtatcttagtcatttctgtttctgctctgggcacaagcttgtgtcaatgtaggttctcagccaatcctgtctgaatccaacccccaggtgatccccaacaactctcaaaataatctaagatttctgtgaccctagtgccaagctcacctgcctacaagtgtctgaatctagtttaccttccctgtctcatcactgcacccatctctcctggactcctgctgcaaccttcctccctgtccagtgaatttcgccctcctcctcccatcccagtcgccacaattggcaaatatcaaccaaaaggaaaaaagatgggaaacaagtttttttttttttttttttttttttttttaaggcggagtctcactctgttgcccaggctggagtgcagtggtgtgatttcggctcactgcaacctccgcctcccgggttcaagcgatgctcctgcctcagccttctgagtagctgagactacaggcgcacaccaccacgccaggctattttttttttcttttttatacaagagttttgctctgtcgcccaggctggagtgcaatggcgctatctcagctcactgcaacctccgcctcctcggtaagaaaactgtcatgacagagaggttaagactctagtccaaggtctgtgctaaagccagcccagcggactgtcggcagaatgaaccaacgggaaagaggtcagaaggagccagatccgccagtgccagccctctccagggctccctggggacccccagcgggcaagggctgcaggcggcccaggctaaacgtgcagtgagtcccgctctcagaggtatctgcgccccgcctgcctccgccccgccccttgttctggtttgtccagtcccacagagtcccacagtcttcatgtaaatgaggcacccagagagagcctatgcgagcgtggcaggggcgtggccttccacctcccgagcatcgctctgattcattgttaaaataaagaggccatgaccctggcactcccaccccggcagcccctgtgcgtggaaacccagccaaggttagcactgggcctcagaaaagaggagctggtagggggaggcctacaggaggggtaggggtcgagggatccggggaggaactggctgaatgcctggatggagagggtcccgggtccattctctgggtggggcatgtgtagctgcttaaggttttgattattatatccacatctcaagtgcattttagagaaggattctgcctattggttgtgggtaggggaggaaacgggagcagcgaggggcacgtggagtagagccccctacccacccccaggaaaatgagcggcgttctcctgctaggcgacgctcctttatgtggccagaccaggagagaaacgcccaggacgggcggggccgatgcgcccctcttccaccaccaggagtcgggaggacgaccgcccggggaggatcagagaccctggggccacggaaggaccagtgggtagccctctccccaccgtgccttgctgtcgcccccaccgcattcccttctccaggtctgatgatggaggagccttggccctggctgtcccaggggaggaggtgaaattcctcagctctccaccaagattggccacaaaagcctgatcccctggaacacagcaggtgaggatggatgtgggcaggtgacctgggggcaccaaaagctgcaggtgttttgggatgttgggttcctcccaccccccaccctccccctggggctctgtgtgagtggggaggccatctttaagtgattctcctgacccagctccactccagggcatggatgttggtggccttaggggcacccagaaaggagaacccttgcacaagtaagataccagggcggccgggcgcggtggctcaagcctgtaatcccagcactttgggaggtcgaggtgggtggatcacaaggtcaggagttcgagaccagcctggcccatatggtgaaacctcgtctctaccaaaaatacaaaaaaattatccgggcatggtggcacatgcctgtaatcccagctatttgggaggctgcggcaggagaattgcttgaatccgggaggcagaggttgcagtgagccgagatcgcgccactgcactccagcctgggtgatagaccgagattctgtctcaaaaaaaaaaaaaaaaaaagaaagaaagacaccagggtttcagaagggtatgatgcttcacacctgtaatcccagcactttgagggaaggaggaggattacttgaggtcaggagttcaggagttcaaaaccagcctgggtaacactgcaagagccttttttttttttttttttttttttgagacacactgttgcccaggctggagtgcagcggggcgatcttagctccactgcaacctccacctcctgggttcaagcaattctcttgccccagcctcttgagtagctgggattacaggcatgcgcaccacgcccagctaatttttatagttttagtagagacagggtttcatcatgttgggcaggctggtcttgaattcctggcctcaagtgatctgcctgcctcagcctcccaaagtgctgggattataggcgtgagccaccgcacctggccaagagcccatttttacaaaataaaaaagaaaaaaattagctgggcgtggtggcgtacacctgtagtcccagttactcagtcccagagactgaggcaggagaatcatttgagcccgggagtttgaggttgcaaggagctatgatcgagccactgcactccagcctgggtgacagagcaagaccctgcccccacctccccaaaaaagacattaggggccggatgcagtggctcacacctgtaatcccagcattttgggaggccgaagggggcggatcacctgaggtcaggagttcacctggccaacatggcgaaaccccgttgctactaaaaatacaaaaattagccaggcatgacggtgcatgcctgtgatcccagatactactggggaggctgaggtagaattgcttgaacccaggaggcggaggttgcagtgagccgagtgagccaagatcacatcacggcactccagcctaggtgacagagagagacttcgtctcaaaaaaacaaaacaaaacaaaacgaaaacacattaggatttctttttggctaagttctgccacaaacttgctgtgtgactttaggctgttcacgtttgtcaaagacgtcgtcctcaactctgaaaatacctggccagctttttgcctccctcgctgtgcttcccaagggacctgtgcgagttggcagtatgatccagtgctcctcacttccacctccgagagagcagggacacacacagccctggatttgaatcagccactgcgaccttcagtgaccgaaggaacctctctgagccttagttgcctgatctaaaattggcattaatttgatctacaatgcagctataagacaaggacactcaaactttggggcgcactagaatcacctggggaatcactttttttttttaagacagagtctcactcttatcacccaggctggagtacagtggtgcaatcttggctcactgcaacctccgcctcctgggttcaagtgattctcctgcctcagcctcccgagtaactgggactacaggtgcataccaccatgcctggctaattttgtatttttagtagagacagggtttggcaatattggccaggctggtctcgaactcctgacctcaggtgatctgcccgcctcggcctcccaaagtgctgggattataggcgtgagccactgcgcctggccaggaatcgcttctttattttcattttcatttatttatttatttatttatttattttgagatggagtctcgctctgttgctcagtctggagtgaagtggcgtgctctccgctcactgctacctctgcctcccaggttcaagcgattctcgtgcctcagcctcccaagtagctgggactacaggtgcgtgctaccacgcccagctaatttttgtatttagtagaggcggggtttcaccatgttggccaggctggtcttgaactcctggcctcaagtgatctgcctgcctcagcctcccaaagtgctgggattacaggcgtgagccaccgccctcggctggaatcacttctttaacatgcacagccccagacctcagtctcttggagattctaactgtgtgaattgggagagagaaaggggaatctagattttttttttttttttttgagatgtggtcttgctatgttgcctaggctggagtgctgtaactattcacaggtgcagttatagcacactaccacctcaaactcctgggctcaagagatcctcccacctctgcctcccgagtagcttggactgcaggtgcacaccatcttacccagctgaaatctgctttttttttttctcagtgcagtggcacagtcatggctcactgcagcctcgacctcccagactcaggtgatcctcccaacttcagcctcctgagtagcagggaccacaggcctgcaccaccttgcccagctaatttttgtattttttgtagagacggagtttcgccagttgcccaggatggtcttgaactcttgggctcaaatgatccgccgcccgcaatgggcccagctggaatctgcatttttttgttttttgttttgagatgaagtctcactctgtcgcccaggctggagtgcaatggcgcaatcttggctcactgcaacctccgcctcctgggttcaagccattctcctgcctcaggctcccaagtagctgggattacaggcacgtgccatcacacttggctgatttttgtatttttagtagagacagggttttaccatattggccaggctggtctcgaactcctgacctcaagtgatcggcccacctcggcctcccaaagtgctgggattacaggcatcagccactgtgcctggcctggtatctgcatttttatgaacagcccaggagggtgtaatgcagagtccttggcgtgcactttcagcaacactgcagtaaggactagaaatcgcacatcaaatgctggcagagtgcctggtgcttagtaggtgcttagtgagtgtttgttgagtgaataaatgaacaggaatggatggagaacaggaacccaaaggaatggatgagtaaccttatttccttggtccttgtctggaaactggggcaactggggctggggttcaggtgagtggccagccagtcatctggtctttgcctccccctcatttttgccaggcctcacatagacggtcagccattggatcataggaactgccctggcctgactcacccaatatggaggaggtgcctggggatgccctgtgtgaacactttgaggccaacatacttacccagaaccgctgtcaaaactgcttccaccctgaggaggcccatggagcaagataccaggtgggccagttttccacgtggttggggtggtttgtgatgggggcatgggtgaaggactgggcctgtggtgtccgctaactcgcagttgaacccagatgctggacttcctcctgtcgagagcctcggttttcccacattgcagggaagtggttgaaccatgtgaatgtttcacaatcttcagtcactttcctcctgcttatatgatacgattgttaccatagccttatctaatctgttacttactttgttattctttaaatcaacatctttttccccttctattgaaacaaaacttcacatcatcaacacaagtagaaaactagaattacttcctgttaagaagaagaggttaagaagaaaggtagaggctgggcacggtggctcacgcctgtaatcccagcactttgggaggccgaggtgggtggatcacccgaggtcgggagtttgaaaccagcctggccaacatggtgaaaattagctgggcatggtggtgcatgcctgtaatcccagctacttgggaggctgaggcaggagaatcacttgaacctgggaggcggagattgtggtgagccgagatcgcgccattgcactccagcctgggcaacagaatgaaactgtctcaaaaaacaaaacaaaacaaaacaaaaaagagaagaaaggtagaaaaagaaaaaacaaaacagaaatgtcgttacaccctaacttgagagtgttttctttttctttttcttttttttgagacagagtctcactctgtcgcctgggctagagtgcaatggcaatggtgtgatctcagctcactgcaatctctgcctcctaggttcaagcgatcctcccgcctcagcctcccaagtattgggattacaggtgcctgccaccatgcccagctaatttttgtatttttagtagaaacggggtttcgccatattggccaggctggtcttaaactcctgacctcaggtgatccacccgcctcagcctcccaaagtgttgggattacaggcgtgagccaccgcgcctggcctcgagagtgttttctatggaaggctctgagcttgcatcctgctgtctctttgtcaaaaagggagattagcagatgttagagagatgttaagaatacaccagcatcatctagagattttctttctctctctcttttttttttttttttttttttttggagatagggtcttgctctgtagcacaggctggagtgcagtggtccaacctatagtacatggctcactgtagcctcgacctcccaggctcaaatgatcttcccaccttggcctcctgagtagcagggactacaggcacatgccaccatggccagctaattttcttgtaaagatgggatctcactatgttgccagggctggtctcaaattcctgggctcaggtgatcctcccacctcaacctctgtaactgcagggattacaggtgtgagacactgcacctggtctcaagattttcttcttcaagttattgaaggagtgaagaagaatccttttttttctttctttttttttcatttgagacggagtctctctctgtcgccaggctagagttcagtggctcaatctcagctcactgcaacctccgtctcctgggttcaagcaattctcctgcctcagcctcctgagtacctgggattacaggtgcccaccaccatgcccagctaatttttgtatctttagtagagacagggtttcaccatgttggtcagtctggtctcgaactcctgaccttgtgatctgtctgcctcggcttcccaaagtgctgggattacaggtgtgagccaccgcgcctggccgagattttcttcttcaagttattgaaggagtgaagaagagtccttttctgactttgtgattgatgtagtctgctgccaagcccccatgcatgtaaacacagagcacctgatacacacgcaatgagaaacctgggactcacgaacctccgagggcccttccaaccttgaccaccatggcttcgtcattcccattggggtctgaaggtcctctttttttttttttttttttgagacagagtctcgttctgttgcccaggctggagtacagtggtgcgatctgggctcactgcaagctcggcctcccaggtttatgccattctcctgcctcagcctcatgagtagctgggacaacaggcacccggcaccacgcccagctaattttttgtctttttagtagagacagggtttcaccatgttagccaggatggcctcgatcttcctgacctcgttattcgcccacctcgacctcccaaagtgctgggattacaggcatgagccaccgcgcccagcttctaccagtcttgatacctccaataatagctctcttgtgctcacctgcaagttcaggttcagggaacagatgcctgggagtccatctttcatgcaaatgactttcttccagtggttgggaagatggcaagaatggaacaggagagccgtggattcaggctcgtctgagttctagtctcaatcccaccatttcccacccgagaccgtgggtcagctcacaaattcatacgtactgaataggtgcttaaaatgtgccaggcattatgctagatgatggggaaatcatgataaatcagaaaggcacagccaggcacagtgactcactcctgtaatcccagcactttgggaggccaaggtgggtggatcacttggagtttgagaccatcctggcaacatggcaaaaccccatctctacaaaaaatttaaaaaattagctgggcgtagtgggatgcggctatagtctcagttactcaggaggctgaggtgggagaatcacctgagactgggaggcgggggcttcagtgagccgtgatcgcattactgtatttcagcctgggtgacagagttggaccctgactcagaacagaacagaacagaacagaacagaacagaacagaacagaacagaacagaacagtacagaaaacagggagaaggaggggaagggggaggggaagggggagggggagagagaggaggagaggaggagagagggacacatccctggcttgtcttcatggggcttatattctagcaagagaaatgcacatgattatttaatcttggttgtgataaatgtataaaggaacagtaagtggcatgaaggtaaaggatagggcattagggaaagtttctccaaaaaaaaaaaaatgacatttcagctgcttagtaaaggctgtgcaggcattagcattagtgaaattgcaggaagaggagaggaaggaaggagaatgtgcaaaggccagcctggcacggcagctcacgcctgtaatcccagcactttgggaggaagtgcttggattgaggcaccgaagcaggaagatcacttgaactcaggagtttgagaccagcctgggcagcacagtgagaccccatttctaccaaaaaaaaaaaaaaaaaaattagccaggcaggatggtgcacacctgtagtcccagctagtcagaaggctgatgtgggaggattactggatcccaggagttcaaggttgcagtgagccatgagcatgccaatgcactccagcctgggcaacagaatgagaccttgtctcaaaaacaaaacaaacaaacaggtcaggtgcagtggttcatgcctgtaatctcagcactttacgaggccgagacgggtggatcacctgaggtcaggagttcaagaccaccctggccaacatggtgaaaccccatctctattaaaaatacacaaattagctacatgtggtggtgggtgcctgtaatcccaggtacttaggaggctgaggcaggagaatctcttgaacccaggaggcagaggttgcagtgagccaagattgcaccactgtactccagcctgggcaacagagcgagaatcctctcaaaacaaaacaaacaaacaaagaatatgcaaaggccctgaggcagaaaggaggctgcacatcgggctggagaggacaggcaagaggggggcacagaggagctataggacaaggatggagaatggggggaggcctggtctcactggccttgtgcggctttgtggacatgttgaggacttaggattctgaggtttttttctgttttgtttttgtttttttttgagatggagtctcgctctgtcgcacaggctggagtgcagaggcgtgatctcggctcactgcaacctctgcctcccaggttcaagcgattctcctgcctcagcctcccaggtagctgagactacaggcatgtactaccaaacccagttaatttttgtatttttagtagagatggggtttcaccatgccgctcaggctggtcttgaactcctggcctcaagcaatctgccctccttggcctcccaaagtgctgagattacaagtgtgagccacctcgcccggccaagccacggaagatttcaaataagggagtgacgtgctctgatttgcatttttcacagtcactctgattgctgggcagagagaatggagggcagggtggtgagagtgaatcaggtgacccgccaggaaaaggtgcacgtactcatcggtgccagagatgattggggctttgagatggaggcaaatggacacatttccgaactaattgagcaggcacgtctacaggatttgggggtgagggaggggagaaacccatggctgactcctgtaatttcttcaggcagggtacttgggttgggaggtctgtttggagttgtctggggcatggtgtggggtgtcggcaggatacagtggagatgagggggaagttagtgaattggtggggctggagctcagagccagaccatcacaggagatggaggcctgcgagtcttcaggatctgtcactgaccaaagtcttgctcacggatgagcctatcatctgtggaagaaagtgtggaatgagatgagaacaggcctgggtggaggccagggaatcagcagagacagccaagaaggccagaggctaggaggcaaaccccacagtgtgcccctcctccccaggagccaagaccagagatggtttcaagagagggggccaggcacaatggctcccgcctgtgatcacagcactttaggaggctgaggctaaaggatggcttgaaaccaggagtttaagaccagcctagttaacaaagtgagatcccatctctacaaaacaaaaaatgaactgggtgtagtggtgcatgcctgcagtcccagctacttgggaggctgaggcaggaggattgtttgagcccaggagattgaggctgcagtgcactgtgatcatgccactgccacagcaagactatcttaaaaaaaaaaaaaaaagatcagagaggggcacgacatcaaatcctccactttcttgagcttccagttgctctgatgatgatcaaggctgtgaaactctcctttggcaaatgcatgaggggtgactgttgtgtctccgagccaggccctgggacccaactctgggcaggtagcagctccctgtgtataccagatgtgatagtaaaaaactgacactgggccgggcgcggtggctcacgcctgtaatcccagcactttgggaggccgaggcgggtggatcacttgaggtcaggagtttgagaccagcctgactagcatggtgaaatcctgactctactaaaaatacaaaaatacaaaaattaacagggtgtggtggcggatgcctgtaatcccagctactcgggaggctgaggcaggagaatttcttgaatccgggaggcggaggttgcagtgagccgagatctggccaccgcactccagcctgggcgacaagagcgaaaaactccatctcaaaaaaaacaaaaaaacctcctgggccccagaagatggcaactgcctcttccagcctcttccacctgcctgcctgtgcactcctctgccactctggacctattccatggtgccacgtggtcaggcattgaaggaatgggtgggttttttttccatcaccctcagatgctgctgctggggttggggcgggtcttccctggctgactctgtctgcctcacccactctctccccatctctctgtcaccacaggtctccagggaccaaatttagcccatttttcctccaaggattctggacccttggccatatttgcctctagctttaggtcaacagatttctaacatggagtcaaaaaatctgtatgtttaaaaaaaaaaaattggctgggagtggtggctcacgtctgtaatcccagcactttgggaggccgaggcaggtggatcacctgaggtcaggagttcgagaccaccctggccaacatggtgaaaccccgtctctactaaaaatacaaaaattagctgggtatggtggcggacccctgtagtcccagctactcaggaggctgaggcaggacaattgcttgaacccgggaggcagaggttgcagtgagctgagatcgcgccattgcactccagcctgggtgacagagtgagactctgtctcaaaaaaaagaaaaaaaaaaaaaaggccgggcgtggtggctcacggctgtaatcccagcactttgggaggccgaggcgggcggatcacgagatcaggagatcgagaccatcctggctaacacggtgaaaccctgtctctactaaaaatacaaaaaattagctgggcatggtggcgggcgtccatagtcccagctactcgggaggctgaggcaggagaatggcatgaacccgggaggcggagcttgcagtgagccaagatcacgccactgcactctagcctgagcgacagagtgagactccgtctcacaaaaaaaaaaaaaaaaaaaaattgaggccaggcacagtggctcatgcctgtgatcccagcactttggccgaggcaggcagatcacctgccatcaggagttcgagaccagtctcgccaacatggcaaacccctgtctctactaaaaatagaaaaattagccgggcatggtgtcgggcacctgtaatcacagctactggggtggctgaggcagaagaattgcttgaacccaggaggcgaaggttgcagtgagccgagactgcaccattgcactctaacctgggctataagagcgagactctgtctcaaaaaaaaagccctttacaaatattaactcgtttaattctcagaacacccctaggaggtgggtcctgctatcctgccggttttgtagatgaggtaactgaggcacagagaggataagtcacgtggcccaggtcttggtcgcttctcagcctccatttccgagaggagaaaacaatgctccgaaaggggaagtcatcggcctgaggtcaccagccgggaaccggaggagccaggatggggcccgaggtccatctgaggccagagccagtgctgacccgccagacaggaaatcagagctggggactgaccgtggggcccactcaagtgggtggtgtggggtggtgacgggggctggggtgaaagccaggatgaggtgtcacattaggctagggttcctgctgggcctggcggggcagagacccctggttgatgcctggcaagtctctcctcatttctgctgtgctgtcccctgggtggccaaggcgccaggcccggctgtggatctgacacctcctgctgccgagctctgatcagaatctggctgcagggcagggggtgaaactgaatcccaccaggcctcccctggcctggatgtcacggcagacatcccaaccccacttcttggcactgcctgaccccagcagtggccttcttggaacctggagagcctgtgcccaccctgtggtgccgaccaggctgctgccttggccctgggctctgggctccagggtccccagggatcccaggcccaggctcttgcccctcccggctctcaggtgagctgctgggatcgggttcctgcggtttcatgtctttcattgttcttggctggggcccggcttatgaaactgtaatgaggggcccctgctcccgaagccggcccctctaaggtttccactgcctcggcggctgctgccaccacagcccggagtcggggcctgggagggcagcagtgtgggggcctgagccggagccccccggggacgagggtgctgacagtcgacagccaccaccaccaccagagcccgcagcccaggtaatccgagaggaggcggggcgcagggtgccatggccgctgtctcccaccaccaggggagggaactgccgctctccagaggtggggaggaattggggggggccctggaggtgagcagccgttcccccctggtgagcccagcaccagaccagccttcacaggtgtggccttgccaaaggtggagggagagaggagtgggcagctggctctagcccccgcccttttcctggggccttgaccctccagccctggatcccctgcctctcctttagtggggcaaatctcttctgtcctccaagaccttgctttcccatctcctctaccatcaaactgcctcttcctccctcagacctctcccttctctcagccagcctaatccttcctcctcgcccttgtcttttggccgcaaaagaccctggtggatccttctatccacctcgttctggggcgcacgcacatacatgcatgtatacatgaagttgcactcatgcaaacgtacagatcggtgtacccgcgggacctgcgtagacacgcatgcgcaagagctcgctccacctatgtgcacacatgtgcccccaataccaggcctttatccacacacatacctgctccaaggcccatatgtgtacactcacgtgtgcaggcacacaccaggtacctcagccagccctcggcttgagtcccaaggggtgcttctagcctgatgggcagctccttgagaagtgcaggatcccccgaggagatgcctggagactcccacgccaccgggaggggctgtgcagggggaggggagcccccacgtgggcgctgagctgtctcctctctccaaccctggcccaggagctcaggagcccttcaggtgctgaggtgccctactgcgacctgcctcgatgtccacctgcccctgaggacccactcagcgcctcaacctccggctgccagtctgtggtggacccaggcctcaggccagggcccaagaggtgggtagagtcccagggcccaggaagggcttcatggggtggaatgccctcacccttcccatttgcactccttccccaaggcagcacctgtctctaatggctgctggcatgggtcacgtggtcagtcctctaaacctaggcacaggtgggtggtgggcatgctccttgggcccacaggaagaactcagatcacaccaccctgtttgcacttcagtggctgagcctcccctccccagtcctggctgtctctcccaggggccctgcccaccccataacctcccaagaccgagctcagctttgccccagggtgtgtggctgctgtacactcaccttgcagtgggcatggccacagcctactcacatttcctggttccctttgcacagctttaaaagattaaacagtccctgcacccaggggcacctgctgtcacccacctacgtgggtgtgcactgctccaggctctggggttccttccaccctcaggcctgagtggcagtccccctttaaggtcatggtaccttgggaggccatggtctgagagtctagaaacctgggttccagcttcagatccatccctgatgggtcttgagcaagttactctgtctttctgtgtctcagtttccctctctgtaaaataagagggattgaattaaatcagcattgtgctgggatcattcatgtgctcctcacaggtaggcatattaaaacaaacaaacaaacaaaaaaacagcctgggtgcagtggctcatgcctgtaattccagaactttgggaggccaaggtgggcggatcacttgaggtcaggaggtcgagaccagcctgaccaacatggcgaaaccctgtctctactaactatacaaaaattagccaggcatggtggcaggtgcctgtaatcccagctgctcgggaggctgaggcaggagaaccacttgaacccgggaggcagaggttgcagtgagttgagatcgtgccattacactccagcctgggtgacacagcgaggctccgtctcaaaaaaaaaaaaaacaacaaaaaaaaaaaacaaaaaaaaacccacaaaaaaacgaaaaaaaaaacaaagacagctttgttatcaagtatgtttcagaaagtctgggataaatgaagttgaatagctttcctgcaggacttgtcagagcctttagcttgcctgcgtgcatcgtggcttttgggtaacggaagtagagaagtatgtcatttgactacagagctcttttttatggccatcacttattatcatcgtgtaggccagtctgtgggtcactctttggggatactgccagcgctaagccttcttgagcctgtgacttcttttaaagcagagccttctctgcagctccctccctcagcatctgggctagtgaacccgtcaatgcctgtggagccatgctgcctctcacatcctcgttagccaagcatgagtctgtcttcttagacttactgaacttggggtcagtagactaagactaagacttaaagttggggctggggcaatagttttggttcataacacagctctgccctttcctatctcggtgaccttggccagtctcttgacctctctgagcctcagtgtcttcctctgtgaaatgggaattattattattattattattttgagatggcatcttgctctatcacccaagctggagtgcaatgacacgatgttggctcactgcaacctcagcctcccgagtagctgggattccaggcatacaccaccacacccgactaatttttgtatttttatttatttatttttgagatagagtctcgtgctgtcacccaggctggagcgcaatggcacgatcttggctcactgcaacctccacctcctggcttcaagcgattatcttgcctcagcctcctgagtagctgggattacaggtgtgtgccaccaccatgcccatctaatttttttatttttagtagagacggggtttcaccatgttggacaggctagtctcggactactgacctcaggtgatccacccaccttgacctcccaaagtgctaggatttcaggtgtgagccactgcgcccggcctaaaatgggaattattatacttactttaaagggatgctgttgctgggcgcagtggctcacgcctgtaatcccagcactttgggagtccgagacgggcggatcacgaggtcaggagatcgagaccatcctggctaacacggtgaaaccccatctctactaaaaaatacaaaaaattagccaggcgtggtggcgggcgcctgtagtcccagctactggggaggctgaggcaggagaatggcatgaacctgggaggcagagattgcagtgagccgagatggtgccactgcactccagcctgggtgacagagcgagactctgtctcaaaataaataaataaataaataaataaataaataaataaataataaaattacaaaaaaaaaagggatgctgttttagctcaatgaggcaatccatataaaaagtctgacacagaggcagctctcaccattggctccctttcccacaccagcgtgtgggccccaggctccctgtgtgagtgagtgcatatgcctgggtggggtgggggatgctcctaactccccattactttttgggtctgtctcctctcccaggggcccatccccctcagcagggctcccagaagagggtcccacagctgcccccaggagcaggagccgggagcttgaggcagtaccctatctggagggcctgaccacttccttgtgtggcagctgcaacgaggaccccggctctgaccccacctccagccctgactccgccacccctgatgataccagcaactcgtcctctgtggtgagccaggagtgggagtttgggggacaagagtggctcacacctccatctgcagccctgggtcccacctaaacctccaggccagggctgagcctcacaccagggaatccgacgaggtcctctggaccattagctggcagctcgggccaccccggcgaacccctggagagtggggatttctgcacaggctggcccagggcagctggggtctggctgtgaaaagacagggaaaggagtttcagccgacaggagctctgggtgaatcaccagcaggctcgggctgccacatgctctcagatcccagagtgttgggtttggtgtctagcgcaagagtggcacagggccccagggccctgccctcgacacacagtgctgagtcccatggccagccctggaatagatttccaagagacagaggaaagggagcaggctgcgggggtcatttaaccacgaaaagagaagagccagcagtctttcctccagcatttgcattttgaggggctgccgcagagcagaagagacaggcttgtcccaggagaccccccaaaaggaaaatgacagggggtggtgataagactcagaataaaacaacccagcctcacacgcttcatggccagctccatgctaagggcttggtgggtgtgggctcaggggagactcaccacagcctcagaagtggagatttcagtcgccccatatggggctgaggctcagcggggggagcaacttagtggaggccacacatctgggaagtagtggggctaggatttgaacccacttttctctggcccctggggctacctcacacagtcccacatgcggaactctgggactctgggcaaagctcttggcttcaatggatgtacatgcctcctaggtccgttgaagatgagcgacttggcacttagcacctgctagagcccagcacagtgccaggcaaacagcacatgcttttaatttaattgattgattgaagactgggtgcggtggctcacgcctgtaatcccagcactttgggaggccaaggtgggcggatcacctgaagtcaggagatcgagaccagcctggccaacatggtgaaactctgtctctactaaaaatacaaaaattagcagggtgtggtggtgggcacctgtaatcccagctacttgggaggctgagacaggagaatcgcttgaacccgggaggttgcagtgagcttagattgcaccattgcactccagcctgggcaacaagagcaaaactccgtcttaaatagagaaaaaaaaaaaagttgattgattgagacagggtcttgctccattgcccagactggaatgcaatgatgtgaacatggctcactacagccttgacttcctgggctcaagtgatccccccacctcagcctcctcagtagctgggactataggcatgcacaaccatgcctagttattattattttttttaattttgtagagacagggtctcactgtgttgcccagcctggaagtgctttttactgaggccatggagcggagtctacaccacagaaggtgtggcaccactcactgtcacctcttggggacagaacttgacagtttaggaagtgctttttattttttatttaattttatttatttttgagatggagtcttgctctgtcacctgggctggagtgcagtgccacaatctcagctcactgcaacctctgtctcccaggttcaagcgattcgcctgcctcagcctctcgagtatctgggattacaggcgcccaccactatgcctggctagtttttgtatttttaatagagacagggtttcaccatgttggccaggctggtttcgaactcctgccctcaggtgatccacctgcctcagcctcacaaagtgttgggattacaggcgtgagccactgcgccctgcagggaagtgctttgtttttttttgttttgtttttctttttgttttttgagacagagtctcactctgtcacccaggctggagctcagtggcgcgatctccactcaatgcaagctccacctcccaggttcacaccattctcctgcctcagcttcccaagtagctgggactacaggtgcccgccaccacgcccagctaattttttgtattttttagtagagatggggtttcaccatgtttcccaggatggtctcgatctcctgacctcgtgatccacccacctcgtcctcccaaagtgctgggattgcaggcgtgagccacagcgcctggccagggaagtgctttttaatgccaattcccttcccttccttctgcccctctcatttggagagtatatgtcctgcagccttttttctcccgcaaacatactttctcctccccttctctggcaggactgggacactgttgagaggcaggaggaggaggcccccagctgggacgagctcgcagtgatgatcccgaggaggcctcgggaggggccgagagctgacagctcccaaagggctccgtctctcctcaccaggtcccctgtgggaggagatgctgcaggccagaaaaaggagggtgagtccttctgccaggttggttcccatggtgatggcctggggccccccagatagccatctcactggccatttgggactctgggcacggcttactttggtggcctgagtgttaataatagtaacagtttgcatgtcatgatggagcagccacaatgagttatgctacccactttaattattattattattatttgggatggagtcttgctctgttgcccaggctagagtgcagtggtgtgatctcggctcactgcaacctttgcctccccagttcaagcgattctcctgccccagcctcccaagtagctaagattacaggctcccgccaccatgcccagctaatttttgtctttttagtagacatggggtttcaccatgttagcccagctggtctcaaactcccaaccttcagtgatctgcccatcttggcctcctaaattgccgggattacaggcgtgattacaggcacgcctagcctgttattattattattattactattattattttgagataagagtctcacactgttgcccagactggagtgcagtggtgccctcttggctcactgcaacctccgcctcctgggttcaagagattctcctgcctcagcctcctaagtacctgggattacaggcacccgccaccacacgtggctaatttgtgtatttttagtagagacagggtttcaccatgttggccgggcttgtctcaaattcctggctggggattacaggagtgagccactatgcctggccttagccaaggagtttggacttctctaaatagtagggagccaccgaaggtttttgaggaggaaagtcatgtaattaaacctgtgcctcaggaagttccctagatcaaagatgcaaaggatgaattggagcagggaggggttgaaggatgagaaaccagttaagagactgttgcaggcactgtagcaataactggttcaggcatgaatcactggcggatgcaaaatccctagggtgataatttgtcagcaaacaggatagtcatggtttcaaagtattgtgtccggaattggtgggttcttggtctcactgacttcaagaatgaagcggcagaccctcgcgatattacagttcttaaaggcggcgtgtctggagtttgttccttctgatgttcggatgtgtttggagtttcttccttctggtgggttcgcggtctcgctggctcaggagtgaagctgcagacctttgtggtgagtgttacggctcttaaggagacgcgtccgcagttgttctttcctccctgtgggttcatggtctggatggcttcaggagtgaagctgcagaccttcgtggtgagcgttacagctcataaaggcagtgtggacccaaagagtgagcagcagcaagatttattgcaaagagcgaaagaacaaagcttccacagcatggaagaggacccgagcgggttgccagagctggctggggcagcctgcttttattctcttgtctggccccacccacatcctgctgattggtccattttacagagagccgagtggtctgttttgacagggcgctgattggtgcatttacaatccctgagcttgacacaaaggttctccacatccccactagattagctagatacagtgtccacacaaaggttctccaagtccccaacagagtagctagatacagagtgtggattggtgcattcacaaaccctgagctagacacagggtgctgattggtgtgtttacaaaccttgagctagagacagagtgctgattggtgtatttacaatcccttagctagacataaaggttctccaagttcccactacactcaggagcccagctggcttcacccagtggatctcgttctggggctgcaggtggagctgcctgccagtcccatgccatgcgcccacactcctcagcccttgggtggttgatgggactgggcgctgtggagcaggggcggcgctcatcggggaggctcgggctgcacaggagcccacggaggcggggggaagctcaggcatggcgggctgcaggtcccgagccctgcccggtgggaaggcagctaaggcccggcgagaaatccagcgcagcgctggtgggcgggcactgctgggggacccagcacaccctccccagccgctggcccaggtgctaagcccctcattgcccggggccggcagggccagccggccgctccgagtgcggggcccaccaagcccacgcccacccggaactccagctggcccacaagcgccgcgcgcagcctcggttcccgctcgcgcctctccctccacacctccgtgcaagctgagggagccagctccggcctcggccagcccaggaaggggctcccacagtgcagcggtggcctgaagggctcctcaagtgccgccaaagtgggagcccaggcagaggaggcgccgagagtgagcgagggctgtgagggccgccagcatgctgtcacctctcagtatcacccctcagattctgcatcgattactgagagaaaggcacccttaggctggggagagcgggaagataccactttcaccaagaggctgctcagcatccccagagtggggcaaaccaacataatatgccccctgatatgatgcatggggtcaggggaggggatgctggggtgggcacagaatcccttcccttctaaatcgtcctgctgaaaatgcattgcctacacctaaccccagtgaaacatcagacaaacccgaattgaaagacattctgcaaaatgactgggctcctcataggacaaaaagcggctaggggactcttcttgattaaaagagactaacaggatgaggacgtggaatgccatgtgtgagcccattgggatctgggacaggaggacacagagctgtgacaggcattactgggacaactggggcttgtttttttttttttttttttttgagatggagtcttgctctgttccccaggctggagtgcagtggcgcgatctcagctcattgcaacctccacctcctgggttcaagcgattctcctgcctcagtctcctgagtagctgggactataggtgcctgccaccacgcccagctgactttttgtatttctagtagagacagggtttcaccatgttgagcctgatgggatccgggacacgcctatagtcccagttactcgggatgctgaggcaggaggatcgcttgaacttgggaggtggaggttgccgtgagctgagatcgccccactgcactcccgcctgggcaacagaataagactccatctcaaataaataaataaataaataaataaataaataagggccatggttgtggggtgaggaggggacagagaaggagagaggtttaggaggcagacttgatggtactttggacaggaggatacacagtcacagctcctggcctgggtgtctgggtagatggtgtgccctttgctgagagcaggtggctggggagcggatgggcccagcgctggctgtgctgtgtgggatttgcgagccctgaggaagaggttttgaggcttcagatgctcagggaagcaggggatggagatgtggcatcttcaactgaggagcaatgttcactcaggcactcagcagacgtttacttactgcccacaagtcaatcatggctgaatagatgaggcagcaatgagaacagcagcagcattacagcagtgacctgtttttttgatgttccaggccttgtgctaaataaatgtcttgcacagaatcactctgggctccccgatccctcactcctggtctgcctccttcctcacgggccactccacctcgctctcctttgctgaggccgcctcctctgcttcacttttaaatatctgatgccccacatcccagtcctgggccccttctgtcttctccctgcacacttagctgcttggctttcggtactgtctgggaaaaaccatgactccggagtccacatctctggccttgatttctcccctgaacctgccaatttatacaacccagccctctactgcgttaatcacacctcaggccccacactgcactcactgtttcactcatccccccccgcccttttttttttttttttttttttttttgagacagagtttcactcttgttgcccaggctggagtacaatggcgcagtctcggctcactgcaacctccacctcccaggttgaagccattctcctgcctcaggctcccaagtagctgggattacaggcatgcaccaccacgcccggctaattttgtatttttagtagagacggggtttctccatgttggtcaggctggtctcgaactcccgacctcaggtgatccgctgatccgcctgcctcggcttcccaaagtgctgggattacaggcgtgagtgaccgtgcccggcccactgctacaatactattaactaagctacagacgtgatgggattcaccagtttttctactaatatcctttttctgttccaggatccattccaggatcccacattgcctttagtccctctcctcatctcctccgtctcctccaatctgtgacaggtttcccatctcttccagtttcccctgaaggctgggggcacagcgatctgctcacctttgactttaaaaaaagtctccctggatgaacaatgacattggccccagagtgcccaggcttgggggctactgcaaccatccaggagagaaatagtggtggcttggagtaggaagtgggtgtagatgagagaaacaggtgaatatggaatgtatttattttatttttcgtagagatgggggctcactatgttgcccaggctggtctccaactcctgggctcaagcaatcctcctgcctcagcctcccgaaatgttggaattacaggtgtgagccactaccaggcatgaaacgtattttagaatgccatgggacatcagccaccagcaattttttttgttttttgttttctgagacagagtctcgctctgtcacccaggctggagtgcagtggccagatctcagctcactgcaacctccacctcccgggttcaagcaattctccagcctctgcctcccgagtagctgggattacaggcatgcactactgcatccggctaattttttttttttttttttgtatttttagtagagatggggtttcaccgtgttagcagggctggtatcgatctcctgaccttgtgatccgcccgcctcggcctcccaaagtgctgggattacaggcatcagccactgctcccggctgcatccagctaatttttgtatttttagtagagactggtttcaccatgttggccaggctggtctcgaactcctgacctcagatgatccacccgccttggcctcccaaagtgttagcattacaggcgtgagccaccgtgcctggcaaccttgcaaattttgaattccctgctaggtgctgggaactcagactttcaccaacaccagcccagagaggctggacgaggcagtggctgcaaagggagaggacaggggatcttaagaaggcgtgaagggaggggatctgcatgaaggcaactgtggctacttttttgtttcgttttttgttttaagacaatgtcttgctctgttgcccatgctggagggcaatggcacattcttggctcactgcaacctccacctcctgggctcaggcactcctccggcctcagcctcctaggtagctgggactacaggcacgtaccaccaggccctgctaagttttaaaaaacttgtagtagagacagggtctcgccatgttgcctaggctggtctggaactcctgagctcgagtgatcctcccaccttggcctctcaaagtgctgggattacaggtgtaagccaccacacccatagttgtggctcctttaagatgaggccatgataccctttactcttcacctaaagcagtagccaagggacatgtacataggggtgctcaacacctgcttggtgaccgagggattgagcggggtggagggtgacacaccaaggtcatggcaactctgtcatgaggctaggagttgcaaagagggtcactactgaggacagttacattaatcctttaggccagtgcttctgaaactataaggtgtacaaatcaccagacagttttgttaaatgcagatccagaagcagtgcatctgggctgggacctgagattctgcatttctggcaaactcccagctaccagtttataaaaggttgtccatccctgcacctttcctatcctcatggcagccctaggagaagcctcagggtaggaacatttggatacaaaaaaacaggggctttctagagctgtcgcacaggaaacaggctcattagaacctgtctctactaaaaacacaaaaatgagctgggcatagtggtgcatgcctgtaatcccaactacttgggaggctgaggcaggagaatcatttgaacccaggaggcttaggttgcggtgagccgagatcgcgtcattgcactctagcctgggtgacagaacgagactctgtctcaaaaaaaaaaaaaaaaaggtcgggcatggtggctcacgcctgtaatcccagcactttgggaggccgaggtgagcggatcacctgaggtcaggagttcgagaccagcctggccaacatggtgaaaccccgtctctactaaaaatacaaaaattagctgggcatggtggcgcatgcctgtaatcccagctactcgggaggctgaggcaggagaatggcttgaacctgggaggcggaggttgccatgagccgagatcacgccactgcactccagcctgggcgacagagcgagactctgactcaaaaacaaaacaaaacaagaaatggggggaattccttggattctgattgaaggaaatagaactgggaagggaagactgtcaggtggctgctgttgggcccacctctccctccctggggtcacacaggccattgtcaacacttctctccacaaatttgcttcttctctgtcttgtccgtggatccccagaccctgtggccttccagttcttgaacccatctcttgagtgagtcagggtctcaatttcaaattcttgacctcagcttgagagaggcatccaagcccttgtctaatcagccttggtcagagaggtggagtcacttggtacagacagtgagacctgtaggaggagggtgtggggtttgccctaatcactggtcctaagggacaaagaaaggtagaatatgagagctgcctggacctctccccttaccttgagcccctctcttctctctccagacaccggcggtgggggccggagcgcaggacagcactgggcaaggctccggggagaaagcgggttgtccctggagcggcaccggtcaacactgacccaggcttcctccatgacaccacacagtggacctcgaagcaccacgtctcaggcttctcctgcccaaagggacactgctcaggctgcctctacacgtgaaatccccagagcctcctctccccatcgaatcacccaaagggacacctccagggcctcatccacccaacaggaaatctccagggcctcatccacccaacaggaaacctccagggcctcatccacccaagaggacacccctagggcctcatccacccaagaggacacccccagggcctcatctacacagtggaacacccccagagcttcctctccctcacgaagcacccaactggataaccccagaacctcttctacccagcaggacaacccccaaacttcttttcctacttgtactccccagcgggaaaaccccaggacaccctgtgtccagcaggacgatcccagagcctcctctcccaacagaaccactcaacgagagaattccagaacatcctgtgcccagcgggacaatcccaaagcctccagaacctcctctcccaatagagccacacgagacaaccccagaacatcctgcgcccagcgggacaatcccagagcctcctctcccagtagagctacacgagacaaccccacaacatcctgtgcccagcgggacaatcccagagcctccagaacctcctctcccaatagagccacacgagacaaccccagaacatcctgtgcccagcgggacaatcccagagcctcctctcccagtagagctacacgagacaaccccacaacatcctgtgcccagcgggacaatcccagagcctccagaacctcctctcccaatagagccacacgagacaaccccagaacatcctgcgcccagcgggacaatcccagagcctcctctcccaatagagctgcacgagacaaccccacaacatcctgtgcccagcgggacaatcccagagcctccagaacctcctctcccaatagagccacacgagacaaccccagaacatcctgtgcccagcgggacaatcccagagcctcctctcccaatagagctacacgagacaaccccacaacatcctgtgcccagcgggacaatcccagagcctccagaacctcctctcccaatagagccacacgagataaccccagaacatcctgtgcccagcgggacaatcccagagcctcctctcccaacagaaccacccaacaagacagccccagaacatcctgtgcccgacgggacgatcccagagcctcctctcctaacagaaccatccaacaagagaaccccagaacatcctgtgccctacgggacaatcccagagcctcctctcccagcagaaccatccaacaagagaaccccagaacatcctgtgcccaacgggacgatcccagagcctcctctcctaacagaaccacccaacaagagaaccccagaacatcctgtgcccgacgggacaatcccagagcctcctctcgcaacagaaccatccagcgagacaaccccagaacatcctgtgcccagcgggacaatcccagagcctcctctcctaacagaaccatccaacaagagaacctcagaacatcctgtacccgacaggacaatcccaggacctcctctcccaatagagccacacgagacaaccccagaacatcctgtgcccagcgggacaatctcagagcctcctctcccatcagagccacccaacaggacaaccccagaacttgtattcaacagaacatccccagatcatcttctacccaacaagacaaccctaaaacctcttgtaccaaacgagataacctcagacccacttgtacacagcgggaccgcacacagtccttttcctttcaacgagacaaccctggaacctcctcatctcaatgctgcacccaaaaggagaatctgagaccatcatctccccaccgctccactcaatggaacaatcccaggaattcatctccccatcgtactaacaaagacatcccctgggcctcgtttcccctccggccaactcagagtgatggtccccgaacctcttccccatctcgctccaagcaaagcgaggttccctgggcatccatcgccctccggccaacccaaggtgacaggcctcagacatcctctcccagcaggccagcccagcatgacccaccccagtcctcctttggccccacccagtacaacttgccatcccgggccacctcttcctcccataacccaggccaccagagcacctcccgaacttcctcacctgtgtaccccgctgcctatggggctcccctgacctctcctgagccctcccagcctccatgtgctgtgtgcattgggcaccgggatgcccctcgagcctcttcgccccctcgctatttgcagcacgaccccttccccttcttcccagagccccgcgcccctgagagtgaaccgccccaccacgagcctccctatataccacctgctgtgtgcattggacaccgagatgccccccgggcgtcctcgcccccccgccacacccaatttgaccccttccccttcctcccagacacatcagatgccgagcatcagtgtcagtccccccaacacgagccccttcagctccctgcacctgtgtgtattgggtaccgagatgcaccccgggcctcctccccaccacgccaggccccagagccttccctcttattccaggacctccccagggccagcacagagagccttgtcccttccatggactctctgcacgagtgcccccacatccccacccctgtgtgcattgggcaccgggatgcaccctccttctcatccccaccacgccaggctcctgagccatccctcttcttccaggatccccctggaactagtatggagagcctggccccctccactgactctctgcatggctccccagtgctgatcccccaagtgtgcatcgggcaccgggatgcaccccgagcctcctccccaccccgccacccacccagtgacctagcgttcctggcaccctcaccttcaccgggcagctctgggggctcccggggctcagcgcctcccggggagaccaggcacaacttggagcgggaggagtacactgtgctggccgacctgcccccacccaggaggctggcccagagacagccagggccccaggcgcagtgcagcagcgggggccgcacccacagccctggccgtgcagaggtggagcgcctcttcgggcaagagcgcaggtgagcccgggggtggggtcagccaggtgggctggggaggaggctcggcagcaggacaggtgaagggttagggtgccaaaagaaagtgttcaaatccccctggcttgccatttaccggctgtgtgaccttgggcaaatcgctccatttctctgtttctgcatattgggagttttctgttttgtgtgtgtgtgtggttaagtgatgtcatgcacagcccagtggttaacagcaaagactgcagtcaggagggctgagtccaaatcctgggtcaaagccacatgtcaactcgtatgacctgatatagtgagttaacctacctgagcctcagtttcctcatctgtaagggaggggaacatgagcacattcattcaaataagggtgaactgtctttttattttttattttttgtttttttttttgaggtggagttttgctcttgttgcccaggccggagcgcaatggtgcaatctcggctcactgcaacctccacctcctgggttcaagcgattctcctgcctcagcctcccgagtagctgggattacaggcacgtgccaccacacccggctaatttttttgtatttttactagagacggggtttcgccatattggccaggctggtctcgaactcctgacctcaagtgatccacccgcctcggcctcgcaaagtgctaggattacaggagtgagccaccgtgcccggccaaaatgagagtgaactctcaaaccctttgatccagactcatgggttttttttttttttcttccgtgcatgagggagaagaagaaagtacccatgattttttcctgccttggcaaagaaaactcatgggtccctatgcatttcagaaaacagttatgtcaatttaaaatgtatggccagggccgggcacggtggctcatgcctgtaatcccagcacttggggaggccgaggcgggcggatcacaaggtcaggagatcgacagcagcctggctaacacggtgaaaccccatctctactaaaaatacaaaaaattagctgggcatggtggcgggcgcctgtagtcccagcaactcgggaggctgaggcaggagaattgcttgaacctgggaggcggagcttgcagtgagccgagatcgtaccactgcactccaacctgggtgacagagtgagactccatctaaaaataaaaataaaataaaaatgtatggccagagctacctattttaagaaagaaagctcacagaattatggatttttagcagtcaaacatcctgggacacctgaagtccaggtgtcttttgagtctccttggtcagcagcactggccccctggaaggggagcatttcctcctgatcaggctgaggtttctctccccagaagttccagccctcgagttttcaagaatcagagctagaattccattagttagggtcaagagaacaacagcaacaaaaagcagtctggaagtctcaaaactttccatgtatataattcaacgaatttttagtttatttaccaagttgtccaaccattgccacaatctaactttagaacattttcatcaccctaaagggtatggaatattttgtatctaaaattcctctttgctgctccttgggaaagttttctcctggatttgaatctgcatgagaaaccttatcagtcttggctgggtgcagtggctccctcctgtaatcccagcactggagcttgcagtgagccaagatcatgccactacactccagcctgggtgacagagtgagactccgtctcaaaaaaaaaaaaaaaaaaaaaaattagccgggcatagtggcacacgcctgtagtcccagctactcaggaggctgaggcagcagtattgcctgaatttgggaggtggagtttgcagtgagctgagattgcgtcattgcactccagcctgggcaacaagagtgaaactccatctcaaaaaaagaaaaaaaagaaactttatctcttgttcttcaaatttccttttccagtaagcttgatcatttaatatccagatgacaaccgtgtggtctccagcattagtataattctttctttggccttaaaaacaaaaacccagagcagttttaggtttacagcaaaattgagcagaaagtgcagtgttccatgcacagcctctcccactaccaatatcctgtactagataggtatgcttgtttccagctcctggcctcaagggatcctcctttcttggcctctcaaagtgctggtgagccactgtactgggcagtagggtgatacatttgttacaatccatgaacctacactatgaaatcacccaaagtttagggttcactcttggtgatgtacagcctataggcttgaatgaatgtatgacaagtatccaccattgtaacatcatggagtagtttcaccctgaaagtcttcagtgtctttaacttttttttttgtttggagatggagtctcgctctgtcacccaggctggagtgcagtagtgcaatcttggctcactgcaacctctgccttctgggttcaagcagttctcctgcctcagcctcccgaggagctgggactacaggagcatgccgccacatccggctaatttttttgtatttttagtagcgacagggtttcaccctgttgcccaggctagtcttgaactcctgagctcaggcaatctacccacctcggcctcccaaagtgctgggattataggcgtgagccaccgtgcctggtctgaccttttttttttttgaaacagggtcttgctttgtcacccagcagtagtgcagtggcgtgatcatggctcactgcggcctcaaactgccaggctcaagcgattctctcacctcagcctcctcagtagctgggactacaggcgtgtaccactatacccagctaatttttctactttttgtagagatggagtctcactttgttgcccaggttggtctcaaactcctggcctcaagcaatgctcccaccttggcctcccaaagtgtctttgacctttttatgattactatttcttgtctaatgtcaattttcctaactttgtcttaactaataactcagcagggacattaaggtctttaagccaaagttaattaattttctttccttttttccaggataatttcagagagataaggtgtttatattaataatagaaatgagaaatatgtttacacttttattaaccatttgtttttacacgatcactcctatacatttaattctactctctttgaaatagcttatttaccttttagggaagttttcataattttactgaataattaaaatttttcctcttatctggcaccttttccaagtagaaaaccattcatcctctgaatatggaaaattttaaaactgtgcagtgtgtgtgtaagggacagactggagcttatgagcgggtggctgtaggagtgtgcttttattttctcctatttcctcatcgatatgtatttattgagcatctactctgtccaagcattgtcccgagtctggaaaatttttcttaaagggttgtcacatcaaagcattgggagttttggcttgatcttaatttttttttccttagatgcctttggcatctcttagagtcacgtagcatcctgtggtcatttgaattcaaaacctagccttcactggatttgctagacttgatggctttgctcctttaattctctctggaggtcgaagaacccatctaagcttccgaaggaaacgtttcctttgtcatgcttggtgcggccacatcaaccctcgggaacaggtggccccgaggagacgctgttgcttcagcatcggacaagccaggtctctgttggggtttcagaatcttcttgagtccctcactcttttctctcagttctacatgggggaaaaaaggaaggcgagttctcaggaggaatgctcatcaagcaagctggagttcgtatggaaaatgcatccatccggaagagaacacacaagtgccttgcttccctgcaccgggtgtttccactattgtcctcctggtcctccccattagggaggaacagcccactgggtcacgtctgggctcttgcttcatcgaagctcctataccccagttcgggggaaaattcactctaaggccttcagctctcacagagtaaggaaacgcactcacctccaattagattacaaattggctgggtgcagtggctcatgcttgtaatgccaagactttgggaggtcaaggcaggtggattacctgaggtcaggagttcaaaatgagaccagcctggccaacatggtgaaaccccgtctctactaaaaatataaaaattagctgggcatggtggtggacacctgtaatcccagctgctcagcaggctgaggcaggaaaatcacttaaaaccagaaggcggaggttgcagtgagctgagattgcaccactgcactccagcctgggtgacagagcgagactccatctcaaaaaaaaaaaaaaaaaaaaagttacaaacagcctgcccagggagccctcaagctcagaaacacttcctccagggaactttggttcctctccgaaccagctgccaataactgctaacaactaacattattgtgctttatggctctgattctaatgacattggcaaaagacatgaaacaacaaaaaactccaaccccatactttttttttgagacaggatcttgctctttcacccaggctggaatgcagtggcatgatcatggctcactgcagcctcaacctcccaggctgaagcgatcctcccacctcagcttcccaagtagctgggactacagccacgtaccaccatgctcggctcattaaaaaaatttttttttcctagaacaaggtctcattctgttgccagggctgtctcaaactcctcgactcaagtgatcctctgacctcagcctccccaagtgctggaattacaggtgtaaagacactgtacctggcctcccaaccccatatatatatatatatattttttgagacagggtctcactatgtcacccaggctggagtgcagtggcgcgatctcagctcactgcaacctccacctcctggggtcaagcgatcctcctgcctcagcctcctgagtagctgggattacaggcacgtgccaccacgcctggctaagttttgtatttttagtagagattgggtttcactatgttgaccaggctggtctcgaactcctgacctcaagtgatccacccacctcagcctcccaaagtgctgtgattagaggcatgagccaccacacctgggctaatttttgtatttttagagactaggtttcactatgttgtctaggctggtcttgaactcctgagctcaagccatccgcctgcctcagcctcccaaagttctgggattacaggcgtgacccattgcgccctgcccaatcccatacttttgaaggtgtcgttccagcatggctcctcaggcacaggcccaccacagacagcagggcctatggaggcctgagcagagtttcctcatacttccctttttgctgcctcactctgggtccaccacagggtggcctttttcaggcttctcttcctggttcagttcatcgaccaaagacatggctccatttgctaactgagacccaaccaaaataaacattcatggagtggttgggccttttgttgtgaccccttaggtagaggaagggagagatatgcccaggttctgtttggtgtttctacctgtcaatagagataccacgttaatcattaacagccatgcctcccagttagtaagcaagacaactaactggaactagactttttacacaagttagagatgatcttcatcggatgcgtcaacaatgcctgaagcccagtgtcttagaaacaacacttgcccagggtcaggcgtggtggctcatgcctgtaatcccagctacttgggagattaaggcagagaatcacttgaacccgggagatggaagttgcagtgagccgagatcgcgccactgcactccagcctgggtgacagagcgagactccatctcaaaaaaaaaaaaaaaaaaaagacacttgcttggacagtttatgttggcctctctgaagttgtcagggagaatgtttctttcttctgatcttgctcagagctcttttgccaacagctaggatggcctggagttttcaaggctaagcgctgggattctgttggttaacagtgatgggagggaaaaaggaaaagaaatccaaaatttacaatatggacaggaaaaggcagaaagaatggaacacgggggcacacagcagtctggctctgtcgtcccacctcgtgggctgcgatcatgatacaagtgcttggcccctggaacataagaagcactcaataaatgctttgtcataatgattatgtgtgcccagtgcctggtacacagtaggtgctcaataaatcttaattcccgcaaagaccagtctaacctttgtctgggggtggctcttgggctgctggtggggtggtggttagtcataggaagtactggatgagacaggagagggccatggccagggccagatccccctccccacccaaccgcctctactccccacttttctcgtcatgttcgcaagagcctcatgaggcagaatagagcagtgttaaccatccccatttttcagaaggggaaactaaggccctgagagtcatcctcacttagggcccttcaacgagcttgcagtgggtccctggctgtcccacatctcctcctgttggaggtgggagcagaggggctggggtgctgggagtgggacagtccctcagaggagtggctgcatttgctcataggaagtccgaggcagcgggggccttccaggcccaggacgagggacggtcacagcagcccagccaaggccagagccaacttctccgaagacagtccagccctgcccccagcaggcaggtgagcactgccagctgtctggggccccgcaccccaaggggcggccactgcctcttccctcccgctagaagccaggcagggggcttggacaggaaggtcctctatgaaagggtcggagtccaatcatggggatccagctctcccctctccccaacggccagcagctcttggcaaaatgcacaagaccccacattaatcctttgaagatagcccctctcccacgctatccccttcctttactaagcactgctgtcttttttttttttttttttttttgagatggagtcttgcactgtctcccaggctggagtgcagtgggacaatattggctcactgcaacctctgcctcccaggttcaagtgattcttctacctcagcctcccaaatagctgggattacaggcgtgtgccaccacacccaactaattttcgtacttttagtagagacagggtttcaccatgttggccaggctggtcactcctgacgtcaagtgatccgcccaccttggcctcccaaggtgctgggattacaggcgtgaaccacggcacctggccaatactgctgtcttgagcagatttcagggaaagccttgaagcaagaatctggctctaagggccctctctttcagggtaatttgtatctttaaccaaacccagagggctaggcccgcctcagtggaatggggtattggtggtggaggttctggcacctgatagcccaagttggaatcagtatctttgagaggggtgagaagccaagaacgggggcaggtctttgcagatctttttctggaactgaggaaagcgggtgaaagggaggagctgaccccggaggggtggggcagagaccctgtgtactttttggcctgctttgattcaggctgctgtgtggacacagccttgactctctgggggcctaagaaaggcagagctggcagccaggtccccagagagagagcctcacctaccccctcacctcatccccaggtgaccatgctccctgccaaacaggcagaactgacccggcggagccaagcagagccccctcatccttggagtcctgagaagagacctgagggagatcggcagctccaggggtccccgctgccccccaggacatcagccaggacccctgagagggagctgcggacacagagacctctggagagtggccaagcaggcccaagacagcctctgggggtgtggcagagtcaggaggaaccgccagggtcccagggccctcatagacacctagaaaggagctggagcagccaggagggaggcctgggccctgggggctggtggggatgtggagagcccagcctgggggcagccaaagccccggagggagcatgggggggcacttccagggagtacaaggagagctgggggcagccagaggcctgggaggagaagcccactcatgagctccccagagaactaggaaagagaagcccactcacgagcccccctgagaactggggaggccccgcagagtcctcacaatcctggcactctgggacacccactgctgtgggctggggggcagagggagcgtgtccatacccgcgtggctctgagaggcgacccgagcttgactggagggatctgcttggccttctccgggcaccaggagagggggtctgggcccgtgtccccagcctggactgggagggcctcttggagctcctgcaggccaggctgccccgcaaggacccagctggacacagggatgacctggccagggctttagggccagagctgggtcccccaggcacaaacgatgtccctgagcaggagtcacacagccagccagaaggctgggccgaggccaccccagtcaatggacacagccccgcactgcagtcccagagcccggtccagctgcccagccctgcctgcacctccacccagtggccaaagatcaaagtgacaagaggaccagcgaccgcaactctggcaggcctggagcagacgggccccctggggagcaggagcactgcgaagggccccagcttgccagagctgcaggtaaggaggtttccaccctcccaagggtagccagaaagtcagccccactcagccaagtctccttggaaaagcctccccttggagtagcctaagctcctgcatccccctccaggctcagacctcagcctccctgctgaccacaacccatcccgatcaccaaactggcccaacaatgatgatgagcaacacagttttaagcgtttatgggccaagccctgatctgaatgtttgacgtgtgcttttcccatttagtctccttagcaaccaggtgagaaatacactatttacagataaggaaactgatgcgcagggtgaagccacttgctggtggggcatgggcaaaacccaggtctgctcagtgcagaccacactgaggcctcaagcaagatgctctggccagggcctattcccctcctggctccaccatacctggtttatgttgtgtctggtggcacacacctgaccccacctgggactgtagccagtgtgggcatgccccttcccctggtggtactcaggtacctgagtccaggacagcctcgcttaccctctctggcccctacagctcctctcagacacagagaagagggtgcatcaatgctcactgggttcagctagctgccaagacaggctgcttaaatgagggtcgtgtgcaaagtgggcccagcgccgggcacacagtaggtgctcgcccttcccctgcttcactggtgctttggtgctgccttgaagcccagaacattcttcatctgaagatggtgggcagggagggtcttggaggccagaatcctgcaccctggcaatagctcattgggaggacggcatgtggttttgaacaccagcctctctctctctctgtaagatggaccaaccacttctctgacgggcagcgctggggtgccgtgggggttcctgcttgtttctccaaagcctcctcatctcctagatgcaaagtccaacgccacctgccccaggatgagcagggcttccaggcatcagggtgcaccccgtgctgggcccagggccttgccatatgtgcctcaagtggataggaggcagctgccacttgacagatggggaaactgaggctcagactccttaggcatttgctgggggtcacacatgcataggtcgtgagaaatgagatcaaagcatccactccaaagtttgtgcttttatttttatttatttatttacttattgagacggagtttcgctcttgttgcccagactggagtgcaattgcacaatctcagctcactgcaacctccgccccccaggttcaagctattctcctgcctcagcctcccgagtagctgggattacaggcatgtgccaccatgcccggctaattttgtgtttttagtagagatggggtttctccatgttggtcaggctggtcttggactcctgacttcaggtgatgcatccaccttggcctcccaaagtgccgggattacaggtgcgagccaccatgcccggcctaagtctgtgcttttagccaccacgtcacaaagctcctgagcccatgggaggactggagaaccctctcccctgtatttccctgtggctttgatgagttgaccctccaatcaactcaatgcgtggacatcagagaagcagggataagtcagctcgtcctgccctcagattgctgtcaggcttgttaggaaggcacacagacagctcaaggaggacacggtgctgtgtcccggggcatgctgggtgccacaggccggccaggtcaagaaggaagttagaaagattcttcagtttcatggtgaagctcagggttctcaggaggctaggagatggtggctgggaagggatgggagcaccatgtactgaaaggaatttcacagatgacaaaacgagtaaccaccaggtcctgctggggctccagctgctcctctctatgaaaatccttggcttggcacagctgggtgcagtggctcacatctgtaatcccagcactttgggaggctgaggcaggcaaatcacgagctcaggagatcgacaccagcctggctaacacggtggaaccccgtctctactaaaaatacaaaaaattagccgggcgtggtggcgggtgcctgtagtcccagctacttgggaggctaagacaggagaatggtgtgaacccgggaggtggaagttgcagtgagccgagatcacgccactgcactccagcctgggtgacagagcgagactccatctcaaaaaaaaaaaaaaaaaaaatccttggcatggcactcaaggccggcttcccttccttccactccggatttgcctcattggtgctgagctggctgcagggcctgtgagcacatatccctgcctttgcacatgctcttccctgttcagccaccaaacgcctgttcattgtcgaagtcttaggtcaggctccctgtcctgagaagccttccctgaacagtcactcctagtaatggtccccttctgggcttggcagttttgcttccatttgtccatgcaacatccatctaatagggttgtcatttccccataagctccacacaggcaggatctctacctgctttatctctgtaactctagctctggcccagggcctgacataaaggaggggacagctcagtggatgcatgcaagatggaggacacaggggtcagtgggtgaacaatgaatgaatggagggtgaatgtgtgaatggatgatggatcaatgatgcatgttgaatgaataatagacatcttttggatggatgacagatgggtgatgatggatggatagctgggtgatgaatatatggtggtggtggatatatgatggatgttgcttaggtgatggatggatgaactttgggtggaatatgaatggatagatgtggcatgggtggatgaatgtcagatgatagatgttggagatatgggtagatggatgatggatggagagagggatatgtaggtattgggtaaatggatatgtgatggatcaatggagggtagatacatgaatgggtgatagacaatggatgatgggtacatgagagggtgagtcatgtgatagacactggatggttggatggatacatggatctactgatgctggacgttagatgggtgttgcatggacagatgatagaatggatggatgaggtggacagatgcatgcatcctggagaataagttgggctaagctgtgttctttttttaatctccagttccaaccagaggagcctgaggagtcagaaccaagcagaggccaagaccccctgactgaccagaagcaggcagactcggtagctgggtcatgggtgtgggtacatacggtggggaagggagggggaagcaggttggagatgggcttcattcctcagaagagccctagaatcaaccagaccaaagttggcattgccatggggtcatctatgtgcatggtggggccttaagaagaggggctctgcaggagccaccttctggcttggggacctgggtaggtgggcgatcctggggtcagaaccctaggccatgcttctcatttgctgggactgaaaaggtcaatgtctttccctgcgcaaatgatggtttggccccagtggtctctgtgggaagagatccttccggtttgaaagggccaggccaggctgaaagagcagggcttccacgagcaggagccagagagctgaggatgtacccagtcagccaggcctggagggtctccagggtcctggaggcgggagagatatgtgcgggggtgggacccacggatgctgctctgaggcctggctgcagctggtgagcacaactctgcccgcccctccccgtgacctaccaaacagactgttctcgtcaccctcagcctccagagaggtgagatcagagttgagggccgtggggcagtgggaggtgggggaggaggagacagactgtttggggctgtgttttccggtcctgctcttcctcccgttgcctcctgaagccaggggtggcagggagcgtccattgggcagcatagcgccccccaagtagggccctgccgtgagtcaaagctgggggaattctgcccaaaccctcactgtgcagatgaggaaatggaggcaggggagtcgtcccaggttatacagtcagtggctagctggactgggactagaacccagggcccaggaaccacccagcgctctctctgcacctccacctggcacccatgctgcccccgtccctgccccgatttcttgcgtggcttcgaacggcagtgctgtaacttcgagcagtccagtcttcccatctgtggaatgggcggggacaggggacactggtcgctaaaggcgctgccagccctcccagggactctgacaactttgctcttcctctttctgggttatttcttcatatcctggagccagagtagtgaacgaggcggaaacagcaatgccggggtgcccctctagtctccatgaaacgggcccggcccatcaacgtggaaaatatctcaacctacccccacccctaggcagccttgactggtcagaactgataaccacctcattcatgcattctttcacacacacttagtgagcaccttctgtatacccaggtgtgggtcacaggtgagtcggagcgccatcaaagagttcagtctagtgagatggttgcatgcctgtggtcaggactgtgatggggaatgtggtagcagggtcgggggcacccctacccccaaagccctcctggacctgtgctttgatgcttcaagttccacttccaaagagtctgcagattccagagcgaggaccctgggctctctcctaccttcccagtaacccatgtgtggctttggacaagtgcctctgcttcacaggggccttggtttccccaacgaggatgactccaaagagggagcatttgggggctctgctaggaatgtgtgtagaagtccacaactcattccctttgcttaagctggggtcacaaacctaacgccctgaaggccaggcaggtaacaatggtgagaaggtgggggggcaccgagggcacttgtgtgactcctcggttccagatagctgttgccatggggaagacgggcccagagtttccacatctttcgatatttcaagaaacactggagatatgtatttatatgtgaaatctctaacctaatgtgaaatactctgaaaacactatgtgggcagaaacatacctgtggtctgcaccccctccagctggcgcccgtggtttgactttagggtgatgacgtgcacaccttcaaaggtgctgagccctgggagccttgtcagtccaacacgatgtagtgtgaacaagttaaccagctcgtctcggcagttctgggaggagagaaagatgggaaccctggggctccatggtggggggcaccacagaatgggcaggggaggctgtagccaggggtgcccccatcctgccaaagggacctggggccaacactggaccctgtttgacaggcagacaagaggccagcagagggcaaggctgggagcccgctcaagggccgactggtgacctcatggcggatgcccggggaccggcccacgctgttcaatccgttcctgctgtctctgggggtcctcaggtggcgaagggtaggctggctccagtggggactggaggggtgagggtggatagagacggggatgggagggaggagggggctgttaagcaaaggagagagagtgggggctgaggaggaggcacctagggccgtcgcatgacaggagaggtgggagcagagctcttaagctcatcctggtctcagcaagcgagtgggtttcccacttccggggcaggcttgggggctgctttcagcttttggagtgaggggtgatggaataatctacacagctgaaagcttccaatcagcagcctctcgccagccctgggccaacggggagccaggtatgggggaagggaaggcgagcttataagtggctctgggattgcaaagtgtgtctcagacctgggcctgagccagtttcacaaacatctggcgttacgtaacccatcccctgcccagagaggcctggaaacactcaagcctctggctgggttttccacaagggcaggcagctgagacccgctccctcccacccgcttcacagcaggacagaaggggcctggccatctccagcagccacaggctggctcatggggtctcttctctctttgagaggctgactctcttactcaccgctgttggctctgagtccagcactaggctgggcacctcagagacagtgtgcccattttacagatgaagggactgaggcccagggaggtgagctgacttgcctgaggtcgcacagcttggggtataaaggagctgattttcctcattctcagatgagagaagggttgtagccaaacttactgagcctcggttgccacatctgtctattaggaaaaagtctgtggagactcagggctgcagagagggctcagggagatcaggatgcatggaggttgcggggctgttgtcgaaacactaactttcccatccacttcagaatttcctttttttaaaaaattaagacggagtctcgctctatcgcccaggctggagtgcagtggcaccatctctactcactgcaacctctgcctcccgggtccaagtgattctcctgcctcagcctccagagtagctggaattataggcgtgcgccactgcacccggctaattttttgtatttttagtacagacagggtttcaccatgttggccaggctggtcttgaactcccgacctcaggtaatccgcccaccttgacctccaaagtgctaggattattggtgtgagccaccacgccaggcgtttttttttttttttttttaaattaagatagagtctcgttctacccccagactggagtgcagtggcaccatctcggctcactgcaacctctgcctcccaggttcaagcgattctgccatctcagcctcccgagtatgtggtactacaggcgtgtgccaccacacctggctaatttttatatttttagtagagatggggtttcaccacgttggccaggctggtttccaactcctgacttcaagtgatccgcccgccctggcctcccaaagtgctgggattacaggcgtgagtcacccagctgagcccagaatttcctttcgctgctctttgtggttaaggcaccgagggtgagcaggcaagcatggttatctgagtagtgtggtacctttaagccatgggcaggaattaccttgtctaactaaaggtcaccaacacacagcacgtctggcaggagggggcaggtaagtccttggtagagcgaaggaggagcgaagcagggaaagcactctggggtaatgatgctggctaaccagcacttattgtatgcctactacatgcccagctctgtgttcactgcatggcgccacctaattgcatttgatccacactcccaggtgcagttagacgcctactgtccattttacagatgatgaagtgaagctcagagagggagggtcacttgctccaggtcacacagggagcaaggggcagaactgagattcagaccctgctctggctgacctcagagcccagtgcttccaacacgccccctacaccactgccttcacatcctgatctctctgagccctcctgcagctctgggagtccccacagattttccccattagaaagatgcggcaaccgaggcttggtgaggttggctacagtggttctctcatgtgggagtgagggaaatgaagagctagggatggaactgccagcagggcctcccagttacacagagcagatttaaacttctcttgggctgaagcagtgaaattagcccaaggccaagagccagaaagcctggagtcgagttctggcttggcacctaacttgtgtgcccttctctgagccttaccttattattctcagtagagtaacggtttgagactggataacctcgaagtttggtagctctggtctttgccagtttaataactcacccctgggtccctgaggctgtgctgtctctgacctgccaggatgagttgtggtttcttcattggtgcattcattcattcgagccgtgcttacggaggatgtgctgtgggcttaggccctaggctggtttccaagatgtagacaaaaaacattccagccctggccactggagcccagttaggtaaggacactgacatgtaactgatgagaacagtgtggtcaccactttagtggggaaaggtacagatgtagggagcactgggccagcagttcctaagtctgctggggacactttggcttcctttggtctgagacttcaaggaagaaattttccaggccaacaagcattgggagggggaaggggagaaagagagagagaatgtgtgtgtgtgtgtgtgtgtgtgtgtgtgtgtgtgtgtgtgtgctgggtgtgtgtgagtgtgtgctgggtgtgtgtgtgtgtgtgtgctggggtacagaagacaggaagagaagtgttccaggcacagcagagaaccatcagggggtagaaggacctgtcttatcctgggaattcctagtagtccagtgctgtgtatctttttttttttttttttttctgagatggagtctcgctctgttgcctaggctggagtggaatgcagtggtgtgatcttcactcaccgcaacctacgcctcccaggttccagcgattctcctgcctcagcctcccaagtagctgggatcacagccatgtgccaccacgcccggctaattttttgtatttttaccagagacggggtttcaccatgttggccagcctagtctcgaactcctgacctcaggtgatccacccgcctcggcctcctaaagtgctgagattacaggcataaaccaccgcgcccagcctccagtgctgtgcatctctttatttacttattgtattttgcaaaattgaccaaagtatgtgtctctccagcctgtcaaatgagaatctggaaggccaggatgacaggcaggagccaggttgtgatggttcctgactgcctagaagaggaatgtagcactgatctgtcagcattggtgatgtgtggaagaactttgagcagggaagtggtctggtcactgtgttgcgggtactaggaggagtcgcaggggccagaaaagcctggaggaggctggtgctgttaggtgcccagggcactggaccaggaccctggtggtaggtgaggtctcctgcgtgttcattcactctcccaaggactgactgcctgagtgaggtgcaagggtagggtgagaaaactcagcccggggtgccagaaggccagtttctagagttagatggacttaaccttggcctcattcctcatggtggagagactcctggcagcaaatgctgggaaagaacttcagctccctgggcctccatttctttatctgcaaaatgggaacagtaattataaaagcaataatttttttttttgagagggagtctcgctccgtctcccaaggtggagtgcagtggcacaatctctgctcactgtaacctctgcctcccgggttcaagcgattctcctgcctcagccttttacatagctggattacaggcgcctgacaccacgcccggctaatttttgtatttttagtagagacggggtttcaccatgttggccagtctgctcttgaactcctgatctcaatgatccacccacctcagcctcccaaagtgttgggattacagacctgaaccaccgcgcccggcaagggcaataatttttgaaccccaaatcaagatgacagaataattgaaatgccaattattccaagcttccctgcctccttgcctaaggatagctaatgagggataaagaggttgtcctaggtgccttacttgaattaacacttaatccttccagcaacctcatgaggtaacagcattaccccattttacagagagtgaaattgagcaccgagaggtgccttgcttaaggtaacactaggctggaatccccgtgccacacgaacttcctagtgcatttagcaaccaattccaccacggtccctactcacctgcaggaaaagagcatctaacaaacggcccagcgttctgggaacctgagcaacgggtgcacgcccacacctgaaaaaccccaaaccaaaaaagacccatttgtgaggagtgggcatttgggagagaccctgccatccaagaactcactttgtgtccagcttactcgctaggaattccgcctcttcctgtgtgacctcgggcaaatcggctcacccctctgagcctccgttttctcattagcaaaataagacctccctcccaagtctgtggtgaggacgaaaatcgactcttggcgagtgggacccgctgagtcgttagtactgggtgctttgccccggtccccgccaaatcacggcgccgagccctagcggacccatcgctccggggccgggtcgggaagcgcagcctgggcgagtcgtgcccacgcccggccgcccgcatcctccgcccccgcgccattgccggagtcacctgcaccctgggcccttccttcctcccagcgcgcccgcggcccgggcccgcccgccctccggccgccaccgccctcccttccctgcggccccatccgcccaccccgccgtcccgccgtcccgccgccccgccgccctagcgcgcccgtcccgttgcggcaggtcccgcccccggcccgtctcgcgcttccattggcccgccgcggcccccgccgctgtttgtctcggcttccccgccacccattggcccgctcgggtcctcccaggaagtttgaaaaaaaaaaaaaaaaagttttatgggcggatggaaggggccggggcagcgtcggggaaaggaagggccggaggcgcggcggcgggcggccgagaggggcggcggcggcggcggcggcggggttcccgcgccgcggagcccggcccgagagccgcgtccacgttcctgcctcctgctcccgccgccctggggcgccgccatgacggtgagtgccccagtcagccgcccgcgcccgaggccgggagaagggcgacgacccgaggcagagcccagcctctcccctccggggcagccccctcctcatttcccgaaggcgagaggagggctgggccggaagacggggccacctccgaagcgctttcggccagaccggcctcacccttcccgcaggctcctcctcgccttccctcgcccactcgcccccgggagcccaggcgaccctgaggggacggaacgacccgtctcgggcgccccctcctcacacttgcggcaccagtcacgggtggattcggggcgaccctttcccacctcccctccagccccctagacgaagacccgattccccaaggcggccaggggccccagggaggagcggaggtgggcctgggctggggaggggcgctcgtgggtgcggatgggtcgcgctgacccgggcctgggcaagccagccctccgtgtggccgctggcccgaggtcgggtgggcgagaagtggccggaccgccccacccacagcccgggaggcagtcccgggacgtctgaagcagcgggataccacgtcttcctgggcttgcactttgcagcggtcctggggccttgggacaagcctgcgagtctgagtagggggcatgatggcaggggtttgcctttctcatgggggtgagctgtacccaagccccatcaattacctgtgccatagttagcatattgagcctcacagctgggttcgctggactccccacttcacagccagataaactgaggcttggggaggggcgctggtgagttgcccgaggtcaccccaagtataagagaaggagtagctcctttccctgtccttctggcccactgaccgtgatgttcgggaagggaggggtggggctgcttttggtttctggctagtgcttcagggaggctctgacagcccagtggccctcctgggggaggatgagcagggtgtgtgtgtgcacaggcggcagtaggcctctttcaggggagtggagaccctgcggaggagtgggtgggctgctgggggcgggctgggctgctggggggcgtggcacgcctagcccctgccctgtgagtgtgatggcctggacttcctcggcgtcctcctggacatcctgccacctccctgctggcccttcctgtcgtcagcagcctccccttttctgtcaggagcagaagggatgtggggggaggagctgagtcagtgtcctggggccaggaggagagaagttgccttgcccaccgggtgcctgcccggccctcagccgggtgctttcacgttaccagatttgatccttgaaggttggtagtaacatcttaatcaaacagatgaggaaaccaaggtgtggcgaggtgaagtgtcatgccccaggtaactcagtgagtcccaggctaagccagaatttgtatccaggtccgttccagctttctttcacagttgcctgtcctgggggcagcacgtgctgagcaagggtaaggctgccggaagcagcgtgtggggtgcttggaagatggacagcacatccctgctggtggcagcagccttcctgagggaggtgtcctcctgtgattatagggccttgtcaggtggagatggactagcgaggagacagcagtgtggacagaaacgggtggtcatgtttgagaagtagcaagagcgtagggaaggggtctggggaggagggcctcactgctagggcttggacaggggcaatagagagccatgaaagcttttagagcagagaggaggctatgatcaccattaatagtgttcattgagttcatcctggctgccatgcagacctcagcctgctctcagctggtgctcctcctgtacccacctcacaccctcctcccctggcccccgtgccctgaatcagggatccatacagagcaagtggcacaggtgtgtgagtgtgtgaggctccggggcttcagggagttgggattctcttccaccccttttgcctttgcctgggtgcagctttgctcccggatcagccttccccctcgcctgctgggcatcaaattatatttggtcccttgtttactgtctctttcctacagtccaccagggcaggggccacagctcttggtcacagctaatttcctggcctagaacagtgcctgataactttaaaaaaaaatttttttttctgcaaacactccctgagcccctatctgtgctgggtcctggcaggtaaacagtgtatgtccctgactgtgagttgcatctaatctagcctgtgaaggataagtaaagggcctcaagatagtcacggatgcaacagaggcctctgagaggggccatgggagggcaggacgggggcggctggtggtgcggtgagtggcatgaactgtgaagggacctcagaggtggccattaagctgggtcttaaggcctgagtagccgcttgcctagtcatcggaggaggaggaagcatagtgtttcaggccaaggacatggcacatatgaagggcccggagtcctggtgtgttgtgatcggcaaggaatatgcagtggtataaacaggggcccctcagcaaggggaggccaggctggaagagtgtgatgaggcttccctgccatcctgaggcagctggactttgttttaaagccacctggagaccgggtgtagtggcttatgtgtgcctgtaatcccagcattttgggaggctgaggtggatggatcacttgaggtcaggagttcgagaccagcctggccagcatggtgaaatcccatctctactaaaaataaaaaaatttgctggacatggtggtgggtgcttgtaatctcaggtatttgggaggctgaggcaggagaaacgcttcaacccgggaggtggaggttgcagtaagccgagatggcgccattgcactccagcctgggcagcagagactctgtctcaaaaataaagcaagccacctggagccgtccctggaactgttaagcaagcctgggataccaagcctttttgagtgagtcccgccagcccgagggtgtgtagaggggttgtgtgcctggccaggtaggaggcggggctgtgagaacctgccagtactcccgaaaggcggaaggagaaactgagcttctagcaggtgaagaagaggtagctgggcctgaagagccctgtatgaaggggcatcgtgggagatttagatgatcggaccttttgaccctggggacaggtttccctgccagtttaaaaactcacattggttggccgggcacattggctcacacctataatcccagcatttttggaggccgaggtgagcggatcacttgagctcaggagtttgaaaccaacctgggaaacatagggagaccccatctctacaaaaaaaaaaaaaaaaaaaaaattagctgagcatggtggagtgcttatgtcgtcccggctacttggaagctgaggtggaaggatcgcttgagcccaggaggttgagtcagcagtaagctgtgatcacaccaccacactccagtctgggcagcagagcagggccctgtctcaacaaaacaaaactcaaattggtgaccttctatccccaaggtcactgtgtcatggcgtgcctgacatggtatgtgatgtgtctgtactgggctctggaggatcactaggtttctccttgtacagacacgttcagtcctgtcggaagctgcgggaggggaggaccgccccgtcatttgccacatcaggcagccaggactcagagaggggatgtgacttaggaaggtcacagtgactccacttcccaggcagccctagaggttccagcctgacagcttgtcattcctgccccaatctcccagccctggcccagggactttcgcctgggactgcccagtggtgccagctctgtgggcccaggaagcctggctcctccgggctaggtgggggtaggggagatggcccaaaaagcacagaaatttagaccagggggtagatatttcctcagcaagtttttcctgagccttgctgtggtcaagccccctgcaaggccctggggccacaggaggtcccagactgaggggaagtggagccaggtgtggtcaccaatcttcattcttagcttgggatcgccctgggcagcctccgtctcaggtggaagacggggtgggcagaatacagagcagcgggacaaacgcagccccaggggttctcggccgtgagcagagcctgtgtctctcccttagacaggtatacagggaggggctgggatgccaacctactgggtcccccgactgtggctgtggaaggttctggatcttcagctgtcccaagccccggttggtccacttcctatacctgagaaggggctccgtgggtggagagtgggtcgggagaggtggccaggcagggtggctgtggtttccagctgccactgtcaccgcccactccactgagccatgccacccgttctctgcaggcaaccagacaccttggcctggtgaggcctcgatgtaggggctgataggtaggctcagagccatggcaaccggtggccacctcctccctgccggcgccaggagcggagactgcagagggaccgggacttagatgagagaggtctccccagcaggaagggagggtctggtggttggcacccactagatgagcatggtcagaaaaatatcaggatgagcaacttctttatctaggcctgggtgggggtgcctggcacaggtctccatgggacatgctgcagctggtagcccccagaccccggggctgtgcccccctgggcggcacccagaaggtagggcttgccaggactgacccttcccaaagagatctaggcggggaccagagggtttctgaccccagcctgtgactggctccacctcccatagtctcctggagccgaggaaaggacaggactggcgggcccatgggagggtccgtggggcacttggtcctcgtcagagggaggaactggacagttcgcgcagtgctgctggtctggactgccctctgagctctcagggggtctctatgcaggcagagtcctcccagcccctctctcccattcttgggcgaggggtcggctggagagaggcccctgggacatctgggtgtgtgtgccagccacccagcccaacttcttggctctctgagtgccactatcaggaaaggggccagggctgcctcagtggctgggaggcctgcttggacttgggggttacctagggccttagccctcttggctggcttcccaggagctcggtcccacaggacttggggacagggtgggtgcagcacgctcccctcaccagcccccattggcttcctgctggacccaactcacctccctcctcatctccccacagcccgatctgctcaacttcaagaagggatggatgtcgatcttggacgagcctggagaggtaagaggactgaggccggaggggaggaagctggcttgtgctgctgctgggcccctgggcagcccaggagtgggggtggggctggggctggtgtgagaaccctgggggtggggctgggaggggtggaggctgcccattaggcttctgcctcctggagcagtctgcagtgtgtaaaagggatcacagcaaggggccgtctagcccctcacacccagtgccccatcccttgatctcatcaagagtctcttggccctgccacctcagtaggagcctgggtgggagtcaagggtcttgggtggaagggctcgtagaagctgtctggcccgagacacagattcctaaagcctggtctgaggggggtggggctcagggcgcaggtgctggggtttcacccacctggatccccactggttgagtcaaagcctcctctagtcctcagtggccacgtctgtgacatgggcataatggataatggtgattctttctagagtggataacaaggtcagagagatcaagcacgtacaggtgccacaaagctcctggcacttactgtgggctcagctaaagacccttcccttcctctggcatatgtgtccttggaaccagcagggacagtggctgtttcctcagctctgttctttcggctgccaggctggctccctgcccacactgcctgggcaggagcgtctccccacccctgccctgcatgcgcctgctgctctggtctgcgtgcagcctgcatgccggagagggctttgagccagaggggatttcattgtgtttccggcccacatgttttattccctccagcccacagccttccctacccgctgcctgcccgctgtccctggtggctgctctctaggctcacacaaagcccggcaccccgccagtgaccccttcctggcctccccacccagggtccccggagggcagagggattacaggccccacccagagctggccattagtcatcctctatcacagggttctggaatgtccgaactggaagggccctgggaattcagccagcccaaccccttggtgcacagacaggagacgggcccatgagggtgttggtctcttccaggcctaggagcacctggggcagacccaggctcagaactcagcgcacctgaggcccatggagctccacccagcttccatctcagacagtcataggctaggcctggaagagctaaagaaacctcttggcatagaacccctgtcctactttacagagaggcaattgaggtctgcagcagcaactccgtttacttagtgagaggaaaatgcttctaagaggcctggcctcccagaacaaacccagcaacctggttggtgtccatccctatgccaagggccatgacagccatccacacaagagaggatgggcgccgctcgcctcaccagaaggtctaggcacttctttttttgttttttatttttgtttttttttttctgaggcagagtttcactcttgttgcccaggctggagtgcagtggcgcaacctcggctcactgtgtcttccgcctcccgggttcaagcgattctcctgcctcagcctcccgagtagccgggattacaggcatgcgccaccatgcccatctaatttttttttgtatttttagtagagacagggtttctccatgttggtcaggctggtctcgaactcctgacctcagatgatccacccttctcagcctcccaaagtgctgggattataggcgcgagctaccgcgcccagctatagggacttcttagtagccctactttatggttcagaagactgaagctcagaaaagtggagacacttgcctaaaggcacacagagagaaagggaactcttggatacaaaactccttttctcagggaggcaatgtggaaagaagcagaaggtatcgtcgttgcatgccccttgagaacttaccatcttcttgaggagagaaaactaagtacttgaaacaaccaacagcacagacagggcttggtgatgtgagggaaccctgggagggctggggaccgggtgatatgcactgaccctggcagtgggcgggccgcgactggcattccagtggagtgaccagaagcccagaggtgggctgggcttggcatactatcaggctgttctggcgcccccacccctttcctacatgtcctgccaatctaaccccagctggagcagagacaggcactgcaggaaggcacccaatcacaaatcctaaacttacagcttagggcgctctcacctgctgcggatgtgggtagccagcctacagttcaagaagcagaccgtgcatctgggcgcggtggctcacgcctgtaatcccagcactttgggaggccaaggcaggtgaatcacctgaggccaggagtttgagaccagcctggctgacatgatgaaaccctatctctactaaaaatacaagaaattagctgagcatgatggcgggcgcctgtaatcccagctactcgggaggctaagacaggagaatcacttgaactcaggaggagggggaggttgcagtgagtggagattgcaccattgcactccagcctgggcaacaagagcaaaactcctccatctcaaaaaaaaaaaaaaaaaaaggcagcagattgtggctggcactcactcctactccagggctccatccagtcctacttcccaggggaccattgtccctgaccatggtgatgatctgggggaatatggaaaaagacgtaacgtcctggccccgctgagtccctgacttgcttacacaggtcatcacccctccctgtctgcactgggtccggggtgcctgaggagccttggcaatcttaaaaggagctccaagaaggaaagggagggtgtggttacggaggggaaaccaatccatttcacagatgctacccctgaggctcagagaggaaatggaggggccaggtctcaaattggcattttccgcctccccacccctcctgtgtgcagcatagtgagtttggcagccacacaggacacctgtacaatcacacacactggctctttcattccatcctccttgcagcctccctccccctcgctcaccaccacctctacttcgcagtggaagaaacattggtttgtgctgacagattcaagtctcaaatattacagagactccactgctgaggaggtgaggccatgggtgtactgatgaacccccggaagggcctggggtggcctggctgggttcactggggtgggtcacaccagggcccacacggaccatagtgggccctcttgctccaggcagatgagctggatggtgagatcgacctgcgttcctgcacggatgtcactgagtacgcggtgcagcgcaactatggcttccagatccacgtgaggctgtgtgcagcttgggggctggtggtgggcagcatggctggaggtccctgggggaggttttggtgttgaacatggctcaccatggagactggatcccttcactcatttacccagaggccctatcttcagagccagagctgtgatgccaacacttagcatatctgggggagacgctggagccagcagggctcttcccaggccaatggaagggaggttttgtaccccctgcccaccccagactcaagaccttagatgcatcctgggaaggaagggccaccctccctggggtccatagtggggagggagtcatgcggctggccatgtggcaacctacccatgcggtggccttgcagaccaaggatgctgtctataccttgtcggccatgacctcaggcatccggcggaactggatcgaggctctgagaaagaccgtacgtccaacttcagccccagatgtcaccaagtacgtactaagctggactggggccttgagggaggcacttacccttgcgtccccgagtgggtttctaggtactcacctgagggctgcacctttctgggccctcgtttctctgtcaacaacatgggaagagagtagtgagcattctcggtatcatccagaagtacactgagggtttgaggtttgatctgtcttctcaaatgtgatggggcctcttctctttggaggagatgcctgtgagtcaaaagcccctgccaggtggctgttctgtctctgtgtctgtgccgtgggggccgtgtctaagcctgtgttaggaaggggtggttaggtagttcagccttggcgcccacacctcccgggatggggagctcactccttctggaggctgccacgggcactggggcaggagggctgagttaccgagtggcagagccccccacagtttatacccagatgcccatggcgggctgggacttggagctgctgggcagcgggaacagagtgtggtattaaagggggctgggctgggtgtagtggctcacacctgtaatcccagcgatttgggaggctgagatgggaggatcacttgagctcaggagttcaagaccagcctgggcaatatagtgagacctcgtccctacaaaaaatttaaaaatcagctggccgtggtagggtgcgcctgtcagctgaggtgggaggatcacctgagcccggaggccgagtcccccagactggccacaccgcggctattcagccttaggccagaggctttcctgtctaggtttcagagtccccatctgtcacgttagcatgtcatgtctgtacatgtgccaggatgtgcccagagcactttgtgaactctgaagcactgtgcagttggactgttatttagcatctaggcccagctgctttaagaaagaaaccccgggcacagtaacttcatcgagatagatgttcatgtctcccttcagaacagccccgaggtatgcagtcctggcctggtggggctcgctctgccgtttcaggggagccacctgccacacccactcggcagcctatagtcacatggctacaagtagctgtgggaatactgcgagtgtagtttttggcagggtgaccacgtacccagctatgactgtggataaagagaattgccatagttgttcagagtctctgcaacttgtgttctgtgcaccccgaggtcccgccttcaccccatcagcagtgactgggcatcccccttgccactgtgagcctcgggaacctgggacattggtctcctacatcacctcattgatcaccatttgcaaaaagccccctgcctgctttccacgttcgcccaccctgtcctcacatccatcctgtgagaggcgtcgctgtcccacattacagatgaggtcactgaagctcaaagagggcaaagagaccagtgtggtggttcacgcctgtaatcccagagctttgggaggctgaggtgggaggagcacgtgagcccaggagttcgagaccaacctgggcaatatattgagaccccatctctatcaaaaatttaaaaaattagctgggcgtggtggtgcatgtctgtagtcccagctactccagaggccgaggcaggaggatcacttgagctaaggagtttaaggctgcagtgaactatgatcacaccactctacttcagcctgggcagcagagtgagaccctgtcccttgaaaaacaaaaacaagaacgggggcgagggaagccgggcatcctggtgggtccctgggctgtcaagaggtggagctgggatgttcctggggtctgttaaccaggaagctcaggtcgggctgcttccttccctggggtctgtctccagcccctggcacagggcctggcacacaggtgtcgctccaaaagtgctcattgtgggactgcaggggtgaggacccacctgacgtggctctgctggtgccctaggctctcggactctaacaaggagaacgcgctgcacagctacagcacccagaagggccccctgaaggcaggggagcagcgggcgggctctgaggtcatcagccggggtggccctcggaaggcggacgggcagcgtcaggccttggactacgtggagctctcgccgctgacccaggcttccccgcagcgggcccgcaccccagcccgcactcctgaccgcctggccaagcaggaggagctggagcgggacctggcccagcgctccgaggagcggcgcaagtggtttgaggccacagacagcaggaccccagaggtgcctgctggtgaggggccgcgccggggcctgggtgcccccctgactgaggaccagcaaaaccggcttagtgaggagatcgagaagaagtggcaggagctggagaagctgcccctgcgggagaataagcgggtgcccctcactgccctgctcaaccaaagccgcggagagcgccgagggcccccaagtgacggccacgaggcactggagaaggaggtaggcaccacggctggctctctaggaggccccttgccccagcgcccctccagtccctgcattcatgccctggcatttgtcttgcactcctacagtgatggggagctcacccctgatctgctgtgagtgtgcaccccacactcctgcgaactagaatcttcttccttagaccttagtagtttggtttggttttgttttgttttttcctagttctgcccttagcagccatagagaagagaagtgggaagagaagggagagacctgccaggctcacacctgtaatcctaacattttgggaggccaaggtgggagggtcccttgaagccaagagtttgagaccagtctgtgcgacatggcaaaaccccatgtctacaaaaaaatacaaaatttagctgggcgtgctggtgcatacctggagccccagctacttgagaggctgaggtgggaggatggctggagcccgggaggcagaggatgcagtgagccaagatcaagccactgcactccagcagtctggcaatagagcccgactttgtctcagattaaaaaaaaaaaagaagaagaagaagggcgagaccgtttattgttcatcttctgcccgtggcctccctgcctgcactgactcgtggaatcctcacagcggcctctacccctagggtggacttcagcagttttactgacgggaaaactgaggctcaaagatgtttcctctgtcacctccatgatgtgtaaacatctgtgaccacagtttccttttcctatccctgtctagccttctctgggccaaggctctcccaggtcattgacctggccatccaggaaacagcccagcgtgtcccctggctacatctcactccagggctgcttgcccttctcaaaccctgaggcattcctaagccttccagggacgctgggcttgtatccgtgtggagctggaagcctgcgggctcctcactgccttccaccagccctgccccagcttccaggtcccactgaccacccttctccctcgtaggttcaggctcttcgggcccagctggaggcgtggcgtctccaaggggaggctcctcagagtgcactgagatcccaggaggatggccacatccccccgggctacatctcacaggtaaggccggggggctgtttttcagggggagggggcagatttctgcttgccgtgttatcaggaaacagctgagattttgggagcccttcctgtgtgtgctggaacctgtgtggggcatttgacatgcgtcatctcatttactctccccacagctggtgggcgtgatcactgtgcccgttttacagacaaggccactgagctctgagaggttatgtgacttgcccaaggtcaccccgcctgcaggtctcaaaggtgggatttgagcgagggtccggctgactgcagagcctgtgtgtgagtccccgtgtgacactctgcacttggacccttgccccggggaagtggggggctagtggccccgagagtcactccctgaacacagggaaatcctgccgaggcccactgggccaaggccccacacaaggaggtctgcaggacaggggagcctccagtagccctcagagaatgcaccgtccgcctaggacagcggttctcaacggggtccattttgtcccccttggggacatttggctgtgtctgggaatacttctggttgtcacaactaggacaaactaactctctagaaaaaacgtgtgtgtgtacacatatataagtttattataaattttaccaataaaaacaatgcttagtacacaatttacaaataaaaatatataattttattgtgaattccgtacagcaaatggatttttctcagaatgctttcagtgattttttccatactcttgtatccacaactgattaacaaagggggttgttctaacgtgtgctggttgacatttttgtttatggtaatgagtaagatgagaagacatttgtcgaaactttactggtccatgttgtcagctacttctttgctagatcggatagtagttttctattgagaatatttgagaatattctattaagaatatttttgcaattttttgttctatttacaatgtaatggttatagatgtgagatacttctaagtttaatctgcattattagcattttcttatcacttgcttaagtctagacaatcaacaaaacaataaatcaagccctgatgtgtaatgtttaccaattctgcagtgtaaatactcccgctgtggccaatgctgcattaccagcacaaagtccctggacagagagttgggaagagatgtcacactattcactaggatttccaccatgcggatacagtagatgtgattggccccaagagcacgcataatacaacacagtgaaatatttaggaagtaataaatttgagtatctattgccttgtctttaacatagttaatttaaagtatataaatttaattgttaatggctgtgcttaacaactacatcacagaattactaaaaatttgacaatcagctgtctgtagttatcacaccattatctaaagtagaaaagaaggggccaggcgcagtggctcacgcctgtaatcccagcactttggggaggccgaagtgggcagatcacgaggtcaggagaacgagactaacctggccaacatggtgaaactccgtctctaataaaatacaaaaaatagccgggcgtggtggtgcgcactgtagtcccagctacttgggaggctgaggcaggggacccactggaacccaggaggcgcaggttgcagtgagccgagattgcgccacggcactccagcctggcgacagagtaagactccatctcaaaaaaaaaaaaaaagaaagaaaagaaaagaaggctgagatctaggccctaggcaggaggagccttctaaaaatttccaaggggaggtcacgtcatgagggggctctcaggaaggcattggctggggcatgagaaggaaggctggttggtgcgtattgtggatgcctccagtgctgagctaatagttagaagctctggcctggtacggtggctaatgcctgtatctcagcactttgggaggtgaggtgggtggatcacttgaggtcaaatgttcgaggccagtgtggccagagtggtgaaaccctgtctctactaaaaaaaaaaaatacaaaacttagcagggcatggtggtgggcgcctataatcccagctactccagtggctgaggcaggagaatcgcttgaacccgggaggcagaggttgcagtgagctgagatcctgccactgcagcctgggtgacagtgagactctatctaaaaacagcaacaaaaaacaaaacaaacaaaaaaagagaagctcattccacagacttttggaggtttggggtcagacagtgacatcaggaaagtgatgttggagtggagggggcttgggagagggccaggtgtaaggcattaggaaatggctgaaggagggtgaatgtcaagggtctggagggaggagaatttgggactggatgaccagatctacggaaggcagaggggcctttgggggccctgaggctggggctgctgctccagggaagcccggagaccgtcctggggccaagtagtggatggagtttccactgatagaggagcaggcaggggaattggggtgggacgcagagggtgaggctgggggcttaccttgtcctggggaggggcaggggaggagccagtgttgtgccctgtagcctcccaccctgaggcagagaagggagctgggggcccaacaccccagctgaggcaggtgggagggcctccgaggcccccagccagggggcttctgcctgcgtgctctgctctaagaagctgcaggggctgctttctgggtgggtggggctgggacccattcgtacccacctataatcagagtggcttcatcttcctccattttattttattttaatttttttagagatgaggtcttttactgtcacccaggctacagtgcagtggcacagaggctcactgcagcctcgaactctagggctcaagcagtcttcccacctcagcctcctgagtaggaaccacaggctacaccaccatgcctggctaattaaaaaaatttttttgtagagacaaggtctcactatgttccctgggctggtcttgaactcctgggctcaagtgcttctctcatgttggcctcccaaagtgctgggggtacaagtgtgaccactgcactggcccacctttgtccgttttactcatagagccagctttagatttcctttagataaaggctctgccactacaatgacgtttaaaaggcactgctttggcttctcagcttactggtggcaaaactgaggcccacagaagggtgtgacctttgagctataggcagacctgtgtctggagttcaggcggtctggtccccaggtgccccattgggtgcaccaaagtctgtcagtgtttggtcccgttagggtgggatgggcacggggagcaggtgggaggggagaagggaataactggggagcagagctgaagaccaggcaggtggaggagtgaccccagatgcggaaggcagcagagaagaagagctgagtcatctgtatcgccctcaggcacgggaggaggcggatggaaattcggtggacctggaggagtgacagctgggagggattccccagctggtatctcgggctgagtgggtgcccttccttcaggggttgggggcttgctgctgcacgacagctgtcgggtggtctggggcttcacccactggacatctggtaaagagaacctttccccactattgcagtggggacagaggcatttctttatctactttgatgtccatgtcaaaggtggcagccaggatcaggacaccttgggccactcaggaaggtaggtgagagaggccctaggagcccctgttcgtcagctgagtcccacctcctgatgtcagcccctgcacccctgagctgctgggtctgcctgcctggtctggccctcttcagaagagcagtgcccacccccacattgctgggctccccactggtggatgctggcgtaccgtctccctctgtgcacagggttcccgtgcccagggagcctcgggggctggtcctgtgaggcctgctttacggatgccaagactgaagctcagagggggcgaggggtttgttcaggttcactccaaggcgcagccagggtgaagaccgcctctgaggtccaaagtcatgttctgttgtcctaagccaggagacacatagagggcaggaacagaagccaggggacagacacccctgtcgccacatgaagctcttggccctcgctcctccatcaaatcgtccccaggtgtggctgctggagaggcggggaggtggcctttgcgtgggggagacagtccctcatctggtcctctgtgccttagtttcttccctggctcttcttccccttccctttttaatgaccttaaacatttttttaattatataaaagaaatgtttacattttcaaaaataatttaaacaaattgaaaggctggaaatcaacaccctcacactccttctgctgccagctgccaccccagggtcctgtcggtggctgctgccgcctgcctatcagtttctggtggcagctgtaacctgtaaccacagctacctaaataatgcacatgtattacctcacgcttctgtaggcgagaagtctaacgcgagtcttgccgcgctgcagccaaggcgtgggcaggactgtgttcctctgcaggcacccgttgtatcccttgcctgctccagcttctggtggccgtccgcgtcccttggctctcggccccttccttcatcttcaaagcctgcagaggggaagtcgagtccttctcctgccacgtcactctgaccatcccttcctggtcacacctcccttgaactcttcgcttctgcccccttcgtccacttttaaggacccttgtgattacactgggcttgagggataatctgggataatctcccgattttaaggtcagctgattagcaaccttgattccctctgcagcctgaattcctctttgccatgtaacatgatgtagtcacagatcctgggagtaagatgtggacaactttgaggggctatcattctgccccctacaatatcctccctaccttttctgtgttttctgtgttttccattcactgggacggacaggtctgcacgtttgttcccgtgagtgagatcataccacgtgtatgtcagaagccaactttcaccacctcattttgggatctttttccacagcatccacacaaaaactctgtctagcagctgcctgtgtcccattgtcaagctcgatcccatcatttattcaagagttcccctgatagggatttagattgtttccagttttcatctgttaccaacctggctgtagggaatacccttgttccaaaagtctctgtacacatacgactttctgtgggatcatttctgggagtgaacctactaggtcaaccagtggggtcgcaaaatgtgatgatgccaccggaccacccccaacacacaccgttgtggcggacactcccagcagtgggtattattagtctgagatacttgcccatcttgtctactaagcattattttgtattacatcatcagtttcagctcatttactgagcacctgccacatgtcaggccctggcctagaccctggggactgcgccagtcagatgttctcagtcttcagggaatttatggtttggcagaggtagaaccttttgaggcaggggagaggctgcccagagacagagctaggagagacatttaaactgggctgcaggtcagtaaattacccagggaggtaaagttgccaaaaaaacattccaggccgggcacagtggctcatgcctgtaatcccagcattttgggaggccaaggccggcagatcacaaggtcagaagttcaagaccatcctggctaacacagtgaaaccccatctctactaaaaatacaaaaattagctgggcgtggtggtgggcacctgtagtcccagctactcacgaggctgaggcagaagaatcacttgaacccagaggtggaggttgcagtgagctgagattgctccactgcactccagcctgggtgacagaacaaaactctgtctcaaaaacaaaaacaaaaacaaaaaaaccacaaaattccaggcagtgggaatagctaaagctcagaggtgtgaacgtgctgcaaccgtaactgtgagattgcttggcagagaaaggccagggatgagaacgtaaaggtcagccatgggaacggggacttgactctgtaggacgaggaatccctggagggcttgaggcaggagcgacaaggtgaggtttgtgaatgaggagccgtggggtgggggtgggagcaggagcaggtgcagactggaggtgctgggacccaggaggaggtggtgtacctgcccctgagccttctcctctggaggctggggaagggccgctgtccagaggaacggggcagcctgtgacaccctggcgtccggcccacaggaggcatgtgagcgcagcctggcagagatggagtcctcgcaccagcaggtgatggaggagctgcagcggcaccacgagcgggagctgcagcgcctgcagcaggagaaggagtggctcctggctgaggagacggcagccacggcctcaggtatggaccctggggggggcacagtgggctgggctctgagcctctgtgctgaggttcctcctagccaaactggggaggattttatcaaataagatgtaggggtctcagtgccacatttggggtaaagggtcagcaggtgttagaagctccaagaactggcctgtagccctacttaaaaagggaaactgaggcagtaaaagataccctccccacccccaacaccaccactaccataggtggtgactcttcctgctcaggggcctgcagccaccatagagtctgcctaaaggcacatgctacccacgtgcgtgggggagaggctgatcagctgcatcccctgtcctcataggagtgcctcctccctgggcacatgggccagaccctggggagagcaggggaaggtgtgagcattgtccatgccagctgtgtgccaggcactgggccccacatgtttcccacaggagcacccttcatcctggacaattccctcccctcctgccaccgcacacctgctgtgtgcctggcacattcctaggcatcactaggggtttgcagaacaatagaaatgctggccaatgtcacatgatctgaagctcacaacctgccagtgctgtgccaagtgctcatgcactcgaacccagccttggggccagtgtgctctgcatttcaggaagatcgcctttgcagccgcgtgtgttagagaccccttccccctcagcagagtctggacttcgccctgtaatctggcactaaggtttctgctgtgaaatggataaaaatcacacttaagtggaataataaagaccataaatagcctcatgtccgttcagggtggggattgccaccaaaagatttaccagaggcccggtgcagtggctcatgcctgtaatcccagcactttgggaggctgaggcgggcagatcacctgaggtcaggagttcgagactagcctggccaacatggtgaaaccccatctctactaaaaatacaaaaattagctgggcgtgatggtgggcagctgcaatcccagctactcaggaggctaaggcaggagaatctcttgaacccaggagacagaggctgcagtgagctgagattgcaccactgcactccagcctggatgacagagtaagactccatcaaaaaaaaaaaaggccaggcactgtggctcatgcctgtaatcccagcactttgggaggccgaggcaggtgcatcacgaggtcaggagttcaagaccagcctggccaagatggtgaaaccctgtctctactatgaatacaaaaattagccatgcgcggtggcaggcgcgtgtaatcccagctactcaggaggctgaggcaggagaatcgcttgaaagtgggcggcaaaggttgtagtgaaccaagattgtgccactgcactccagcctgggtgacagagtgagactccgtctcctgggtgacagagtgagactccgtctcctgggtgacagagtgagactctgtctcaaaaaaaaaaagaaagaaaaaaaggagagaaactttcaatgttcagaagtttcggattttagaattgtgggtaaaaccatgggtggccctgagtgggaaaaaaaaagcctcggtctcagtccttaggagctcacaatctgagaataaagccagcaggagctaatgttggggcatttactctgagccatgctttgttctaaattcttcacacaccttccaataaccccatggaggaaaggtactgttgttatcgatccctgttttccagataagggatctgaggcacaaggggttaagtcacctgtgcaaagtcacatcggtttatgctgactgtggagcctgagctcttgaccacgaggctggtcaaagcagataggccttgtttgagagccctcagagtctgcagggggggtgtactaggtggggtcctacctggaaatcactagaacaggaggtaccaatggtcagaccctgagctgtctccccagtagggtccatccaacaggattatcttcccttaatagatgggctgagagaggttgagagcttaccccaagccactcagtttatgacacaacctgggctactctagactcctggttcggtgctctttgcatagcactccttggtccaagtccatagtacttgcatagtactatgtggagtccacatagtactccaccagtacatgtggcgtctcagagctggtggcacttggtgctgctgacccccctccagtctctcttgtgcctctctgccctgcttccagccattgaagccatgaagaaggcctaccaggaagagctgagccgagagctgagcaaaacacggagtctccagcagggcccggatggcctccggaagcagcaccagtaagatgatgccggggcccaactgcccaccctgatggttatgggttgaggaactttgctgaggccccttggcagcggacacatcagtttgcccctagctgagattcctgctccagtctcatggatgcaagaaacagaagcagaaggtcctcaggcagaccccatgccagtcctcacagacagtccttcaggcagcttcttgtcttggctggtcccagcctccacccacctcttcacccctttagtctcccctggagctgggctgcagtgtcactgttgaccactaggcctctccctgccccagagcacagttttggaatgttgaggtttcaggggctttaactttaaagatgggcccctccagccgggcacattggctcatgcctgtaatcccagcactttgggaggctgggatcaggagttcgagactagcctggccaacatggtgaaaccccatctctactaaaaatacaagctagctgaatgtggtggcgggagcctgcaattctagctacttgggaggctgaggcaggagaatcgcttgaacccaggaggcagaggttgcagtgagccaagattgtgccattgtattccagcctgggcaacaagagtgagagcaagactccatctaaaaaaaaaaaaaaagatgggctcctccaagccaccctcacttagggtaaacacctgtagcccagagaagctgtcactggttcacagccccacagcaggctaaaggcaaacctagagagggaaccccagagtcctgggatgctttaagtctacctgactggactccaggcttggcaggagcaagacaacctatgctctcctctgctcctcctctggggcaggtcagatgtggaggcactgaagcgagagctgcaggtgctatcggagcagtactcgcagaagtgcctggagattggggcactcatgcggcaggctgaggagcgcgagcacacgctgcgccgctgccagcaggagggccaggagctgctgcgccacaaccaggtgggcctggccccaggttggggggacacgggtgggtcccggcacccctcccctgaccaccgtgcctctcccaggagctgcatggccgcctgtcagaggagatagaccagctgcgcggcttcattgcctcgcagggcatgggcaatggctgcgggcgcagcaacgagcggagttcctgcgagctagaggtgagtgtcctcactagcaccaggcagcccagtggttctcggggcccggggctatggggcacccccgccataggctgggtatcacctgtggcaggaaagccaagtctcccagtggctgggccagcctgactaggctagaacacctactgtgcatccagtagccagcattctgccctcccacctgcattgtgtcacctacctgccgtgtaccatagcaaatcactccacttttctgagtcccagtagctcatctgtaaaatggcaccagcaccttccttactgggaaatattggggtaagaaaatatgtgtgtatgtgtgtgatgccagtatcactgtagtattttctttctttttctttctttctttttttgagacagagtctctctctgtcacccaggctggagtgtagtgacacgatctcagttcactgcaacctctgcctccctggttcaagcgattctcctgcctcagcctcccaagtagctaggattacaggcctgcaccaccacacccagctaattttttatatttttggtagagacaagtttcactatgttggccaggctggtctcgaactccggacctcaagtgatctgcctaccttggcctcacaaagtgctgggattacagcatgagccaccacacccggccttagtatttatttctttactttttttttttttttgagacagagttttgctgttgttgcccaggctacagtgcagtggcgcgatctcggctcaccacaacctccgcctcccaggttaaaacgattctcctggccgggcgcggtggctcacgcctgtaatcccagcactttgggaggccgaggcgggcagatcacgaggtaggagatcaagaccatcctggctaacacagtgaaaccccgtctctactaaaaatacaaaaaaattacccgggcgtggtggcgggcgcggtggcgggtgcctgtagtcccagccactccggaggctgaggcaggagaatggcatgaacctgggaggcggagcgtgcagtgagccgagatcgtgccactgcactccagcctgggtgacagagcgagactccgtctcaaaaaaaaaaaaaatattaaaaaaaaaaagcgattatcctgcctcagcctcccaagtagctaggattacaggcatgtgccacctcgcctggataattttgtatttttagtagagacagggtttttccatgttggtcaggctcttctcgaactcccaacctcaggtgatccgcccacttcggcctctcaaagtgttgggattacaggcgtgagccaccgtgcccagccgatattttatttctctttttttttttgagacggagtcactctgtcacccaggctggagtgcagtggcaccatctcggctcactgcaagctccgcctctcgggttcatgccattctcctgcctcagcctcccgagtagctgggactacaggcacccgccaccacacctggctaattttttgtatttttagtagagacggggtttcaccatgttagccgggatggtcccaatctcctgacctcgtgatccgcccgcctctgcctcccaaagtgctgggattacaggcgtgagccaccgctcctggccccaatattttatttcttcaacaaacacttaggtgaggctcactctgtacctagaaattctggaagccctttttgtctgttaactcatctaatcttcctgacagctccatacattagctactatgactgtccccatttacagatgaggaaactgaggcacaggaaggtcaagtaccttaccaaagcttttatagctggactgggatttgaaccaggcagtctggctccagtctgagcttttaagcctccccagtcctggctgaacttgtttcctccttggtcaagtcagcagcacctagccctcggggttggggaggggttaatgaggtgccttgtggagtggttcagcctgctcaggtttatgtagggcttcttttcatccatctcactcccgaggtgagagcctggtgctgcatgagggctgcagcagacttgaccgtgagatatccactcacacgggctggacaggggtgagagtaagggaaggcaaagcaggggaatcggagagggcttcctggaggagtccgcctccaggatgtagagggtttttgtgcagataggggctgcattctaggggcctgaggcagagagaacccgggctgcagggcactatgggccagggtagctctggcttctggccctgggtcagtccagcacctatatccccaggtgctgcttcgcgtaaaagaaaacgaactccagtacctaaagaaggaggtgcagtgcctccgggacgagctccagatgatgcagaaggtaggtccttccgctgggctgggggccgtcggggactctggagccatctggatgccatcctgtgagcacctgctctgtgccaagccctccactcgcttcatccttcctcaggctctcctgtgcttctcccatgtaggtgtcatcatccccattcactgacagggaaactgagactaagaaaggggaagtgacttccccaaggctgtacttggcttctgtttatttagcattatttaatttattgattattattgagcacctactatatcctgggcactgtgctaggtgctgggaagacagatgtgaacaaaataaccccaaatctctgctgtggggagcttgcactccagtgagaataaccacgttgctaggagttgggtgggtcagggttcagcccaggtctgagtctgcagcccgcctggcccacccttggctgctatgtcactgcctggtgcgctctgtcagtttggggcaggaagtggacatgttggtggctctgtaagtgcacgtgagccagaccgtgtttaccgcacttgaagaacaggtggcgtgaactcacaggaagggcccgagcacccagccaggctgacctggttctcatcccagccactcactgccctgcggtcttggtcaaaatcttctcccccgaaacaggatgaggatgacaatgacgcctgtgtccctgggtggtaccagggaggtgggaggggtaagcccagaacccacggccatcttggggagccacctggagggatgaagcgaggtatctgcggggaggtctggctgctggtgctgcccatgtgcccggttggcagggctggagggagagacttcatgccctcatacctgcctcctgccccccaggacaagcgcttcacctcgggaaagtaccaggacgtctatgtggagctgagccacatcaagacacggtctgagcgggagatcgagcagctgaaggagcacctgcgtcttgccatggccgccctccaggagaaggagtcgatgcgcaacagcctggctgagtagaggtggatgccgaggcgtgtgccctgcagggtgggcaggggctgaggctctcccacacccgggactccctggaccaccccagccaggccacttccttcttctggcctccaattcccgttctgtaaaaaggacaatgaaaccagcaacacggggttgttgcagagatcccatcagacccgggccacaggctgcttcatcagcttaagcctgttcctccagagctgggcggcacagtgcagagccacagcctactcagtgcaccccccttcttggggctggaggcaaatgcagcgtgcacatccctgacccccacagtgaatctccactgagcttcacacacacacatcgcacgctgaggccgggcttctatcccagttagtcttaacactccttcttgacttagcagggctcaaagtggttggttggttggttggttggttggttggttggttggttggttggttttggttgctttgagaaaggtcttactctgacacccaggctggagtgcagtggtgcaatcacggctcactgcagcctcaacctcctaggctcaagggatcctcccacctcagccttctgagtagctgggaccacaggccctcaccaccatgcccagataatttttgcactttttgtataggtggggtttcgccgtgatttcccaggctggtctcgaactcctgggctcaagcaatacacctgcctcagcctcccaaaattctgagattacaggtgtgagccgctgcacctggccaaagtgttcttatttttgctttttcaacgccacatctacctggagcatcctctttctgataagtcctcatggacttcctatggcatgcaggagaggccaccctatggctgagctgcttgggaaggagccaggaagagcggatctggctgtaccttaggggctgagaggtggtggaaggacccactcagcacccttgcttggccttggggtggcctcgcagcccctcagcccaggcctcagccctgccgcaccttgtctttcaggtcccgcccagctgcagaccctccaggctggaggaccagccgccctccttccctcctggatggaagtaaaaagccaagctttctccccaccctctgtgggccacacgtgcacttgcacccaccacacacacacacacacacacacacacacacacagacacacagacacatacgcacacacgtgcacacatgtacacacggatacacacacacacacacacactgcatatctgagcgcgcccctcgcactgggtctcaccttgcaccttcttcaggattttatatgtgaagagatttttatatagatttttttcctttttttccaaaacactttatactttaaaaaaaaaaaaaaaaagcaattcctggtggctgtgtgcctccaaccctggtccccctctgtctccagccaccctctgcttgggcttctgagctggtggccctggcccagaggtctggcggaggcccaggcagcagccatggcggggtgtctctacaggggagaggcgggagcctgccaccctcttcctgccctacctcctactaacacttcctgccccatttggacccgtaccatggggctcaggacagagggagctagcagctggcctccatggccccacagcctccttcgaggctgtgctgggtgcagaaccgccagagccacccaaaaggtgtttctcttctgctccctgaacctcttaacttaataaaacgttccagcagctctggtgtcctagatggctggcagaacaggaatggagattggggtttcttgaagtggcttccccactcacaccctacccacaccccacccttcctaaagcagcggcctctaggcttctgagggtggggctgaaaatccaaggtctcccttagtacagactgtgacgcccccagtgtggcttgcaggctagtggcagcggaagcatgtgggaaatagcaagtccagtcccaccccaacctactgaaccagcgtctgcattttaacagggtgccccagtgattcacgtgaccttcaaagtctgaggagccctggagtagggcccagggcccaggcctgagagagaggcctggggctaagactagccctgaccatgaccttgggcaagtcacacccctcactgagcctcagtttgcttctccatcaaatgggtgtttttctttcagtcccagtcctctcctgaggcttttcccagaggtcatgcccagccctgggcaggggtgagggcagggttgtggctgccaggcacaggtccagcgggctgggagtcctcaccatggctggctgtgctgattatggttgcatggggctgggaagaggtcccatttctgagccacagaaacaggccacatccagtaggggtcctggaaggctgtgagaacccagaggagaccctgacccagcctgcaggtagaagactgcctttggaggcagctttgaaagatgactcttccagatggaagaatcaggaagggccttcccacgtggaggcaccagcaggagcaaacgtccctggtgtgttcaggcaaagagccacaggagagtgacctcgtggagtgggaagagattgtttcccattcccttgccagggattggttgaggaatggacaaggcttgcagttcacgcaagccagtgaaatgcgaggggaagtcttgggagtggggtggaggaggtcatctgggaagggtgtccttggtcttaaaaagaggcacaagaggccgggcgcggtggctcttgcctattatcctagcactttgggaggccaaggcagggggatcacttgaggtcaggagttcgagaccagcctggccaacatggtgaaaccccgtctctactaaaaatacaaaaaattagccagacgtggtgccaagcacctgtaatcccagctactcaggaggctgaggcaggagaatcacttgaacccaggaggcagaagttgcagtgagccaagatcgcgccactgcactccagcctgtgtgacaagggcgaaactccatctcaaaaaaaaagggggagggtggcgcaaggagaggacacctctctcctggccctgtcgccatcttccctcatcaatagctaaaaatggcaaagaagaaagagccaggaccccgtgccatcaaatcctccggccttgtgctgccctgtctcggcactgcttgccttaggagatcaggagtgttcctagccactgggagatgggatgcctgccactggcagctctgccgtccatcctcaccatcccaccgtccccccaagacagctctccatcccatcctctgcctcccttctagcctcaacctaactcagggctcccccgtctcacacctgggttgcaggaacatcctcttcaccaacccccctcccatccctcctcagggctgcctagggcagctacaaaaaccaggccagcctctgaaaggtgctccacatctcattaaaaaccgtgaaatcgcactgccccactatcagaatagctcagaggagaaggtctgccagtaccaagtgctggtggggatacggagaagagcagctcccaggcgctgctggtgcaaatgtgctttgttgcacccacggcaggaaactgaccagcttctcatcaagttaaatacgcatctaccctatggcctagcatttccactcttgcttacacatccaggagaaatgagtccttacatgcacaaaaggatgagtaccgtaatactcacatcagcaaataaacaatacagctgtgtgtcagtagtagaatgaataaattgtggtcgattcatacgttagaatacagcaatttaaaaacaactgctacacacaaaaatgttggtgaatctttcagacacaatgttgagcaaaaatagccacagaagagtgtaaggctgtacgattttatttaggtgaggttcaagaacagacaaaacacggtgatagtggtcagaagagcgggtacctctgagctgagggcattgaccagcagtgggcaaaagggaacattctgatcccagaaatgttctatatcatggtctgggttgtggtcacgtgggtacatacagatgtaaaaattcaccatgccggccaggcataatcccagcactttgggaggccaaggtaggtggatgacctgaactcaggagttccgagaccagcctggccaacatggcgaaaccccgtctctactaaaaatacaaataattagccgggcttgctggcgcatgcctgtaatcccagctactcgggaggctgaggcaggaaaattgcttgaacccgggaggcggaggttgtagtgagcccagatcgcgccattgcactccagcctggatgacacagcgagactttgtttaaaaaaaaaaaaaaatgccacgccttgcacttacgatttgttcatttttactatgtgtgaatcacgtctcaatggtgcagggggtgggaagaagcctgctttacaaaagaataagccagggttccagcaggctcccagatgagccacctgggaaatggccctgtcaccgcggccgcagggaatttgaccaaaaccacgtggtttggctgcaagttctggtcaactgcttcaggcagccaggcatgtgctctgtaaagaaaacaaactggtttcagatgaacctgccaggtcaaaccctacctgctgcctccagctggctaggtgagccttactgagtcacatctctctctgggctttacttcctcttctgataaatgggaacaataacgtctaccccagaggactgtgtaggtgttaaattaccaactgtttcagttatctattgctgtgtcgccaacaaccacatatgtaatggcctagaataccactttttaaatattcatggtcctgtgggttgacctggctcaacctctttgtgtctttttttgagataaagtcccgctctgccgcccaggctggagtgcagtggtgtgatctcggctcactgcaacctctgcctcctggcttcaagtgatttcctgcctcagcctcccaagtagctgggattacaggtgcccgccaccacgcccagctaattatttatgtttttagtagaaatggggtttcaccacattagccaggctggtctcaaactcctgacctcaagtaatccacccaccttggcctcccaaagtgctgggattacaggcgtgagccaccgtgcccggcctggacatctttctccacatggccacttcacggggctagcttgggctccttacagcatagtggacttgggacaatctgacttcctacattgtggttgacttccccctagaagaggagttctggccaggtacagtggctcacgactgtatatccagcacttcaggagcccgaggcaggaggatcacttgaggccaagagttagttcgagactagcctgggcaacacagcaaaacctcgtatctacaagaaattaaaaaaacaaaaaaacaatagccaagcagcccgggtgaggtggctcacacctgtaatcccagcactttgggaggccgaggcaggcagatcacctgaggtcaggagttcgagaccaacctgatcaacatggagaaaccccatctctactaaaaatacaaaattaaccaggcatggtggcatgcacctgtaatcccagctactcaggaggctgaggcagggaaatcacttgaacctgggaggcggaggttgcagtgagctgagattgcgccactgcactccagcctagggaacagagtgagactccttctcaaaacaaaagccaggcatggtgatgcatgtgcctggagtcccagctacttgggaggctgaggcaggatgattgcttgagcccacgagttggaggttgcagtgaactgtgattgctgccaccgcactccagcctgggcaacagagtgagacccatctctaaaaaaataaaaacaataaaaagtaaagggagcctcaacagccccaagtggaacctacgagcttcttatgaatttggcttggaggtgctgcagcatcccttccatcactttagtcaaaaatgagtcgcacagccagcccaggtccaatgggagaggcggcagcagggcctgagcgccggaggtgtggttcactggcagccatctttttcctctgtttctgcttcagctacaccccagctcctctttagtcccctatgtggaattctcattttcttcccagccctctgatgtgcttccctggagtctgtcctcagcaatcctctgttctctcgtgaagacttatttatttacttacttagagacggagtctcactctgtctcccagtctggaatgcaatggcacaatcggctcactgcaacatccaccacccaggttcaagggattctcctgcctcagcctcctgggtagctgggactacaggcagccgtcaccacacctggctaattgttgtatttttagtagagacagggttttaccatgttggccaggctggtctcgaactcctgacctcaagtgatccccctgcctcggcctcccaaagtgctggggttacaggcgtgagccaccatgcccggcctcttgtgaaaacttgatctctcatccttggcttttgttactgtctgtgctaaccatccacatctgtctccagcccagaccttttccatgaactcctaagacctggtcagcctcagtcttaaggctgccatcaaggccctgtcctccctgcagcccgttcctgttcagtgtattctgcctcgtgagtcagcctctggagtaggccccggggatgcaacatggaaccaagcattctcccttcaggagggaggtgaaattggaatcaggtgattaattacaagaagccacagcacagagggtgtagcaggcccagcctggaaggtcaggggaggcttcttggaagaggagatgctggaaccgagcaggatagagctaggctgagagggggagagagtgccaggtccagtgagcgtcagaagctcagcagagttcaaaggctctgaaatggctgcagcttgtgtgtagagggattcgagatgagcctgcggggacaggctggagctggaatctgattttgcaaggacagtgggggtcatgtgtccaagctctagctttgtgcttaacccagtgggaggctattggggaattttatgtgagcagtgccttggctcagaacagcgatcttggtcatcctcagcacatgggggctatggaaggccctaagttgacctagggtttggtgcagtgggagagaagaacagaggatgaaaccccgaggaagggcagaagcccgtaaagcaactgagaggttcccagcagcccaagcgagcgaatgtttcagagtgatggagcgggaagcgcccaggctctggtgtcagatggccctccgtccgtccccctgctctcagctctgcaacccgggcaagttacatgacctctctgtgcctccgtttcctcatctgtaaagcagggatagtagtacctccctcccagaagtattatgaagatgagaaatgcgctcatgtgtatgaagtgctgagagggtgcctgggactgagttaacaaggtacatgtgagctgttaagactattgtgatgtgctgctgtttgggtgttgtgaggattggatgaaaaggtgcatgttgccagacgcggtggttcacgcctgtaatcccagcactttgggaggaagatgcaggtggaccacctgaggccaggagttcgagaccagcctggccaacgtggtgaaaccccgtctctactaaaaacacaaaacctagccaggtgtggtggcgcacgcccgtgatcccagcaactcaggaggctgaggcaggagaatcccttgaacccaggagggggaggttgcagtgagctgagatcgtgccactgcactctagtctgggcagcacagcgagactctgtctaaaaaaaaaaaaaagcggggggtggcatgtcaaaaatgtggcccagggccgggattagggaggatttagagctgcttgctttatttatttatttatttatttatttatttatttatttatttatttattttgagacagagtcttgctctgtcacccaggctggagttcagtggcgcaatctctgctcactgcaagctccgcctcccgggttcacgccgttcccctgcctcagcctcccgagtagctgggactacaggcgcctgccaccaagcccggctaattttttgtattttttagtagagacagtgtttcaccgtgttagccaggatgctctcaatctgacctcgtgatccgcccgcctcggcctcccaaagtgctgggattaccggcgtgagccaccgcgcccagcctagagctgctttatttttattttattttaattttttttgagacggcgtttcactctgtcaccacacaggagtgcagtggcacaatctcggctcactgcaacctctgcttcctgggttcaagcaattctcttgcctcagccttctgagtagctgggattacaggcacgcaccaccatgcccggctaatttttgtatttttagtagagaccgggtttctccatgttggccaggatggtctcaatctcctgaccttgtgatccgcctgccttggcctcccaaagtgctgggattacaggcttgagccacggcgcctggtctggagctgctttagtattagttggatgttgctgccctcaaggtccccaggagatccggctccagttggccaagccccagttccatggcctgtgagaatcccgacccgtccctcctaggttggcaggtgcccacaggtcacttttcagagcttcctttctgttggggttggggaagatgtgctgcgaggcacagagccaggccctctggtggttccacagtagatccgctggcagaattgtgctaggaaagagctctcaacatcttgccccagcaccacccagacccccagcaggtcaagggcacctggcagtccaggagggtttgacctggccactgggtcctgcccgacttcccctacccccaccaagccctggctggttccccttccctctctcggccgctgctgttcctgggccccatgcccctgccctgcttgcctcctccctcattcccagacaggttttccctcctgtccaatccacacacccacagcgggggatttctaaaactgggagcggccatgttgctcccctctgtgaatctctgccctgactccctgttcccttgggatggggttctggcatgcaagcccctctgtctgccgtggtctcctttctctacccctttggatccgctaggctccaggcttccactgcacggagcagtagcgcactcttccatcctcactgccgtccccctgcatgcactttccactcccagcccctccccggcagaccccctaagactcaggactcagatcagtcatcatctgccacctccaggaagccccccaagatcccctagatggggatggaagcctgctctggatcccacagtacttggaacttgacatgttttttccttatggctcccccagactgtgagccccctgaggccagggaccagctctgaatcgcttctgtgtccccactgcccagtacagagcactggtgtctgtctccgagggatgagtgtttgttgattgacggactgactgactggaagtgaatgaccactgagtcagtcaccctcaaggcaggaaatagccacagcctcagctccacaccaaatggcaagggaccagatgtccccataaacccactgggaagcccggcagccgtcctgaagggctggaggctaatggaggtttccggtacacgaaagggccaggatttaactgtgagtcacccttgtcatcccggcgtcccacagtactttacgaggggacttgactttgatggagcttccgccacgagcaaacatgatgaacggcaaacctttaatgctcgcaacaacaccttgaagtacttattgctctccccttgttataggaggaaactgaggctcagagaaggacatgacttacccaaggtcaataatttagtgactcacatccgagcaggtctgactctagagcccaaatcccctccctacctagggtgcctccctaaaagtcacgaagccttttttttttttgctgagcacttactgtgggctggaccctggaacaaacattttcactcacaagctcctttaattcccagaacagcctgatgagggaggtagcacagttgtccccggtagggggccgggactcagcagcacaatgaggtgacggccaggtcagttggtctcacagcccaggtggcctcctgagctgacccaggtcttctcattggaggctgcctggggaccaggtgccttggttccccctgcttgtggtaggcattgggggaggtctgggtgtaccttggtgaggctgacttgaatgagcctcatgtggaggccacatgaggaggcctcaatgtggagccacttccacactgctgcctcagtttcctagtaaagcagggcaacagcttattcccaaagggcccagaaaggctagatccccctgcaaagggcaggaggcgtttcggggtgcctgtgtgattggctggcccttgccctgtcaccaccccgcagctccaccttcatcgcctgcgtcccggggactgccaaccgcgctttctttccagagcccctgagctcttgcatgggctgctcccagcccctccctagctctggccatcctggccccagttggtctccccgccatgagctcccttgtggcttctcaaggccaagactcaaccaggccggcggagtgggaggaacctgcttcttcaagttggtcacctggcttggccatccactggccctgggaccttgactgtggcatttccagagccacatcccagatgctcccatgtggctgtgtccactctcgggtggggcagctgactgcactggccaaatgtgtctgaaaggtgacagatggtggacttgccccaccagcagtgtgacatggatgcactgatgtgggggtgggaggcgctacagggagaacttcacaggggcctggctggccctgaccctttggactccagcagattctcaccatctcctgaggaagacaggtttataggtgtccctggcccccaccccagggtgtccccacaacccaactccaatctcatgcagtctctcccctcttcactcattcagttgctgaaagtctgtgtcatctactagctgtgacctcaactgtggcatctccagagccacattccagctgctcccacgtggctgtgtcctcactcaagagcaggacagctggctgcactggccaagtgtgtctgaaagttgacaggaacattcattccagcattagaaggaagtgggccaggtgtggtggctcacacctgtaatcccagtactttgggaggccgagacgggggatcacctgatgtcaggagtttgagacgagcctggccaacatggtgaaaccccgtctctactaaaaatacaaaaattagccaggcgtggtggcaagtagtgcctgtaatcccagctacttgggaggctgaggcacgaaaatcgcttgaacccgggaagcagaggttgcagtgagcctagatcatgccattgaactccggcctgggtgacaagagcaaaactctgtatcaaaaaaaaaaaaaaaaaaaggaaactgtgtcctgtgcagatttgcatctgtgtttattcatgcttaaacctctccagaaggatttgcacacatacatttgtgcacacacacccccagggtgagggaacccagtgtgaaggggccctggacacacaagaccctgggaatagtggttgcctcctcggggagggagccagaaggccaggggacaggggtggtgggacacatttcagtgttaaatgctttcatatgttctgcactatttcccatgtgcatgtgatatttattccaaaataaagttttaaaaaatactaaaatagtcctgaacggagcatggtaggggagtggcagggctggcaccaaactcagggctcactggctggctctgccacacacctgcttcaatcaatgatcttccctggaaattcacttcctcacctgagatgagatgaagaaatgggattaagtgaggccctgagcgtggccaggcccactgagtctgagtagcagctgttattcctgttaatatcctggtcaagcctgttccaggcacctgagtgacacagacatgaagggacacgccctgtccctgcgctcaccctgcaagggcaaggggagagacagcaacaccagggagagctgatgcaactgacccggtgcaactaactcggccagaggagccagggaaggctgcacaggacaggtgacgcctgcaccgaggcttcaaagataaataggtgtaatcgggggaccaaaggagagagggtgctccaggctggggaagcagagcctgccaagactgtaaaaaactcatgctgggcacacccacgtccacagcatgtaaacagagccatatatgcactcatgaacacctgtgctcacagctgccccattctatacactcctgctcacatacacagcccatgtgcatgcctgtatatgccccccatgtgcacagcagaccgcctgccagttacctgtgtgacccacttatgtctctcaacctctctgggcctcagttcgctcacctcttacatgtggaaaatgacagggacatggtgagtgttatatgagacagtacctgtggagcactaagggcaatgtccagtaaatgttcgctgtatgatccttttgtcgttcataagcatgacgattgggctttcatgctcatgcatgagatgggcctcccttcagtcttgttacaggccggctctgtggctcatgcctgtaatcccagcactttgggagtccaaggtgggaggattgcttgaggccaggagttcaagaccagcctgggcaacaccgtgagatctcatttgtagaaaatgtttgtttgtttgtttgtttgtttttaattagatgggtgcagtggtgtagctgtggtctcagctactagaaaggctgaggtgaggccaggcgcggtggctcacgcctgtaatcccagcactttgggaggccaaggtgggcgaatgacaaggtcaggagtttgagaccagcctggccaacatggtgaaaccccacctctactaaaaatacaaaaaattagccgtgcgtggtggtgggcacgtgtaatcccagctactagggaagctgaggcaggagaatcacttgaactcaggtatagtgtctcacgcctgtaatcccagcactttgggatgctgaggtgggcgggtcgcttgagcccaggagtttgagaccagcctgggcaacatggcaaaacccagtctctacaaaaaaaaattacagtcccagtcccagtccctctccctctccctctcggcctccctctccctctcggcctccctctccctctcggtctccctctccctctcggtctccctctccctctctttccacggtctccctctgatgccgagccaaagctggacggtactgctgccatctcggctcactgcaacctccctgcctgattctcctgcctcagcctgccgagtgcctgcgattgcaggcgcgcgccgccacgcctgactggttttcgtatttttttggtggagacggggtttcgctgtgttggccgggctggtctccagctcctaaccgcgagtgatccgccagcctcggcctcccgaggtgccgggattgcagacggagtctcgttcactcagtgctcaatggtgcccaggctggagtgcagtggcgtgatctcggctctctacaacctccaactcccagccgcctgccttggcctcccaaagtgccgagagtgcagcctctgcctggccgcccatcgtctgggacgtgaggagcccctctgcctggctgcccagtctggaaagtaaggagcgtctctgcctggccgccatcccatctgggaagtgaggagcgcctcttcccggccgccatcccatctaggaagtgaggagcgtctctgcccggccgcccatcgtctgcgatgtggggagcgcctctgccccaacgccccgtctgggatgtgaggagcgcctctgcccggccacgaccccgtctgggaggtgaggagcgtctctgcccagccgccccatctgagaagtgaggagaccctccgcccggcagccgccccgtccgggagggaggtgggggggtcagccccccgcccggccagccgccccgtccgggaggtgaggggcgcctctgcccagccgcccctactgggaagtgaggagcccctctgcccggccagcaccccgtctgggaggtgtacccaacagctcattgagaacgggccatgatgacaatggcggttttgtggaatagaaaggggggaaaggtggggaaaagattgagaaatcggatggttgctgtgtctgtgtagaaagaagtagacaggggagacttttcattttgttctgtactaagaaaaattcttctgccttgggatcctgttgatctgtgaccttaccccaaaccctgtgctctctgaaacatgtgctgtgtccactcagggttaaatggattaagggcggtgcaagatgtgctttgttaaacagatgcttgaaggcagcatgctcgttaagagtcatcaccactccctaatctcaagtacccagggacacaaacactgcagaaggccaaagggtcctctgtctaggaaaaccagagacccttgttcacatgtttatctgctgaccttccctccactattgtcctatgaccctgccaaatccccctctgcgagaaacacccaagaatgatcaattaaaaaaaaaattacaaaaattagccaggcatggtggcttgtagtcccagctactcgggaggctgaggtgggaggatcacctgaatcgggaggttgaggctgtggcgagctatgactgcaccactgcactccagcctgggagacacagtgagaccctgtctcaaaaaaagaaaaaaagtttttggcctgccgggtgtggtggctcacacctgtaatcccagcactttgggaggctgaggcgggcggatcacctgcgagaccactctggccaacatagtgaaaccccatctctactaaaaatacaaaaaattagctgggcatggtggcggtggcgggcgcctgtagtcccagctactcgggaggctgaggcaggagaatcgcttgaacccgggaggcagaggttgcagtgagccgagatcgtgccattgcactccagcctgggcaacaagagcaaaatgccatctcaaagaaaaaaaaaaaagagcttttggtctttcaaacaaactacattaagaagagattcctacattttaaaaacttagggctccgaggtcaggagatcgagaccatcctggctaacacggtgaaaccccgtctctactaaaaatacaaaaaaaaattagcctggcgtgatggcgggtgcctgtagtcccagctacttgggaggctgagggaggagaatggcgtgaactcgggaacagaggttgcggtgagccgagatcacgccactgcactccagcctgggcgacagagcgagactctgtctcaaaaaaaaaaaaaaaaaaaaaaagtagagctgaagcctaggcaatatagtgagaccctgtctccacaaaaaaaaaaaaaaaaaaaaaaaaaaaaaaatagaaaaaattagctgggtatggtggcaggcctgtggttccacgtactggggaggctgaggtgggaggactgtttgagcctgggaagttgaagctgcagtgagtcgtgattgtgccactgcactccagcctgggcaacacagagagaccttgtttcaaaacaaacaaacaaaggaacaaacaaacgaacttaagactggacacagtggctgctgcctataatcccaatactttgggtagctgagacaggaggattgctcgagccagaagttcaaggttacactgagcacgtgaacgttacatgcaccaccgcattccagcctgggcaatagagcgagaccctgtctcaaaaatattattaataaattaaaaataggccaggcgcggtggctcacacctgtaatcccagcactttgggaggccgaggtgggtggatcacctgaggtcaggagttcaagaccagcctggccaacagggtgaaaccccatctctactaaaaatacaaaaaaaatcaactgggcatggtggcgggcgcctataatcccagctacttgggaggctgagtcaggagaatcacttgaagccaggaggtggaagttgcagtgagccgagatggtgccactgcactccagcctgggcaacaagagtcaaacttggccgggcgtggtggcttacgcctgtaatcccagcactttgggaggccgaggcaggtggatcatgaggtcaggagatcgagaccatcctggctaacagggtgaaaccctgtctctactaaaaatacaaaaaattagctgggcatggtggcgggcacctgtagtcccagctactcaggaaactgaggcaggagaatggcgtgaacccgggaggtggagcttgcacggagccgagatcgcaccactgcactctagcctgggcgacagagcgaaactctgtctcaaaaaaaaaaaaaaagagtgaaactccgtctcaaaaaaataattaattacaaataaatttttaaaaattaaacagtaaaaactcaagtaaagtcacgtggaactgccaatcaaagctttggatcagtggaagaaaatccattgctcccacactgaatggatataaagcttagccaaaaacaaagatacttaacatggtcatgaacctctgctgccttgttttgggtaaacacgtcatttctgtccaggtgtctgaaataccaaggatgatacagctaatacttaactgctaatactaaaacagctaatacttaaactgcacttactttgtgtcaggaattccatttttttgttttttttgagacggagatctgtctcccaggctggaatgcagtggcgcgatctcggctcattgcaacctccgcctcccgggttcaagtgattctcctgcctcagcctcccgagtacctgggattacaggcacgtgccaccatgcccggctgatttttgtatttttagtaaagacaggatttcaccatgttggccaggctggtctcgaactcctgaccacaggtgatataccccccactcatcctcccaaagtgccaagactacaagcatgagccactatgcccggcctgtgtcaggaacttctaagtgagatatataatgatatataactcatatgatatctatcatttgctacatacagagtatgtacacacgtatgtatttataacatacatatccatttagtcctcaagaaaactctatcaggcaaatgccattattatcgccaattactataatgcccaggggaggaaactgaggcacagaagggtcattattatttttgccaagaccctcatacttatgacttggaagggctgggatttgaaaccatacaacctggacctccagtacttgggcctcaccactatgctagactttgggacttctagcagatagaagaagtccatccaaaccttcagtttacaggatcacccacatggcccagagaggattagcaaatgccctcaggtcacacagcagatttgggtgcttctcctaccagcccacattgcctcctaaggtatgtttaacatctttaatgtctatgggggaagggccctaaacgtttctgaagaaacccactcctccctgcaagcagcgctgtgtgctccacccccagccagcaccaaagcatatgtgaatacctgcagggactgatgccagctgcatttgggccccagttgggcatggccctcaccagagagcagtccctgttgtccctggtgcttgtcacagcaccagttagtgcattgagagtatggttcatggaggagaaaatattttcccagccgggcatggtggctcccacctgtaatcccagcactttgggaggccaaggcaggtggatcacttgaggtcaggaattcaagaccagcctggccaacacagtgaaaccgcatctctacaaaaatacaaaaatacaaaaattatccgagcatgatggcaggtgaaacccccgtctctacgaaaaatacaaaaaattagccaggcgtggtggcgcgtgcctgtaagtcctaactactcggcaggcaaaggtgggagaatctcctgagccagggagatagaggctgcagtgagccaagccactgcactccagtctgggcaactggagtgagagagaccctgtctcaaaaaaaaaaaaaaaaaaaagtaatacacatggccagccgcagtggctcacgcctgtaatcccagcactttgggaggccgaggctggcagatcacctgaggtcaggagttcaacaccagcctggccaacatggtgaaacccctctctactaaaaatacaaaaattagccaggcgtggtggcaagtagtgcctgtaatcccagctacttgggaggctgaggcacgagaatcacttgaaccaggaggcggaggttgcagtgagccgagatcgtgccactgcactccagcctgggcgacagagtgagacgcagtctcaaaaaaaaaaaaaaaaaaagacacgcttattgtttataaactaaaacagtatagaagtgtataaactaggctgggcgcggtggctcacgcttgtaatctcagcactttgggaggccgaggcaggcggatcacgaggtcaggagatcgagaccacggtgaaaccctgtctctactaaaaatacaaaaaattagccgggcgtggtggtgggcgcctgtagtcccagctactcggagaggttgaggcaggagaacggcgtgaacccgggaggcggagcttgcagtgagccgagattgcgccactgcactccagcctgggcgacagagtaagactctgtctcaaaaaaaaaaacaaaaaaaaaaccaaacaaacaaacaaaaagaagtgtataaagtaaaaaataacagtgcactgtgacccaaatccatttctcagagaaaatcattactatgaacatggagtgtccacacatgtacacgcactcacgggccacttcaccagcttggagaacaaccctagccacagtgcttgcggttgcttttttaaccaatctctcctgcatcctcattcatttattgttaagaagcccagcatctccctcttgaggtctcttccagaatagtctgggaatcccaaggactcactctgtccaaagaaggccagtcctactctgcaaggcctagtggtgcactgcgtgggccccgaggcagtcctctcagttcactccaggagctcagctccctgaaaggaaaatgatgccaagccaggcgcagtggctcacacctttaatcttagcaatttgggaggctgaggcaggtggatc

SEQ ID NO: 1453 - DNA, 180 bp, Homo sapiens
gagaaattacaacatatcaggttccctactactgaagtagccttccgtgagaacacaccacatgttaggactagaagaaaatgcacaatttgtaggggtttggatgaagcagctgtaactgccctagtgtagtttgaccaggacattgtcgtgctccttccaattgtgtaagattagtta

SEQ ID NO: 1454 - DNA, 4684 bp, Homo sapiens
  misc_feature (4138)..(4138): n is a, c, g, or t
aggtgaggcgctagaaggggtggggaccgctgggctggcccaggcgggaccgtgcaccgtgtgtgcgcgcggcgttgaaatgccctgcacgtcggggcagcgggacagatcccagggtgcccagggagtctccaagtgcctcactcctcccgccgcaaacatgacagagaactccgacaaagttcccattgccctggtgggacctgatgacgtggaattctgcagccccccggtgagtaccgccagggattccacacgcagggcctgggttgtgtgagtatcaggttccacagttcggactcaggggtgcgtgccaccgaatgggtgtgttggcgggggaataaatttgggtcccaaatgtgtgggtgggatgtcgccccacgcgtatgagtgtgcaggggtcacggcatccacaggcgggtgcggagggacgtcccgtggccggtagagggtgcaggtcctggggcgaaggccctgtgctgcggggtttgctcatcccacttccacgcccgactgcaaaggaccctcgggagggagcgcggcgaaaggggcacccgtaggagcccgggcgagctgtttcccgcccgactccccactccctgggggctaccgcgtggggcccgggtgcgctgggggccgcaggtgctggcggcacaaacgcgacggtccctctcccgccccggcccgcaggcgtacgctacgctgacggtgaagccctccagccccgcgcggctgctcaaggtgggagccgtggtcctcatttcgggagctgtgctgctgctctttggggccatcggggccttctacttctggaaggggagcgacagtcacatatgtccagagggcggcgcgcggggacccccgtgtcgcccatggtgcccctagggggggcccgagcgcgggccggcgaggggcgcgcggctgcccggcggcccctcgggcccagcgtgagctcccctctcccatcccactctggcacgcggctttccgccttaggtcaacgttgtagaaaagcaagtgaaggtttcacgggagaagattgaagcgtagagtaggggagaatgtagtggacggtccgagaaaggccgttctcggctcatctcccactaagcagtggcgcgaccgtggggaaggcacgtcaccttttggcctcagtgtactcgtcctgaagggaaaaaatggaactggacgatctctaaggcctgtccctgctaagaaaggctgtgggtttaaaatccaggacaaagatagtggaggaatattcagacccatattcagacccattgggaaggaatttttgcctttcagaaggtttttttgtgacctagccatgaacattcccttctctctctggaaaacaaaaacaaaaaacaaacaaacaaacaaaacgtctaacttccttaaaggtggaaaatctctttaacaattaattctggcctagtcatcacgtgtggtttaatagtaggtgttttactaactgctgtcctactttctttgtatgcaactatttattttaaagctccacggctctcgaggagtgtaaagactgtttctaagttgactgggcagagctccagtgtgttctctaaatactctgaaagtgttcacctatgtaaaagggggcattttatcttgatgaccactgccaggtctggtataagcttatttccactaatggaaaagaattccatctccagggcacacacaaagggctctttcataatcactatcctcagaggattggtgattgctgttttttcctctctcctaccatgaaatgcaaagcatgaacgaattccagtacttacagaaaatggtgctgaaagcaattcaaccattttacacatcacatcttctgcagtcactgcataatttgtatttttaactcaaatgtctaatgtagataagcatgccatttagcaccgagtctgttttagagactatatcaaatttacaagcatcgatttgtaagatcagaattgcactgtattttgtgggtatttgaaaagtgccttaatgtatttgtattttaaatatagaagctgggccagatgctcatgtttgaaacagcaaatgtgaataagagaatgatttcaatatctacatttttattaatagcagggtttagattgtcatctctttgggaaattctgtggttttagaatgtaaatgctatcttttaaataacaaagcctcaatggtataggtcaatgggggataacaatagctatgcttttttttggtaaagattctggacgtaatatattttaaaatgaataccatttgtcatttaattattcaaggtaaacatcactaactgacaggcttctaaaaagagagattaaacaatcatactgaataagcacagctcccttttttcatatattttactttactgcaagatggttggttgtctggttcaggagagcagtattaaattctaagaattcagaggaatagtgaatcacattttatcgtcaacaatcaaaattattgctatatcctatacagacaggagaatgaagaaaatcatgatagtttttttctccctgatccatatgacttaagtatgaaaaacaaatcacaaaatactaaatagagtaatttttgcaccacctaggcatagcacatgcacaggtctgctttgcctgaatacaaatctaaatagctcagacaaaacgtaatcaaaaaaggtaagtctttgtcaaacagaaagacttgtcaaaccaaatggattatccactctttggggattatctgtgcctccgctcctctatattggtttatagaggagaaccagctgtaattcacctcctatccttttcatgtgggtaaatccccttaggacaggtttactgaaatttagctggaggactatgaagcactggagtaataataatcaggggacaactgaactgggctccaatattgaggccatttttcatccacattatcgtaaatggaacaaggcattgaaatatgggaaatttccaccaatatgagataactgacaaccccaccctgtgagatgagggaaggagatcattgcttggggcctttcctctcagactaatttttctagacattttcccaaacattatgtaattaatcttatagaacataggccttattaaaaactcattagcaaatatccttggctgtaaaaggcaccatattgagcagaattttggcaaataataaatttcatcttgtttggataaaaatagccttgggtgtccacagctccacggacttagagcagataaggtaattgctgctccaacagcccagcctcgtccccagctcagagtctagtatgttagaaactggactgcctcctccccccacatcctcccctagtagcttcaggagggggacagcttcactgctgtccccatgcagatggtgcagtgcacataaaaggtgggctgcaggccaggcgtggtggctcacatctgtaatcccagcactttgggaggccaaggcaggaggatcacttgaggtcaggagttcaagaccagcctggccagcatggtgaaatcccatctctactaaaaatgcaaataaaggccgggcgcggtggctcacgcctgtaatcccagcacttcgggaggccgaggcgggcggctcacgaggtcaggagatcgagaccatcctggctaacacggtgaaaccctgtctctactaaaaatacaaaaaaattagctgggcctggtggcgggcacctgcagtcccagctacctgggaggctgaggcaggagaatggtgtgaacccaggaggcggagcttgcggtgagtggagattgtgccactgcactccagcctgggcgacagagcaagactccgtctcgaaaaaaaaaaaaaattagctgggcctggtggcgcatgcctgtagtcccagctccctgggaggctgaggcaggagaatggcttgaacctgggaggcggaggttgcagtgagtcgagattgtgccactgcgccccagcttgggtgacagagcaagactccatctcaaaaaaaaaaaaaaaaaaaaggtgggccgcagctgcacaaccaagatgccctacgtcaagcttgtccaatctgtggtcctgcatgcggcccagggcggttttgaatacaacctaacacaaattngtaaacttttttaaaatagyatgagattttttttttttttagattttttttacaaatatacragctatcgttagtgttagtgaattttatgtgtggcccaagacgattcttcttttaccgtgaccgagggaagccaaaagattggctatccctgcacctagttagggaggctttctggggagaagacagccaggggtagtggtggaggaatgtgaaattcaaaccacaggccactcttctagtgtgacaaccttatctccttaagaactgctaagaatttagaaatggttatgttcttaaatgttgcattgctttactagtaaaagcttatgtgcaatgttcttaaaaaaaaacacagaacctcttgtcatatgagtggaagacactcacatgggtgtttcctgccaggctccttctgacagtcatcactgacccatatgaacactggctgctcagagagcaccggacagaacagagccttctttccaaacttcacctgcaggagtcccgtctcagccaaagaaaacaggtttcccaaacctggct

SEQ ID NO: 1455 - protein, 72 aa, Homo sapiens
MTENSDKVPIALVGPDDVEFCSPPAYATLTVKPSSPARLLKVGAVVLISGAVLLLFGAIGAFYFWKGSDSHI

SEQ ID NO: 1456 - DNA, 640 bp, Homo sapiens
cggccacacagctcggatctcctcctgtggatccccccagctctgcgatgatggcagaagagcacacagatctcgaggcccagatcgtcaaggatatccactgcaaggagattgacctggtgaaccgagaccccaagaacattaacgaggacatagtcaaggtggattttgaagacgtgatcgcagagcctgtgggcacctacagctttgacggcgtgtggaaggtgagctacaccaccttcactgtctccaagtactggtgctaccgtctgttgtccacgctgctgggcgtcccactggccctgctctggggcttcctgttcgcctgcatctccttctgccacatctgggcggtggtgccatgcattaagagctacctgatcgagatccagtgcatcagccacatctactcactctgcatccgcaccttctgcaacccactcttcgcggccctgggccaggtctgcagcagcatcaaggtggtgctgcggaaggaggtctaaagccaggtggggcaacagcggtggcagggcagggggtggtgggccagactggtccccgggggacttcttcacaggggctgctggcgagctctttctctttagggactgctccataccccatgatggagcacacggtg

SEQ ID NO: 1457 - protein, 151 aa, Homo sapiens
MMAEEHTDLEAQIVKDIHCKEIDLVNRDPKNINEDIVKVDFEDVIAEPVGTYSFDGVWKVSYTTFTVSKYWCYRLLSTLLGVPLALLWGFLFACISFCHIWAVVPCIKSYLIEIQCISHIYSLCIRTFCNPLFAALGQVCSSIKVVLRKEV

SEQ ID NO: 1458 - DNA, 475 bp, Homo sapiens
tttttttttcttctaatttccatcatgcagccatttggttccatccttctaagaattattaatgttctgtatatatacacccattgcaggcttgtattccacaataacaaagtcatgtatagagaatgtgaaatgatacttgaaaaccaagatatataaaatattgaagtcatttatgccttttgatgactgggttaaatatgcaaagcagctaaaggaatatctacaccacccaccccctttttaactcacacaaagcatatgtagacagaaaaactgaacatactttaagagcacacgcttttttttcggctaagaatcacactatcatcgtagctttgcaactgatgtctgtggtaacatactggttataaaagaaatgaaactcacaaaaggaaattagaacttagcttcctaaagcatatagaattgttaaccttgacagcagaagctcctttataaaaagggaaaatag

SEQ ID NO: 1459 - DNA, 453 bp, Homo sapiens
tgtccttgggggaggaggccagcttctcctggggcatggctggaactgtggcgacaggagcaacgataatggggggctgcactggggttggagccacagccacagcaggagcccgcactggttctcgaaggaggacagtcacattgggggctggatcatgatcaggtatcttcccattaggtttctcttcctttttcttggtctttcctttcttctccactgttttctccttctttttcttctcgactttctggtggtgagttttcgccatctccttgcgctggttggctagggcttcttcatatgacgtttccttcatggagaaagtcgacaccaggaagatgccaatggcagaaacaaccatgaatcctccaaagaccacaacccccaaggtttgagtgtcgtaaatatccatcctggcttgctttcctttcaccatcttcgccgcggcgg

SEQ ID NO: 1460 - DNA, 1744 bp, Homo sapiens
cccacgcgtccgcccacgcgtccgcccacgcgtccgaatcgcagccatggcgtcgttactgtggggaggcgacgcaggggcggcggagagcgagcggctgaacagcaacttttcaaacctcagccaaccccggaagaacctttggggtattaagagtactgcagtccgaaacatagatggttctattaataacatcaatgaagatgatgaagaagatgtagtggatttggcagctaattcactcttaaacaagttaatccatcaatccttagtagaatccagtcaccgtgtggaagttttacagaaggatcccagctctccactttactcagtaaagacatttgaagagctgcggctaaaggaagagttactaaaaggaatctatgcaatgggatttaataggccatctaaaatccaagagatggctctccctatgatgctggcacatccaccccagaacctcatagcacagagccagtctggaacaggaaagacagcggcatttgtgttggcaatgttaagcagagttaatgccttggaattgttcccacagtgcctctgcctagctcctacttatgaattggctctgcaaactggccgtgtggttgagcagatgggaaaattctgtgtggatgttcaagtgatgtatgccattcgagggaatcgaattcccagaggcaccgacatcactaaacagattataattggcactcctgggactgtcctagattggtgttttaaactaaaattgattgatttgactaagattcgtgtgtttgtcctggatgaagcagatgtgatgattgacactcaaggattctcagatcatagtatccgtattcaaagagctctaccctccgaatgccaaatgctcctcttttcagcaacctttgaggactctgtgtggcactttgctgagcgaatcatccctgaccctaatgttatcaagttacgcaaagaggagctcacactgaacaacatccggcaatattacgtgctgtgtgagcacaggaaagacaaataccaagctctgtgcaacatttatggcagcatcaccattggtcaggccatcatcttctgccagactcgtcgaaacgctaagtggttgaccgtggagatgatacaggatggccaccaggtgtctttgttaagcggggagctgaccgtggagcagcgagcttccatcactcagaggtttcgggatgggaaagagaaggttctcataacaactaatgtttgcgcccgagggattgatgtgaagcaggtcacaattgttgtgaactttgatctccctgtaaaacaaggagaggagccggactatgagacctacctccaccgcatagggcggacggggcgctttgggaaaaaaggccttgccttcaacatgattgaagtagatgagctgccctcgctcatgaaaatccaggaccactttaacagcagtattaagcaactcaacgctgaagacatggatgaaattgaaaagattgactattgaagaaagaactttattgtttgtgcagtatcctagtttatgtgagaatgtctcagtgggttttgaaggtaatttttttatgttgaggctttttcgacgtgaaactgtcacagatggcaaaataaatgtcacggtacttagttttaagacatgaggtctttttgaagccaaattgatgtgaagcttgtgatccttttgaataaaaaaaaggcaagattatttcttattctaaaaaaaaaaaaaaaaaaa

SEQ ID NO: 1461 - protein, 483 aa, Homo sapiens [sequence omitted]

SEQ ID NO: 1462 - DNA, 335 bp, Homo sapiens
  misc_feature (56)..(56): n is a, c, g, or t
  misc_feature (111)..(111): n is a, c, g, or t
cttggtctcctcctttttgccgaagttatgaagtcacttttgtcaatttggctgtnagtaggctcctgccggatggagatgattgcaggagatcctgggataatgaatttntcgggcaactcaccgggaccggattgtttggggttgcctggtccgtatttaaaggtccagctgttgctgttgacacccgcaccgactggaggggacacttctcctgcctctggttctggtgttgcactggatactgttggccactgctgatcaggccctcctggaccagcccgtagaatgccagcctcctctaggtgcacagagctgtgcatgcctgctctcag

SEQ ID NO: 1463 - DNA, 246 bp, Homo sapiens
  misc_feature (35)..(35): n is a, c, g, or t
  misc_feature (62)..(62): n is a, c, g, or t
  misc_feature (204)..(204): n is a, c, g, or t
  misc_feature (217)..(217): n is a, c, g, or t
gagacagcagcccatcccctcagcccacacccctncgccctgtgggaccgacaccacagaanccaatgtttggagatttgcacaacctcccgttcccccacatggagaagggaagtaagttgaggcagccgtgggatggtggtaggttccctcttagtcttgctgctgttgctggaattccaaagtgaccttagaaaccacgtnggggaaggcagtnctcactactttagaagggttgcttctaag

SEQ ID NO: 1464 - DNA, 415 bp, Homo sapiens
gaggaggaagaggagaccactgacgatcctgaatatgatcctggctacaaggtgaagcagcgccttggcgggggccgtggtggcccatcccgccgggccccccgtgcagcccagcccccggcccagccttgccagctctgtggccgctcaccccttggggaggccccaccgggaaccccaccctgccggctctgctgccctgctacagccccccaggaagcaccagcccctgaaggcagggccctcggggaggaagaggaggaaccacctcgggctggggagggccgaccagctgggcaggaggaggaggaggaagaggaggaggagggaacctaccactgtacggaatgtgaggattccttcgacaacctgggggagctgcacgggcacttcatgctgcatgcccggggtgagg

SEQ ID NO: 1465 - DNA, 883 bp, Homo sapiens
tgccatggttacttttgccacgatcttacaggtgaacaaggtgatgtccatcttgttttatgtgatatttctcgcttatctccgtggcatccaaggtaacaacatggatcaaaggagtttgccagaagactcgctcaattccctcattattaagctgatccaggcagatattttgaaaaacaagctctccaagcagatggtggacgttaaggaaaattaccagagcaccctgcccaaagctgaggctccccgagagccggagcggggagggcccgccaagtcagcattccagccagtgattgcaatggacaccgaactgctgcgacaacagagacgctacaactcaccgcgggtcctgctgagcgacagcacccccttggagcccccgcccttgtatctcatggaggattacgtgggcagccccgtggtggcgaacagaacatcacggcggaaacggtacgcggagcataagagtcaccgaggggagtactcggtatgtgacagtgagagtctgtgggtgaccgacaagtcatcggccatcgacattcggggacaccaggtcacggtgctgggggagatcaaaacgggcaactctcccgtcaaacaatatttttatgaaacgcgatgtaaggaagccaggccggtcaaaaacggttgcaggggtattgatgataaacactggaactctcagtgcaaaacatcccaaacctacgtccgagcactgacttcagagaacaataaactcgtgggctggcggtggatacggatagacacgtcctgtgtgtgtgccttgtcgagaaaaatcggaagaacatgaattggcatctctccccatatataaattattactttaaattatatgatatgcatgtagcatataaat

SEQ ID NO: 1466 - protein, 257 aa, Homo sapiens
MSILFYVIFLAYLRGIQGNNMDQRSLPEDSLNSLIIKLIQADILKNKLSKQMVDVKENYQSTLPKAEAPREPERGGPAKSAFQPVIAMDTELLRQQRRYNSPRVLLSDSTPLEPPPLYLMEDYVGSPVVANRTSRRKRYAEHKSHRGEYSVCDSESLWVTDKSSAIDIRGHQVTVLGEIKTGNSPVKQYFYETRCKEARPVKNGCRGIDDKHWNSQCKTSQTYVRALTSENNKLVGWRWIRIDTSCVCALSRKIGRT

SEQ ID NO: 1467 - DNA, 1690 bp, Homo sapiens
gccaaatcgcaaatatggcgccggagcggctgcggagccgggcgctctccgccttcaagttgcggggcttgctgctccgtggtgaagctattaagtacctcacagaagctcttcagtctatcagtgaattagagcttgaagataaactggaaaagataattaatgcagttgagaagcaacccttgtcatcaaacatgattgaacgatctgtggtggaagcagcagtccaggaatgcagtcagtctgttgatgaaactatagagcacgttttcaatatcataggagcatttgatattccacgctttgtgtacaattcagaaagaaaaaaatttcttcctctgttaatgaccaaccaccctgcaccaaatttatttggaacaccaagagataaagcagagatgtttcgtgagcgatataccattttgcaccagaggacccacaggcatgaattatttactcctccggtgataggttctcaccctgatgaaagcggaagcaaattccagcttaaaacaatagaaaccttattgggtagtacaaccaaaatcggagatgcgattgttcttggaatgataacgcagttaaaagagggaaaattttttctggaagatcctactggaacagtccaactagaccttagtaaagctcagttccatagtggtttatacacagaggcatgctttgtcttagcagaaggttggtttgaagatcaagtgtttcatgtcaatgcctttggatttccacccactgagccctctagtactactagggcatactatggaaatattaatttttttggaggtccttctaatacatctgtgaagacttctgcaaaactaaaacagctagaagaggagaataaagatgctatgtttgtgtttttatctgatgtttggttggaccaggtggaagtattggaaaaacttcgcataatgtttgctggttattcaccagcacctccaacctgctttattctgtgtggtaatttttcatctgcaccatatggaaaaaatcaagttcaagctttgaaagattccctaaaaactttggcagatataatatgtgaatacccagatattcaccaaagtagtcgttttgtgtttgtacctggtccagaggatcctggatttggttccatcttaccaaggccaccacttgctgaaagcatcactaatgaattcagacaaagggtaccattttcagtttttactactaatccttgcagaattcagtactgtacacaggaaattactgtcttccgtgaagacttagtaaataaaatgtgcagaaactgcgtccgttttcctagcagcaatttggctattcctaatcactttgtaaagactatcttatcccaaggacatctgactcccctacctctttatgtctgcccagtgtattgggcatatgactatgctttgagagtgtatcctgtgcccgatctacttgtcattgcagacaaatatgatcctttcactacgacaaataccgaatgcctctgcataaaccctggctcttttccaagaagtggattttcattcaaagttttttatccttctaataagacagtagaagatagcaaacttcaaggcttttgagattcttaaagatcatctgaagaaaattcatcagttttctgcttaactctatatcttatgtgattctgatattacaataaaattatggtaaa

SEQ ID NO: 1468 - protein, 527 aa, Homo sapiens
MAPERLRSRALSAFKLRGLLLRGEAIKYLTEALQSISELELEDKLEKIINAVEKQPLSSNMIERSVVEAAVQECSQSVDETIEHVFNIIGAFDIPRFVYNSERKKFLPLLMTNHPAPNLFGTPRDKAEMFRERYTILHQRTHRHELFTPPVIGSHPDESGSKFQLKTIETLLGSTTKIGDAIVLGMITQLKEGKFFLEDPTGTVQLDLSKAQFHSGLYTEACFVLAEGWFEDQVFHVNAFGFPPTEPSSTTRAYYGNINFFGGPSNTSVKTSAKLKQLEEENKDAMFVFLSDVWLDQVEVLEKLRIMFAGYSPAPPTCFILCGNFSSAPYGKNQVQALKDSLKTLADIICEYPDIHQSSRFVFVPGPEDPGFGSILPRPPLAESITNEFRQRVPFSVFTTNPCRIQYCTQEITVFREDLVNKMCRNCVRFPSSNLAIPNHFVKTILSQGHLTPLPLYVCPVYWAYDYALRVYPVPDLLVIADKYDPFTTTNTECLCINPGSFPRSGFSFKVFYPSNKTVEDSKLQGF

SEQ ID NO: 1469 - DNA, 1596 bp, Homo sapiens
ccgcgggacgcatgcgcacggcggacggaggcgagccggccggggcttcctccccggccggcagggtggacggtgggctccagatgggatcagagcggatggagatgcggaagcggcagatgcccgccgcccaggacacaccaggcgccgccccaggccagcccggagcggggagtcgcgggtccaacgcatgctgcttctgctggtgctgctgttgtagctgctcgtgtctcactgttagaaaccaggaagatcagaggcccacaatagcttcccacgaactcagagcagatcttccaacctgggaagaaagccctgctcctactctggaagaagtcaacgcctgggctcagtcatttgacaaattaatggtcactccagcaggaaggaatgcattccgtgaattcctccgaacagaattcagtgaggaaaatatgctcttctggatggcctgtgaggaactgaaaaaggaagctaataaaaacattattgaagagaaagcaaggataatctatgaagactacatttctatactttctcctaaggaggtgagcttagactcccgggtgagagaagtgatcaacagaaacatggtggagccatcccaacacatattcgatgatgctcaacttcagatttacaccctgatgcacagagactcatatcctcgattcatgaactctgctgtctataaggacttgcttcagtccttatcggagaaatctattgaagcataggatttttcaaatatatttattattaataaaataataaaagaattcatgggctacaactagcacagggaatttagaggttgtagcatcttctgctggagtaatactcaggctattctaataacagatgattccttcaacagactgctatatattcaccatgtaaactgcagccacctttagtgatacttttaaaaaaaaaaataaagggatatggctgttgtagaaagatagcgtatttgcatttacaataacagtagcatgttgtcagtggccaaggctacacagaaggctccctgctgcccggagcaggtacatccacagagcaaagggaaccacttttattttgcatgagtttggtaactgattactctcccctcaaagaaaagacattcaggtgtttctcaacgacatcttctgtccagcaagctcggtttgaatacgtcacttaccagtgccattgcaggacccaaattcacagttcataaaagatgtgaccactacatgtaaaaatagcattctacttgatcttacagtatgtatgtatgtatgtatggagacatatgtgtgcgtgtggatgtctacatggttaatggaaagcactgtgctctgaagtggatcagtctcaagtgtctggtaacagcagcaatgcttagaaaattcttttgttgaaaagagttactgttattatcagaatttgccaacctaaagaatgaatttttaaattcataacttggtcatgttcacaacaaaactgtcaaataagcatatttccatttttattactgaaagaaatatgggcattttcattctttaaagaaataaagcacaagaattttatctcaaaaaaaaaaaaaaaaaa

SEQ ID NO: 1470 - protein, 241 aa, Homo sapiens
MRTADGGEPAGASSPAGRVDGGLQMGSERMEMRKRQMPAAQDTPGAAPGQPGAGSRGSNACCFCWCCCCSCSCLTVRNQEDQRPTIASHELRADLPTWEESPAPTLEEVNAWAQSFDKLMVTPAGRNAFREFLRTEFSEENMLFWMACEELKKEANKNIIEEKARIIYEDYISILSPKEVSLDSRVREVINRNMVEPSQHIFDDAQLQIYTLMHRDSYPRFMNSAVYKDLLQSLSEKSIEA

SEQ ID NO: 1471 - DNA, 9700 bp, Homo sapiens
agccgccactgcgtccggccctccccgtcagctttcccttctcccgccgcctgggctccaacaagaggggccggcggggcaggccgaccaagcagcccgcggctcccgctgcggagcgctgcgccccggccccgccgccgccgccgcccacgtccggacccatcgggggctcccctcgccgatacgcggtagtagccggggcaggtgggcagccgccaggctgaggtggcgcccaagacgcggctgagctcgcccagggtgggcagcagtagccggaggaagccgccgccgccgccgccggccccccccagcaccagcgccccgggccggggggggcgaggaggcgggggcggcacgacggggggcgggggcggcggcggccacctgtcccggaccaccgcggcccggagggccgtcaacaaagtggtgtacgatgaccacgagagcgaggcggtggaggaagaggaggacatggtctccgaggaggaggaggaggaggacggcgacgccgaggagacccaggattctgaggacgacgaggaggatgagatggaagaggacgacgatgactccgattatccggaggagatggaagacgacgacgacgacgccagttactgcacggaaagcagcttcaggagccatagtacctacagcagcactccaggtaggcgaaaaccaagagtacatcggcctcgttctcctatattggaagaaaaagacatcccgccccttgaatttcccaagtcctctgaggatttaatggtgcctaatgagcatataatgaatgtcattgccatttacgaggtactgcggaactttggcactgttttgagattatctccttttcgctttgaggacttttgtgcagctctggtgagccaagagcagtgcacactcatggcagagatgcatgttgtgcttttgaaagcagttctgcgtgaagaagacacttccaatactacctttggacctgctgatctgaaagatagcgttaattccacactgtatttcatagatgggatgacgtggccagaggtgctgcgggtgtactgtgagagtgataaggagtaccatcacgttcttccttaccaagaggcagaggactacccatatggaccagtagagaacaagatcaaagttctacagtttctagtcgatcagtttcttacaacaaatattgctcgagaggaattgatgtctgaaggggtgatacagtatgatgaccattgtagggtttgtcacaaacttggggatttgctttgctgtgagacatgttcagcagtataccatttggaatgtgtgaagccacctcttgaggaggtgccagaggacgagtggcagtgtgaagtctgtgtagcacacaaggtgcctggtgtgactgactgtgttgctgaaatccaaaaaaataaaccatatattcgacatgaacctattggatatgatagaagtcggaggaaatactggttcttgaaccgaagactcataatagaagaagatacagaaaatgaaaatgaaaagaaaatttggtattacagcacaaaggtccaacttgcagaattaattgactgtctagacaaagattattgggaagcagaactctgcaaaattctagaagaaatgcgtgaagaaatccaccgacacatggacataactgaagacctgaccaataaggctcggggcagtaacaaatcctttctggcggcagctaatgaagaaattttggagtccataagagccaaaaagggagacattgataatgttaaaagcccagaagaaacagaaaaagacaagaatgagactgagaatgactctaaagatgctgagaaaaacagagaagaatttgaagaccagtcccttgaaaaagacagtgacgacaaaacaccagatgatgaccctgagcaaggaaaatctgaggtaggtgatttcaaatcggagaagtccaacggggagctaagtgaatctcctggagctggaaaaggagcatctggctcaactcgaatcatcaccagattgcggaatccagatagcaaacttagtcagctgaagagccagcaggtggcagccgctgcacatgaagcaaataaattatttaaggagggcaaagaggtactggtagttaactctcaaggagaaatttcacggttgagcaccaaaaaggaagtgatcatgaaaggaaatatcaacaattattttaaattgggtcaagaagggaagtatcgcgtctaccacaatcaatactccaccaattcatttgctttgaataagcaccagcacagagaagaccatgataagagaaggcatcttgcacataagttctgtctgactccagcaggagagttcaaatggaacggttctgtccatgggtccaaagttcttaccatatctactctgagactgactatcacccaattagaaaacaacatcccttcatcctttcttcatcccaactgggcatcacatagggcaaattggatcaaggcagttcagatgtgtagcaaacccagagaatttgcattggctttagccattttggagtgtgcagttaaaccagttgtgatgctaccaatatggcgagaatttttaggacataccaggttacaccggatgacatcaattgaaagagaagaaaaggagaaagtcaaaaaaaaagagaagaaacaggaagaagaagaaacgatgcagcaagcgacatgggtaaaatacacatttccagttaagcatcaggtttggaaacaaaaaggtgaagagtacagagtgacaggatatggtggttggagctggattagtaaaactcatgtttataggtttgttcctaaattgccaggcaatactaatgtgaattacagaaagtcgttagaaggaaccaaaaataatatggatgaaaatatggatgagtcagataaaagaaaatgttcacgaagtccaaaaaaaataaaaatagagcctgattctgaaaaagatgaggtaaaaggttcagatgctgcaaaaggagcagaccaaaatgaaatggatatctcaaagattactgagaagaaggaccaagatgtgaaggagctcttagattctgacagtgataaaccctgcaaggaagaaccaatggaagtagacgatgacatgaaaacagagtcacatgtaaattgtcaggagagttctcaagtagatgtggtcaatgttagtgagggttttcatctaaggactagttacaaaaagaaaacaaaatcatccaaactagatggacttcttgaaaggagaattaaacagtttacactggaagaaaaacagcgactcgaaaaaatcaagttggagggtggaattaagggtataggaaagacttctacaaattcttcaaaaaatctctctgaatcaccagtaataacgaaagcaaaagaagggtgtcagagtgactcgatgagacaagaacagagcccaaatgcaaataatgatcaacctgaggacttgattcagggatgttcacaaagtgattcctcagttcttagaatgagtgatcctagtcataccacaaacaaactttatccaaaagatcgagtgttagatgatgtctccattcggagcccagaaacaaaatgtccgaaacaaaattccattgaaaatgacatagaagaaaaagtctctgaccttgccagtagaggccaggaacccactaagagtaaaaccaaaggaaatgattttttcatcgatgactctaaactagccagtgcagatgatattggtactttgatctgtaagaacaaaaaaccgctcatacaggaggaaagtgacaccattgtttcttcttccaagagtgctttacattcatcagtgcctaaaagtaccaatgacagagatgccacacctctgtcaagagcaatggactttgaaggaaaactgggatgtgactctgaatctaatagcactttggaaaatagttctgataccgtgtctattcaggatagcagtgaagaagatatgattgttcagaatagcaatgaaagcatttctgaacagttcagaactcgagaacaagatgttgaagtcttggagccgttaaagtgtgagttggtttctggtgagtccactggaaactgtgaggacaggctgccggtcaaggggactgaagcaaatggtaaaaaaccaagtcagcagaagaaattagaggagagaccagttaataaatgtagtgatcaaataaagctaaaaaataccactgacaaaaagaataatgaaaatcgagagtctgaaaagaaaggacagagaacaagtacatttcaaataaatggaaaagataataaacccaaaatatatttgaaaggtgaatgcttgaaagaaatttctgagagtagagtagtaagtggtaatgttgaaccaaaggttaataatataaataaaataatccctgagaatgatattaaatcattgactgttaaagaatctgctataaggccattcattaatggtgatgtcatcatggaagattttaatgaaagaaacagctccgaaacaaaatcgcatttgctgagttcttcagatgctgaaggtaactaccgagatagccttgagaccctgccatcaaccaaagagtctgacagtacacagacgaccacaccctcagcatcttgtccagaaagcaattcagttaatcaggtagaagatatggaaatagaaacctcagaagttaagaaagttacttcatcacctattacttctgaagaggaatctaatctcagtaatgactttattgatgaaaatggtctgcccatcaacaaaaatgaaaatgtcaatggagaatctaaaagaaaaaccgtcatcacagaagtcaccacgatgacctccacagtggccacagaatcaaaaactgtgatcaaggtagaaaaaggcgataagcaaactgtggtttcttccacagaaaattgtgcaaaatccactgtcacaaccaccactacaacagtgaccaagctttccacaccctccacaggcggcagtgtggacatcatctctgtaaaggagcagagcaaaaccgtggtcaccacgacagtgacagactccctgaccaccacgggaggcacactggttacatctatgactgtgagcaaagagtattccacacgagacaaagtgaaactgatgaaattttcaagaccaaagaagactcgttcaggtacagctctgccatcctatagaaaatttgttaccaagagcaccaagaagagcatttttgttttgcctaatgatgacttaaaaaagttggcccgaaaaggaggaatccgagaggtcccttattttaattacaatgcaaaacctgctttggatatatggccatatccttctcctagaccgacctttggcatcacttggaggtatagacttcagacagtaaagtccttagctggagtgagcctgatgttacggttactgtgggcaagtttgagatgggatgatatggcggccaaggttcctccaggaggagggagtacacggacagaaacatccgaaactgaaatcacaacaacagaaataattaagaggagagatgttggtccttatggcattcgatttgaatattgtatcaggaaaatcatttgtcccattggagttccagaaacaccaaaagaaacgcctacacctcagaggaaaggccttcgatcaagtgcactgcggccaaagagaccagaaacgcccaagcaaactggccctgttattattgaaacctgggtagcagaagaagaactggaattgtgggagatcagggcatttgctgagagagtggagaaagaaaaggcacaagcagttgagcaacaggctaagaaacgactggagcagcagaagccgacagtgattgcaacttccactacttccccaacaagcagtacaaccagcaccatctctccagcacagaaagttatggtggcccccataagtggctcagttacaactggaaccaaaatggtactaactactaaagttggatctccagctacagtaacattccaacaaaacaagaactttcatcaaacctttgctacatgggttaagcaaggccagtcaaattcaggcgttgttcaagtacagcagaaagtcctgggtatcattccatcaagtacaggtaccagtcagcaaacctttacttcattccagcccaggacagcaacagtcacaattaggcccaatacctcaggctctggaggaaccacaagcaattcacaagtaatcacagggcctcagattcgccctggtatgaccgtgattagaacaccactccaacagtcaacactaggaaaggcaattattcgaacacctgtgatggtacagccaggtgctcctcagcaagtgatgactcaaatcatcagggggcagcctgtctccactgcagtctccgcccctaacacggtttcctcaacacctgggcagaaaagcttaacttcagcaacgtccacttcaaatatacagtcttcagcctcacaaccccctcgcccccaacaaggacaagtgaagctcaccatggctcaacttactcagttaacacagggccacggtggcaatcaaggtttgacagtagtaattcaaggacaaggtcaaactactggacagttgcagttgatacctcaaggggtgactgtactcccaggcccaggccagcagctaatgcaagctgcaatgccaaatggtactgttcagcgattcctctttaccccattggcaacaacagccaccacagccagcaccaccaccaccactgtttccacgacagcagcaggtacaggtgaacaaaggcagagtaaactgtcaccccagatgcaggtacatcaagacaaaaccctgccaccagctcagtcatcaagtgtgggtccagcaaaagcccagccacagactgctcagccttcagctcggccccagccccaaacccagccccagtccccagctcagcctgaagttcagactcagcctgaagttcagacccaaacaactgtttcatcccatgtcccttctgaagcacaacccacccacgcacagtcatccaagccccaagttgcagcacagtctcagcctcaaagtaatgtccaaggacagtctcctgttcgtgtccaaagtccatcacagactcgaatacgtccatcaactccatcccaactgtctcctggacaacaatcccaggttcagactacaacctcacaaccgattccaattcaaccacatacatctcttcagataccttcccaaggccagccacagtcacaaccccaggtacagtcttcaactcaaactctttcatcaggacaaactttaaatcaagttagtgtttcatccccatcccgtcctcagctacaaatacagcagccacagccccaagtcattgctgtgcctcagctgcaacaacaagtccaggttctctctcagatccagtcacaggttgtggctcagatacaggctcagcaaagtggtgtgccccagcaaatcaaactccagttacctatccaaattcagcaaagcagtgctgtgcagactcaccagattcagaatgtggttacagtgcaggcagccagtgtgcaagagcagttgcaaagggttcagcaactcagggatcagcagcaaaagaagaaacagcaacagatagaaattaagcgtgaacacaccctccaagcttctaatcaaagtgaaatcattcagaaacaggtggtgatgaagcataatgctgtaatagaacatttaaaacagaaaaagagcatgactccagctgaaagagaagagaatcaaagaatgattgtctgtaaccaggtgatgaagtatattttggataagatagataaagaagaaaaacaggcagcaaaaaaacggaagcgtgaagagagtgtggagcagaaacgtagcaagcagaatgccactaagctgtcagctctgctcttcaagcacaaagagcagctcagagccgagatcctgaagaagagagcactcctggacaaggatctgcaaattgaagtgcaggaagagctgaagagagacctgaaaattaagaaagaaaaagacctgatgcagttggctcaggccacagcagtagctgcaccctgccccccagtgacaccagttcttccagcccctccagcccctccaccttcacctccccctccacctggtgtgcaacacacaggccttctgtccacgcccaccttacctgttgcttcccagaagaggaagcgggaagaggaaaaagactccagctcaaagtccaagaaaaagaaaatgatctctactacctcaaaggaaactaagaaggacacaaagctttactgtatctgtaaaacgccttatgatgaatctaaattttatattggctgtgatcggtgtcagaattggtaccatgggcgctgcgttggcatcttgcaaagtgaggcagagctcattgatgagtatgtctgtccacagtgccagtcaacagaggatgccatgacagtgctcacgccactaacagagaaggattatgaggggttgaagagggtgctccgttccttacaggcccataagatggcctggcctttccttgaaccagtagaccctaatgatgcaccagattattatggtgttattaaggaacctatggaccttgccaccatggaagaaagagtacaaagacgatattatgaaaagctgacggaatttgtggcagatatgaccaaaatttttgataactgtcgttactacaatccaagtgactccccattttaccagtgtgcagaagttctcgaatcattctttgtacagaaattgaaaggcttcaaagctagcaggtctcataacaacaaactgcagtctacagcttcttaaagttcagcgtgttaacctaacataaaacacagcaagaatctggttgtctgaactattttaaattaaggagccagatgtttttagtcaggctatcctgacaagacttgacctaaacttcgtttttattggtcataacagtccaattatattcttggccaattttgtccaacggacaagaaaaaagcaaagtcaacgacaccattatcttgtcaagatcagatggttttactattgtggcagaagcgagaaaactttgtttattgaaaaaaaaagaaaaagaaagcaagaaaaaaagatactatggggtcaagtgtaactccatggaaatgccacgtctgctcttcagtgaagaagctggtttagagtctcacagaaaacttttgactgtatttatttattgttgcaaaaaagacgcttttttattgctgccctcatttgtcagctaagtattttttcttataaaatccagccccggttacatataatcatctgtatcttatcatgattcctgtaggtaaaagtacaagacgacctctagatgtcttttctttctatgaaaggagctgctatgtacacatgtgcacacacacacaactgggaatcaacaatgagtttattgttcatggtagattaaaattaagcttgcataaaggttgggctaagtggtccttgggctacagactctgttgccttgaatataacagtacaatttgtcaattactctgcaccaggctaaagtgagtaaaatctatttgaaggtatcttgtttgtaaacatttgtcagattctaatttttttcttttgtattaaaattcaactatggatgtatatgaaacaaaataaatggagataatttttctcccacaaaaaaaaaaaaaaaaaa

SEQ ID NO: 1472 - protein, 2781 aa, Homo sapiens
MVSEEEEEEDGDAEETQDSEDDEEDEMEEDDDDSDYPEEMEDDDDDASYCTESSFRSHSTYSSTPGRRKPRVHRPRSPILEEKDIPPLEFPKSSEDLMVPNEHIMNVIAIYEVLRNFGTVLRLSPFRFEDFCAALVSQEQCTLMAEMHVVLLKAVLREEDTSNTTFGPADLKDSVNSTLYFIDGMTWPEVLRVYCESDKEYHHVLPYQEAEDYPYGPVENKIKVLQFLVDQFLTTNIAREELMSEGVIQYDDHCRVCHKLGDLLCCETCSAVYHLECVKPPLEEVPEDEWQCEVCVAHKVPGVTDCVAEIQKNKPYIRHEPIGYDRSRRKYWFLNRRLIIEEDTENENEKKIWYYSTKVQLAELIDCLDKDYWEAELCKILEEMREEIHRHMDITEDLTNKARGSNKSFLAAANEEILESIRAKKGDIDNVKSPEETEKDKNETENDSKDAEKNREEFEDQSLEKDSDDKTPDDDPEQGKSEVGDFKSEKSNGELSESPGAGKGASGSTRIITRLRNPDSKLSQLKSQQVAAAAHEANKLFKEGKEVLVVNSQGEISRLSTKKEVIMKGNINNYFKLGQEGKYRVYHNQYSTNSFALNKHQHREDHDKRRHLAHKFCLTPAGEFKWNGSVHGSKVLTISTLRLTITQLENNIPSSFLHPNWASHRANWIKAVQMCSKPREFALALAILECAVKPVVMLPIWREFLGHTRLHRMTSIEREEKEKVKKKEKKQEEEETMQQATWVKYTFPVKHQVWKQKGEEYRVTGYGGWSWISKTHVYRFVPKLPGNTNVNYRKSLEGTKNNMDENMDESDKRKCSRSPKKIKIEPDSEKDEVKGSDAAKGADQNEMDISKITEKKDQDVKELLDSDSDKPCKEEPMEVDDDMKTESHVNCQESSQVDVVNVSEGFHLRTSYKKKTKSSKLDGLLERRIKQFTLEEKQRLEKIKLEGGIKGIGKTSTNSSKNLSESPVITKAKEGCQSDSMRQEQSPNANNDQPEDLIQGCSQSDSSVLRMSDPSHTTNKLYPKDRVLDDVSIRSPETKCPKQNSIENDIEEKVSDLASRGQEPTKSKTKGNDFFIDDSKLASADDIGTLICKNKKPLIQEESDTIVSSSKSALHSSVPKSTNDRDATPLSRAMDFEGKLGCDSESNSTLENSSDTVSIQDSSEEDMIVQNSNESISEQFRTREQDVEVLEPLKCELVSGESTGNCEDRLPVKGTEANGKKPSQQKKLEERPVNKCSDQIKLKNTTDKKNNENRESEKKGQRTSTFQINGKDNKPKIYLKGECLKEISESRVVSGNVEPKVNNINKIIPENDIKSLTVKESAIRPFINGDVIMEDFNERNSSETKSHLLSSSDAEGNYRDSLETLPSTKESDSTQTTTPSASCPESNSVNQVEDMEIETSEVKKVTSSPITSEEESNLSNDFIDENGLPINKNENVNGESKRKTVITEVTTMTSTVATESKTVIKVEKGDKQTVVSSTENCAKSTVTTTTTTVTKLSTPSTGGSVDIISVKEQSKTVVTTTVTDSLTTTGGTLVTSMTVSKEYSTRDKVKLMKFSRPKKTRSGTALPSYRKFVTKSTKKSIFVLPNDDLKKLARKGGIREVPYFNYNAKPALDIWPYPSPRPTFGITWRYRLQTVKSLAGVSLMLRLLWASLRWDDMAAKVPPGGGSTRTETSETEITTTEIIKRRDVGPYGIRFEYCIRKIICPIGVPETPKETPTPQRKGLRSSALRPKRPETPKQTGPVIIETWVAEEELELWEIRAFAERVEKEKAQAVEQQAKKRLEQQKPTVIATSTTSPTSSTTSTISPAQKVMVAPISGSVTTGTKMVLTTKVGSPATVTFQQNKNFHQTFATWVKQGQSNSGVVQVQQKVLGIIPSSTGTSQQTFTSFQPRTATVTIRPNTSGSGGTTSNSQVITGPQIRPGMTVIRTPLQQSTLGKAIIRTPVMVQPGAPQQVMTQIIRGQPVSTAVSAPNTVSSTPGQKSLTSATSTSNIQSSASQPPRPQQGQVKLTMAQLTQLTQGHGGNQGLTVVIQGQGQTTGQLQLIPQGVTVLPGPGQQLMQAAMPNGTVQRFLFTPLATTATTASTTTTTVSTTAAGTGEQRQSKLSPQMQVHQDKTLPPAQSSSVGPAKAQPQTAQPSARPQPQTQPQSPAQPEVQTQPEVQTQTTVSSHVPSEAQPTHAQSSKPQVAAQSQPQSNVQGQSPVRVQSPSQTRIRPSTPSQLSPGQQSQVQTTTSQPIPIQPHTSLQIPSQGQPQSQPQVQSSTQTLSSGQTLNQVSVSSPSRPQLQIQQPQPQVIAVPQLQQQVQVLSQIQSQVVAQIQAQQSGVPQQIKLQLPIQIQQSSAVQTHQIQNVVTVQAASVQEQLQRVQQLRDQQQKKKQQQIEIKREHTLQASNQSEIIQKQVVMKHNAVIEHLKQKKSMTPAEREENQRMIVCNQVMKYILDKIDKEEKQAAKKRKREESVEQKRSKQNATKLSALLFKHKEQLRAEILKKRALLDKDLQIEVQEELKRDLKIKKEKDLMQLAQATAVAAPCPPVTPVLPAPPAPPPSPPPPPGVQHTGLLSTPTLPVASQKRKREEEKDSSSKSKKKKMISTTSKETKKDTKLYCICKTPYDESKFYIGCDRCQNWYHGRCVGILQSEAELIDEYVCPQCQSTEDAMTVLTPLTEKDYEGLKRVLRSLQAHKMAWPFLEPVDPNDAPDYYGVIKEPMDLATMEERVQRRYYEKLTEFVADMTKIFDNCRYYNPSDSPFYQCAEVLESFFVQKLKGFKASRSHNNKLQSTAS

SEQ ID NO: 1473 - DNA, 926 bp, Homo sapiens
ccagagaggggcaggcttgtcccctgacaggttgaagcaagtagacgcccaggagccccgggagggggctgcagtttccttccttccttctcggcagcgctccgcgcccccatcgcccctcctgcgctagcggaggtgatcgccgcggcgatgccggaggagggttcgggctgctcggtgcggcgcaggccctatgggtgcgtcctgcgggctgctttggtcccattggtcgcgggcttggtgatctgcctcgtggtgtgcatccagcgcttcgcacaggctcagcagcagctgccgctcgagtcacttgggtgggacgtagctgagctgcagctgaatcacacaggacctcagcaggaccccaggctatactggcaggggggcccagcactgggccgctccttcctgcatggaccagagctggacaaggggcagctacgtatccatcgtgatggcatctacatggtacacatccaggtgacgctggccatctgctcctccacgacggcctccaggcaccaccccaccaccctggccgtgggaatctgctctcccgcctcccgtagcatcagcctgctgcgtctcagcttccaccaaggttgtaccattgtctcccagcgcctgacgcccctggcccgaggggacacactctgcaccaacctcactgggacacttttgccttcccgaaacactgatgagaccttctttggagtgcagtgggtgcgcccctgaccactgctgctgattagggttttttaaattttattttattttatttaagttcaagagaaaaagtgtacacacaggggccacccggggttggggtgggagtgtggtggggggtagtttgtggcaggacaagagaaggcattgagctttttctttcattttcctattaaaaaatacaaaaatcaaaacaaaaaaaa

SEQ ID NO: 1474 - protein, 193 aa, Homo sapiens [sequence omitted]

SEQ ID NO: 1475 - DNA, 314 bp, Homo sapiens
aaaatttaaaccaaagttccagcatcattgattaagtaatttatcctttcccacagacctgttgtgctggctaggttcacgttttccccagtgatcttctacttgccctcacacatgttagaattctatactatatcagcctcttggcttccattggctgttcacacccactggtattttattatttatattgctttataataacctttgatatatagtaggacaagcctcaccattttactcttctccttcaaagtgtcttattcttagtctgcactttcacatgttccattcctctctaccctaaatgggat

SEQ ID NO: 1476 - DNA, 242 bp, Homo sapiens
tataaaaattttgatctcacatattccctgaaaagaatcttgaaggttcaataccacatcttgatagtgatcaagagatacattaacttccttttttctgtctgtgactcttggttagggcaaatttcaaatccattataatacatacattgcagcaacactgagtttcttataataggtactatccaaagctttcttttttttacatgtatcacttaatcctcacacccacctgaggttta

SEQ ID NO: 1477 - DNA, 454 bp, Homo sapiens
gaattcaaacattcgattccaagagctacctaaattaaggtggctttaaaaaatatttaaattatcaatgatttaggaacgaggctggaagagtaatataaagatgtatatttacaatgccacattaggaaatgtagttccctactctgcactttggaaagacatgaatctgtccagagtcaatactatcatatggctgcttcctactcttccactggaaaaaccctctccacttggaaaattcattttatgcatgctcccactgttgatactctgcatctctcatatgagttaggcaaaatgaatctaataggttacttttgttttcaaaataaaccacccaaacaggttttttaaaactttcaaaaatggaacatttaacccttcacacaaacttccattactgagtacctagtctaatggcaagtacagtattaaggattattgcttttat

SEQ ID NO: 1478 - DNA, 516 bp, Homo sapiens
ttttttttttttgcgggctaacgctttatttgccagccaaggccccgggcccgcctgggcttctgctcagaagatcctcacggagtccagctgcacgtccccgcccacctccaccaggcgcacgcgcgccagcggcaggcggtggcggaagtggtggtactgggcgtccccaaccacggccttgaagccgtcgtctgacgcgatgatgagcacctcgaagggctgcccgcgctggaaaggaacgcccggcccgcgctcctcgcggccccaggagccttgctccttgctgttgaagaccacctccgacgtgtccagccgggggttgaaatgcagggcggcatcggagccctgctcctccccgcacagcaggtttacatggaacctgctggcattgggaggaaccaagccgcgaattctcagcaccgtgccagggcggatgccctcgggcagcgaggacttgtgggggacgttctgcaagagtggggtgcaggggccactgtgagccggtgagaccga

SEQ ID NO: 1479 - DNA, 351 bp, Homo sapiens
  misc_feature (213)..(213): n is a, c, g, or t
  misc_feature (237)..(237): n is a, c, g, or t
  misc_feature (323)..(324): n is a, c, g, or t
  misc_feature (332)..(332): n is a, c, g, or t
  misc_feature (337)..(338): n is a, c, g, or t
  misc_feature (345)..(345): n is a, c, g, or t
cttctgaataacatgagaagccaatatgaacaacttgctgaacaaaaccgcaaagatgctgaagcctggttcaatgaaaagagcaaggaactgactacagaaattgataataacattgaacagatatccagctataaatctgagattactgaattgagacgtaatgtacaagctctggagatagaactacagtcccaactggccttgaaacantccctggaagcctccttggcaganacagaaggtcgctactgtgtgcagctctcacagattcaggcccagatatccgctctggaagaacagttgcaacagattcgagctgnnaccgagtnccagnntacttgnttacca

SEQ ID NO: 1480 - DNA, 3202 bp, Homo sapiens
ctgagacaccgcagcttccctgagcgccgagtccctccggggacagcagcagggagcgcccgcgcagccaccgagcctctgcccagccaagccgccgtcgccgcgccgggggaccgccagccatggccgcgccgggggatccgcaggacgagctgctgccgctggccggccccgggtcccagtggctcaggcaccgaggggagggggagaacgaagcggtgacgccgaaaggggccacgccggcgccgcaggctggggagcccagcccggggttgggcgccagggcccgggaagcggcgtcgcgggaagccggctcgggccccgcccggcagtcgcccgttgccatggaaactgcatccacaggtgtggcaggtgtttccagtgccatggaccacaccttctcaacaacatcaaaagatggggaaggatcgtgttacacatctctcatttctgacatctgctatccacctcaggaggattctacatattttactggaattcttcagaaggaaaatggccacgtcaccatttcagagagccctgaggagctgggtacacccggcccctccttaccagatgtgcctgggatagagtctcgtggcttatttagttctgattctggaatagagatgactcctgcagagtccacggaagtgaacaagatcttagcagaccctctggaccagatgaaagcagaggcctataaatacattgacataaccagacccgaggaggtgaagcaccaagaacaacatcaccccgagctggaagataaagacttggactttaagaataaagacactgacatctcaattaaacctgaaggagtccgtgaacctgacaaaccagctcctgtggagggaaaaatcatcaaggaccatttattggaagaatccacatttgctccatacatagatgatctctctgaagaacagcgcagggctcctcagatcaccacccctgtcaaaatcacactgacggaaatagaaccttctgttgaaaccactacccaagagaagacccctgagaagcaagatatatgtctaaagccaagtcctgacacagtccccactgtcactgtctcggagcctgaagacgacagcccaggatctatcacccctccatcttctggaacagaaccatctgctgcagaatcccaggggaaaggcagcatctccgaggatgagctgatcaccgccatcaaagaagcaaagggattatcgtatgaaaccgccgagaacccacggccggtgggccagctggccgacaggcccgaggtcaaggccaggtccggaccgccaaccatccccagccccctggaccacgaggccagcagcgcggagtcgggggactcagagatcgagctggtgtccgaggaccccatggccgcggaggacgcgctgccctcaggctatgtgagctttggccacgtgggcggcccgccgccctcgcccgcctcgccatccatccagtacagcatcctgagggaggagcgcgaggccgagctggacagcgagctcatcatcgagtcgtgcgacgcctcctcggcctcggaggagagccccaagcgggagcaggactcacccccgatgaagcccagcgccctggatgccatccgggaggagactggcgtccgggccgaggagcgtgcgccaagccggcggggcctggccgagccgggttccttcctcgactacccctcaactgagccccagcctggccccgagctgccccctggagacggagccctggagcctgagacgcccatgttgccacggaagcctgaagaagactcgagttccaaccaaagtcctgcggccacaaagggccctgggcctctaggtcctggcgccccgcccccactgctgtttctcaataagcaaaaagctattgacctgttgtattggcgggacatcaagcagacgggcatcgtgtttgggagtttcctgctgctgctcttctccctgacccagttcagcgtggtgagcgtcgtggcctacctggccctggccgcactctcagccaccatcagtttccgcatctacaagtctgttttacaagcagtgcagaaaaccgacgaaggccaccctttcaaggcctacttggagcttgagatcaccctttctcaggagcagattcagaagtacacggactgcctgcagttctacgtgaacagcacacttaaggaactgaggaggctcttccttgtccaggacctggtggattccttaaaatttgcagtcctgatgtggctcctgacctacgttggcgctctcttcaatggcctgaccctgctgctcatggctgtggtttcaatgtttactctacctgtagtgtatgttaagcaccaggcacagattgaccaatatctgggacttgtgaggactcacataaatgctgttgtggcaaagattcaggctaaaatcccaggcgctaagaggcacgctgagtaaactgatttcccaccggggactggacacaaacaggaatgtctggagtggtaacagctctcttcttactcattactgcaaattgattgtctttcccccctccctccagtaccataatcttagagacaaaccttaaaacagctgtttttaggctgttccttgtactcttaggatatttgagtcacttgtgtcaaccactaaagtatagagaaaagtgtattagatgtggtttttaattttgtgttgctaaaaaaagtgcatgatggtgagagcccaagttatctttccctcttcggtgttcttcttctcttctctgcaatgcttctgtagcttctaatgttccccgtggctaggcctttcctgccgagtgctctgatgcaatagtggaaatcgcttatatgtccttgggttgctggttggattaatctttaataacaatatatagaattgtagactgatgttttagcatttttccaacacacacaacgtaaaaataaaagcagtcgaccgcacttatggtaatcagttttgtataacttaaaataattaaataaatgaataaatccaaaacaaacatgcagtacttttgttgtatgggattggtgggctgatttacatgtatggttactaaaaagtaccagcatgttaactttattacaatttgtattactttctctgtagttcctaatggattcaattacggactctggatatttgcacttatgtacttgatactgaatgcataaataaat

SEQ ID NO: 1481 - protein, 776 aa, Homo sapiens
MAAPGDPQDELLPLAGPGSQWLRHRGEGENEAVTPKGATPAPQAGEPSPGLGARAREAASREAGSGPARQSPVAMETASTGVAGVSSAMDHTFSTTSKDGEGSCYTSLISDICYPPQEDSTYFTGILQKENGHVTISESPEELGTPGPSLPDVPGIESRGLFSSDSGIEMTPAESTEVNKILADPLDQMKAEAYKYIDITRPEEVKHQEQHHPELEDKDLDFKNKDTDISIKPEGVREPDKPAPVEGKIIKDHLLEESTFAPYIDDLSEEQRRAPQITTPVKITLTEIEPSVETTTQEKTPEKQDICLKPSPDTVPTVTVSEPEDDSPGSITPPSSGTEPSAAESQGKGSISEDELITAIKEAKGLSYETAENPRPVGQLADRPEVKARSGPPTIPSPLDHEASSAESGDSEIELVSEDPMAAEDALPSGYVSFGHVGGPPPSPASPSIQYSILREEREAELDSELIIESCDASSASEESPKREQDSPPMKPSALDAIREETGVRAEERAPSRRGLAEPGSFLDYPSTEPQPGPELPPGDGALEPETPMLPRKPEEDSSSNQSPAATKGPGPLGPGAPPPLLFLNKQKAIDLLYWRDIKQTGIVFGSFLLLLFSLTQFSVVSVVAYLALAALSATISFRIYKSVLQAVQKTDEGHPFKAYLELEITLSQEQIQKYTDCLQFYVNSTLKELRRLFLVQDLVDSLKFAVLMWLLTYVGALFNGLTLLLMAVVSMFTLPVVYVKHQAQIDQYLGLVRTHINAVVAKIQAKIPGAKRHAE

SEQ ID NO: 1482 - DNA, 1422 bp, Homo sapiens
gaattctacaacctgggtatctactggacataatgtgggctccattctcacagaaggaattccttgcactgtggttcttctgtgtggcttacgcatgagacaagtgtaagaaagtggccatgtcaataagaaaataagccagctctttggtgccaagaagtctgatttgggggtgccagctatttataggaattgtctagaattaaaatatcaccctgccttggggattgtggggcagctggggatcttggacatctgcagtatattgcaaccacacctgaaattaagaaggactcaatgacaataaacatctttacatcacccagtgtcttgaactcacttccccatcatgtagagcagctcaggtcttctctagctcttccacctcatgatgggtagtgactgctagggaagtcctgatcatcctagccctccaagaaatgttttgatagcattgcatcttgaactcactataatttgatcaagcaaagatgttctatgtctctggttctgaaacctgccaccacagctgtgttctctgctttcagagaccaggggagcagtgactgaagctaagactacacatagcacttcagacaggcaattagaggaaaagaaaactgaatctgtaaactgggaaaaactggtgtatcttttgaggtcccagccattttgagaaactctgatgctgaaaaaataaggaagaacaatctgactcctctctcaaacgctgacattctagctgagtgttgattttttcttagaaaaacaaactttgggtcaacaaggaaagatcacgagtggggagggtgaatgggtgattcacctcatggatctccctggcagctcttgcacttccttgatcaatctgtatataagaaattggctggcacctggatattacttctctgggacacattgccttctgttttctccagcatgcgcttgctccagctcctgttcagggccagccctgccaccctgctcctggttctctgcctgcagttgggggccaacaaagctcaggacaacacgtgagccatgcccttctcctacccaacaaaaaaaaattgcaggaggctcctctcccagtctgaaattacatatctctttctgagaatttctttcaacttcccagaactctagtcccagagctcccatggatctcctgccaggttccacttcttgtcctcttaggaagccccaccaactcctctcacatttttgctgggtgtttctgcattgccagtggaaataaagctccaaatgtacctacaggctgtaattagtagttagtcttcatctaacatgctgatccacatcttgttcataatttatacctttgttcagatttctgctcagtaaactttaccttctcacaccttgcctcctagaagagaagcataacaggtctgtgaattc

SEQ ID NO: 1483 - protein, 146 aa, Homo sapiens
MRLLQLLFRASPATLLLVLCLQLGANKAQDNTRKIIIKNFDIPKSVRPNDEVTAVLAVQTELKECMVVKTYLISSIPLQGAFNYKYTACLCDDNPKTFYWDFYTNRTVQIAAVVDVIRELGICPDDAAVIPIKNNRFYTIEILKVE

SEQ ID NO: 1484 - DNA, 429 bp, Homo sapiens
ttttttttttttttttttaaaaagcataaaagatattctttttattcctgtaattttataaaacactacataaaagctggcgagttttaaagagggaaaaactgcattgaaaagtataaagtctcacaagggcaaagtccatctggggcaacagttccaacatcacggacctctcaggaggagaactggtctcatgagatgctccgtacacccctacccacatacccttcctgtcaaaacttagaccaagcatgccacatctgacaagtcaacttcaaacaattcgtggtgcttttctttcaggctagaaatcatctgtagctattagaaccattcagcaaagcaatatggctttaatgggtacctatgctttgtgaagatatatttatacacacacacacaccgtgtgcttggggccaatcctgagac

SEQ ID NO: 1485 - DNA, 491 bp, Homo sapiens
tctggatctattgaaacatgtttaaaacggggttggtcacaacaggatgggcacaaatgggagcgggggaggggagtggggccgcaccagcccctgccagtgcctgaggctgcagcctggcgagtgcttttgcttctgcttctccacgctggtggttcgagatggtcccaagccccactggggcaggccctgccttgccctgcagaggcagggtggctccacttccccatctcctcccccatgggctgcaggggcatttatgatgcccaacaggtggcactgtcgcgctccttcctccctgtctccgtggctcagaaacaggttaagggtagaggtagatggggaagacttgggggccacacagtctccggtggcagtgagggagcttgggaccctgaggggggcatgctgactccttgctggagaaaaggcacctagataggggagctgggcttgggggcctcccagggggtcctggggtgaggtgggga

SEQ ID NO: 1486 - DNA, 2699 bp, Homo sapiens
gcccagcgggggcgggactggaacggagccgtgcggccccgcgcgctcgcagtctgtctcccgccgtccccacgcacgcgtcccggctcacgcgtccgcccgcccgcccccgcttgtgccgcccctaccagagacccccaggagcaggatgtccttccagggcaagaaaagcatcccccggatcacgagtgaccgccttctgatcagaggtgggaggatcgtgaatgacgaccagtccttttacgctgatgtgcacgtggaagatggcttgataaaacaaatcggagaaaacctcatcgtccctgggggcatcaagaccattgacgcccacggcctgatggtccttcctggtggcgttgacgtccacacaaggctgcagatgcctgtcctgggcatgacaccggctgacgacttctgtcagggcaccaaggcagcgctagcaggaggaaccaccatgatcttggaccacgtcttccccgacacgggtgtgagcctgctggcggcctacgagcggtggcgggagcgggcggacagcgcggcctgctgcgactactccctgcacgtggacatcacccgatggcatgagagcatcaaggaggagctggaggccctggtcaaggagaagggtgtgaactccttcctggtcttcatggcatacaaggaccggtgccagtgcagcgacagccagatgtacgagatcttcagcatcatccgggacctgggggccttggcccaggtgcacgctgagaacggggacatcgtggaggaggagcagaagcggttgctggagctcggcatcactggccccgagggccacgtgctcagccaccccgaggaggtggaggctgaggcggtgtaccgagctgtcaccatcgccaagcaggcaaactgcccgctgtacgtcaccaaggtgatgagcaagggggcggccgacgccatcgctcaggccaagcgcagaggggtggtcgtgtttggggagcccatcaccgccagcctgggcaccgacggttcacactactggagcaagaactgggccaaggccgcagccttcgtcacatcaccccctgtcaacccagaccccaccacggcagaccacctcacctgcttgctgtccagcggggacctccaggtgacaggcagcgcccactgcaccttcaccactgcccagaaggctgtgggcaaggacaacttcgcgctgatccccgagggcaccaacggcattgaggagcgcatgtcgatggtctgggagaaatgtgtggcctctgggaagatggacgagaatgagttcgtcgcggtgaccagtacaaatgctgccaaaatcttcaatttttacccaaggaaggggcgagtggctgtgggctctgacgctgacctggtcatatggaaccccaaggccaccaagatcatctctgccaagacccacaatctgaacgtggagtacaacatcttcgagggagtggagtgccggggagcgcctgccgtggtcataagtcagggccgagtggcgctggaggacgggaagatgtttgtcaccccgggggcgggccgcttcgtccctcggaaaacattcccggactttgtctacaagaggatcaaagctcgcaacaggctggcggagatccacggtgtgccccgtgggctgtatgacgggcccgtccacgaggtgatggtgcctgccaagccagggagtggcgctccggcccgcgcgtcctgcccaggcaagatctccgtgcctcctgtgcgcaacctacatcagtcggggttcagcctatctgggtctcaggctgatgaccacatcgcccgacgcacagcacagaagatcatggcaccacctggcggccgctccaacatcacctctctctcctagacgcccaggaccggccctgtgagccgtgctggccccacccgaggccgcgggggccccagggcactcgcccccctccttagcattttcttttgtagaagtttctcgaaggtgcttggcggtcttgccttccccctccccacaggctctccttgtggggtcccaggtcctgctgccaagagcccctcaagagaagggctgaacctggggagatgtcactgccagggtgaggtggagccacatggcagggacaatgccggcagcctgagcccaggcaccccagtgcccgctgggcccagcctggggacagggaacctgccgggctcacagtgtgggagcagctggacaccaggcttcttggtgaaccggcgaggggccgagtcccgcctggtgggcatttgctgccgcctccccaccaccagtcactgcctcgcagagccctacactcccgcagccgctcctcagaggcctgtgcccatcgcaggcctgggaggaaagtgggcgcagagccctcctgctcacacagctgctgagacttcagggacccatcagaacttggtgcagcacagccccgcccgtggagggtcccttttacgcaccccaaggcccacacctaagcttccatgtagccctcatccagggaagttttgcgatcctttaggaagacactgtcctcttattacagattgtgtatttccgtaggcttcttagtagcagctttgtacactgaggacactgtagccaggaacctgtgcatgccacccaccgcctggacaggcagtcatcctgcctctgatgtgaatcaggcccattaaagacgtctgggtttgaagcc

SEQ ID NO: 1487 - protein, 572 aa, Homo sapiens
MSFQGKKSIPRITSDRLLIRGGRIVNDDQSFYADVHVEDGLIKQIGENLIVPGGIKTIDAHGLMVLPGGVDVHTRLQMPVLGMTPADDFCQGTKAALAGGTTMILDHVFPDTGVSLLAAYERWRERADSAACCDYSLHVDITRWHESIKEELEALVKEKGVNSFLVFMAYKDRCQCSDSQMYEIFSIIRDLGALAQVHAENGDIVEEEQKRLLELGITGPEGHVLSHPEEVEAEAVYRAVTIAKQANCPLYVTKVMSKGAADAIAQAKRRGVVVFGEPITASLGTDGSHYWSKNWAKAAAFVTSPPVNPDPTTADHLTCLLSSGDLQVTGSAHCTFTTAQKAVGKDNFALIPEGTNGIEERMSMVWEKCVASGKMDENEFVAVTSTNAAKIFNFYPRKGRVAVGSDADLVIWNPKATKIISAKTHNLNVEYNIFEGVECRGAPAVVISQGRVALEDGKMFVTPGAGRFVPRKTFPDFVYKRIKARNRLAEIHGVPRGLYDGPVHEVMVPAKPGSGAPARASCPGKISVPPVRNLHQSGFSLSGSQADDHIARRTAQKIMAPPGGRSNITSLS

SEQ ID NO: 1488 - DNA, 315 bp, Homo sapiens
gcacgtacggcctctaccggacgcatcttctctccagactgccgatcccagaaagccaggtgatcaccattaaccccgagctgcctgtggaggaggcggctgaggactacgccaagaagctgagacaggcattccaaggggactccatcccggttttcgacctgctgatcctgggggtgggcccgatggtcacacctgctcactcttcccagaccaccccctcctacaggagcgggagaagattgtggctcccatcagtgactccccgaaagccaccgccacagcgtgtgaccctcacactacctgtcctgaatg

SEQ ID NO: 1489 - DNA, 370 bp, Homo sapiens
  misc_feature (32)..(32): n is a, c, g, or t
  misc_feature (34)..(34): n is a, c, g, or t
  misc_feature (297)..(297): n is a, c, g, or t
  misc_feature (335)..(335): n is a, c, g, or t
  misc_feature (362)..(362): n is a, c, g, or t
tttcatagccacctcctattgctattgcagtnanttcaggtgctgcaagtatccacttaaaatgccacgcattttaatcggcactgatcacctctgtttcagcagtttgtctctgtagtaaattgcctaccacagtaaaaggtaatctcttgtggttctcatgtatttttcatcgtgtttaatgcaatactgtaaactttgaataataccataagactcgtataaagtgatgccactagcactagtggatactgggaagtggctcccaagaagaagagaaaagtctggacatttacnagaaaaagttggaattggctgggtatggtaccataganttaatggtcggcagctggtaagggacnattggtta

SEQ ID NO: 1490 - DNA, 475 bp, Homo sapiens
  misc_feature (243)..(243): n is a, c, g, or t
  misc_feature (266)..(266): n is a, c, g, or t
  misc_feature (269)..(269): n is a, c, g, or t
  misc_feature (286)..(286): n is a, c, g, or t
  misc_feature (401)..(401): n is a, c, g, or t
  misc_feature (410)..(410): n is a, c, g, or t
  misc_feature (412)..(412): n is a, c, g, or t
  misc_feature (452)..(452): n is a, c, g, or t
  misc_feature (456)..(456): n is a, c, g, or t
  misc_feature (459)..(459): n is a, c, g, or t
ggtgcccttttgctttttttttttttttttttttttttttttttttttttttttttaaaaacacattttatttggttaaaaggttattgtttggttaaaggctactaggtaaaaagaagcttaaataaacaggaaggtaagttatatgatgaccaaaatgactcaaaaagtttaatgttacaaaatagctattttatgcacatatacctattaataaacattaagaatggacaaatcaacacnccatgaaaggccaaagaaacaanaanaaaaccttttcattaancatttcatcttcttgatactatatttctgttttgattccttatgctttgaaaattcagaaaaaccagaatccataaattcacttcatcttctcatcttgtctctgaggcttggcnctttaaaananaaaggagtacaccttcttcttctgcttgtccgttctgaanatanatnttctgacttattttca

SEQ ID NO: 1491 - DNA, 3084 bp, Homo sapiens
tccggaaacagtgggggtaggaaaactcggcctcaagttgcgccctctaggtagcacttgaaaacatgacaagggcccgtagttgtttggataagagaactccagcatagagccttatagcaactgacttcccagttaagtcccagtgtaagggttggtctttggttggcagaactgaacatggtggtttgcacttgggttctggtggcgcaggcgcaggagcagccagctgtggcagcgcattagttttggcgcaagcgagcctatgctgcagggtcacttttggctggtcagagaaggaataatgatatcaccttcttccccccctccccccaatcttttttttttccctttacaaattttcccctttccctttacctcctttccctcccatcttctttcattaacccctcctaaggcatgttatttgaaagcaattgagacgcaaccgaactttgcagtagcttggagtaatcttggctgtgttttcaatgcacaaggggaaatttggcttgcaattcatcactttgaaaaggctgtcacccttgacccaaactttctggatgcttatatcaatttaggaaatgtcttgaaagaggcacgcatttttgacagagctgtggcagcttatcttcgtgccctaagtttgagtccaaatcacgcagtggtgcacggcaacctggcttgtgtatactatgagcaaggcctgatagatctggcaatagacacctacaggcgggctatcgaactacaaccacatttccctgatgcttactgcaacctagccaatgctctcaaagagaagggcagtgttgctgaagcagaagattgttataatacagctctccgtctgtgtcccacccatgcagactctctgaataacctagccaatatcaaacgagaacagggaaacattgaagaggcagttcgcttgtatcgtaaagcattagaagtcttcccagagtttgctgctgcccattcaaatttagcaagtgtactgcagcagcagggaaaactgcaggaagctctgatgcattataaggaggctattcgaatcagtcctacctttgctgatgcctactctaatatgggaaacactctaaaggagatgcaggatgttcagggagccttgcagtgttatacgcgtgccatccaaattaatcctgcatttgcagatgcacatagcaatctggcttccattcataaggattcagggaatattccagaagccatagcttcttaccgcacggctctgaaacttaagcctgattttcctgatgcttattgtaacttggctcattgcctgcagattgtctgtgattggacagactatgatgagcgaatgaagaagttggtcagtattgtggctgaccagttagagaagaataggttgccttctgtgcatcctcatcatagtatgctatatcctctttctcatggcttcaggaaggctattgctgagaggcacggcaacctgtgcttagataagattaatgttcttcataaaccaccatatgaacatccaaaagacttgaagctcagtgatggtcggctgcgtgtaggatatgtgagttccgactttgggaatcatcctacttctcaccttatgcagtctattccaggcatgcacaatcctgataaatttgaggtgttctgttatgccctgagcccagacgatggcacaaacttccgagtgaaggtgatggcagaagccaatcatttcattgatctttctcagattccatgcaatggaaaagcagctgatcgcatccatcaggatggaattcatatccttgtaaatatgaatggctatactaagggcgctcgaaatgagctttttgctctcaggccagctcctattcaggcaatgtggctgggataccctgggacgagtggtgcgcttttcatggattatattatcactgatcaggaaacttcgccagctgaagttgctgagcagtattccgagaaattggcttatatgccccacactttttttattggtgatcatgctaatatgttccctcacctgaagaaaaaagcagtcatcgattttaagtccaatgggcacatttatgacaatcggatagttctgaatggcatcgacctcaaagcatttcttgatagtctaccagatgtgaaaattgtcaagatgaagtgtcctgatggaggagacaatgcagatagcagtaacacagctcttaatatgcctgttattcctatgaatactattgcagaagcagttattgaaatgattaaccgaggacagattcaaataacaattaatggattcagtattagcaatggactggcaactactcagatcaacaataaggctgcaactggagaggaggttccccgtaccattattgtaaccacccgttctcagtacgggttaccagaagatgccatcgtatactgtaactttaatcagttgtataaaattgacccttctactttgcagatgtgggcaaacattctgaagcgtgttcccaatagtgtactctggctgttgcgttttccagcagtaggagaacctaatattcaacagtatgcacaaaacatgggcctgccccagaaccgtatcattttttcacctgttgctcctaaagaggaacacgtcaggagaggccagctggctgatgtctgcttggacactccactctgtaatgggcacaccacagggatggatgtcctctgggcagggacccccatggtgactatgccaggagagactcttgcttctcgagttgcagcatcccagctcacttgcttaggttgtcttgagcttattgctaaaaacagacaagaatatgaagacatagctgtgaagctgggaactgatctagaatacctgaagaaagttcgtggcaaagtctggaagcaaagaatatctagccctctgttcaacaccaaacaatacacaatggaactagagcggctctatctacagatgtgggagcattatgcagctggcaacaaacctgaccacatgattaagcctgttgaagtcactgagtcagcataaataaagactgcacaggagaattacccctaaaaaaaaaaaaaaaaaagggcggccgc

SEQ ID NO: 1492 - protein, 920 aa, Homo sapiens
MLQGHFWLVREGIMISPSSPPPPNLFFFPLQIFPFPFTSFPSHLLSLTPPKACYLKAIETQPNFAVAWSNLGCVFNAQGEIWLAIHHFEKAVTLDPNFLDAYINLGNVLKEARIFDRAVAAYLRALSLSPNHAVVHGNLACVYYEQGLIDLAIDTYRRAIELQPHFPDAYCNLANALKEKGSVAEAEDCYNTALRLCPTHADSLNNLANIKREQGNIEEAVRLYRKALEVFPEFAAAHSNLASVLQQQGKLQEALMHYKEAIRISPTFADAYSNMGNTLKEMQDVQGALQCYTRAIQINPAFADAHSNLASIHKDSGNIPEAIASYRTALKLKPDFPDAYCNLAHCLQIVCDWTDYDERMKKLVSIVADQLEKNRLPSVHPHHSMLYPLSHGFRKAIAERHGNLCLDKINVLHKPPYEHPKDLKLSDGRLRVGYVSSDFGNHPTSHLMQSIPGMHNPDKFEVFCYALSPDDGTNFRVKVMAEANHFIDLSQIPCNGKAADRIHQDGIHILVNMNGYTKGARNELFALRPAPIQAMWLGYPGTSGALFMDYIITDQETSPAEVAEQYSEKLAYMPHTFFIGDHANMFPHLKKKAVIDFKSNGHIYDNRIVLNGIDLKAFLDSLPDVKIVKMKCPDGGDNADSSNTALNMPVIPMNTIAEAVIEMINRGQIQITINGFSISNGLATTQINNKAATGEEVPRTIIVTTRSQYGLPEDAIVYCNFNQLYKIDPSTLQMWANILKRVPNSVLWLLRFPAVGEPNIQQYAQNMGLPQNRIIFSPVAPKEEHVRRGQLADVCLDTPLCNGHTTGMDVLWAGTPMVTMPGETLASRVAASQLTCLGCLELIAKNRQEYEDIAVKLGTDLEYLKKVRGKVWKQRISSPLFNTKQYTMELERLYLQMWEHYAAGNKPDHMIKPVEVTESA

SEQ ID NO: 1493 - DNA, 1216 bp, Homo sapiens
ttcggcacttgggagaagatgtttgaaaaaactgactctgctaatgagcctggactcagagctcaagtctgaactctacctccagacagaatgaagttcatctcgacatctctgcttctcatgctgctggtcagcagcctctctccagtccaaggtgttctggaggtctattacacaagcttgaggtgtagatgtgtccaagagagctcagtctttatccctagacgcttcattgatcgaattcaaatcttgccccgtgggaatggttgtccaagaaaagaaatcatagtctggaagaagaacaagtcaattgtgtgtgtggaccctcaagctgaatggatacaaagaatgatggaagtattgagaaaaagaagttcttcaactctaccagttccagtgtttaagagaaagattccctgatgctgatatttccactaagaacacctgcattcttcccttatccctgctctggattttagttttgtgcttagttaaatcttttccagggagaaagaacttccccatacaaataaggcatgaggactatgtgaaaaataaccttgcaggagctgatggggcaaactcaagcttcttcactcacagcaccctatatacacttggagtttgcattcttattcatcagggaggaaagtttctttgaaaatagttattcagttataagtaatacaggattattttgattatatacttgttgtttaatgtttaaaatttcttagaaaacaatggaatgagaatttaagcctcaaatttgaacatgtggcttgaattaagaagaaaattatggcatatattaaaagcaggcttctatgaaagactcaaaaagctgcctgggaggcagatggaacttgagcctgtcaagaggcaaaggaatccatgtagtagatatcctctgcttaaaaactcactacggaggagaattaagtcctacttttaaagaatttctttataaaatttactgtctaagattaatagcattcgaagatccccagacttcatagaatactcagggaaagcatttaaagggtgatgtacacatgtatcctttcacacatttgccttgacaaacttctttcactcacatctttttcactgactttttttgtgggggcggggccggggggactctggtatctaattctttaatgattcctataaatctaatgacattcaataaagttgagcaaacattttactt

SEQ ID NO: 1494 - protein, 109 aa, Homo sapiens
MKFISTSLLLMLLVSSLSPVQGVLEVYYTSLRCRCVQESSVFIPRRFIDRIQILPRGNGCPRKEIIVWKKNKSIVCVDPQAEWIQRMMEVLRKRSSSTLPVPVFKRKIP

SEQ ID NO: 1495 - DNA, 1808 bp, Homo sapiens
ccgaccttaccccaggcggccttgacgttggtcttgtcggcaggagacagcaccatggtgggttctctctgagtctgggaattcccgagcccgagccgcagccgccgcctggggggcttgggtcggcctcgaggacaccggagaggggcgccacgccgccgtggccgcagaaatgaccatggttgacacagagatgccattctggcccaccaactttgggatcagctccgtggatctctccgtaatggaagaccactcccactcctttgatatcaagcccttcactactgttgacttctccagcatttctactccacattacgaagacattccattcacaagaacagatccagtggttgcagattacaagtatgacctgaaacttcaagagtaccaaagtgcaatcaaagtggagcctgcatctccaccttattattctgagaagactcagctctacaataagcctcatgaagagccttccaactccctcatggcaattgaatgtcgtgtctgtggagataaagcttctggatttcactatggagttcatgcttgtgaaggatgcaagggtttcttccggagaacaatcagattgaagcttatctatgacagatgtgatcttaactgtcggatccacaaaaaaagtagaaataaatgtcagtactgtcggtttcagaaatgccttgcagtggggatgtctcataatgccatcaggtttgggcggatgccacaggccgagaaggagaagctgttggcggagatctccagtgatatcgaccagctgaatccagagtccgctgacctccgggccctggcaaaacatttgtatgactcatacataaagtccttcccgctgaccaaagcaaaggcgagggcgatcttgacaggaaagacaacagacaaatcaccattcgttatctatgacatgaattccttaatgatgggagaagataaaatcaagttcaaacacatcacccccctgcaggagcagagcaaagaggtggccatccgcatctttcagggctgccagtttcgctccgtggaggctgtgcaggagatcacagagtatgccaaaagcattcctggttttgtaaatcttgacttgaacgaccaagtaactctcctcaaatatggagtccacgagatcatttacacaatgctggcctccttgatgaataaagatggggttctcatatccgagggccaaggcttcatgacaagggagtttctaaagagcctgcgaaagccttttggtgactttatggagcccaagtttgagtttgctgtgaagttcaatgcactggaattagatgacagcgacttggcaatatttattgctgtcattattctcagtggagaccgcccaggtttgctgaatgtgaagcccattgaagacattcaagacaacctgctacaagccctggagctccagctgaagctgaaccaccctgagtcctcacagctgtttgccaagctgctccagaaaatgacagacctcagacagattgtcacggaacacgtgcagctactgcaggtgatcaagaagacggagacagacatgagtcttcacccgctcctgcaggagatctacaaggacttgtactagcagagagtcctgagccactgccaacatttcccttcttccagttgcactattctgagggaaaatctgaccataagaaatttactgtgaaaaagcgttttaaaaagaaaagggtttagaatatgatctattttatgcatattgtttataaagacacatttacaatttacttttaatattaaaaattaccatattatgaaattgc

SEQ ID NO: 1496 - protein, 477 aa, Homo sapiens
MTMVDTEMPFWPTNFGISSVDLSVMEDHSHSFDIKPFTTVDFSSISTPHYEDIPFTRTDPVVADYKYDLKLQEYQSAIKVEPASPPYYSEKTQLYNKPHEEPSNSLMAIECRVCGDKASGFHYGVHACEGCKGFFRRTIRLKLIYDRCDLNCRIHKKSRNKCQYCRFQKCLAVGMSHNAIRFGRMPQAEKEKLLAEISSDIDQLNPESADLRALAKHLYDSYIKSFPLTKAKARAILTGKTTDKSPFVIYDMNSLMMGEDKIKFKHITPLQEQSKEVAIRIFQGCQFRSVEAVQEITEYAKSIPGFVNLDLNDQVTLLKYGVHEIIYTMLASLMNKDGVLISEGQGFMTREFLKSLRKPFGDFMEPKFEFAVKFNALELDDSDLAIFIAVIILSGDRPGLLNVKPIEDIQDNLLQALELQLKLNHPESSQLFAKLLQKMTDLRQIVTEHVQLLQVIKKTETDMSLHPLLQEIYKDLY

SEQ ID NO: 1497 - DNA, 544 bp, Homo sapiens
agcactctgtcttgcgaccactcacaactcttctcccctccctgtttctccctgtccatctgtccccacatccaccaagcagggtttccaggcctgaggtgcccgccctggccccaggagaatgaaccagccgcagaggatggcgcctgtgggacagacaaggagctcagtgacctcctggacttcagcatgatgttcccgctgcctgtcaccaacgggaagggccggcccgcctccctggccggggcgcagttcggaggttcaggtcttgaggaccggcccagctcaggctcctggggcagcggcgaccagagcagctcctcctttgaccccagccggaccttcagcgagggcacccacttcactgagtcgcacagcagcctctcttcatccacattcctgggaccgggactcggaggcaagagcggtgaggtgcgcgcctatgcctccttcgggagagacgcagcgtgggcggcctgactcaggctggcttcctgtcaggcgaggctggccttaacagccccggacccctgtcccgttcggg

SEQ ID NO: 1498 - DNA, 205 bp, Homo sapiens
tttttttttttggcaagattttaacaggctcaattttccagggatgcaagtactttggtgcagaaaaactgttcagtgtttggaaaattatgtcactgatggaaataccacaacccgtagcatttgcgttgccgaataacacacctatatcaatctgcacatatagttctcacattcatgagttctatatacgagtgccagcatc

SEQ ID NO: 1499 - DNA, 5380 bp, Homo sapiens
agagagagagagagagagagaacatctgggccgaaatacaaacaccagccagcttgggctggcgtgcaaagtagcagttttccttttccctttctggacggggtgtcgttgtccgggggcttccctggccgtttcaggcagcggagcaggccaagggcgcagccctactgggtgcccgcttggcggcctgagggacttctctgttctcgggctcggtctttgaggctgccaccagtccacgcgcggtctgcaagcctggttggactgggctccctgctctttgtgtgttgggtggggaggcgagtgaagggttagcttgggtgcagacgccagctgtcgacaaattcggggctcagtgataccagggcaatgtggctgcaagcctgattgggcgcaacgttgagaaggtcgggtgtttcatccctgggacgcgctcactcactaggggtttgtcagacactctggttgtgaggatttgaagggggaaaatcttgtgtactgtgtaggctctttgtgcgagctgcccagctggacttcgagtgggctgtgtggttggggaatgtgcagaggcggcgattcctatttgtcttcattgtctccctcttgtcttctctcttgctttcgccggcttctgctggaggcagcctgtgtgtggggagatgtgcagaaaggggagcgccctacaagttcttgtcattcgaaaggcaagtttggaggctatcacgcctagtggagagggaaggccaaatttgcagacgtcagagccaacggggaagagagatttacattgggaacatgccctccgattctactatggcgggcggttagttccagagaagcagctcctctgttcccttgcgccccaccccggtcctttgttgttcaacgctcccccagcgttacaggagtaacctttgggcttcaagaggccaaaacggtgcagggcctatactgaggtcagacgttataatcagaatctctccagtagcatttttctgatttcttggtgtgagcgctcgaagcttcctcccgtgcgccttgtacaatctggcaaccctgagtaccagactccctgcccaggaacaaggggtaggatgccaggatggagggggctgtaagaagaggcgacgttgttggtagaatatcagccccctatttggcttctccagtactgtgtgtggaggggtgctttggggtttcaaacttactcctcttcgcccctttggctccgcgaggttttaagggcagagctttcagtccgaagcctccgctcggggccaggttttgctctggtccgggtgagaagtttctgcagtggatgcaacttgttactgagcggcttcctattctgagaactcctgggtttcataggtttcctctccctctcttttggctcaacttaagcctcccagttccgtcctgaagcaccaggggagtgagaaaggactgggaaagccatcccatcactgagccccgcgcgggcggctgtccgggtttccaatcgcgcttggagattgaaaaagacagaaggcgcgccgcgtgtacagacagttagttaatggaaatcctgtaaatcggttttaagtgcacccaggacagagggggaggaagatggaggtggtgatatcagatgaaggatggagatccgcaggagcgggggtgaatgggttacgcatccttgcatttccgaaaatgggagtcggtcccctccccattgttcttaatgtagaaaaattcattaaagaaatctcagggatagggaaacccgagcttcattaaagaaatcccagtccgccccaagtggcggagtacgcggcttcccttggcagggaacccggctgcggctgtccccctctacgctccctcccttctccccgccccccagcggggcactgctactacggcgatcgccacctcacgccgaaggaatgctcgaagtatgcacacgttcccaaaagtagacctccttcaccgccggaggagcatacatcaccccgtggcagccgtccaccttctcaggcgtttcgtaaccgagtaaactgagagctgggaacagccctctattaagtagcccgcggcgcggagtctctttccacttggctaaggcgaaccgccccagacgcgtccgcgcgccggcagctgcaggctcaggccatctccagtcttcctgccgcgcccgcctctcctcctgggattctcctcctcctcctggacttccccgcagctgcccacgcctcggcggccgccaggtgctcctggagtgcagcgcctatcgccggggcgtgtgggggccacaccgagcaccagcttctccgacgccgggaagccgctgtcgccgccgctacctctccctgttgccgccgcctcaggtcagcctggtttctgtcccctttcccctacccccatcattcccagagacaactcgggaaacggcgtctagcttgcaccttgcccggagcggtgaagaatcctgggcgaggacagtttggacttgtaatagtgtagatgggctagagcgttgccttgtatactgggatttggtgattctttggggtttttgagggagaggggaatgttgcttttcttaagagctgagcaaggttttgtgcacgcaaagcatcccgttcagtgtttccgtttctagaggagtttcatctgtagatgctgtcgatttcaatggagggcgcgccgggttctggggcagcagggccctggttatctcgcggctgtggctttgtcggggagggcaggcgtgcggcgggggcgctgggaaggtattttggtgacgcacggtgcggaattctttggagggcccgctgagtgctctgcagctcgtcgaggctgcacgggtgtgtgtggcatctcgtaacagattcctagtggagtgttctggctccttcctcccctacctttcagagcatccgagatggtgggttaggcagcactagggtactcattcttggcggacttttcccagctccgggagaaagtcccctctccgactccctcccggtgcattggtggaggccctattcggggtctgtgagatctccgcggcggtttcccactcagatcctagacttgtggggatcagaaagcgtgggtcgccggactcgttcagcgagcggaacaggtaccccccaagcgggcgacctcgggagcccttcagtgaccagttcagggctccctgggactctgggccagggagactctcgatccggactctgtagtcttctagtgaatgctggggaaggatagggcaggaaaggaaataaacgctaagctctcctttggctaatgccaaggtcgtggtgggtgggagaggaggtaggcgacgcgcacgcggtgtgtgtgtgtgtgtgtgattttctttttaactggacgcgggagttaaggaattgggttcttccagcagggaattgggagggggcgagttggcagaaggggacgagtccacttagcccccactcccaccccagtggactcatttttattcatgagggtgaagtgagggagtcctcgctgccacgtaggggtggccgctttcagatatttatgtctgagaatgctcaatgaagtgttgctaagcattcaaatgaatgttttggctaaaaaggagagaaagcgttttcttttttaaaacatatattgacgggatgcttggctggctggcgttccgatatcccggcgcgagatgattcattcttgcagctaagtcgggaaagcgacaggtggcgatcgagacccagcaaaagtgttaccactcaggttttcgttgagttcagctgttaaaaaaaaatctgcgcacagcttttcggtgggtcgattgttcgcctttaacttctcgcgagcacgactgccaactgagttggaaattattataccaaagttaaggcaagatgattggaacaatgggccagtctcacctcttgcttttcactgatgtagaagagggttagaaatgtcaaacagttgttaattaggaagaaagaaattgctagaccccttagatacttagggcagtgccaaaattttaatcttggcttcataaaaaggagctccaggcaatttggcacgcctgctcatcagacatttaaaatgcaatttacacacaggctgcggaaagctgccctcatgctttgtgccaataatttggaaagtcatcgttccacattgtcagtttcttttctcaaagaggcctcgacctttggctcatttttgcattccgacgcaggacagtctcctatccccctccatttttcctgaggcctaggctgttggcttacaataaattatgtacttcagagtcaactctttttatgttttgccactggcaacttcccagttcagttccttgctagtagcttttgtctttgggttgaaccctagactattttaggagattccattctgtagacatgggttaagtacctactgtgtgctgggaaaccacaaagatgaataagattctttgtctttaaggaattcataatgtaattacaaaattagaaaaaatcggaacagaacatattctcctctggggtatgtatactaataatcttccagcttaaataaacagttaaatacaaagattattattgataatttttatttaaaaacacgttggaaaaacagacaagggtgtcttgcttcttccattttgctgccttatttgttattatgtattttggagttgtttttccctcatctcaggtaaaggatttatcggatgtgaaaacaacacagttagcaggagggtcaggtttcagctgggccttacatatttctgtataatccatttcagatcttaaagagctgcatatttgaaagcagaacaaaatgaagaaaaaagagaattaaaaaggtttattatacttttccaaattaccctgagaccactaaagtacagttacctaaagagttcatcagctaggaaaaagcagtcaaataaaatccccagctggaagagatatttagttgagtgagggataaaatgacctctgaattagccattacccaggcaggatgaagtcatgtgagggctggtaaaggccttcacccgggatgctaagcaggaccagtctccaggagaacaggaccctttttaaacttgaacttcctcctagggccatgattaaacttctgtagacgaacttgacttccactgcttcacaataggcccattatgtgctggagtaggccctgtggtttttaaggcagatctggtcgggttctggactaggtccaggctccagttctaacctggttcaaggcctgcccagacccagttctgatgcagtcactacttcctcccgcagatctcttcatgccgctgtaagctcggaggccaaggatgcggagtaggcttcccccagcgctt

SEQ ID NO: 1500 - protein, 9 aa, Homo sapiens
MRSRLPPAL

SEQ ID NO: 1501 - DNA, 437 bp, Homo sapiens
  misc_feature (435)..(435): n is a, c, g, or t
ctttccttgagcacctttcatccaggcatgatgcaggtgcaccaacttacttaatcctcatagccaccacctgagcaagctcctgttttataaatggaccagttcttgttgctattgtacaagttattttctttctataacgtcctccttgtcctccttccacattcttaaagaaacttgcccttcctttaaagtactcagggagccctgcattgcttcttgaagccttctccagcttcatcatctcacagtggtctctcttttcactaaatgtccaatatgctgcacataagtaccccaaagttagcacaggaattgttccatggctgtcatatatgttaaaaatcatttaaaagttcattttttctctcattatggggaaggatacatgctcctactagtaaatttagtagggtaggaaaaaatttatcactnta

SEQ ID NO: 1502 - DNA, 318 bp, Homo sapiens
ttttttttttttttttttttttttttttattttaaatcaactaaagactcatgagatttatttggttacagtgaataacctggacaaaatgttgagaagagttgttaaaacaagtttacattaaatatactaacaattacgtttggttacatatttgtaagtgatggttatttagaaaaactgcatagaaatccaaaccttaaatattctgcaaatcaaatcattagcttttctcttctctaataaagtagggtgactagttcttggattaatctaactataacattaatgtagcacttgattatcttatggaataat

SEQ ID NO: 1503 - DNA, 434 bp, Homo sapiens
cttcttcttcgccgcctcttcctcctccctatatggggctgccccagcctccaggggtggcaccaggtcctcagaggaggcctccgacatggaggcctctgactctgcctctgatgtggactgcaacttttgggggcctctaggcaagtcgagggtgcctggcacaggctgatggctctagaggccttggaagaaggtcatcatcttcagcatcaccctggttcaggcctgcaggctcctggctcgccttccccgtcagggctgatgtccacacacctcccgggagctcgctgggcccggctccttcagtcctgggcaggatgtggaaggcgcacccatcccccgatgaggacacccgggcacgggcagagaagtgactcggcctgtgtcgccccggccggagtcacgccgggacctgggcctttctgctgtaa

SEQ ID NO: 1504 - DNA, 196 bp, Homo sapiens
cacgagggccctcgcccatgtcctgtgcccttacatggctcccggactgtgcagggagccgatacgtttgctgatatcaatactggaaccaccgggtgcgatggcagtgaggagactgcccagtgcctttggggctgtgcttgcaataaagaaagaatttcctggaaaggcagtcggcaaaaaagggaaccggtga

SEQ ID NO: 1505 - DNA, 356 bp, Homo sapiens
aggacttctgcagcacagctcccttcccaggacgtgaaaatctgccttctcaccatgaggcttctagtcctttccagcctgctctgtatcctgcttctctgcttctccatcttctccacagaagggaagaggcgtcctgccaaggcctggtcaggcaggagaaccaggctctgctgccaccgagtccctagccccaactcaacaaacctgaaaggacatcatgtgaggctctgtaaaccatgcaagcttgagccagagccccgcctttgggtggtgcctggggcactcccacaggtgtagcactcccaaagcaagactccagacagcggagaacctcatgcctggcacctgaggta

SEQ ID NO: 1506 - DNA, 386 bp, Homo sapiens
ttttttaacattcagcaaatatttattaagcacttataattggcacgactttttttttaaaaaaagaccatcatgttcttacatgaggctcacaaactaatgtgttgacacttcagtaaagtctatagtcacaaaaattttggattgactattatgggatactaaaatatgcataagtatgaatggctactttagtgtttagccatcattagttcttatttttagtgttacacactgtaggagttactgcaaaatgagacattggaggattaaataatatcagatactcacattttaaacagtcctacatagcaatagtgaaacaactcttaccaatagctagaaatacaattttacttaaggatttacaatacttttttttgggg

SEQ ID NO: 1507 - DNA, 617 bp, Homo sapiens
ttcaatttaggtgacactatagaagagctatgacgtcgcatgcacgcgtacgtaagcttggatcctctagagcggccgcctactactactaaattcgcggccgcgtcgacatgaaattggattctgttgctttaagcatttcatgactgagctgctgtctggatgctacctgaagagattctcattgaatatcattatggcccgtaagtgttccataattttctttaagctccatctatgtaaatatttttgaacaattttgcacaagtacagggccacatacctatttgttataaacccgacgttgataaaatgcactcttagtataattgggtcttgttttgatcctggcagtttcatattgggatttggcagtgagttcaacagaataagcattatcctcttgaggcccatctaggattgaactaaagggcttctacaatatccacatgatcatacaattagttctctctctccctctcttttttttgtgctgtgatagtgtaactgaatatgagctggttgccaaggtattgtggtagaataataccctgcagtaaacagttaatcatgcagcagaactggcttgattaaaaaaaaaaaaaaaagtcgacgcg

SEQ ID NO: 1508 - DNA, 334 bp, Homo sapiens
  misc_feature (28)..(28): n is a, c, g, or t
  misc_feature (241)..(241): n is a, c, g, or t
  misc_feature (247)..(247): n is a, c, g, or t
  misc_feature (272)..(272): n is a, c, g, or t
  misc_feature (306)..(306): n is a, c, g, or t
  misc_feature (314)..(314): n is a, c, g, or t
gcaggctttgtgcgcgctgggaatccantgatcgccgccccgcagagccccctgtccccggaggcgtctcatttccgggccgcccaccacccgcgtagaccggcagccgctgtcccggcagtctccagccgtcccgcccgcttgtggccaactggctccagtcactccccgaaatgccagtcgacttcactgggtactggaagatgttggtcaacgagaatttcgaggagtacctgtgcgncctcgncgtcaatgtggccttgcgcaaaatngtcaactttctgaagccagacaaagagatcgtgnaggaacgntgaccatatgatcattcgta

SEQ ID NO: 1509 - DNA, 295 bp, Homo sapiens
  misc_feature (17)..(17): n is a, c, g, or t
  misc_feature (179)..(179): n is a, c, g, or t
  misc_feature (228)..(228): n is a, c, g, or t
  misc_feature (255)..(255): n is a, c, g, or t
  misc_feature (259)..(259): n is a, c, g, or t
  misc_feature (276)..(276): n is a, c, g, or t
ctcgtttgcccctcgtnttcatgggagctcgttttcttttcctctaggcagagaagaggcgatggcggcgatggcatctttcggcgccctggcgctgctcctgctgtccagcctctcccgctgctcagccgaggcctgcctggagccccagatcaccccttcctactacaccacttctnacgctgtcatttccactgagaccgtcttcattgtggagatctccctganatgcaagaacagggtccagaacatggntctntatgcttgacgtcggtngaaaacaattccctgtcaa

SEQ ID NO: 1510 - DNA, 2294 bp, Homo sapiens
aagcagttgttttgctggaaggagggagtgcgcgggctgccccgggctcctccctgccgcctcctctcagtggatggttccaggcaccctgtctggggcagggagggcacaggcctgcacatcgaaggtggggtgggaccaggctgcccctcgccccagcatccaagtcctcccttgggcgcccgtggccctgcagactctcagggctaaggtcctctgttgctttttggttccaccttagaagaggctccgcttgactaagagtagcttgaaggaggcaccatgcaggagctgcatctgctctggtgggcgcttctcctgggcctggctcaggcctgccctgagccctgcgactgtggggaaaagtatggcttccagatcgccgactgtgcctaccgcgacctagaatccgtgccgcctggcttcccggccaatgtgactacactgagcctgtcagccaaccggctgccaggcttgccggagggtgccttcagggaggtgcccctgctgcagtcgctgtggctggcacacaatgagatccgcacggtggccgccggagccctggcctctctgagccatctcaagagcctggacctcagccacaatctcatctctgactttgcctggagcgacctgcacaacctcagtgccctccaattgctcaagatggacagcaacgagctgaccttcatcccccgcgacgccttccgcagcctccgtgctctgcgctcgctgcaactcaaccacaaccgcttgcacacattggccgagggcaccttcaccccgctcaccgcgctgtcccacctgcagatcaacgagaaccccttcgactgcacctgcggcatcgtgtggctcaagacatgggccctgaccacggccgtgtccatcccggagcaggacaacatcgcctgcacctcaccccatgtgctcaagggtacgccgctgagccgcctgccgccactgccatgctcggcgccctcagtgcagctcagctaccaacccagccaggatggtgccgagctgcggcctggttttgtgctggcactgcactgtgatgtggacgggcagccggcccctcagcttcactggcacatccagatacccagtggcattgtggagatcaccagccccaacgtgggcactgatgggcgtgccctgcctggcacccctgtggccagctcccagccgcgcttccaggcctttgccaatggcagcctgcttatccccgactttggcaagctggaggaaggcacctacagctgcctggccaccaatgagctgggcagtgctgagagctcagtggacgtggcactggccacgcccggtgagggtggtgaggacacactggggcgcaggttccatggcaaagcggttgagggaaagggctgctatacggttgacaacgaggtgcagccatcagggccggaggacaatgtggtcatcatctacctcagccgtgctgggaaccctgaggctgcagtcgcagaaggggtccctgggcagctgcccccaggcctgctcctgctgggccaaagcctcctcctcttcttcttcctcacctccttctagccccacccagggcttccctaactcctccccttgcccctaccaatgcccctttaagtgctgcaggggtctggggttggcaactcctgaggcctgcatgggtgacttcacattttcctacctctccttctaatctcttctagagcacctgctatccccaacttctagacctgctccaaactagtgactaggatagaatttgatcccctaactcactgtctgcggtgctcattgctgctaacagcattgcctgtgctctcctctcaggggcagcatgctaacggggcgacgtcctaatccaactgggagaagcctcagtggtggaattccaggcactgtgactgtcaagctggcaagggccaggattgggggaatggagctggggcttagctgggaggtggtctgaagcagacagggaatgggagaggaggatgggaagtagacagtggctggtatggctctgaggctccctggggcctgctcaagctcctcctgctccttgctgttttctgatgatttgggggcttgggagtccctttgtcctcatctgagactgaaatgtggggatccaggatggcttccttcctcttacccttcctccctcagcctgcaacctctatcctggaacctgtcctccctttctccccaactatgcatctgttgtctgctcctctgcaaaggccagccagcttgggagcagcagagaaataaacagcatttctgatgcc

SEQ ID NO: 1511 - protein, 428 aa, Homo sapiens
MQELHLLWWALLLGLAQACPEPCDCGEKYGFQIADCAYRDLESVPPGFPANVTTLSLSANRLPGLPEGAFREVPLLQSLWLAHNEIRTVAAGALASLSHLKSLDLSHNLISDFAWSDLHNLSALQLLKMDSNELTFIPRDAFRSLRALRSLQLNHNRLHTLAEGTFTPLTALSHLQINENPFDCTCGIVWLKTWALTTAVSIPEQDNIACTSPHVLKGTPLSRLPPLPCSAPSVQLSYQPSQDGAELRPGFVLALHCDVDGQPAPQLHWHIQIPSGIVEITSPNVGTDGRALPGTPVASSQPRFQAFANGSLLIPDFGKLEEGTYSCLATNELGSAESSVDVALATPGEGGEDTLGRRFHGKAVEGKGCYTVDNEVQPSGPEDNVVIIYLSRAGNPEAAVAEGVPGQLPPGLLLLGQSLLLFFFLTSF

SEQ ID NO: 1512 - DNA, 401 bp, Homo sapiens
  misc_feature (35)..(35): n is a, c, g, or t
  misc_feature (386)..(386): n is a, c, g, or t
ttcggcacatgcgtgaacaaatagctgaggggcgnccgggcagaacgcttgtgtaactttgcaaacgtgccagaaagtttaaaatctctcctccttccttcactccagacactgcccgctctccgggactgccgcgccgctccccgttgccttccaggactgagaaaggggaaagggaagggtgccacgtccgagcagccgccttgactggggaagggtctgaatcccacccttggcattgcttggtggagactgagatacccgtgctccgcttcgcctccttggttgaagatttctccttccctcacgtgatttgagccccgtttttattttctgtgagccacgtcctccttcgagcggggtcaatctgtgcaaaaggagtgatngcggtttgctgggac

SEQ ID NO: 1513 - DNA, 551 bp, Homo sapiens
  misc_feature (524)..(524): n is a, c, g, or t
aaagagcaatctaacagcatttatctcccctggcaagaatgaatggctccctgatttgcccatcagcagcaccacaacaggcatgatatttagtcactaacagagagctgacttccacctaaatatctgagtcaaagaatatttctttggtagtctctgaagtgaggatttaaaggtgtcccaaacctactagtcttgttaaataaaaacgaagcatcttttaatgtgccaggattatgggaagcatctaagagcaaaattgaaataatttaacactgaaattagaaaccaaatacatgagctttcttgggctttttctcagaacacaatcaatgcagctgacttaattcttgtcagcagagaagagacatggcccaaacattctcaagtttttccatcaaagggtgcaaaataagttgactcagtgcccttttaactctcagacaactttttcccaagattttctttgaatattagtaatagtaaagtttatccaaaaacactctactattttacatcttatntatttacatttcaatgtaatggtgaga

SEQ ID NO: 1514 - DNA, 4318 bp, Homo sapiens
gcttcccggctgccaggctacagaactcgcctcgccactcctgagacatggacaacgccgttgacggactggacaaagcttctatagcaaactcagatggccccacagcaggttcccaaacacctcccttcaaaagaaaggggaaactatccaccattggtaaaatctttaagccttggaaatggaggaaaaagaagaccagcgacaaatttagagaaacctcggcagtattagaaaggaagatatccacacgacaaagtagagaggagctgataagaaggggagtgcttaaggaattgcctgatcaagatggagatgtaacagttaactttgaaaattcaaacgggcacatgatacccatcggagaggaatctacccgagaggaaaatgtagtaaagtctgaagaaggtaatggctctgtatctgaaaaaacaccacctctggaggaacaggcagaagataagaaagagaacactgaaaaccactctgaaacaccggcagctcctgctctacctccttctgctcctcctaagcctagatccaaacctaaacccaaaaaatcacctgtgcctccgaaaggggccactgctggggccagccacaaaggtgatgaagtgcctcccattaaaaaaaataccaaggctcctggtaagcaggcccccgtccctccacccaagccagcaagccgaaacacgacccgagaggctgctggctcctctcattcaaaaaaaacaactggctctaaagcatcagcttcgccatccacttcatccacctcatctcgtcccaaagcttcaaaggagacagtttctagcaaagcagggacagtggggaccaccaagggcaagagaaaaactgacaagcagccaataacttctcacctgtcctcagacacaacaacttctggcacatccgacctgaaaggagagcctgcagagaccagagtggagagtttcaaactcgaacagactgtccctggagctgaggagcagaacacaggcaaattcaagtccatggtccctccaccccctgtggctccagcaccttctcctctggccccccctctccctcttgaggatcagtgcattactgcctcagacactccagttgtcctcgtcagcgttggagctgacctgcccgtctctgccttagacccaagtcagcttctttgggctgaagagccgacgaacagaaccactctctactcaggcactggcttaagtgttaacagagaaaatgcaaaatgtttcacaaccaaagaggagctggggaagacagtgcctcagctactgactcctgggctgatgggcgaatcttcagaatcctttagtgcctcagaagatgaaggccacagggaataccaagccaatgactctgactcggacgggcctatcttgtacaccgatgatgaggacgaagacgaagatgaggatggcagtggagaaagtgctttggcaagtaaaatacgccggagggatactcttgctatcaaacttggcaacagaccatctaagaaagaactagaggacaaaaacatcttgcagcgtacatctgaagaagagaggcaggaaatccgacaacaaattggaaccaagttagtcaggaggctgagccagaggcccacaactgaagaattagagcaaagaaacatcctaaaacaaaagaatgaagaagaggaacaagaagcaaaaatggaacttaaacgcagactcagcagaaagctcagcctgagacccacagtggcagagctacaagctcgaaggatcctgcgatttaacgagtatgtagaagtcacggattctcctgactatgaccgccgagcagacaagccctgggccaggttaacacctgcagacaaggcagcaataaggaaagaactaaatgaatttaaaagcacagaaatggaagttcatgaagagagtcgacagtttacaaggtttcatcgtccataacgaagagtgagactatttggaaacagagactgatcatctttgggggaagccctgcttcctgaaaacctgatattgcactgggatttgaatgtgtgtgtttccgtttaacttgtggtgaaggaagtgtgtgactcagcttggctgggaagtgctcctcacctgtgtggcccagatggctccaacaagcaaaaggaaggatgcagtgactcttgctgcccagaatgcacagcgatggtaagagacaccgtggatattcttcatcagaagctttaatcaaagaagatgagcagaagacaatcactggctccctgttaccagaaagccaaattttataatgcgggtgaaagaaaaatatagattaaaattgctgggcactgaaaaggggtgggagttggaaatcagaaagaaagagaaatatttcattatgttaatgaagaaaagagaaaattgaagcataaatgtatttttgaagtagttattcggtagctgagaacttattaagggatttaggaatttaacctcctgatgtggattcctcaaagacttgatcggagaatactcttgtttcaccattatgttggtacagtatagtaccattattttatgttgtgccagtgaatccagttgccagaaataagtctgaatgttttcatgcatctttttcttaaatgcaagagcttctactgactcttaacaagcatgcttacccaaattttgttgcatgcttttaagtagcattagctatgcacacttgacatttttaaatatccctttcctagtgtaccagccttcacaggataagaggactgggaataaagtcagatgtaatgtgaccctagaaaactgtagcaagcttcagaaataaatcttttgatctttccctatcttgattagatccaaagtcaaagcaaccatacttcacctagagaagacagtattggcaatcatgacacctgtaataaaaacttgaatccaaagtcaaaacttaagcaagatacaaatgtgctgcctgcagttagtcctgcatgggaataaggactagttatttttttagtgctgcatttttttaaagttggattgctgctatttaaaaaaaaaaaaaggacacagatcaaaaaaacacccaaaggcttaacagaacatggaaagttcccactaagttgtgtgtgaggaaatcctcatcttgtattttaagaatctgcagatggcatccatagatacagtacagtatttactgtcaatgcaaaagaatcagtgaggttaaagtagtggaagttttccctatgagcctacagtctgtattgtttacattaagaaactctctattattgtgttgctattttccatggagtcacaggcacactatgacttctgctcccaaatacatatgaccatatgtaaataccaccttgcatttcattgttcttcacaagtgctttgtgcccctttaattaaaaacacatgaaatgaataacaaaacaagacccaaatagagtttattttattctcagagtttggactacaattttctaagatgtttctggttcaagactgtcattttctatttcaaccgaaaagtaagcatttaacccggtgaataaatgtagatcctgccattcattggtattttaaagaaccacttgaaatcggatcattttatttaaaaataaaaaatgttaatgccagttggcctactataaaaagccaggaccatgttagaattaggaaaagtaaccagcattactgcacctcttgttagactctgtgcattaataaaacacacctagagtctgttgtcatttcactaataggataagacaaattttttgctttgaaaaaatttttctgcatgcccaggtgtctgtctctggctgaggttttgtctattttacagtgtttcaatccagccataaaaattaacttgtgattttttttttcccaaagtcatgcttttccttaattatatttttattttattattttagtgtcttgagaaaaataccaagagatataatgtttcttttaattgtctatgcttaatcatctttaaacactttttaaatttctaaccacaagacctctctataatggtaaatgtaagacatcaccattttatcactcaaagtatgttattgaaagtttctatttggttgataaaaggaacaattttttcccacttttgatgcctgtgatgcaattttttattgcctacaatgagatacacttagtacaaaaaatgaaaatctggtatttcaaaattgcatttcttgtataataggtcagatttattaactactcatactttttctttacactaatcgatacatttagaaaaaattttctaagttagagacaagtttaaaagt

SEQ ID NO: 1515 - protein, 634 aa, Homo sapiens
MDNAVDGLDKASIANSDGPTAGSQTPPFKRKGKLSTIGKIFKPWKWRKKKTSDKFRETSAVLERKISTRQSREELIRRGVLKELPDQDGDVTVNFENSNGHMIPIGEESTREENVVKSEEGNGSVSEKTPPLEEQAEDKKENTENHSETPAAPALPPSAPPKPRSKPKPKKSPVPPKGATAGASHKGDEVPPIKKNTKAPGKQAPVPPPKPASRNTTREAAGSSHSKKTTGSKASASPSTSSTSSRPKASKETVSSKAGTVGTTKGKRKTDKQPITSHLSSDTTTSGTSDLKGEPAETRVESFKLEQTVPGAEEQNTGKFKSMVPPPPVAPAPSPLAPPLPLEDQCITASDTPVVLVSVGADLPVSALDPSQLLWAEEPTNRTTLYSGTGLSVNRENAKCFTTKEELGKTVPQLLTPGLMGESSESFSASEDEGHREYQANDSDSDGPILYTDDEDEDEDEDGSGESALASKIRRRDTLAIKLGNRPSKKELEDKNILQRTSEEERQEIRQQIGTKLVRRLSQRPTTEELEQRNILKQKNEEEEQEAKMELKRRLSRKLSLRPTVAELQARRILRFNEYVEVTDSPDYDRRADKPWARLTPADKAAIRKELNEFKSTEMEVHEESRQFTRFHRP

SEQ ID NO: 1516 - DNA, 511 bp, Homo sapiens
aaactagttaattaaatgaacataatttttcaagttaataaattaagaaaatatctaaatgaaagagagaataaaatcagcatatgtgacagcccatatagtaaggacagtttcgcaatcaacgtaaccaaggaaaacagctttgttatcatttcaaacatgcaggcacacacaggcagaggcaaagctggaaccaaaccaaacaaaaagaagattttgaatgttaaaaaactgggcctctagacactttgccttttagaaccagcttcctacatgttcaagtaaattccactgatagatcttgactatctacaatgtgctaggtattatgttaggtgatgaggacactaaagtgaataagacataacccttgttctcaaagagctcacaatgaaattaaggaaacagagcgagatgacttatcatcatctaatccagcaagtctttcctaatcgccccatccctagttcaagctagggaccttctctatgctaacctgtgccttgtatat

SEQ ID NO: 1517 - DNA, 473 bp, Homo sapiens
cttctcttcctgcaattgctctatcacttcttccctctcaagtcccgccctttcagctacctccaactgctgaggaaccggttgcctaaaaggagccggcaaaagcgcctacgtggagtccagaggagcggaagtagtcagatttgactgagagccgtaaagcgcggctggctctcgttttccggataacgactacagctccgactgtcagtgccggccttcctcgtgtgaggggatctgccggacccctgcaaattcaatttctttcccattccgggcccttccctatcgtcgcccccttcaccttggatcatgttcaagaaatttgatgaaaaagaaaatgtgtccaactgcatccagttgaaaacttcagttattaagggtattaagaatcaattgatagagcaatttccaggtattgaaccatggcttaatcaaatcatgcctaagaaagatcctgtcaaaatagtccg

SEQ ID NO: 1518 - DNA, 488 bp, Homo sapiens
  misc_feature (2)..(2): n is a, c, g, or t
  misc_feature (40)..(40): n is a, c, g, or t
  misc_feature (190)..(190): n is a, c, g, or t
  misc_feature (205)..(207): n is a, c, g, or t
  misc_feature (210)..(210): n is a, c, g, or t
  misc_feature (388)..(388): n is a, c, g, or t
  misc_feature (442)..(442): n is a, c, g, or t
  misc_feature (451)..(451): n is a, c, g, or t
  misc_feature (459)..(459): n is a, c, g, or t
cngccgcgccgcccgcacgtggcagccccaggccccggcnccccacccacgtctgcgttgctgccccgcctgggccaggcccaaaggcaaggacaaagcagctgtcagggaacctccgccggagtcgaatttacgtgcagctgccggcaaccacaggttccaagatggtttgcgggggcttcggtgttcnaagaactgcctgtgnnnccnatttccagtctccgagtggtcggcgtggtcattgcagtgggcatcttcttgttcctgattgctttagtggggtctgattggagctgtaaaacatcatcaggtgttgctatttttttatatgattattcctgttacttgtatttattgttcagttttctgtatcttgcgcttgtttagncctgaaccaggagcaacagggtcagcttctggaggttggttggaacaatacggnaagtgctcngaaatggncatccagagaaatctaaactgctgtgggt

SEQ ID NO: 1519 - DNA, 2418 bp, Homo sapiens
gcttctatgaggagaccatgtgccgaggtcgtgtgctaggaagccagttgctgtgagaaatgaccagtgtcatgtctgtctttcagccaccctacatcatgtagcagttcttctgagatcatgtctgtgctgttcttctacatcatgaggtacaagcagtcagatccagagaatccggacaacgaccgatttgtcctcgcaaagagactgtcgtttgtggatgtggcaacaggatggctcggacaaggactgggagttgcatgtggaatggcatatactggcaagtacttcgacagggccagctaccgggtgttctgcctcatgagtgatggcgagtcctcagaaggctctgtctgggaggcaatggcctttgcttcctactacagtctggacaatcttgtggcaatctttgatgtgaaccgcctgggacacagtggtgcattgcccgccgagcactgcataaacatctatcagaggcgctgcgaagcctttgggtggaacacttatgtggtggacggccgggacgtggaggcactgtgccaggtattctggcaggcttctcaggtgaagcacaagcccactgctgtggtggccaagaccttcaagggccggggcaccccaagtattgaggatgcagaaagttggcatgcaaagccaatgccgagagaaagagcagatgccattatcaaattaattgagagccagatacagaccagcaggaatcttgacccacagccccccattgaggactcacctgaagtcaacatcacagatgtaaggatgacctctccacctgattacagagttggtgacaagatagctactcggaaagcatgcggtctggctctggctaagctgggctacgcgaacaacagagtcgttgtgctggatggtgacaccaggtactctactttctctgagatattcaacaaggagtaccctgagcgcttcatcgagtgctttatggctgaacaaaacatggtgagcgtggctctgggctgtgcctcccgtggacggaccattgcttttgctagcacctttgctgcctttctgactcgagcatttgatcacatccggataggaggcctcgctgagagcaacatcaacattattggttcccactgtggggtatctgttggtgacgatggtgcttcccagatggccctggaggatatagccatgttccgaaccattcccaagtgcacgatcttctacccaactgatgccgtctccacggagcatgctgttgctctggcagccaatgccaaggggatgtgcttcattcggaccacccgaccagaaactatggttatttacaccccacaagaacgctttgagatcggacaggccaaggtcctccgccactgtgtcagtgacaaggtcacagttattggagctggaattactgtgtatgaagccttagcagctgctgatgagctttcgaaacaagatatttttatccgtgtcatcgacctgtttaccattaaacctctggatgtcgccaccatcgtctccagtgcaaaagccacagagggccggatcattacagtggaggatcactacccgcaaggtggcatcggggaagctgtctgcgcagccgtctccatggatcctgacattcaggttcattcgctggcagtgtcgggagtgccccagagtgggaagtccgaggaattgctggatatgtatggaattagtgccagacatatcatagtggccgtgaaatgcatgttgctgaactaaaatagctgttagccttggtcttttggcctctttaccctgtgtttatgtttgttccaaaaccatcatttaaatctctactgtcacattttgtttcttaaaagcaaagccagctaacaccttcattcatccctagttcggaaattcaagctaactacttaccctttaaactgtcactgcatatgcaagtaccgctctaatttttggatcattaaagggagttacacaacttttaagtgaaaaaaataggtaacaaaacaaccacctgatagtaagttttctgataagactatagataagtggtagaggtaatcaattcttccgaagtgtttccttcgtgaataactggtagaggtaatagttttttcaatgtatttccttcatgagtaaagaaaatgtggattgaagtatagattccagtagcctagtttccacagcacgataacaccatgacgcctactgctgttcccaccttgggattctgtgtgctgccatcccacctgcagctgccctggaattcccttcgctgtttgccttcatctccctccacgtttgagaggctgtcaggcagcagcgaaagcttgttaggatgtcctgtgctgcttgtgatgagagcctccacactgtactgttcaagtcaatgttaataaagcatttcaaaaccaaaaaaaaaaaaaa

SEQ ID NO: 1520 - protein, 557 aa, Homo sapiens
MSVLFFYIMRYKQSDPENPDNDRFVLAKRLSFVDVATGWLGQGLGVACGMAYTGKYFDRASYRVFCLMSDGESSEGSVWEAMAFASYYSLDNLVAIFDVNRLGHSGALPAEHCINIYQRRCEAFGWNTYVVDGRDVEALCQVFWQASQVKHKPTAVVAKTFKGRGTPSIEDAESWHAKPMPRERADAIIKLIESQIQTSRNLDPQPPIEDSPEVNITDVRMTSPPDYRVGDKIATRKACGLALAKLGYANNRVVVLDGDTRYSTFSEIFNKEYPERFIECFMAEQNMVSVALGCASRGRTIAFASTFAAFLTRAFDHIRIGGLAESNINIIGSHCGVSVGDDGASQMALEDIAMFRTIPKCTIFYPTDAVSTEHAVALAANAKGMCFIRTTRPETMVIYTPQERFEIGQAKGVSMLQDSWSSVISYQKVLRHCVSDKVTVIGAGITVYEALAAADELSKQDIFIRVIDLFTIKPLDVATIVSSAKATEGRIITVEDHYPQGGIGEAVCAAVSMDPDIQVHSLAVSGVPQSGKSEELLDMYGISARHIIVAVKCMLLN

SEQ ID NO: 1521 - DNA, 337 bp, Homo sapiens
  misc_feature (133)..(133): n is a, c, g, or t
  misc_feature (166)..(166): n is a, c, g, or t
  misc_feature (193)..(193): n is a, c, g, or t
  misc_feature (278)..(278): n is a, c, g, or t
  misc_feature (319)..(319): n is a, c, g, or t
  misc_feature (326)..(326): n is a, c, g, or t
cttttttttaagcagggctgagaatgtttattccatgcccaaggcagcacagacctggcagacagcagtaccacagggcaaagagggagaacactggcggccgatcccaacgaggctccctggagcccgacgnagaacagcgccctggccgggccaagcaggagcnggcatcatgtgttccttcaaagtagtnctggaggggccagcaccttggggcttccggctgcaagggggcaaggacttcaatgtgcccctctccatttcccggctcactcctnggggcaaagcggcgcaggccggaagtggccgtgggtgactnggtgctnagcatcgatgg

SEQ ID NO: 1522 - DNA, 480 bp, Homo sapiens
ttttttttttttttttttgcaaagaagattgctttgtattttatttacaacagaatgtaagaaaaagtaagttattaacaataataaataactaggaagaaaaacacagaacagccacaaaatgacacagaaggatggcatatgtaaggatcaacttttgtttgctttgcttatagtctgtaatgctgtgtattccaacacctggtccttcagcagtggcagtggtatgtggattaatttaaccaatcaagatcccagcttgaatgtaaacactacaaattacacttgagctacatgtgagtggtacaggtacaacaccaactcagagaccctctcctgggtgatatatagaaactgaagggagacttgcaatttgacagacatgctttcaatttaaagcaaaaaacatcaagaggcttatcctaaagtccttgttaatttaacaacaaaattacaattattaatggcatctgaaaattt

SEQ ID NO: 1523 - DNA, 532 bp, Homo sapiens
ttttttttttttttgaggggacagatttattttattttactataaagatgtatgtgtagcagaagacaaattatgcagagctttgagttagttaagaatcatctgatttaattctttggagaaatgagacaaattgtagctaaggactatggagttgttttagtttgccagttatatttaatttgactatttctttatttattgagagacaaagtctcactctgctgcccaggctggagtgcagtgatgcaaacacagctcacttcagccttgacctcctgggctcaagcagtccctcctgccttggcctcccaaagtgctgggcttacaggtgtaagccatggcacttggcctatttgacttgtttaatccctccgaagaactcatacatactattgccacctcattttccacgtaagaaaatggaaacacgaagaccttaataacttgcttaatggctagtaggtggtagagcttgaatttagaccacacagtgtggagggtatgctattaaggaaaaacgatgttctag

SEQ ID NO: 1524 - DNA, 354 bp, Homo sapiens
  misc_feature (341)..(341): n is a, c, g, or t
ttactaggggcgggcctgtttccgggaggcgcgtggggcttgaggccgagaacggcccttgctgccaccaacatggagactttgtaccgtgtcccgttcttagtgctcgaatgtcccaacctgaagctgaagaagccgccctggttgcacatgccgtcggccatgactgtgtatgctctggtggtggtgtcttacttcctcatcaccggaggaataatttatgatgttattgttgaacctccaagtgtcggttctatgactgatgaacatgggcatcagaggccagtagctttcttggcctacagagtaaatggacaatataataatggaagacttgcatncagctttctattt

SEQ ID NO: 1525 - DNA, 2904 bp, Homo sapiens
ggcacgagctctgtgagactgaggtggcggtcagccggagtgagtgttggggtcctggggcacctgccttacatggcttgtttatgaacattaaagggaagaagttgaagcttgaggagcgaggatggcagtcaacaaaggcctcaccttgctggatggagacctccctgagcaggagaatgtgctgcagcgggtcctgcagctgccggtggtgagtggcacctgcgaatgcttccagaagacctacaccagcactaaggaagcccaccccctggtggcctctgtgtgcaatgcctatgagaagggcgtgcagagcgccagtagcttggctgcctggagcatggagccggtggtccgcaggctgtccacccagttcacagctgccaatgagctggcctgccgaggcttggaccacctggaggaaaagatccccgccctccagtacccccctgaaaagattgcttctgagctgaaggacaccatctccacccgcctccgcagtgccagaaacagcatcagcgttcccatcgcgagcacttcagacaaggtcctgggggccgctttggccgggtgcgagcttgcctggggggtggccagagacactgcggaatttgctgccaacactcgagctggccgactggcttctggaggggccgacttggccttgggcagcattgagaaggtggtggagtacctcctccctgcagacaaggaagagtcagcccctgctcctggacaccagcaagcccagaagtctcccaaggccaagccaagcctcttgagcagggttggggctctgaccaacaccctctctcgatacaccgtgcagaccatggcccgggccctggagcagggccacaccgtggccatgtggatcccaggcgtggtgcccctgagcagcctggcccagtggggtgcctcagtggccatgcaggcggtgtcccggcggaggagcgaagtgcgggtaccctggctgcacagcctcgcagccgcccaggaggaggatcatgaggaccagacagacacggagggagaggacacggaggaggaggaagaattggagactgaggagaacaagttcagtgaggtagcagccctgccaggccctcgaggcctcctgggtggtgtggcacataccctgcagaagaccctccagaccaccatctcggctgtgacatgggcacctgcagctgtgctgggcatggcagggagggtgctgcacctcacaccagcccccgctgtctcctcaaccaaggggagggccatgtccctatcagatgccctgaagggcgttactgacaacgtggtggacacagtggtgcattacgtgccgctccccaggctgtcgctgatggagcccgagagcgaattccgggacatcgacaacccaccagccgaggtcgagcgccgggaggcggagcgcagagcgtctggggcgccgtccgccggcccggagcccgccccgcgtctcgcacagccccgccgcagcctgcgcagcgcgcagagccccggcgcgccccccggcccgggcctggaggacgaagtcgccacgcccgcagcgccgcgcccgggcttcccggccgtgccccgcgagaagccaaagcgcagggtcagcgacagcttcttccggcccagcgtcatggagcccatcgtgggccgcacgcattacagccagctgcgcaagaagagctgagtcgccgcaccagccgccgcgccccgggccggcgggtttctctaacaaataaacagaacccgcactgcccaggcgagcgttgccactttcaaagtggtcccctggggagctcagcctcatcctgatgatgctgccaaggcgcactttttatttttattttatttttattttttttttagcatccttttggggcttcactctcagagccagtttttaagggacaccagagccgcagcctgctctgattctatggcttggttgttactataagagtaattgcctaacttgatttttcatctctttaaccaaacttgtggccaaaagatatttgaccgtttccaaaattcagattctgcctctgcggataaatatttgccacgaatgagtaactcctgtcaccactctgaaggtccagacagaaggttttgacacattcttagcactgaactcctctgtgatctaggatgatctgttccccctctgatgaacatcctctgatgatcaaggctcccagcaggctactttgaagggaacaatcagatgcaaaagctcttgggtgtttatttaaaatactagtgtcactttctgagtacccgccgcttcacaggctgagtccaggcctgtgtgctttgtagagccagctgcttgctcacagccacatttccatttgcatcattactgccttcacctgcatagtcactcttttgatgctggggaaccaaaatggtgatgatatatagactttatgtatagccacagttcatccccaaccctagtcttcgaaatgttaatatttgataaatctagaaaatgcattcatacaattacagaattcaaatattgcaaaaggatgtgtgtctttctccccgagctcccctgttccccttcattgaaaaccaccacggtgccatctcttgtgtatgcagggctatgcacctgcaggcacgtgtgtatgcactccccgcttgtgtttacacaagctgtggggtgttacgcatgcctgcttttttcacttaataatacagcttggagagatttttgtatcacattataaatcccactcgctctttttgatggccacataataactactgcataatatggatacgccttatttgatttaactagttccctaatgatggacttttaagttgtttcctttttttttcttttttgctactgcaaacgatgctataataaatgtccttatc

SEQ ID NO: 1526 - protein, 522 aa, Homo sapiens
MAVNKGLTLLDGDLPEQENVLQRVLQLPVVSGTCECFQKTYTSTKEAHPLVASVCNAYEKGVQSASSLAAWSMEPVVRRLSTQFTAANELACRGLDHLEEKIPALQYPPEKIASELKDTISTRLRSARNSISVPIASTSDKVLGAALAGCELAWGVARDTAEFAANTRAGRLASGGADLALGSIEKVVEYLLPADKEESAPAPGHQQAQKSPKAKPSLLSRVGALTNTLSRYTVQTMARALEQGHTVAMWIPGVVPLSSLAQWGASVAMQAVSRRRSEVRVPWLHSLAAAQEEDHEDQTDTEGEDTEEEEELETEENKFSEVAALPGPRGLLGGVAHTLQKTLQTTISAVTWAPAAVLGMAGRVLHLTPAPAVSSTKGRAMSLSDALKGVTDNVVDTVVHYVPLPRLSLMEPESEFRDIDNPPAEVERREAERRASGAPSAGPEPAPRLAQPRRSLRSAQSPGAPPGPGLEDEVATPAAPRPGFPAVPREKPKRRVSDSFFRPSVMEPIVGRTHYSQLRKKS

SEQ ID NO: 1527 - DNA, 325 bp, Homo sapiens
  misc_feature (41)..(41): n is a, c, g, or t
ctctctctctttctgtctcttcctcgctccctctctttctntcctccctctgccttcccagtgcataaagtctctgtcgctcccggaacttgttggcaatgcctattttttggctttcccccgcgttctctaaactaactatttaaaggtctgcggtcgcaaatggtttgactaaacgtaggatgggacttaagttgaacggcagatatatttcactgatcctcgcggtgcaaatagcgtatctggtgcaggccgtgagagcagcgggcaagtgcggatgcggtcttcaagggcttttcggactgtttgctcaagctgggcgaca

SEQ ID NO: 1528 - DNA, 566 bp, Homo sapiens
  misc_feature (557)..(557): n is a, c, g, or t
gagttatgaactgctcctcctctgacctgcagtgactgaatcacagtttaggtccctgtctagcaggggctgaggtgtcaggaggggacttctggcccaccttagcgttcaggcctctgtgagtgggcatgcagcagatattgtggggaggcgatggccagatgggactagtgttccctcctatctggccacggcgttatgcggcgatggggtgggccggggtggtcctggctggcattgcctgagccggcagtgatgaagtggggagctttgccctttgacaggtggtgggctggtctggggccttaatgtgaaaagacgagtggcaggcagctggagtagagcgagcccagcagccctaaaaggctgcttcatggccatctagtccccagttcagggcagcatccaatagcccacaaggccagcgtgggtggggcgggggtggtcccacagctgggttccacctgaagagcctccgtgcctcggagcatggagaggcaggctatgggtggcacctctcccgtcctgccctgtgttcccagttgaagaacctggancttgagtac

SEQ ID NO: 1529 - DNA, 2063 bp, Homo sapiens
tggcccatgctaccctcacctgacacctgcttcctacctctggtttctactttgcaggtgtgtatcaggtgtacacagaccaggtagaggtctgtggagagggctgcaggccaggctgcagggaaggggtgccaggcggggctagagcaacaagggcagaggctacactgaacctgggtcttaagggtcccccaggctggggctgggtggcctatgtgaaccccagaggcacagccaggacatgggggctcatcagaggggcagtctgagctcagcaggaaaggccttctctgtcagagctgtcccaggaccactggacatggctgaggaacagtgagttccccagtgttggaggtgtgcaagcagaggcctggccatcgtcctcagacagagctcccagatccagctccctgcccgtctgccatgttcctgccagctgcctccccactgggccctttaccacgttcctgactcacacggccggttctgccaccgcccagaagccggtgcccaagggcctggctataaatccttgatgtgaggctggctacctctcatcacttctgagcacggagcaatggcctctcgctgggctgtgcagctgctgctcgtggcagcctggagcatgggctgtggtgagtgggccgcaggctggtggggaccctgcctctgagcttgtctgcccacctcctagggggatggggctgttgggggtgctttgtggctgagagcctccttaggcctccatgaggctcaccctcctcattctcagtgagcctcctgggtcccagagcccagcttcaccctgggacaggggtcacggctccactctgcaggaagggagactgaggcttggtggagggatgcagcattcaagtctgtggctcagctcagttagagaaagctgccagagaggccccttgaagggctgcccggggccttgaaagatgtcagcgagactccttcagcccctgcctcctggttccaggatgaggccaccgaggtcaggtgatgaggttctgcccccatccctcacccaggtgaggccctcaagtgctacacctgcaaggagcccatgaccagtgcttcctgcaggaccattacccgctgcaagccagaggacacagcctgcatgaccacgctggtgacggtggaggcaggtgaggccaggccccacggcagccctgggtgcactggagtcagggccacctcccccaagtgcctccctcctttgctggtgctcctcccggcccaaaaggcagcaggtgggatgggcagaacaggctgccacaccttggcaggggtgccttccacgagggtggcacagccccctcagagacccagtcctggggcaccaggcgctggaggtgggtggggcttaatggccggggtaccctggggggctcaaaccccagctctgacacagacccactgggtggtgttgccacagcctctgggctcgggctcccatctcagcgcaggcacttcagaggtctgacaaggcctaataattcatgaacaggtcacagtcagaggagggctgggccctgggtggcttcacagatgtggactattgggaacagggatcacagggagggtgaggtcaggcgacggcggctgggagcagtgcagcagcaggcaggcgctgcaggggagtgagggttctgacactggcccaccctgcagagtaccccttcaaccagagccccgtggtgacccgctcctgctccagctcctgtgtggccaccgaccccgacagcatcggggccgcccacctgatcttctgctgcttccgagacctctgcaactcggaactctgaacccagggcggcagggcggaaggtgctcctcaggcacctcctctctgacggggcctggctccacctgtgatcacctccccctgcttcctgctgctgtggcacagctcactcatggggtctgaggggagagaagcacaccaggggcgccctctgccttccataccccacgcttataaaacataactaagccaagagtggacatgacttttgtccttcctgggcactgacaacctacagaactgg

SEQ ID NO: 1530 - protein, 103 aa, Homo sapiens
MASRWAVQLLLVAAWSMGCGEALKCYTCKEPMTSASCRTITRCKPEDTACMTTLVTVEAEYPFNQSPVVTRSCSSSCVATDPDSIGAAHLIFCCFRDLCNSEL

SEQ ID NO: 1531 - DNA, 1690 bp, Homo sapiens
aagcataacaggacccggtgcatttcaaggactgaaataaggagggccgacagcatgacttctgaagaccaagaacctgagcgggactatgagaacgagtctgagtcttcggagcccaaactgggcgaggaatccatggaaggggatgagcacattcacagcgaagtgagtgaaaaagtcctgatgaatagtgagaggcctgatgagaaccacagtgagccctctcaccaggacgtcatcaaggtgaaggaagaatttacagaccccacttacgacatgttttacatgagccagtatggactgtacaatggtgggggtgccagcatggccgccttgcatgagagctttacatcgtctctgaattatggcagccctcaaaagttctccccagaaggtgacctatgttctagcccagaccccaaaatctgttatgtgtgcaagaagagtttcaaaagctcctacagtgtgaaacttcactacaggaacgttcacttgaaagagatgcacgtctgcacagtggctggttgcaatgctgcattcccctctcgccgaagccgagacagacacagtgccaacataaacctacatcgtaaactgttgaccaaagaactcgatgacatgggcctggactcgtcgcagccctcccttagcaaggacctccgcgatgaatttttggtgaagatatatggtgcccagcaccccatggggctcgatgtcagggaagacgcctcctctcccgcagggactgaagactcccacctgaacgggtatgggagaggcatggcagaggactacatggtccttgacttgagcaccacctccagcctccagtccagcagcagtatccattcctccagagaatccgacgcaggcagcgatgaggggattcttctcgatgacattgacggggcgagtgacagtggggagtcggcacacaaggccgaggcccctgccctccctggcagcctaggggctgaagtttcaggatctcttatgttcagcagcttgtctgggagcaatggtgggatcatgtgcaacatttgccacaaaatgtacagcaacaaggggaccctgagagtgcactacaaaactgtgcatttgagagaaatgcacaagtgcaaagtcccaggttgcaatatgatgttttcctctgtacgaagccgaaatcggcacagtcagaaccctaatctccacaaaaacattcccttcacttcagtagattagtctcagaatggacactacaaatgccagctctcaccagatggcctacgtgtttgaactgccatagtcagtgtgcgcttatgtacttggggtgtgtgtgtgtgtgtgtgtgtgtgtgtgtgtgtgtgtgcataaatgtatgctctgtggctacatatacacacacgtatttccttgagataaacaagataaacactaggtgcttttgaatttttttcacttccctttatagttttgggaaaggagtgggatctttgatttcagggtgaaaacagagtacccctttaaacacacacacacacacgcacatacacacacacacacacacgcacacacacacacacacacagtgtgcaactagccccagttttgacagaataattcttggtcttccccaaagagacaatttgttgtacccatgactgttgcctgcaaaaataaaagggaaaaaaaaaaaaaaaaaaaaaaa

SEQ ID NO: 1532 - protein, 389 aa, Homo sapiens
MTSEDQEPERDYENESESSEPKLGEESMEGDEHIHSEVSEKVLMNSERPDENHSEPSHQDVIKVKEEFTDPTYDMFYMSQYGLYNGGGASMAALHESFTSSLNYGSPQKFSPEGDLCSSPDPKICYVCKKSFKSSYSVKLHYRNVHLKEMHVCTVAGCNAAFPSRRSRDRHSANINLHRKLLTKELDDMGLDSSQPSLSKDLRDEFLVKIYGAQHPMGLDVREDASSPAGTEDSHLNGYGRGMAEDYMVLDLSTTSSLQSSSSIHSSRESDAGSDEGILLDDIDGASDSGESAHKAEAPALPGSLGAEVSGSLMFSSLSGSNGGIMCNICHKMYSNKGTLRVHYKTVHLREMHKCKVPGCNMMFSSVRSRNRHSQNPNLHKNIPFTSVD

SEQ ID NO: 1533 - DNA, 1488 bp, Homo sapiens
gaggggcggggcggtgccggcaagatggctgcgcccgagaagatgacgtttcccgagaaaccaagccacaaaaagtacagggccgccctgaagaaggagaaacgaaagaaacgtcggcaggaacttgctcgactgagagactcaggactctcacagaaggaggaagaggaggacacttttattgaagaacaacaactagaagaagagaagctattggaaagagagaggcaaagattacatgaggagtggttgctaagagagcagaaggcacaagaagaattcagaataaagaaggaaaaggaagaggcggctaaaaaacggcaagaagaacaagagagaaagttaaaggaacaatgggaagaacagcagaggaaagagagagaagaggaggagcagaaacgacaggagaagaaagaaaaagaggaagctttgcagaagatgctggatcaggctgaaaatgagttggaaaatggtaccacatggcaaaacccagaaccacccgtggatttcagagtaatggagaaggatcgagctaattgtcccttctacagtaaaacaggagcttgcagatttggagatagatgttcacgtaaacataatttcccaacatccagtcctacccttcttattaagagcatgtttacgacgtttggaatggagcagtgcaggagggatgactatgaccctgacgcaagcctggagtacagcgaggaagaaacctaccaacagttcctagacttctatgaggatgtgttgcccgagttcaagaacgtggggaaagtgattcagttcaaggtcagctgcaatttggaacctcacctgaggggcaatgtatatgttcagtaccagtcggaagaagaatgccaagcagccctttctctgtttaacggacgatggtatgcaggacgacagctgcagtgtgaattctgccccgtgacccggtggaaaatggcgatttgtggtttatttgaaatacaacaatgtccaagaggaaagcactgcaactttcttcatgtgttcagaaatcccaacaatgaattctgggaagctaatagagacatctacttgtctccagatcggactggctcctcctttgggaagaactccgaaaggagggagaggatgggccaccacgacgactactacagcaggctgcggggaaggagaaaccctagtccagaccactcctacaaaagaaatggggaatccgagaggaaaagtagtcgtcacagggggaagaaatctcacaaacgcacatcaaagagtcgggagaggcacaattcacgaagcagaggaagaaatagggaccgcagcagggaccgcagccggggccggggcagccggagccggagccggagccggagccgcaggagccgccgcagccggagccaaagttcctctaggtcccgaagtcgtggcaggaggaggtcgggtaatagagacagaactgttcagagtcccaaatccaaataaactagttttgttctt

SEQ ID NO: 1534 - protein, 482 aa, Homo sapiens
MAAPEKMTFPEKPSHKKYRAALKKEKRKKRRQELARLRDSGLSQKEEEEDTFIEEQQLEEEKLLERERQRLHEEWLLREQKAQEEFRIKKEKEEAAKKRQEEQERKLKEQWEEQQRKEREEEEQKRQEKKEKEEALQKMLDQAENELENGTTWQNPEPPVDFRVMEKDRANCPFYSKTGACRFGDRCSRKHNFPTSSPTLLIKSMFTTFGMEQCRRDDYDPDASLEYSEEETYQQFLDFYEDVLPEFKNVGKVIQFKVSCNLEPHLRGNVYVQYQSEEECQAALSLFNGRWYAGRQLQCEFCPVTRWKMAICGLFEIQQCPRGKHCNFLHVFRNPNNEFWEANRDIYLSPDRTGSSFGKNSERRERMGHHDDYYSRLRGRRNPSPDHSYKRNGESERKSSRHRGKKSHKRTSKSRERHNSRSRGRNRDRSRDRSRGRGSRSRSRSRSRRSRRSRSQSSSRSRSRGRRRSGNRDRTVQSPKSK

SEQ ID NO: 1535 - DNA, 3367 bp, Homo sapiens
tgtgggccatcaacaaggtcccacaaggtgaccaagaatgtgagcaagcccaggcacagccactgtgggcgcctgaccaaacagcactaaatttgtgtgggacatgatcccagaggtgtgtggcttcacccctcaacgagtggcgtggcatggagttactgaatctccaaggtcaaacaggccctcaaattcatcaagaaaagggtagggacaaacatctgtaccaagagaaggcaggaggagctgagcaacgtcctgctgccatgaggaaagcagctgccaagaaggactgagcccctgccatctgcctataatgaaagctttgcaaaataaaataaatataaaataaagtaataaaattaaattaaatttaaaaataaaataaagcaaaacaaaataaaatatataaagtaaaaattgttaaaatgcaaaacaatatggacataaatacagaaacacagggaaacttctttaggcactcatttacaggtaaaaatatgaaattgaataaaggtcatctggtgtcaaataatataggccttatctattataagagtttggactgaaaagcaaaagtgagataacaaaaaaaagcttttcagaatattattttgtatagatatgtgaaggatgaagggtgggtgaaaggaccaaaaacagaaacacagtcttcctgaatgaatgacaatcagaattccgctgcccaaagtagtccgacaattaaatggatttctaggaaaagctaccttaagaaggctggttaccatctgggttttcacagtgctttcacattcttatcactttcaacactactgcaaataggaagggacagtaacatttagaagagaacaaaacagaaactcttggaagcaggaaaggtgcatgactcaaagagggaaattcctgtgccataaaaggattgctggtgtataaaatgctctatatatgccaattatcaatttcctttcatgttcagcatttctactccttccaagaagagcagcaaagctgaagttagcagcagcagcaccagcagcaacagcaaaaaacaaacatgagtgtgaagggcatggctatagccttggctgtgatattgtgtgctacagttgttcaaggtatgcagtaatttttatttctcaacctataagttccttttctaatgtttcaaatgtcttttcttccacttttatcctaaaagacatgataaagttttatttaatctcacagattagaagttactacagctttagcacagaaatggtggacatgtttaagatactagagatgattattgaaactagaaattatgaacttcatggaatttttgatttggctagaatatctggcaaaagcctttagcaacagttttaaatgtctgttaagaagattttatatagcgatcatgttaacaagcttcctgggaaaatatttgaggataaaatcaagggggcaaaacaagcttcacctccaataaacttccttcatgcttcccatttgttagacgaattgcttactaatttaatgagaaaataatcaacatcttacttaacttttcccagtaacagatgtgttaagtgctatttgacaaattactatctttacccttaatgaaaattctgctcacgttcaccaccagctataaaccacagccatctgttgcaatcagacgcattactaactaatgctatgatctattctaggcttccccatgttcaaaagaggacgctgtctttgcataggccctggggtaaaagcagtgaaagtggcagatattgagaaagcctccataatgtacccaagtaacaactgtgacaaaatagaagtgatgtaagtaatgaacttgctgaagatgacaatggtgcaggcttttttgtttatgtatttgcatctaaactttaagactcttttgtatgttcttttaacagtattaccctgaaagaaaataaaggacaacgatgcctaaatcccaaatcgaagcaagcaaggcttataatcaaagtaagttaccaaattactcccatgttataatctgttttatccaagacagatcttttgaaaaagaaaataatgtggacaactacagaaagattctgctatgatcctgtgtgaaatattctgttaaggggtccttggttgtaacagcttccccttcttactacatgtttttagatgtcctgggggaaacaagaacagcccaagtaaataaaactcttgttttcttattccagaaagttgaaagaaagaatttttaaaaatatcaaaacatatgaagtcctggaaaagagcatctgaaaaacctagaacaagtttaactgtgactactgaaatgacaagaattctacagtaggaaactgagacttttctatggttttgtgactttcaacttttgtacagttatgtgaaggatgaaaggtgggtgaaaggaccaaaaacagaaatacagtcttcctgaatgaatgacaatcagaattccactgcccaaaggagtccaacaattagatggatttctaggaaaagctaccttaagaaaggctggttaccatcggagtttacaaagtgctttcacgttcttacttgttgcattatacattcatgcatttctaggctagagaaccttctagatttgatgcttacaactattctgttgtgactatgagaacatttctgtctctagaagtcatctgtctgtattgatctttatgctatattactatctgtggttacggtggagacattgacattattactggagtcaagcccttataagtcaaaagcatctatgtgtcgtaaaacattcctcaaacattttttcatgcaaatacacacttctttccccaaacatcatgtagcacatcaatatgtagggagacattcttatgcatcatttggtttgttttataaccaattcattaaatgtaattcataaaatgtactatgaaaaaaattatacgctatgggatactggcaaaagtgcacatatttcataaccaaattagtagcaccagtcttaatttgatgtttttcaacttttattcattgagatgttttgaagcaattaggatatgtgtgtttactgtactttttgttttgatccgtttgtataaatgatagcaatatcttggacacatctgaaatacaaaatgtttttgtctaccaaagaaaaatgttgaaaaataagcaaatgtatacctagcaatcacttttactttttgtaattctgtctcttagaaaaatacataatctaatcaaatttctttgttcatgcctatatactgtaaatttaggtagactcaagactagtttaaagaatcaaagtcatttttttctctaataaactaccacaacctttcttttttaaaaaaagatc

SEQ ID NO: 1536 - protein, 94 aa, Homo sapiens
MSVKGMAIALAVILCATVVQGFPMFKRGRCLCIGPGVKAVKVADIEKASIMYPSNNCDKIEVIITLKENKGQRCLNPKSKQARLIIKKVERKNF

SEQ ID NO: 1537 - DNA, 376 bp, Homo sapiens
ttttgagtaacacggagtttctttaataagctaccagtctccaggtcaataactaagttatcaacaattcatttgcttatacacttttgtttcaaacacccacatttcaaccccctcccccataaatccctccacattttcagtgtggttgattaatctcccagctgttgatgggttcaggcaaaacagacctctcgccagttcatctttcattgaacggtggggagggggcgggacggggggacgcctcccagcccccacctcccggaggcctggcggggcgggcagcggagtcgggcgcgcgcagaacgcagcttttgctcttcttcgctccagcactccaaatcggcctttgcagtcgccgcagcagctgccg

SEQ ID NO: 1538 - DNA, 17072 bp, Homo sapiens
gatcttttaaagacaaagttagtggcagaccatttacagaaaccagatgttctgtcttttggctctgagcatgctgctaatcttcatcatctagtgtactgaacgagatgtactgaacgagggctgcagagctgcagcaccggcagagtaggcgctcggtaggacggggcctgcacaacctccccggtagtcagcagagcaatctaggaaggctcctttcccgcggcgccctggaggcggggccccaccttcccacgcaggcgctatcaagccccgcctcctcacccgcccgcgctggcgtcggaaagagccctcagcccctccctctctggcgctgatacccaatgggcagcctcaggcctttagcgggggcggggcaccccctggacgccgttctggttgcccgcggcccggcgcagcgcatgacgttattacgactctgtcacgccgcggtgcgactgaggcgtggcgtctgctggggcacctgaaggagacttgggggcacccgcgtcgtgcctcctgggttgtgaggagtcgccgctgccgccactgcctgtgcttcatgaggaagatgctcgccgccgtctcccgcgtgctgtctggcgcttctcagaagccggtgagacctcccgggctggccggatggggcgcgagtggggctgaggcggggcgaggcagggcgggccaggccgggcacccagagcggggtggaaggcgccaggggagcgggagcctttacttcgcctccgcgccctgcattccgttcctggcctcgggagaagcggcacgaccgatcacgccaaggtccgtgtgaacttcccccttctcgacacccacctcccgcccccgggcccagctgtgcgccaggcgaagtcggtgtgctcaagaggtgcctgttgggttacaggacacggaaagggtggcctcggctccttcgagtctccaattgaccccactcatttcggatcttctaacttaatttctcttgaccgagagctttgtaatagcgtagaatctggagacagggtggcttcgttcaaacagcaccctcaccattgactagccctgtgaccttgagcaagtttttaaacgtcccggggacccgtttcctaaaatgtttgctcgaagtggagttaatctctaaatggagataagagttatctctgaaatgttatcggttattaaaatgttatcagttaactctaaaatggagataataagagtccccacctcttggggttgtcttgaggattcaacgagtgacacgtgtggaaacgattccaaatagcacctggcacataatcgataacatgtgtgttgaatagtgttatttattgagtctccagttcggtatacatttcttgaaccacctgtgctcagttctgaggcgggttcacagaaggtcagcctcttcagaaacaaacttcctcctcttccctctccctcaacatctgagcttttcttggcagtgagttcaggagcgccgaagcagaactcagaggacgctgccctccctcccttcctacacatcttagggtacagtagctaaagcaaagagcaacgatgcttgagggtggggggtagagtttagcactatttcatggcctctagcatttagaggtcctaacacctgagctagcaattctgacccccctaggcacagtgaggtcgtgttaattggtgtaactgcaggcctcgggattctggtatttcccccaggacttgataccgctctacttagtacaggcaagagattgtcaaaaggtaaagaggtatgcccctctaggaatcctgttgcctaaaataatgacaaaactgccgggtgcggtgctcaggcctgtaatcccagcattttgggaggctgaggcaggtggatcacctgaaggtcagaagttcgagatcagcctggccaacatggtgaaaccccgtctctactaaaaatacaaaattagccggtcgtggtggcgggctcctgtaatcccagctactcgggaggctgaggcgggagaatagcctgaacccgggagcggagtttgcagtgagcggagatcgtgccattgccatacggcctgggcgaacaagagcaagactccgtattttaaaaaaaaaaaaaaaaaaaaaaaaaaaaagcgttccctttaggatatctgtgggtagagggctgtaccggtagttacgggctcagaaacatccttcctttaggcacctgatgtaggttttcttcttcttctgcaagtcaggttcattgtttcctgtatcagtttgcagggtccccccccccccgccaccttacagtaggaagaaaattgagttccagatatgaagtcacctttgaaagtgcccaggtatctttccacttggtgtgtaaactcttcagataattagaagttttctgtgtcactcaacttgtcatggactaattaggaaccattcctgaagcttttaaggatagaactaaaagtttcacttttatttttttaaagggtggaataataaactaacgtgttgactctttgtattttgtaattcttcatacttatggatgtctttttacttaactataagtaacaaaatagatcaacgttttagttttttatattatacatgtaaaaagacattttgcatataagcctttcacaaaaatcttgacagtaaacaataagcagtggctcacccaaattaggcagacttactgcactagactcctaccatctgtgtgatactccatgaagggagggagaaggggagggagaagggtaggcagctggtctgatggctgtgacacaagataatccccttaacctcccaagacgctgtgtgttttttccttttttattctccctggtttactttcgttttgtttgagacagggtctctgtgtcacccaggctggagtgcagtagcaggacagctcactgcagccttagcctgctgggctcaagcgatcctcctgccttagcctcctgagtagctgggaacacaggcatgtgccaccaccacacccagccaattaaaaaaattttttttttactagagacatggtcttgctacgttgcccagtctggtctccatctccaggctcaagcagtcctcccacctcggcctccaaagctgggattactctcactctcttaaaaccaggcaggtagggagatttatctcaggcttaaagattgccattgtctcatcaaagagtgtttggtgtgaaactttgaaatgaatatcaagattgtgtttttatttttgaataaggtttatagttttcatagttcttatttcatggaagaagattgaatgcatttaaaatgttattttattgtttgcatttctgtatggctccttttgtgagatctttactagcaatgttttggctttataagtggtaggtaagagttttaatttacactgttagaatctggaatttttgaaacgtttttcctctttcacatgaatggttcctatgtatttaggaagttaaagttttacttttttttaattaatttttttttttaggctggaatgcagtggcacagtcatagctcactgtagcctcaggtgtgtgccaccatacctgactaattttttaatatttatttttgtagagatgagagtctcatgttgcccaggctggctttgaactcctggcttcaagtggtcctcccaccctggcctcccaaagtgctggggattataggtgtgagccatcatgcccggcctagtttttattttttaaaatttgagtgggttgttcgtggtctctgtcagagaggaatcccatttaacagagaatctttttatggctctccagagaaaatgaatggtaaacttatcttttcacaagctctcactcagaaatgatacacacacacttctgataggacttttagcttctttaactttgttcctttcactcatatcagtggttcttatttttgagatacacagtaatgaagccatgggagaaagtatctaagtagctttctggcagtcctaatctttgcaggcgcaagttacaggcgcatgccacagctactgggccccttcttgctcttatgtatagcattatcctgcctcattgtttcaactctaggattgagaaagaagttaccttttctctgttactgtcgcctggctggtttggactcctgccttccaaaaactgcagtttctgtagttgtatttggaaatttatttcacaatacaataaatttctggccccacaaaatatttattaactgccaagaataacacatctgtttgattgctaaatataaccattgatttgctgtttcaccttctctcagctttacttcttcccaaattcctaaatttccttcactttttctgagatacattagtggactgtctctgcctgtaagttaactgaaacactgattcctagtatttcagttgttttcctccagcactgtcattgtctgtgtttgttggctttgtccaataatggtctattgaggggtgaagatatacgtaattagctttctcctattggcttgtacactccagggatacttggcagatcagtcttaactcttctcaccaagatcagtccagtgctggattaggtaaggtatgaacacatcagatgtgctttttatggagaaatcatgttggtttacacgtcagtgtgtgagaatgtggcagaagggagctaaaatagtatgataatactactggataaattttgtggtctaacctaaaccttagccattacatagaatacttttgctgtgagcaggtttgctcagttgtaaaactggaaaggaatcatttctcaccccccgcctccaagcttactcaaacatgacagccaccaaacatcaagagaacagtgtttcagagaacatttctactggggcttcaggaggagcctgtccaagatttaggctgttcaaattataaattataaaacaactggctcaagtcccagttagtgtttaagtctagagagtgctaagtaatcttttcatttatgtcattagtctccctaaagtatttatcatcagtaacgttacaatctaatttaaaatattctcattcgtatacagataccaatttgatagaagagtcaagtttgcctagagtggagattaaatcatagttttatttgaagtataattttggcttgctcaaaatgaccagtatctggttatgactaagaatggcatgaaaaggccagacgcagtggctcatgcctgcaatcccagtactttgggaggccaaggcaggtggatcacctgaggtcaggagttggagaccagcctggccaacatggtgaaaccccatctctactaaaaatataaaaattagccgggcgtggtggtgggcacctgtaatcccagctactcgggagactgagacaggagaaatcacttgaacccgggaagcggaggttgcagtgagccgagatcgcaccactgcactccagcctgggtgataaaagcaaaactccgtctcaaaacaaacaaacaaaagaatggcataaacagacacagctcacagatgatctagtctctttagccactaatttcattatattctcactataatttctttgaaaacaaaggatgggtttgttttttgcccctctttcgctgcttgccttcagatgcgggataatcctgtttcattggccaaagcatggattcattttggaggccaaggaagatgcaaacacagtgcacagggtggaagagaagcctatgaatatgttggggcttattaaatttccataacttcattctgataactgattattatactttccaaaatagctgacaattaaaaagtactgatttgtttgtatatttttgtcttttaaggcaagcagagtgctggtagcatcccgtaattttgcaaatgatgctacatttgaaattaaggtaagagtgttttactttgttaataattttttcacaggtacactctgatatacagttttacctttagaatagaacatcttgatgttcatgattagtcatcattttcttctaaatgtccaggatcagaagttcagagaagcttattcaaaagtttggaatgtaattcagtgaaatatttgaataagaagagtcttagttgtttctttgaaggttctttcaacctataactcagttggcttctaggggctttcagtgaaaatcatcttagaaagatttccttcccccaagccccatctcattgcacagtgaggtttatggatttaaggaacagaggcgatatgaagcattactgatgtgctcctttgcagtttttcaagttcaatattatttgcaatggagttagatcttagagtggtcaacagtgtttgcaatgtagtatgtggaggataataactaccttattcatttcagaaatgtgaccttcaccggctggaagaaggccctcctgtcacaacagtgctcaccagggaggatgggctcaaatactacaggatgatgcagactgtacgccgaatggagttgaaagcagatcagctgtataaacagaaaattattcgtggtttctgtcacttgtgtgatggtcaggtgagtggtaggtttgtggtggaactgtgttatttaggtactgaagtatggcttgtacttattgggctttaccctgccatatgtatcagaagagtttgaggctggtaatgtaattttcttttatttatttatttttttgagacagtctctctctgtcgcccaggttagagtacagtggtgatcttggctcactgcagcctctggttagagtacagtgtgatcttggctcactgcagcctctgtccactgggctcaagcaatcctcccacctcagcctcccgagtatgtgggaccacaggtgcacaccaacacacccagctaatttttgtattttttggagatacggggtttcactatgttgcccaggctagtctcaaacttctgggctcaagtggtccgcccaccttggcctcccaaggtgctaggattacaggcgtgagccactgtgcctcgctgaagccagtattttagaattaaaaagtagaatgccaaaacctgctatgaagcttaggctaaagaattcacataacattgccagttttctgtacctgttcttagagttttactattttaaaactttctggcactatgatcgcctgtactgtatataatttggagagaaaggattagtttgttttttgttttgtgggcttaggtcaagggttagagtcaaatacctacaagggccagccaggtagaataaatgagtgaagaaggctaggtatacaaaacagaaaatggtgacagggactcatgctgaactggcaccagcatgccctacccagaggaatgccatgacttggttccagccagttggtgccatgtggaaatcaggggtaatgtttcctgttttccatgtctaagagaaggcggaagtctggattttcatgtgaaattcccagtgttttaatgttgacatctgatgtaggcttttattttaggtcatcatacaggagaaaggaaggaagtggcacatgtgtgggttgccagtttattgcttctggtttgggccttccactctgtattttggtggaaaatagctactttctctggttattaatgacaggttctactagcccacatatttcactgtggtctaggaaacgtttttatttagaaacatgtatcatattgcctcatagtttctccttcctctaacacaggaagcttgctgtgtgggcctggaggccggcatcaaccccacagaccatctcatcacagcctaccgggctcacggctttactttcacccggggcctttccgtccgagaaattctcgcagagcttacaggtttgctgttgatttacagaaaggggaaatgagtggattaagtttttaaatatctgtcattaagagctattatgagttaatatttgttaaaaattttaagtttctttttttaaccctctctcctttggtgctctggtacttctgttgtgctcttgagttaactgaccatttgtgaagttctctggcccctcaggtaaaagtttaaaacaggttggtgctataaaatcacagtaggtttggttatcattcaagcatgccagaagaagtctagcagtcatagaaagtaagttcggttgaagcactccatggtatgcaatgtaaattctagaaatcttcttaatattccccttttctttgtcccccgtgactatttgtttgttttggtggtttttttttttttttttgagactgtgtctcactccgttgtccaggtggtgtgcagtggtgtgatcagggctcactgcaacctcactcccgggtcaagtgattctcatgcctccacctcctgagtagctgggactacaggcatgcaccaccacacctggctaatttttgtatttttagtagagatggggtttcaacatgttggccaggctggtctccaactcctgacctcaggtgatccacctgccttggcctcccaaagtgtgctggggttacaggcgtgcagccgcacctggcctgttttgtttttttgagacagagtctcgctttgttgcccaggctggagtgcagtggcctgcctcagcctcccaaaatgctaggattacaggcgtgacgcctgtgcccggtcctcctcctcctccttttttttttttttttttgagacagagtttcactctttcacccaggctggagtggctggagtgaagtggtatgattttggctcactgcagcctccgcccccggggtcaagcaattctcctgcctcagccctcctgagtagcctaggattataggtttgcccaaccaccacacctggctaatttctgtatttttagtagagaccaggttttcaccatgttggccaggctggtcttgaactcttgacctcaggtgatcctaccctcttcggcctcccaaaatgttaggattacaggcgtgcagcggttgcccggccctccttgactcttgaactatggttgtcctctatatatcaggggattggttctaggaccctcgagtatacaaaaatcctcaaatactcaagtcccaaagtcagccttccatatcttcgggtttgcatcctgagaatattctattttcaatacatgtgtggctgaaaaaaaatctgtgtataagtgtacctgtgcagttcaaaccctgttcaaggattgaatatatttagtgtactagtataggagaggtcctaagatgtttgtaactggccagaaaacccagaaaagtccagggtatcatctggatggaacatctgaaggaaactaagtgactagagagtaggaaaagctggaaaggttgaagcacatggaactagtgaaaggacaaggagaaacatgtgtttgcctggagggacaggtacttagacgactgaactggcctctgtgttctaatggttgagcctcagagtacatatttggggtgcggtttggtttgctttgtagagttggtttgttctgcacatgtgtatgttctgccatttccaggacgaaaaggaggttgtgctaaagggaaaggaggatcgatgcacatgtatgccaagaacttctacgggggcaatggcatcgtgggagcgcaggtagtcaaggacgaggattgtgtgctgctttagatttggccctggactttgtcttgaaaaacctttcacagccccagacaacttttcctgaagctagtacagccatgtgctgcacagtgacgctttggtcaatgtcgcatatatgatgttggacccataagattataatggagctgaaaaattcctcgtcgcctagtgatgttgtagtggcacaacacattaccttttctacgtttaggtacacaaatattttgcctacaggattcagtagagtcacatgctgtgcagggttgtagcctaggagcagtaggtctactatacagcctaggtgtgcagtgggctgtaccatctaggttcgtgcattacagtatggtgttcacatgacaaaatcgcctagtgatgcaattctgagaatatatccctgttgttaagtgacgcgtgactattttgggggcttggtttgcttttaaagacctagtgcttcatatcctaccgtttgagagatgagtagatttggatggtgatttataatgtttccttttaggtgtctgctgttttataagtaagcaggaacctctagcagtggagccataaccttccccttcctatttatatttcagtacattaattgctttatcttgtcaacttcattttggggtccttgttctcatcatcagttagtgaatgatgaagaattaacagcacaaaattatatccggactgtttcttttcctttctaatatattaagattctattatgtgttgtttttttttaaacctaggttttatttttccttttgaaatggagtcttgctcagccgcccaggtgagcagtggtgtaatctcagctcactgcaacctccacccccgggttcaagcaattctcctgcctcagcctcccgagtagctgggaatatagttacgtgccaccatgcccaaccattttttgtatttttagtagagacggggtttcacatcttgtccaggatggtctcgatctgtggacctcgtgatctgcccaaagtgctgggattacaggcgtgcaccacgcccggccaggttttattttttaactcttgaatgcagaaatgttagtgttactggttaaaatagaacatagtatttatatattactttagtgctttattgaaaatatcggaggtgggataaacagagagatagggttggaaggagagtttgtagcagcagtgtaatttctgtgtcagattctggccaggagtgaaaatgcagggcattaattagtatctcccctcatggatttctgtggttcctttctcggttgtccttaatgttaggtgcccctgggcgctgggattgctctagcctgtaagtataatggaaaagatgaggtctgcctgactttatatggcgatggtgctgctaaccaggtaattatgtctcttaacttcccaaaaacagtcttattttcaaagtctttaatatttacagttgaatttctaaagaagtagcatattgcttattaggtgaaatagcaagtcctatggctagctcaaatttggttgacttatggccagattagagattgacctcttagcgttgtttcacaagagacttacgggggcacattcctgtgaaggagctcacctttgctctacatcagtgcttggcaaaggccctgtggtaaaggacctccccacaacctattgcaaaacaatacagacccattctcttggatgtccgggctggcagtgtcaaattcggataatagcgtctgagtcctaactcagtttctatgcttctcttgttaccgagtaatccccagtctgtggccagcactctgtgaagccctgttctagaggctgattcttaggtgctggttcactctggctatccagtgggcctgatagatttcatattgatcttttttccagtgtgttccttactgctagcatggccccaaagaaacaagtagtagttggtttgtcaccttccttagttgcaagagtatgatgcctgctacttctcctccaccacccaccccgctttccctcaccacccaaagctcggttttagaagaggaggcctttctgtgctttatgaaagctttctgtgccaggcagagcagcagctgttagagatgatgaagcctggagaaagaagccaaatgaaaccccttttcgtaactacttccagggccagatattcgaagcttacaacatggcagctttgtggaaattaccttgtattttcatctgtgagaataatcgctatggaatgggaacgtctgttgagagagcggcagccagcactgattactacaagagaggcgatttcattcctgggctgagagtaaggaaccctgtggtggggccgggccaacgcaaggccaaggccaagggtatgtccttgtgcagacccttgacgatcttagaaacattggagagtttcattctcatacaggagcaggtcatgtgaaagtaaaatggtttggggcagttggattcactgtcgcccctcccctgtttattaccaggtggatggaatggatatcctgtgcgtccgagaggcaacaaggtttgctgctgcctattgtagatctgggaaggtaaggctctaacacgtctcccgtagtgacatttatctctggaagttcaaagactgcctcccatgtgcctgctgaagctgttagtgggtacctgctaattgaggtgcatgagatggaagcagagtgaaggagcagggctcctttgggtagcttggtcttggtagctcacctgctgggaagcctacgtttctctcatttgggggaagtccgttctggtgcttcctctgctttggcctgtcttcatgacaactgatttgccttttccttaggttaattctgtccctcctccccaccccccattaatcatgagtcccttgaaggaacagattggggatccccacagtgtccagcatagaatgtcatgtatacaataggcatttaatatgtgtgtcttatacaaattaaacagtatggtagaagctcgtaatcttagtcttgctcagtcctaaggatctttcccttttcagtgtatggcagtgagggagatggtaagagggagactggcctaaagaggtttcactcctttggcactagtataggcttaggaggtttgggtgttctccctaaatcagtgttctacagccccagaaacaaggtttctgaagttggcacttcagcgccataccatgtacgtttaggcagtgatgtgaatcagatgtggccagccaatgatggaaatgtcacaaagtggagagacagggaagtgagggtgggaatgtagtaacattaaataagagctaatgagtagaatgaactagagcaggaccaagactacagcttgggtacaatgggctgagcagtctatgtcaggaccctaaggctgggagtgccaggccctgagtgatgggtattgacgccacctctcccaattcctgaaaagaatacatgggggcagccctggctggagacaaggggagttgtagaatgtagttgtagaatgtgtgactttcccaaacagataacccttcacaattctgagttaggtgttattgttttgcccattttgcagacaaggaaactgagccatagagcagttaaaggtacacagctactctgtcttgagccagctccccactcgcccattttaactgctgcaccaaaccaaccaaggatcctcaatgtttctccaccccagtgttcagagccgtctcctggaagtgggctagtgtagaatgagcgagcccaactgtccagactcccagcagagccttggggtttgggtagcagaggttgttgtgcctgccaactttgttacacactagcaaggtctgtgaagtaggagtgctgccagccccacaacacaccatgagaaaggagcatgagatggaaatctgtctagccaatagcaggaggctctagaacatgctcagagcctttttcttttttcacagggtctcgcgcagtggcacactcacagctcactgcacccttgaccttccagaatcaggtgatcctcccaagtagctggactacaggcgcacgccaccatgcctggctaatttttgtattttttgatagagatggggttttgccatgttgtccaggctagtctcgaactcctgggcgcaagtgctctgcccacctcagcttcccaaagtgctgggattacagcatgagccaccatcctggccttcaaagcctttttgattcaaaacaagctgttgcagattgccttattaaaaatgagaaagatgaaatatgcaatcaatacttgctagaaatgagaacagatcagtcaaccaataagaaattcgtgacaactcagaagatctgataagactacactggacgcttaataaagggcctgcgtttgaggccgtggattgccggcctgttcttccagtcatcgttcctaactaactaactgctaccggttctgttttaggggcccatcctgatggagctgcagacttaccgttaccacggacacagtatgagtgaccctggagtcaggtacgctcatgggcagtgtggtttccataggggtgggctttgaatggtgttacatggcaaaagcaacacatttcagtatttgcttttggagctagataccagttcacttcatgtacgcagtgtgttgggcatcaagttatctgaaagcagtgcctcctaataagaaagctttctgaaaatgcctacagtgtatagtgtgtgtgagcacaagcagcaatttttaaagaaagagtgttatataccttaattgtagagggaaattgttacataaaacagggctgatggtagtgtagtatcttgggggcatttagcttttgtaggcattaccccaagtctacacctggcatactctacctgaagaggatcagaatttggagatgttcctctgtctggtatagagctaagggtaactgggtgttcaatccgttgaaatacatcaatcaaaaaagctaggttccactaggaaggcatgaattttacttttttgcttagtagctctggcctgtgattctggaatcccagttttgacacagttgataaataagcctttgtagagtggacttctaaggaaaaatcatgtagagagcacgatatggaaaaatgcactttgtgtaaatctattgttgaaaatggtagaatccttttagtgttacttcagatgatataggcataagatacattggttttgctggctgtgcttctttagggggacttaagggagaaaggcaaggcacatggatttcctgcttggcgctctgatgtctcaaagtctaattatcaccacacacaccatctctgctgtccccacccatgtagtatacaggagcccaaatgggtgggacaagtgacacttctttagaaccttacatctaaatcaaagcagcaagcaaaaacttggcccctgttgtcggaatgccagggaagccatgtgactcaccagtgtacggttttctagaaaagacagaagcagttattacagaatgttaggctgcgttctggtattttgaaagtataacacactctgccagctatagtgacataagcatggtatgcccctttgtttcagaaacacacttctgtatttcactcattgggacaatccaacccctatactagtttctacacgcgtccttggctctactggaactgctcttactgatcgattactacttttccctccccatagttaccgtacacgagaagaaattcaggaagtaagaagtaagagtgaccctattatgcttctcaaggacaggatggtgaacagcaatcttgccagtgtggaagaactaaaggtacagtcacttgttcatggtggtttgaaggttggctttaaaagttgccacccctgcgcgtgacagagtttgtgtgggttcctccaagcccagaaagtgatgtcctgggacataaatagttccatagttccaaagtcccttgggtgggggcttttcctttagtttcctctattcaaaattgtattactcttcagatttcagattttggtggactgtgaaccaccatcacagtggcaaagccccacagtagtatggttcttttttcctaaaagtatactgtggatttttaattcataaaatagatacaccctagaaatctgtattccaaaatcttctgaattagcaactgttcgtacttgtagttaaagagttacaccagcaacaggtcctcagcagaactctagttggtacctaagctgctgttcattctaaaaccttttacactgttacctaatttttaggaaattgatgtggaagtgaggaaggagattgaggatgctgcccagtttgccacggccgatcctgagccacctttggaagagctgggctaccacatctactccagcgacccaccttttgaagttcgtggtgccaatcagtggatcaagtttaagtcagtcagttaaggggaggagaaggagaggttataccttcagggggctaccagacagtgttctcaacttggttaaggaggaagaaaacccagtcaatgaaattcaatgaaattcttggaaacttccattaagtgtgtagattgagcaggtagtaattgcatgcagtttgtacattagtgcattaaaagatgaattattgagtgcttaaagattattttgacttaaatagtatactttgaacatactctaattatgaaaggaagaacaattcctgtatgcctgtttcccctgcccccaagccccctttaattgggaggaagaccattatggaaggggacccatcacagcaattctaccaaccatagcacccaccccgagcagcgctggtgctgcagcctgttcgcgctgaccatttctctacaagatacaatatttattatcaggcaagaggacagttccattttaaaataagacttttgtaatcattccaattttgtaatcatttcaaaggccacataacttagttttctctacttacacattcagtataaatatgaagctattttctgttcatatcaaacattaactacaaggcacattcgtatcagttttgtgtttctcaaattgaagtaccataccagttctgaggcagtgtcccagcttccatgtttgttaaataccccttgtttgtttcaccattccagcaagtgctgaagggtgtactttttttgagacagggtcgggctctgttgcccaggctggagtgcagtggtgtgatcatggctcactgcagcctccacacctcctgggctcaagcaatcctcccacctcagcctcctgatagctgggactacaagtgaatttcctaatattccgggaggtcaaaaccaaggctcactgttttcacaatacacacagttctatgtttataaataacaggtttcaaaagaaactcaggacagtatttaaaacaagttcttaaactattaattgaacaatggcatttttaaatatgtaaacacagcggaattc

SEQ ID NO: 1539 - protein, 390 aa, Homo sapiens
MRKMLAAVSRVLSGASQKPASRVLVASRNFANDATFEIKKCDLHRLEEGPPVTTVLTREDGLKYYRMMQTVRRMELKADQLYKQKIIRGFCHLCDGQEACCVGLEAGINPTDHLITAYRAHGFTFTRGLSVREILAELTGRKGGCAKGKGGSMHMYAKNFYGGNGIVGAQVPLGAGIALACKYNGKDEVCLTLYGDGAANQGQIFEAYNMAALWKLPCIFICENNRYGMGTSVERAAASTDYYKRGDFIPGLRVDGMDILCVREATRFAAAYCRSGKGPILMELQTYRYHGHSMSDPGVSYRTREEIQEVRSKSDPIMLLKDRMVNSNLASVEELKEIDVEVRKEIEDAAQFATADPEPPLEELGYHIYSSDPPFEVRGANQWIKFKSVS

SEQ ID NO: 1540 - DNA, 478 bp, Homo sapiens
gaacgtggacaagactcgcagattttcttgggagagtcactccagccctgaagtctgtctctagctcctctgtgactcagaggggaaataccaacctcccagtcttccactgcccacagggatagggagggtgttgagaatcctaaactcgaaccgtttcactgtcagcctgccctcggcgacccatcactgggtatgctattgtacatagaggaaacctgggctagccccacccagagcgcagaggagggggcaccgacagcgctgcgagccaggctctgggtagtggctgaggccagaggcccatcgcctgcccctgtccaactgagatggccttcaggagcctaggtttgaacagcagatgctgtcccaggaagggctagggacatcggaggggacctgcccccacaccctctgctcagcccctggactcagccttgcctgtcttttcctgctgctcccagggggaggtgtcaga

SEQ ID NO: 1541 - DNA, 2776 bp, Homo sapiens
aggaggaggaggaagatcaggaggaggaggaagaagaggaaaaaagagaaaaagaagaaatatcacagaaaaaaaaattcttcgttgtctagactgggctttttttcccccctaaaaaatagcatattggagaattgggagaagtctctttggtttggaaaaaaaaaaaaggaatcttcagcctagatcactttcttatccggactgggatattaaatatacgacacatccaggagtttattggagcgcagactgatggcgcaaaggtacgatgagctgccccattacggcgggatggacggagtaggggttcccgcttccatgtacggagaccctcacgcgccgcggccgatccccccggttcaccacctgaaccacgggccgccgctccacgccacacagcactacggcgcgcacgccccgcaccccaatgtcatgccggccagtatgggatccgctgtcaacgacgccttgaagcgggacaaggacgcgatctatgggcacccgttgtttcctctgttagctctggtctttgagaagtgcgagctggcgacctgcactccccgggaacctggagtggctggcggagacgtctgctcctccgactccttcaacgaggacatcgcggtcttcgccaagcaggttcgcgccgaaaagccacttttttcctcaaatccagagctggacaatttgatgatacaagcaatacaagtactaaggtttcatcttttggagttagaaaaggtccacgaactgtgcgataacttctgccaccgatacattagctgtttgaaggggaaaatgcccatcgacctcgtcattgatgaaagagacggcagctccaagtcagatcatgaagaactttcaggctcctccacaaatctcgctgaccataacccttcttcttggcgagaccacgatgatgcaacctcaacccactcagcaggcaccccagggccctccagtgggggccatgcttcccagagcggagacaacagcagtgagcaaggggatggtttagacaacagtgtagcttcacctggtacaggtgacgatgatgatccggataaggacaaaaaacgccagaagaaaagaggcattttccccaaagtagcaacaaatatcatgagagcatggctcttccagcatctcacacatccgtacccttccgaagagcagaagaaacagttagcgcaagacacaggacttacaattctccaagtaaacaactggtttattaatgccagaagaagaatagtacagcccatgattgaccagtcaaatcgagcaggttttcttcttgatccttcagtgagccaaggagcagcatatagtccagagggtcagcccatggggagctttgtgttggatggtcagcaacacatggggatccggcctgcaggtttgcagagcatgccaggggactacgtttctcagggtggtcctatgggaatgagtatggcacagccaagttacactcctccccagatgaccccacaccctactcaattaagacatggacccccaatgcattcatatttgccaagccatccccaccacccagccatgatgatgcacggaggaccccctacccaccctggaatgactatgtcagcacagagccccacaatgttaaattctgtagatcccaatgttggcggacaggttatggacattcatgcccaatagtataagggaactcaagggaaaaggaaacacacgcaaaaactattttaagactttctgaactttgaccagatgttgacacttaatatgaaattccagacagctgtgattattttttacttttgtcatttttcatcaagcaacagaggaccaatgcaacaagaacacaaatgtgaaatcatgggctgactgagacaattctgtccatgtaaagatcctctggaaaaagactccgagagttataactactgtagtataaatataggaactaagttaaacttgtacatttctgttgatcacgccgttatgttgcctcaaatagttttagaagagaaaaaaaaatatatccttgttttccacactatgtgtgttgttcccaaaagaatgactgttttggttcatcagtgaattcaccatccaggagagactgtggtatatattttaaacctgttgggccaatgagaaaagaaccacactggagatcatgatgaacttttggctgaacctcatcactcgaactccagcttcagaatgtgttttcatgcccggcctttgttcctccataaatgtgtcctttagtttcaaacagatctttatagttcgtgcttcataagccaattcttattattatttttgggggactcttcttcaaagagcttgccaatgaagatttaaagacagagcaggagcttcttccaggagttctgagccttggttgtggacaaaacaatcttaagttgggcagctttcctcaacacaaaaaaaagttattaatggtcattgaaccataactaggactttatcagaaactcaaagcttgggggataaaaaggagcaagagaatactgtaacaaacttcgtacagagttcggtctattaattgtttcatgttagatattctatgtgtttacctcaattgaaaaaaaaaagaatgtttttgctagtatcagatctgctgtggaattggtattgtatgtccatgaattcttcttttctcagcacgtgttcctcactagaagaaaatgctgttacctttaagctttgtcaaatttacattaaaatacttgtatgaggactgtgacgttatgtt

SEQ ID NO: 1542 - protein, 477 aa, Homo sapiens
MAQRYDELPHYGGMDGVGVPASMYGDPHAPRPIPPVHHLNHGPPLHATQHYGAHAPHPNVMPASMGSAVNDALKRDKDAIYGHPLFPLLALVFEKCELATCTPREPGVAGGDVCSSDSFNEDIAVFAKQVRAEKPLFSSNPELDNLMIQAIQVLRFHLLELEKVHELCDNFCHRYISCLKGKMPIDLVIDERDGSSKSDHEELSGSSTNLADHNPSSWRDHDDATSTHSAGTPGPSSGGHASQSGDNSSEQGDGLDNSVASPGTGDDDDPDKDKKRQKKRGIFPKVATNIMRAWLFQHLTHPYPSEEQKKQLAQDTGLTILQVNNWFINARRRIVQPMIDQSNRAGFLLDPSVSQGAAYSPEGQPMGSFVLDGQQHMGIRPAGLQSMPGDYVSQGGPMGMSMAQPSYTPPQMTPHPTQLRHGPPMHSYLPSHPHHPAMMMHGGPPTHPGMTMSAQSPTMLNSVDPNVGGQVMDIHAQ

SEQ ID NO: 1543 - DNA, 2734 bp, Homo sapiens
gctcggcgctgtagccgccgctgccgccgctgctcttggctcggggacgcgggcgggcgctccgagaggctctggtgcctgcggctgctgctctcctccgacgcccggggctgcggcgctccgggtcccggcccctgtcccggcatctctcgggtccctgagccccggccacgggtcccgcgtccggccggagagaacgcactcagctgctcgagccgccccgggctcgcgcccccgggccatgaagaggggcccgtgaggcgcgcgcggagtcggaggaagaggagggaggagggaggccgaggaggagggcgcgggaggcggaggatgccgccgcggctgctgccgccgccgccacccgcgggtccccggcgaccctgactccagacccgaggatggagccggcgctgggcgctgcagctgctcccggcgcgtccccgaccaggtagctggtgtcacttcggtgtggttggaagaagactttctccccagctgcattcccggaggcgccctttcgacctggaggccgggtctgctggccacagggctgccgcactggctgggactgccagctgggcctggagacgctggtggctgtggactccccagcttggagcagtccctctttgacctcaccccttggagaagcaaccccatgaaggtgcccagccatgcaatgttcctggaaggccgtcctcctccttgccctggcctccattgccatccagtacacggccatccgcaccttcaccgccaagtcctttcacacctgccccgggctggcagaggccgggctggccgagcgactgtgcgaggagagccccaccttcgcctacaacctctcccgcaagacccacatcctcatcctggccaccacgcgcagcggctcctccttcgtgggccagctcttcaaccagcacctggacgtcttctacctgtttgagcccctctaccacgtccagaacacgctcatcccccgcttcacccagggcaagagcccggccgaccggcgggtcatgctaggcgccagccgcgacctcctgcggagcctctacgactgcgacctctacttcctggagaactacatcaagccgccgccggtcaaccacaccaccgacaggatcttccgccgcggggccagccgggtcctctgctcccggcctgtgtgcgaccctccggggccagccgacctggtcctggaggagggggactgtgtgcgcaagtgcgggctactcaacctgaccgtggcggccgaggcgtgccgcgagcgcagccacgtggccatcaagacggtgcgcgtgcccgaggtgaacgacctgcgcgccctggtggaagacccgcgattaaacctcaaggtcatccagctggtccgagacccccgcggcattctggcttcgcgcagcgagaccttccgcgacacgtaccggctctggcggctctggtacggcaccgggaggaaaccctacaacctggacgtgacgcagctgaccacggtgtgcgaggacttctccaactccgtgtccaccggcctcatgcggcccccgtggctcaagggcaagtacatgttggtgcgctacgaggacctggctcggaaccctatgaagaagaccgaggagatctacgggttcctgggcatcccgctggacagccacgtggcccgctggatccagaacaacacgcggggcgaccccaccctgggcaagcacaaatacggcaccgtgcgaaactcggcggccacggccgagaagtggcgcttccgcctctcctacgacatcgtggcctttgcccagaacgcctgccagcaggtgctggcccagctgggctacaagatcgccgcctcggaggaggagctgaagaacccctcggtcagcctggtggaggagcgggacttccgccccttctcgtgacccgggcggtgcgggtgggggcgggaggcgcaaggtgtcggttttgataaaatggaccgtttttaactgttgccttattaacccctccctctcccacctcatcttcgtgtccttcctgcccccagctcaccccactcccttctgccccttttttgtctctgaaatttgcactacgtcttggacgggaatcactggggcagagggcgcctgaagtagggtcccgccccccccaccccattcagacacatggatgttgggtctctgtgcggacggtgacaatgtttacaagcaccacatttacacatccacacacgcacacgggcactcgcgaggcgacttctcaagcttttgaatgggtgagtggtcgggtatctagtttttgcactgtcttactattcaaggtaagaggatacaaacaagaggaccacttgtctctaatttatgaatggtgtccatcctttccccatccctgcctcctgcccctgacgcccatttccccccttagagcagcgaaactgccccctcctgcccgcccttgcctgtcggtgaggcaggtttttactgtgaggtgaacgtggacctgtttctgtttccagtctgtggtgatgctgtctgtctgtctgagtctcgtggccgcccctggaccagtgatgactgatgaatcttatgagcttctgattgatctcggggtccatctgtgatatttctttgtgccaaaaagaaaaaaaaagagtggatcagtttgctaaatgaacattgaaattgaaatgctttatctgtgttttctgtaaataaaagagtgcaataatcgaaaaaaaaaaaaaaaa

SEQ ID NO: 1544 - protein, 411 aa, Homo sapiens
MQCSWKAVLLLALASIAIQYTAIRTFTAKSFHTCPGLAEAGLAERLCEESPTFAYNLSRKTHILILATTRSGSSFVGQLFNQHLDVFYLFEPLYHVQNTLIPRFTQGKSPADRRVMLGASRDLLRSLYDCDLYFLENYIKPPPVNHTTDRIFRRGASRVLCSRPVCDPPGPADLVLEEGDCVRKCGLLNLTVAAEACRERSHVAIKTVRVPEVNDLRALVEDPRLNLKVIQLVRDPRGILASRSETFRDTYRLWRLWYGTGRKPYNLDVTQLTTVCEDFSNSVSTGLMRPPWLKGKYMLVRYEDLARNPMKKTEEIYGFLGIPLDSHVARWIQNNTRGDPTLGKHKYGTVRNSAATAEKWRFRLSYDIVAFAQNACQQVLAQLGYKIAASEEELKNPSVSLVEERDFRPFS

SEQ ID NO: 1545 - DNA, 5563 bp, Homo sapiens
cggctcggccgcggggcgcgcaggcggctgctgggcggcctcggtgcgcgcctcccgccttcccagagacgtggcgcgaggcccgggccctgagcacctatcgcggggatccccggcgccaggagggggtgcagccggtgggcagcgccgcgcagggaggggccgcagcatcctcgccccccagcgcgcccgggcccgagaggaggaggccggggctctccgggcctcccgccgcttagcctgatgctggaaggacgaaggtgagtgaagatggcagagaggacgtgaccagcactcacccttgtccacctgcccagtggcaccgccatgcagaagcccagcggcctgaagccccccggccgtggggggaagcactccagccccatgggccggacatctactgggtcagcttcatcctcggcggcggtggccgctagctccaaggaaggctccccactgcacaaacagtcatctggaccctcctcctccccggccgcagctgctgcccccgagaagccgggccccaaggcggcggaagtgggggatgacttcctgggggactttgtggtgggcgagcgggtgtgggtgaacggcgtgaagccaggcgtggtgcagtatctgggagagacgcagttcgcaccgggccagtgggctggcgtggtgctggacgacccggtgggcaagaatgatggcgcggtgggcggcgtgcgctacttcgagtgcccggccctccagggtatcttcacgcggccctccaagctgacccggcagcccacggccgagggctcggggagtgatgcccactccgtggagtcgctgactgcccagaacctgtcattgcattcgggcacggccacgcccccgctgaccagccgcgtcatccccctgcgggagagcgtcctcaacagctccgtgaagactggcaacgagtcgggatccaacctctcagacagcggctctgtgaagcggggcgaaaaggacctgcgcctgggggaccgcgtgctggttggcgggacgaagactggcgtggtgcggtacgtgggggagacagactttgccaagggcgagtggtgtggcgtggagctggacgagccccttgggaagaatgatggggcggtggcgggcaccaggtacttccagtgcccacccaagtttggtctcttcgcgcccatccacaaagtgatccgtatcggcttcccatctaccagcccagccaaggccaagaagaccaagcgtatggccatgggtgtgtcagcactgacccacagtcccagcagttcctccatcagctccgtcagctctgtggcctcctccgtggggggtcggcccagccgcagtggcctgctcacggagacctcttcacgctacgcccgcaagatctcgggcaccacggccttgcaggaggcactgaaggagaagcagcagcacattgagcagctgctggctgaacgagacctggaacgggctgaggtggccaaggccacaagccacatctgcgaggtggagaaggagattgccctgctcaaggcacagcatgagcagtatgttgcagaagccgaggagaagctgcagcgagcccggctgctcgtggagagcgtgcggaaagagaaggtggacctgtccaaccagctggaggaggagaggaggaaggtggaggatctgcagttccgcgtggaggaggagtccatcaccaagggagacctggagacccagacgcagctggagcacgcgcgcattggggagctggaacagagcctgctactggagaaggcgcaggccgagcggctgctccgagaattagcggacaacaggctgaccacagtggccgagaagtcgcgcgtgctgcagctggaggaggagctcaccctgcgccgaggtgaaatcgaggagctccagcagtgcctgttgcactcgggtcccccacctccggaccacccagacgccgccgagatcctgcggctacgggagcggctgctctcggccagcaaggaacaccagagggagagtggggtgctgcgggataaatacgagaaggccctgaaggcctaccaggcggaggtggacaagctccgcgcggccaacgagaagtacgcacaggaggtggcgggcctgaaggacaaggttcagcaggccaccagcgagaacatggggctaatggacaactggaaatccaagctggactcgctggcctcggaccaccagaagtccctggaggacctcaaagccaccctgaactcgggcccaggcgcccagcagaaggagatcggcgagctgaaggcagtgatggagggcatcaagatggagcaccagctggagctgggtaacttgcaggccaagcatgacctggagaccgccatgcacgtgaaggagaaggaggccctgcgagagaagctgcaggaggcccaggaggagctggctgggctgcagcggcactggcgggcccagctggaggtgcaagccagccagcaccggctggagctgcaggaggcccaggaccagcgccgggatgccgagctgcgtgtgcacgagctggaaaaactggacgtggagtaccggggccaggcgcaggctatcgagttcctcaaggagcagatctcgctggccgagaagaagatgttggactacgagcggctgcagcgggcagaagcccagggcaaacaggaggtcgagagtttgcgggagaagctcctggtggctgagaacagactccaggcggtcgaggccctgtgctcctcccagcacacccacatgattgagtcgaatgacatttcagaggagacgatcaggacgaaggaaactgtggagggcctgcaggacaagctgaacaagagggacaaagaggtgacagccttgacctcccagaccgagatgctcagggcccaagtaagtgcgctggagagcaagtgtaagtcaggcgagaagaaggtggacgccctcctgaaggagaagcggcgcctggaggcagagctggagaccgtgtcccggaagacccatgacgcctcgggccagctagtcctcatcagccaggagctgctgcggaaggagcggagcctgaacgaactgcgggtgttgctgctggaggccaatcgtcactccccagggccggagagggacctgagccgtgaggtacacaaggctgagtggcggatcaaggagcagaaactcaaggatgacatccggggcctgcgtgaaaagctgaccgggctggacaaagagaaatccctgtcggatcagaggcgctactccctcatcgaccggtcctcggcgcccgagcttctgcggctgcagcaccagctgatgagcacggaggacgccctgcgggatgcgctggaccaggctcagcaggtggagaagctgatggaggccatgaggagctgccctgacaaggcccagaccatcggcaattccggttctgcaaacggcatccaccagcaggacaaagctcagaaacaagaggacaagcactgatcctgaggggatactgtggagcagcccagtccacaccagagccccacgcggctgcccggcagtacctcctccaggcaggagccgggactgtcactttggagacaaaacagtgtttgtaacaataacgtactcaccgccgcggacaatcccccaccccgatccctcgccagaccaggacgcttcctcaagcccagccttctacagagagtgtgaacggtacagccctggcctgacccggggaccttcagcctggacacccggcagcttctggagtttgtcagtggaggcagaggggatccggccaggcccctctgtccagaaggagctgccctgaggaccatcttagcggccctgtcctctttttccgcccattctccctcgggtctccccagaggggccggcgggggctggggagggggtaagtttatccatgcagacaccaagggggagcatccagtctttaagagccaagtgggggccccttttccgaagccacttccaggccaaggcagtcgccagggcttcttgtccccaccttctgaaccttcttcaaacagtagtacaagctcccctcagccagcctgcctgcccagcgaggcccccaggttcaaggtgttggcgggggcggagggcaggggaacgggatccttctcccgctgcccaccaacaccaacacacacacacctctaagctgctggccgaagatgtcaccaaggccaaagacacagtattatgaaggtttggaaacccctctcctcacctcccaccgtgaccttgggcaaaccctggctcggagcccagggcagaggcagctcagagtggaggctctaggcaggtttgacaaaggtcagtaatacggtttcccctggggttgaccagatgttccaaaatatctgcatccacctggagatgcagctaagtgggtccttatgtacacaccacgttcacacacacacagagggaccacgtgtgcacgcatgaccgtgtgggtggcggcgtttgctgtgaaccatgctcaggccacacagagacacatacttggtttctgggactgagacccaggcctggcaggaccgtgcctacagatactgcaaacgttcctacagcctagaggtgcgtatacacacccaagtacacgcagccaggcattcaggggtgtgtttgccacatggagcatcccttcctggtcttgccaggcacctgcacagagcgtctccagccccatctcctaacgggggctgggggtaagagaaatctaactgcgctcccccaacccctcgccctgccatcttcccctcaagcctgctaagttatcccaggcctgtgcgtggtggaaaaagccagccttggccctgcagcctccacctcgccgctgggggaccaacaggttgcttacagctttgcaccccggcatcagcacaggggtccctgccccaccctccggcagctcagggagtgttttcctgtgaggcctcccccatcagtggaccagagggagaagcccgatgccccatcccggctttcccgtaacgcacaggacacgtgtgcaattcataggaacggcccagatcgccctcatgagtgccacctggtacaggtaggtggcgctcacgttcctgcccaaatgcagcccatcggggagtcacagtcagtccccccggcccccctcccagtccctgttggctttcggtagctctcgcatgcagttctattaacagccgtctagaagcgatgctttagtggcctaacccagggtcaaatacagctctttctagcaaaatcaggcagctctgccccatcggtaggggcaccgattagtctactaacagccagaggtccatctaggagggtgccgggaggagctgagcccccggaggtgggctcctggtgacgggtgtccaagaagcggtttccttgggagcttctgcctccgtgggcctctcagcccgccccgtgtggccgcccgggtgtggctcagccatgtcccctccccaggtccttcattcacccctcccctccccacagtggaattgttgaagtgtggcgagtctgtgctcgggacaataaagcttgtgacaggtccaggaaaaaaaaa

SEQ ID NO: 1546 - protein, 1046 aa, Homo sapiens
MQKPSGLKPPGRGGKHSSPMGRTSTGSASSSAAVAASSKEGSPLHKQSSGPSSSPAAAAAPEKPGPKAAEVGDDFLGDFVVGERVWVNGVKPGVVQYLGETQFAPGQWAGVVLDDPVGKNDGAVGGVRYFECPALQGIFTRPSKLTRQPTAEGSGSDAHSVESLTAQNLSLHSGTATPPLTSRVIPLRESVLNSSVKTGNESGSNLSDSGSVKRGEKDLRLGDRVLVGGTKTGVVRYVGETDFAKGEWCGVELDEPLGKNDGAVAGTRYFQCPPKFGLFAPIHKVIRIGFPSTSPAKAKKTKRMAMGVSALTHSPSSSSISSVSSVASSVGGRPSRSGLLTETSSRYARKISGTTALQEALKEKQQHIEQLLAERDLERAEVAKATSHICEVEKEIALLKAQHEQYVAEAEEKLQRARLLVESVRKEKVDLSNQLEEERRKVEDLQFRVEEESITKGDLETQTQLEHARIGELEQSLLLEKAQAERLLRELADNRLTTVAEKSRVLQLEEELTLRRGEIEELQQCLLHSGPPPPDHPDAAEILRLRERLLSASKEHQRESGVLRDKYEKALKAYQAEVDKLRAANEKYAQEVAGLKDKVQQATSENMGLMDNWKSKLDSLASDHQKSLEDLKATLNSGPGAQQKEIGELKAVMEGIKMEHQLELGNLQAKHDLETAMHVKEKEALREKLQEAQEELAGLQRHWRAQLEVQASQHRLELQEAQDQRRDAELRVHELEKLDVEYRGQAQAIEFLKEQISLAEKKMLDYERLQRAEAQGKQEVESLREKLLVAENRLQAVEALCSSQHTHMIESNDISEETIRTKETVEGLQDKLNKRDKEVTALTSQTEMLRAQVSALESKCKSGEKKVDALLKEKRRLEAELETVSRKTHDASGQLVLISQELLRKERSLNELRVLLLEANRHSPGPERDLSREVHKAEWRIKEQKLKDDIRGLREKLTGLDKEKSLSDQRRYSLIDRSSAPELLRLQHQLMSTEDALRDALDQAQQVEKLMEAMRSCPDKAQTIGNSGSANGIHQQDKAQKQEDKH

SEQ ID NO: 1547 - DNA, 568 bp, Homo sapiens
gcggccgccgagccagtgccccgcgggggtaacagatgaagcacatctggacagctgtgcgacctcctcgcgggccgacgtcagccgagcacgtcccccacgtcctctccttctcgccacttattatttattcgttttcccaaagaagcgactagggacccaagtttaaaaattcccccccccccacccaatgcgagacgtggccagatcccatccaacacacggtttaattttcatggggctctgggatcaaaagaacagaaacagcaacaacaaaagcccagccgctgtctgattttaagctggcaaagtgggaaaaataaagtgttgagtaaacagaccaagttggatcatggggaatttcagaggtcatgccctccctggaaccttcttttttattattggtctttggtggtgtacaaagagtattctgaagtatatctgcaaaaagcaaaagcgaacctgctatcttggttgcaaaacattattctatcgattggaaattttggagggaattaccatagttggcatggctttaactggccatggctgggagcagtttattccc

SEQ ID NO: 1548 - DNA, 1835 bp, Homo sapiens
ggagctgcgggctgcgtggccgggatgagcgccagcacgggcggtggtggggacagcggcggcagcggcggcagtagcagcagctcacaggcctcctgcgggcccgagtcctcgggctccgaactagccctggccacaccggtgcctcagatgctgcagggccttctgggctccgacgacgaggaacaggaagaccccaaagactactgcaagggcggctaccaccctgtgaagatcggcgacgtgttcaatgggcggtaccacgtggtgcgcaaactgggctggggccacttctccaccgtctggctctgctgggacatccagcgcaagcgctttgtggccctcaaagtggtgaagagtgcggggcattacacggagacagctgtggatgagatcaagctcctgaaatgtgtccgggacagcgaccccagtgaccccaaaagagagaccattgtccagctcattgatgacttcaggatctcaggagtcaatggagtccatgtgtgcatggtgctggaggtgctgggccaccagctcctcaaatggatcatcaagtccaactaccagggcctgcccgtgccctgcgtgaagagcatcgtgaggcaggtgctgcacggcctggactacctccacaccaagtgcaagatcatccacacggacatcaagcccgagaacatcttgctgtgtgtgggggacgcttacatcaggcgcctggctgccgaggccacggagtggcaacaggcaggggcgccgcccccctcccgctccatagtcagcactgccccccaggaggtcttgaccggtaagctgtccaaaaacaagaggaagaagatgaggcgcaaacggaaacagcagaagcggctgctggaggagcggctgcgggacctgcagaggctggaggccatggaggctgccacccaggctgaggactctggcttgagactagacgggggcagcggctccacatcctcttcaggcttctccggctccctcttctctcctgcctcctgctccatcctctccggctcgtccaatcagcgagagaccgggggcctcctgtcgcctagcacaccattcggtgcctcgaacctcctggtgaaccccctggagccccaaaatgcagataagatcaagatcaagatcgcagacctgggcaacgcctgctgggtgcacaagcacttcacggaagacatccagactcggcagtaccgggccgtcgaggtgctgatcggcgccgaatacggccccccggcagacatctggagcacagcctgcatggccttcgagctggccactggtgactacctgttcgagccgcattctggagaagactacagtcgtgatgaggaccacatcgctcacatagtggagcttctgggggacatccccccagccttcgccctctcaggccgctattcccgggagttcttcaaccggagaggagagctgcggcacatccacaatctcaagcactggggcctgtacgaggtactcatggaaaagtacgagtggcccctagagcaggccacacagttcagcgcctttctgctgcccatgatggagtacatccccgaaaagcgggccagtgccgctgactgcctccagcacccctggctcaacccctaggcccggctgtggctccacctccagctctccgtgccttaagggaaaagcgggacagctcccaccaccctgctgggcgccagttctccacaaccacagggcagagagacgctggagccaggcccggctctcagagcgtgttctgcctgagacccccgtgagggctctcggagaaagtgtgtgtattcctttcttaataaagtgtggactga

SEQ ID NO: 1549 - protein, 533 aa, Homo sapiens
MSASTGGGGDSGGSGGSSSSSQASCGPESSGSELALATPVPQMLQGLLGSDDEEQEDPKDYCKGGYHPVKIGDVFNGRYHVVRKLGWGHFSTVWLCWDIQRKRFVALKVVKSAGHYTETAVDEIKLLKCVRDSDPSDPKRETIVQLIDDFRISGVNGVHVCMVLEVLGHQLLKWIIKSNYQGLPVPCVKSIVRQVLHGLDYLHTKCKIIHTDIKPENILLCVGDAYIRRLAAEATEWQQAGAPPPSRSIVSTAPQEVLTGKLSKNKRKKMRRKRKQQKRLLEERLRDLQRLEAMEAATQAEDSGLRLDGGSGSTSSSGFSGSLFSPASCSILSGSSNQRETGGLLSPSTPFGASNLLVNPLEPQNADKIKIKIADLGNACWVHKHFTEDIQTRQYRAVEVLIGAEYGPPADIWSTACMAFELATGDYLFEPHSGEDYSRDEDHIAHIVELLGDIPPAFALSGRYSREFFNRRGELRHIHNLKHWGLYEVLMEKYEWPLEQATQFSAFLLPMMEYIPEKRASAADCLQHPWLNP

SEQ ID NO: 1550 - DNA, 377 bp, Homo sapiens
  misc_feature (29)..(31): n is a, c, g, or t
  misc_feature (49)..(49): n is a, c, g, or t
  misc_feature (85)..(85): n is a, c, g, or t
  misc_feature (92)..(92): n is a, c, g, or t
  misc_feature (104)..(104): n is a, c, g, or t
  misc_feature (118)..(118): n is a, c, g, or t
  misc_feature (126)..(127): n is a, c, g, or t
  misc_feature (140)..(140): n is a, c, g, or t
  misc_feature (325)..(325): n is a, c, g, or t
  misc_feature (363)..(363): n is a, c, g, or t
cttggagagttctcgggttcgtgaacttnnnggaggcgcaatgagctgnattaacctgcccactgtgctgcctggttcccccagnaggaccnggggggcagatnccaggtgattcttngggcccgnntgttcttaggganaaaggagagagttgatgagacgcgtccgtcgtttccagattgctcagtacaagtgcctggtgatcaagtatgccaaagacactcgctgcagcaggagcttctgcacacatgaccggaacaccatggaggcactggccggctggctgctccgagacgtggtccaggaggccctgggcgtggttgtnataggcatggacgaggggcagtttttgcgtgacatggnggagttgtgggagg

SEQ ID NO: 1551 - DNA, 1485 bp, Homo sapiens
tcagccaattagagctccagttgtcactcctacccacactgggcctgggggtgaagggaagtgtttattaggggtacatgtgaagccgtccagaagtgtcagagtctttgtagctttgaaagtcacctaggttatttgggcatgctctcctgagtcctctgctagttaagctctctgaaaagaaggtggcagacccggtttgctgatcgccccagggatcaggaggctgatcccaaagttgtcagatggagagtaaatacaaggagatactcttgctaacaggcctggataacatcactgatgaggaactggataggtttaagttctttctttcagacgagtttaatattgccacaggcaaactacatactgcaaacagaatacaagtagctaccttgatgattcaaaatgctggggcggtgtctgcagtgatgaagaccattcgtatttttcagaagttgaattatatgcttttggcaaaacgtcttcaggaggagaaggagaaagttgataagcaatacaaatcggtaacaaaaccaaagccactaagtcaagctgaaatgagtcctgctgcatctgcagccatcagaaatgatgtcgcaaagcaacgtgctgcaccaaaagtctctcctcatgttaagcctgaacagaaacagatggtggcccagcaggaatctatcagagaagggtttcagaagcgctgtttgccagttatggtactgaaagcaaagaagcccttcacgtttgagacccaagaaggcaagcaggagatgtttcatgctacagtggctacagaaaaggaattcttctttgtaaaagtttttaatacactgctgaaagataaattcattccaaagagaataattataatagcaagatattatcggcacagtggtttcttagaggtaaatagcgcctcacgtgtgttagatgctgaatctgaccaaaaggttaatgtcccgctgaacattatcagaaaagctggtgaaaccccgaagatcaacacgcttcaaactcagccccttggaacaattgtgaatggtttgtttgtagtccagaaggtaacagaaaagaagaaaaacatattatttgacctaagtgacaacactgggaaaatggaagtactgggggttagaaacgaggacacaatgaaatgtaaggaaggagataaggttcgacttacattcttcacactgtcaaaaaatggagaaaaactacagctgacatctggagttcatagcaccataaaggttattaaggccaaaaaaaaaacatagagaagtaaaaaggaccaattcaagccaactggtctaagcagcatttaattgaagaatatgtgatacagcctcttcaatcagattgtaagttacctgaaagctgcagttcacaggctcctctctccaccaaattaggatagaataattgctggataaacaaattcagaatatcaacagatgatcacaataaacatctgtttctcattcc

SEQ ID NO: 1552 - protein, 343 aa, Homo sapiens
MESKYKEILLLTGLDNITDEELDRFKFFLSDEFNIATGKLHTANRIQVATLMIQNAGAVSAVMKTIRIFQKLNYMLLAKRLQEEKEKVDKQYKSVTKPKPLSQAEMSPAASAAIRNDVAKQRAAPKVSPHVKPEQKQMVAQQESIREGFQKRCLPVMVLKAKKPFTFETQEGKQEMFHATVATEKEFFFVKVFNTLLKDKFIPKRIIIIARYYRHSGFLEVNSASRVLDAESDQKVNVPLNIIRKAGETPKINTLQTQPLGTIVNGLFVVQKVTEKKKNILFDLSDNTGKMEVLGVRNEDTMKCKEGDKVRLTFFTLSKNGEKLQLTSGVHSTIKVIKAKKKT

SEQ ID NO: 1553 - DNA, 384 bp, Homo sapiens
ttttttttttttttttttttttttttttttttttttaagagcaggatgataatttactttcaacttctaacaggatttgtaaacaccatgataaatggggagaggcacaacgctgcattcctccagcgggtcctctgaacacaccacgtttcggcatcagttggcttaaatcattcatttcaaatcaggactgaaattctccagtgttcctgtcaggcacccttcccatctgatcccctggaaaggatatgtcagtcgaagtcacaggtaacacggtgtattaagacttgagagcgttgatatcaaatccattaactatgcttttggttgaaggcggtactcgcaaatatgtagtaagcaaagggacgattttgggaaaagggg

SEQ ID NO: 1554 - DNA, 8018 bp, Homo sapiens
cgccgctctgagtccagcctcctactgagaacagtccctcccttgtgcgggtcgcacggctagccgcaggttcggccacgtcaaatccattttctaaaaaagcagggagcagagctctctcttcgccgccgacgcagaaaggagctggggaggaaaaagctgctgccttttgcgctggagattcgtgggcaaggcttctcattttcccaggctgcttcccctcccgggtgaggagcgtcctgagactaaggaaagagcctggaaaatggagcagacctggacgagagattattttgcagaggatgatggggagatggtacccagaacgagtcacacagcagcttttcttagtgacactaaagatcgaggccctccagtgcagtcacagatctggagaagtggtgaaaaggtcccgtttgtgcagacatattccttgagagcatttgagaaaccccctcaggtacagacccaggctcttcgagactttgagaagcacctcaatgacctgaagaaggagaacttcagcctcaagctgcgcatctacttcctggaggagcgcatgcaacagaagtatgaggccagccgggaggacatctacaagcggaacattgagctgaaggttgaagtggagagcttgaaacgagaactccaggacaagaaacagcatctggataaaacatgggctgatgtggagaatctcaacagtcagaatgaagctgagctccgacgccagtttgaggagcgacagcaggagacggagcatgtttatgagctcttggagaataagatccagcttctgcaggaggaatccaggctagcaaagaatgaagctgcgcggatggcagctctggtggaagcagagaaggagtgtaacctggagctctcagagaaactgaagggagtcaccaaaaactgggaagatgtaccaggagaccaggtcaagcccgaccaatacactgaggccctggcccagagggacaagagaattgaagaactgaatcagagcctggctgcccaggagaggcttgtagaacagctatctcgggagaaacaacaactgctacatctgttggaggagccaactagcatggaagtgcagcccatgactgaagagttgctgaaacaacaaaagctgaattcacatgagaccactataactcagcagtctgtatctgattcccacttggcagaactccaggaaaaaatccagcaaacagaggccaccaacaagattcttcaagagaaacttaatgaaatgagctatgaactaaagtgtgctcaggagtcgtctcaaaagcaagatggtacaattcagaacctcaaggaaactctgaaaagcagggaacgtgagactgaggagttgtaccaggtaattgaaggtcaaaatgacacaatggcaaagcttcgagaaatgctgcaccaaagccagcttggacaacttcacagctcagagggtacttctccagctcagcaacaggtagctctgcttgatcttcagagtgctttattctgcagccaacttgaaatacagaagctccagagggtggtacgacagaaagagcgccaactggctgatgccaaacaatgtgtgcaatttgtagaggctgcagcacacgagagtgaacagcagaaagaggcttcttggaaacataaccaggaattgcgaaaagccttgcagcagctacaagaagaattgcagaataagagccaacagcttcgtgcctgggaggctgaaaaatacaatgagattcgaacccaggaacaaaacatccagcacctaaaccatagtctgagtcacaaggagcagttgcttcaggaatttcgggagctcctacagtatcgagataactcagacaaaacccttgaagcaaatgaaatgttgcttgagaaacttcgccagcgaatacatgataaagctgttgctctggagcgggctatagatgaaaaattctctgctctagaagagaaagaaaaagaactgcgccagcttcgtcttgctgtgagagagcgagatcatgacttagagagactgcgcgatgtcctctcctccaatgaagctactatgcaaagtatggagagtctcctgagggccaaaggcctggaagtggaacagttatctactacctgtcaaaacctccagtggctgaaagaagaaatggaaaccaaatttagccgttggcagaaggaacaagagagtatcattcagcagttacagacgtctcttcatgataggaacaaagaagtggaggatcttagtgcaacactgctctgcaaacttggaccagggcagagtgagatagcagaggagctgtgccagcgtctacagcgaaaggaaaggatgctgcaggaccttctaagtgatcgaaataaacaagtgctggaacatgaaatggagattcaaggcctgcttcagtctgtgagcaccagggagcaggaaagccaagctgctgcagagaagttggtgcaagccttaatggaaagaaattcagaattacaggccctgcgccaatatttaggagggagagactccctgatgtcccaagcacccatctctaaccaacaagctgaagttacccccactggccgtcttggaaaacagactgatcaaggttcaatgcagataccttccagagatgatagcacttcattgactgccaaagaggatgtcagcatacccagatccacattaggagatttggacacagttgcagggctggaaaaagaactgagtaatgccaaagaggaacttgaactcatggctaaaaaagaaagagaaagtcagatggaactttctgctctacagtccatgatggctgtgcaggaagaagagctgcaggtgcaggctgctgatatggagtctctgaccaggaacatacagattaaagaagatctcataaaggacctgcaaatgcaactggttgatcctgaagacataccagctatggaacgcctgacccaggaagtcttacttcttcgggaaaaagttgcttcagtagaatcccagggtcaagaaatttcaggaaaccgaagacaacagttgctgctgatgctagaaggactagtagatgaacggagtcggctcaatgaggccttacaagcagagagacagctctatagcagtctggtgaagttccatgcccatccagagagctctgagagagaccgaactctgcaggtggaactggaaggggctcaggtgttacgcagtcggctagaagaagttcttggaagaagcttggagcgcttaaacaggctggagaccctggccgccattggaggtgcagctgcaggggatgacaccgaagatacaagcactgagttcactgacagtattgaggaggaggctgcacaccatagtcaccagcaacttgtcaaggtggctttggagaaaagtctggcaactgtggagacccagaacccatctttttcccctccttctccgatgggaggggacagtaacaggtgtcttcaggaagaaatgctccacctgagggctgagttccaccagcacttagaagagaagaggaaagctgaggaggaactgaaggagctaaaggctcaaattgaggaagcaggattctcctcagtgtcccacatcaggaacaccatgctgagcctttgccttgagaatgcggagctgaaagagcagatgggagaagcaatgtctgatggatgggagatcgaggaagacaaggagaagggcgagttggataaccagtcccagcctcgtgaccctgggcctcagtcagcgtttagcctaccagggtccacccagcacctgcgctcccagctgtcacaatgcaaacaacgctatcaagatctccaggagaagctgctgctatcagaagccactgtctttgctcaggctaacgagctggagaaatacagagttatgcttacaggtgaatccttggtgaagcaggacagcaagcagatccaggtggacctccaggacctgggctatgagacttgtggccgaagcgagaatgaggctgaacgggaggaaaccaccagtcctgagtgtgaggagcacaacagcctcaaggaaatggtcctgatggaggggctgtgctctgagcagggacgccggggctcaacactggctagttcctctgagaggaagcccttggagaaccagctagggaagcaggaagagttccgggtatatggaaagtcagaaaacatcttggtcctacgaaaggacatcaaagatctgaaggcccagctgcagaatgccaacaaggtcattcaaaacctcaagagccgggtccggtccctctcagttacaagtgattattcgtctagtctggaaagaccccggaagctgagagctgttggcaccttggaggggtcttcacctcatagtgtccctgatgaggatgaggggtggctgtctgatggcactggggctttctactctccagggcttcaggccaaaaaggacctggagagtctcatccagagagtatcccagctggaggcccagctcccaaaaaatggactagaagagaagctggctgaggagctgagatcagcctcgtggcctgggaaatatgattccctgattcaggatcaggcccgggaactgtcttacctacggcaaaaaatacgagaagggagaggtatttgttatcttatcacccggcatgcaaaagatacagtaaaatcttttgaggatctcctaaggagcaatgacattgactactacctgggacagagcttccgggagcaactcgcccagggaagccagctgacagagaggctcaccagcaaactcagcaccaaggatcataaaagtgagaaagatcaagctggacttgagccactggccctcaggctcagcagggagctgcaggagaaggagaaagtgattgaagtcctgcaggccaagctggatgctcggtccctcacaccctccagcagccatgccttgtctgactcccaccgctctcccagcagcacctctttcctgtctgatgaactggaagcctgctctgacatggacatagtcagcgagtacacacactatgaagagaagaaagcttctcccagtcactcagattccatccatcattcgagtcattctgctgtgttgtcttctaaaccatcatcaaccagtgcatctcagggggctaaggccgaatccaacagcaaccccatcagcttgccaactccccagaatacccccaaggaggccaaccaggcccattcaggtgccagcactgttcctcctgcttccacagctacattgctgagcaacgacttggaagccgactcttcctactacctcaactctgcccagcctcactctcctccaaggggcaccatagaactgggaagaatcctagagcctgggtacctgggcagcagtggcaagtgggatgtgatgaggcctcagaaagggagtgtatctggggacctatcctcaggctcctctgtgtaccagcttaactccaaacccacaggggctgacctgctggaagagcatcttggtgaaatccggaacctgcgccagcgcctggaggaatccatctgcatcaatgaccgcctacgggagcaactggaacaccggctgacctctactgctcgtggaaggggatccacttctaacttctacagtcagggcctggagtccatacctcagctctgcaatgagaacagagtcctcagggaagacaatcgaagacttcaggctcaactgagtcatgtttccagagagcactcccaggaaacagaaagcctgagggaggctctgctgtcctctcgatcccaccttcaagagctggaaaaggagctggagcaccagaaggtggaaaggcagcagcttttggaagacttgagggagaagcagcaagaggtcttgcatttcagggaggaacgtctttccctccaggaaaacgactccagactgcagcacaagctggttctcctgcagcaacagtgtgaagagaaacagcagctctttgagtccctccagtcagagctacaaatctacgaggcactttatggcaattccaagaaggggctgaaagcttacagcctggatgcctgtcaccaaatccctttgagcagtgacctgagccacctggtggcagaggtacgagctctgagagggcagctggagcagagcattcaggggaacaattgtctgcgactgcagctgcaacagcagctggagagcggtgctggcaaagccagcctcagcccctcctccattaaccagaacttcccagccagcactgaccctggaaacaagcagctgctcctccaagattcagctgtgtcccctccagtccgggatgttggtatgaattccccagctctggtcttccccagctctgcttcctctactcctggctcagaaacgcccataatcaacagagcaaatggcttgggtttggatacttctccagtaatgaagacccctcccaagctagagggtgatgctactgatggctcctttgccaataagcatggccgccatgtcattggccacattgatgactacagtgccctaagacagcagattgcggagggcaagctgctggtcaaaaagatagtgtctcttgtgagatcagcgtgcagcttccctggccttgaagcccaaggcacagaggtgctaggcagcaaaggtattcatgagcttcggagcagcaccagtgccctgcaccatgccctagaggagtcagcttccctcctcaccatgttctggagagcggccctgccaagcacccacatccctgtgctgcctggcaaagtgggagaatcaacagaaagggaacttctggaactgagaaccaaagtatccaaacaggagcgactccttcagagcacaactgagcatctgaagaacgccaaccagcagaaggagagcatggagcagttcattgtcagccagctaaccagaacacatgatgttttaaagaaggcaaggactaacttagaggtgaaatccctaagggctctgccatgtactccagccttgtgacccttgccttccaggaaccatgcaagaagcgcagccaccagaagtccttaaaacagcaggaaaggtgggcctgtcccccttttgtgcagctacctatctgctgaggagcatctgggcctcattcctccaagtccacgggagggtccagaagagggagtcagagatgtatcctggtggagctgggagaaaggcagaaagcctttctgacggctatggaatacgattagccaaggtccacttggcccagcactaagaaaaagatgcgtagtttgcacagaaggttttgtgatcctgcctctcaacagccccagcagcttgggaactagcaagagcacatttcttgcctcatcagctgtcctgagatggaaaactcagtgaatataggaccctgattccgatgaaaggggcacgtggtcccaatgctggagctcctctggcaggttctaaaagcacactactgagcagcggtgccctgccggacactgctggcgggggctcagtgagcactactcacagatccacacctgaccctgttgggtcgagtcaggctgggccttggtctgcactgtagcacctgtgttctttgagttcacatcatgaatgtggtgacttcccagataccatctcaggcttaacctagcacatcctatttcttttcttctatgatatccaaattggactgacctcacttcaaagttgctgtcccattttgtcaccctatcttatctcggggaaattgcagactgatggccagaccaactctgttgaaattcttgcatagagcaaacctgtgctcatttttaagtggcatgggagaggccccaagcctagtaaagcctagtctgtgtcttcacagtgctggtagaatgtgtttgtgtgtataaatatatgatatagatttatatatgttgctaacgccatatattgaaggccaacataactggtggacagggtgggtgacagaaaatgaaagtctttttggtgattgttaaagcaaaatgtgtataaagaaataaatagtttttctttc

SEQ ID NO: 1555 - protein, 2296 aa, Homo sapiens
KSREQSSLFAADAERSWGGKSCCLLRWRFVGKASHFPRLLPLPGEERPETKERAWKMEQTWTRDYFAEDDGEMVPRTSHTAAFLSDTKDRGPPVQSQIWRSGEKVPFVQTYSLRAFEKPPQVQTQALRDFEKHLNDLKKENFSLKLRIYFLEERMQQKYEASREDIYKRNIELKVEVESLKRELQDKKQHLDKTWADVENLNSQNEAELRRQFEERQQETEHVYELLENKIQLLQEESRLAKNEAARMAALVEAEKECNLELSEKLKGVTKNWEDVPGDQVKPDQYTEALAQRDKRIEELNQSLAAQERLVEQLSREKQQLLHLLEEPTSMEVQPMTEELLKQQKLNSHETTITQQSVSDSHLAELQEKIQQTEATNKILQEKLNEMSYELKCAQESSQKQDGTIQNLKETLKSRERETEELYQVIEGQNDTMAKLREMLHQSQLGQLHSSEGTSPAQQQVALLDLQSALFCSQLEIQKLQRVVRQKERQLADAKQCVQFVEAAAHESEQQKEASWKHNQELRKALQQLQEELQNKSQQLRAWEAEKYNEIRTQEQNIQHLNHSLSHKEQLLQEFRELLQYRDNSDKTLEANEMLLEKLRQRIHDKAVALERAIDEKFSALEEKEKELRQLRLAVRERDHDLERLRDVLSSNEATMQSMESLLRAKGLEVEQLSTTCQNLQWLKEEMETKFSRWQKEQESIIQQLQTSLHDRNKEVEDLSATLLCKLGPGQSEIAEELCQRLQRKERMLQDLLSDRNKQVLEHEMEIQGLLQSVSTREQESQAAAEKLVQALMERNSELQALRQYLGGRDSLMSQAPISNQQAEVTPTGRLGKQTDQGSMQIPSRDDSTSLTAKEDVSIPRSTLGDLDTVAGLEKELSNAKEELELMAKKERESQMELSALQSMMAVQEEELQVQAADMESLTRNIQIKEDLIKDLQMQLVDPEDIPAMERLTQEVLLLREKVASVESQGQEISGNRRQQLLLMLEGLVDERSRLNEALQAERQLYSSLVKFHAHPESSERDRTLQVELEGAQVLRSRLEEVLGRSLERLNRLETLAAIGGAAAGDDTEDTSTEFTDSIEEEAAHHSHQQLVKVALEKSLATVETQNPSFSPPSPMGGDSNRCLQEEMLHLRAEFHQHLEEKRKAEEELKELKAQIEEAGFSSVSHIRNTMLSLCLENAELKEQMGEAMSDGWEIEEDKEKGELDNQSQPRDPGPQSAFSLPGSTQHLRSQLSQCKQRYQDLQEKLLLSEATVFAQANELEKYRVMLTGESLVKQDSKQIQVDLQDLGYETCGRSENEAEREETTSPECEEHNSLKEMVLMEGLCSEQGRRGSTLASSSERKPLENQLGKQEEFRVYGKSENILVLRKDIKDLKAQLQNANKVIQNLKSRVRSLSVTSDYSSSLERPRKLRAVGTLEGSSPHSVPDEDEGWLSDGTGAFYSPGLQAKKDLESLIQRVSQLEAQLPKNGLEEKLAEELRSASWPGKYDSLIQDQARELSYLRQKIREGRGICYLITRHAKDTVKSFEDLLRSNDIDYYLGQSFREQLAQGSQLTERLTSKLSTKDHKSEKDQAGLEPLALRLSRELQEKEKVIEVLQAKLDARSLTPSSSHALSDSHRSPSSTSFLSDELEACSDMDIVSEYTHYEEKKASPSHSDSIHHSSHSAVLSSKPSSTSASQGAKAESNSNPISLPTPQNTPKEANQAHSGASTVPPASTATLLSNDLEADSSYYLNSAQPHSPPRGTIELGRILEPGYLGSSGKWDVMRPQKGSVSGDLSSGSSVYQLNSKPTGADLLEEHLGEIRNLRQRLEESICINDRLREQLEHRLTSTARGRGSTSNFYSQGLESIPQLCNENRVLREDNRRLQAQLSHVSREHSQETESLREALLSSRSHLQELEKELEHQKVERQQLLEDLREKQQEVLHFREERLSLQENDSRLQHKLVLLQQQCEEKQQLFESLQSELQIYEALYGNSKKGLKAYSLDACHQIPLSSDLSHLVAEVRALRGQLEQSIQGNNCLRLQLQQQLESGAGKASLSPSSINQNFPASTDPGNKQLLLQDSAVSPPVRDVGMNSPALVFPSSASSTPGSETPIINRANGLGLDTSPVMKTPPKLEGDATDGSFANKHGRHVIGHIDDYSALRQQIAEGKLLVKKIVSLVRSACSFPGLEAQGTEVLGSKGIHELRSSTSALHHALEESASLLTMFWRAALPSTHIPVLPGKVGESTERELLELRTKVSKQERLLQSTTEHLKNANQQKESMEQFIVSQLTRTHDVLKKARTNLEVKSLRALPCTPAL

SEQ ID NO: 1556 - DNA, 278 bp, Homo sapiens
  misc_feature (84)..(84): n is a, c, g, or t
  misc_feature (117)..(117): n is a, c, g, or t
  misc_feature (123)..(124): n is a, c, g, or t
  misc_feature (150)..(150): n is a, c, g, or t
  misc_feature (194)..(194): n is a, c, g, or t
cagaacactgcgtgtcctgtgcgcgcgtacgggtccggccgcgggtcccaccgcaagcgggcgtgtgcagctgcggctcctggngggcgagcttaggagggagctggagctgcgganggcggnnaacaggagcaggccgagggtcctctngccagaagaaatctggcctcggaacacgccattctccgcgccgnttccaataaccactaacatccctaacgagcatccgagccgagggctctgctcggaaatcgtcctggcccaactcggcccttcga

SEQ ID NO: 1557 - DNA, 5338 bp, Homo sapiens
ggccgcgagtgcatcttccacgaacctaattcatctctccagcaaaggacacatctctccagcaaaggacacctctctccagcaaaggacacctgcagagatgtccccagtccttcacttctatgttcgtccctctggccatgagggggcagcctctggacacactcggaggaaactgcaagggaaactgccagagctgcagggcgtcgagactgaactgtgctacaacgtgaactggacagctgaggccctccccagtgctgaggagacaaagaagctgatgtggctgtttggttgccccttactgctggatgatgttgctcgggagtcctggctccttcctggctccaatgacctgctgctggaggtcgggcccaggctgaacttctccaccccaacatccaccaacatcgtgtcagtgtgccgcgccactgggctggggcctgtggatcgtgtggagaccacccggcgctaccggctctcgtttgcccaccccccgtcagctgaggtggaagccattgctctggctaccctgcacgaccggatgacagagcagcacttcccccatcccatccagagtttctcccctgagagcatgccggaacccctcaatggccctatcaatatactgggtgagggccggcttgcgctggagaaggccaaccaggagcttggtctggctttagactcttgggacctagacttctacaccaagcgcttccaggagctacagcggaacccgagcactgtggaggcctttgacttggcgcagtccaatagcgagcacagccgacactggttcttcaagggccagctccacgtggatgggcagaagctggtgcactcactgtttgagtccatcatgagcacccaggaatcctcgaaccccaacaacgtcctcaaattctgtgataacagcagtgcaatccagggaaaggaagtccgattcctacggcctgaggaccccacacggccaagccgcttccagcaacagcaagggctgagacatgttgtcttcacagcagagactcacaactttcccacaggagtatgcccctttagtggtgcaaccactggcacagggggccggattcgagatgtccagtgcacaggccgcggggcccacgtggtggctggcactgccggctattgctttggaaatctgcatattccaggttacaatctgccctgggaggatctaagcttccagtatcctgggaattttgcccggcccctggaggttgccattgaagccagtaatggagcttctgactatggcaacaagtttggggaaccagtgctggctggcttcgcccgctccttgggcctccagctcccagacggccagcggcgtgagtggatcaagcccatcatgtttagtgggggcattgggtccatggaagctgaccacataagcaaggaggccccagagccaggcatggaagttgtaaaggttggaggtcccgtctacaggattggagttggaggtggagctgcttcatctgtgcaggtgcagggagataacaccagtgacctggactttggggctgtgcagcgaggagacccggagatggaacagaagatgaaccgtgtgatcagggcttgtgtggaggcccccaagggaaaccccatctgcagccttcatgatcagggcgctggtggcaatggcaatgtcctaaaagagctgagtgacccagctggagccatcatttacaccagccgcttccagcttggggacccaaccctgaatgccctggaaatctggggggctgagtaccaggaatcaaatgctcttctgctgaggtcccccaaccgggacttcctgactcatgtcagtgcccgtgaacgttgcccggcttgcttcgtgggcaccatcactggagaccggagaatagtgctggtggacgatcgggagtgtcctgtcagaagaaatggccagggggatgcccccccgacacccccgccaacccctgtggacctggagctcgaatgggtgctgggcaagatgcctcggaaggagttcttcctgcagaggaagccccccatgctgcagcctctggccttgcccccagggctgagcgtgcaccaggctctggagagggttctgaggctgcccgccgtggccagcaagcgctacctcaccaataaggtggaccgctccgtgggaggcctggtggcccagcagcagtgcgtggggcccctgcaaactcctctggcagatgtagcggttgtggcactgagccatgaggagctcataggggctgccacagccttgggagaacagccagtcaagagcctgctggacccaaaagtcgccgcccggctggccgtggccgaagccctcaccaacctggtgtttgctctggtcactgacctccgggatgtgaagtgtagcgggaactggatgtgggcagccaagctcccaggggagggcgcagctttggcggatgcctgtgaggctatggtggcagtgatggcagccctgggtgtggcagtggatggtggcaaggactccctcagcatggctgctcgggttggcactgagaccgtgcgggctcctgggtcactggtcatctcagcctatgccgtctgcccagacatcacagccactgtgaccccagacctcaagcatcctgaagggagaggccatctgctctatgtggctctgagccctgggcagcaccggctcgggggcacagctctggcccagtgcttctcccagcttggggaacaccctccagacctggaccttcctgagaacttggtgcgggccttcagcatcactcaggggctgctgaaagaccgcctcctctgctcaggccacgatgtcagtgacggaggcctcgtcacatgcctgctggagatggcctttgctggaaattgcgggctacaggtggatgtgcctgtccccagggttgatgtcctgtctgtgctgttcgctgaggagccaggcctcgtgctggaggtgcaggagccagacctggcccaggtgctgaagcgttaccgggatgctggcctccattgcctggagctgggccacacaggcgaggccgggccccacgccatggtccgggtgtcagtgaacggggctgtggttctggaggagcctgttggggagctgcgagccctctgggaggagacgagtttccagctggaccggctacaggcagagcctcgctgtgtggcagaggaggaacggggcctgagggagcggatggggcccagctattgcctgccccccacctttcccaaagcctccgtgccccgtgagcctggtggtcccagcccccgagtcgccatcttgcgagaggagggcagtaatggagaccgggagatggccgatgccttccacttagctgggtttgaggtatgggacgtgaccatgcaggacctctgctctggggcaattgggctggacactttccgtggcgtggccttcgtgggcggcttcagctatgcagatgtcctgggctctgccaaagggtgggcagctgctgtgacctttcatcccagggctggggctgagctgaggcgcttccggaagcggccagacaccttcagcctgggcgtgtgtaatggctgtcaactgctggctctgctcggctgggtgggaggcgaccccaatgaggatgctgcagagatgggccctgactcccagccagcccggccaggccttctgctacgccacaacctgtctgggcgctacgagtctcgctgggccagcgtgcgtgtggggcctgggccagccctgatgctgcgagggatggagggcgccgtgctgcccgtgtggagtgcgcacggggaaggttacgtagcattttcttctccggaactccaagctcagattgaggccaggggcttggctccactgcactgggctgatgatgacgggaaccccacagagcagtaccctctgaatcccaatgggtccccagggggcgtggctggcatctgctcctgtgatggccgccacctggctgtcatgcctcaccctgagcgggccgttaggccttggcagtgggcatggcgaccccctccatttgatactctgaccacctccccctggctccagctctctatcaatgcccgaaactggaccctggaagggagctgctgactggccacaggggctcacctgggccccatggcttttcacctaagtgggtcctgccccctcccccatgaccttcaggagcaccccatattatttccaaaaatatcttggacagacaaggaccaaaatgccaaaatctcagcggactcgatgatctgcctgctgatgttccttctgtggctgtgtctattttcagttctgctctaacatggcatgccctttctcagcccaggaaacagcatgtggttcagagaaaagagcgacaaggaaaagttaggactcctgaggtccgaacaggggcttctgttgcccacttcacaacacccagtgatcaccggtgtgcaattgcctccttggctctgagggatgttttgcgctcccttttctcatcattggggttagcgggtgcagacaaattcagcaatagtatgcagatcagcccctcaccacctcattgttctcatctggaactgaaactttctggatttctcttgaagtgctacactgcactgaatgtaaggaattgttgcttgtggaagtttctcagcgtttctggctgtcttagggctggcctcagaacccagcattcctgttatttgcttctaaattagcagctctctttttttttttttttttgaggcagtctcactctgtcacccaggctggagtgcagtggcgtgatctcggcccactgcaacctctgcctcctgggttcaagcaattttcctgcctcagcctcccgagtagctgggagtacaggcacacaccaccacacccagctaatttttgtatttttagtagagatagggtttcaccgtgtctcccaggctggtctcaaactcctaacctcaagtgattcgcctgcctcggcctcccaaagtgctgggattacaggtgggagccactacagctggcccagcagctctgtttctgatagaggtggttggggctctcatccctagatcctaaccctttagtatgctggaattctactcttcacttactgcattgactgttgttgattagttattattgcaaagcactgccaccggcctcagggagtttatgtgtaatagaattaaaaataatagctgtgtataacacttagctcaagccacgcatgtgtgaggcatttggtatgtatctgaattaattctcactaaaattcagcaaaggacttgatagcctctccccgccttttcaataaaggatgaatgaaggttg

SEQ ID NO: 1558 - protein, 1371 aa, Homo sapiens
AASASSTNLIHLSSKGHISPAKDTSLQQRTPAEMSPVLHFYVRPSGHEGAASGHTRRKLQGKLPELQGVETELCYNVNWTAEALPSAEETKKLMWLFGCPLLLDDVARESWLLPGSNDLLLEVGPRLNFSTPTSTNIVSVCRATGLGPVDRVETTRRYRLSFAHPPSAEVEAIALATLHDRMTEQHFPHPIQSFSPESMPEPLNGPINILGEGRLALEKANQELGLALDSWDLDFYTKRFQELQRNPSTVEAFDLAQSNSEHSRHWFFKGQLHVDGQKLVHSLFESIMSTQESSNPNNVLKFCDNSSAIQGKEVRFLRPEDPTRPSRFQQQQGLRHVVFTAETHNFPTGVCPFSGATTGTGGRIRDVQCTGRGAHVVAGTAGYCFGNLHIPGYNLPWEDLSFQYPGNFARPLEVAIEASNGASDYGNKFGEPVLAGFARSLGLQLPDGQRREWIKPIMFSGGIGSMEADHISKEAPEPGMEVVKVGGPVYRIGVGGGAASSVQVQGDNTSDLDFGAVQRGDPEMEQKMNRVIRACVEAPKGNPICSLHDQGAGGNGNVLKELSDPAGAIIYTSRFQLGDPTLNALEIWGAEYQESNALLLRSPNRDFLTHVSARERCPACFVGTITGDRRIVLVDDRECPVRRNGQGDAPPTPPPTPVDLELEWVLGKMPRKEFFLQRKPPMLQPLALPPGLSVHQALERVLRLPAVASKRYLTNKVDRSVGGLVAQQQCVGPLQTPLADVAVVALSHEELIGAATALGEQPVKSLLDPKVAARLAVAEALTNLVFALVTDLRDVKCSGNWMWAAKLPGEGAALADACEAMVAVMAALGVAVDGGKDSLSMAARVGTETVRAPGSLVISAYAVCPDITATVTPDLKHPEGRGHLLYVALSPGQHRLGGTALAQCFSQLGEHPPDLDLPENLVRAFSITQGLLKDRLLCSGHDVSDGGLVTCLLEMAFAGNCGLQVDVPVPRVDVLSVLFAEEPGLVLEVQEPDLAQVLKRYRDAGLHCLELGHTGEAGPHAMVRVSVNGAVVLEEPVGELRALWEETSFQLDRLQAEPRCVAEEERGLRERMGPSYCLPPTFPKASVPREPGGPSPRVAILREEGSNGDREMADAFHLAGFEVWDVTMQDLCSGAIGLDTFRGVAFVGGFSYADVLGSAKGWAAAVTFHPRAGAELRRFRKRPDTFSLGVCNGCQLLALLGWVGGDPNEDAAEMGPDSQPARPGLLLRHNLSGRYESRWASVRVGPGPALMLRGMEGAVLPVWSAHGEGYVAFSSPELQAQIEARGLAPLHWADDDGNPTEQYPLNPNGSPGGVAGICSCDGRHLAVMPHPERAVRPWQWAWRPPPFDTLTTSPWLQLSINARNWTLEGSC

SEQ ID NO: 1559 - DNA, 2840 bp, Homo sapiens
cagcggccgctgaattctagggcgggttcgcgccccgaaggctgagagctggcgctgctcgtgccctgtgtgccagacggcggagctccgcggccggaccccgcggccccgctttgctgccgactggagtttgggggaagaaactctcctgcgccccagaagatttcttcctcggcgaagggacagcgaaagatgagggtggcaggaagagaaggcgctttctgtctgccggggtcgcagcgcgagagggcagtgccatgttcctctccatcctagtggcgctgtgcctgtggctgcacctggcgctgggcgtgcgcggcgcgccctgcgaggcggtgcgcatccctatgtgccggcacatgccctggaacatcacgcggatgcccaaccacctgcaccacagcacgcaggagaacgccatcctggccatcgagcagtacgaggagctggtggacgtgaactgcagcgccgtgctgcgcttcttcttctgtgccatgtacgcgcccatttgcaccctggagttcctgcacgaccctatcaagccgtgcaagtcggtgtgccaacgcgcgcgcgacgactgcgagcccctcatgaagatgtacaaccacagctggcccgaaagcctggcctgcgacgagctgcctgtctatgaccgtggcgtgtgcatttcgcctgaagccatcgtcacggacctcccggaggatgttaagtggatagacatcacaccagacatgatggtacaggaaaggcctcttgatgttgactgtaaacgcctaagccccgatcggtgcaagtgtaaaaaggtgaagccaactttggcaacgtatctcagcaaaaactacagctatgttattcatgccaaaataaaagctgtgcagaggagtggctgcaatgaggtcacaacggtggtggatgtaaaagagatcttcaagtcctcatcacccatccctcgaactcaagtcccgctcattacaaattcttcttgccagtgtccacacatcctgccccatcaagatgttctcatcatgtgttacgagtggcgttcaaggatgatgcttcttgaaaattgcttagttgaaaaatggagagatcagcttagtaaaagatccatacagtgggaagagaggctgcaggaacagcggagaacagttcaggacaagaagaaaacagccgggcgcaccagtcgtagtaatccccccaaaccaaagggaaagcctcctgctcccaaaccagccagtcccaagaagaacattaaaactaggagtgcccagaagagaacaaacccgaaaagagtgtgagctaactagtttccaaagcggagacttccgacttccttacaggatgaggctgggcattgcctgggacagcctatgtaaggccatgtgccccttgccctaacaactcactgcagtgctcttcatagacacatcttgcagcatttttcttaaggctatgcttcagtttttctttgtaagccatcacaagccatagtggtaggtttgccctttggtacagaaggtgagttaaagctggtggaaaaggcttattgcattgcattcagagtaacctgtgtgcatactctagaagagtagggaaaataatgcttgttacaattcgacctaatatgtgcattgtaaaataaatgccatatttcaaacaaaacacgtaatttttttacagtatgttttattaccttttgatatctgttgttgcaatgttagtgatgttttaaaatgtgatgaaaatataatgtttttaagaaggaacagtagtggaatgaatgttaaaagatctttatgtgtttatggtctgcagaaggatttttgtgatgaaaggggattttttgaaaaattagagaagtagcatatggaaaattataatgtgtttttttaccaatgacttcagtttctgtttttagctagaaacttaaaaacaaaaataataataaagaaaaataaataaaaaggagaggcagacaatgtctggattcctgttttttggttacctgatttccatgatcatgatgcttcttgtcaacaccctcttaagcagcaccagaaacagtgagtttgtctgtaccattaggagttaggtactaattagttggctaatgctcaagtattttatacccacaagagaggtatgtcactcatcttacttcccaggacatccaccctgagaataatttgacaagcttaaaaatggccttcatgtgagtgccaaattttgtttttcttcatttaaatattttctttgcctaaatacatgtgagaggagttaaatataaatgtacagagaggaaagttgagttccacctctgaaatgagaattacttgacagttgggatactttaatcagaaaaaaagaacttatttgcagcattttatcaacaaatttcataattgtggacaattggaggcatttattttaaaaaacaattttattggccttttgctaacacagtaagcatgtattttataaggcattcaataaatgcacaacgcccaaaggaaataaaatcctatctaatcctactctccactacacagaggtaatcactattagtattttggcatattattctccaggtgtttgcttatgcacttataaaatgatttgaacaaataaaactaggaacctgtatacatgtgtttcataacctgcctcctttgcttggccctttattgagataagttttcctgtcaagaaagcagaaaccatctcatttctaacagctgtgttatattccatagtatgcattactcaacaaactgttgtgctattggatacttaggtggtttcttcactgacaatactgaataaacatctcaccggaattc

SEQ ID NO: 1560 - protein, 346 aa, Homo sapiens
MFLSILVALCLWLHLALGVRGAPCEAVRIPMCRHMPWNITRMPNHLHHSTQENAILAIEQYEELVDVNCSAVLRFFFCAMYAPICTLEFLHDPIKPCKSVCQRARDDCEPLMKMYNHSWPESLACDELPVYDRGVCISPEAIVTDLPEDVKWIDITPDMMVQERPLDVDCKRLSPDRCKCKKVKPTLATYLSKNYSYVIHAKIKAVQRSGCNEVTTVVDVKEIFKSSSPIPRTQVPLITNSSCQCPHILPHQDVLIMCYEWRSRMMLLENCLVEKWRDQLSKRSIQWEERLQEQRRTVQDKKKTAGRTSRSNPPKPKGKPPAPKPASPKKNIKTRSAQKRTNPKRV

SEQ ID NO: 1561 - DNA, 738 bp, Homo sapiens
gtatctgtggtaaacccagtgacacgggggagatgacatacaaaaagggcaggacctgagaaagattaagctgcaggctccctgcccataaaacagggtgtgaaaggcatctcagcggctgccccaccatggctacctgggccctcctgctccttgcagccatgctcctgggcaacccaggtctggtcttctctcgtctgagccctgagtactacgacctggcaagagcccacctgcgtgatgaggagaaatcctgcccgtgcctggcccaggagggcccccagggtgacctgttgaccaaaacacaggagctgggccgtgactacaggacctgtctgacgatagtccaaaaactgaagaagatggtggataagcccacccagagaagtgtttccaatgctgcgacccgggtgtgtaggacggggaggtcacgatggcgcgacgtctgcagaaatttcatgaggaggtatcagtctagagttacccagggcctcgtggccggagaaactgcccagcagatctgtgaggacctcaggttgtgtataccttctacaggtcccctctgagccctctcaccttgtcctgtggaagaagcacaggctcctgtcctcagatcccgggaacctcagcaacctctgccggctcctcgcttcctcgatccagaatccactctccagtctccctcccctgactccctctgctgtcctcccctctcacgagaataaagtgtcaagcaag

SEQ ID NO: 1562 - protein, 145 aa, Homo sapiens
MATWALLLLAAMLLGNPGLVFSRLSPEYYDLARAHLRDEEKSCPCLAQEGPQGDLLTKTQELGRDYRTCLTIVQKLKKMVDKPTQRSVSNAATRVCRTGRSRWRDVCRNFMRRYQSRVTQGLVAGETAQQICEDLRLCIPSTGPL

SEQ ID NO: 1563 - DNA, 2984 bp, Homo sapiens
taactgagcgaggagcaattgattaatagctcggcgaggggactcactgactgttataataacactacaccagcaactcctggcttcccagcagccggaacacagacaggagagagtcagtggcaaatagacatttttcttatttcttaaaaaacagcaacttgtttgctacttttatttctgttgatttttttttcttggtgtgtgtggtggttgtttttaagtgtggagggcaaaaggagataccatcccaggctcagtccaacccctctccaaaacggcttttctgacactccaggtagcgagggagttgggtctccaggttgtgcgaggagcaaatgatgaccgccaaggccgtagacaaaatcccagtaactctcagtggttttgtgcaccagctgtctgacaacatctacccggtggaggacctcgccgccacgtcggtgaccatctttcccaatgccgaactgggaggcccctttgaccagatgaacggagtggccggagatggcatgatcaacattgacatgactggagagaagaggtcgttggatctcccatatcccagcagctttgctcccgtctctgcacctagaaaccagaccttcacttacatgggcaagttctccattgaccctcagtaccctggtgccagctgctacccagaaggcataatcaatattgtgagtgcaggcatcttgcaaggggtcacttccccagcttcaaccacagcctcatccagcgtcacctctgcctcccccaacccactggccacaggacccctgggtgtgtgcaccatgtcccagacccagcctgacctggaccacctgtactctccgccaccgcctcctcctccttattctggctgtgcaggagacctctaccaggacccttctgcgttcctgtcagcagccaccacctccacctcttcctctctggcctacccaccacctccttcctatccatcccccaagccagccacggacccaggtctcttcccaatgatcccagactatcctggattctttccatctcagtgccagagagacctacatggtacagctggcccagaccgtaagccctttccctgcccactggacaccctgcgggtgccccctccactcactccactctctacaatccgtaactttaccctggggggccccagtgctggggtgaccggaccaggggccagtggaggcagcgagggaccccggctgcctggtagcagctcagcagcagcagcagccgccgccgccgccgcctataacccacaccacctgccactgcggcccattctgaggcctcgcaagtaccccaacagacccagcaagacgccggtgcacgagaggccctacccgtgcccagcagaaggctgcgaccggcggttctcccgctctgacgagctgacacggcacatccgaatccacactgggcataagcccttccagtgtcggatctgcatgcgcaacttcagccgcagtgaccacctcaccacccatatccgcacccacaccggtgagaagcccttcgcctgtgactactgtggccgaaagtttgcccggagtgatgagaggaagcgccacaccaagatccacctgagacagaaagagcggaaaagcagtgccccctctgcatcggtgccagccccctctacagcctcctgctctgggggcgtgcagcctgggggtaccctgtgcagcagtaacagcagcagtcttggcggagggccgctcgccccttgctcctctcggacccggacaccttgagatgagactcaggctgatacaccagctcccaaaggtcccggaggccctttgtccactggagctgcacaacaaacactaccaccctttcctgtccctctctccctttgttgggcaaagggctttggtggagctagcactgccccctttccacctagaagcaggttcttcctaaaacttagcccattctagtctctcttaggtgagttgactatcaacccaaggcaaaggggaggctcagaaggaggtggtgtggggatcccctggccaagagggctgaggtctgaccctgctttaaagggttgtttgactaggttttgctaccccacttccccttattttgacccatcacaggtttttgaccctggatgtcagagttgatctaagacgttttctacaataggttgggagatgctgatcccttcaagtggggacagcaaaaagacaagcaaaactgatgtgcactttatggcttgggactgatttgggggacattgtacagtgagtgaagtatagcctttatgccacactctgtggccctaaaatggtgaatcagagcatatctagttgtctcaacccttgaagcaatatgtattatatactcagagaacagaagtgcaatgtgatgggaggaacgtagcaatatctgctccttttcgagttgtttgagaaatgtaggctattttttcagtgtatatccactcagattttgtgtatttttgatgtacccacactgttctctaaattctgaatctttgggaaaaaatgtaaagcatttatgatctcagaggttaacttatttaagggggatgtacatattctctgaaactaggatgcatgcaattgtgttggaagtgtccttggtcgccttgtgtgatgtagacaaatgttacaaggctgcatgtaaatgggttgccttattatggagaaaaaaatcactccctgagtttagtatggctgtatatttatgcctattaatatttggaattttttttagaaagtatatttttgtatgctttgttttgtgacttaaaagtgttacctttgtagtcaaatttcagataagaatgtacataatgttaccggagctgatttgtttggtcattagctcttaatagttgtgaaaaaataaatctattctaacgcaaaaccactaactgaagttcagatataatggatggtttgtgactatagtgtaaataaatacttttcaacaat

SEQ ID NO: 1564 - protein, 476 aa, Homo sapiens
MMTAKAVDKIPVTLSGFVHQLSDNIYPVEDLAATSVTIFPNAELGGPFDQMNGVAGDGMINIDMTGEKRSLDLPYPSSFAPVSAPRNQTFTYMGKFSIDPQYPGASCYPEGIINIVSAGILQGVTSPASTTASSSVTSASPNPLATGPLGVCTMSQTQPDLDHLYSPPPPPPPYSGCAGDLYQDPSAFLSAATTSTSSSLAYPPPPSYPSPKPATDPGLFPMIPDYPGFFPSQCQRDLHGTAGPDRKPFPCPLDTLRVPPPLTPLSTIRNFTLGGPSAGVTGPGASGGSEGPRLPGSSSAAAAAAAAAAYNPHHLPLRPILRPRKYPNRPSKTPVHERPYPCPAEGCDRRFSRSDELTRHIRIHTGHKPFQCRICMRNFSRSDHLTTHIRTHTGEKPFACDYCGRKFARSDERKRHTKIHLRQKERKSSAPSASVPAPSTASCSGGVQPGGTLCSSNSSSLGGGPLAPCSSRTRTP

SEQ ID NO: 1565 - DNA, 566 bp, Homo sapiens
  misc_feature (466)..(466): n is a, c, g, or t
  misc_feature (508)..(508): n is a, c, g, or t
  misc_feature (533)..(533): n is a, c, g, or t
  misc_feature (540)..(540): n is a, c, g, or t
  misc_feature (547)..(547): n is a, c, g, or t
tattcatgtataagtaaagattaagtggacaaatcttaatagcctgaagactgtctacatgtgtttcccatgtaattcctagtaatgcaaagagagagaacattcccaatagcttctcaggcacaaatttgccctctcagttaatactgcataaatgtgaccattatcttgtcttttatcatcatgtatgatgtttggttatgaacttaacaacataattctacagtatttcctactgtgtatctggtatgccactgccactcaaggtttctttgagagggagactatatatttgttactattattaatgaatctatttccatgactgctgtgaaaaacccaggctgagttaacagtgatgagctctggccaggcacagtggctcacgcctgtaatccaacactttggaaggctgaggcaggaggatcacttgagcccaggagttcaagaccaggctggggaacanaggagactcattctagaactcacaggtggaatcgcctgtggntcagcactagggaggttagcaagangctgctnagccagngttaagcaaagtagcatgc

SEQ ID NO: 1566 - DNA, 3416 bp, Homo sapiens
ggtttacacgtacctccgcctcatcgtggaccaccatgggactgcccagctccaggccctgcgacagaaggaagtagacttctgcatctcactgcttcgggaacggttcatggaatgtctgatgattggtcgggatctcgtaagactacttcagaatgttgctaggataccagaatttgaactgctttggaaagatattatccataatcctcaggccttgagtcctcagttcacaggtatcctacagcttcttcagtcaagaacatcccgaaaattcctagcatgtcgtctaaccccggacatggagactaaactcctcttcatgacatcccgggtgcgatttggtcaacaaaagcgataccaagattggttccagcgccagtacctgtcaactccagatagtcagtctctgcgctgtgacctcattcgctacatctgtggggtagtccacccttctaatgaagtactgagttcagatatcttgccccggtgggccatcattggttggctcctgacaacgtgcacgtcaaatgtcgctgcctccaatgccaagctggctttgttttatgactggctgttctttagtccagacaaggatagcattatgaacatagaaccagccatcctggtcatgcaccactccatgaagccccacccagccatcactgccacactcctggacttcatgtgccgcatcattcccaacttctatccaccattggagggccacgtgcggcagggtgtcttttcctccctcaaccacattgtggagaaacgggtcttggcgtgtaaaaagtattggctctacctcagactgctgggcatatgtcttcttggctcttagaggaatttctctcctgccatcgtattacaaagacacctagctcccctgtttgacaaccctaagttggataaggagctgcgggcaatgctgagagagaagtttcctgagttctgcagctcaccctccccacctgtggaagtcaaaattgaggagccagtttccatggagatggacaaccatatgtcggataaggatgagagttgctatgacaatgcagaggcagccttcagtgacgatgaagaggatctcaacagcaaaggaaagaagagggagtttcgcttccaccctatcaaggagacagttgtggaggagccagttgatatcaccccttaccttgaccagttggatgagtccctgagggacaaagtactccagctacagaaggggagtgatacggaggcccagtgtgaggtcatgcaggaaattgtggaccaggtcctggaggaagactttgactcggagcagctgtctgtccttgcttcctgcctacaggagctcttcaaggcccactttcgaggggaggtcctgcctgaggagattactgaggagtccctggaggagtctgtaggaaagcctctgtacctaatatttaggaacctatgtcagatgcaggaagacaacagcagcttctctctacttctagaccttctctccgagctatatcagaagcagcccaagattggctaccacctgctctactacctgagggccagcaaagccgccgcagggaagatgaacctgtacgagtcatttgcccaggctacccagctgggcgatctgcacacctgcctgatgatggacatgaaggcctgccaggaggacgatgtgcggctcctgtgccacctcacgccctccatctacacagagtttccagatgaaaccttgaggagcggagagctgctgaacatgatcgtggctgttattgactctgcacagctccaggagctggtctgccacgtgatgatgggtaacctggttatgtttcgaaaagactcagttctcaacatactcattcagagcctagactgggagacctttgagcagtattgtgcctggcagctctttctggcccacaatattcccctggagaccataatccccatcctgcagcacctcaaatacaaggagcacccagaggccctgtcctgcctactgcttcaactccgaagagaaaagcccagcgaggagatggtgaagatggtgctgagccggccctgccatcctgacgaccagttcaccaccagcatcctgcggcactggtgcatgaaacatgacgagctgctggccgagcacatcaagtccctgctcatcaagaacaacagcctgcctcgcaagagacagagcctgaggagctctagcagcaagctggcccagctgactctggagcagatcctggagcacttggacaatctgcggctcaacctgaccaacaccaagcagaacttttttagccagacgccaattctccaggcgctgcagcatgtccaagcgagctgtgacgaagcccacaagatgaaattcagtgatctcttctccctggcggaggaatatgaggactcttccaccaagccacccaagagccggcgaaaagcagctctgtccagccctcgaagtcgaaagaatgccacacagccccccaatgccgaagaagagtcgggctccagcagtgcttcagaagaggaagacacgaaaccgaagcctaccaagcggaaacgaaaagggtcctctgcagtgggctctgacagtgactgaggccctgcattccccatcccacccccggctggactgccctctccttcttggtgattcaaaggttaatagaggctgaggagattgcaggggaaacacccttgctgcatccccaagctcccccggtggaaggaggagctttctcctctggctgagtttgagaagctgccatgcagcccctagccccttccctcctcctggggcctccagcccctcacactgctgttcccagtgatatttgggatctgactgaagccagaggctctgtaaaatcagaccatagtggaagtcctcagccccctggccccttccgcaatctcctcccccagtctcccaaagagccatttcaacagagaagggaaatgacaaaggggcagctggccagataagctaggatgagagcagagactcagtgtgtgggtgtcccttcctgcttccccttcaggtcttggtttgttctgaagggacgttttatagtcactatccacatgccagtgtgaaatgggcatctatgacgtggtcagggtgtccattcctaatcatggggcagatgccacaagcattcagaaaggagtctgaaagggtggccacagccccacgtggtgtgccctggaggcttaggttggtctgaggttggcacctcaatctacaccagagcccagggagtcccagaggcaagtttcacagaattgtcaaatgatcccatttccttgagtctgttttttttttttgtttttttttgttttttttttggcagagataatcgtgtcttaaaagttgtttttaaatgacaataaaacaagccagaatgtcaaaaaaaaaa

SEQ ID NO: 1567 - DNA, 1423 bp, Homo sapiens
gaccaacggaccggacagagacgaggagaggaacaggaagagagaagctgggagaatcgggaacctgggggctagtgacctgcacacagggcaggggcactcggcagttcccagaggccacccctcccaccccagacatccagacatctggaactttgggtgccaagagtccagcttaatgcaggcagcctggcttttgggggctttggtggtcccccagctcttgggctttggccatggggctcggggagcagagagggagtgggagggaggctggggaggtgcccaggaggaggagcgggagagggaggccctgatgctgaagcatctgcaggaagccctaggactgcctgctgggaggggggatgagaatcctgccggaactgttgagggaaaagaggactgggagatggaggaggaccagggggaggaagaggaggaggaagcaacgccaaccccatcctccggccccagcccctctcccacccctgaggacatcgtcacttacatcctgggccgcctggccggcctggacgcaggcctgcaccagctgcacgtccgtctgcacgcgttggacacccgcgtggtcgagctgacccaggggctgcggcagctgcggaacgcggcaggcgacacccgcgatgccgtgcaagccctgcaggaggcgcagggtcgcgccgagcgcgagcacggccgcttggagggctgcctgaaggggctgcgcctgggccacaagtgcttcctgctctcgcgcgacttcgaagctcaggcggcggcgcaggcgcggtgcacggcgcggggcgggagcctggcgcagccggcagaccgccagcagatggaggcgctcactcggtacctgcgcgcggcgctcgctccctacaactggcccgtgtggctgggcgtgcacgatcggcgcgccgagggcctctacctcttcgaaaacggccagcgcgtgtccttcttcgcctggcatcgctcaccccgccccgagctcggcgcccagcccagcgcctcgccgcatccgctcagcccggaccagcccaacggtggcacgctcgagaactgcgtggcgcaggcctctgacgacggctcctggtgggaccacgactgccagcggcgtctctactacgtctgcgagttccccttctagcggggccggtaccccgcctccctgcccatcccaccacccggcctttccctgcgccgtgcccaccctcctccggaatctcccttcccttcctggccacgaatggcagcgtcctccccgacccccagtctgggcgcttctgggagggctcttgcggtgccggcactcctccttgttagtgtctttccttgaaggggcgggcaccaggctaggtccggtgccaataaatccttgtggaatctgacttgaggggcagtgaaaaaaaaaaaaaaaaaa

SEQ ID NO: 1568 - protein, 323 aa, Homo sapiens
MQAAWLLGALVVPQLLGFGHGARGAEREWEGGWGGAQEEEREREALMLKHLQEALGLPAGRGDENPAGTVEGKEDWEMEEDQGEEEEEEATPTPSSGPSPSPTPEDIVTYILGRLAGLDAGLHQLHVRLHALDTRVVELTQGLRQLRNAAGDTRDAVQALQEAQGRAEREHGRLEGCLKGLRLGHKCFLLSRDFEAQAAAQARCTARGGSLAQPADRQQMEALTRYLRAALAPYNWPVWLGVHDRRAEGLYLFENGQRVSFFAWHRSPRPELGAQPSASPHPLSPDQPNGGTLENCVAQASDDGSWWDHDCQRRLYYVCEFPF

SEQ ID NO: 1569 - DNA, 2165 bp, Homo sapiens
atggctgtgcgcggcgccaacaccttgacgtccttctccatccaggcgatcctcaacaagaaagaggagcgcggcgggctggccgcgccagaggggcgcccggcgcccgggggcacagcggcatcggtggccgcggctcccgctgtctgctgttggcggctctttggggagagggacgcgggcgcgttggggggcgccgaggactctctgctggcgtctcctgccggtaccagaacagctgcggggaggactgcggagagcccggaaggctgggactcggactccgcgctcagcgaggagaacgagagcaggcggcgctgcgcggacgcgcggggggccagcggggccggccttgcggggggatccttgagcctcggccagccggtctgtgagctggccgcttccaaagacctagaggaggaagccgcgggccggagcgacagcgagatgtccgccagcgtctcaggcgaccgcagcccaaggaccgaggacgacggtgttggccccagaggtgcacacgtgtccgcgctgtgcagcggggccggcggcgggggcggcagcgggccggcaggcgtcgcggaggaggaggaggagccggcggcgcccaagccacgcaagaagcgctcgcgggccgctttctcccacgcgcaggtcttcgagctggagcgccgctttaaccaccagcgctacctgtccgggcccgagcgcgcagacctggccgcgtcgctgaagctcaccgagacgcaggtgaaaatctggttccagaaccgtcgctacaagacaaagcgccggcagatggcagccgacctgctggcctcggcgcccgccgccaagaaggtggccgtaaaggtgctggtgcgcgacgaccagagacaatacctgcccggcgaagtgctgcggccaccctcgcttctgccactgcagccctcctactattacccgtactactgcctcccaggctgggcgctctccacctgcgcagctgccgcaggcacccagtgaacccgcttgggctgaggcagcgagtgattcccgcgctccggctccggaccggcgctgacagctgtaggctgtagcctgcacggggcgccccgccaaggaggcacctggaggtgaaacccagctccagctcccgttagccaggacttgtcccctggcagctgggctgagtctgccctgagggggcgcctttttctaatttgaacagaggcaccctatggcctaggggccctgatcgcccacctgcctggaagcccctgggctctatttattatcatgacaatgttggaattaaattttgattcgaatatgtctgcctgggggtggggttttccctgagcggcaactcctggagaccacatagcctgaatcctcagaatttcaggcctgctgggagctttctgcactaggccacactagttcatggtatccatgctaccaatctatgtgtatctacatatcttttatttttggaaattgcatttgtaaccaaggggtgcgaaaccctggcagtcccaggcagcaccaggccaggggttgatttgaaacgtgaaggattgggttttcaggccctctgctccacccctcctgtgtgtcagagctagggtgggggtgcccgattcgggtgctgaatgtaaggaggggagcctccaagtgtggtgcaagccgggggtctccacatcttccttctctgaagtccaggtacctgcacaagcaggaagcgcctgggagccccggaaggaggagagcgcacacccaggcagccctctgcggaaactttccttggtttctttttatttgtgtaaaggaggttaagacgtgtcgcacttttcagttgtttgtattcaaatgacgattatttttctactcaatgtgaatatccctggccagcctttccacggcgcccaccgcagtgccgctgcctggccctcagtgtctaccttccgccctctgcgactccagtgctctggcccgggactcccctatccgcccctcacttacccttaaacaggtgatcccacctgtcttgtcaacctcgccgcttttcgcctccttaatggcactgtgcactcaactagagtattaactgtaaaaagatttgtgaagtttggaagctctattcgctgtattttttctttaatttataaacttttagtttaacatgc

SEQ ID NO: 1570 - protein, 333 aa, Homo sapiens
MAVRGANTLTSFSIQAILNKKEERGGLAAPEGRPAPGGTAASVAAAPAVCCWRLFGERDAGALGGAEDSLLASPAGTRTAAGRTAESPEGWDSDSALSEENESRRRCADARGASGAGLAGGSLSLGQPVCELAASKDLEEEAAGRSDSEMSASVSGDRSPRTEDDGVGPRGAHVSALCSGAGGGGGSGPAGVAEEEEEPAAPKPRKKRSRAAFSHAQVFELERRFNHQRYLSGPERADLAASLKLTETQVKIWFQNRRYKTKRRQMAADLLASAPAAKKVAVKVLVRDDQRQYLPGEVLRPPSLLPLQPSYYYPYYCLPGWALSTCAAAAGTQ

SEQ ID NO: 1571 - DNA, 2630 bp, Homo sapiens
ctggtgctggacccatgagggcagtgcctgccattggctcagtgaccatcctgtgcagagccagtgcctggtcaaggccccaactgccttgagtgctgacctgtggtgggtcacacacattccccaggtcgtcgcactaaacggcgttttctccactctttttcagagaggaagcagtgcattggtgaaggcaacgttaggtgtgatttccattcctgctgggagacccgggacgcagcccgggagcttcgtccagcctgtggatggagcctgactggctgcagatggaacttctgtgtcctcccaccctaggtgggctaaggttctgctctcagagctgaattgacaggaggtgtgtgtgtgtgctcacttgtgtgcacaagcatgcgtttatgcatgttttcacgcaaccagaagagccattcgtgggatttagccatttcgaggcacctagaagttgaggcagccagctgtgcagccaggtgtgactgttactggcagcattgtataaaagacacgactcagctgccgtagggaggactgggttgtctggaagtattaggctcattttatatttgtgtcagaagaaatgtctgactttggggcagatgacacggtggctgcggaccaggcatggctccctaggttgaaatcagggaaaagctaatagtatcagacagatatgctttttctttggtggctgcaggatttttgctggaaaatgcactattaatcagcacttgtccaagaaagacccatccatttctgttgtcattcaagccacagttcctgatttactcggcaagatactgggccagttcagtgtctctagctgagcctgacctcggggtttgcgtctcgagtctgaaatcctgtttagtcctctgtgcatagttttgtctcattttaacgactgcatcttcttggcacatttattatactcacaactgaatggcacacaatagccttgtgttaataaaagctaccgtggcgctgtgggtgaaccgctgggttgaagtccgatggactctacgatgcaggcatccagaaatatgttgtaactctacctggctccctgccagcctggcctcctcctctgggagagctcctggcatggtcccaatgtgtacctgcatgggaacaacagctgcatgggccagctgtttcggatctaaagatgtgcagtgaaactcacattcccagattcacatccctcatgtttatttgggtcatcatggtttagcatgttgtatatatgtctggagcacttcatacacctctatccaccacagacactcttaatcacagttctgtaataataaggcaaactatacggcaaagagaagcatgtaaatatgtaccaaatccttatgaagttgtaattgtttatatgtaaaaagtatgtatataggaacgggagaaggtgcaaggaatgtgctgaataacatccaaactgcatcgcgtctctgccccattcctgaaagcacacatctagttggagcgtcagttcctctccttagatatcattgttttcactcgtctatcataggcaccttctttacatctgattacaatacccagcatttcagaactgggtttttgcccccaaaaaggtaaatatgagcatttatcactgactcctcctggtccagtgagcagcagcagaattcaagtatttaaaaataaggtgcatttctaaattgcaggctataccttcttttccaaaccaatgggctagagtgaatttcctccaagtacttgggctgtcttactgctagctcttctaacaggggaagtctgtatgaatgcatcaccccctaataaggcaagaggaaggaccctgaaatgttgccagaaatgtactgttacatcaacatttacattatattaacatcatcacactctgtgttcaacacacagaacaacatagatactttagtttgtctaaagtaaaaatccacataaatagcagattcctttgttgacaccagtgtgttgtttaccttgtgcccatggtccagattttgagctggagaaggactatggctgttccttaaagtctctgcccttgcagaatctgtagccttcaggataccccgagtgccttacagggcttgtgaacaccgatactagaagtcaaaaagaagagagtgcccaagtgtgggtttggaggcactgacgcattcgccaactcaccgtcatcccatccttgaaaccctgagagagagtgtgtgttttatcacagtaatggaattcagtttagcctcaggaaactcatattgtgaatataggtatcaaatcatatatttgtttactgtatattttttaaaaagctttattgtaaatttatgcaaaaactaaccgggcctgttttcttacggcggcatgccaggtagtgtgtgtattctcccaggcactcccttcatagtcaccctctaaccacgtgacattccgttccatgctaagcagtattcacaggcctaaaataggtttgtatggtgatctacaagattttacaaatatttttgtattgtgattcctatgatatataccagagaattttttactcgtttgtaaattattgtacagttttaataaaaaatgttttaaatcttaaaaaaaaaaaaaaa

SEQ ID NO: 1572 - DNA, 2480 bp, Homo sapiens
atagttgaccagcttctgcaggggctcctcagtgagagaatggaggtgaggtcagggactcctgccttgcctctgccatcacttccagtgatgcctattcctaagattgatcgtgtcctgtgctgaagatgtttccggaacaacagaaagaggaatttgtaagtgtctgggttcgagatcctaggattcagaaggaggacttctggcattcttacattgactatgagatatgtattcatactaatagcatgtgttttacaatgaaaacatcctgtgtacgaagaagatatagagaattcgtgtggctgaggcagagactccaaagtaatgcgttgctggtacaactgccagaacttccatctaaaaacctgtttttcaacatgaacaatcgccagcacgtggatcagcgtcgccagggtctggaagatttcctcagaaaagtcctacagaatgcacttttgctttcagatagcagccttcacctcttcttacagagccatctgaattcagaagacattgaggcgtgtgtttctgggcagactaagtactctgtggaagaagcaattcacaagtttgccttaatgaatagacgtttccctgaagaagatgaagaaggaaaaaaagaaaatgatatagattatgattcagaaagttcatcctctgggcttggacacagtagtgatgacatcagttcacatggatgtaaagtaaatacagctccgcaggaatcctgaaaaataattctaatgttactatcttaggaatagcaaattatgtccagtcatagagaagaaagcttcataataatacattcttacctaaagctcactgtcatgatgttaggtatttaaattcttaaagatgttgggttgtttattagtggtatttttatgttgtcttattttaggtaagcttctgtgtaaagctaaaaatcctgtgaatacaatactatcctttacaggcagacattattggtaaacaagatcttgccctccaatgaaatgacttacatgttttaaaaaaccgagttggttttattgaatttaaaaagataggtaactaagtagcatttaaaatcaagatagagcattccttcttgtatcagtggggcagtgttaccataaacacggtgtatatgttgttaaaccctatgaagagtaacagtgtagaccagactgcctctctcagatatgtgcctgatattttgtggatacctcccctgcactggcaaaacactatgcttttgggtgttagactgaaatattttaagagtatttaacctttccagtattctgtttcacgcttagatggaaatgtatcttatgaatagagacatattaaaataatgtttacatcttagaaaaaacatagatagtgctagtaatattacttataactgtaatatatagattcagaaatacattttcattatccaaaatcagcttcaacaaatggtttctggagacaaataatttgttttcattatcattgtataatcaggttaatgatttattttttgactaaatgtgcaatttcttatcactagataactttcagtatcagtggtggttacttattacttaaatcagaggaaggattttataaagattaataaatttaattttaccaataaatattcccataatttagaaaaggatgtcgacttgctaatttcagaaataattattcatttttaaaaagccccttttaaagcatctacttgaagattggtataattttcataaaatgtctttttttttagtgtcccaaagatatcttagataaactattttgaagttcagatttcagatgaggcaacattttcttgagataattacccaagtttcatccatgttgaatggtacaaaatatttctgtgaaactaacaggaagatattttcagataactaggataacttgttgctttgttacccagcctaattgaagagtggcagaggctactacaaaaagcaaccttttcattttcactaagagtttaaaagctattgtattattaaaaagtctttacaatgcttgtttcaaagaaccaacagaaaaaaaagctaagaaaactgagaactaacattaaaaaaattaaatttagaataagaatgatttctttaatttgtcctttttttctttggtctaaaacattattaaatttttgtaaatattttgatttaatgtgtcttagatcctcattattttaatacaggaaaagaaaagatttagtaatttcttaccatgctaatatgtaaagttcatgccatccaggcatttaagagcgatcctcatcccttcagcaatatgtatttgagttcacactatttctgttttacagcagttttgaaaaacacatactatgccaccaattgtcatattatttttagatgatgtaacatagccatcaaaattaatattatgtaatgcctaatacttagtatgtaaatgtcacgagatcatttttacattaaacgtga

SEQ ID NO: 1573 - protein, 201 aa, Homo sapiens
MFPEQQKEEFVSVWVRDPRIQKEDFWHSYIDYEICIHTNSMCFTMKTSCVRRRYREFVWLRQRLQSNALLVQLPELPSKNLFFNMNNRQHVDQRRQGLEDFLRKVLQNALLLSDSSLHLFLQSHLNSEDIEACVSGQTKYSVEEAIHKFALMNRRFPEEDEEGKKENDIDYDSESSSSGLGHSSDDISSHGCKVNTAPQES

SEQ ID NO: 1574 - DNA, 105325 bp, Homo sapiens
gatcatccagttaaaaacccaattcctgggttggtgtctacgagttgtcttttatttggttcttatgaaaaaggtccatatccaagaaggagcacatcagggaaaagcacctcaaaatgtcctgtcctgaaagtgtcttcagaagataacatttcaggcttggagcctgggaacagaaggtgcctattggtctttaattaaggaaactgttgcaaatgaagggcatttaacatcttaaaccaccagtggctcaaaggcagcatgaagcccgtgggtaacaaagatgcatttgttgtcccagctgtcctggtacctgcattggcctatacagctgacctacagctaaatgcttcccagcagggcagattataagtgatcttggactccctgggctgtgacaactcaattttcacaagtggcaaagaaagtcaagccaccgtcccctcccgtgcaacacatctgccacaataacagagctggagaggaagcagtcctctgtcaagagagacccctagacatggggacatgcaaggaatgctgaagaatcagaatggcattgtgcagatttcattactattttatctgggggagaaagagcctataaggagcaggaaagaaaacccctacagattgtgctctgattttataaccagattgttggaaattactgacagattgaataaaataatatgctttggagcaggagggaacataaaggtggaaatttaattgacttctatcctaaacctaggagctagggggtaggggaaggtatattattaatcaccactgtggtcacgcctggtggtttcatgtgcagtgagaggaaatgtagctttcaattacatacatatgaatttcaaatgactacctggtgcaccagagaggagaaagcgtgcagaccaggagctgtaccccatgtgtgtatgcacttgagcagaaccacactaccctgtaaaaaatgcaattagagaacgggggggtgagtgccatgggtggggggtaaagccgtaatctgtgagggccccaccttatctgttctctttgaagcacatgttctttttcttcctgcaaagtgcttgcaatagccctggcctgaatggatttcagatctgccttgaatatgaaatacctctggatgcattcaaccattttctaccctgaaagtcagagggacaaaaggtggattgtgtgtggccttaaatgatatttcaggagttcactaaatgtcaagataagattaggggtagcctaggaagggaattctcctaattaatgggaattctttagcatacagtgttgcaagatcctcctttgttaagcttccagagttttttcctctagtgttcaaacaaaagacaagatttttgtgttggggttgttgtaagaattattgaggtttttctttaacaagaaatacttttactttcacggagaagagacccccccccccaaaattaaaaaaaaaaaaactttgtcttgcttgtttgcgtattgaatagctactgtgagtccagcctgtgctggacatcggagtcctagaggtcaataaagacatgtccccggtctcagaaagtgtatttcagtcccagtgtaggcacaaaataaggtctgctgaattatattgcctaagctggaactctagcacgttcattgattcattcaacaaacctttcaaaggcctcatataggcagactaatagtcaactagccaccagattaaaaaaaaaaaggattgaattagaatcaattctatcaccggattaaaaaaaaggattgaattagaatcaattctatctgtgactaaacacgcaggctttttactcagacagacctggacttgagtttggctctgctgtgaatctgtttggctttgcaatttctccatgcctcagtttttccttctatacaatggggacaggaagaaccatctcccaggtttattgcattaaatgaaatactaatgcctactgtttagtactgttctgagtgctttgcatctactgttaaatatgaatgacttatttcctcagctgcttctgattgaacctggagtgtttattcatgatttgggggcatacggctctcggataccttaaaagtgattgagaacctcaaagagttcctgttacacagtctctattacaaaatagctacccatatttattgtattataaattaaaatggaaagcagttgaaaccacttgttaattcattaaaatataacaataataaacccattacatgttttaaaataaaaaacatttttcagaacaaggatttagtaaaaacagggcattgttttccacgttctgcatatcttctttcatgtctgttgtaaatcacatttcatgtagtctctcaaaaactccgcggtgagcttctaagagaatctgagtataaagggccaatatcttagcattattgtgacgatcatgagccaaactccccgacagggtctgggggacctcaggtcacaccttgagcagccctgtattaagtcacttgctcctcaacacaaccttccagggtaagtgctattttcattcccatttcatagatgaggaaataaaggcacaaacgtttaaggagcttgcccaaggctacgtcactaagagtagcagagctggcgttgagacccagctgcttgtcctcagggtctgtgtccccaccaccacaccatggttcacgcagagaacccagaacagtgctggccgcaggaggctctaggccaacgtgagcagctggacgtccttctgtgatgaaggtgatatcaccccattctccgatggtcagttcacttcctaccgaaagcactggcatagctctttgaaatccatgtacagggctttggaaatagccactcataatctgaacatttcttcgattgcctgagtgttcgttctaaagcatctacagggcctgcagccactcacagaggaagactatgtctgtctgatcacctagaaaccattagaatcccccggctatcagggcagctctcctcaccttgtggtgaggccaaaccatcatgcacgtttgcagacaacaaagaaagcgggtacattgaagggagaatgtggaaaatataacttcagcgtagacctctcctgctttatctcatgtgaccaaaaaggttgggagttgattgaaatgacttgcatctgggactacaccaggaggccgagcagacacaggagtgtttctcactcttaaaaaaaaagtccatataccatttactcttttcagctcaaaatactccacagactttgcaacttacctcttcccatttgccctttaaaaagggagtggggggagagaaaagggagaagtgggggaaagccacattagaattcatgggaagaaatgagattgtttttaagacacaggcacctggatttctttgtttaattagcatcagtgaattattaattcagcgcaaaaaagcatagctctttgtcatataaaaaatcatcaataccacaagagaccctcacaaaccaggatgatgataacttacttatatttgcacagtgctttgcaatttacaaggccctgttctgtacttcacggatttaactctgttaactgtgtggaatggagtttttgcccgggctggagccagcaggacagtacagagattttacttcctcaccatcacgccccaaattatggagaaacactccagatttaatcagaagtgcctgggacaagaagtcattaatattcaacaatttttaaaattgcattcccaaactatgtcaaactttttgagaattcaccttgaagaatcaagaggtgcaggcccagctctggggagtgatccaagcagggtcttctgtgagcttcgttcttttccttaattggatggagctattcactacggtgaggtgacccatctgttctgatttgcttaggacttccccacttttagcactgaaagtccagtgtcctgggatcccccacttccaagtcccaggcaaaccaggatgattggtcatcctacgtgcgacaaatgcctgaaagcatcgcatactccgagtctacacccctcttttcttcatctccgtggtttttctcctggcagagttgcttggagcttcacatttgacaagtgcatttggttttgctggccagggctggccttacagcctaacccaggacccgtgcacctccagtcttcatttcccagctctgtcagagcagtggggcacactcatcctctttgggggatatccccttagtgtgtcagtccctaccagagccaaggggcagtagaggctcttgttcctcctctgcctccctgtggcaatggctcaaccgcctgtctttgcttggccaatcttatactgtcagtgaggacttggaatcttgggagtgacaggtaaagactttgggaccactggagcctgctcgtgacatgaaggtggagttctgagtgtacagcagaagagccggctgcggggcccagattcgtggtctctgtggcgactcagcttccctggaactggcttgctttctgagtccaatgcacgaacatttttgtcagttctgtgagctcattgatgtcctgctgatccattccttcaatgcttaagcaagtcggagtcagttctgatggctgcaacttagaaccctgccagctatgctgggtcaagaatggtaatattatccgtctccaccaactagttttatctatcaatttatctatccacccatctatccatccaaccagtcatccatccttctatccctattaatatcctactccagtcccttttccctctgccccactgaccaccatacagatgcgttaatcatttgttttcatttttgcaaaatgtgtattattgctttgtatgcatatacacatagatatacaaatattaagtgtatctcttgatggacctcacatatgtctatactcacagccaccaacaagatcaggatacagaagacatccagtacccagaaaggtctctcatgccccatcagtacattactatctcccccatccagaagtaaccactttctgacgtctatcaccataaataaattatgggcatgtattttttatgtacatacatggtcttgttatatatcttgcctgtttcttcatatttttcaagccttatgttgttaaaacccgatgtgttgctaggttttcaccttggcaactcctgacttctaactcatgtgtactactcagcaggcaagcttcacctgcttagcctcgtccatcccccaagctgcctccacggctggtcatggcgttgtggtcatctccggagtcctcatgcgtgggagtctgctggatttctcagtttgccgacactccagaaggtcaagttttaaacctgggagatgtgggggagggagattaatgggtgagccttttttttgtattacgtccttgatgtgtttgctgaatcttcagtacctcccagacaagggtggtgtggccacattctggatatagaatgctcctcccagccttctatctgatgcatggcgcctgccacttcctcttaggcgtgctgcaggatgacactagtgagccacaagaaggtcaagtgtgttcactggtccttcctgtgaggggctgctcatccttcctgacacaaagcagcttagaaatcctaagaaaagtaaagaaagccgcagagaggaaacaaaagtgagggagagtaaagccaagtttgcgtgtaaaatctttcatgttttctcattatgtgtcttctggctgggaacatggttctcacagcccaggagggcacaacttgcttttatttggcttcagaggcatccagtttgtgaaagtttatgggagcattgcagaaatgtgttttctctgtggagccaaaagtttgtggacaaaatagaccaaaagacaaagaccgtggaagtgtctgacccaccccaatggagccgacttgcttaggaaacagaaaatccttctcatcctgtgcaattttaggaagatcaggaaggctgtactgaggaggatttcagagctgaagctgatacaaaaagaaaataaatgaatgaaagaaaataatcactgtcatctgagtacagcatgaaaaatatcaacatgaccctgatttcataactcaaaccagatgaaaaaaaaacttcacacccaaccccataccaattcctctgatttctttctttttttttggtttcttgagacagagtctcactctgtctcccaggctggagtgcagtggtgtgtctcggctcactgcaacctccgcttcccgagttcaagaattctcctgcttcagcctcccaagtagctgggattacaggcacctgccaccatgcccagctaatttttgtatgtttagtagagacagggtttcgccatgttggccaggctggtctctagctcctgacctcaagtgatccacccatgtcagcctcccaaagtgctgggattacaggtgcgagccaccgcgcctggccaattcctctgatttctaatcaatttctgtggaggtggcatttacagagttcatggggatggaggggactgtgacagtgcaaccagctccaaggcacacagctgccaggagggacagtgggggtgatgggcccgggctccagagttaggcaggaagggagccgagtctgtatttttccatgtatcatctacgtgattttgggaaaattacctaccttcccagaccttcaattctacatctgtaaaatggggttataattgcaggtccttcacagagttaaacactcatgaaattctagaagcaaagaggcatcagagagcctgacacgctgaggtgcccactgaatgtgagctctgtgttcacaggacaagctacaaagtcccagtgcggagtgaccacggaaaccctgggtcaaggtgagtgatgctggagccacttgaggtctgtccccagggaggtactgcacattttccctttcaggtaatatggccatccacttctagacacttgtcctacagaaacaagcacgcggagacttttgtaggaggatgcagcactgtttgtaacagtgactgagtgggaataacctaaacgtccatccaaaagtcagtgttagataagccattgtgtgttcattcaatggatactctgcagtgtccaaaagaacaagtaaacccataagtatggcacggaagggtgactgggtccaaaaataaaagtgtatacaagtattaatgagatgtctgcatttttttttttgagacaaagtcttgctctattgcccagaggctggagtgcagtggcgccatcacagctcactgcagcctcgacctcctaggctcaagtgatcctcccacctcagcctcctgagtggctgggaccacaggtgtgcaccaccatgcccagctaattaaaaaaattttttttttgtagggatggagtcttgctatgttgcccaggctggtctcaaactcctaggctcaagtgatccttccacctcatcctcccaaattgttgggattacaggtgtgagccactgtgcccggcccagatatttgcatttttgtagaaataaggaagaaacaatactgtgtttaagttgagtatagaagaacatagtgagaagaatgtttatcaagcagctggtggtgattttctgggaagaaggtggtatcctaagtaacatggtcatgtaattggtccacatggggtactttgggaaatgaaagaggcaggcacttcgctaaagctgtgcgatgggtactgacctgcagccacgcaggcaatctgggagacatcatggaggacttaccctttgttcgcagagcactcaggactcttgtttgttagtggcaaatccaagtcaaatatgcttggttcatattccctttccctgagtccagcattcactgggactgtgaataagctgggactggacaggggaggtgggaccttttttatgagaacctcagagatgagagccagctcatgggggatgcagtgttgaccaagttgctgtgggaggcagggagaacagatgttgggaaggtcaaacacagagacgtctgccttgcagtccactgtgtatctggatagcatgcgaatgtataaggctgaatgttatggggaaatctagctggtagaggtgagcactgggacaaaggggacctttcgtgaagtccctgtgtgtgatgccggaggcatctgaggacttggggaaccctcccccccgcccactatgagaaatgcaacagcattatcaaagagaggagaagaaagggaggaagatgggccagggatcttgaaaggatgtggttttttccctgcactgggtgtgcgaaggaactgtgcttgaagggccagcagtgggaatgtgtgagcatgtggtgccctggatagtttgctttccttgattggaagcagctgtgggcctttgacttttgagagggacagaaagtttggtgtctttatggtgttagaggttatgcccgaagatttcctgccttctgggccccactgaattggaaccatttttcatcccactcagacatccaagacttacagggttctaaagaagtccccgaatgcccctctaaatcaatctccagacgttttctccctgggagtgttcaaacgattcaattatggtgtgaaactttcatagccagacctcacaagctccttccctctctcccctcccagcgatttgggtcactcatgattctgagcagagaaactatcccttggaaatctttcatgatctaattctcaggggccctggtgtaaacaggagccttaaagcagggtcccagaagatactagaatgatcatcagcttaggagacaatgattctgaactcacctggaccgtttccttacctgtcaattgggaaaaacaatagtagctgccttagaaggttattttttcttttttttaacaaatgtttttacttaaatacatttttaattttaaagtcactttagagttacagaaaagttgcaaagaaagtacagggagttcctgtaagcctctcacacaggttcttctcttgttgtatatatgtcatcttacatttctgtagtgcgtctgccacagctgcaaagctaacatcggcacattactattaactgaactccatggctaattcaaactgcactcattttttcctaatgtccctctctggtccagggtcccatccaggacaccaccttacatttagttttcttcttaggcctttttgatctgtgacaattttctcagacttgtcttggtcttgatgacgttgacagttgtttgtttgtttgtttgtttgtttgtttgtttttgaggtggagtgttgctctgttgcctgggctggagtgcagtggtgtgatcttggctcactgcaacttctgcctcccgggctcaagctattctcctggctcagcctcccgagtaactggcattacggacacctgccaccacgcctggctaatttttgtatttttagtagagacagggtttctccatggtggccaggctggtctcaaactcctgacctcaagtcatctacctgccttggcctcccaaagtgctgggattcagatgtgagccactgtgcccggcctacattgacagttttaaaaggtatagtcaggtgttttgtggaatgtccctcaatttgggtttttgcaagatgttttcctcgtattagactgagcttattgattttggggaggaagatgtcagaagggaagtgtgcttctcattagcctatcagaggtccaggctgtcaatggtaatgttggccttgatcatataggattatattgagaattcagtgacatcacccaagtaaggtgcttagggcacacagcaaacccatggttagacaaatgggttgagtgagtggttattgaggattttgactttgtcaggtaatgtgtcgatttcagacaaagaagaatcagacctgattcctgtcttcaaggacccttcggcctgaggtgtcgatgcatccttcatctcccatccagtgaccttgatcacctttgctttgttcagctgctttccagcggtcacttcctgcttggagttagggctatagctgttggcaactggggtgtgtagaaaaccagaaagcgaagaactgtggcaatttctggctggggatgaaaagcccagtaaacaaagggacagagtctttcagagagtgatggctcagcacgcagcggggaaagtgaaccacaagaagggaggagattctcaggggagcaatgtggcccaaacagacatctgctgtggatcttttaagaccttcctatgtaatgtggcaggatcccaccaaacgccaattcttggttttcttgtatggacaatgaggacagtgacatttgactggcttttctcagaaagttctactcaacctaagttgatgtccaagacctttgggtacacacaggtgcaaagccaaagccccagccctcaagaagctcacagtctcagaatgttgcaaggctccaaaggcccaacgtatggccatggaagtcccgcggccactgagtggctggctgtgcagaacgaggaaaaacctccttcattttttacaagaaataggtgctttttaaaggacaagcctccaaccaagccaacaacatggtcagcgtgtctcctcagaactcctatgaatcatgtcctcatgcttttccattgaaatctcttaggaaacagctcagcaatttgcttcaattctgcaaatttcatactttcaaagaaggcatctaaagaattcctgatgcttgttttgttgggttcttttgctccaatgaacttctggttgaagtccaatggtttctgtggctgaggaagaagcagtgatgtgtatgtgtgcacattgccttttgctcttttcaatgattggaacatatttagtcacacccttctaatcagtaaagagcccacagcacatttagggctgtaggtgaaccacggagacagggaaaaccagttttgttttttttacttttgaggaaaagtggaagatgctagcttagcactacgcttggcctgatctcttaggacttatagatgctccaaatcttaccaaagagcctctcagcactgtgctgcccagcagggctgtatgcaacatctccaagtggcaccatattgcacagtgcatgtgctcaagctccagaagttttaaatttatgctgtttacaaattgcatttatgttagccactgttttccatggaaaagttcaaaccccagaggaacattaaacagtcttacagcaaatctacaagataatagaaaatcagagggctctacgctcttttttcctcctcctccattgatgagaaacacaagttctgcttggagaaggcagatggcctcaaaaggataacacacatgaaaaggtgcaaacctgagctttcatttgtagacatgttggtgcatctgaacagaatccatgtgtggaaccaggtatacttaactcattaaaggttcctgccatgcgtattagttactagggccaatggattccccgttctgtctgagcttatgagttgggttttgtcctttgtaagccacggtctcctctgagtattatacacagtgcttggcgtagaaagggttgctcaggaaggtttgttgtctggcccgctgaatgctctaaaatgcacagtccactggacaagggttttccaaccttggcatattgacatcagggccagatctttctttataggggctgtcctgtgtgttgcaggatggtgagccgggtccctgggctctaccctttagatcgcagcagccagcaacactccctccatattagttgtgaccatcaaaaatgtttgcagacattggtaagcgttccctgggggtcaaatcatccccagctgagtaccactgatgtacataaatctacaattctaattttgaatgatttattgaccatcttctataaaaaagattggattggatgagaacaccaaaacatgaaataagatgaaatgaaagtcaagattttgctgcccgaactacttatgatttagaagagatttgccatcctcaaatgctgaagtggagccaagccatgtgcattccaggggcttctgggagataaattggtttcactcatccaaagccatcagtcaccattcacccacttttctgtttggagttatttaatttcttcttgaatgcttcccatcttgctcaaatttgcaccctgtctctgtccttctctctcttcaaaatgaaggaggttgaagtaggtagaagtttgctcatcaccctaatcgcacttatttatttagaacagcaaaatcctctcgagatgacgaatttgctttctgccaaagttatgcagctgactgtttataacagatcctgtaattaattggattttgtcactagaatgcatgcttttttccctttgctttgcaggtgtgaaaatctcagaaatggccttgcaaggttgtagcttccagccacgttagccagaggggaccagaccttcatcaccttcattttttaattggcttttgatgttggacataatttcttaatgacacagccatctcctctgttgaatctgcacagctttgaatgttcattacgctacaaagttggtctcagcttattttggaattattgtttctccaagcttacttagacaacctctggcctcctttttgggttatgtaattatttcctcatgcagcccatagcttgcttccccacatgtctaaggctactgctaaccatgagatcttattcataactctattgtgagacagaacaaaggcacccagtctacataacctcaccagaggtaaaaagcaactctatccttacccagcctttcccacaaggcttttctgtttgccagaagtgtcggcattcttgactccattggggaaatgtacctatagcaaaaaacaaatctaaaaatcgcataactgactgcactcgttctattttgtcttaaattttattaaccctgctttgcccagaatttttttaatctcttgaggtaagtttccaatcatctctcctccctccttcctaccccgaacacacaaactttggggataagggaaggagggctgtatcaagagaaaatgtcaggcaacaagaggaggtgatcatctatccctcagtgccacatacaaagactgattttaaattaattagccaatgcaggaaaacagcaacaacaacaaaatccccagcaagatcaattgctcaatatgccctgtttttaaactgatttgatcaaatcagtggttgatctgaggtcctgcttagacgaacccatgtaaacatacattacaaaacagatttttcaaggaaatctaaggggctgatacacaataaatatttaagttaaaccccaaactgtgtaaatagtaaataattttgtttcctgtcactcacagctctctggaacagtttactatttaatgtatctgaacatcaaaagaatcccttaacttgaaatattttccaaaaagtcattaaataacatatttcttccaaacaaaacccaagctggaatggaaaccctcacacatatacctattggttaattaaggttaggattccctcaagagaaaagagctggtcaaaagaggttggttctgtccaaagacaagtttaaacattataattcaggtgaccccaaaggaaaggagaggacctgctagaggactctcagtcagaagttggcacagatgttttttcttctgctgcaggtgtgaaacggaatggtagtatctgcttacctttgtgcagagaccattcctcccaggacatcagcctctatgcatctattgaaccaacacgacccaagtttgcgatgttcctcccagagaaagaaagagttcagtctgtaacaaagtggcgtagtttgatccttggggtcatagccccactgcggcacctcggcttcgcatttgcgcagagaggatgctggcaatctgatacaggacttaaatgcaaaatgaatgccaccttggggtttgtgcccttccatttcataatcatgtgacctttatttcctttcttttctgttgacaattttttctaagagatttggagcatctctttcgcttgaaatttttatgacctttaaaactcctgcctccattctccctaagactgccttcagaaaagctgcagctgatcccagcacatgactcacacagcatctacctgtcacattccaagtgcctcgctgtgtcgtgggcatcaagtggcaaaatgaacaaagatcgaatgtcaggaggccctatccagggtcacatgcttggccgcacttcccctttcaagagctggtgggagaaagattttgagcagggtcaccgaagacaggtatgctctgtaggagagcaaagagaaggaagaaatgctttgccttaatgactttttcaaagactcaggatttccctggatgcctttctggctttgaactaaagtgctctgaaagatcaacttgcttggctatattgcccttggtaacttttcttggggaagacaggaagcttccccactaccctttttttaaagaaaagtattttttaaattgtggaagccaggcgggaagccagcctcctgagtagctgggattacagggacgcaccaccacactcagctatttttttatatttttagtaaagacagggtttcactatgttggccagactgatctgaactcctgacctcgtgatctgcccgtcttggcctcccaaagtgctgggattacaggcatgagccaccctgcccggctgtcattattctatttttagtcttctgaggagctgccatactgtttttcacagcagctgtaccatttgcattttcaccagtggtgctcaagtgtaccgatttctccatatcctcaccaacactggttactttctgttattttgataatagccatcctaatgggtgtgaagtggtatctcattgtggttttgatctgtttttccctaataaggagtgatgttgagcgtctggtcctgtgcttattggccattagtacatactctttggagaaaagtcttcaaatcctttgccatattttaattgagtttgcttttttgttgttgcattttggttttttacatattctggatgttaatcccttaagagataagcaatttgcaaatactttcttccagtctgtgggctgccttattactctgttgatgggtcctctgatgcacaagtttttaattttgatgaagtccaatttgcctattttttcttttgttgtctgtgcctttggtgtcaataaatcattgctaaatcctttgtcatggatttagcatggaaaaagctttctccatatgttgtcttctaagagtttcagaattgtagctcctacatttaggtctttggtcaattttgagctaatttttgtatgtggtgttagctaagggtccacttttattcttttgaatgtggatatcctgtttttccaggaccatttgttgaaaagattgtcttttcctctattgaatgggttggcatccttgttgaaaatcaatttcacatatatttgatggtttattcttgggcatgccctcaggaacttttactgtattcatgcattctttctttgaatttgccatatttttgtgttatccatgttctctgtgcctgtctcactgttccaccagattacaaacttcttgagaatggtttctagattgttttcactagtttgtgtgttgccattgcctagtggctttatttatttactggggctaatctgatcaatgtagtcaggctggctatattagcataaatgacctggcaagtgggtttgcattgatccccatttgaagcttgcccatcctgagcacgttgtaggacgattatgagtattctaatgattttgctctaccagcctccttctctagccagtgagcatcttggcagtgcctggcccattgctcacttcttaataagtgttttgagcaaacagataagcccgtggataaatagctgttgagaatgtggagtagccactggagtctgctacactcatcgggggagcgtggcccagaggggttgaatcacaggtggattctccttttcagtccccttttctggatcttctttctctttctggatctaaactttggatcacctcaggtctcagcctcagatctcttctccatccacatttatttccaggctaagcttatcctgaagctttaaatgcaatccatttgctgacaactgctgagtccaaatctccagacccaccctctctcgtaagactagtgaagccactgagcccttctgagccagtgtcctcatctgcaaacaagggatactatgatcttccttgctgctgtgtattatagatactgtgtgccaatgccgggcacctagaagtggtcagcattatttcagtttatcttattaagagtcagctgtaggaagcccctaaagactacttatattatcagatattccacaataaagaacatttggaaaaaattaaaacaagagttaaaatgtggaaatctgcatgcatggcaggcagctgaaagccaccctagactcctcaaagtgtggagggtgtatactgtttgtacttttccatgttaatctgttttcccaaagggtttgttttgttttgttttgaggcagagtttcactcttgttgcccaggctggagtgcaatggcacgatcttggctcaccacaacctccacctcccgggttcaagtgattctcctgcctcagcctcccgagtacctgggattacaggcatgcaccaccatgcatggctaatttttgtatttttagtagatatggggtttctccatgtgggtcaggctggtcttgaactcctgacctcaggtgatccgcctgcctcagcctcccaaactgccgggactacaggtgtcagccactgtgcccggtcctcccaaagggttttagtttgtcgattccttttgtcttcaaccagttgagagcagccatatcaacagaggccagagtgatttcaaactgaaaatgactgtggtgttgagctataggcctggtgatgctgcagagcaggagagccccaaaattggggcttagccctggagggttcttggcttagcccaggaaagactttaagggtgagccagtggtgttcaacaacagctttgattgaaggggccgtgcacagcagtggcagagggactgcaccttgtagagcagggctcccccataggcagtgagcttagagcaacagctcagagttctgtggtcatagttatactcacttttaattatatgcaaattaaggggtagattatgtagaaatttctaggaaagggtggcaacttctagatcactgggttgctgtcacggaaagggcgataactttcaggtgctgccaaggcaatggtaaactgacatggcacattgctgggcatgtcttacggaaagcagcttctaccctgtccctgttttagttagttctcaatttggtctggtgtccaagccccacctccacagtggagtcccatctcctacctcagtgaaaaatgagtgggttatgtaaccaacgcccggagtccatttgctgggctggtggtagtgggttggggtggtccagccaagaaaagtgtgtctaaagaatgaaggtgggatggggcagagggcccagcagctgggggaaggccctctcagcatgctgggttatggggaaggcctccaagaataactcttttcctctttttatccccagaactcttctatgggaaatggcgctttgagtttgaagtagagatgaaggttggaatagaaactagttgagcactaaaggaaaggcttttgagatatgaccttatcttgcatgtaggggctgcctactctctagctgcaaggactatggggtatgaagaattcccttcactcacacagaacttcctacattttaaagaacttccacatctttccctcttaccaagttgcccaccaaaatcctagaaggcattttgattccttttcatcagtattctcctgcctctaaacttcaatttgtgcaaaatccagttggttctgcccccaaaatattttctgaatctcagctgaccacaatgcttttttccctatcactataaccccaggttaagccatctcctattggcctacacaagcatcccacccagtttcctggcttttatcctagatcagtacaacccattctctatatgcagctagagggcccagagggcagagctgagagtcacagcaggtggggcctgggcctggaggatggagctaagaaccaaagaggcagaacctagcctagacaagggagtggaaaaccacagagtgctgttcccaagtccttgcaacttcttgaaatttgtcctgctgcatctctaatttggttggggtaagtgacccctttacttagtacaatttctcccttgtggattggaaatgtctaccctatcctatcattgtattttgcctgtcctgccacagtattttggaagcaggtagcttgctttctaggttcacagaggcacagatgaagaggaattttgtctgaggatggaccgtacaaaatgtctcacccatactgatttagatgaagacatttggcacttttgacctgatgatatttagatgagattttggacatagagttgatgctgtaatgagttgagctggtggggatgggatgttttgcacatgggacaaatatgcatttttgggagccagagagcagactctagtggactgaagtgtggtctcccacaagatatccacaggttccacctggaatctgtgaatgtgagcttatttgaaagaaaggatctttgtggatgtaattacactaagcaatgagatcattctggataggagtgggacctaaatccaatgaaaaatgttcttagaagaaaagagaaagagaaaggatggggaggagcaggccacgtgaggatggtggcagaaattagagttatgctgccctcaacctggaaccactagaacctgaaagaggccaggaaggcttctcccctggagtctctagagcaagtgcagccctgccgacaccctgatttcatattgactgtgagagaatacatttctgtttaaatgcagcaattttgtgacagtatgttatagcagccatgctaacacactccctgtcagcctaggaagggttgtcaaatgtcaagcttgattccagccctgcctggggcttcgcacttgcagtctcctttgcctggaataccttttcctcagggatgtaaatgcctggctccctcccatccttgggacctgctcaaacctcaaccacctttgaggccttcacagaccacccattgtaaacggccccccctagttactcgatgtggcctcaccctgtccaatccctttatggaaactttcagagtctgtagttttgttctaccatgttatttacctgtttattgcctctattccccaaccagaaccataagcatcacaagggctgggatcttgttccctggtgccaaaaacagtacctggctcacagatggtctttagtaaatttgctgatggaatgaaagcagggaagacctccttctttgcagagcgcatcttgccttacctttgtgtacagaggaagaaatgggctgaaaaccatcagcaagactgggacaaagctcacactctcccctccaccaccctgggggcccctgggttcttgcagggcctctgctccgtcactgggctctattctttccttttccggctgtggacttttttctagggacccagggtcccatcttgctttgtccctggctctcctgtgcccctgtcacccaccactgccctggactcttgactgtagggtccaatgaggtcctgcaggtgttatttgcccctcccccaattctggcctcagtcttgttcttccttctttcctcctctccaggggcaggctccctcagggtccagatcacctttgtcagcttcacaaagtcatggtatcaagggcctgtgttctctccaggtctgtgtagctctgtgttgggtgggccattgccaggcccctgtgtggaacccacaggtaaatgaatgaatgagtcaacaggaccaaacctgcaaatagctcagctattcacaaagcatgtgtgatgcttggaagtcatgtaaagttatgacccattgaccttccacctcctggggaatccccaagtctagccaggaggttggggagccctcaggcctctacagaaaccagagacatttcggctggccccagtagctccacgggcttgtagctgccttacaggtggtgtgccttgcttctgaacaaagacccagaggcaatggaggggaggggtggccggagaaagcctcataacatgaggcagcattgccatagggtcctttgatcccacctgcatgctcccagcctctgctcccaaggtggtgcccttgttaagttggcttcaggtggtgacaggcacacagatccccaaggcaggggattcctgctttctcctctagagaaggggctgggttcatttctatttgaaagaaaccccatctgttagaggacatcttgacaccaaccactccttgttcacatgcttgcagatgtttgctcagttcagcaaactcatttgatgagcttcagttgggtgccaacacctgccagatactgcaagaagctgaggacatgaaggtgttgatggcatgtacctgaaatcgaggggctcccctgtcgtcagcgggatgtgccagggcaaggacatgctaccacagagaagggagtgcaagacagcgatgaaatgcctggcattggcatcagatagacctcaattatggccctcacacccccatttacgtagctttatgacccgagtccaggtacttaatttgtccagacctcagttccccagatggcgacaagggattgtaagagtacctatccaatggttgacatgaagataaaatgagatcagatatggaagagcttagtgtggtgcctggcacatagtggagactcaagaaattgtggcttttaaacacaataatgggttatggttcatctacagatttgcagaaacccacctccggtgttttctatctggccatgtggaaggtaaactgcatcctgcctgtgcttgcgtcacactcaggaatcactgcgtggaaagctcctcctaagatgtccttcaagagccaaagtagaattctcagctgagagacggactgttgctagagctgcctccagactgtctctcggtctccttgcagcagacatgatacaaagtttttcactttacaaataattcctctactttgcaaaaggagtgattttttgcaaactagggttgctttagagtcaacctctagtagtgcctgacagcttctgttgctctgtagtgaacaaggagctcttgttgggggaaggaggcttcgttgggcgatgggaacagaggggtggtggcagcgcttcaccacttcactggggcagcagccaggcagcactcaggtagccctttggaacgtgggccacaccctcaactgtgatcacccaggtcctggtgagacctgcctggcctttgccagagtggagggacactggctggaaatcctcaggcctgaagctgagtcctgcctcagaagcagccccaccagccagccagatgctggcagctgctctcccactggctgcccagacctgccctcctatgtaacgggatgttccctcttacctgttctcttcttcacctctcagcactggagcacttcctcagggaccaaggttgcattgccctgttctaacaccttggacttgtccttccagccactgtcacatttgtcattttactttggccagacaaatgttgcctccctgctaaaatataaactcctagagggtaggggcaaggcctgtcagcattgtgcctgataccgaggaggtattcaagtgtttgctggatgcataaacatggaacagaactagggccagccactcaaccagtcaggtggagcggggttggggagggtgggtccccaaatatttttatcactgtggtcattgtaacaaaaataataacagcttatttttgtacagttattaggatgtgcatattatcatacacatgtatctcacttaaggtcctcccaatcaggatcttagcgagctagctagtatcattatggtgattatttttccaaggaggaaactaagcaatatgctcacagcgaatactttgagtggcatctgaacccaagctgtgatgcacaggcccttgccaccagctaccctgcaggcaagctcaagagtggagcctgagataatgttataaggtgcatggacatgacactgatactaaatcgcataatgacaaggctgctgcctccttctgttccaatcccgactgccccaggacagcctccctttgatgaaagcatatttttaacacctccccaacacagaaagagaaggccagccaggaactccacagcccacagtcatatcttgttagaatgttaatgatggagttctgtgctttcattatatgtatttttatttttgtgagacaggttctcactctattgctcaggctggagcggcagtcactcatcttttgtgggcttaactgccatcatatgcctgactttagcgtctggcatgaattaatcccttattcatgctattgaggaaaaggcagatatgggcttagaattttcctattatgagcctcaccaggcatctcattccttctgggctgatttggtcctgatggccacagcagggagtggggacagctggtctagcagggtagctaagctacatatggagaagactggagaactagggcagaagaggaaaccaagggtaacctctctagaacacttgatatataaccagctctggtaacatatatgcagtacggccatattttaacctactttatgtgtttaatttccataaaaacaaccaccccagtggtgatgacaataaccaacactaacatgttttatcaattagaaagtattgttgttccaagtgaaagatagatggaaatgggcttagaacatagggattggggtgcccggatgcatgtctcgttcaggtgaggcgtgatgcagtgcctccgacgatgccactgcaggcctgatcccctccaggctctggtccgtcttccacggcttcgccttcaacccgaggctctccagtggggcagatggcatctctttcctggaagctccaaccaacgttgctgatgagtcactggctctgactgggtgacatgcacatgcctgtttaaacacctgtccagagggtgaggcatgctgttcggactttggagtcaaaaagacctgggttaaaatcgtgattcccaccattctccccaccccttgcctacctgcctggctctggcaagccacctccccttctgagtctcggtttctgcattcggaaagtggggataacggcagcactcacacagtggagctgtgaagatgaaacaagagaatgcggggagggcagcgagcacctctgtggagcatctaccacctgtcaggccccagcctaggtactgggaccacagcggtggacaaggagatggtgacctgcagcttctagcaatgtcgcaggggtgacagacactctccacatcagcccagaaacaggatcagagaaagtggtatcttcagaaatgctgaagtatgctctaaggagaagtcctgggtcttctccggagcatcagcaatgggtgactcaacctagcctgagaggtcagagttttccccaagaagctgtccttgacctgtaatctgaaaagagagttgatggtgcagcggagcatccctcatagggtcgccgtattgctcctcccagaacccaggaagtccattcctaccgtgtacttccacctgtgtggaacacttcccatgactgcgtgggttcgcctctttgagtctctgctcaaatttcctcttcactccagtcaaaatggtgccagtttcttcacgctacacatctttctctgcccttcccattactgtctctttcatcaagcccaatgtcatattagttaattctttgttttgtcttagttcttggaggcatctcatggaggcaccatcttgttcccaggggtaatcttagtacttagaaaaagtgtctgactcccagtaggtgcttaataagtagttgaatgaataaagggacaaacacagaacccttttacatgactttcatagtgatgtgagttgcgacatctcagtaactaagagtttaattctaaggttttttttttctttttttttttttttaaagccaaatgattcccatttcctccccaatccatcagcacgttccggcaggagattttgctctctcggagtcctacgtctctgagaaggtaccaggtcaaatcctgccccccctgcatttctgaatctgaattatgacttccgggcttgattgtgttactcttttgtttaactgtgtcctgctaaagtggtttgagctcattaaaaacacaattgtgaaatttctttcagaagaaaatgcgtctgtgccctagcttgagaagttctgtgaagtccattccttattttaggttttgaaagttccagaatccggcagccagcttagatttctgttcttccttcccccacccgcagtggcttctcctccgtcccattggtttttgctgccctctcaccgttcatttccttacttctctttcaagtttgaactgttcccaggtgtgagggaggaggaaaagtaggtgacatactaggaatgcagaaccttcaatatcttttttttctctagcgctggggacagaagtttaaatagtttcatgtaaggaaaaaaagctagctgtttttttttgtgggggggtggacccacaagcctcaacaacaatgaatcacctgcactctataaattcctctatttttaaccactgcttttgatgtttaagagtggcaacttaggtttggagcccaacttcatgttcagctcagccagcatctacaaatggatttctcaggaccacgacagcactttaggctgttgtaggacttcatttcctgcttgtggtagattgcaaatagccccaattcttcacacctctcttactacaccctttgccatggtgtgccctcctgagtcacaacagcttggccatgggacttggtttggccattgggatgttcatggagccaacagaggcttgcatggggcccgtgtgttaagctttcatctctggagccccttctcctgctatgagaaggacatacctggctggcctgctggaggaaaagagacttggggagtagaggtgagtaattctcattgtctcagtcaaggtcaacccggatcctccagcagctatccccagacaaacgactgagtccagcagggggtctaggcagtccacagagctgcctagccactggatgctttgctgaccatcattgcagtttgaggaacacttgtaatgcacattacgtggcaatggataactcatacaccatcctcaaaggacttccaatctggtgagaggcaaaagtttgcacataaccataattactaaaactactatcactgctgggtaacatttatccaatgcttatttattttgctccaggtcctatattcaatgcttcactgtcatttaatctgtgcgacaacgcttatcctcagttcacagatgaggaaattgagtctcaaagaggtgcagtgacttgcccaaggtcacacagctaggcaagggggatgtcagtattttgatccaggtctgtttgacttcaaagcccatgagtgaggccattatgctttcctgcaagtctaaatgtttgagcagctacaggaggatctcaacatattatttttttaaacaggcaaatcaggttgctagaaggggcagcatttgatctgggacttaaagtggctttggtcaggatttcatgcaatgaggtgagaatgaaggagtgcttatgtgaatatttttattctgcaaacagatcaaggtatttggcagctgctggaaagttttccacatccagtgattggctgcatttggtggacacagggactcatcactatatgaactttaaagggatacagcttgtgaaaaattcctctgataaaagtcaaggctacttcaaggtaattaaaacacacaggtgtgtttgtggcatgttgacttaacttattcaaaagcatctctcccatgtatctgctgagatgcttgaaattcccaactttggctgaggcattgaaggctccagttaaagtacacacatgttgtttgagataagttgagactgtgtgtgtgtgtgtgtgtgtgtgtgtgtgtgtgcgtgcatgcggtctgggtcagggctcctgggagggatgggaaaggtatgagttagaggcattgctgaaataaaacaaataccaaaatgcaagagattccaaaaacaaatcgacttcctttacctttttcccccaagggctgggtgctgttgagagatggaatctgtgcccttccatcaggaagtggtctgtctatgggtatgaggctccaggttagcattgcattggatggttgtataatgtgctgcttcggggtccaaatggccactctttctctcttccctgcatggtttctactcccaccagagatggttttgaacgagcacttatgtcttgcctgctagaactgtgaaatttcagactttctagaaaaaaactaagcatttatttcagtagctcttctcattccctgaccaatgaaccaacatagccattctgctgctggttctggagacaattaccatgagcagcatccatgttctttacagcctactccactctcacagtaagttgagacaaaacacatcgggatgcttttgactgcgagtggaagaaacctaacttgaactggtgtcagcaaagatggagatgtcttggctgatgtaggtgaaaggtccaaggagccatgttgggtccagggcttatgacttagccttgattccctacttctactttctactttctaccgattactctgtgttggcaccattcccggagagacttttcacctcatgatgacaagtactgctggcaccagcaagctttcatctgattttctcagcggctccccagaaaaacagaagagcctcttttcaaagtcccagaactgaatctcctgggtcctgagcagccaggcttggctcatgggcctatctctggacaaatcactatatttaaagttgtattaatttcttattgctgctgcaacaaatcatcatgaacttaatggtttaaaacaataccaattgattatcttatagttctggaggtcagcagtctaaaaataggttggaagggctatgtgccttctggaggctgaaggaaagaattcattcccttgccttttccattttctagacattgcctgtgttcctctgctcatagccttgtaccagcccaacttctgtttccattgtcacagcttctctgacgctgaccctccccctccctcttaaaagaacatttttaaaaattacattgcccaccgccccccacccccgataatccagggtcatctcccatctcaatgtctttaatcacacccttaaaatcccttttgccatgttagttgacatattcacaggttctgaggattaggacatggacatctttggggataccattattcttcctatctcaaagatgatgtatggtctgattagttaatccatagtcacaagcctggccctggagcgtcccctgaaaccacttggacagagaaggggaggggtggttccccaggggaagatgtggtccattaccagacctggagggatggggatgctggcagggcaacaacagcaaatgtccacagcagaaaacacaggaaaaaacttcaggactcttttgaacaagttttgttgcttttgggatcacccgatttctcttaggctttgaacacattttattgatagcactaaagttcagaatgcattgtgatcattttatttcacggagaatattatacacagtgtacctcatttgtaaagcaagggatttggagcctggcacttcctccagtgcatcttagaatgaaccacgtgccagtgagggaagacacagctaagagttggacaacatggaaaagcacttaattacttggtttttgagtaagtccagagttcctgctgctgtgggtgggtggggagaagaaattccagcatgatggaaaactacataatgtattatgttactctcccttaaatcccttaaattaaaggaaaaacaatcttcaaagaatcataaagcacataaagagacaacttgaggggatgcttatctgagataaattgcaacattcttaatggctgggttttgaatcaaaatgtaagtggtaaggactcaaagtatcagtcgcacatctgctgacttggaaaaagttgaggaaaaataaacacaatgaccaagccgtgcacttggccgagccccagcagtgtcctgatacatgacttctcctaggggcacattggatgctgaggcagtgaaggaggatcaaggaatattggcagacgtctgcggagaagaatgcctattcattcgtgtcctctgtagaggtcatcattcctttacatgaccttccatcagagattatggaatggaaactagacagatggagaggcagtgagttgtcaatgatacacagaagaaaatgggaaccattaaaaccttgggtatgagttccagaggcagcgctgcttaagcattatgaactctgtccctggaatcatgtggagtcaaatttgaatcctgatagactgccacttaatagatgcatggttgtaggctggttactttgaccttttcgagccttagttttttaatctgtgagatggggataatgttagcataaattttgttgagttgtcacaagggcaaaacaatgatggaaaccaccagcttgccattgagttacatgaattgtatatttcctttgcacatttcttagcctggaacccagaaggctttgtgatcttgccaagtctccaagccggctttacaatgaattacttcatattgtaattgaggttacctttacttgacttaagtgtattaatttagaaaggaattttatgtcaatcactaccatgcacagtaagcccgattccacagcctgacaaaggctccaagcctatggcctgctatccctttgtacaagcctatggcctgctacattccttttgtatccctttgttcaaaaatccctttgtacagctctctctctgttcgagagctgttaaagacacatcgagtcattgccctggccatcgtcagaagccagaagaacagtaggaaagggagctctttcgcttgagagctggtgttggcgagtgtcactgcaggctgctgcctcaaatcatggcgcccggcttgctttagggaccaaggacaatgctgcctcctctgatcatccagctgaacacactgtcttcttctcttagctctgtgcggcgttttatgttctcagcatcctggatccttggcgatctatttctgaacttccttacctcaactagagtagaagacccagagggcagggccagctccatcctggtatttggctagcacctcctggtgcctgagaggctcatccagggtttgttgatttttagtcccagtgaagacaagtggtggtcggcttcaagctactgaaggccatagacccagagagtggtctaagcagccatgatacctcctgtgtctgaacatggtacccggaaacctcctcctactccttttctccttttagctgattagtatattttctattcctccagccatcccccaatccaagaactttttattttgttgaagatggaaattttaattccaaagagatagtaattattatggtctgaatatttgtcctctccagatttatctgttgaaatcctatccatgaaggtgatgatgtcaggaggtggggcccttgaggggtgattaagtcatgagggttgcagccctcatgaatggggttggtgtccttagaaaagagacccccagagagctgccttgacccttccacaactgaggatgcagtgagaagtcaccatccatgatcagaaatcgagcccttattaaacaccgaatctaccagcaccttgatcttggttttccagaccccaaaaatgtgaaaaataaaactctgcggtttatcagccacccagcttatggcgttttgttatagtagccccaacaaacaaagataatactaaaatgatccaaattctagcccagcaggaacagaagatattgtgagtcttgggtttttcttattttcaaagcatcaagtgcaaaaacaaacaaataaacacttggattcaagggctaggcaggatgggatgggagtggggggatggagaacttcagcatcagcttcagtgctggaagcttgagtgctactctagttactgcagctctgtaccaatttacccagagtttagtgctgtaaaacaaccatttattatgctcatggattgtgtgggtgggaagttcggacagggtacagcgggacagctattcctcagttggaagtcttgagggctgggagctcaaatcatcggaaggcacattcactcaggtcagtggctgacactggtggtcggctgggaggcctcggtttctctccacgtaggtttctccaggtgatctctccaggtgggcttgttagggcttcctcctggtacagcagctgtgttcagaggacaggtgtcctgagctatcaagccagggggatgttgtagcactcttttggactgtcctcagaaactgctctggtcacttcagctgctttctagttttcagaagctggtcgttaaggctagtagagggcaggacccaattcaaccccattttttagagatgaggtctcgctatgttgcccaggctggtcttgaactcccaggctcaagcaatccatccaccttggcctctcaaagagctggaattacagatgtgaagcactgcccctcccccaaccccatctgttatgaaaggagggtcctttgaccacaagtgccctgagaagtcaggaggacttcccagtctcagacatttttatctgagctggagatggggacagcctcccacacacaggacttggaaggctatgaaggaagtagggggctctcttgggaggtcatttcccttggtagggacggttgtgtgaatgaacttggcctttagggagaggagcccgactctcacctgaagccacccaacctgtgcagatggctgaggaagccctggacaccacaggaccgctaacccaggatctttgttgactttgctcccaggccactgccccacacgcaggctctgaactcctgggagaggtagggagccagcccgaggcgtgagtcaagagtgtaaagtacaccgagttccttggcaagcaggctcttcaaggggaaggtgtcactcggggaacaatgagaaatgtgtctttccctcagcccctgatagaaaagataacaccccttgagcacagccttttctcatctgttcttgctcttggatggggggctgctactccggagcggcgaactggcgggcgggggtgcgcctgtgagtgtgagcgcgcgtgtgcgtgtgtgcgcgcgctctcgtggccttccggcagctggcagctgtcccggcccccaccccaccctaccccaccccacccagccgcgccacgccacgccgcccccgcccctcgctgtcctgggtgcgcctcgggccgctgcgctcctggccagctccccccagcgcctgggaggcgacccccagtgcgcccgggttcaaaggcccggcgaggcagttccagcccctctggggggcggggaggcgacgggggtggtgcagaagccagaaaagcccgagccacagccggccagctccgcgcagggatgggcagcgcgctctgaaagtttatgaccgccgcagccaactcctggccggagctggagacgcagcgagcgatcggccggcctcgaacccccacagctggagggcgaggccagctgtacccggccccagtgccctttcgcggccacaagcggccgtcctcctggtccggtgctccggcgcctgatctaggttcatggagccggggctgtggctccttttcgggctcacagtgacctccgccgcaggtaagcgcacggggcggcgcgcctctcctggcgcgagcgcacacaaaaggacccagggcgggggacccgaggcgcggagaagatgtgcgtcgcggggagcaaactcttgcctgggctctgcactcgtgaagacgcctgggggagggctggggagcagaagcggcgcgcaacgactacccgcacgggctccgggagttgcagcccgcgcactggctggagacctgctgcctgggccgacttggtcaatttttcatgaaactggggacttttcagaaagtttgcgaactattcagaggctgtgccaaaccctggcaaagtttgcagaaagtatgcaaaatgcatgcaagttttcaacgggtgcagatagcttgcaagcttttcacagagtgtgcagatagcttggaaacttttcagaaactgcgcagagctttggaaactttgcagacattttgcttgctccacccccctcctcaggtgtttgggggtggcgggtgttgaggggtctgcacactcagcttaggagcccctcaatctgccttctgcaggattcgtgccttgctcccagtctggggatgctggcaggcgcggcgtgtcccaggcccccactgcagccagatctgagggggactgtgaagagactgtggctggccctggcgaggagactgtggctggccctggcgaggggactgtggccccgacagcactgcagggtccaagccctggaagccctgggcaggagcaggcggccgagggggcccctgagcaccaccgatccaggcgctgcacgtgcttcacctacaaggacaaggagtgtgtctactattgccacctggacatcatttggatcaacactcccgagtaagtcagccttttgtggtgaggaacgtggctcccggaccaggcccacatctgctcattcccaggaggacctcactccaccccagccccgctcagttagcccagagcctgccctggcacagcctttagctcttgctggggcctcttgccagcccaggtctcttctgcaggtcaggggtgtgacccacatcccccctgagggcctggcccaagagaaactcaatcctgagtttgatcctgtggaaggaggagccctccctctgaatgaagtgaactgaccagggggattagatacctgagatgtctctctgagcctcttttctgagatagagaaagccccgaaagtttatctcattccccaggggccaagggggctcatactcactgttgaccccaccaggatccaaggggtttaaaattccttgaaagcatcctggtctccagggagtctaagggtgggtttagctgagcctgacagaacctgcacagtccactcggggtagaattcccctgggatgggctcccttccttcctgtgggcccccctggatgccaaggcagggtgaattcacatcagctcgtccttgggccttccacaggctggctccagtcacccactgccatggtcacagagggccttcccttctctcctgcagtccttagaaactctcttaccctagggcctagacagcaccatcctgaatttgtcttggggttcgtccagtggggaagtcagccttctcctggggccatgtggagagagtgtggctctgacagggggaggctttgatgactcccagtgttcagggaacccctcctgcaggcacatcatcttgcaggccatacagagggcttgaccttgcctgggtcaccaactctctggcattggcttccccatctctaagatctgggacttggatcagacacctctaagttctgttccctgggtgttcatgggatctcttgggactcttgcttgtaccctattagggattcttagctgagaactcagagatggttgtgaatgcaagcccctggaagcctggaaaggcacctttgccaccgtgtcccggagccgtcttgattcaggttcctcacggtcacctttatccccaagccccataacctctgagcccttggtagcagctttcatggggctcacttacctaccttgtgtcatcggcacctcaaaaatgaagtgcagacgagggtagtaaacctgaggggtggaatgtctttcagaccaggggacaagacctctaatcacatccatgatagatctggaacatcaccccaccatgcttgaagggcaggcaggggcttcacattgagccagcaggacacgtgcacaaagtcctgcactcagaaagactctggctcggcttaaagtcctgctgtcactgtcttgaaatccttaatactttctgaacaaagagctgcacatttgcattttctcctgggtcccataaattctgtagctggtcgtgataccctgatttgctggctgggctgtgtccacctagaggatgggaggtgcctccctgtttctttccctttgtggggaagatagaagctgtgagtgttgggccatcatcaattgcctcttatcctcagatagcgaggggagtcacctttccttgtagcccctgcaccttggcactgccctttctgattcttatcctgcatcattgtgctctgatcaaattcacttcatagaatggagggcactgggcagtcaccaggaaccgagttcttgtcttggccagaatccccagctgtgaatctagaaggagaaagaagaaagctaatggaattacagacaggaacctggggtggtgggcaggtgggagaggatttggaaaccatctctttcattcgttgcctgtttaccaaaccccggagcactggctggggaggaagtgatgacttgagacatgtctgagagtctcaaccaacaccctgtgatctgtttaaaattctgtctcatgcatcctgcgatctgtttgaagtcctgtctcatgatttcgagtttgtcctgaaatgaagctgtggctctctgactttttccaggacagccaacttgataactttccccctgaagtgtgatttacctcttcccttccttcccgacactggttcaatttaaacatgatgaaagaaggattaaatctggtgtttgggcatcccctgagctacttgggaaacaaaaacgacaatagccagacttgagcattttgaaattagacaggtaaaataatttttatgaggcagaacttcccaaatggcctccttccctcccttcctgcctccctcctttctttcttaccctccaaacttcctcctgccctccctccctctccccctcccttctttccctctttcctttcccttcttttccctccctccttcccttccttcctgaaactctgtagatgtgtagataggtctgttgtcatctttaaaatatctcaggcaagactgcaatttgagaaaatgggctgtggtgacagggaacaggagtgatggggaggaatctaaaaaatcactgaattgagcaaaagaggcactggaagtgagggacacagtcttttctagtggttctgtctccccattagatcacaaccccacctgtcacatgttcccctctcctgctgtcacgccctcttcattcatggactggtctccctctccaaacttctccaccaggtgtgatttctccctgtcccagcggcagctgttctgggcacgagaaggagccttgattcttgtgcctcagtcaggggtcttgaactttgggtgcttttcacctttcagagcctttcctcccatggcgcatccagctgcgtgaagacagaatcaacactcctagttgatctttgatggaaattgctctgagtacggtcatttttgctcccttcgaggatctgagatgctgcaggagtcatattgggagttactaccgagacccgctttgcatctcctcaagggaagttaactgtctagttcaggctcaagagactagttggtctcttaagtctcttttggaaagaaggtctgagattcctcggctgtccctttagccctcctgcttttttcccctccttagtccttccagacccgagcttggtcggccctttctgttagcacccagcatggcatggatgctcaggaaatgctggttgacttttggctaagtcctgccacctgggtactctggctcatctttgctgttgctgagcccctaaatctccagtgccttctcccacacaggaggcctctttctccaggtgcctggctgctcttcaggggcctgcacatccctgtagacaggggtgggcaagagagtttttcttggggatgttgcccataacttctgtgatatcttcccaaaagtccatcgccccaaagaggaaccaaatttatacttaccctgtcaaggctgctgggatcacagttcatcaatgggatagcatgatttccattagcctttccttggctgtcccccacagtccccaagccatcccaccactgccaacaaaatcaaagtcccaaatcagagaaaaacatatcccatcctattgtcatggataagttgccaagaataagatagtaaggggacaggtggtgaacaaggggtccgtgtgctgatgtccttgtacactgcggctgtcctctatgagcagactgaagaaacagataccaggtagctggggcctgtaggagtcagggttctctagagagacagaaccaacagggtgtgtgcatgtctgcagattatgcatatatcagaagtgcggttgccaaaggaaatatttggttgctcttgggggccatggacttttatggaggataaacagaagttatgggcaatgtccctccagagatatatatatggagagagacaaagagcaattttcagaatttggcttacatgattgtgggggctggcaggccagaaatctgcatgccaccaggctgaaaattcccgagggagttgatgtcaaggaggtctggaagcagaattcttttctgttcgggaacctgtcttttctgtgaaggccctcaacagattggatgaggcccactacattttggagggtcagctgctttgctcaaagtctactgatttaaatgttaatcacatatcaaaaataccttcagggcaacatctaggctgctgtttgactaaacaactgggcacagtatcctagccaagttgacacctaaagtgacccataacggggatgtcagctcgaaccacatttcatggcggaccagcccctcagagcctggctgaagactgaaaacctgtttatccaatggctgactgagctgtgaagcacccagcaaagagccccactgtgctcctccccgccccatgagctgagggatcctgccatctgttcatccctctaaggacatctgagggaggcattgtgatgctggatggtgactgtgttttccaaaccaaaatctgacacacatgggctggcagataggaatgtagttatgaaaagaacagggcaggatgttgggaatcatgatcatggtggaaaatttgggatttgcagtcccgacttgtggagaagactccagaacccagaagtgctgcccttgagtcctggccatgactatctgtgtggccttgagccaggaggtgctgttgcctctctgtgaccctctggaaggtgcagacatcagccgctccaggacagtgagctgccaagtctctcctaatcccaacagtctgatcagctcctatcaagatgcccaggccggcttcccaggctgccctggatcaagccacactaaacttaatccagcaggaatgccatttcttttgagtttttttctcccctaaatgcataaagagtaaaaaaaaaaaaaaaaaaaaaaaagcattaacaaaacatttaaacttgtattttaatgtattctaccacaaaagggcagcatcacagattctggctttgccttctgtgttcttcaagaaaggcatcttggcatggtctcaagaagagatattccaaattttagaacatcccaatagaacggttggatctggaaccccaacttcctgcacatgaggagccagctgagcaccagaatgtgattttgggatcccgataaaagtcaccctgggccaggcgcggtggctcacacctataaacccaacactttgggaggctgaggtgggcagatcacttgaagtcaggagtttgagatgagcctggccaacatggtgaaaccccgtctgtactaaaaatacaaaaaatagccaggcatggtggcatgtgcctgtagtcccagctactggagaggctgaagcaggagaatcacttgaacccaggaggtggaggttgcagtgagcagagatcacgccactgcactccagcctgggtgacagaccaagattccatctcaaaaaaacaaaagtcaccctgacctgtgagccacacctggcagtatcattgttggacatgtggccatatgaggcagagggccagtctttctgccatcatggttttggaaaggggtcatgaatagtctgctactaatcatggatggtgaggatggctgaccatgactgtgacctcatgtcatctcatgggatcagcttgacagccccattagttggatgctattgtccctgtagtttacaggaagaagctgagcccaggaggcggagtcagttggccaaggttgcagagcttgtgagtagggactgggctgccagcccagaagtttggccctgaagcctgccctgtaagcctcctcctgtgtgcatgttcccaacatgggcttcttaggtgactaatatgccatcttagatgactcctgctttcgttcatttaatatgttttcccagagtgcctcacctgggtcagtattgaatggggctctgggacccaagaatgaataaaagacatggttccccatccgtgactgattaagggtggttttgttctttttgagacagtgtctcattctgtcgcccaggctgaagtgcagtgatgcaatcataggtcactgcaactttgaactcctgggctcaatcgaatctcccacctcagcctcccgagtagctggaaccacaggtgcgtgtcaccatgcctagctaatttagtaatttttttttttttttgtagagatcgggtcttgttacattgttagggctggggttttgttctttttgatagtgatgattcatatatataattctatgtaatcatatatttacccttttgcaagattatttttattaacatatgttaacacatgggcaaaacccaaatccttggtccatcacaagtcctaaattttattctggaaatgtagccttggcttgcatagaagcatgtgattttcctttagcctaccagagcccttggtggtttctctgtgggtaagaggggctggttgagtgtgcactccaagcaaaccagaaggtttgtcctgatgtcagagatgctgggacagagggggctgagtctaggcgagagggcgagggacccccaggccatgagtctcattcctggtgcaggatttttcttttcttggctgctgctctgtgccttgttctgtcttcttgcttcttggtgtggttacgggagcagggcagacataggaggtgggactgctcaaatccatctcttcttgcagatccagcttcacactttggtttagagactcctggggtttagagaggaatggggcctggggcccactcatccaaattgtcacgtggaggaggaacagatccctttgtaggggttaagagctcaaactgtgggctcgaatgcctgggctgaaatctggatctgccacttaggagatgtcacctctgagaccttcagtgtccccatctagagagtgggggaatagatagcactctatgaggaaagatgttttcaggatgacacaagaaagtacacagggcgtggttagcacagcgcctacaatctagtaaacactcaacgtcttgaagatggtggccacaatgataacaacacaacctccagccctgcagaagcccttcctgggccaaaaccagtcctcctgccatatccaatcctgtgattggaggatgctggctggtgagtagaaagtccttgctcaagttctgctggggtccacctctttggaccttctgactctgatcttagctcctggagtgccccggagcaaacctgtccaccctgtcccctgcaggacggtctgttagcctcaattagcagaaagcttacagactctgggaaaaggtgtgcctggctgtctgctgttgctgataagcagcctgataaagactctgtggtcaaaggttgctgggctgggctgagattcagtcccgcccttccagcccctcctttctgctttctattgcttccctctccccttggtaaatcactgaaagttttcagtaatggggcatggcgctctttgcgggcacccgtctggggctgtgtctgtgaaataggaggtaggggtggtgattggggtgattagggtctcagttcaggagaacaggaatgatctgtttacctctttgttaaacacctatgctgagagctctgtgaggcatctgtggctctcatgtccttggtacgtccagcagagtagatataatgccttgtaatttgcagctgaggaccccatggggcaccagtagcctcacttctgacttcacccagcattgcccaggacctgaagtgggtgtcaccaactgggagtcaccaggaagcaatcgaggaaatcccacagacatctatttagaaaacatcatttcatgatgtgcttttgagacgggcatgtgaaagaagagggtgttggccagattaaaagggaccctgagcttgaggttctgactgatcatggtttcaggaggtttttcccctcacataaccatttctatctcttccttagaaattagcacacttttgggtaccagttttgagttggagtggcatatttcttagaacactggacggcaagatacttctttaaaattggggagacttagggctaagtttcgcagtttgttggaaaggtcagtcctacgaggacttttctgttggggatgcacaggtagaaagcccgttttctgccccagagtcagcaggaagtgtgagtggtccaggaacaaaaacagacttggtggaatgcaactaatctccacttgggagacagagggacttgaggctggaaggcagtttgatttgtagcaagaaaacttggtacaaagaggttgtgaccctgtgtgaccccgagggagaatttggatttgtgctagatgaaagggccattacagtgaggaacttggccttcaatctgaaggcacatgaaaggctctgatgtgtctggtcatgtttgttcctgcaagaatttaaaacaaaggaagctgggaggcaaacaatgcttctgctttataattccagttccaaacctcagagggggagctgtaaagggtgaccctgtctacggcaccaccccgcgttccagtgtattggaagtggatggtctctgttttgcatgagaaagtgacctggtctccttccttgtcatgtttcagttgaaacagagttcctcaaaattggaaatgcacacacacatacacacagacttttgcccactttggaatagaaattaattgcactcggaaaataaattgcagagcatggctgagtacagacagccacatgtgaatgaattgtttgtccgcatagttttgggggcttcggaatcctggctcacccaccaaacctcccaagaatagacagacaggatgaggcatcagctctctttctcatctgccccacctcagagtcttaggagggccaagagctttgggagaccttggggacattcacaggcttggaagcactggcctcttcttcttttgtggcctcctcagggcagacttggtgggagctcttaataaacagtaactcaggaacagaacagtcagggaggcctggtccctggcccagtaattgaaaaaccagaaacagcttcatttcatatgcattgatgacaaaagtaccgacagacgcaaccaaaaacatgactggcccgctggtggacagtttcgccccacaacttggggagcgcaaattgctttgccgagagtcagaagcaactacatgagacagcagaggtccatgtaacttttctggatttttaggaatctgatttccatgggtctcttgcagggctgagaatagactggggtgagtgaggcactccctcatgtacaaactttcaggaggcaccagaaagtaggaaaaaacaagtaaaatgtaatgcactattttcagaaagccaaaatgagtgcaaaaaaaaattcataatcgaccaaatattgtttttagtaaaggcaggatccagccctgagcttgctccacttacctcacctgcctcaccctaatcccagccctggcatcttgcttgaggataaagcctgtgtctctaatagagactcagtagtttgaggtaagtgataaatctattggagctattactggaaaggggtcccgatccagaccccaagagagggttcttgcacctcgagcaagaaagaattcaaggcaagtccatagagtaaagcgaaagcaaatgtattagagaagtaaagaaacaaaagaatggctgctccatagagcagtggtatgggctgcttgattgagtatacttacagttatttttcgatcctatgctaaacaaggggtgggttattcatgaattcctggaactgaggttcccccttcctagaccatatagggtgacttcctgatgttgccatggcatttgtaaactgtcatggcgctggtgggagtgtcttttagtggctaatgcattataattagcatataatgagcagtgaggacaacagaaggtcacttgggttgccatcttggttttggtggattttggccatgttttttttttttttccacgtcctgttttattagtgggagtctttgtgagcaatgtcttgtgtggacctcccgtctcatccaatgagtaagaatgcctcaccttctggcaatgcagcctcattctacccagcccctattcaagatagagttgctctggttcgaacacctctgacagagctaccaaaagggcattacacaaggacacagacaattaggttaggtggaagatgagcgtatctttacggtcattgtgatggtaagcataagtcttgctcatgaagatcttttccatccttaacctggtatctcctgaaaattagcaagagtgtcttctcttgctttctttaaattattcaaagcatgtatcatggtgtcggcattttttttaatccctttgcacataaccccatccttatgaaaatacttgctccctgttttccctcttctctttccactgctgggaactattttgagccctgtctgtctgcagctttgcataaagttataatgaggctgggccaggcagccatggatttctcatgcctacattcggcctggaattcagaagggtcactgggggctggggagagaaactctagcctaactcgtttgatgcattttggttgtaccagatggagggaaactgctaatctgtaggattccatagacggcttaattccccaagttttggaggagtttgtttctctaattttttttttagccataagtcttgaaaatcctgcaccacataacaaaaaccagaggtatttttctgttgttctcctttcctttgaccccctggtgcttcctccaagtatccttaagtgtgcaggtgcctgtgttaggggaggaataggtctatggtccaatgagctgatgagatgataaatgctgcgactttgagattctttttaatctcagccttatggtaataggccatggaagagtgtaaacagtttgggctaaggctttctaaatacagttgatgagatcctgggaaccacttatcttgggtggagtggagcacctcactttgagtttggtgttagcgctggggcaaaggtctaaggccttctccagtgattgtgctatttaaggatgttcaagggatggtgagggcctttggaaacatctgagtggagtttggagccagagggaccctggagagacccagccagcccttttgtttctcagggccagaaggaaggtgcccacctttcctgtgaatgagtcatccttgggactagaagcctgggtcttccagcttagtaaagcctctgttttgctctggtaccttacccatctacgcagcctagtttgtccaccaaggtgctgatgtggcctgcaggagttattgccaagacataattcttccacttcaagtaatctagaggccacaagtaatctagaaggttttctaggaaaacccctcaaagaccagctgatgaaggacaaaataagtagagatccattgagtcagccaagaatgtcatatgtttgggacactgggtagggctgtgcagtgatggctcatttggaccctattcattcattcgtttaacaggtatttattattgagatattgggacttgattttgagccagacatggtgtcagctgccctggatggagaggtgaatggggcagacacaaccagtggctccggctggacaaggtcctgctgttgctgagccagggggttgtgcctgggccagacaccatctcttaaatgaaacgaaggaactggccctcattcttagatctgattggtaggggataatgctcagtattctttttgaaaatgtatgtgatactgttaaaattctcaaacagccaagtcctgggtaaatccaaaggttttttgagggggaaaggagggggatagagtaattttttaaaaaggcaacaattaacccacagcacattgctcactgcttttggtatttccaaatattctagaatcatgggctctttctgagggctgcgggagatggacttcccaccttgtggggtggtgggatgaacggtctgccttgggtcctcccaactttaagccgtgagaattttctgcagcagaaggaaagctatgaattgccggttcactgttctgatgtttaggaagcataagctttgtataatattctttagaaccagaaagcgcctgtgtgtgttctctgcttatataatgaggtcactgaggagctatgtttcctggcctattttctttcctggaagttggaagggcaccccatgggctgtctggcataaggcctggcccacagcagactttcataagcatttgatgagcgggcaaggaataagttcagtagaggacgaaacttctgaggtggtcaaatgagcgtccgggggtgggctctgagcctcctgggaaggaagggatggcatgcctgcctccacctgctgaaggacagacagtgggcagcgggcacacctgggggaaaggaggggcatagcctgcttccacctgtggaggacagacatttcacagtgcacacacttgggggaaaggactccagccagcttactgtgctgggtttgtcctgattctgaacatgcttttctgtgtgttgtcgcagtgaagaaaatttttccttgtcctcaacagctggggagactacaagccttcctcttatacccaagagtctgtggttgccatctcatgaaagtgaggtccaggatcagccagagttcactggtcacaagcaacagaaacctagtctagctggcaaagcacaggaggagtttattggaaggacacgggaaagctcacagactggaggcaagaagaagccctaggctctgaaaggagaggtgttaggacaggattgggggtctaggggtgcaccaaatggacaaggaggggcggggctgcttggcaaattgtagctccagagtgttttctgatctcgagttgcccctcttaggagtcttgggagagagtgggtcctattggcccagtttaggtctcctgaccagtcctcaggcagtggtaggtgaggcccatcaattgactgccccccagagacctcacacaatggaaggcggataattctccaaagagaaggtggcagactggatcctaggagacaaaaataaccaatgctggcctcgggctccagagaattccctgcttctcagtccttggagtgcaggtgctcctgttcctggtcctatccctcccctttgtctccatgtgttgtgcgtagcagtgtctgctggatgtttgctgaagcaaagggtcactttcatgggcctttgaatagtcagccacttccacaccagagattgcatatgtaggtgtgctggagggcattttgttttttctaagggtatttggattaatctttctatttcaccctgtcttagtcattagagccacgttctgactggttcagattacagatggtaaataaaggtgattgacattttcctccctgcccaggcagacatttctaagcttgggagagttgatgagtggtgccttctagggaatgtaataaagtctgaaattgagctgtagttagaaagcatgcgagggtctagaagttgtttctccagggaatggcaggaggtagtatccaatgactgctggtgcctggcagctgggggctgcctcctgactgtctgccagtgggaaacagttgtttctcctcctcttggccacaggacaagtcacagagccatgctttctgtacaatatgtcccctgggccaaaaggcaatattgcctctgctttcccagttcagaaggaaaaatgtgaaccgaggaagcagatcatcaacttgacatgtatcctaagtgtgacatgaacatgttctatttgttggggagacactcaagtcaccagctgggctttttaaatgaaaacaacacctctatttaaatgaaacaacgcctctatctgtaaagaggaaaatagtatcaggtactcattttgttcatgtgtcatctgacctatctgccttcgctttatggaataaaccactagactaggagttgtaaactcagatgctcctgagggccagacacataaaaaagatgagcgaagggggccaggtataaaactactgaaaatggtggggactggggcagaatggagggtttacgcccagtctctgagatcattacccggctgccatgctggaatatgaggttggtattagcacaacttccaattcttcaagaaaagctggaaatcgggatgtttatgtgaaatttccggatttaacaaaaaacactatggttcacgcctgtaatcccagcactttgggagggtgagggggtggatcacgaggtcaaacgactgagaccattctggccaacatggtgaaaccctgtctctactaaaaatacaaaaaaattagctgggtgtggtggtgtgtgcctgtagtcccagctgcttgggagggtgaggcacgagaatcgctcaaacccaggaggcggaggttgcagtgagccaagattgcgccactgcactccagcctggcgacagagtgagactctgtctcaaaacgaaaacaaaaacaaaacactgttgactgaaaaaagctgacaaaaatgccaatttgctgacctcagtactggattaaaagtgtatgtgtgcagggcagggccccgccccttgtctgtctttacataagttttacccggagtctagtccagcgcctgcatgttgaaaagcagttggcaaatatttgttgaatgctattcagttgtggggggtggaataaaaactgggttttcaatagggaatgacagtttgataagctttcctaagaatttagaatctggtcagtgggaatatctgtgtctcttctttaaacttcagatatacaggccagtctcctgatcagaaagatggagagtgttaattcattcatgaaaaggcaacacggaacttaaaaacagaatctttaaaacaaaagtcagctttccttatttaaaaacttcttgtagagagaaataaagcgttttcagtgtggtgttgcagatgaagaatgaatatgagagattggggaatttaatatttaataacacttatacatgatgtttgggaaaacgtgacaaataagaaacatttgataaaaaagactctgttgtcaccacaccaatcaaataatgaatgttctgaatacataagttgagtgataatttattggatgaacacacacaacaccagagattgcgtatgtaagtgtgctggagggcattttgttttttctaaggatatttggattaatcttctcacctgcttttcttttgcatggagctttgttttataactgagacatgaacagatggaagagctgcctacttgtataaaggattgtattctgaaaaccccgttgtattatagagcggtaggccccagccactgggcagggcatgctggtcaaaggttctccgccaatttcacttcacgttcatggtccaccgttaggtctttcctgttcactactcagtaaacagccagcgatgaagcaggccacaaatgaaatatgaatgctcatgagatatgagtacgttatcactactgaaatagaagtgctcatgagctggtaatctggcgtcagagctcggtgagaaggtggtgtcgaatgaggtgacctgtggccttgggctccttattacccttctttattgctaagtcaaacatctcaaatgccaagcttagtaggtgggacttttctgatacaactcacttgacctcccagaccagataaataacaatagtagctactgtttgcttatggcactttgctaagtattttccatgcagtatctcctttgctttgtccagccacacttttgtcgaccaggaagttgttgagagggtgaagtgatcatcatgtaacataagagcagtattaccaggtcatgtgtctctgtgtgtaccttgcacatacctgtacctactggccttttttcctttacctgttttcgtagtccaacagcatataactcctgaaggcatggacacatagggatgtgcctttctgtgtccctgtgacacttacattgataccacgtatatagtggatgctgaagaatgttggagattctttcagtgatttttgtggttattgaactctttagggtgaaaagaatcctgtctcgccagactagaatgatctcaccatgaattaccagttgctcaatcaataatctgttcgcctggccttgtgtgaggcccatggtgggtaaaaaagaagtaaaagacctgccctctcttttgaggatccagtaatctgcctttagacttgggtaagaaacactgcaactctgggccctgtgggttagaggactgcctctgacgccactctggccatgcctcccaccccactgtaagagtctgggactcaaagccatatgctccctcttcaagaccatgttccaggtattcaggggctggaattccctactcacgcatccccaagaccacttccagggcctgacacttggggatgagcagggctccaggtacatatctccaggcctgcagggtgacagctgcttacaggatgtagggtggaaggagcttggaggaagcagcctggggcatgcacggggagtgcttgaagccagcgctggtgtgggatggcgcaggatagcagagaaggtactgggcctccaccacatgtcgatacggagtggccaggagcccaggattctaaattaaaagctggacctgcaaggcagcatttggaagccacatttgtccagatacaggagataacactttttcgtttcagggcttatcagatcgattgaaacctttaaatgattagccctgtgggaggtgggcctccatcgcgaactctcattccagactctacaatgtcagcggcaggctctgctgggccgtcagcttccctcacctccgcacgggtcggtcagcagactgcacacccggaaggcccaggccttggtggaggggtttctgtgcctcaaggctgtagggcaggggagggggccgtgcctctctaaactgccagagcctgtttgcacaccagcactttaccgcgcttggcggccggggaagtgctaagcctgtcttcattaacaaataccatgttgccttgtttccttacttaaaacactttggagtgttttggctcaagttgaggggctctacatgtgcaaatgcataatcagctgacagcagtttcaaaattgcaggtctcactattgatggagaaatgggagcgttgttattccttgtgtgtaattttctccaagaaatggggggattgatttaatgtcaacactcagagatttaatgtggccctgttactggaaaaatacacctttgccaaactctgcctcaaaacaatgtctacattgtcttgctgcactccctacccccatttcccattcctgagaaaaaacgggcttgaaggagggttcagctcaatacagggctggatcctgccctctgtctccgtttcctgagcacagatggctcatcagcggggcctgtctctgcctggagggatcccaccacctctgtttctgaggaacttgggtgggagggagttagtggggagaacaagagtcaacgaacagggtggggtcagttttaggctcttgtgttcaacccagcagggaggcgggggcgggggactccctccaagccttaggtcactatggggcttcctggcccaatttgccctcactgtcgcaaaaaggctttatggtgtgtgtttcaaatgaaaagaaattcaatttgattttattttgaaaatgcagcgaggggctgggcatggtggctcacacctgtaatccagcactttgggaggccgaggcaggcggatcacaaggtcaagagatggagaccatcctggctaacacagtgaaaccctgtctctactaaaaatacaaataataacaataataataattagccgggcgtggtggcacatgcctgtagtcccagctacttgggaggctaaggcaggagaattgcttgaatcggggaggcagaggttgcagtgagccgagatcgtgccattgcactccagcctgggcgacaagagcgagactctgtctcaaaaaaaaaaaaaaaagaaaaaaaagaaaaaaagaaaagaaaagaaaaaagaaaatgcagaggggatgtcaggactccctttgaagtggataattggtactactcagtggggttcatggaaaccaaggtggttcatctctggggactagcaagaaaaccaatgtttattggaaaagtggctttggccacatgtttcttctagctattagtaatttgttcctcaaatcaagctagtaagttaaggatctgctttcaacttcttcccgctgaactgcctggcaggcaccccctttttctctggcaagtgatgatttggatgtgcacactcactagaaccagcttccacgggttttgctctgaaccacaccatcacactcctcctgccaacgccaaccataaacgaaattggtcaatggtttcaagccttcttcatcacgcggctcttctgaggctggttccactttcagctgcatggccaggccctcacccgcctctcagaggtcacggagtgttccttctgatgtttgtctctttgaggaagcaactttcaaaggccgggatgcatctctaatgactgtaattgcatttcccatcttctcattagcacaaactgctgtgcacatggaagaaattcagtcagaaacctcaggtctggcctcaggctgcggggtaggcaggtgatctgatcagggcgaagacccagaccagcacgtaggttgccccacatgcccttggcacaggaagaaaagcctctggaacaggtgctatggttgtctttaattctttctcggctttccatggaatgaggaggaggcccagatggtacttccagagccgaggagcagaacccggcccggaggagctaggccggccgtggtttggtcttgaagagaatgaaagcccacccatgttcacagatcgcagagccccagggcgttcaggccacacctgcagctggtgccttgggtgaggctaaggggctcacaagtgcaggcacacatgcccagacgcctgctgggctccaagagtgctggctgctgcccagctacccagaccctccatgtccttccatgccctcagccccaactctcttcctgggggttgtggagggcagggggtgcacagttcactccagaaccttcctaagacccagagctgtagtggggagggttgtgaacaccagtttctgagaccttttcagccaggcggtggttctcgctccacacccttgggggcccctgagcagggaggcctgggtgtgctcacctaacattaccctgtgctttgcagacagacggtgccctatggactgtccaactacagaggaagcttccggggcaagaggtctgcggggccacttccagggaatctgcagctctcacatcggccacacttgcgctgcgcttgtgtggggagatatgacaaggcctgcctgcacttttgcacccaaactctggacgtcagcaggtatgacacctcctccagtttcactcatttgcagatatgcatcaaccctcggcaaggccaggccaggggcttctcaaaggagggtgtaggatagttcagtcacatcctgacctactgtcgtcctgtgggccagagaaaggaggtgctgagcccagaaaagacccaggtcctcagcatcaggagggcaggagatgcagcgtccccacccccttgctgccttttggaacagaagcttcacagtggccgtggctacatctggtttccagacatatgtttttctggcctgcacagcactttgtgaaaatctgaataagttgccaacacttaaaagattgaagaattaacccctgccaaatgcgtatttttagccttctcgaaaatagcccatgataagagtgcaaaaggcttattgggaggggggggaacccagcacgtaggaccatctggtctcagagccccccttctctttggccaccctcagctggaactgagtgggggcatctcacgtttgagtaggatgtgcaatatccatttacctgttaccaatttatcttactttgtagcccctggaggcccccaagtttgagaccctgtggtctgtcctggctgccttagggaagcttgcaaatcacgttgaatggaaccaacaggcagactccatgtttgacccaggggctttgagctggtattcacataacaggtattcctgttaatgctccttactccatctttttcttaacttcgggccaagattcatgaacccagtgaggcagattggccctttcaaaacccttcctggagcaggcgtaggtgagctgccctgatgcacacaaaagacacataggcaggggtgagctcccaacaccccaacaaggcagacggtagcgctcaggaccccaggatctgccgtctgtgaaacccagtgtgaactgcatggtttttccccccttctgggcttttaaacatccgatgaataagtgagtggtgagtatattctgtactttggtagaaatccacccaccgagtgctcagccttcagaaactgtgcctgagacgcagtccttggggaacgcactaatgtgctcattggtggggaagaggaagtcataatttgacaccgaaaaaccagccacagggaaaggcaggttgattgattaaaaccagctctctccccacagtaattcaaggacggcagaaaaaacagacaaagaagaggaagggaaggtgagaggtgccaacagaggcctgtgtcaaaggaggtgaagatgtgacgtgtcattccttcgggggtgggtggagggtgttttgaggggatggcatctggtctggtccagtgggaaccccagatctcatgggatgctgcacccacaagcaatggtgcctttggtggaccgtttctgggggcagagcgggctgaagctgtggacagctgctgtcacttgtcggtccctggccaccctgctctgtgtcctgggagccagcccttgcatcccttgtagctctgggcagtgatgtcctgcctggatttcacctggcctggacaaagctagtcaaccaccgctctcagaggccctgtaggctgctctgcccagacccacacttcgcctctgcttccttagcaacatgtggtctttctcgtcaaaaaaatcatttattcttttcagcagctgattctgggcagaggtgaattacagcagcttgacagcagggtcccttggttctccagttcattgtattattttttttaacccacttgtcttttttgtatgagagatcctgagggtttcctgcagtcaaactgggtttatttgtcattctatcaatcagaagtcattattaatgactccgcagctcatctgcaatgggatggtaatttatgttcataataatagcctggaggtggcttgggtttctacagagactgatcgagggaagatgaaaccatgctcagtatacaggagctttccaaattggtggcagatcgcttctagtctagtccagagagggatctgtcagcaaccataataaaaatggagcgggaggaggagggccgaggcggaagagacagagcccgggagagcatgagtcagacccagatggtcccactttgcctcttcattctttttcctctttttctcttcctcaccccaaaccaaagctcctctcagcgagggcgggatgtaattaaacccatccatccattgcatcatttattcattcgcttatgcattcgttcagcaaagacttgttgggcacctgctacgggctgggcaccattctcgatgctggggacatagcaggaacaaggcataggatctcttttatagagcttaactagtggggatgcagacagcaaacatgtacaatttaaagtgagattgcaaagaataacagaaagacacggcaagggtaggaagcgtggggtggttgcagtttgagatggggttgacgtggcctcatctttctcaccaggtgacctgaaggaaggctgggaggagccatagggatgagtgagggaaagggatttcaggtaggggaaccggtgagtgcaaacgccctagagtgtgctcagggaacggccagaagggagccctatataggagaagcacaccggtccttttgctgttgtggtgattattactgttctatgtcacatgttcaaaagatgcaattggtggtgcagatgtcccagcagggcctggaaaagtggttcttccaggtctctatgagtcatgtaaagctctagtaagaagctttacttgggaagaaaaagtctcttattaagccaatgttcttgctttcttgcaagattcaagttagtaattcccagattcacattctcagagtggaagctgtcaccatccttagcttgtggtaatcaaagatggggccaggctgcgggagggcccctagcagccttgtctgctggtgttattcttttcacacttttccagtctggtggtaggctcggaaattgctgagaagcactgggaagagggtacatacagttccaatcagggaacaggctggagaggcagtgggaagacgttccctttttcagcttcacagaactacagagctacactttcataacatacctttctttttttttcttttgccccctttccccaagacaggttgaagtcaaggaccaacaaagcaagcaggctttagacctccaccatccaaagctcatgcccggcagtggactcgccctcgctccatctacctgcccccgctgcctctttcaggaaggagccccttaggaggacaggcctgcagcatcctggtctcgggaggcttctgtcattgctcacacacagttcagatttccacctctttatagacaagaagtgaatttgcctggggcagaacacccacccaaagagtccccacttaacaataccccccccccacggcaagaatgcccaaatccgaatgaccccagttttcctaatgagtaaaatgatcccagatgtgccccagagcatgacgcctgcagctccggtttcatgcaggaaattggttttggagagttttggcaagttggaaagccacttactggcttttgacatgacttctcttggagaataagtggactccaagctaactctttgcaaatgtaaacacatgtccatcttgtaataaatgcaaaatgcccgtgcagcagaagcatgcgactttcatatccttgcctagaataggctgcatggtgtatgtcagtgagggccacgaggcgtcggctttagacacagatcatagctctacaggagtttatgaatttgaagcttatgggattttggcagagaaattttcagctgtgcttgatacccaccaaaagaatgtatctcgaaagaatgaaggaagaagaaaaaaggatccttgatgtttgtgacaagaaaatgagaaagttagtatctgcaatacagagcttgttcctgttcagtgactgaccctctgtattctgtatagacaccaggccgatacacagtggagttcccaggccttgtttgcaggaagccgactgtaaagacagccccagctcaaggctattaggttgaatatttgctttcatgagtaaatgtggatctttggggaatggcttcaaaataagtcacgaacacaaattctttgtaaattatgtaaattcctgtttatataaattggcaacaacttataccgtctgacagttcaaaatctctttcagctgcgctcttcccaccgagccgagcttactgtgagtgtggagatgttatcccaccatgtaaagtcgcctgcgcaggggagggctgcccatctccccaacccagtcacagagagataggaaacggcatttgagtgggtgtccagggccccgtagagagacatttaagatggtgtatgacagagcattggccttgaccaaatgttaaatcctctgtgtgtatttcataagttattacaggtataaaagtgatgacctatcatgaggaaatgaaagtggctgatttgctggtaggattttgtacagtttagagaagcgattatttattgtgaaactgttctccactccaactcctttatgtggatctgttcaaagtagtcactgtatatacgtatagagaggtagataggtaggtagattttaaattgcattctgaatacaaactcatactccttagagcttgaattacatttttaaaatgcatatgtgctgtttggcaccgtggcaagatggtatcagagagaaacccatcaattgctcaaatactcagaaagtactgtcaaaagcctaataaaaaacctaaagtttgctctgatttgtgggtttttttcctcactgtctttatgtgcggggttgcgcatcaacttttcatggacctctggagaggacgggaagaagttgtggtttgggaagtggaatccatctaaagtcagttatggagctagatgaggggctgcctgaatattaaggaagaagtggggtttggggaccgttccaagaagataaaacattcacagcagtcaggaagagagaaacctggggagagagctggttcttcccctaggccattgtgccttcctagcaatagggaggcttccttgtggccctgccaaagatgcctgtgcagcccaggattctagggagagggcactgctggggggctcaggattctatggagagcactgctggagggctcaggattccagggagagggcactgctggggggctcaggattctacggagagcactgctggagggctgaggattctagggagagcactgctggggggctcaggattctagagagagggcactgctggggggctcaggattctagggagagcactgctggggggctcaggattctagggagagggcactgatgggtggctcaggattttacggggagagcactgctggggcgctcaggattctagggggagagcactgctggggggctcaggagtctatggaaagcactgctggggggctcaggattctagggagagcactgctggggggctgaggattctagggagagggcactgctggggggctcaggattctagagagagggcactgctgggggctcaggattctagggagagcactgctggggggctcaggattctagggagagggcactgatgggtggctcaggattttagggggagagcactgctggggcgctcaggattctagggggagagcactgctgggggctcaggattctatggaaagcactgctggggggctcaggattctagggagagggcactgcgagggagctcgattctaggagagggcactgctgggggggctaaggattctagagacagggcactgctgggggctcaggattctagtgagagggcactgctgggggctcaggattctagggaaagggtgtggctgctgagttcttgataaccagaagacagcaatgatcacacctgcaagtctttaaagcttataagacgtcttgggggattggggatgttcggaaagagtggggtttccttcattttctttcttacttcctttcctaccttctccacctgccttttgaataaagaatcagagaccgtgggaggcagggaattggacaaagacaggcccagccaaagagcaaagagaaatccaagaagaggagtaggtttgagtttgatggctacctgatctgagaaaacccaggagcctcttgttttaattaaagtcatcttagagagttttgactttgatggactgagagcgttgggttttttctgcaggatgtggggcagcacacagcaggagctgcagcgttcactcgaggcactaacaggtcctggagtccaggagctgcccaggtgccacggaggccccaggcagaggaggacagccaaggacttccaggagtcatgggcagtccgaggcccagacgtggcaggcttttctggcatctgggtggaggaatgaaggagcagtctatggatttatgagcaggattggctatggaaactgtagggcccctggcttagaaggagtaagaacttcagatcgtgcattaaaccacgggcgtccagcccttctgagcccgggatcctgttcacctgtgaaggttgcctcagctgaagcccagcaaaaaaaggctgtggagtctggagacctggatttgacaccatgtcctttagggaaaccagctttaaactctcccagcctcagtttctttcttttaccttttcttcttttttctatgtgtttgtctatctgcgaatatctttattttgaaatttataaatgatagtttttctggggagagaattttaagttgacagtagtagccccttagatggaggatgttatttcattgtcttttgaggtcagttattgctggttagaaattttctctgagacaaatcataggttaatttctggtggctttaatgtttttctctttatcctagacattctgcagtttcagtataaggtgtccaggcagagatttccattcaatttataccagatagaattggtttgacttttcagttgaagggcctctttcctccacttgtttctggaagacttagtgtcctcctccaacgttgccactccactgttctctggcatctctggagtgcctgtttaaactacttgaagtgcctattttctccatttctcctttgcctgaatattttgatattttcttttttcccctatttttgagtctgagtttagtattgaaaacccgggactgtcattagagacagttgtgggttatcgaggggttacatttctccgggaagcttgttcctgtcagtcaatccacggtgtttcctaggatctctccttgcacaaggtgtgtgtgaggagcccaggacacacaagaataagtctccaatttgttcgaagtatatgcaattgttttaagccctcaacgtaattccatgatgtctgtattatttgtgtcctcattttatggattatgaggaaaaccggggcacagaggggttaccagcctatggccacatagctagaaattggtcctcacctgaacacattgtgcctacctgtactactgtataattagttaatggcagctgagggtgaggaatgaaggctcagaataattttatggagaaggtatttttaattaaaacattgagcaagtaaaactctttgattgaaaaattgaaactattaaaacattctacgtagggacttcttgccccctccctgtcctgtcctccctgcctcacctccacccccagaaaaccactgtcatgactgtctggagtaccttttcatctgcattgtgtgagtaggagcaaacaggaacatgtagtcttgcttctcactacttttccacacaagttagcatataacacttctcactactttctcacacaagttggcctataacactgtcttcctctgacaccacctttgccaccgagggtgtgggtttttttcctgacaccaaatacatgttgttttcccacaccagttatccaattctacaacaccaaccgagtgtccaacaactgaacccaattctgactttatctatgtggagttagcatcagagccagcaagctaaggtctcaatcctgcaagattgcccctacttcagacaccagccacacaagtggggtttccagcagatccacatttcttcccagcctactacaaatttgggggttccataatctaagctatacccccatgtttgagaactcatcagaacaattcccagaactcagggaagtactgtgcatacaacttcagctttcctataaagggtgtgacccaggaacagccccatggaaaacaggcaaagaatgaagccctgggagaggaggtttccacgctccagtacatccatgggttggccatcgtcgaagctccctgaacttacttaaggcttcttatggcggtttcattacctaggcctgattgattaaatcattggccattggtgactgaactcaagccagaggtcagggtatggaacagaaagtccaagggcagggggagagctttgtccccagttactcctgtgtaagtgctggctccattgtgattgggccagcgtgggtactgtgtccatcctgagctaatcaatgggcttgaaggttaccatgtaaggagtggcctaggctctcatactcagcttttggacccaaaggaagtttggatgctttttccagaggaagggaaaatggataatgagcagcaaaacccatcaagggccattgggaggtacctggtaacccaagagccttgactaggacagtgtgcctgtctagaattaacgcagattaaatgcttcttccaagagaagccatggatggtttccatcagtatccagcctccaatatgaaatgcatctcaacaggcttatcagatacttctttccaaccatatgtgttgtccatgtttctcactagagaagacctggtgacatcttcctttatttctctctgtaacctgtggtccagcagacagcctaatgttataagtaggggaaagagatgatttttttttttttttgagatggagtctcgctctgtcacccaggctggagtgcagtggcgctatctcagctcactgcaagctctgcctcccaggttcacgccgttctcctgcctcagcctcctgagtagctgggactacaggtgcccgccacctcgcccggcgaattttttgtatttttagtagagacggggtttcaccgtgttagccaggatggtctcaatctcccgacctcatgatctgcccgcctcagcctcccaaagtgctgggattacaggcatgagtccccacacctggccgaaagagatgatttaatgggaaaattgcattctgtttttgaaagtgtcagaggagacttgctcccaaatcacaatgcaatgacaagccagcggccagtgagcgagtgacatcatgacagggatgcccaaggaattattatcacaaccatatcccagtcatacctgaggtcagagtatctggagttcaaaaattcaaccttaaatatcttaaatgtgcattcacttggttgctaggatcaaaaaccaggggacccttcttcctggtaattaattgattaaccttgggacctggaatcagggatccctacttataggtataggtttcagataaggaaacatcagtctgcattggaattgctattggacattctccaaagtgatttaataacagaggcacttcctagtggctcaggcagcttcagatatgacttgagtttagaactgtggtggatgagccttttctcttggcaaatactaagtcagcattaaaaaaaaagaaaaagaaaaaagccagttcttaagaatctcctatttcccaagcacttaagtcaaagtgagggtaactccttcacagggctatgaggccttccgtgatctggcccttgttcatctctgcaggctcatggcacccgagtgctcctgaaactccagccacaagaggctccttgcagctgccggaattcctgtccaccttgtgaccttcagttagattgtttttctgcctagaacgctcttctttcttctcctcctacctccacatcccctggctagcatagattccatcccctcctggtctgggtccagcccctccatggctctgtgtttgatagcacttatcacaggatagcatggcaggccatcgcccactgtccagtctcaaagccgagccacacagaagcacagtccaggcaccaaaaggtgacgtgagggctctacttaatctcccacatgctgcaaagagagagatgaagatgatccatgcttggtaaaattttcccgttttctctcttgcttgcttccttcacccctgcagctgctcccccctctctctcgacacctctttaaccatgtcttgcagaatcctaccggagagcctcttgtcctcagctcttttccccagttctacctcccagagggtctggagagctggcccagtgtgtagagatcctctggggtggtggggagggtgaggcagtagaaaacaaagccaaagggagaggaaggcccaaggctggagacctcgtggttaatttgtaaatagtttatcttctgcatacttattttgtcactttaaaacataacttatcccctctgttcgtctcccctgggagggtagagttgatgtctgttgtgtttgctgctgtaatcttagtacttagacaagtacttagcacttgattgcactccgtaaacatttgttgagtgaaggaagacacaaagataagcaccacatggtctgtgccttgagggactcacagtctagtgaaaaggcaagcaaacaaacagaccgatgtcggcccaggagctcagggactgacagagtgcaacggaacccaaggggaagcaggtccctgctggatcggcgcagtgtagacacctgctacctgacaaggctctcctgtctggggacgtaggctctaggagccaccacatgtgttcatcaaaaggcatgctggtgtttcttgattcagatcagtactaattgtctcctcaggggaactcgcagttctcattttctcagcaatcgggtgcaatgagcctgcagaagaagcttttccagagctgttgtaagacttctgcaggccctgggcgcagtcattttcagaggtttcaggccacggcacggcgatgccatgaaaacgcggatgcatcccatgctaggtaattatcggaggactgtaagattttccaaaatgtttaccatatttcctgggaaaattatgtggaattgggctcagtaaaagtgacaaagaaaaaaatatatatatatataggctgaatcttgctctgttgccaaggttggaatacagtggtgtgatttcagctcactgcaacctccacctcccaggttcaagtgattctcctgcctcagcccccacgagtagctgggattacaggtgtgcgccatcacgccaggccaatttctgtaattttagtagagacggagtttcaccatgttggccaggctggtctcaaactcctgacctgaagtgatccgcccacctcggcctcctaaagtgctgggattaccggtgtgagccaccacgtccggctgacaaagataataataatttgaattttcttatgatttttaaattttttgatttcattaaaaagaagttatttattttgcttgtgagcacaaaattatacgtaattcatatggttacatattaatagagtcacagttgactagttgacataatgttttgttttgaaggcatgtaatgaggcagttatcagttttattttgcaaggttgtttttgttttcaccttgctttgctttgttttgtattttggagccaatggattctatttgtttcggccctcagatacaggcccttggaaggctcctaagccatagctttgttactgttaggaattgtctgaggctaaagcagctctgggctgccgtatggttcttttctgtgtgggtccaagtgttgcctaaattcaaatgatcaatcaagagagaaagcaaaatgcttgatgttttgttagctttgtgtcagtgagctattgctttacagcagatcaccccaaaatttagtggcttaaaaaataatctccctcccaccactcccccataaatgagtgtttctgctcatctgggctgagctgggctgatcttgactgggctagctggtgcatctgccgtcagctggtagcttgacctgggactggctggtctggtgtggccctggctggggtgacttggctctgctccacatagtcactcatctgcagggtagcctggtttgtcctcatgggtagcctggcttgcccccacagtgggggtgaggggcccagcgggggagaaaagtgttacgttcagagacttgggtctccaaggcctggctcctttatgttctattatttgaagcaagtcaaaaagcagcccagattcaagctgcatgggaataaactctacctcttgatagcaggggccataaaatcacattacaaagggtgtggatgtagaacgagggggagaattggagttatatcttcgtcacagctgactagcaaatctatgatttatttgtgtttcaatattacaaggaaatgtttagccctcacagaaaatattcctttgctatattcaaatcctgtctgttctatacaacgtaatcgatgttaccttgatctatgtcaaatggcaatgatgcaaaatgcacatttgctaaaatgctcttttaccacatggagcggcgtggcatcaatgtgcgcaccctggccctcgtgttttatcagaagcctcgaaggctggcgagtgagagctcgggctccaggctctgtaactctggttttccccagttgttttctaggtgttgtttgagtaactaagttagcctctctgagctctaatacttttgtgacctggagagagcaaggttaccttcctcacggagtcgtcgtgcgcattgaatgcacatcaagcgcttggcacagggccagacaggttgataaatgtttgctcttattgagctcagaatcaagtctgtgttcagggaaagtttgttgaatgaatcaattaatgatgcaagcccagcttttccaagggcagagaatctgtgaggaaaagaaagcatagaaatgtatgcacccttttggggtctctttcagaagaaaactgcttcctcatctcctgtcttatgttgagtgcctgtgttgttatatagctaacaggtgaataaccaagacaattgaaggatgggaagagggctttttctcagatctctaaaatgcttttcttcccctgttagaatactaaagccatgatgacagcaaagggtgacagaatatgattggaggagtcccaagctctttttgatccaggcttggatggggctgggggaaagctcctcttctgatggacagtcattgctggaagacagatgggacataattgtgggggcccctgtgggagaggtttgaaatgtctcagggaaagacgggactgtgaagggatcccctgaggacactggtaacatttgcagtgggacactttggctcacaaggaagcttctgggcatgggaatttcagagcccagatggtgggaaaatcctcaaaaaaccttgggatttgggtctctgcagctgggcagcagctgtgggcctggaattagcgccaaccacaggtggtaccacctgttccagtgaccacatgtttcccaccctcgtcacggaggcccagccatttctccctcagagttttgggaaatgtggaagaagaatgggaggagaccatttgttgaaaggattagggagatgggtgttcagcctggaagcctcccagaggctcagggttagttaccaaaaaagcccagaacagcagaatttgtgctgttttccctgatgcctcaattaaatcatcctctgacgtcacattttctgcacctgcagggtttgcggtcaacacatggtaatgtgggctccataaatttagagtgtataattgttctgacacggcatggattggagcttctttctgaattatctatgaaaaagcaaattaagagcataatcctgactgcatgggatgtgcccagccttctaacaggaacaaactctttcctggccttttcaaagtatctgttactatgtaataaattaatagggtaattacaaatggttcttttccaggtctaccagatttctgatggaccatattctcttagttcttattgtacttgaagtaatacttaaggtcacacacggtagcactttaaagtagctaattacaactgtttcctttatgatgcacatggaaaaacttcttcacctgcgatgaaactgaatagctgttaaggctcgtgtctagattcaggcagctttgttttctaccccagctggcctggttggttccttaatttctctgagcctcactttttctgcctgtaaaacgggaatgatcatatacccaaggcctcctgccaacagtcagcaccaatgtgccaggtggaccactggaggactgcagcctcatgaaagatcccaagctagagccacccagctaagcctctctagatttcttggcctgcagaaacttttaagataatacatgcttttgtattctaagtaaattaatactacttataatggtactgacatataggattaccgaggaagacattcatcagcgaagagcaagtactgagtacggtcttagcataagtatgcgtacatggtaaaggtaggaagttttacactaatgtttgaaaggaaaatgtagataaaatgtacatgctcacaaatgggaattgaggtagggttgccaaatttcacaaatagaaatccaggaaacccagttacatttacatttcagttgaacaatacataaaatgttagtagaagtatgttccgtgtaataatgggatagtcactgaaaaattatcacgacttacccaaagttcaaatttaactgtgttctgtattttatctagtaatctagatcgaggcgacttacttcctcatgatccaatgggcatctgtctctgatgtggttcatctctttattccctaattgaaaaaatataaattttttaatactaacatgaattttggcattttttaaaaacctggcaataatacagaggaattgacattctcacagcataccagtagaagtgtaagttggaattggttattatataaacagtttgtcaaaatgattgaagaacttgaaaatgttcataccccaagttttgattacaaagatatttaccataatgttacttaaaaatcacaaaatacccggaaaaaacccattgcttaaatgatagtaataatctgacatatttctctacatttgccagcaaaaatcaagacatcctctgaagactgtccatgaagattttgttggagtgagaaaaaataagcaataaaaatgtagtcttcttgtttggctatagtctggcctggaatggatattttggaagtgactcctcacgtgcaggaaggactcttaggccgtatgtgtgggcctctccgaagttcaaagctgatttatagagcatcagcgctgactccttgacagagagtctgcgggtcagaggaacttgaagtcagaatgtgagactgaagtctcaggaacacacagaattcatatcaagttccttttacacataacttgttaagaagagcatgtttgcctaaagtggggtgctcctcacagattctgggagtacagaagagctcaggaaatgctggggacagagtggaggctgcgctgggaggaccctggtgtggtttcaatatcagcttggtgccaggttctctgtagcaccttctttctctgtgaaagtggccaactgttgctgaatcctggaatgttggatgggcgaacgggagcctgaccaagcccaggctggaattcacagcctgattctgggaactgatgggttattgattccctgtggcattgacttacatgagctgataccccttggccattggttgggggctcaaagagtttagggcgagggtacctaagaggacagagaagatggaggagtacagcatgcagttcatcccttccctgtccaccgctgtggtgtgatttcagccactgaggttgattgaggtggactgtgagctcctccctccagctaggcagacatggggcctacaggaggcagacaggtgtcaggcttaggagagggctctgtggttccttctgctgcaaaccctggcgcagcttcagggccaacttacccgcttggcacagtgagcacagggcctagggcccatgaaacttttagggtcctatgaaaatgttttaatttctttttttttttgagacggagtctcgctctgtcgcccaggccggactgcggactgcagtggcgcaatctcggctcactgcaagctccgcttcccgggttcacgccattctcctgcctcagcctcccgagtagctgggactacaggcgcccgccaccgcgcccggctaatttttttctgtatttttagtagagacggggtttaatttctttttttttccttctttctttctttctttttctttctttctttctttttttgagacagagtattgctctgttacccaggctggagtgcagtggtgccatctcggctcactgcaacctctgcctcctgggttcaagtgatctcctgcctcagcctcccgagtagctgggattacaggcatgtgccaccatgcccagctaatttttgtatttttagtagagacagggtttctccatgttggccaggctggtcttgaattcttaacctcaggagatccgcccacctcagcctcccaaagtaccgggattacaggcatgagccactgcgcctggccgaaaatgttttaatttcttttaaaatcagatgaaaaagtgaacattgtaataatactgaatatggatctcctccataatgtgatgggctatgtgaccttgggcaacttactttgcctctctgggcccctgtttggctgtctgtagttaaacggaccacctcatctctgggacttcaaaagaggagaggacggtcagcaggggtggcctgctcagaagggccatactttgtccccaacatccctcaacaaccccaagggcaatgccaccccagacctcactgccaggccttccagagtccaataaactcatgtcccatgaccacagcttgttcccttgatctatgtgcacctggggatgctggtggctgggaggtgagttcatgaggcctcagatccgcccttgaagtcagtactgacattcacccattcttcagacgaggacatagaggcctgggaagagtcagcaaggacagaagctgggttcacagccccccaggccagctccagaggcctcaatcttcaccagcaatgtgcctctgggcttgagaagattggacaggaagaacacaggaagctccaagaaaaaagaactgaaactgcaccaagagtcaatgatctgctgcctcctcagacgtgcagcaatctgacaacatccatcaaaattaaaagcgcgtgcacccttgacttcacaatggccttctaggaatttaccctcccaacgcactagtgcacgtgtctaagatacaaggttctgccgtagcagaactgcttacggcaatgagtttatggctgcccacacccccagcctcaagtgaggaggctccaactccacagcaggttggcaggggctgagctgtgcccctccactcaatggaaatatttcctggaccaaaacggaactgcaccagggaccaagacagacaggacctcctccaccccgtggaaggtaacatggagagaggtcccagtggatccaccaaagaaaaggaatgtccatcttatctttcacctagagtgggatccagtgcaaaccagcacacacaggaggatccactgtagttgctggaatgtaagatggacataccgtgtgtgtatgtatgggaaacttctggaaaatgcaatgttggggtgaaggaggtaggaggctttttcttcctattcttatgtccttcagtcatggttcatttggttttgcactctcatgagcatatattattttatacttaaaaaaaagggattgcatttcaaaacttccatgaccagctccgaagtcagtgggtcagagggaattccctgctcactcctggaacagacccatccagccccctgccaccttcctgggctctgcaggaaccacattcacgccaagtttggaagcagctgggttatgtgctctttacaccagtgctgctggacatagacttgggaatcctttttatggaggagagggacaaggaaggcagaagcgcctggggcccaagcatgttaccttctcagcaaccgctgtactctgcacatttgttttcttgtggaagttctggaagaaggtggaggaggcttgtcctgaaaaggctggtggggccagaggatggccagtggacctgctatctgcactcctcgagatggccatggggagccccagagattctacccatgtgggtgggggtaggagcagcaagttaggtctggtaaatgttaaccctcctttagttgcacatgcaggctgggatcattcagaagagactttagtatttggaagcagtgttaatccaccactagcaagagccagccctcaccccacacatgcatggcaccatctttgccggcactgcctgcagaggcctaagtgctctgggctggaaacttggccccactcctctgaatgaccaaggcaagttctttgatcactgcctcagtatccccatttgcactgtagggatagtgataacactttctcatgggatggttgtgagaactaaatgagataatgcattatatgttcttagaataatgtgtgctaggcacatgttatcaataaaaataatgagaaggagacaaaaagaaggggatctgccttgcaatcttttcatgtgtctgctatgaaacaatgtcacatccatcatgatgggcagccccattgtgtggagcataagtcactttggggcctttccaaatctcaacggggatgcaagctggctggagaaggactctctgggttactgagacatgccctgtgtcagactgggtggcccagagatgtcatctttgcaaagaatggtgtgttgcaagagaagagatgggacgctgatgagcagggagggtgtcagggttcagctatgtggggacaagctcactgtgtagcaaaacaacatctgcacccagcatggggagactgagggtgtttgctagggagcagctggggagatggatcctgatgaaaaggaagtcttccagccagtccttcagacagctccgaaggacaccggagccaagagggccttgtggtaacaattttgcagagccaatggagcacggccctggtgctctggggttgatcctcgctttctagaagctgatcctacgggtagcggcatccaggaagccttctgcagcgtggtcaaagcactaagagatgagaagctattgcaagagccctagggggctaatccattctagagaccacagcacatgtggcgattaagcctgcaggcctagaggaggggcgttgggtgcaaaccctggctcctaaccaaaaggctttttgacttgaggcaagtaattcaacctgtctgtgccttgtttccttctctgcagttcttgtgagggttcgatgatatgataagggttttaaaagcaggtgcaagctccctgtgatcattcttttgcctcagtatcccggcaggcattgagaaggctgcttggaggaaggagcctttgagtagggcctcaaaggatgaggaggtgtaccccaagacggaggggcgttgagacagagggaaagcatgtatgcagtcccatggctaggatttgggggtggagtgtgtttgagagtgtgagtgtgtgcatctgtgtgagtttgtgcgtgtgaatgtgagtatgagtatgtgtgtctgtgtgtgcatgtgtgtgagtgtgcatgcatgtgtgtgcttgtatgagtgtgagagtatatgtgtatgtgtttgagtctgtgtgcttgtgtgtgtgtgcatgtgagtgtatgtgtgtttgtatgtggcctgtgtgtatgtgtgtgtgcttatatgagtgtatatgagtgtgtgctgtgtgagtgtgcatgtgtatgagtgtgcgtgtgctgtgagtgtgcatgtgtgtgtgggtgggtatgcatgtgtgagtgtatatgagtgtgtgctgtgtgagtgtgcatgtgtatgagtgtgcgtgtgctgtgagtgtgcatgtgtgtgtgggtgggtatgcatgtgtgagtgtatatgagtgtgtgctgtgtgagtgtgcattgtgtgagtgtgtgtgtgactgtgtgggtgggtatgcatgtgtgagtgtataagtgtatgtgcttgtgtgtgcatgtgtgtatgggggtgtgactgtaggcatgtgtagtgtgtgagtgtgtatgtgcttcgtgtgcttgtgtgagtgtatatgagtgagtgcatgcttgtgtgagtgtgcatgagggggtgtgtaggaatgtgtgagtgtatgagtgtgtatgtgcttgtgtgagtgtgtgtgcatgtgagtgtgcatgtgtatgaatgtgtgtgcatgcatgtgtgtgtctgttgctaagggagaggacttagcattagtgagcagcaggagacgaaaggggaagcaagtttggggttcatgcagtcatgtgacaggctctggggcttcctctgcaggccttagggaacaagcctggtttggaagcactgaggctgaggtggtggtgacaggccctcacttggtttcaccctgggggtgtaggtgggcacaggaacaatagctgagcaagcaagaggggacagaggctgcatgcagggcctgagccacctagaaggaggctgctttcccagcccggccctcccgcagcgcctgtgtgctcataggaaaatcctcctcccgagagatttatggctggcggctgcgacagctctcgtgtcctttgcagggggagcttggctactcctgccttgggcttaggcagagcgcagttctctctcagaaagtctagagcctcgcagctgagcagagctttggggcagccccaggttgctctgtgaaacaaggtgccaccaggcagccaaggtgacaaggggcccgccatctgacagggtggcttggatttggaggaggtcactggacgtccgtgcggatggcccggggccctggcgtgtgtcctcctctcatctgcacctggtccttgccccagcagctgagtgtgttgttggggaaggaaatgagaacaaggagtgccctcctggggatgccgtgagggtggcgcagcatctgctttgcactgggcccatgtcgctcctttgccaggtatgtgagctggctcagccctgtggggagcagacacttgggcatgtgcttggagacatggcttttgacactcgccgtcctttactgagctctgcgcactggccctgggctgtgcactcagctcgccttgtcccactgaacctcaccacattcccctggggaagggacggtcgctgactcccttctgcagatgtgggaactggggaaagtagtaaaattcaggaggaagtgggcgaggctgacttggactttggacctttgtcttgagagtccacaagcttggccttgtcgccatttctttgggcaagggtttctcagcctcagcactcctgacattttgtgcagatcgtcctctgtggtggggccatcctgtgcattgcggggtgttcagcagcatccctggcctcaacccactacatgccagtaggtccctccaggtgtgacaaccaaagatgtcaccttgagggcaggtgtgacaaccaaagatgtcaccttgagggcaggtgtcacaaccaaagatgtcaccttgagggcacagtcacttctggctgagacccactgctttagggaaaggctaagatgacctcgaaatgtcaccaccttccccttttcctccaaccccagccctagtgccaaccctctctgctttcctaacctgctgacagtgagctctcagattctgtcgcctgcatgagggtgagcctccatcagcctggagagacagtcctggaagtggacacttctgcctgcctttctggtcactggtgctgccttgagcagagtgcctgtgagttttgggggattggaacgagccttcagcacctccccgtgccactctagcaagccttgggtcacactcaggctaagttgtctgagggattgagagggtgacaagatcccagggatgttgaaagttgtctgtagaacactagtgagagcatggggacgttggcgccccaacactctgccggcagaagtcagaacaaagcctcctgtcattgggagctggggcccagacttgaagctcatgtgttctttgatccagctgttcacctctgggaagaatcccacagaagtgtaggcatgtctgctgaaggctcttcattccagccactgtgtgacagtgtgaggaagaggaaatgagtgctgaacagcaaaaatacaaaaaagaaaagccaatggctgctgtacagatgacgatagactggttaccagtctctatggttttcctctctccctgtagctgtaaaattagcaatgtgacttcgtggcatctcccatcgagaagtgcagaccttgaatacaggctggtctggggcttgctctggtcaaggggcagaatgaatgacagtcagcctaaaatgaatgacagccagcctagaatgaatgacagccagcctaaaatgaatgatagccagcctagagttccacacatcgggagacttgcttgattctgagctctcaaaaccctgtctagccaccatgagaacaagcctggactgggctgcagagggtgagaaaccaggaggaggagaacccagctgtcccagtcaaggccaatctcgtctgctgacagccagccaaaccccaaacacaagagagagcccagccaagtacagcagagttgtacatctgaactacacctgaccacagatgagtaagtccagagagtctagaagaaccaccctgcttacccccagactcacaaacaatcatcagtgtgtcttgtttcataacattaagtttggggcttgtttgttacgcagcaaaagcagactgataaacagtgaatagatcaaggctcagatggaagagctggtttgcttgaagtcacattactagttgatcttggatccagagtgtagaccctggccctagtggagtcagttcccgtaataacataaccagagtcaataaggggtttaatgaaacaaccttaaaaaacttccggtagaaataagcttcacgtcatgactgcacgtggcccagaatctctgcagtggccctcagcttctaggctgagcagcaagagaacatctgggcatgtttatagctcagactctatttcttagcgctttgtgggggttcctggctcatggaaatgaacatcttgggctgcactgaggcaagagaaatgcaatagaggcaaggattccaaaaacagctctaatacaagtaacagcaaagctcccttcatggaacacacggctgggaggacctcgccattctggaaaggcaaggctcagtgggggagatgtgaatgctcttccctgatttgggggcttggtcctagggagccaaggctgtgcatcacgaacggaggccttgggggaaggtgggcagtggagtagcagcttggactcagtgccatcctgcagaacttctttgatctcagctttcccttggtaacataggggtaataattgtccttccccattaggcaaagaagcaagagaacagtgttcctgaaagaaaaaaggctgtgcagaaaactgtagcatacttgtcaagtctgtgcactttaggtcaggtatggttcttgcctcttaagaaccgtgtcaacctggataagttgcttaacttttggaaccttgtttttgtcattgtaaaagggagggagcatttgaccatgagaatacaaggacagtgatcatggacggaggccatggtaagcttcttccccagattcccctaccctagtgctttagcccgggacctgtcatgttataggctctggataaatcatggctgaattcactgaaaaaaatagtcaccattcactgaatacctactacatgccatgtagtttataaaggaaagaggtttaattgactcagagttcagcatggctggagaggcctcaggagacttaacaatcatggcagaaggggaagcaaatatgttcttcttcacatggcagcaggaagagaagtgagagcgaagtgaagggggaagccccttgtgaaaccatcagatctcaattacttttaccatacgggggagactacccccatgatttaattatctctacctggccctgcccttgacacatggggattattacaattcaagatgagatttgggtggagacacagccaaaccatatcacagaccaagtaggatatgcatacacatataatgaactggctcccatgactgtgagagctggcatgtctgacctctgcagggcaggccagtaagctggaaactgaggtagcaattctatgtcacagtctcaaggcagaattccttcttatttaggaaacctcagtttttgctcttagctccttcaactgattggctgaggatcatccccattattgagggtaacctccttaaagtcaactgattgcaaaggtgagtcatttctacaagtatcttcactgcaacatttcaatgagtgtttggccaaacaactggcaccatagcctggctgccagattctggtttgtgctgctgggtgacagccaagaccacctatactccttctctgcataggtgtgcagagaaggagcaggtttggggggccattatcacacacctcatattctaaaggcaggctgtttccacaccatgacactgtttccacaaatgtgctttataagcagcttactttgtggctggtgattcccttctgggggaaaattgcctcctctccctcattctttcaagattgatcaagaccagatgtgtgtgtgtgtgtgtgtgtgtgtgtggtgggggcagtgaagggtgactggataaagatgtgaatttagaccccagctccattccagagccaaccaaattgtaattcactctcagcttttcctaatattaggtttgtgccaaagcaattgcggtttttgccattaaagtaatgccggtaaagtaatggcaaaaatggcaattgcttttgcaccaacctaatagaatagagtcaaatgcaaaatcccacgccagtagcaaacggtccctcgctgctctcccagtctccctgggcagcgggacccacaagcacagccctctcctcctgtatgccattctgtgggattctggaaagtccaaagggatgatctagggcaaagaatcacccatggcccggcaccacgagggccggaatagtacatgcctgaggcctgggtccaggacttgcttccaaaattgcactcaaggctctcttgcctttgggataaaagaccaattctctgataaggcttgtgatattgatttttaaaaagtcaaaagaagaatatttttttgatacaaataatgatatgaaattcaaattctggtgtccacaaataaagttttattggaacacattcatgcctgttcatctgccaattgtctgtggctgctttcttgacacaatggcagagttgagtagttttaataaccatgtgactcacaaagtctaagatacatactacatggccttttacggaaagatttcctgttcccctacccccgtttagaattgtgcagccttccctgctggttattaaataaccaccaccctgagctcccaaaagcccacttctaaccctccccaggaaccttcgggacctctcccaatctatggataaagcttgtctgtctggagagctctggaaccctgtgagagcctacgcacgtgttgttctcattgatggtgcccactttgtatctgtgcattgtagtttgagtcccatccctgattttctcactgctccttcaaagatgcttcctccctgcctcagagtcttagcccatgctgttacttgtgcctgggatgtgcttccctacatctccaccaccatgcaccaagtctgcaaattccttctcatcctcagatcttgtctgaagtatcaagagggcctcttgtcctccaacattaggtctggtccttcattacacactttggaggaaggtcactgtgcagccacacttaagaagtagccggtcatcctccatctccccgagggcacagtatctacataaactatttggaattcttctgcctgggagatttatctctgttctcgaatttatttacttagtcaatcatttatttaatcagtgtggtctcatggatatttatttttactttgggttacaattcaataacattttatgtattttattgcacaaattgtcccagctttgggcacggggagctctttcagctggctcctgtgtccctttgacatagtctcatcgttgttagtgggatctttattacttgctttaccatttccttactttctggcactataagacaccccaaggtcatcttgtatcagtcctacaagaagctactttcccaagggtcctttgttccttttactggacaatgatattagaaaccaagatctgggtacaggtgggctcattgctatagggatgctgttgcttgtagactatctcagctgacagagtaaggggatccgattgtgcatattaacccatgtatatgcacagatctataaatatttttatttggaaccacctgtatccatgtaaagctcaacgtgagttcacactaatgtctccaactctaatccatcaccacatggatcatttggcctccaccccttgcttatctcactccagtggtgaaaagctggtgttcaccatcttctgtccatttacttcattattcagttgccagggacatggatattagtaacagaattattcaatggtgcctctcttgaccctgtgggaagcaaccttatcagctcgagtcaagtgcttctgtacagttccttttgtctttagtgttactgacttcactcatttccaaagttactaaagtcagtacctttccttttctgtggggttgtctcaaacatttgcaatgcatttagattgtttggtcacattgtgcccttccttttgggatgagggattcttttcatgagttaagcactggggctctggctttctagagaaggggcatggaaagtctgtgtggggtacttagcagaggagagaaggaggatgacagcacccttgatggtgacactacctcactagccccctggcctggatttaaagtttggatggtgagaggttttaaggccacaaacaaaggacattgatttccacagggattttgcaagactctgggctcaagcagccccatttttgtgcccaggtgataaattatgaccacaagttggggagaggaatccatcctaactcttggttttctagggtttgtggaactggggttactggaaggcagctcctttggcagatgcatctatcaccctggccaacatcgagagtcccttgggcagctcctggagagggaagacactgagatgcacaagaggtggcagagacagaagggccgatcagggagggtcctttgagaggactgaagctggcaggctccagggtcatccagacatacttggggcctctgtaaggggctagattgggtcctgggtaggtactgaggttcataaccagcatcacgtctcaacacaaatgttcatctgcccccatgggtgtctactataggttgatgaggcacaggagagtggagggggtttggaccagagctgttcttattcctgctctgctgcctgctagccctgtggccttgagccaagcatgtaactccttcaagcattaatttgctcatctttaaagtacggagaaataataatcatagtacctgccttaaagagttgtggtgaggatcaataaattaattcatttcattagaacagtgattggcacatagtaagggccctgcggaatgacaaaaatagtgatattgatgatgataatgataatagtgatggatgatgattatggtgataattggtgatgatgaagatgatattgatggtgataatgataatgatgggtgatgattatggtggtgattggtgatgatgattatgacaatgataatggtgatgattgatgttgataatgaagatgatgataatggtgattaatgataacagtgatgatgatgatgataatgatggtgaggatgatggtggggatgataatgaggaaatgatggatgatgactatggtgatgattgatgatgatggtaacaatgaggatgattgatgctgataatgaagatgatgatggtgatgataatgataattaatgatgatggtgatgatgaccatcatcacctcaggctattggggcctatgatattggggttacatttggaagaaattcatgattttcaccttgggagtatttatttgactcacatgctattgctgagtgggccaggaagcatgtgcagaactggaaattgagaacttgaagtttggttttggtcaagttccccagaagcagcccctaaaatgaaggtctgtgcataagtgattcattaaaggggcactcccccaaaaaactggtcaggtagagatagaaggtacagagagaaactggagagggaaggggaagagaccaaggaaaggtgaggcttcacctgagtcccagcttcagcctgagcctgtggggagctctggatcataaatcttatcttgaggttcgtcttgctcaagacaaaggagctgggcttctgcatttctgcgtcaatctaccctcggctgtgacctgccctgggggatgagggtttgagaaaccagactcccaggcactcctggccctcagtccaagtgagccattccagtagcacaggcatcatcctctaaagaagactgacactgtgagctgttagaagcaaacacacagaagccgggtggtggcgggtggggaggggacacacattagggagatcagaggcatgcgggtggagcactgatgtgtctgtgcaccacggagttcacatctactcttccagtaatggcatgtgatctcgagcaagacgcttcatatagtcactcactcaaatgttttcaggtactgactccaagccaagcacagtggatgggactccttggaagctgaatgtccagcatgtgcatctgactgactgacagctgtcacctgtgtgacactggggaaccgcctggagccctgggtcctccccctcacaagagaacctgttggaatattccaggaagtgattttgtttagacaggtaaccctgagcctactctaaattcatttgaaaaagtgaatcttcacacactttggtatttcttgagtgacattttcttgaacctcaccacacagttacaccaagtttaccgtaggactctggtccaggaagccttggctcccccatctgtaaagctcagggcttagatgaggagatcatcaaagctgcttctagcactgactttctaggacaccaagttaaaacaaacatgagtcaagcagttgattaaccccaggttctatttttccatttgaacactgaaggtttttcctagtggatcttaaaaacaaactccggaagggccttttaccttttccagggataatgtcgtaatctaaacaaatatgtaagaagcaaaaaacagaaatggtgagatgagaatttaatgtagcgtgcttgaggccctggatgatttatcactgtcctcgcagactgcacagcctcacaatgggttcgtgaatgtgtctctcctctcctcccccaaggatcttaggccaagcaggcccctttaacggagaaaccatttaacatgccagaaaaagtatgggtctgtgggccacccaggaggcaacccagcccttgaagatgtcagcgaagacacagagactcagagaagggcaacttcagagttggcctttggttcttttataggaattcctccccgcaggctgccctttcagggtgtgatagtgtggacaaatccactggaccaggtcactgttttacagctatcggggtgaccctgagccaatcaaagcaaagtacataagcatcatggcagtggagtccaagaaccatctgggtcatccccacacccacccctgtccctgccccaccatgttgattctcatcttaaactcatccgttgcatcttgcgctgcttcataaccttacccagtggcagatcataaaccagtgactcatgtgcttgtatatttagtgcccatctccttccccatgagactttaacttcttgggatagtgattcattcagtacatagagagatgagggctctgggaaggtttccaggagacagtcttcgtgggacctggggtcgtgttacttcacatcttctcatctgtgaagtggggctaataatagtccccaactcagagatgttcttactatttttattttagagatgaggaatttgcactctaaaatgtgataaccacccatctgaattattgccaagtcatcaagttatccattaatcatccatctatccatcaatttatcttttctccctccctcccttccctccatccagccgtcaaaccatccatccatccatccatccatccatccatccatccatccatccaacaatcactaagtattttatgagggaagtcggtgtatgaggctcttgggaacacaatagtgatcgcttcaggagatccttagctaatatagtgggaaaagaaaatcaaataaatacctatattccaacccagtcggattaagggtgctaacagaggattttggagcccaggacagggaggggcctattgtcctgagctggctaaagggaaacaggcaggagaagcaaattgggtgagtctcatgtgccagatcgtggagttggacccaacttgttagcccaaggaaactgtagtgcaggacatagaaagtgaaactaagttttaagagtgaaaaagaaacaaagaaacacgcctgtaattccagcactttgggaggccaaggcaggagaattgcttgagcccaggagttcaagaccagcctgggcatcctagcaagatctggtctcaaaaaaataaaaaaatcaaccaagcaaaggtggtgcctgcctgtagtcctagctacttggaaggctgaggtgggaggactgttcgagctcaggatatttgaggctgcagtgaactctgatcaaaccactgcactccagcctcggcaacagaacaagaccctgtttcccaaaaattaaaagatgaaaaagtgattttaccttcctctgaaactgcagcaactcttcatgatcctgagggcttgggagagtttaaacttgctttatctaatggggcatggctataacaacatgggcacgactctggaaatctttcatctgaagcgatgcagacactgcctccttcctttcaaggcagagctttatgcacctgggtcttgacatcggtgtggaatctcagaggaacctggggctgatatcactggaattaatctgagtaattagtaattagttcccaggagatggcagagctgataacatctttcttggtggtggaatttttccctcttgccctgtcccagagcacagttcatcctgcacccctgaatggctctatttctttccagtgatggttcacagactttcggggtctcccgccctaatcatgacgtgccctcctctgctccccttggggttggcctcccctgatagtgtgacaggttatttctttagtcattcaagctggttttcctcatatttttgcttgccccatttccggcagctcactgggcccctctgtgtccctgcagctttaggcagctgtgttacaggcgtccaggtggaagccacctgccggaacttcttcccttcccgaaaaacaagcccgtaatgaattggctgtgtgcatttcacagttttcacataaaacccaggattcctgacttctcccaaggaactgggcagtctggtcctgtgtctccacctggcaacaatgggctggagctggggaccaactgccgccttcaggaggcatgttcctgcctgcttgccactctccccacccagctgtgggcatatacagaactaaagtggggtgtcctggaggagagggggagggggaaggggaagggaagggcaaggagcaattcggcagagataggaaaaagatggggacggtgcaaggccattcattcctcactcggggaccatgacgggccacatgagagaggtcagatgcttgtaggagcagtatcagcctggtctcaacaatggggcaacgggcacctctctggtgagccgtgtggacaggtggacccagccataaggacctctcctatgctttggggctggcttggacctcagcacagccctgggggagtcccacagtgccatccagctggcatatggacacgtggaggtgaatttcgtccatggggagaagtaggagcctggctagttcttgcccctcttgagatgtggcctgagattctccctagctatgaggagcttgacagcctggggaacaggcccttttcccctgctctggatcgcccaggctctgcgcctggcagccatggcttcatttattgatcaaggtggcagcaattttctcatcacagaatctaacccagtgcacgcccctggtgtgtgtgtgtcttctgcttgctgtcagtgacaggtgaggcctggggtggtggatggggccagaaaggatggaagcctggggaggagacggttcccaaccctcatgcggctttcctccactattcctctgggccgactgggcttcatggaactctcgcggctgccccacttgatggatgaggacaccaggtctgagaacttcccaggtcacagggcagggattcagaccctaggccaggcctgaatcgtgcccactttagaacagggtggccttgttgctgggcattttctgcagtgccattgtgcctcatttgccttgtgtacacggggccgaccggtcatgcctgcgtgcgtgcacccagcagggccccgcaaagtcctacctgcttttctgtctgcctggagtgcgcaccctccactctcagcttaccacttattgcctcatcctaaataccccctttaggctttttgttttgctcttttagatgaagaaaactttgaaattaaaatgcaaaatcggatctttgccttttgtgataaaagcccatttcctcctcaatcaagcacaattatacaaaggtattcattgcatcacctggtaaagctgagatcaatatgaacaggctgggttttggcttccgtaactcccagcaccaagcctgggggctgtcaggagcctgaggcttcctggtttcaggtgcagccactctagtgcaggaggcaggccttcctcgtgactcctcctaggaagatgggccccacctgctgtgtttccagtcacgtagttgctgcggcgggtgggtctcctcccagtggacagtcaccccagagagcacagaccccagcactcccaggcctggcacctccaaggggccaagtgaataaagtaaatgagacgggtgaacacggctccacgggcgttaaggccatgggctcccacgctgcacgactttagtcctgcctctcctcgctctatgaccttgggcggcagccacggaactcacggagcctcagcttgctcatctcaaaagtggacgcgaccacgcagcctcttcccgtggggctgaggtgagcactcagtggaatgatcaccgtgcctcaggcaggacaagagccacggggactgtggctatttctaatatccttagtagtagtagtattaatggtgcacaggagtggggacagcgggagttctcaagggaccctccttgtcacggatgttatcgctgggacttggggatggcttcaagagccacaggaacattcaccaagtaactgctgggatccaggaaagcaagagggagatgccgctgggcctttccaatgacctctgcctgtctcccccaccacactcagctactgtggaagttgggagtttgagctgggccaggcttcctcttctctgcttaccgttgtctttgtgatgaatgcaaccctctctgtctctctccccatctcccctctctcccctctctccctctctctcactccctctccctctctccctctccctccctctctccctctctgcctctctccctctcccctctcttcctctccccctcccctctcttcctctccccctcccctctcttcctctccccctctccccctttccccctctccctctccccctctcccctctctccctctgtccccctccctcctctccctatctcccccctccctcctctctccctccctcctctgtccctctcctcctccctcctctgtccctctcccccctcctctctccctctccccccctcctctctccctctcccccctcctctctccctctcccccctcttctctccctctcccccccctctcttctcctctcctcttttcctctcctctctcctcctccccgactcccctctctccttctcccctctcttttcctcccctcttttcctcccctctcatttcctcccctctcttctcctccccccttttcctccactctcttttcttcccctatctttccctcccctctttttctctcctctctcccccactcccatctctccctctccccctcttcttcttccactctcttccctccctctcccctctctcccatctgtctctcctctgtcccctctctatcctctctctctcccctctctcctctctctcccctctgtcctgtcctgtctcttctctctccgtttcctcctgctcataggaaccagggctcacattctaaggaactaaaggccatgaagaaataccagggggtttcctccagagggtggaggttggcccctgtggctgccacgtggtgtcctgggggtgggcttggagttgctctgtgaagatccaggggacctgcatctggggttacttatggcacagtgctagaattctagaggggagccctctgggcactcctccaaggccacatcccagacgtggtgggagctgcagggtcaggtcatcgatggtgtatttcacgctaaccagatgtgggcgggcatgtgccctccagcagatccttcagaaggaaggaaggaagctgtcactgggccttcccaaggcaagcccaggctttctcacacaccatctcagtcagtcctcatcccatcctggtggagggatcaggatatcgtttcttcattgtgttgtgggggcaaaggcgtagcccatcatgcaggttgctggggtgccccacaggggcaaggcacagagagggcttagcagacagccaggcatgcagtgacactcaaaatggcagctgtttccatcccagtattcaaataaggaagtagaggccctgagaagttaagggcaaacaaggtcctggagaactggagtcaaggaacgtgtccccaagggagtgccagtaagcactggcagtgtggcagtgctggaaacaggacaggaaacaccacctgcagtggtgtcagtgcagcccgggatcctatactgcagccccaggaagctgctcaacgtctgcagctccttggcagccctctcttccatctggccctggctgtttgcctgtgctgggcaccattttgcttctggcactgcagtggaggtggggcgggaggcagggcaagggtgttcaccaggagctctggttgcactagggaaacccttctccttcccactgctccttcactgagctgagccctgtggggagagtgtgtgtgtgtggtgttttttttctgtttttttttttttggagacaggcccaggctggagtgcagtggtgtgatctcggctcactgccacctctgcctcctgggttcaagcggttctcctgcctcagcctcccgagtagctgggattacaggcatgcgccaccacacttggctaatttttttatgtttagtggagacggggtttcagcatgttggccaggctggtcctgaactctggcttcaagtgatcttcctgcctcggcctcccaaagtgctgggattacaggtgtgagccactgcgcccggccccatctgatgtgttcatcaccagattccccaaatccagtccagtacctgacactcagcaggaaatttattagagttgaggaatgaatgactgaatgggctgacatgtcagagtcactctgtccttccctccagggcatgagcttgtagaagacaaagccatgacacagcctcctggagacagaattcactggctcaagcagagcaactttgttgaggagacaaagcttggcatggaatgggcacctggtggcccaagaaggctgagtgaggggtgcagtaggcagcctggatgccgtggcaagctttgggtgttttctaagcacagagggacattcctactagagctgcacaagtctcagcccaagcaggagtgtcccctggctgttagaaagccagagctttgggagagcatggcctctgagtgtcaaggcccatggggatgtgactctaccaggcttcaagcagaaccccaggagaggatggaggcagaaaggctatctgcctgggaaagtgatggcctcttcattccctcaccaaagtcccattttttaaaaaagttaaaaattgatggacaaaatattgaacatgcagacttggcagcagagggataaacacaggtgcactttgtcacagtgacagagtcaatgggcattcatttctaacacggcaagcatcatttgaatgaagacagcagccatcagttaaataaatagttatgctgtcctaagcttgagtgctagctaggctcagagcacggacttggggctcactgactggcatctgtcagcttctgaacttggtcctggtgtggttccctcagagcccagggaggtcgggcagggggtctgttccaggagtgagcagggaattccctctgatccactgacttcagagctggtcatggaagttttgaaatgcaatcccttttttttaagtataaaataatatatgctcatgagagtgcaaaaccaaatgaaccatgactgaaggacataagaataggaagaaaaagcctcctacctccttcatcccaacattgcattttccagaagtttcccatacatacacacacggtatgtccatcttacattccagcaactacagtggatcctcctgtgtgtgctggtttgcactggatcccactctaggtgaaagataagatggacattccttttctctggtggatccactgggacctctctccatgttaccttccacggggtggaggaggtcctgtctgtcttggtccctggtgcagttccgttttggtccaggaaatatttccattgagtggaggggcacagctcagcccctgccaacctgctgtggagttggagcctcctcacttgaggctgggggtgtgggcggccataaactcattgccgtaagcagttctgctacggcagaaccttgtatcttagacacgtgcactagtgcgttgggagggtaaattcctagaaggccattgtgaagtcaagggtgcacgcgcttttaattttgatggatgttgtcagattgctgcacgtctgaggaggcagcagatcattgactcttggtgcagtttcagttcttttttcttggagcttcctgtgttcttcctgtccaatcttctcaagcccagaggcacattgctggtgaagattgaggcctctggagctggcctgaggggctgtgaacccagcttctgtccttgctgactcttcccaggcctctgtgtcctcgtctgaagaatgggtgaatgacagtactgacttcaagggcggatctgaggcctcatgaactcacctcccagccaccagcatccccaggtgcacatagatcaagggaacaagctgtggtcatgggacacgagtttgttggactctggaaggcctggcagtgaggtctggggtggcattgcccttggagttgttgagggacattggggatgaagtatggcccttctgagcaggccacccctgctgaccgtcctctcctcttttgaagtcccagagatgggggatctgtttattacagacaggcaaacagaggcctacagaggtgaagcaacttgcccaaagtcacacagctgcttacattacagaagaaatgccactctgctttttactttaagcacaaaatttgtttctccttgcatgtaataaccttgctgtggctctgattcttcacggtctgggtttgaattctcatctgctgatttctgactgtgggcaaattcctttacctgtctgtgcctgcagatctctgagatgaaagcggagatgggcgagctcactcacaagcagggccgcgctggtgtcagcaccttgggcagcctcagtccttcctcttggatccggcactggcagggcaccagtgcgaagagggctgcctgttcaactcccactgaagctacaggtgagtccaggcctcggtgcaatgcatgctcttgtgatggccccggagccaagcaattttatcatcgtcttgtaactcatccactacatctgacctttggattcacagaataattaatggggcactttgggtggcgcttgaagtgtcaagtttttaattaatgtgccggactgaatatacttagctggaccattctgcccagtccatccaattacccagactcattatgcaactcgattgcgttttccattactcagtggctttgctaaatgggaatctatgctgcagacagacagcccagcgctgatattgattagagagcacagtttattacccagtggaggcaatgcttggggttgtaaatctcttgctggacacagcttttctgcagcctccaggtgggagacggaattgtatttggatgaagcatttcagccatcgaccctccttccaaacttcctctgtgtcctgccctttgtttaatggaattgcctttccctcgccaactcccccctgtaaatacactcagggactcctcgtgctttaatagctaacatggatgcatggtatttttcacctttccccgagctccagaatgacacaaagcattgagcttgccagggagcattatagcaggatcagccacaggggaggatgctgagccttctttgttctcgctggatttaggatggatcttgtgccagacccaccttgtcttgctctgcagtggcctccagcccttggtgagagagggaggcagcagtcagttggcggtcgaaacttgtgtttaaggttgtgattataattccaagtggagaaacactcctctccccactgtatcaagggtactgtttcatactcgataacctccttccactcctattgccccttcagcattgcttcaatgtgttttcctaatctgtggcacaggctgcagcagggaaaagaaagagaaagagtacaggctggcgtgatggttgggccgtgtccctccactgtgtcaaagctgatgaacacctattccatgccgggcaccgcacatttgccatctccagtcctcagaaagcctaggaagcacgtgtttgggtttgtttttttttttaaatcttctagtttagattatttcatattcacaaaagagttgcaaaaatagtatagagaattctcatagacctccacgcccagctttcccttgtgttaacactaaagtaagtgttttaatcagcaatctgtggaaaagaaagctgaggctcagagaggttaaggaacttccactaggtcacacagccatggtgggattggagcccagatctgtgtttagctttgcctgggtcatcctgtaagcatgaatgactatctgccaaaggacttaaaaagaaggagcgggtgcttatccgcaatcacaaaattcaagaacagagctgtaggtgtccgcaaaagggagatgtctgatgcccaagcccagaaatcaagccagaacctcatttatgttcaagatggatgttgctttgcaaaggcacagaggagatttgaattcctaaggggtaagagggaaaacaagaagaatttgagcacaacactgaccagcagaccgcacgcttcctccctcatttagacttgggtagtcttgtttcatggaccccaaactgcctgaaggaccggcttccaacccaccttgccagagccaatcagcaatcagcacgtctaattgggctggtgttgacactcctgttggcaatgtaatagtgcaattagcaacaattaaccttgagaataaatgaaccatcacaaaagaaaagttttgcttttgccaagctcgacagacaccctttcaacaaacaccattctgattctctggacactcctaatgagaaaaggagctgctgggggtttaaacaaatagagtgatagatcacaaataaatcctatttattaagcacacatggatgccaggcttggcggtaagcactcaacattgacttagctccctaaattccctctaaaaacttgtgaaatcagtgctgtttttatgcctttaaaaaaccccaacattttaattttgaaataacgacagatacacaggaaattacaaacatagtagaggggtcccatgtatcctttccccaggttcccccagtggtgacaccttatgtgattgtagattatcaaaagcaagatattagcattggttcaagctacagctctttttccgatttcaccgttttccatgcactatttgtatatgtgtgtgttgttctatgcagtgttgtcagtattattatccccttttcataaatgagggaaccaaatcgtagaaaggggtaagggacttgcctaggtgaccacacagagctgcatgaaggtcaaactccaaagctgcacccctgcctgcctctctaggttttcaaacacccctatcctttgggaatgtgattaatatgggagagacttcacttgtggacgaagttagcccttaaactacacttacagctggtggtaaaaatgttgtcttgctaatttatctcttctaaagatgatatacaaagggcagagtgctctttcatgctcacattcgctctcctgctgcgtgtgtgtgtgtgtgtgtgtgtgtgtgtgtgtgtgtgtgtatctgtatctcacagagtgccttcctgtgtgtggaccctgatggaatgggatgagtggggagtcactgtgacttccagtctggtaatgtgggcagaaaacacgtggctgcctgacctgggacagccggggcaggagagatctactgacaaatggaagcccacctcccaccacgtacagggtggggggcaccagaaggccccaacacaccgaagggaaagctctgtgactctttacatccgatggcttcaaattaataacaaattgcaaaactaaggcacactggggatttggctttgttcttggagctgttaagaatgtaaaaggtcatcgagctacaataaataatgaaatgtgcctgttttgtgcttgggagacgggatttttttaggggggaggggttgctttaatggctctggggagggtcctgaaatcatcccgcttccctctgggtggcagtggtggtggaaatttactgcaagttaaatttttaaaaaatcaatagcatttcagatgattgcgaattaggggctatttgctgaggcttaaggggattaaggttaaagcctgaagatgatcaatgggtaattaccacaaagcagtggggtgagggaatggagcatgtctgtggtcttggggtcagggcctacaggaatgaagaacgcagccccaacaggaccccttttaacatccacagcgtgcagtatgtctgcacatgtcagacctgaatgagccgggctcagatgcattgggaaagccatttgctaggtcgttcacccttgagggtgcccacccttcgccctttctcctcaccaccctcgcggatacccccacccaccacggaggaaatgctctccattcagacttggagcacacaaaggccgaggcgcggacctgctgttcctttcatgccaatcagtcctggggttgtaatgactacaattttctgatttgaagtcaaaaccaaatggcccagaagagtgattcagactccacgtggccctcttcctgagaagaagaagcacaaatggatttttctttcttaagcccaattgtgtgctgctcatcgacccctcatcatttctgagctctattttcttccctcctgcttgaggcacaattaacggaggcccagaaagttttttgcttcctgtgtcttggctttgtgggtatagcttggccttggtgctgagaaaatgccgaggagcccaaagccctggagttgccttgggagagtcgctcacccttctgggcctcaggatggagggtccaggggctacagagctgtcagcctatgccctgagctgggactctgtggaaatgtgggtagcccagtctgcccagggtgactgactcagactctccaggggtcattgactctttgggtcaaacatctgctcttcaccatgtgaattttaaagtgtaaaccagctgggcacagtggctcacacctgtaatcccagcacttcggaaggccaaggcgagtggatcacttgtcaggcgtttgagaccagcccggccaacgtggcaaaaccctgtctctactaaaaatataaaaattagccaggcatggtagcatgtgcctgtaatcccagctactcaggaggctgaggcaggagaaacgcttaaacccgggaggcagaggttgcagtgagctgagattgcaccgctgtactccagcctgggcaacagagcaagactctgtctcaatataaatagataaacaaacaaaaacaaacaaaataaagtgtaaactggctcagaattccccagcagctcccccaactcagagtgaaacccagagttgggactttggccgcaggatcctcctccgtcttcgtccgcatgccaggctagtctttcccagactctgctaagtcaccctggccttctttcagcctgtgctactctcacgggagtggctgccccagggcctttgcctatcctgtttgtgctgcctggatgctctcatccgtccatgctcaaccccatggtcctcttcaattcccaggcctgccatcacctccccgggccgtcatgtgcgaggcagcccctggtctccctcctatagtatcacttacttgagtttctgtgcagcccttatctcagcctgaagttttattctttttgtttgtttacctgcttacgaactgcctgctgcaccaggatgtgctcttccagccctgcatctccacaccgagcccctggcctggcacggagtaggtcacgtgagtgcatgaatgcatgagaggcagtgctgtggagcccgctcagcagtgacactttgtgagtctgggttcagctctctggagctgctcattttacacatgagggagcagaggtcctggcaggctgatcctaaagtgagtgatcctcccatagctattagtggagtcctcaggctgcccttgtccacgctgggggcacctccaggcagctttggatttgaaaagaaggtagctggtgccatgaggcttctgagttcagccaaagggccctctggggcaatgggacaacctggccttgtccagaactgaggccccggaagcgaggggttgaaactggtgccatgagctcagttctttcagctaaagctgtgcatgttcccaagacagaaaaggtcagagacaatgcagttattctggggccatggaactctgcctggtgctttccaggctcttaaacgtgtccatttaatccttcattaagacctgtccatcagctcatctctgtgcatttaaaatatttcacaatcacttcccccctctgacaggggcctgactctggaaactgaattcaacctgcccctaccccgcactcccagtatggggtcctggcccaatagagccagccaaggccttgcggtgtaagtctcggctgctgcctccgtgttgggtgcgtccagtccactgggatatatggctcctattggaggtgagctgtccgggtctctgtaaatctgttcccttctcttcccccaccatcagggacataaggcagagaaaatgccagacatggacatgggacatggacactttgatctatgtactcattttcttgtgctccaaacttttccctttatttgacttcagaggtgaccactgagccagttgcttgcagtccattcagaagccctttccatcagcttccaggcacaagtgtacccttcacctccaagagcgggcagagccctgttagagggtggtcggggcaaagccaaaggcccaggcacaccgcaacccccccgccgccacagccggaactggcacgtcggaggcactgaggcccaggggcctgtgccctgtgctgcaccccgcctacctgccgcaatgctgggagacagcaaacaggaaccacttgaggggccatcagccgctgctgatgcgaatcaaagagcacgcggtccccagcccagggcggaagcacgctggccacccattagttgttatggaaactcattaccccaagaggttgttcagctgaaaatataaacaatttcccgaaaggttttagcaaaattcatgggtgacagccgtaatggcactattaagggagaggaggatgttctctcctgcagctgtgggttgcggcctgccttgtgtcaggggcacctgctctcccatgtctttccactgccacccacccagtggcatgaggccagacacgcggcaggtcctcctcaagcctcgtgagtcctcctgtcgggggctactccacgtcactcagacactgtcctacactggggagagagaaatcccaaggcaatgtgcctcttctgggctccctgagcaaatccctcttacaaagctgggtgcagaaaaatatcacctacaatgatggcgagttatgacaattagaatagctatgtactatcagcaatgattattattacatggtattatttcattattgtgatcaattatattacttgtaattattaataaaaacatcaagtatcattatgttccaggccacttgtgttttaagtgctgtaattctggtcacaggcatataaggcaggtagtattaccatctcattttagaaatggcaaactgttgttactgaaagagaccctgtgccaagcaggaattttaagtttcctgaaagttctgttcctctcttcattctctccctctcaccctctctcactttcatccagcattcattccacaaattcttattgattctaccatgtgctacatactgttctagacacagagtggcagtacacatgcctgtgcttccactactgtgtttttacttggcttcttctactcacctgtcagaacctagacgtcatttctcccagctagcctttttgggacttgctagttggggttaggggctttttgatgcttctacagattctgaacttccttcatctccatactgggagttctatgacagttgcttacttgtatctgtctcttcctctagactgggaaccctttgcctcctgggactgttttttgtctatgttttcagggctcagcacaaaataggtactgaatttttgttggattttatcactaggaaaatagttccaagaaggccaggtctgtcttttctacccttatatccactagaagtgtctagtctatagtgcttgcaaaatatatatttgtatgatggataaatggatagatggatggatagatggatgaatggttgattggatgggtggttaagtggatgaatggattaatgtctggataaataaaatgttggttactagaaggttgggtgattgaatggttggatagatattcggatgttggacagatggactgatggatggatggatggatggatggacatatgggtggatggtcagatatatggttggatggataaatggaaagttgttaggatagaggtttggatgactgggtagataattgaatattgaattgataaatgagtagcagatggttgttgtctgaggtcagtttccctgggcaacagattctgagctggtgttttacgtgcagaaaaattgctgagatgtgccttcaggatcaacacctatggaagagtgaacaaagaatgatcaggcagcaagaggagtcaaactgagacagagttgcaacctctgccgatcccatggggagctctggagctgggatagccattcaagttgtcttgtcttgaggcaaggagtctgtctttatagctctcattatcagtcattgggtgcacactgtccctgggggaaaggcctgattagggatgaagcatctttttcagccaagggcaatgcctggagagggactcagttgagagctctcacattttaacacttgcagcagctgggagactgagggcttctgtccaacaggcccaaaaggcaggccccaggtcatgcaccagagcatccactacgcttcacccttctgattcacttacttggctcctccaggattcaaccatatgcctaacaccaggcattcaacaaccatatgcctaacaccagaactccttttctgaagagtccttagtataatgtgatatatgcgggatcctgtactgtcagatcaaatactgtgttagcattcagagtgtagggctcgctgaggcacagtaaaggcaaacccatatcctgaatatgttaaccccaatcaagagaaattgctgcccttttgaaggtggaaagtgtcctgtggaatcaacttgccaccaagtagctggttggtggtgttctcaagggcatattagaagctaaagggcatattagaagctctgtgtgtgtctccccagatgattgagccactatactgatatgggtagatttttgtaggatggatatttggtggtagcagtagctagatcaaccttggtaagtggggagttcatgctgttgggctcatgtgtagcttctacctgtgctaccatagctattccattaatgaactcatggtgccatcaacagtagctgatgacaaatgctagctgatgtcagctggcctactcattgtgtctacttggctgtctagtggcttccaagatagatgctctagtggcttccaagatagatgctctctatcctgaacatatagtacaacaatcttagcactgtatgacaactttcacgggtccttccagaagcctctttttcagacctccttgtcccaaatgtttaagtctttgttctcaagacctctgactgacaagtcaagctatttacctcagcccctgagtccatgtatattcttacattgaactactgtttttttcaaacaaaaatggatggccaggtgcactgcccaaagctgtgcagttttgctgtacctttgggaatattttctttcactgctgtctttcagggtcacttctgagtggtgatatggtgcacctggtatctgtttttggttttcactcacatgcgattaacccactcatgaaccaaactcaggattttttctcatttttcagctcatcataaaggaaccacccccgtcttcagctggcaatgctttgagcaaagggagaggggctggtgccaccatggtagatgacaagggagtctagacttcctcctgctcctggggcttacatgtgccccctgctcctgcttgtgcttgatcctcgaagtaccacttccatcttgaatacattgttcctggatcttcctgactttatgacttgatggatctaagagaacccaacttactgtgggtagttctgcctgagggtcacttgatgatccatagtcaggctccacatctccaccagggctgaggaggtcaccaggagctcttcttaaaatggtcaacaattctctattgcagttggccttgctccagcacccaagtgggcctacactgtgactctcttactaggatttgccatgccatcttttcctgttgctgacacctctagtataataagttcagctgggtcatatgatctgagcagcagggccacttatgctgcagccttgacctgctgcacagcttttttctgctttgatccccactggaatgggcagccttgtgtaccactcactaaattagttggagtagttttccaaagtatggaacatgcatcttcaggtcccacagaggtcttccagtgttatcctttcatctttgtggtaaaaagtatgagatgcaataatttgttttttatttggagaggatgtgctgttatgcccccagatgactggaccactctactggaccactgtactgacatggctggacctttgtagaggtcaggctctcccatcctttggaacacatgtgccttcccaagagttccaacttgccgtttcttgctcatccagtccaattagcatgatatgtcagatatcacggaaccaatgtgatgttcagtggaatatccctataatccaggttccttcagaaggacagagaacaggagaattaatatagtgctcaggcaagactgtaaatgtaccctgttgtccatgccaagtgaatgacaaactatttttgatcttccttcttgatggggatgaatgcattcaacaaattaatgactacatctccctctgatcctcttgcttaatataatatgtactgtttcaatttggcaatgcccagcagtaaaatttgaaactgggttcccaggtgaaataagacttcttgagcctaagctatagtgtcccttgaaactcttccagagctctgcattgggaggtattagacgcttgcccaggtaataataaagtttgcctcatcctcattttaatggtattctttgtatgtgtaggtccccttcaggagccttgctgggaaggggtagtggggccaagctgggatatggatagaccatggctattatgccatcaaaaccgcattcaaattaatgaaaattttgcacaaatctaatagtcaccctacttctcatcaacttgctactgagagcctttcatgtacttagagatacaaggcaagggactggccatttagctggggagtataaacagtgcatgacacaggctttccaaggaggcagggcaaagtagaccggagagtcctgaagcttccctggagggagagtgacttaggcgaggagagagcctggccacccctgacaaggagtcaggaacggtaatgccttatttaaagaatcatgcctaatctataataagtaatataataactgacaacaataataaatgtgacatttattgacaagtacacaaaacccattggtgtctattataaatttcaccctcaaaacaacccttcattcattcagtaatacaacaattatttttcagacactgagggtacgatggtaagcaaaatgatacgatttctgccttcatatggctccccattcaagggagcatgtggggacagagaataaagtcagccaataaataaacatgataatttcagatagcagctagtgctatgaagagaatagaacaagagaataaacaagatgatgcggctgaggggtacttgcctggatggggggtgcttcagatgggaggttaacgaagcctccccaagggagtgacagttgtgttgggactagagcaacatacagttcgtgcagaagcatgttgctggaggaggaacaaatgcaagggccttgaggcaagcatgctctgggatgtttgaggaggccaggggaggcccctgtggctacagcacagcctataagaaaggtggctgggaacactgatgctcagatcatgtctggggatagacaatccgactcccaattcaggatgagtcttcgacactcaagaaggagaaaggaaggccgggccacactgaatacatgtccaagagtcaattagtccctgtgtttaaagatcataacctctcttgctcccacattcacaccaggaggaagcggtgacacatgctgtcccttgtcctggaggagaccctgcaccaccagtcctgtgtctgcgactcccagaaccggatggcccaggcgctgtgtccacgtagcccttcgtgtattgtattgggcctcttcagtcactgctagattttccagtattgaccaacagaatcttcccattggctcgtttcttggaagaatgagaaagagatgggaagagggggagagagcctagctccccacatgcaggtctctttccttcctctctccctgacctcttccatgcgtgcttccgatatccccatgttgagaagacaaaccacagataaagtagcctctcctggcccacagccaggggcgtgggtgcctccgtcctgtgtgtgcagacagctgaacaaccagattgtgaccttggcctggacttcctcagctggctggagatgaacttgttttcagaactgtgaaacttgacatcctttatcccgataccttcaactcccaagtttgcttggccaaaacaagccatatctgcttaatctttggggctctttctcatggaaaaggaggctgctgctttggccatttccaaaggcccagtgtccacagagcctttcagcaccacagtcacccctttggaccccaggggggagtatcctgctgtcatttcagtcacatttttagacaatgaaactagatggtgaggaagggccactctgtgctggcgctcaggcgaattcaggaggggagcagcctgcgtcactgccccagggactgctggttagcccaggactggagacccattacattcccaattagaggctctgccactgagcaggtgccttcagcttcaacccagagaggagccctgctctgccctggaggggcctaagaagcttacattatttacagtcacagttcaccttttattgttgatgttggtgcttccatttggtgtcagaaatttgcacgttaaggactttctaaagtgggggttttctttgggcatggggttgtggggagctactgcctcgtgcccccaatttcactgggtcccactttccttacagccttctctcatcctcttcttccatgcattttaatttaagtttgtatttagggtcagcattttgaaagaagagttagcatcatttttaatttttagcatcacgaatctaatttacttgttccatgagttaatagtgttggctgcttgaagagcacatgccttctctgtgaattcggcagctccatctggggtgatggcgagggatgagaccactttgctgggccagccagggccggcctgggctgggctgtggctcattcaggctttggtttaagattgaagttggggctagagctgaagacgccaccaaggtctgaggtagagccacacttggcctctattacatggcagggttattcccattcacagggtggcacccttctgctctgtcggctttcccaagcacatggatttttaaaaatatcaagaaaggaaaataataacaacctatggtactgacaaagtaggaggagggtgttgaattagaggcaaagaaggagacccagaacttcagaaacccaagcacctgctagaaacttcatggcgtcaggacaaacagaatgattccagagccatctgtctctaccctccccccatcctcctacttgacactttaggagccttacttgagtgataaggatattttaccacagcatttttacttgggcaacatactttattgtttagttccagggagaaaaatggtcgatagattgatgaaggcaaaatgaccttgttgttgagcaaaaccctccagatctcatcaccttcagtagcactgccttcacctaaatgctagtgaccttattgtaattgatttacacaggctctccccagtgtgtttgcattgcatgtggcatttgacatttcacaacttggcctctcaaaactgggatccaggatcagcatgcacacttccaaagcagacagtaaacattcgttagagcttgctcttgagctgacatggtgagatcatacacagcatccttagttgatggagtaaaaatgctaatcaggaagagtgtatgccccaggagactcataaaacaggttgccaatagggtatgaatcaatcagtcaatcaatccatattattaagcattctgtggccccattccatccttctccccaaatcagttcagctctgggaactcaaattcaggagcagatttcaaaaacgttgagaatcaaccaggtgttatgagatgagctcacatcaaatggtaaacagttcaaggaattgtactatggaaggaggcagacagagcttggacagagacatgagtagagatttctggagaaaagcagatggaggatttgcatagttggagggaagtgggccggcgggcaatgacgatggaggcgacatgctgagtggttgcctggctcaaccactcttcactgtttgagcttcacgggttctactcagccactctggagcctcaccattctccctgcatgatggagctagtgaccccatctctcagggctacagcgaggttctaacaggcaaaagaggtgagacttctttgtgaatttttcaggaaagaggaggagatgcctcctcctcctccttgggggttgggggcaggagtggggctcactcctgtaatcccagtacttagggaaccagaggtgggaggatc

SEQ ID NO: 1575 - protein, 238 aa, Homo sapiens
MEPGLWLLFGLTVTSAAGFVPCSQSGDAGRRGVSQAPTAARSEGDCEETVAGPGEETVAGPGEGTVAPTALQGPSPGSPGQEQAAEGAPEHHRSRRCTCFTYKDKECVYYCHLDIIWINTPEQTVPYGLSNYRGSFRGKRSAGPLPGNLQLSHRPHLRCACVGRYDKACLHFCTQTLDVSSNSRTAEKTDKEEEGKVEVKDQQSKQALDLHHPKLMPGSGLALAPSTCPRCLFQEGAP

SEQ ID NO: 1576 - DNA, 43712 bp, Homo sapiens
acagagcaaggctctccatcttggaaaaaaaaaaaacaaaaaaacaaactaagtgaaactcttccagccataccctgtggtgctttaagaaatcaagacaagcttcttatttggataaccatagagaaaaagcacatggcccagcaagcaccgcgacagtcacaaagctcaactttgatggcaatgatggtgtcagtgacttttccataatgcgtgttatgaattgtgtgctttgaaaaacactgtcacttctgatgaagttcggtgcccctgcgagcctggggctccactccaagctgggccctgctggccatgtgcctcctgcctcccacaccaggccccttggctggcctgtccgtggtgagaccctggctcatgcctgtaatcccaacactttgggaggctgaggcaagatgattgcttgagcccaggagttcaagaccagcctgggcaacatagcgagacctcgtctctacaaataatttttttttaaatttgccatgtgtggtggtgcatccctgtggtcccagctacttggaaggctgaggcagaaggatcgcttaagcccgggtggttgaggctgcatgagccgtcatagtactactgcattctagcctgggcaacagagcaaaactccatctcaaaaaaaatagggaggggtcctagtgagaccctggtacccaccccgtccctgtcttcctcttcagatgaccatgctgactgtcatagagcagccagtacctccaacaccagctacccctgaggaccctgccccgctctggggtccccctcctgcccagggcagccccggagatggaggcctccagggtgagtgtcagactcagactcccctgtgggaatgagcagtgggttgggaatcggggaagtgggattctggtccccaccctgtcgctgactcccaacttaaccctctagtgggcctcagtcttcccatttcccgtttcttagacccgcctaagaggaccgtctcctgggactcctgaatgctgcagtccctggagaccaagcagccccagcagaccctgcctggaggtcggggggagctgggagtggggattctggatgagcctccctcctccaggcccagcagggacactgacctctgcctaccccccccaccccagggctgccaggagccatagagagtgtgagggtcccgctgcttccccgaaatggtagatgctggttggggggctggggccagggtgggggtcaagagcagatgtggagctgccagtctgatatgctttaccccccagaccaagtcggtgcttgggggcttcccgggcccaccggccccaagggagatgccggcagtcggggcccaatggggatgagaggcccaccaggtgagtgcccgcaatgctgccccacagctcctctggccatcccctccaccaggtgggcccttccctgctcctgacatggccaggatgacctgggccctttcatctacttgcctcttcactcagcaccccaccacggagtgccctgcccacgcctgggctccatgaagtcctctcttatgttcactgacccacattccctgggcacctacacttatcaggctctgagctgggcactgggtggggtcagacatgtccctgcccttctggagcttccatgctgctgggagcagggctgggcagaggagaagcagcaatgcttgccccatgtgaccagggtttctatgaggggttttgggggtttgggagccccaaggaaggaagactcagcctggacgaggtggagaactaggtgctgtgctcatccccctgttagactaccaggcagcctaggcctgtggactccggggccctctctcatgcccactgctccaggctgccttgtcctgtcgctcaaggccaccctgggcctccttgcctcctgtatacccacaaatccgtgtgattccattgcaggtccacagggccccccagggagccctggccgggctggagctgtgggcacccctggagagaggggacctcctgggccaccagggcctcctggcccccctgggcccccagcccctgttgggccaccccatgcccggatctcccagcatggtgagtccccctgggatcccagcaggtggaggtgggggtggagtagccatcagcacagtgcccgctaccatctgccacgtgccttctgtgtgccagccctgctcacgataggccacatgtgacccagtcctccagcaggcgccgttgtcctcctgtggttacaggtgaggaacactgaggaccagagagggaaggtggcttgccagggtcccacagcctgggcgtaggggaacggcttcaaacccaggctgcctccagaacctgtgcttagagccaccgggcatcaggccctcccaagccttggaactggctggaatccagttctcggaacactgggacgcaaaagacccggcggcaggaagtgagtcctgaactcccaaggccacaggcccggcccctcctccaggccctgacgtgcgtccttggcttcttccctttggcagcccagcctgacctgcccatgggctgccaggggtcagagtgtggagcgccaggtttcagcctcttctccactgtgtttttggtgcacaacccagcacaccattcattcattctgccatcccagcattcattccatctcactatccatacgatggggacaatgacagtgccagcctcccagagctgcgtaacatccatgtacagaagcctggcacacagtaggtggtggataaatggtatcttttattgtcattcccatttgacaggtgacagtacaggctctgaaaagtagaaagtgttgctggatgtcaccagctggattgcagtggggttagaacccacatctccctgcctcctggtcttgcgggaccaacactctccacactcctcaccctggagcaggtgcccaggtggtaccagccatgctgcaggctgccccatagggcagtccaagctgtcttggcagaggtggcaggtgaagactaaccaccccactctacccagctctactcactcatcatctttgctcacccaggagacccattgctgtccaacaccttcactgagaccaacaaccactggccccagggacccactgggcctccaggccctccagggcccatgggtaagttgagtccaggccaggggtaaagggtgaagttggtagatggcagagggaatagggtttgtggctatcaggagggagctgatggggcacttcctgagattgtactttgttccggcccttaggacatcctgtctttttccaggtccccctgggcctcctggccccacaggtgtccctgggagtcctggtcacatagtgagtagttctccttgtactctcacccatgtgtctgtccatctttccatctatgcatacatccatacatctgtccatcatccacccttgtatccatctatccatccatccattcatccttccattcattcattcaacaagtatttattgagcacttaatatgcaaactaccttccataaatcttattcaatccaagtaatgagaaccatgtgtggttatcacctaagaccaagaaaagtagagattcttgtgccagcacatggcaatgagctgtggtgggactgtctgactccaggatcagatcttttaacactgagctgtatgaactgactgcggtgtgctgggtgtatggtgaagaacccagaggcccagaccaagcttgagcgccctccccaacacctctgttcccaagcccctgcccactccatcctgccccaacacaaggctgaggccctgtcttgttgctcagggacccccaggccccactggacccaaaggaatctctggccacccaggagagaagggcgagagagtgagtacccaggtggccccaggtgggggaattctggggagtcctgagggccccaggtcagagtcctcaacagctgacgccattcgtctcctccctcttacacagggactgcgtggggagcctggcccccaaggctctgctgggcagcgggtaagtgttgctgtctgtcccgcattcatccctgcaggatcccttagtcccagattcctcctgtgactccatcccctgcaaccagagcttctaaccctccctgtcttgtcatttattttcagatgctccctgtctctgagactcattgtcctctttggattaggctgcctctgtctctctcactctggctctctgtttctctgtatctctctctttccctctgtacgtctgtctctttgactctgtatttcatttacactctatctctccaattctgattgtagatctgttcatttctctctttaatttggtgaattttgctttacgtattttgagtctttgttattaggtgcattcacatttagtattttaatgtctccttggtcattttatctttatgaaattaatatctttatctctgataatacttgccttgaatcgactttgtgtgcttttaatagcacaccagctttcttatgcttgctatttgcatgttatatctttttttatccttttttttttcaacctgtaactttatatttaaagtgcatcatggctgggtgtggtggctcacacctgtaatcccagcactgtgggaggccgaggaaggtggatcgtttgagctcaggagttcaagaccagcttgggcaacatgacaaaactctgtctttatataaaaatatgtatataaattttattaaatgtaagaaagtgtggaccgggcacggtggcttacgcctgtaatcctagcactttggggggctgagacgggtggatcacctgaggtcagaagttcaagaccagcctggtcaacatggtgaaaccccgtctctactaaatatacaaaaattagccaggcatggtggtaggcacctgtaatcccagctactcgggaggctgaggcagaagaattgcttgaacccaggaggcagaggttgcagtgagctgagatcacaccattgtgctccagcctgggcaataagagtgagacttcatctcaaaaaaaaaaaaaaaaaaaagtgcatcatatgacttgggtcttgctgtttaaaaacagtttgactgtttagttaatttatatttaatgatatgtataattgattaatatggttctgtttagccatcttgctgtttatgttctatttattccttctgttttgtgtttcttttttcccttttcttttcttgtcttcttttggattgagtactttttatgatttcttttttcttttttagagacagggtttccctatgtgcctaggctgaactcaaactcctgggcacatagtgaatgaagtgtcttaagtgatcttcttgcctcagcctcccaagtatctgggactacaggtgtgcaccattgtgcctgacttaaaatcttctctttctaaaattaattttctttctagaattaaagctttctagaatttaagctttttttttttttttttttttttttttgatacagggtctttctctgtcacccaggttggagtgcagtggtgcaatcatagctcactgtagccccaacctccctggctcaggcaatcctcacacctcagcctcctgagtagctgggaccacaggcatgtaccaccatgcccagttaacttctattcctttacatttaatctgttttgtggttatatttaaagtcagtttcttatagaaaacctacggttaggtcttattttttggtccattctaacaatcctcatcttttatttgctgcatttaggccattgacatttaaagtgattattgaggcccagcatagtggcccacacctgtaattccagcacttcaggaggccaaggcaggaggatcacttgaaatcaggagtttgagactagagtgggcaacaaaatgagaccctttttctataaaacaaatttaaaaattggctggacgtggtagtgtgcacctgtagattcagctacctgagaggctgagctgggaggattgcttgagcccaggagtttaaggtgacagttataattgctttactgcattccagcctgagtgacagaaccagaccttgcctctaaaacataactaaatagtctgtgcacggtggctcacacctgtaatcctggcactttgggaggtggaggcagggggatcacctgaggtcaggagtttgagaccagcctggccaacatggtgaaaccccgtctctactaaaaacacaaaaattagccaggtatggtggcgcactcctgtaatcccagctactcaggaggctgaggcaggagaattgcttgaacctgggaggcggaggttgcagtgggccaagattgtgccactgcactccagcctgggcgacagagtgagactccatctcaaaaaaataagtcaatcagtaaaataaaaaataactaaataaatgaagtgttatttatatagttgggttaacagctaccatattactattttctttcttttttttctttttttttttattttttgaggcagagtcttgctctgtcgcccaggctggagtctagtggctggatctcggctcactacaagctccgcctcccgggatcaagcaattctcctgcctcagcctcccaagtagctgggactacaggcgcccaccaccatacctggctaatttttgtatttttagtagagatggggtttcaccatcttggccagactggtcttgaacttctaactttgtgatctaccggccttggcctcccaaagtgctggaattacgggtgtgagccacctcgcccagctactattttctatttgttttccttgttctttgttcctatttttgtctgccagactttttctgcctttttttggctttatttatttatttacttacttattttcttttgagagagagtcttgctctgtcacccaggctgtagtgcagtggtgtgatctctgctactgcaacctctgcctcttgggttcaagcaattctctgcctcagcctcctgaatagctgggactacaggcacctgccaccctgcctggctaatttttatatttttagtagagacagggtttcaccatgttggccagactggtctcaaactcctgacctcaggtgatccacccacctcagcctcccagagtgctggggttacaggtgtgagccaccatgcccggccatgctcctcctttctttatgtaaaatctgagtttctggccaggcacggtggctcacgcctataatcccagcactttgggaggccgaggtgggcagatcatgaggtcaggagatggagaccatcctggtgaacacggtgaaaccccgtctctactaaaaatacaaaaaaaatgtagctgggcgtgctggcaggtgcctgtagtcccagctacttgggaggctgaggcaggagaatggcatgaacctgggggatggagcttgcagtgagtggagatcgcgccactgcactgcagcctgggcaacagagcgagactccgtttcaaaaaaaacaaacaaaaaaaatctgagtttctgacacataatttttgtcctctctgaagaactacctttattttttcccagttggctttatttgtgattctagaatcgggcaacacttcattccataaaataaaataagtgctccgctgaagaacttcttttaatgtttcctacaaggcagatctactgacaaaaattccctcactgtttgtttgtctgaaagtcttcatttccctttcatgcatgaaggataatttttcagggtaaagaattctaggttgatgtgtttttttcctctcaatacttggtatattactctccactctcttgcttgcatggtttctgcagagttggttgtaattattattgttgctcctctgcaggaaagatattttttccctctgttttcttttcagtatttttttatctttgattctctgaagtttttctaaaaattattattattattattattattattattattattattattattattagagataaggtcatactctgtcacctcagaagccttgaggcttctgggctcaagggatcctcccgcctccacctctcgagtagctgggactactgtcatgtgccacacctggctaatttttttttctgttttgagatgaaatctcactcttgtccccaaggctggagtgcaatggtgtgatcttggctcactgcaacctccgcttcctgggttcaagcgattctcctgcctcagcctcccaaatagctgggattacaggcacctgccatcacgcccggctaattttttgtatttttagtagagacagggtttcaccatgttggccaggctggtctcaaacttctgacctcaggtgatccgcccgcctcggcctcccaaagtggtgggattacaggcgtgagccaccgtgcccggccattttttttttttttttttttaattttagaagcaagatctcactatgttgcccaggctggtctttctgacctctagtgatcctcttgccttggcctcccaaagtgctgggattacaggtgtgagccactgcacccagcctgattttctgaaatttggatatgatatgcctacttgtcatttcttggcatttatcctatatggtattcccttatcttcctagatctgtggtttggtgtctgacatttttggggggaaaattctgtcattattacttcaaatattgcttgtgtttctttctcttttttccttctggtattctattatgcatatttacatcttttgtaattgtcccacaattcttggatattctgttctattctttcagccttttttctctttgcatttcagttttgaaagtttccattgtcatatcatcaggcttagagattctttcctcagccatgtccagtccacgaataagcccatcaatggcattctttatttctgttacagtgctttttatatctaccacttatttttaattatttcttagaatatcttttttttcttttaaaaaaaatttttttttaatgtagaggcagggttttaccatgttacccaggctggtctcaaactcctgagtttaagcagtctacccacctcagcctcccaaagtgttgggattacaggcatgagccaccacgcccaggcctttcttagaatttccatctctctgcttataatccatctcttcttgcatgttgtctactttttccattaattcccttagcatgttaattgtagatttttaaaattcctggcctgataatctgaacatttctgccataactgatgcaggttctgatgtttgttgaatctcttcaaactgtgtttttgccttttagtatgccttgtaatttttcactggaaggtagacataatgtactgtgcaaaagaactgcagtagataggcctttagtaatgtagtgagaaggtattggggaagggaagtgttctggagtcctatgattagatctcagtcttttttttttttttgagacagagtctcactctgtctcccaggcactggagtgcagtggctcgatcttggctcactgcaacctccacctcctgtgttcaagtgattctcgtgcatcaacctcccaagcagctgggactacaggcgcctgccaccacacccagctaatcaacctcccaagcagctgggactacaggcgcccgccaccacacccagctaatttttttgtattttagtagagatgagctttcaccgtgttggccaggctggtcttgaactcctgagctcaggcagtccacccatcttggcctcccaaagtgctaggattgtaggtgtgagccactgcacctggcctaggtctcagtctttagatgagcttgtgcccttggactgtgaacttcaccagtgtgtctcagttgttgttttgttttgtttttgtttgggggttgttttgccccttaggtgggacaggttatctagagggagttagagttggatatttcccttctttcatgtggaaactagagggagctggaagtgggtatttcgcttcctccaggttgcttagtgttgggagaaaagctgagtgttgggagggaagctgaggcagggcttgcacgtctgacataatgtaaaagagtcttggaacatgtctggggtccagggtcaagaacccctcgtggcctttggaacaccaaactctgtgctaaagggtggaaggctaccctgccacaccgtaatctaagcccagggcataaaacccctcgtgacttggatggaatccagggctcagggcataaaacccctcgtggcctctggaatgtgtctagacttgctggctccttgcttctagcactcccattacctcaagtagcagaacatgttccatatgcttcaaagaaaatgctaaactgtcacagctgtaaatcatgcgcttgacgcatcgcattctctcaacccccacatccttgccacctgtttctttgtttgatcaccagtaaatagtgtgggctcccagaactcggggccttcacagcctccatacttgtgttggccccctggacgcactttctctctcaaactgtcttttctcattcctttgactctgtcagactttgtcgcccccatgacctggtgttgggtccgatcactccaacaggttaggctctggtaaagtagtttctcctgagtcaggctttgttcagaacagaatgcttggtctatttcaaaatgatgccttctctcctctccttgctggaaggacaagggcatttttctctgatattcactgtgagggccttgtagagctccttgaggtaaaactcatgaaaggagggatgtgggtctgactgggtccccctggagtttttaaccctaagactggtctacactgagcctccagaagttcatcaattacagtttaggttttcctaccctggccctggttcctctggaggcttgtgcttgtgggtttctgctttagtaagttgtgatagtctggatttgcctctccagctttgggggcaatcgtttgcctatggtctcacttctccaacagatctaagaagagttgttgatttttcagtttttttcaactttccacttgttgttaagatggaatgataacttctaaggtctttttattttcgagatgactctcgcccttgtcccctaggctggagtgcaatggtgtgatctcggctcactgcaacctctacctcccgggttcaagcgattctcctgcctcagcctccagagtagctgggattacaggcacctgccaccacgcccagctaatttttgtatttttagtagagacggggtttcaccatgttggttaggctggtcttgaacttgtgacctcagatgatccgcccgcctcagcctcccaaagcactgggattacaggcgtgagctaccgcacccagccaacaacttctaacctctttacatgccaggttggaacccagaagtctgttttgttttgtttttaaatcaaatttgaaaaaaaaaaaggtcaacatttccccaaacatttttttctgtttctgctctccagtatgtccttctggaactccattgattttctcccatgagtcactgaagttctgttagttttttaaacaatctttgtctctctgtgctttatatttctttattttacttttttgagatagggtcttgctctgtcacccaggctggagtgcaatggtgtgatcacagctcactgcagtcttgagctcctaggctcaagcaatcctcccacctcagcctcctgagtagctgggactacaggtgcacaccaccatatctggcttgtttttttgtttggtttttgttttttcatttttagtagaaatggggttgctcaggttggccccaaactcctggcctcaagctatcctcccaccttggctagggagctatcctcccaccttggcctcccaaagtgctaggattacaggctctgtctgtactttaaattattccattgatctatgttcaagttgattgattacttcttctgttgtgtccaatcttatgttaatttcatctgataattttctatttctggtattatcgttttcacttccaggatttccatttgattcttttttataatttatatatctctcctaaaattctccatcttatcacccatgatatcaatttcagtagattctttaacatattaatcatagatattttaaactcctttgctgattctaacatataggtcggctgtggatctatttctattgacagatttttctcttgaatataggtcacattttcctgtgtcttcacatctagtaattttttgttgcacactggacaaagtagataatatgttgaaaagactctaaattctgttatctcctgaagagtattgagttttattctagaacagttaaattattgatgggtcatcttgctcttttagagacttagttgtaggttttatcagagagaatctctggttttgctcttagtcctaggaaaaatcccttaatcctgagatagggtctttcttcctaagtcatggctgttctagagtttcattagaaagctttaggtgttcacaagcacctctaacttggttggactggaactctaaactctgtctcctatatggtgggcaatttttgacatctttagtcagttctaccaatctgttggttctccccctctgggctccttggagtattgccctgtgattggtcaatccagggaccatccaagcgtcagaaaggaacatttatgcagatttagttcccccacttgtagctccctgcttcccagtatttctcatcaatttcttgcttctctggcaacctcaacctctgattcctgaggccaataaaactgaaactttctgcttgagctcttgttttgccaggctgatggggctgaggtgcaccctctgaggaaaagctgtaaatacatggattttacccaatgccattcccttcttttaagggttgaatattctccagtgtctgtctgctttttattactttccgttgccttcaatcagttggtttttgctttgtatccaatacaagctactttctgtttctctaagtttctctccctttccccgctctttttcctccctctttttttcccgtccctttctgtctccttgccttcctcactgctgctatctctgtctctccttgcagggggaacctggccctaagggagaccctggtgagaagagccactgggtaagctctggcctggcactggcctctccctgccttctcagccctacatgctcaagagagtattccctccccaggaggccctgggagtgggagcatcccatccacatccccactacagcctggtctcccaggcaggagccttggcaattatcagccccaactccttcccccatcttgttgctcccaaccgggcagggccagccctatcagcagaccccatgccttctgtctcagtctctgtccctgtctccaccttccctctgtggcctttccaggccagggtggctctgccttttcctcctgggtggtttgggctgacccaggccagactgcatcccctgcctccatagccccctcccagccaaggcttagcttgctcccttgtctgcagaacaaagggaagaatgaagacaatatctacacaggagaatgggatagaggacctaggaaaggggcctagaaatgatgaggtacataggagccacgtggtaaaaaggacagggaactagataccaccatacacatcggaaattcatgaagcctgtgaagagacgcctcgaaactgctatgtacacgtttgatgtggttaatgaggccaggtgacctagactcctctatacttaaaggacctatagtttacacaaggtcctagacaccatcacatacataggagacccatgatggatgagaagggaagcctagaaactctcacatatacaggagacagagtaaatgagaaggggacaagaagggggaactagaaaccacacaccgcaaaatctcatgattaatgtggggtcctagaaaccttcacaatcgtccgggatgccgtggctcctacctgtaatcccagcactcttggaggccgaggcgggtagataacttgaggtcaggagtttgagaccagcctggccaacatggcaaaacccccatctctaaaatacaaaaaaatacaaaaatacaaaattagccttaaaggtttgggctaaaaatacaaaaattagctggacatggtggtacgcacctgtagtcctagctattcaggaggctgaggcaggggaatcgcttgaacccaggaggcagaggttgcagtgagcagagatcgcgccactgcactccagcctgggcgacggaacgagactctgtctcaaaaaaaaaaaaagaaaagaaaagaaaatagaaaccttcacaatcattgaaaatcattgcaggggagggattttcgggttaggacctagaaatctactcacccaagagacgtgggggaaagacgaggaccctaaaacataccatacccaaaagccccacgacacagggatctggaaaccatcactgacaggggagacatctggaaaatggacagagtggaggcagacactccttcaggagagagagacaactaggaagctctttttggcggtgggggggattgtgactccccctccacatgcagtctggctgggacaccctacttcctggcagtcacaagttagtgaggatgtgggtggcacccagtgcctgccttgccctcttagttcttgattgtggggtcagtgatggatacagccgtgggagccccctaccctgcacgagtcttcccctgtgtctgcccatgacttctggtgccctgctacctctccagttagcctctcctggcccctgctgtcctgaatctcctcctaccccatacccatcctccgtagctccagagtctcttaatactgccagtatggacatgagctgagctgggatcagatagacccatgcaagcctggctctctgcctcccctaggctaattactggcctctcccagaggcccttggtctgggaacacatttaccacccagtccaggaggggtgggagagattgggcagtcctgtcccttcatgagaatccccggcaggatgccctggccaccctagaccagtccttgaacccagaaccacctgtgggctccccgcaagaggtagcagggcccctgcccacccaccttcctgcccctcttctacctgcacttctgcccctgcttgctgcttgcctgggaggggacccactgggctgggggctgcatgaagctttgggggctgggggaacagctctgttggggacaggtgggaatgaggttcagtgctggcaaggtccccgagggctcctatgtacacttcaccaaccaactcccttagtgcagcttgcagatgcgttctggctgtggcccagcagtgacacctggtggtcatgatagtgcactgcaggaactggagtgactgtgctgggcctgcccacctggatcaaagctctcaccccttattcagacagggaaactgaggcccgactcggcagagagaatccttggcagagcgggaactggagccctgacttttaagttcctagggccagagaaccagctaccattccccaagcatctcctccataggcaccagacctggagctgggcactgtttacacagatgcaattcagacacagtccccaccctcagggtggtcacagtgaggtgagggaaaaaagacctataatcagcagctacaggactgtcaactttataaacactttacactttagcatcctcccggaggagccaggtgaagcctgaaaggtgcattaaccaggcacggagtgtccaggcagaggcgagggtacaacaggtgcaaaggccctgtggcaagagggagcctcggatatttgaggagctgcaaatacttggagtggcactgtgacaggtagagagtggaacagaggccaaagaggccttcagggtgtaggaggccacgttcaggaatttggactttgttctagggcagtggggaggcattgaaggctctagaagcagcagagtgatgcggtcaggttttttttatttgcaaagaatccctctgattgccatggcgaatggatgggagaagcagaaagacagtaggtcgggggctgtcgtggtcatcctggtgagagactgagccgggcagtgggtgggagccagtgaggacagacagccgtcgatggagcaaaaagacacttgtgtgctggtctggctgcaaaagggagtgaggagtcaagggagacttaaaatagcaaaagagaaccaggagaagcaagcaggctgagttttgtctgtggaccaacgggaggagtctgtgttacagccaagtagggttgtccagcaggcccagacacttagatccggagtgcagagggcaggccaggctgaaggagactgggttgtcatcagtgcaaacatcaggccacctggtctgagggagttccaaacagtggattttaaaaacacttttccccatatttttctttttaattttatgttttaaaaaatacagacaagaactcacaatgtgtcccaggctggtctcaaattcctggcctcaagtgatcctcctacctcagcctcccaaggtgttgggattacaagtgtgagccactgcacctggcctccccaatatttttgtttatttttattttgtttttttccttttttattgagacagagtctctatcgcccaggctggagtgcaacagctcaatcacagctcactgcaacctctgcctcctgggttcaagcaattctcgtgcctcagccacctaagtagctgggactctgtagccatgcctggctaatttttgtatttttagtagagatgggtttgcgccatgttggccaggctggtcttgaactccaggcctcacgtgatccacccgcctcagcctcccaaagtgctaggattacaggtgtgaaccactgcacccagctattttgcattttgatatacagaaaagttggtacaatgaatgtcattctgcccttcctgtagatggaccaattattggtacagccatgtgtcacttaatgatggggatatgtcctggaaaatatgccattaggtgattttgttgtggcatgagcatcatacagtgtacatacacaaacctagatgggatagcctacaacacacctcagctgtatggtgtagccaattgctcccaggctacaaacctaaacagcacgttactacgctaaatattgcaggcaactgcaacacagtcgtaagtatttgtgtatctaaacatagaaaaggtacagcaaaaatacaccataaaagatttttggagcttttttgtttgtttgtttaggacaaaatcttgctctgtcgcccagggtggagtgcagtggtgtgatttcggctcactgcaacctccatctccaggttcaagcgattctcttgcctcagcctcctgggtagctgggattacaagcatgagccaccacgcccagctaattttttgtatttttagtagagacggggtttcaccatgttggccaggctggtctcaaactcctgacctcaagtgatccgcccacctcagcctcccaaagtgctggaattacaggcgtgagccaccgcgctggtgaaattaattttttttttacttttttttttttttgagacagagtcttgctatgtctcaagaaaagtacagtggagtacagtggcttgatctcggctcactgcaacctccgcctcctgggttcaagcgattctcattgcctcagcctcccaagtagctgggactacaggtgaacgccacgatgcccagctaatttttttgtatttttagtagagatggggtttcaccatgttggctggccaggctggtctcaaactcctgacttcaagtgatccgcctgcttcggtctcccaaagtgctaggattccaggtgtgagacactgtgcctggccctttttttttttttttttttttcactttttaaatgtttttgctaaaaactaagacacaaacacatacattagcctaggcctacacagggtcaggatcatcagtatcactgtctccatgtccacctcttgtcccactggaagttctgggcagtaacatgcatagagctgtcatctcctatgataacaatgccttcttctggaatacctcctgaagaacctgcctgaggctgttttacagcttaactgttttttaaataagtagaaggagtacactctaaaataacaatttaaagtatagtatatgaccaggtgcagtggctcacatctataatcccagcactttgggagtccaaggcaggaggatcacttgagcccaggagttccagactaacctaggcagcatagcgagaccttgtctgtacaaataaaaaaattagctgggtatgatggcatgtgcctgtggtcccaggtacttgggaggctaaggtgggaggatcgcttgagccggggaagtcgaggctgcagtaatacgagatcacgccactgcactccaacctgggcgacagagcaagactctgtctcaaaaataaataagtaagtaaaatatagtaaatactaggcaatgggaattttttggctccattataatcttatgagaccactgtggagatatgcaatccatcgtagactgaaacatcattatgtgatgtatgactgtattgagccacaattgttctgtcattctctcttacatatttatagatctttttttcaaattcatttaaaagtaagctgcaaaacccagccacgtttcccctaacattgcagtgtgcaccgtgaatgaatatggacattctcccacattaccacaataccgtcgtcatacttaagaaagctaacatttatttagcaaaatgatgccattaaatatgtgacttacctgtaaatgttaccagttgtccccagatggcttttcttttttttttccttttttttgagatggagtctctgtcaccgaggctggagcaccaggacggagtctctgtcacccaggctggagtgcagtggcgtgatctcagctcactacaacctccgccttccaggttcaagccattctcctgcctccagttcttgagtagttgggattacaggcgtgcacgcacaccaccatgcctggctaatttttgtacttttagtaaagacagggtttcaccatgttggccaggctgatctcaaactcctgacctcaggtgatccggccatctcagcctcccaaagtgctgggattacaggcgtgagccactgcgcctgacccccaaaatacctttattatttatttatttatttatttatttatttatttatttatttttgagatggagtttcactcttgttgcccaggctggagggcaatggtgcaatctctgctcactgcaacctctgcctcctgggtttaagcgattcttctgtctcagcctcccatgtagctgggattgcaggtgcctgccaccacgcctggctaatttttgtattttgagtagagacgatgtttcaccatgttggccaggctgatctcaaactcctgatctcagttgatctgcccgcctcagcctcccaaagtgctgggactacaggtgtgagccaccacgcctggcccccaaaatgccttttaaagctctttttttccaaagtccaagatctggctgggcaaggtggctcatgcctgtaatcccagcactttgggaagccaaggtgggaggctcttttgagcccaagagtttgagaccagcttgggcaacatagggagacacctgtctctacaaaaaaaataaaaaaatttgttttcaattagctgggtgtggtggtgcacacctgtagtcccagctacttgagaggctgagacgggaggatcatttgagtcctgaaagtcaaggctacagtgagccatgatcataccactgcattccagcctgggcaacagagcaagaccttgtctcaatcaatcaatcaataaagtccaaaatataatcaaggttctcacacactgcgtttggttgtcacatttcttgtctcttttaacttagaacaggcctcctgcctttttcttcttctcttgactttgtctttgtgtgaatgtcccacaatttaaatttgtctgattgtttcttcatgatgagatgcaggctaaataatcttggcaggggcacctgtggtgccttttattgtacctcgttaggaagctcatgatgtcagcttgtcccattgtccatgccaggaatggcttcatggaattttattttatcttttttttttctttttttaatttgagacagagtcttgctctgttgcccaggctggagtgcaatggcatgaactcggctcactgcaacctctgcctcccaggttcaaacgattctcccacctcagcctccagagtggctgggattacaggcatgcaccaccacacccggctaatttttttttttttttttttttttttttttttttttagtagtagtagagacagggtttttccatgttggccaggctggtctcaaactcctgacctcaggtgatccatccgcttaggcctcccaaagtgctgggattacaggtgtgagccactgtgctcagcctggaattttttaagatcatctttttttattttttattttttgagatagggtcttgctgtgttgcccaggctggagtgctatggcatgatcatgactcactgcagcctcgacctcaggggcccaagccaccctcccacctcagcctcccaaagtactggaattacaggtacacaccaccacgcctggctaattttttaattttttctttttttgagacagggtctctgtcgccctggctggagtgcagtggtacgatctcagcccagtgcagcctcagcctcctgggcatcaatcctcccacctcagcctcccaagtagccaggactacaggcgcacaccaccatgcctggctaatttttgtatttttagtagagatggggtttcgtcatgtgggctaggctggtctggaactcctgagctcaagcagtccacccacctcagcctcccagggtgctgggattacagacgtgagccactgcatctggccattttttttttttttttagagatggggtctcactatgttgccctggctaggctcaagtgatcctcccaccttggccacttaaagtgctgggattacaggtgtgagccaccatgccagcccccccggcgttttttgagacatggtcttgctctgtcacccatcgtggagtgcagtggcacaatcatagctcactgtagcctcaaactcttgtgctcaagtgaacctcccacctcagcctccacagtagccagaactacaggtgtgtgccaccacacccaaataatttttttttcttttttttgagatggagtctccctccgtcacccaggctggagtacagtggtgtgatctcagctcactgcaacctctgcctcctgggttcaagtgattatcctgcctcagcctcccaagtaactaggactataggtgcacaccaccaagcttggctaatttttgtatttttagtggagatggggtttcaccatgttggccaggctgcttttgcactcctgacctcaagtgatctgcccaccttggcctcccaaagtgtcattaggtgctgggattacaggacagctaccgtgcccactctaatttttaaattttttgtagatatggggtcttgctatgttgcccaggctggtctcaaactcctagcctcaggtgatgctcccactttggcctcccaaagcactgagattagaggtgtaagtcactgtgcctagcgaaggtcattcatttttagatcctgcccctgtaatactcgaaaggggattactttggcatgcagctcgtggtgaccctgggacccccaggctgaaatggccattcagcggcctgagggtcacccgatccatgtgatgtggacaggacagctggatcacaagggtcagccccagcgagcaggctcactcatgatggacatattgagagacctcttagttgtttagatggttttgtgggaagcagcaaccttaaagggttggcttgtaattatacaattatgcatattgtctatcccttcacttatctgtactgagtaaagggcaccaagagagatttccagatgttgtcagagctgggatagttctatttgtcatcctggtgcactgttggaattgagagatctacattctggaaatagctttggtctggactaggaaagaggaaggagtgagggagtgtggagcgttgtcaagactatggaccatatgctggggaaggaaaggatgcagatggggagaaagagatgaggtctctggcatgagccctgggtagcagctggtaccacttggggagtggggagccccagagctggtggccttggaggaggggctttgtgagcccagtgccacatccctggggtctgggagccagagacagggagaagcagacccgtactgctaagaggagagggctgggctgagggtgacgcatcaggatgtgccagattgtggacctggcatagtctaagccctgggagaggtgagcactgttttccaggcagggagcccaaagcgtgaagacctggggaagggacagagtgctgagcctcaggtttctcagaattttaagcgcaagttctccaaaagcaatgtaactcaaaccttgtctaattttattgacatactgatggtccccagcttacgatggttcaaattacaatttttcaactttacaattgtgcgaaagcaatataggctttcagtacattcctcaacttacttccaaataaacccatcgtaagttgaaaatattgtatgtcaaaaatgcacttttttggccagggatggtggctcacgcctgtaatcccaacactttggaaggctgagacaggaggatcacttgaggccaggagatcgaggccagcctgggcaacatagcaagacccttgtctcttaaaaaaaagaaatgtgtttggctgggcgcggtggcttacgcctgtaatcccagccctttgggagaccgaggcgggcagatcacctgaggtcaggagttccagaccagcctgaccaacatggagaaaccctgtctctactaaaaatacaaagttagctgggtgtggtggtgcatgcctgtaatcccagctacttgggaggctgaggcaggagaatcgcttgaacctgggaggtggaggttgcggtgagctgagatcgcgccattgcactccaacctgggcaacaagagcaaaacttcgtctcaaaaaaaaatgtacttttgacttgtgatattttcaacttacactgggtttatctggatgaaatcccattgaaagtcaaggaacatctatatattcatttgggcataagtggaaatactggtaagtagcctgaactcactgatcggagtaattagggtgaggctaatgtggtgatttaaagcaaaaagaatgtgaagtaaataagcatataggtggccaagagatatagtcatgcaggtgttgggagagcaactggtgctgggcgacagacattagaggacaggagggctcccagcagcttctgggactgccgttctgcccctgaagattggctccccctgccttcagcgcagcaggatttgcggccttgtcagagagcagccagctgggatccaacgggaccttctgggaggtcctgcaggggttgcttccttccgtctgccttgttgtccccctcctgtcctcacctggtcttgttctggctgtccatggaccctgggctgtggcaggtagtgtggggctgcaggtgcatgtcccgggtggggcatgggccaccgacgggctttgcagggtcccctcccctgcccccttcacggctgcatctgtctctttcctccacagggggaggggttgcaccagctacgcgaggctttgaagattttagctgagagggttttaatcttggaaacaatgattgggctctatggtgagtagagacagacagacggacagacggcccagcccctgcctgccagccttccccaagccctcctggggtggaactggcctgagcccagtcatgaggctggagaaggtgcctgccccaggcaagcatggacctgagaggccacaaccacccttccctcaatgactggttccctcctccacgggtgcaggggtgccctagaaacccgggccctgctgctgtggtcagacctgggcctctaagcattatgggtagtgtggtttctaggcctgcagggaaccagagatgaaagattttaagtttggaagaaattatgggcaatggaaccaaactccactccagcagtgggattgtgggtaacagagccagactcctggagtgcaaggaaccatggggaatccaatcacagctcaggacaacaggaggattataggtaatggatccagactctagtcagccttcagctctagagaaatcatgggtaacagagtcaggcccgcaggacaataggtcatggagcaagactccagaagggcaggggactgtgggtgacagagctaggctcaggccccaggggactctgggtaatacaccacctactagttctgactttcctctcccataagcccccagaggctctcacaaggcagatcctcctggtcccaggtgtcccctttgcagttttccctttggtcctcctaacctgttctgttggtccctttaggggactaagagagccaggccctcactcaccccaggcattcattcacccagaaactctccacccatgtggttatttgaggagccaggccagccctgtccccaccataggaggggaaactgaggtctcagtactgagactcactcccaggctcctgccctgacgccagctggcagtgccctcccaccctccccgcttggctccccagcccagccctcggaggccagactcgcaccgtctgctcttctccatctcccatcaggctcctagcttacagagcttcctgcagcagcaggctcagctggagctcctggccagacgggtcaccctcctggaagccatcatctggccaggtaatggcagggcgggcaggcaggggcagcctcttccaggaagggcctggaaaaggcctgggcatgcagaaggcgccttccgatgcttggcccaggccagcggacactcattcttcatccagccagccagccagcaaatggtgcctggcagagagaaggctctggtcacttgagtgaatgcgcacctgctctgtgccaggcaccttgctgggacaggctccacaagataagacagacacagtcctgcccttgaggagtgtagggtgctggggggctcaggagaaccctgacactggtagagaaacccaggtgagctacactgcaggaaagggagtacaggcagccatggaaatacagaagtgcctctggcctggcccagaggaggttggaggggggtcagggaggtcttcctggaggaggtgatatctaagtgaagacttgaagggcaaggatctggggagagtgaacaggcagagaaacagcataagcgaaggccaagagaccagaaggagcctagaagcaacagaatctggcagggcctagattgagaaggtcctagaaggcaggttggggtagtacaggaggtggttagacaccagtgggtggtacccctccttgcgtctggctcctgggagtgaggctgagaaaatctctccccatgaaactggagcctgtggctggccctgaagaaaggaagggattggccacccgaggggctgagctctattcctcacctgcccagccgccctatctcgcagcccagtgagcacatcagtgcacagaggcctccatatcatgtccaacctcgcatctattttaaagactgagaggccggtcatgttagctcacacctgtaatcctagcactttgggaggccgaggcgtatggatcacctgaggtcaagagttcaagaccagcctgggcaacatggcgaaaccccgtctctactaaaaattagttgggtgtggtggcgggcacccgtaatcccagctactcgggaggctgaggcggagaatcacttgaacccaagaggcagaggttgcagtgagccgagaccgcaccactgtactccagcctgggtgacagagcgagactccatctcaaaaaaaaaaaaaaaaaaaagactgagaaacttagatcccaagcaggaagaagggttaaggttagagcccagcctccttcatccagcaaaactgtagggagcactcattgaaagccagacctgttgggcactggtgctctggagtacagataggtgctggccttggggagctggccatgagtggcagggaatcgtatctacggagatatggggtaggggagcatggaaggatatggatgaggaagagtcacttgtccctaggggttggagaaggcttcttggaagaggggactctgcgttgcgtcctggaagatcccaatgagtgtgccaggtggggaagtgggtcgggcagccttgagagagtcctgcctgtgcagaggcccagagcctgggaagggtgtggggtctgcttccaaagctcctcccacagtgccacatgcttctctaacttctagaaacttcagtgcctagctcccagacctcctcccctcttacagagaggggccaaggaccaaatctcaggctctcagaacctttttaggtgtctccacctcctctctgaggattggagcaggagctagaagggacacatttgagccaccatgtccctggatctgtccctgccttcagccagctctgtctctgacagcccagggagaaaagtgccagacacctcagaagtcccacacccactgccagtggcccctcaagccagcttgggtcggggcttggagggacaggtcgggggactgggaaatgggacagggaaggaggtgggaccctccccattggcgcaacatacacatcaggtgctactgaagacccagatggggttcatgtttaggttataatcaataattatgataatagtatcagctgccacgtgtctggcccacctgggctggattgatcatctccaatctcttagaggagtaaacttgctaggtgagcgatgccgtggccattttacaggtgaagaaacagaagctcagaggctcctgtgactgcttcagagtcacaggaatgggaatggtcaggctaggggtccacctcaggtctcccctctaaagtcctggccctttggactgcatcagcaaaggtttgctgactctgccactcatccagggccccaaatttgattgtgacaaactcacaggggccagacctgcaggagacctgggtggaagcgacaccaacctagtaaccataataatccagcatttcccgtgaaaaccactttccagtcctggtcacggtaaacacatgtatcacaagggtgtgaaaatgggactattatgcccacgttccagatgacgctcagaggttctatgacttgcccaaggccacataactggcagagtgggaccaagccatgatcccagctggcattggggccagtgctctgtgccactcccctcccacgctccctaaggcatggaatgtccctttcagtgaccacacatgcctgtctgctccgggagccctcaactcagcccagaggtgcagggcaggctgggccacacagggtcggggcactggcagtcatgattacgacggacagcccactccatggcagtgccctcagtgggaacctggtgtttaccagaacccaagtatctgtcctatggaggcttagccaagtcctccaccgtggccctctcctccctgagtgtccatctccccctagaaaaacagcctattcttctgacctgcctggcctgctcattttactttgggaagggctgagatgataggcacagaaggcttcctggaggaaatggctcctacccttggttttgaaggatgagtagttttctggttccatccggaactgtccctgtttcagagatgagatgactgaggccctgacagaggtccagcttgcccaagactgcacagtaggtcagtggcagagcctggcctcctaagctctttcccccaactggtggcctagcccatgtctgttccctggcctcagtttacccagctaccaaatggggatgactcagggcacacctccaccccaaaatgaatagaaaaagaagcagcctttctatgaagcattcactgcatctaaacacttcctaaaggaggtgggtgtggttatccccacctgacaaagcaggaagcagaggccctgagtgctctccttgggctggggggctggtaagtcctggcgtgaggcaccaaccaatctgcagaccccctttcccacagctctgcagccagataccagggtggattatacctggcagagcgtgcccggttctgccaccccctagagggccaaggggaggtgggcacctcacatgaacccctctaatgtggcctctctccttcttccctccggcagaaccagagctggggtctggggcgggccctgccggcacaggcacccccagcctccttcggggcaagaggggcggacatgcaaccaactaccggatcgtggcccccaggagccgggacgagagaggctgagggtggtggcggcccctgaggcagaccaggccaggcttcccctcctacctggactcggccagctgcctccagggaccgcccgtccatatttattaatgtcctcagggtcccttctgccatctaggccttaggggtaagcaggtctcagtcctggcaccatgcacatgtctgaggctgagcaagggctgagaggagaggcttgggcctcagtttccctctgtgaagtggggggaggcaggccttcaaggagggatagaggtacaaggcttcgtctcatctgctgtctgagcatccaggcccaaaggcactgagggagtcaggagctggggctcggcacatgcagagatgacagggcagggggcagtcttcctccccctccccgaccaaacctcggggagccctcctgtgcccctccctccttgttgtccagtgctgggctccccaccccgaggtcaggctgcccaatcctctgactggatcaccgggggcttcttgcctcagttcttccctctgagcccccaggccctcccgcatctcaggttggggatggggacatggagaggaaggggccgcctactcctgcaaatgcttgtgacagatgccaggaggtagatgtgtgctggccaataaaggcccctacctgattccccgcagcttggtctcagtgtgtgcttagatgggggcagctgggaatgaggctacgacggagagggctagaaatgggcggtggagaatgctctgtgctggaggacagagcctcctggaggtataggctgcaaggtgcagggccaggaagcctgtgtctctggacatcagggaacagctctcccacaactggtcattcatttggtgctcactcattcattcatccccctgatgccaacacagaagagtcaaacacaactgctgcctccaaggaggtccaggttgaaaaacaaactggtttttattctaaacacgtactagggcagcatgctggggggcctctcctgcctccagaggtgcccctgctccccactgtggccctctttagacagagtaggagctcgggctacccacatgcagcccagcccttagcacccaagggcctgcctgtgccccactctctgcctgggctagggaggcccaggaccctcggagtgggcaggcccaccctttccatgggtcaccagggtctcagtgcccacttgtcctccaaccaacagtgacacggcaccctccacacggcctgtggctgccagtgccaccaccgcctgctccgtagggaagcccatgcgctccagctgctgcagcctgttgggggtggggggagaagtggggagtgtcagggccaccccggcccctataccaggggaccccacctctgcccaccccaccttaccgcagagaggagacagaggacttggacagccatggtgcgctctggggttcctgggctggcccgtcaagaagcgaggcctggatgccctcctgcagcatctgctcatccaaggccgcccacatcggagtccctggggagaagctggccccagcccagtccaggcctgcctctgaggagccctcccaggtgggctgcacaggcctcaggcttggtgggggcagggctgagtcttcccagtgggaccagaggtcaggggaggccacataaggcggtccagggatgggaggcctggaggagtgggaagagaagagggcctgactggcagccctgccacagtgcccaccacctggactggcatcccccccatcaccctcacctcactccggcaggatgggtgacaggcagctccgccaggctacccggggtggcaaggagcctcaggggccagcaccccgccaaggtcctgcacaagacgccctcctgcagcacctgcagccgtcgctctgagggttccagccaccggaaggccccagctgcatctgtctgcccggggcagggcggccggtcaaggaaaaccaaaagcagccaggggtgggcccacgccacaggccaggccccatgccaagtgtgctggccaccattccctcccgtctcctcactgtggaccagcatggaatagcgtcaccctggtcagcagcagaggctcagaaaggaaaagggatctgcctgaagctactcagccaaacagagccaggtatgcctcaccccaaggcctgggctcacccgtgacccactctgttcccagaaccctatgcaccttttcaggtctgtaactcaagacccacccgtcctggaagaagtcccatggacacacctgctattgccttcagacaggcctggataactcctgtcaccaatccagagtgcagaggccagcctgttctctccagtggcactgttttccccgataggtatgaatcatcttagggctggacgcagtggctcacagctgtataatcccagcacttggggaggctgagacgggaggatcacttgaggccaggagttcaagaccagcctgggcaacatagaccccgtctctacaaaaaatttttaaaattagctggacgtggcagtgcacacctgtaatctcagctactcaagtggctgaggcaagaggatcgcttgagcccaggagtttgaggctgtagtgagctatgatggcgtcgccacactccagcttgggtgacagaatgagaccctgtctctaaaaattaaaaaaaaaatctcagaagcagaacaccaataaagagtgctctagcacgacttatttatttatttatttttgagacagagtctcactctgtcacccaggctgatatgcagtggtgaaatctcggctcactgcaacctccaactccgaggttcaagcaattctcctgcctcagcttcccgaatagatgggattacaggcacgtgccatcacacctggctaattattttgtattcttagtacagggtttcaccatgttggctaggctggtctcaaactcctggcctcaagaaatcggcccacctcagcctcccaaagtgctaggattacaggcgtgagccactgcacccagcctctagcaccatttattaaaaagaatattcttttcctcattgaatcgacttggcactcttgtcaaaataaattgactatacagtaaatctaacagtttatttctagatggtcaattctagtccattgatctgtatgtctatcctgatgccagtaccacaatatcttgattattataattttgtacggcttttttttttttttttttttggagagagtcttgctctgtcgcccaggctggagggcagtggtgcaatctcagctcactgcaacctctctcctgggttccagcaattctcctgcctcagcctcctgagcagctgggattacaggcgtgtgccaccacacctggctaatttttgtatttttagtagagatggggtttcaccatgttggccacgctggtcctgaactcctgacctcaagtgatctgtctgcctcggcctctcaaagtgctgggattacaggtgtgagccaccgcacctggccacttttgtagttttaagttttgaaattgaaaagtgtaagtcttccaggtttgcttttctttttcaagattatctgaggtattctgggttctttacatttccatattatttttaggaccagcttgctaatttctgcaacaacaacaaagacagctgagattttgataagaattgtgtgggatctataaatcaactgagtagcattaccattttaacaatattaagtattccaatccgtgaacatgagatctttccattcacttaggcttttaattttctttttttttgagaggaagtctcgctctctcgcccaggctggagtgcagcagcgctatcttggctcactgcagcctctgcctctcggattcaagcaattctcctgtctcagtctcccaagtagctgggactacaggcgcctgccaccacgcctggctaatttttgttttttggggtttgagaccggagtctcaccctatcgcccacgctggagtgcagtggcatgttctcggctcattgcagcctctgcctcacaggttcaagtgattctcctgtctcagtctcccaagtagctgggactataggcgcctgccaccacgcctggctaatttttgttttttggggtttgagaccggggtcttgccctgtcgcccaggctggagtgcagtggcatgttctcggctcattgcagcctctgcctcacaggttcaagtgattctcctgcctcagtctcctaagtagctgggattacaggtgcacgccaccacgcccagctaatttttgtatttttagtagagatggggttttaccatgttggccaggctagtctcgaactcctgacctcgtgatccgcccaccttggcctcccaaagtgttgggattacaggcatgagccatcgcgcctggcctaatttttttatttttagtacagatggggtttcaccatgttggccaggctggtcttgaactccagacctcaagtgatctgcccgcctggcctcccaaagtgctggggttacaggcgtgagccactgcgcccggtcaggcttttaatttttttaatttttaatttttgctcagggtggtttggctattctgggccttttgtggttccatataaattttagggttattgtttctatttctgcgaagaatggcattgatattacagggagcccacgtagccctttacattgtaattggcacctccaccaggccataagaccccaggtcccagcccagagcatgtcccagaggaagactcagagaagctcctggaatgtgtgtgcacggctccttggtattgcttgggccttcacccctttgtgccacttccttcccaggcacccacccacagaacccacacatccccacgggccctgggctcaggcaaaggatacaggccaggccggcaaggaggccgcaaaggagctgcaggaagggtggctcagagctgagcagtggggtcagggcaagcagcagccacggcgacagccacggtggcagtgccccacggggccgtctagggcggtgtccctccccagccagcatggccaggtggacaggcatgtatccacagctgccggctgcactggacagcccaaggcctgccagcagcactgccagcagcccagaagccagggcgagcagggctgaggcatgcaggaatctcagcgtgcccaggtggcactcctgctgccagcccacagtgggcaggagcagcaggctcaggagcaggcctggcagggccgtgtggcccagggcatgggtcagcagccggtgcactgggagagagaaggggcttatgtgccaggttagtggccccaacatccaaggctgtcccaggtgtgccaggttgaaggttacgctacaccagggccacctgctgagcccacctcccctccccaggagccagtcttcccacagccagcacttaatcattggtggaagggaccaaggacttccaaacactgtggctacgcctctgtggtattaaacagaatacactggacgtgccactcagtcttttcactgacaacccgctacagagcactcactatgtcccagacaccatgaaggtactctgcttctgtatttactaaatcatacctggctgagagcatgaaatggcctgcttcaatcctggagctaccccattccctcaagctgtgtgaccctggtcaaatcacttaacctctctgagcatcattgggggtcctcaaatacaaattggaggagttattattgggaaacaggtgctcagctgaggtcactcctcaaaaccccaacacctcctcctcccatcctgatgcttagttgaaagtcttagctgtttttttgttttgttttgttttgttttttgagatggagtctcactctgtcacccaggctggagtgcagtggcgcgatcttggctcactgcaagctccgcctcccaggttcgcgccattctcctgcctcagcctctcgagtagctgggactacaggcacccgccactacgcccagctaatctttttgtatttttagtagagacggggtttcaccgtgttagccaggatggtctcaatctcctgacctcgtgatccgcccgcctcggcctcccaaagtgctgggattacaggagtgagccactgcgcccggccaatttttgtatttttagtagagacagggtttaaccatgttggccaggctggtctcgaactcctgacctcaagtgatccacctgcctcagcttcccaaagtgctgggattacaggcgtcagccacctggccttagttcttatttcaaggaaaagctgctagaaagggaaaccatgagaaaagcactcctacccataggttccagcccaccctagggagtcctctgcctcccttcttggctgtggatgtgctgggcatgctcctgtctaaggccatgctttcccgggacactgggccccatccctgtttgacccctggaggccttgtgctgctcctgccaagtgggcccaggccctacagcaagtctcctgcttcctccaaggtccacgtggctggccctcaccctgccaggggtccagcaacagctccggggccaggaccaggccggggccggcccccaccagccacagggtgctcatcagcagcatcaggactgaggaggccagaggcagtgctggggacagttggccatgggggcccctggcatgcatcgcttggttgaggacggtcaagggtggtcctggggctgtgtgctggggataaaagaaaacaataacaagttattactggagcttttatctcaccaataccctctcaagcaccttatcaacagccctattttacagaggtggaaacaggctggagacgcaggcccagcagcttggccttagtggagctcagaccctaacccatgcgctcataagccatcttaccattccactcacctctgtttaaggactggcaggggacaggcatagagacttctgagtcctgataggccctgaactcccaaaaagaggggttcaggccctcaccccccagggcgaattcagggccatctctagccctcttctgtcctcccccttccctcagactactacctccctccttcctcccctcccctgttcccagccttaatgctccagatggtttcagttgcccttgaccctggggtggggccagacaatgggcaagccgacagggtaaggggtagggcagatgggcagaagtcccacatcttgagccatactcagagacctgcgactgagacatcccctttgagggtgaacccatccactgtaagcctcctcctgcttccttactggcacagcccctctggccctggctcccctttccacaggaagggtacagtatgcgctccacctctttctgctctgtgtcctgaggcaagtttccaacctcatctttttacagatgagcctcattttacagatgagcctctcctttctcatctgtaaaatggaaattcataaattcttttcctcagagtatgatgaaataaaaaggaataggctaaggcaggccctggcccacaactcttcctccataaaccatagcaatccgcactaatcatggcaggcgtctgtagccaccaactggcccatcgagaaggcctcaatatggaggtggctgctccagcctagctggtcccagctttggccctcaaacatggcctttccctgcccaccaaagcaaggccttctcccccgtgctgttctcttgcatccagcctgtcctccagggcctgtaggtcttcacccctggtcaggcctctcggtcccaggactcccactgagctgattcagggcaggaagcaggatcccagagagacaagaaggctgcctaatttgctcccctgccaagcgccttctccacatctaccagtttcctgcaggaaaaatgtggaaagctcctctgcctgcattgtccttccctccattttgccagcaggcaaactcctatttcacccttggaagcccagctcaaatatcccttcccctcctctggccccctaacatcatggatcttatccttaggagcacagcttggccagtctgtctccctaggcaggtggtctgagctcatggctcctctgatccaaccccacattccccagggtattcacagcacacagccagtgctttatatatgttcactgaaaaaaggacactagcttggctcctggtcctgccgagggatttgaaggtgaaccctgcccttcgcggacccgggcatccacctagggggctggggctagaggtccaggaaggtgggcagggtcagccttgcctggaggcagggtttggggccaaggcacccaccgtaaacctcctcctgcatcgacacctcacaaccattccccagctctgggcaccttagcaagggtgaagggcttacccgtggacactcggaactgggacttgagccccctggacctcactttcttcaatctatgaaacggggcagtgcaccaccaggccctgcctaccttactgggaagccgggagggcagaatggaaagacaaggacggagattcttccggtggcggatagagtagggggtcccaggatctgtctggttcgaactcagctggtgactttgcagagatactcaatttccttgggcctcagtttccccttctgtagaaacaaggatatcggatgagggatgattaaagggcctgctccacctcgaccgttaccggggatagggtctcggggccaggcacggcgttcgaggcctcccacccagccgaccggccttggggacccttccccgctggcccgggccacgcgtcccgggtactcactgcagagcgcgcccggcaaccccgaaaggccggtcggggaccccggctgggagtcaggactctagctcccgggcgcgacccgagaaccctgaatccattccgcgcacacccggccgcgtgacccctgccgaccggctggcgcgccacccattccccgcggcccgcggattagtcagcagttgttctagtccgggtcccttcccccagccctcccgccgatctccgtctccctgcagggccgactcttcagcgaccgtccctagagccagcggacggaaccattccaaacagcctagtctcgtgctgagagcctctccggtttcacgctgagacccgctcacccccgctctggccccttagatgctattttggcccgagtgtcacgtcgggcgctctttagagaggactgggacaagagttgcggacgcgaagaacgagtaagcggtggttcatccctcctgaccccacccccgtggcctggcccgatggtcgcgcccggggttgcgagatttgcgcctgcgcagtgcggcgcctagagggaaagcgagagggagacggacgttgagagaacgaggaggaaggagagaaaatggcgtccacgggtgagtatggtggaactgcggtcgcgccggcggtagccggaacgcccaaactgggggtcgttcgtctctgggcttggctgggaagactgagtggagttgccgagagggggttgaggcacccgccgcggcccgacgagctcggggatccgcattcctctcccctcccccaaccgggcgggccggttctggaatcttccggcgcccgtggcgcgcggggggcttgctgcggcgggggcgcgcggggcccgccttggcctccattgtgtggcggtcctcgcgccctgagctccgggcctcccgccacgtgggcggggcctgcggccttcgaggccctgcgtgaaggggaggatttggccaggcctcaagccggtcactatgaaaccgccggggggcccgcaggctgctgtccctgtgaggcctccctccccgttttcagggtttcctgagaaaccaggggaaaaagcaaataaagataccgtggatttgtgggccgaggggtgccggcctatgagcgggagccccgtcatccttaagacccagtcggctggggcgtctggcgctgccgagctgccccctctgtggcttccagccccaagccgaacttctgctcgcctgggctttagacagaatgtgcttccctcctccagggcccccagtttgccgctttcttgggcttctccatttttatcgttattaatccacgtcctcccctcccccaaaaccaattaagtggcttcccagggccctttttctgcaaacgccgagggacatccgttgtataataaggccagcctgggtcgagagacgagaaacgctaccagaaagatatttctggtctctctgacctaggaggaacaaaaggccgagccttcatttgaattatgtttcagcagtggcctcgcacgtttattcgcctgcgttaggccggcaggcctgttgatttcgtaggtcgacagaggagaggggaaaaaaggccagtagaagcaatcttaaaggcacttgcaagcaagccccggttgggaactccaaaatgggagtagagtggtccttgatggaaggagcgtttaagagtgtcgcctagccatcacctgcagttcgcaatctgtgggtacactaacccgcgaaaattggcagggtggagcatttttgccccgggggtattctcaggccacctggttccaggccttagagacagtgggagaagatgagaaggaagacaggaaaagttctgggcactccagagtttttggagtccagaatccagcaacttaaggacagtttaagaattctccccatctgtggtcaataaacaggtaagtgttggctgttcgtgccgggataccaaagagtggataccaaagagtgccggtagaagagaggactgaaataccacagctaacctcccggtgggaagtggtttcctaggtgccctatccaccctcttctgctctgcaaaagcctgaaaaggcaaaacgtgtgcgttgacatttttgcgtggctggacgtgccttttttcagtcaactttgttcaaaccttgttcaccagtaactaccatgtgctgtactgtattagaattacagttgtggtttctgttgacacaaagtaaacacattaggcctggctgggggggccttcagagagtcacataagtaatctggtccttagtttcctttcctgtaaaatacagaagttaggctagacctcttaagcttttgagcccttctgaccttccagcataagcattccacaaatttgtcctatgctgacttcagctcaggtactgtgaagctcaactcaggtagtgtgaagcagcttccatagtgactgctctaaagtgttaaaccgttgccttgggttaataatagaagttttctctcctcgtatgttatctcatgtagaaaagtacgtaaagcatatatatccagtgcaacaaagaattggaatgcagactcgcagcaatctagaacccccagcgctcaatcacagtgaagtgatttttagtgaagtcagtggctcacttttgggggttaaaaacgaacacggttgctgaataatctgaccagtttgtaattgtattaggttggtgcaaaagtaattacgtttgcatcaacctaatagcttgcttgagggcctgtgatgtttgtgtgctctaggaagataaatgtaagttcatgaaacaaatttgctaccttctatagcccaccagttagtatagggccgaatcctgtggtttctcactgataagaggtcattggttgttccatatcagctttgccagtttgatgttttacataactgctcttgcgtaaaagtcgtcttgcaaacgttgaacttacatgacagtgatttacaatcacttctcaagcaaagacctcaacaaaacgtgggttaaaatatttgatgttaaatgattcattgctgtgtttattttgtagatgccacatggaaaaaatgatctgcatttagttttaatgtcagagagagtatgacttgtagtgctattgaaaatgcctttaagattgtcatgaacagattatttttttcattataggttagcctttgggcagttgatttgttcctcttggtgattcagggttttgagttaagagtgtgtacaaaggaaagaaagtagtccagtaaagtacagagaggtaggcagataagccaacgtgaagagatggattcagcaaagctctctcaggccgccgagggattgtgaggctggctttggattccatgaagtggatgccatgaagagctgtcaattgttggttttggatgagggactactttctgattggaaaataaaggaccccttttttccgtcctaatggcagtactgtcttcagacagaacaagatatgtgttcttgtggagaagaaagaattgggcagaattttcaaaaataattactttaactgcctttaaaaaaaaactaaatttatctaactttaatgcagtagcgctctgaaaactattttccgtttgtttttactacttgtagacacctcagtggaccagtttttggtccctttggatgcatgttataaatttcataggaaaaggaaaattatagggaggtttacttagataagggatgaaaattcatgtcttttttttaagttgaaatcattttgagttgtatgaaagacaatggtgttaccaaatttttcccagaaagactaaatgctttttcttctttgccagtcttcagggttctgccttagctctgcttcaccagggtttataatatatctagcttttaagttgctgcacaaatatagttctgacacagcaaaccctttaaaacactggagtgtggtgactgccttcttgtctgccattccgtttcactgtcgttgagctagggaatgatggtttgtctaacttgctaaagtgaggggagtgaaaactaatttttgaggagaggtaggttctaacgtaaccaatctagtgttaaactttgtattattgttgcatgcctccgttttatatgagggtagaaacttctgatcctgttagtagatcttgttgtcagtctgtgatattgatgatcatcctgtattttaaatgacagttgggattgggatgggttttgtggtcatgggaacataaaaagtatacctgccaaatcagctgatcttgacctcattagctagtcccacagtcaaatgttgagtttaactggtttagacttttttttctgttagatgttgagaggtaagggggactcatttggacctgtgttggcaggtctccctacagtttaaagaattcttcctgccacgtgaattctttcccccttttttctcttctccttgtttctgctaactttacactatttttcctccttgttttcctctagattacagtacctatagccaagctgcagcgcagcaggggtaagtcagtcttttataaccgtattttgtgtgtgattaatattttttgaatatggagccttctataattgtagaggtggtatttgaatgttctctattcaagttattgcatttaattcttttgcagctacagtgcttacaccgcccagcccactcaaggatatgcacagaccacccaggtaatctttaaaataattacatgtagctgcacctccaagtaaaatcagtatattatccagttatctttcagttatccagtaaaacaaatgagtaatgtgtttggaatagtaaaatacccaggcattttaaactttcacagtgggagtgcgaaggactccattgtgccatcataaatgaaaccattcagaagctgataattgactctttataactttttaatatgatttctcaagttaggtgccctgttccatgcttggtccttcttcattatgtttaaatttagtgaatttattcatcatagcaattctgcaaaggaagaggatgatatgaccattctgcagaggagaacattgcagtgcatagatattaagtaacttgccagtggttgcacagtaagtggcggggttagctctaaaaactggcgacctagccaaggagctgctgagctctttccagtgaagagtctgttgaaaagcctaggccaacagattctagaaattagccttctagtgttttcaagataatgttgaattctgaaatgatccatgccataaaatggatactaataactgccatggaaacatgttctaggacaagcagaatgtgatgtctctggcagatcttacataactggtcatttaaacaaacctagagaataatcatgctaatatctgaaagaacaactcttccttgcctgattttaagtattatggatgtctaagttcaaaagacagtactcttgatgtgcccaccataagaggacatacagcgttctggttcattttctttgaagtggtatagtagttttaaagtctttttgtcaggctgaaaatctggttttcaattttttctgacagattttagccctcttcattgctttctctgttcatttgtcttcgtaccttttgtttccaatcactaaaactgtgctacgctaagtgctagcagttaatacacctgtgcccttattgctcttcccttgagagtgtcttgttaatctcatgtatagttaactgaggttttgcctgattatcttttttttcccccttttgagaagctgtgaatgacattgcctacttacctaatgagctttttccgtagctaactttaccataatatgagtgaaccagataagggataacattcatgatactgtgattatttgtcttgttttgttgtttttgttttgtttttttaatcttctagaaaggaatgtttttgattttggttctccaatttagtccattttattgctaaaatacaaaagttcatgtatgaagttcttgcattcgtttttttttggagcaggcatatgggcaacaaagctatggaacctatggacagcccactgatgtcagctatacccaggctcagaccactgcaacctatgggcagaccgcctatgcaacttcttatggacagcctcccactggtaaggcctgccttggagagatttttgggtcgttctggctagggcattggctaagaagcttattagtcatgctttcggatgtatattctggtccataccttggcatctggggaatcctttattcttaggaagaggtattttttctctttcttccctactc

SEQ ID NO: 1577 - protein, 100 aa, Homo sapiens
GLRGEPGPQGSAGQRGEPGPKGDPGEKSHWGEGLHQLREALKILAERVLILETMIGLYEPELGSGAGPAGTGTPSLLRGKRGGHATNYRIVAPRSRDERG

SEQ ID NO: 1578 - DNA, 5144 bp, Homo sapiens
cagctgtacgagcggaacctggactagaggaactttcctcaggactcagggcacacagcccctcggccactactgtctgcgagcccgaggcgcaggggagcgccagcggctgcaggtacgctgcgcacccgcactggggcctgggcggtgcagcggcggcgggagggtcctgggaaccgcagccgccgaggccagtgtgtgagccggccggccgcggcaagccgcatcccccggccgcccctcgcagccccttgctccccggcagccgccgccgccctcacgcagcccagccgggcgctcgcgccaggacttccccgccgcccgcctcggcccggaacatggctgcgcgccctgctgccaccctcgcctggtcgctactgctcctctcctcagccctgctccgcgaaggctgccgagcgcgcttcgtcgccgagcgggactcggaggacgacggagaggagccggtggttttcccggagtcgcccctgcagagccccacggtgctcgtggcggtcctcgcccgcaacgcggcgcacacgctgccgcacttcctcggctgcctggagcggctggactaccccaagagcaggatggccatctgggcagccactgatcacaatgtggataatacaacagaaatattcagggagtggttgaaaaatgtacagagactctatcactatgtggagtggaggcctatggatgaaccagagtcttaccctgatgaaattggaccaaagcactggccaacctcccggtttgcccatgtgatgaaactacgacaggcagcccttcgaactgcgagggaaaaatggtcagactacattctgttcatagatgttgacaatttcctgactaatccacagaccctcaatctactgattgcagaaaacaaaactattgtggcccccatgctggagtctcggggcctgtattctaatttctggtgcggaatcacccctaagggcttctataagaggaccccagactacgttcagattcgagaatggaagaggacaggctgcttccccgtccccatggtccactccaccttcctaattgacctcaggaaggaggcctcggacaagctgactttctaccccccacaccaggactacacctggacctttgatgacatcattgtctttgccttctccagcaggcaagcaggcatccagatgtacctctgcaacagagagcactatggctacctgcccatccccctgaagccccatcagacactgcaggaagacatcgagaacctcatccatgtgcagattgaagcaatgattgaccgtcctccaatggaaccctcccagtatgtctcagttgtccctaaatatccagacaagatgggatttgatgagattttcatgataaacctcaaacgcagaaaggacaggcgggaccggatgctgcgcacactgtatgaacaggagattgaggtcaagattgtcgaggctgtggatggaaaggcactcaacacaagccagctgaaggcactgaatattgaaatgctgcctggctatcgagatccctattcctccaggcctctaacaaggggtgaaatcggctgctttctcagccactactcagtctggaaagaggtaattgatcgagagctagagaagactcttgtaattgaagacgatgtgcgttttgagcatcagtttaagaagaagctgatgaagctgatggataacattgaccaggctcagctggactgggaactgatttatattggtaggaagaggatgcaagtaaaggagccagagaaagcagtgcccaatgtggcaaacctggtcgaagccgactattcctactggaccctgggctacgtcatctctctggaaggagcacagaagctggttggagccaatccttttgggaagatgctgccagtggatgagtttctgccagtcatgtacaacaagcatcccgtagccgagtacaaggagtattatgaatccagggacctgaaagccttctctgcagaacccttgctcatctaccctacgcactacacaggccagccggggtacctgagtgacacggagacctccaccatctgggacaatgagacagtggccaccgactgggataggacacatgcctggaagtcccggaagcaaagccgcatctacagcaatgccaagaacacagaggccctgccaccgccaacctccctggacactgtgccttcaagggatgagctatgaaggctccctgggagtgtggcccacatcagttcaacatcctctggtttttctaaagggctattcatctgtttgctccagttttctgttttgttttgttcttagtggtcacagtcatctaaccaaagtgatctagtgtgatagatcgaaattaacatatttttgaccatggaaggaaataaggaaattcaacccaaatttcccaagacggctgaaagacaggttttttggaaactgttaagataaactgtaatccagacacctaattcttcagttcactactcatgtgatactgattcccacattaaggttgaacaacatggctcagagtcttgttcaagagaaagtgatcaccgagctgtcacatcagcaaatatgtagtcaaggcagccaggccaactagaccacacttattggtctagtttgtccgttttatatgacattgaaaacttgtgtgtgcaacttttgggggacaggaatcacttaaaatcatatttatttggctttttatttaaaggattctgtcacaagtcttattgaaaagtagattttttaaaaaaaaaaaatcttagtccctgttatccagtaggggtgggtatttgggtccgactgagacttggcctgtgaccatcatggcagttggagttctcatatagaggtgaccagtttgccatgtggatataatttagtagatatttgacagtttgtgtaggtatttgagggaaaaaactcaatgtttggcttttttattatggccactcgagtcaggatgctctatttataaagataaatgtaatatataaagggtgaggactggctgtgcatcctgccctgtcccgggtttgcgcgctgctacagagcttcacgctctccgctccaccccttagcctgggaacccaccgcaggtgtgagttctgtgagtcactgctaagagacagagcacattttcaggccagcaactatccttgccagagttttttcattatattttgaattatttattttacaaaatgggcgaagatattgtctttaggataaggcagagaaacagatgttgcagacttccacggcacccgggggagtggtgggtgtggacacattggttcggcaatctgattctcctgaatttcccagccaggctcttgtggggaggcctgtggatggggggatttgaactatttggaaacaaatgattctctatctcaggtgagaaacctggtcagaaacaaagggctggtcacctgatttaggccagcaaccagggaagctcttagaatcccaggcggacaccctttctcaaaagatatcccctaagagtcctttctgctttcttcacagattgattttatgtaaaatgcagagttggactacacgatttcttcccactccacaatctgtcatcctagtatagatcatggtggtttccctcaagtttatgttctcatgccctcaatctgtaaatttttgtctccagaaaaaccctcccaggcatcccataccagcaccgttcctcatcactgtccatgcaccatgcagccatatggggggccgtgcacaccccaaaccctgagcttcacacttaaactcatggggagggcccttcagagcagagtccacaggcgggtggtgctacatacacaagcttagtgtacgagtgtaagatacactttaagccagacacctaattcttcagttcactgcccatgtgatactgattgccacattaaggttgaacagcatggctcagagtctagagaaagtgatcaccaagctgtctcatcaccaaataggtagtcaaggcagcctcatctccccaggtgaggggcgggtccccactttaggacaagaggcagcttgccttccaccagacgccagcctcggccttccttcccgactcactgtgggtacccttctacactgaccagcaagctaggccgctggaggaaagggaactcacccaactctaaattgtgccgcttagacttagctgtcagtgtgacttcctttcccacccacccccagaaaaacagaaagagcatctggggagcgagtgaaaattccttaggtgattcctaagatttccttgggtatctggtttttgttttcatatttgagtgtgtgcatgtgtgcatgactttaatgacttttttaatggggtgggaggtggctggggtgctggggttgaaggaagtttgggttgatttttgtggtgttttgtttaatagagaatttttttttttcctgttcccctgtcagctggtctgacagatttaagaactctcattcttaaaagactttggacttaaattctagcattttagactaggactgttctactgtgaagaaagttctgtctcctttagcccggtttgtttctccctgctcaggtctagaatcccaagcagtgttcttttctggtgaacactgtgagccgcagatgtgactttttttttaaagtcatctcttcagcaatccagaggttccttgacctcattatttgtcctatctctcccttatagtcctaagccaagacatttgacctttgacatttgacctttgcagtgtcatgtgagggcgtcagtatagaggcctttgcatctgggcctggcacccgctctctgcctctggaggctaaaccctgtctggatttctcttgggatctaacgtgggatcttctggacagacaaccgtgacatcagcagtgctggtgctgctgtgtgtggactgaacacctgcactttgcagaggacacgctgcatgggccccgcttgcggttcattcaggcctgctgcaggagctctgagaacaagaaagagtggacacccgttcccctgcatcatctgtcttgcgtgctatttcagagtggggaagtgataaactatttgccttctggagctctttgtgaaaaattaaaaaaaaacttagctc

SEQ ID NO: 1579 - protein, 738 aa, Homo sapiens
AVRAEPGLEELSSGLRAHSPSATTVCEPEAQGSASGCRYAAHPHWGLGGAAAAGGSWEPQPPRPVCEPAGRGKPHPPAAPRSPLLPGSRRRPHAAQPGARARTSPPPASARNMAARPAATLAWSLLLLSSALLREGCRARFVAERDSEDDGEEPVVFPESPLQSPTVLVAVLARNAAHTLPHFLGCLERLDYPKSRMAIWAATDHNVDNTTEIFREWLKNVQRLYHYVEWRPMDEPESYPDEIGPKHWPTSRFAHVMKLRQAALRTAREKWSDYILFIDVDNFLTNPQTLNLLIAENKTIVAPMLESRGLYSNFWCGITPKGFYKRTPDYVQIREWKRTGCFPVPMVHSTFLIDLRKEASDKLTFYPPHQDYTWTFDDIIVFAFSSRQAGIQMYLCNREHYGYLPIPLKPHQTLQEDIENLIHVQIEAMIDRPPMEPSQYVSVVPKYPDKMGFDEIFMINLKRRKDRRDRMLRTLYEQEIEVKIVEAVDGKALNTSQLKALNIEMLPGYRDPYSSRPLTRGEIGCFLSHYSVWKEVIDRELEKTLVIEDDVRFEHQFKKKLMKLMDNIDQAQLDWELIYIGRKRMQVKEPEKAVPNVANLVEADYSYWTLGYVISLEGAQKLVGANPFGKMLPVDEFLPVMYNKHPVAEYKEYYESRDLKAFSAEPLLIYPTHYTGQPGYLSDTETSTIWDNETVATDWDRTHAWKSRKQSRIYSNAKNTEALPPPTSLDTVPSRDEL

SEQ ID NO: 1580 - DNA, 426 bp, Homo sapiens
aaactcggtgctggagcccacgtgctgcctgaagcacagaaggaagttctcttcggttggcaggatctgcgccagctctgccatctcgattttcccatctgagtttttatcatacttctgcatgaactccttcatcttttctccaaagttgtcactctttgacatcatgccagagcctttccttgccttctccagctcttggaaaaagttttctagctctttaccttcaatatacccatttccgtctgcgtcaaagtgcttccatatttccaggaactgggacgccgtcagctcggccaggtgcaggtaagggggctgctgctgcgggccagccatggcgagccgctcggagacctcagcctgcaccgctcccgctccgcgccggctgggctctggcactcgcgctcggggggggggggggggggg

SEQ ID NO: 1581 - DNA, 5659 bp, Homo sapiens
tttttttttttttttttcctaatttttggtcggcggcggtgctgggccaggggaaggaagggacacggaggccgccctcgtcccgccacctcctacccgcttccccccagccccggctccgggagatgtgccgggcggggggcccgggttcgccgagccgcaggagagacacgctgggccgaccccagagaggcgctggacaggctggtggtccaggccgtggtgcctgccaggtgatgtggggcaaagccccccgcacaggccactgagagctccggacacgcacccggctgccaccatggcccgcctagccgcagtgctctggaatctgtgtgtcaccgccgtcctggtcacctcggccacccaaggcctgagccgggccgggctcccgttcgggctgatgcgccgggagctggcgtgtgaaggctaccccatcgagctgcggtgccccggcagcgacgtcatcatggtggagaatgccaactacgggcgcacggacgacaagatttgcgatgctgaccctttccagatggagaatgtgcagtgctacctgccggacgccttcaagatcatgtcacagaggtgtaacaaccgcacccagtgcgtggtggtcgccggctcggatgcctttcctgacccctgtcctgggacctacaagtacctggaggtgcagtacgactgtgtcccctacaaagtggagcagaaagtcttcgtgtgcccagggaccctgcagaaggtgctggagcccacctcgacacacgagtcagagcaccagtctggcgcatggtgcaaggacccgctgcaggcgggtgaccgcatctacgtgatgccctggatcccctaccgcacggacacactgactgagtatgcctcgtgggaggactacgtggccgcccgccacaccaccacctaccgcctgcccaaccgcgtggatggcacaggctttgtggtctacgatggtgccgtcttctacaacaaggagcgcacgcgcaacatcgtcaagtatgacctacggacgcgcatcaagagcggggagacggtcatcaataccgccaactaccatgacacctcgccctaccgctggggcggaaagaccgacattgacctggcggtggacgagaacgggctgtgggtcatctacgccactgagggcaacaacgggcggctggtggtgagccagctgaacccctacacactgcgctttgagggcacgtgggagacgggttacgacaagcgctcggcatccaacgccttcatggtgtgtggggtcctgtacgtcctgcgctccgtgtacgtggatgatgacagcgaggcggctggcaaccgcgtggactatgccttcaacaccaatgccaaccgcgaggagcctgtcagcctcaccttccccaacccctaccagttcatctcctccgttgactacaaccctcgcgacaaccagctgtacgtctggaacaactatttcgtggtgcgctacagcctggagttcgggccgcccgaccccagtgctggcccagccacttccccacccctcagcacgaccaccacagccaggcccacgcccctcaccagcacagcctcgcccgcagccaccaccccgctccgccgggcacccctcaccacgcacccagtgggtgccatcaaccagctgggacctgatctgcctccagccacagccccagtccccagcacccggcggcccccagccccgaatctacacgtgtcccctgagctcttctgcgagccccgagaggtacggcgggtccagtggccggccacccagcagggcatgctggtggagaggccctgccccaaggggactcgaggaattgcctccttccagtgtctaccagccttggggctctggaacccccggggccctgacctcagcaactgcacctccccctgggtcaaccaggtggcccagaagatcaagagtggggagaacgcggccaacatcgccagcgagctggcccgacacacccggggctccatctacgcgggggacgtctcctcctctgtgaagctgatggagcagctgctggacatcctggatgcccagctgcaggccctgcggcccatcgagcgcgagtcagccggcaagaactacaacaagatgcacaagcgagagagaacttgtaaggattatatcaaggccgtggtggagacagtggacaatctgctccggccagaagctctggagtcctggaaggacatgaatgccacggagcaggtgcacacggccaccatgctcctcgacgtcctggaggagggcgccttcctgctggccgacaatgtcagggagcctgcccgcttcctggctgccaaggagaacgtggtcctggaggtcacagtcctgaacacagagggccaggtgcaggagctggtgttcccccaggaggagtacccgagaaagaactccatccagctgtctgccaaaaccatcaagcagaacagccgcaatggggtggtcaaagttgtcttcatcctctacaacaacctgggcctcttcctgtccacggagaatgccacagtgaagctggccggcgaagcaggcccgggtggccctgggggcgcctctctagtggtgaactcacaggtcatcgcagcatccatcaacaaggagtccagccgcgtcttcctcatggaccctgtcatcttcaccgtggcccacctggaggacaagaaccacttcaatgctaactgctccttctggaactactcggagcgttccatgctgggctattggtcgacccaaggctgccgcctggtggagtccaacaagacccataccacgtgtgcctgcagccacctcaccaacttcgctgtgctcatggctcaccgtgagatctaccagggccgcatcaacgagctgctgctgtcggtcatcacctgggtgggcattgtgatctccctggtctgcttggccatctgcatctccaccttctgcttcctgcgggggctgcagaccgaccgcaacaccatccacaagaacctgtgcatcaacctcttcctggctgagctgctcttcctggtcgggatcgacaagactcagtatgagattgcctgccccatcttcgccggcctgctgcactatttcttcctggctgccttctcctggctgtgcctggagggcgtgcacctctacctgctactagtggaggtgtttgagagcgagtattcccgcaccaagtactactacctgggtggctactgcttcccggccctggtggtgggcatcgcggctgccattgactaccgcagctacggcaccgagaaggcctgctggctccgagtggacaattacttcatctggagtttcatcgggccagtctccttcgttatcgtggtcaacctggtgttcctcatggtgaccctgcacaagatgatccgaagctcatctgtgctcaagcccgactccagccgcctggacaacattaaatcctgggcgctgggggccatcgcgctgctgttcctgctgggcctcacctgggctttcggcctcctcttcatcaacaaggagtcggtggtcatggcctatctcttcaccaccttcaacgccttccagggggtcttcatcttcgtctttcactgcgccttacagaagaaggtgcacaaggagtacagcaagtgcctgcgtcactcctactgctgcatccgctccccacccgggggcactcacggatccctcaagacctcagccatgcgaagcaacacccgctactacacagggacccagagccgaattcggaggatgtggaatgacactgtgaggaaacagacggagtcctccttcatggcgggtgacatcaacagcacccccaccctgaaccgaggtaccatggggaaccacctgctgaccaaccccgtgctgcagccccgtgggggcaccagtccctacaacaccctcatcgccgagtcagtgggcttcaatccctcctcgccccctgtcttcaactccccagggagctaccgggaacccaagcaccccttgggaggccgggaagcctgtggcatggacaccctgcccctgaacggcaacttcaataacagttactccttgcgaagtggggatttccctcccggggatgggggccctgagccgccccgaggccggaacctagccgatgcggcggcctttgagaagatgatcatctcagagctggtgcacaacaacctgcgggggagcagcagcgcggccaagggccctccaccgcctgagccccctgtgccacctgtgccagggggcgggggcgaggaagaggcgggcgggcccgggggtgctgaccgggccgagattgaacttctctataaggccctggaggagcctctgctgctgccccgggcccagtcggtgctgtaccagagcgatctggacgagtcggagagctgcacggccgaggacggcgccaccagccggcccctctcctcccctcctggccgggactccctctatgccagcggggccaacctgcgggactcaccctcctacccggacagcagccctgaggggcccagtgaggccctgcccccaccccctcccgcaccccccggcccccccgaaatctactacacctcgcgcccgccagccctggtggcccggaatcccctgcagggctactaccaggtgcggcgtcctagccacgagggctacctggcagccccaggccttgaggggccagggcccgatggggacgggcagatgcagctggtcaccagtctctgagggcacctcatggaccaggggctggtggcccaggccagggagggaaccctgggcagggctctggtgggagagggagacagatggaggcagtggctggtgggccactctctccaggtgcccctcagccatgggccctacagtcccctcaggggactctaacctgggggcctgaggtgccagggttcacagacagggtttcccaccagccacacgcaccagctctatttgggggaagtgtagtgaggaggagcccagaggaccccaggggagtgaggagggagaacttggaagggtgcagcccacttccagactctcccctctcccacccttctaccctgtgaagggaaatgagggctttagtttcctgggcagggaggggcagcttctgaggttgccaaaggcccccactggatggaacctgttagctgctcctctccgcagccagaaatgctgccggctgcacccagagggagcagtgaggcaggacagatggacaggttcctcctgcgctgtaattccctgctccctggagactgggaaaaggccgcagggcagggggactgggcggtggtggctggtggtttaaaggttgaactttctctgaagctcctttccccttgctcttggtccctgccccgcaagcaaacctgccccctctgcctcccagtgcacccaatgaccccctcccttggggcgactcctgatgaagcacaactccccgcagggcccccagcccacaggggtggccatatttgggcagttcccagtcctgtgggctcggctatctggggagcagattttgggtctggatctccctggggagtgggtcctgggcttggatctttccctagggggccctcttactccttcctctctcctcctccttccccattgctgtaaatatttcaacgaaatggaaaagaaaaaaaaaaagac

SEQ ID NO: 1582 - protein, 1474 aa, Homo sapiens
MARLAAVLWNLCVTAVLVTSATQGLSRAGLPFGLMRRELACEGYPIELRCPGSDVIMVENANYGRTDDKICDADPFQMENVQCYLPDAFKIMSQRCNNRTQCVVVAGSDAFPDPCPGTYKYLEVQYDCVPYKVEQKVFVCPGTLQKVLEPTSTHESEHQSGAWCKDPLQAGDRIYVMPWIPYRTDTLTEYASWEDYVAARHTTTYRLPNRVDGTGFVVYDGAVFYNKERTRNIVKYDLRTRIKSGETVINTANYHDTSPYRWGGKTDIDLAVDENGLWVIYATEGNNGRLVVSQLNPYTLRFEGTWETGYDKRSASNAFMVCGVLYVLRSVYVDDDSEAAGNRVDYAFNTNANREEPVSLTFPNPYQFISSVDYNPRDNQLYVWNNYFVVRYSLEFGPPDPSAGPATSPPLSTTTTARPTPLTSTASPAATTPLRRAPLTTHPVGAINQLGPDLPPATAPVPSTRRPPAPNLHVSPELFCEPREVRRVQWPATQQGMLVERPCPKGTRGIASFQCLPALGLWNPRGPDLSNCTSPWVNQVAQKIKSGENAANIASELARHTRGSIYAGDVSSSVKLMEQLLDILDAQLQALRPIERESAGKNYNKMHKRERTCKDYIKAVVETVDNLLRPEALESWKDMNATEQVHTATMLLDVLEEGAFLLADNVREPARFLAAKENVVLEVTVLNTEGQVQELVFPQEEYPRKNSIQLSAKTIKQNSRNGVVKVVFILYNNLGLFLSTENATVKLAGEAGPGGPGGASLVVNSQVIAASINKESSRVFLMDPVIFTVAHLEDKNHFNANCSFWNYSERSMLGYWSTQGCRLVESNKTHTTCACSHLTNFAVLMAHREIYQGRINELLLSVITWVGIVISLVCLAICISTFCFLRGLQTDRNTIHKNLCINLFLAELLFLVGIDKTQYEIACPIFAGLLHYFFLAAFSWLCLEGVHLYLLLVEVFESEYSRTKYYYLGGYCFPALVVGIAAAIDYRSYGTEKACWLRVDNYFIWSFIGPVSFVIVVNLVFLMVTLHKMIRSSSVLKPDSSRLDNIKSWALGAIALLFLLGLTWAFGLLFINKESVVMAYLFTTFNAFQGVFIFVFHCALQKKVHKEYSKCLRHSYCCIRSPPGGTHGSLKTSAMRSNTRYYTGTQSRIRRMWNDTVRKQTESSFMAGDINSTPTLNRGTMGNHLLTNPVLQPRGGTSPYNTLIAESVGFNPSSPPVFNSPGSYREPKHPLGGREACGMDTLPLNGNFNNSYSLRSGDFPPGDGGPEPPRGRNLADAAAFEKMIISELVHNNLRGSSSAAKGPPPPEPPVPPVPGGGGEEEAGGPGGADRAEIELLYKALEEPLLLPRAQSVLYQSDLDESESCTAEDGATSRPLSSPPGRDSLYASGANLRDSPSYPDSSPEGPSEALPPPPPAPPGPPEIYYTSRPPALVARNPLQGYYQVRRPSHEGYLAAPGLEGPGPDGDGQMQLVTSL

SEQ ID NO: 1583 - DNA, 624 bp, Homo sapiens
cgcctcctgctctcaggcctctctgctcctgtcttttgtttggatgccggcgctgctgcctgtggcctcccgccttttgttgctaccccgagtcttgctgaccatggcctctggaagccctccgacccagccctcgccggcctcggattccggctctggctacgttccgggctcggtctctgcagcctttgttacttgccccaacgagaaggtcgccaaggagatcgccagggccgtggtggagaagcgcctagcagcctgcgtcaacctcatccctcagattacatccatctatgagtggaaagggaagatcgaggaagacagtgaggtgctgatgatgattaaaacccaaagttccttggtcccagctttgacagattttgttcgttctgtgcacccttacgaagtggccgaggtaattgcattgcctgtggaacaggggaactttccgtacctgcagtgggtgcgccaggtcacagagtcagtttctgactctatcacagtcctgccatgatgagccctgttcctgctcatcatgaagatccccgcgatacttcaacgccttctgacttccaggtgatgactgggcccccaataaatcccgtctttgggtcaaaaaaaaaa

SEQ ID NO: 1584 - protein, 136 aa, Homo sapiens
MASGSPPTQPSPASDSGSGYVPGSVSAAFVTCPNEKVAKEIARAVVEKRLAACVNLIPQITSIYEWKGKIEEDSEVLMMIKTQSSLVPALTDFVRSVHPYEVAEVIALPVEQGNFPYLQWVRQVTESVSDSITVLP

SEQ ID NO: 1585 - DNA, 199 bp, Homo sapiens
ggggggcagcatgcccgcgcgcgctgcctgaggacgccgcggcccccgcccccgccatgggcgcccctgcctgcgccctcgcgctctgcgtggccgtggccatcgtggccggcgcctcctcggagtccttggggacggagcagcgcgtcgtggggcgagcggcagaagtcccggccccagagcccggccagcaggagca

SEQ ID NO: 1586 - DNA, 299 bp, Homo sapiens
  misc_feature (21)..(21): n is a, c, g, or t
  misc_feature (202)..(202): n is a, c, g, or t
ggacactcctaggggcttttntaaagctagactcgcagctccttgctcaggaaaattaaactattcacgtttcagatcaagtgttgacagtcaccagtcaggaggagttcttaaagagttttatgttgactgaatattgcacattgagtccccattgagtccctggtgggaaaagtccacaatttcccattgatagcttttnactgttgtcagtcactgttacttggatcagatcaagcgcagtgactttttgggattcagtggttattctccacacttcgtaggccattttcaaccca

SEQ ID NO: 1587 - DNA, 416 bp, Homo sapiens
gcggggccgtgctgagacggcgtcgtgccctgcgtagtgcgtgcggcggcgcgtgcgctaggggagtgggcggtgatggcctggtccacgtgcgtcccttcccgggacccccgcagcttggcgcccagcggctacgtgagccaaggcacccggatgtcctgcgcccctctccgagtgacaagtcccggcctccggtcccgcagtgcccgcagcctcggcctggcgtccacgcattgccatggtgactgttgggcaactactgcgaaggccgaatgggccctgtgtggtccgtgcctggatgcatggatggcctgagtccctgcttcttcttcacgctcgtgccctcgactgcggatggctctagggactctggccttggtgctggctcttccctgcagacgccgggagcggcctga

SEQ ID NO: 1588 - DNA, 432 bp, Homo sapiens
  misc_feature (372)..(372): n is a, c, g, or t
  misc_feature (388)..(388): n is a, c, g, or t
  misc_feature (425)..(425): n is a, c, g, or t
aaacttgacgccatgaagatcccggtccttcctgccgtggtgctcctctccctcctggtgctccactctgcccagggagccaccctgggtgtcctgaggaagaaagcaccattgagaattatgcgtcacgacccgaggcctttaacaccccgttcctgaacatcgacaaattgcgatctgcgtttaaggctgatgagttcctgaactggcacgccctctttgagtctatcaaaaggaaacttcctttcctcaactgggatgcctttcctaagctgaaaggactgaggagcgcaactcctgatgcccaagtgaccatgacctccactgggaagaggggggctaagcgtgacgccttggattctcaaccttacnataaactcctttcctngcctcaaggaactcccattaaaacatttttccaatcnaaaaaag

SEQ ID NO: 1589 - DNA, 1691 bp, Homo sapiens
ggcagaggcactgcgagatcctgtgctcccagaccctcagcatggagagtgccgtgaacacctacaaatatgccaagatccacaatgccccagaactggccctgttctgtgagggcttcttcctcaagcacatgaaggccctactggagcaggatgccttccggcagctcatctacggccgcagcagcaaagtgcagggcctggatccactgcaggacctgcagaacaccctggcagagcgcgtgcactctgtctacatcacctcccgggtgtgaggcagggggcggaggctgccgaggccagggcctgtggaggtgccagggcccaccatgtcggggtatggttgtaggccctcttggagccaggttcacggggctgtttcctcctcctcccccagatgtcccccctgtcaccgggcagctcaccctcatctcctctgccctagagctgtttgttcaatcactgatgggcaaaggggagatgtagctaactggtggccctcctccccatctcagtttgcaactcaagggcagccatgcactccccctgggtgtcgctctcccctcctgcaggtcagcagctgatcctgatccacctccgcccaggccctccaagctctactcacccctagggcctcagtaaactcagaccatcccaactggggctcctgggggtacaggaatccttatgaatgtatagaatgcatactgcctaggcccccagtcgtctgcagtaattcaaaagctggtatttttcttcctaaatgtcacatagcaaaggctgcccaaatccccaaacttgttcttcaaaggtttgacaggcttaatgtgggcatccagtggcctgtggacccccccctgccaccacgactgctgccacccggagttcccccattgtctttggtgcctgggcttccagagtccctcccatcaggactaccagcttgctcagttagcagcagagggcagttccccagcttgatggtttctgagctaagtctggcatggaggggcaaggggtaggggatggggtgctgtgtaggaatggcctcagctcttgttttgctgctggttttaggggccaaagtaaatgggtggattctggaacctcaggcctagactaggttgcctttgtgggggcgatgaagcagagtcccctggtcaagtctctcggctcctttaatgtaggattgagagctgggcaaacaggtcccactggggactgtgactcttggagattaaaggacagggcattgatggaaggtaagggccaggagaagaggcctttctgctgtgtcccctcacggccttgccctcgaattctgcaggccctgggctcccctgacacctgtcatatttatggaccagacactggggcagcatcaggcacagtctgtctgggtgcaacttcttcagctgtctggccgcaccttaaaaactatttattcaccaaaagccccaggcatttcagaaggtggcactcaggtcaccctgaaaagcccccaggggcttgcaattctggaaaatattttgactagctgcttggctggatgtacaaagaaataggcattattttattgctgtaatattgtatgatactttaactgtacaataatgttgtcacttactgtaaatgtactatggttttattaacaataaacactcattaacaatgaaaaaaaaaaaaaaaaa

SEQ ID NO: 1590 - DNA, 896 bp, Homo sapiens
cgggtgccgggacaaactatacggctaggtacgaggctggtgtgtctccgggacgctgaggggccgaggagacgtgaggctctggcctgcagctcgcgccgccatggacgctgccgaggtcgaattcctcgccgagaaggagctggttaccattatccccaacttcagtctggacaagatctacctcatcgggggggacctggggccttttaaccctggtttacccgtgggaagtgcccctgtggctggcgattaaacctggaaacaaagacagaaatgtcgcctgctccctccagagtggatggatgtagaaaagttggagaagatgagggatcatgaacgaaaggaagaaacttttaccccaatgcccagcccttactacatggaacttacgaagctcctgttaaatcatgcttcagacaacatcccgaaggcagacgaaatccggaccctggtcaaggatatgtgggacactcgtatagccaaactccgagtgtctgctgacagctttgtgagacagcaggaggcacatgccaagctggataacttgaccttgatggagatcaacaccagcgggactttcctcacacaagcgctcaaccacatgtacaaactccgcacgaacctccagcctctggagagtactcagtctcaggacttctagagaaaggcctggtgcaggcggcttgctgggggatgtgagcgctcaggacgtgatgaggtactcgtggttctggagctctagaaacacttctgatgcatgacaccatgtgtgatggtgccaggaatggttcaggatgttgttggggacaccagtttgtgattagtccttaaaacttagcttcctgggacattcttcattcccctctggttctagaaacagcccttgttccccc

SEQ ID NO: 1591 - DNA, 462 bp, Homo sapiens
aattcggcaccaggctccaacatggagctcttgcagcttacccgctaaaatgttccgggcccagagcaaagcttttatgcctttgaagtgaaggatgcaaaaggaagaactgtttctctggaaaagtataaaggcaaagtttcactagttgtaaacgtggccagtgactgccaactcacagacagaaattacttagggctgaaggaactgcacaaagagtttggaccatcccacttcagcgtgttggcttttccctgcaatcagtttggagaatcggagccccgcccaagcaaggaagtagaatcttttgcaagaaaaaactacggagtaactttccccatcttccacaagattaagattctaggatctgaaggagaacctgcatttagatttcttgttgattcttcaaagaaggaaccaaggtggaatttttggaagtatcttgtcaaccctgagggtcaa

SEQ ID NO: 1592 - DNA, 479 bp, Homo sapiens
cgctgtgtctgcccggtctctcctggggtctccggttctgccgcctcctgtccctccttccggctgccccggccagaggggctcgaaggcgcgttggggcccggggccacgctgggagacacgccttcggccgcgcctaattcgagccaggcgcgggacgcgtcccccggccgggcggagcgggaggggacgcccgccgcgctcggcctccccgggccccgacccctcctttgtaatttgaataaaacgcctcccccgcccgcgcgccgccttaacccgccgcctccgctctccccggctgcaggcggcgtgcaggaccagcggcggccgtgcaggcggaggacttcggcgcggctcctcctgggtgtgaccccgggcgcgcccgccgcgcgacgatgagggcgcggccgcaggtctgcgaggcgctgctcttcgccctggcgctccagaaccgcgtgtgctatggcatcaagtggctg

SEQ ID NO: 1593 - DNA, 337 bp, Homo sapiens
aagagagcagaaaggagatgagatgacacaaccaggattctccgaagctgggcttgaagtcctcaagataaactcccatgaacaaggaaggaagagtgaagaaaaaaacagggatacctggtactggacaaaagtaaaaagatagaaggatactttttttcccccagaagaagtctgtcacaaaagcaaacctgcaaatatacgatcagtataacacccaagataatgacacatgcggccaggcatggtggctcatgctggtatcccagcactttgagaagccgaggcaggtggatcacctgagatcaggagttcgaggccaacctgaccaacatgg

SEQ ID NO: 1594 - DNA, 399 bp, Homo sapiens
gagaaagaggtctacaactctgaccccccagaaatacccaaacacagaaagctctctccgccgtgaatctcgatcccacatcccgtcggctttcttcaacctctcttcccggagcgccccccaatccacgagtggcagccgcgggactgtcgcgtcggcgcccgcgcggagtcagcagggccaaaagcggtagatcatggcaaccatagaagaaattgcacatcaaattattgaacaacagatgggagagattgttacagagcagcaaactgggcagaaaatccagattgtgacagcacttgatcataatacccaaggcaagcagttcattctgacaaatcacgacggctctactccaagcaaagtcattctggccaggcaagattccactccgggaaa

SEQ ID NO: 1595 - DNA, 646 bp, Homo sapiens
cccggggtctgggggtgacattgcaccgcgcccctcgtggggtcgcgtgccaccccacgcggactccccagctggcgcgcccctcccatttgcctgtcctggtcaggcccccaccccccttcccacctgaccagccatgggggctgcggtgtttttcggctgcactttcgtcgcgttcggcccggccttcgcgcttttcttgatcactgtggctggggacccgcttcgcgttatcatcctggtcgcaggggcatttttctggctggtctccctgctcctggcctctgtggtcttggttcatcttggtccatgtgaccgaccggtcagatgcccggctccagtacggcctcctgatttttggtgctgctgtctctgtccttctacaggaggtgttccgctttgcctactacaagctgcttaagaaggcagatgaggggttagcatcgctgagtgaggacggaagatcacccatctccatccgccagatggcctatgtttctggtctctccttcggtatcatcagtggtgtcttctctgttatcaatattttggctgatgccttgggcccggtgtggttgggatccatgggagactcacccttattattcctgacttcagccttttgaaagcggcatttcctggtcca

SEQ ID NO: 1596 - DNA, 5784 bp, Homo sapiens
acggcatccagtacagaggggctggacttggacccctgcagcagccctgcacaggagaagcggcatataaagccgcgctgcccgggagccgctcggccacgtccaccggagcatcctgcactgcagggccggtctctcgctccagcagagcctgcgcctttctgactcggtccggaacactgaaaccagtcatcactgcatctttttggcaaaccaggagctcagctgcaggaggcaggatggtctggaggctggtcctgctggctctgtgggtgtggcccagcacgcaagctggtcaccaggacaaagacacgaccttcgaccttttcagtatcagcaacatcaaccgcaagaccattggcgccaagcagttccgcgggcccgaccccggcgtgccggcttaccgcttcgtgcgctttgactacatcccaccggtgaacgcagatgacctcagcaagatcaccaagatcatgcggcagaaggagggcttcttcctcacggcccagctcaagcaggacggcaagtccaggggcacgctgttggctctggagggccccggtctctcccagaggcagttcgagatcgtctccaacggccccgcggacacgctggatctcacctactggattgacggcacccggcatgtggtctccctggaggacgtcggcctggctgactcgcagtggaagaacgtcaccgtgcaggtggctggcgagacctacagcttgcacgtgggctgcgacctcataggaccagttgctctggacgagcccttctacgagcacctgcaggcggaaaagagccggatgtacgtggccaaaggctctgccagagagagtcacttcaggggtttgcttcagaacgtccacctagtgtttgaaaactctgtggaagatattctaagcaagaagggttgccagcaaggccagggagctgagatcaacgccatcagtgagaacacagagacgctgcgcctgggtccgcatgtcaccaccgagtacgtgggccccagctcggagaggaggcccgaggtgtgcgaacgctcgtgcgaggagctgggaaacatggtccaggagctctcggggctccacgtcctcgtgaaccagctcagcgagaacctcaagagagtgtcgaatgataaccagtttctctgggagctcattggtggccctcctaagacaaggaacatgtcagcttgctggcaggatggccggttctttgcggaaaatgaaacgtgggtggtggacagctgcaccacgtgtacctgcaagaaatttaaaaccatttgccaccaaatcacctgcccgcctgcaacctgcgccagtccatcctttgtggaaggcgaatgctgcccttcctgcctccactcggtggacggtgaggagggctggtctccgtgggcagagtggacccagtgctccgtgacgtgtggctctgggacccagcagagaggccggtcctgtgacgtcaccagcaacacctgcttggggccctcgatccagacacgggcttgcagtctgagcaagtgtgacacccgcatccggcaggacggcggctggagccactggtcaccttggtcttcatgctctgtgacctgtggagttggcaatatcacacgcatccgtctctgcaactccccagtgccccagatggggggcaagaattgcaaagggagtggccgggagaccaaagcctgccagggcgccccatgcccaatcgatggccgctggagcccctggtccccgtggtcggcctgcactgtcacctgtgccggtgggatccgggagcgcacccgggtctgcaacagccctgagcctcagtacggagggaaggcctgcgtgggggatgtgcaggagcgtcagatgtgcaacaagaggagctgccccgtggatggctgtttatccaacccctgcttcccgggagcccagtgcagcagcttccccgatgggtcctggtcatgcggcttctgccctgtgggcttcttgggcaatggcacccactgtgaggacctggacgagtgtgccctggtccccgacatctgcttctccaccagcaaggtgcctcgctgtgtcaacactcagcctggcttccactgcctgccctgcccgccccgatacagagggaaccagcccgtcggggtcggcctggaagcagccaagacggaaaagcaagtgtgtgagcccgaaaacccatgcaaggacaagacacacaactgccacaagcacgcggagtgcatctacctgggtcacttcagcgaccccatgtacaagtgcgagtgccagacaggctacgcgggcgacgggctcatctgcggggaggactcggacctggacggctggcccaacctcaatctggtctgcgccaccaacgccacctaccactgcatcaaggataactgcccccatctgccaaattctgggcaggaagactttgacaaggacgggattggcgatgcctgtgatgatgacgatgacaatgacggtgtgaccgatgagaaggacaactgccagctcctcttcaatccccgccaggctgactatgacaaggatgaggttggggaccgctgtgacaactgcccttacgtgcacaaccctgcccagatcgacacagacaacaatggagagggtgacgcctgctccgtggacattgatggggacgatgtcttcaatgaacgagacaattgtccctacgtctacaacactgaccagagggacacggatggtgacggtgtgggggatcactgtgacaactgccccctggtgcacaaccctgaccagaccgacgtggacaatgaccttgttggggaccagtgtgacaacaacgaggacatagatgacgacggccaccagaacaaccaggacaactgcccctacatctccaacgccaaccaggctgaccatgacagagacggccagggcgacgcctgtgaccctgatgatgacaacgatggcgtccccgatgacagggacaactgccggcttgtgttcaacccagaccaggaggacttggacggtgatggacggggtgatatttgtaaagatgattttgacaatgacaacatcccagatattgatgatgtgtgtcctgaaaacaatgccatcagtgagacagacttcaggaacttccagatggtccccttggatcccaaagggaccacccaaattgatcccaactgggtcattcgccatcaaggcaaggagctggttcagacagccaactcggaccccggcatcgctgtaggttttgacgagtttgggtctgtggacttcagtggcacattctacgtaaacactgaccgggacgacgactatgctggcttcgtctttggttaccagtcaagcagccgcttctatgtggtgatgtggaagcaggtgacgcagacctactgggaggaccagcccacgcgggcctatggctactccggcgtgtccctcaaggtggtgaactccaccacggggacgggcgagcacctgaggaacgcgctgtggcacacggggaacacgccggggcaggtgcgaaccttatggcacgaccccaggaacattggctggaaggactacacggcctataggtggcacctgactcacaggcccaagaccggctacatcagagtcttagtgcatgaaggaaaacaggtcatggcagactcaggacctatctatgaccaaacctacgctggcgggcggctgggtctatttgtcttctctcaagaaatggtctatttctcagacctcaagtacgaatgcagagatatttaaacaagatttgctgcatttccggcaatgccctgtgcatgccatggtccctagacacctcagttcattgtggtccttgcggcttctctctctagcagcacctcctgtcccttgaccttaactctgatggttcttcacctcctgccagcaaccccaaacccaagtgccttcagaggataaatatcaatggaactcagagatgaacatctaacccactagaggaaaccagtttggtgatatatgagactttatgtggagtgaaaattgggcatgccattacattgctttttcttgtttgtttaaaaagaatgacgtttacatataaaatgtaattacttattgtatttatgtgtatatggagttgaagggaatactgtgcataagccattatgataaattaagcatgaaaaatattgctgaactacttttggtgcttaaagttgtcactattcttgaattagagttgctctacaatgacacacaaatcccgctaaataaattataaacaagggtcaattcaaatttgaagtaatgttttagtaaggagagattagaagacaacaggcatagcaaatgacataagctaccgattaactaatcggaacatgtaaaacagttacaaaaataaacgaactctcctcttgtcctacaatgaaagccctcatgtgcagtagagatgcagtttcatcaaagaacaaacatccttgcaaatgggtgtgacgcggttccagatgtggatttggcaaaacctcatttaagtaaaaggttagcagagcaaagtgcggtgctttagctgctgcttgtgccgttgtggcgtcggggaggctcctgcctgagcttccttccccagctttgctgcctgagaggaaccagagcagacgcacaggccggaaaaggcgcatctaacgcgtatctaggctttggtaactgcggacaagttgcttttacctgatttgatgatacatttcattaaggttccagttataaatattttgttaatatttattaagtgactatagaatgcaactccatttaccagtaacttattttaaatatgcctagtaacacatatgtagtataatttctagaaacaaacatctaataagtatataatcctgtgaaaatatgaggcttgataatattaggttgtcacgatgaagcatgctagaagctgtaacagaatacatagagaataatgaggagtttatgatggaaccttaatatataatgttgccagcgattttagttcaatatttgttactgttatctatctgctgtatatggaattcttttaattcaaacgctgaaaacgaatcagcatttagtcttgccaggcacacccaataatcagtcatgtgtaatatgcacaagtttgtttttgtttttgttttttttgttggttggtttttttgctttaagttgcatgatctttctgcaggaaatagtcactcatcccactccacataaggggtttagtaagagaagtctgtctgtctgatgatggatagggggcaaatctttttcccctttctgttaatagtcatcacatttctatgccaaacaggaacgatccataactttagtcttaatgtacacattgcattttgataaaattaattttgttgtttcctttgaggttgatcgttgtgttgttttgctgcactttttacttttttgcgtgtggagctgtattcccgagacaacgaagcgttgggatacttcattaaatgtagcgactgtcaacagcgtgcaggttttctgtttctgtgttgtggggtcaaccgtacaatggtgtgggaatgacgatgatgtgaatatttagaatgtaccatattttttgtaaattatttatgtttttctaaacaaatttatcgtataggttgatgaaacgtcatgtgttttgccaaagactgtaaatatttatttatgtgttcacatggtcaaaatttcaccactgaaaccctgcacttagctagaacctcatttttaaagattaacaacaggaaataaattgtaaaaaaggttttct

SEQ ID NO: 1597 - protein, 1172 aa, Homo sapiens
MVWRLVLLALWVWPSTQAGHQDKDTTFDLFSISNINRKTIGAKQFRGPDPGVPAYRFVRFDYIPPVNADDLSKITKIMRQKEGFFLTAQLKQDGKSRGTLLALEGPGLSQRQFEIVSNGPADTLDLTYWIDGTRHVVSLEDVGLADSQWKNVTVQVAGETYSLHVGCDLIGPVALDEPFYEHLQAEKSRMYVAKGSARESHFRGLLQNVHLVFENSVEDILSKKGCQQGQGAEINAISENTETLRLGPHVTTEYVGPSSERRPEVCERSCEELGNMVQELSGLHVLVNQLSENLKRVSNDNQFLWELIGGPPKTRNMSACWQDGRFFAENETWVVDSCTTCTCKKFKTICHQITCPPATCASPSFVEGECCPSCLHSVDGEEGWSPWAEWTQCSVTCGSGTQQRGRSCDVTSNTCLGPSIQTRACSLSKCDTRIRQDGGWSHWSPWSSCSVTCGVGNITRIRLCNSPVPQMGGKNCKGSGRETKACQGAPCPIDGRWSPWSPWSACTVTCAGGIRERTRVCNSPEPQYGGKACVGDVQERQMCNKRSCPVDGCLSNPCFPGAQCSSFPDGSWSCGFCPVGFLGNGTHCEDLDECALVPDICFSTSKVPRCVNTQPGFHCLPCPPRYRGNQPVGVGLEAAKTEKQVCEPENPCKDKTHNCHKHAECIYLGHFSDPMYKCECQTGYAGDGLICGEDSDLDGWPNLNLVCATNATYHCIKDNCPHLPNSGQEDFDKDGIGDACDDDDDNDGVTDEKDNCQLLFNPRQADYDKDEVGDRCDNCPYVHNPAQIDTDNNGEGDACSVDIDGDDVFNERDNCPYVYNTDQRDTDGDGVGDHCDNCPLVHNPDQTDVDNDLVGDQCDNNEDIDDDGHQNNQDNCPYISNANQADHDRDGQGDACDPDDDNDGVPDDRDNCRLVFNPDQEDLDGDGRGDICKDDFDNDNIPDIDDVCPENNAISETDFRNFQMVPLDPKGTTQIDPNWVIRHQGKELVQTANSDPGIAVGFDEFGSVDFSGTFYVNTDRDDDYAGFVFGYQSSSRFYVVMWKQVTQTYWEDQPTRAYGYSGVSLKVVNSTTGTGEHLRNALWHTGNTPGQVRTLWHDPRNIGWKDYTAYRWHLTHRPKTGYIRVLVHEGKQVMADSGPIYDQTYAGGRLGLFVFSQEMVYFSDLKYECRDI

SEQ ID NO: 1598 - DNA, 375 bp, Homo sapiens
  misc_feature (337)..(337): n is a, c, g, or t
gggccctcagagagggctgccaggacgcgagccactgaggagccgctcagccagcgccatagcccttaggactatcggtcacatcctcgcgctcctgctccggctcctccatcttggcctcggcagtggcggctgccgggaggatgtgccgccttctggcagggggaagaaggaggagaagatgaagaagcaccggcgggccttggccctggtctcctgcctctttctgtgctctctggtctggcttcccagctggcgtgtatgttgtaaagagagttcttcagcttcagcgtcatcatattactctcaagatgacaactgcgcactagaaaatganggatgtacaattccagaaaaagaatccagagtcaaaaa

SEQ ID NO: 1599 - DNA, 682 bp, Homo sapiens
  misc_feature (532)..(532): n is a, c, g, or t
attcagaggaggatgaagaccattttggaggaagaaaagcacccttattaagaattgcagcaagtaagccaacaaggtcttttcaggatgattttcttatatcaagtggtacatttcattttatttacttcagtttctggtgaatgtgtgactcagttgttgaaggacacctgctttgaaggaggggacattactacggtcttcacaccaagcgccaagtactgccaggtagtctgcacttaccacccaagatgtttactcttcactttcacggcggaatcaccatctgaggatcccacccgatggtttacttgtgtcctgaaagacagtgttacagaaacactgccaagagtgaataggacagcagcgatttctgggtattctttcaagcaatgctcacaccaaataagcgcttgcaacaaagacatttatgtggacctagacatgaagggcataaactataacagctcagttgccaagagtgctcaagaatgccaagaaagatgcacggatgacgtccactgccactttntcacgtacgccacaaggcagtttcccagcctggagcatcgtaaccattgtctactgaagcacactcaaacagggacaccaaccctagatacgaagctcgataaagtggtgtctggattttcactgaaatcctgtgcactttctaatcttg

SEQ ID NO: 1600 - DNA, 491 bp, Homo sapiens
  misc_feature (13)..(13): n is a, c, g, or t
  misc_feature (195)..(195): n is a, c, g, or t
  misc_feature (296)..(296): n is a, c, g, or t
  misc_feature (426)..(426): n is a, c, g, or t
  misc_feature (447)..(447): n is a, c, g, or t
caaatcagttttnttggtgtctttgcagggaatgaaagaagataatgagcagataatcagcagccatttcctttcagttacggtatatgattctgcctgagaaagcaggatttatgggaaggaaaacttgtctaaggctcatcaagatggcctgacccagagtcacctaagagaactcttccaacttaaatgtgnctagggtgtgtaatcagttgcttcttattctgtgtctcagatttcctagtccatgacatttaatagtgagtatagagtaggatattctatacattttagtntttggcccttggaaacaaagttaaataccatgtcactcagaagactcccaaaagtttgtgtataaatggcgaagtatgcactatgagaggattctaatccattcacatcaattctttgagttgtgcaaantacacttggctttggatttcnacttgggtgatccaaaatttgggttatttaaagctgccaggaaa

SEQ ID NO: 1601 - DNA, 517 bp, Homo sapiens
  misc_feature (508)..(508): n is a, c, g, or t
tttctgcagcaggaaccgcggctgctggacaagaggggtgcggtggatactgacctttgctccggcctcgtcgtgaagacacagcgcatctccccgctgtaggcttcctcccacagaacccgtttcgggcctcagagcagtctggtgagatgctgttgccgctgctgctgctgctacccatgtgctgggccgtggaggtcaagaggccccggggcgtctccctcaccaatcatcacttctacgatgagtccaagcctttcacctgcctggacggttcggccaccatcccatttgatcaaggtcaacgatgacctattgcgactgcaaagatggctctgacgagccaggcacggctgcctgtcctaatggcagcttccactgcaccaacactggctataagccctgtatatcccctccaaccgggtcaacgatggtttgtgactgctgcgatggaacagacgagtacaacagcggcgtcatctgtgagaacacctgcaaagagaagggncgtaaggaa

SEQ ID NO: 1602 - DNA, 2291 bp, Homo sapiens
gaatgcgagattttggacatcatcatgaaaatgtgctcttgctgtgaatgcaagtgcggccccatcgacctcctgttcgtgctggacagctcagagagcattggcctgcagaacttcgagattgccaaggacttcgtcgtcaaggtcatcgaccggctgagccgggacgagctggtcaagttcgagccagggcagtcgtacgcgggtgtggtgcagtacagccacagccagatgcaggagcacgtgagcctgcgcagccccagcatccggaacgtgcaggagctcaaggaagccatcaagagcctgcagtggatggcgggcggcaccttcacgggggaggccctgcagtacacgcgggaccagctgctgccgcccagcccgaacaaccgcatcgccctggtcatcactgacgggcgctcagacactcagagggacaccacaccgctcaacgtgctctgcagccccggcatccaggtggtctccgtgggcatcaaagacgtgtttgacttcatcccaggctcagaccagctcaatgtcatttcttgccaaggcctggcaccatcccagggccggcccggcctctcgctggtcaaggagaactatgcagagctgctggaggatgccttcctgaagaatgtcaccgcccagatctgcatagacaagaagtgtccagattacacctgccccatcacgttctcctccccggctgacatcaccatcctgctggagcctccgccagacgtgggcagccacaactttgacaccaccaagcgcttcgccaagcgcctggccgagcgcttcctcacagcgggcaggacggaccccgcccacgacgtgcgggtggcggtggtgcagtacagcggcacgggccagcagcgcccagagcgggcgtcgctgcagttcctgcagaactacacggccctggccagtgccgtcgatgccatggactttatcaacgacgccaccgacgtcaacgatgccctgggctatgtgacccgcttctaccgcgaggcctcgtccggcgctgccaagaagaggctgctgctcttctcagatggcaactcgcagggcgccacgcccgctgccatcgagaaggccgtgcaggaagcccagcgggcaggcatcgagatcttcgtggtggtcgtgggccgccaggtgaatgagccccacatccgcgtcctggtcaccggcaagacggccgagtacgacgtggcctacggcgagagccacctgttccgtgtccccagctaccaggccctgctccgcggtgtcttccaccagacagtctccaggaaggtggcgctgggctagcccaccctgcacgccggcaccaaaccctgtcctcccacccctccccactcatcactaaacagagcccaagcttggaaagccaggacacaacgctgctgcctgctttgtgcagggtcctccggggctcagccctgagttggcatcacctgcgcagggccctctggggctcagctctgagctagtgtcacctgcacagggccctctgaggctcagccctgagctggcgtcacctgtgcagggccctctggggctcagccctgagctggcctcacctgggttccccaccccgggctctcctgccctgccctcctgcccgccctccctcctgcctgcgcagctccttccctaggcacctctgtgctgcatcccaccagcctgagcaagacgcctctcggggcctgtgccgcactagcctccctctcctctgtccccatagctggtttttcccaccaatcctcacctaacagttactttacaattaaactcaaagcaagctcttctcctcagcttggggcagccattggcctctgtctcgttttgggaaaccaaggtcaggaggccgttgcagacataaatctcggcgactcggccccgtctcctgagggtcctgctggtgaccggcctggaccttggccctacagccctggaggccgctgctgaccagcactgaccccgacctcagagagtactcgcaggggcgctggctgcactcaagaccctcgagattaacggtgctaaccccgtctgctcctccctcccgcagagactggggcctggactggacatgagagccccttggtgccacagagggctgtgtcttactagaaacaacgcaaacctctccttcctcagaatagtgatgtgttcgacgttttatcaaaggccccctttctatgttcatgttagttttgctccttctgtgtttttttctgaaccatatccatgttgctgacttttccaaataaaggttttcactcctc

SEQ ID NO: 1603 - protein, 436 aa, Homo sapiens
ECEILDIIMKMCSCCECKCGPIDLLFVLDSSESIGLQNFEIAKDFVVKVIDRLSRDELVKFEPGQSYAGVVQYSHSQMQEHVSLRSPSIRNVQELKEAIKSLQWMAGGTFTGEALQYTRDQLLPPSPNNRIALVITDGRSDTQRDTTPLNVLCSPGIQVVSVGIKDVFDFIPGSDQLNVISCQGLAPSQGRPGLSLVKENYAELLEDAFLKNVTAQICIDKKCPDYTCPITFSSPADITILLEPPPDVGSHNFDTTKRFAKRLAERFLTAGRTDPAHDVRVAVVQYSGTGQQRPERASLQFLQNYTALASAVDAMDFINDATDVNDALGYVTRFYREASSGAAKKRLLLFSDGNSQGATPAAIEKAVQEAQRAGIEIFVVVVGRQVNEPHIRVLVTGKTAEYDVAYGESHLFRVPSYQALLRGVFHQTVSRKVALG

SEQ ID NO: 1604 - DNA, 629 bp, Homo sapiens
ccatgctgtcttcagagatggtcactgtcttggcctcctagagtgttgggattacaggcatgagccaccacgctcggcccagtccagactttttaactacctggccccactgcagacacagttccctctagtccttcccagagttacaagaagagaactccagtagccttattctgtcagggacgaattgtttaccccatgataatgtaggatatcataaattcttcttcaaaggttttaacctgtaatttgttaagtacattgagttctgagatcctctccaaagaaccaatgtatcagtatgttcagctcacctgttctttgttcttcattttaacttttaatttcctcattctttatgtctccttgcccctagtttcagtaaacaatcccctcctagcctctgtcacctgctctgacctgagtcacctttagtcacctggtccgtaaccatctttcctgtctaaacttctcaccccaccactctggcttatacccctgctctctttaaaatagccagtcagaattagcttagattgtgcggtccaaccctagcccataggggaacaacacagcagtagggggtacctgcatcagtgataagaaccattccctccctgatccggttg

SEQ ID NO: 1605 - DNA, 420 bp, Homo sapiens
gggatgagtggaggatgggatgagtggaggatgggatgagtggcgttggctgcagatttgtggtgcgttctgagccgtctgtcctgcgccaagatgcttcaaagtattattaaaaacatatggatccccatgaagccctactacaccaaagtttaccaggagatttggataggaatggggctgatgggcttcatcgtttataaaatccgggctgctgataaaagaagtaaggctttgaaagcttcagcgcctgctcctggtcatcactaaccagatttacttggagtacatgtgaaagaaaacgtcagtctgcctgtaaatttcagcaagccgtgttagatggggagcgtggaacgtcactgtacacttgtataagtaccgtttacttcatggcatgaataaatggatctgtgagatgcc

SEQ ID NO: 1606 - DNA, 316 bp, Homo sapiens
  misc_feature (74)..(74): n is a, c, g, or t
  misc_feature (88)..(88): n is a, c, g, or t
  misc_feature (113)..(113): n is a, c, g, or t
  misc_feature (137)..(137): n is a, c, g, or t
  misc_feature (218)..(218): n is a, c, g, or t
  misc_feature (226)..(226): n is a, c, g, or t
  misc_feature (230)..(230): n is a, c, g, or t
  misc_feature (239)..(239): n is a, c, g, or t
tcctgctgctgcctccaccactgctgtaaattcacccatggtgcattggacactggatcttaaactccagagtntgtttagggaggtnagcacagggctgggggaggtgcggnggggcccagaagaccaggccactnagcccgcgctccaggctgtaacggtccaaaccacggcactggagctgcagggtctgcctagtgggctctgcattccccganagcacgantttngcacatggnagaatggagcccgtggagaaccttctgggggtcggggagaatccctgcctccctttaaaggaatcatgaaggacaga

SEQ ID NO: 1607 - DNA, 344 bp, Homo sapiens
  misc_feature (238)..(238): n is a, c, g, or t
  misc_feature (284)..(284): n is a, c, g, or t
  misc_feature (289)..(289): n is a, c, g, or t
  misc_feature (321)..(321): n is a, c, g, or t
  misc_feature (325)..(325): n is a, c, g, or t
  misc_feature (337)..(337): n is a, c, g, or t
agaactagtctcgagttttttttttttttttttatagctaattattttattacaatgttttcagaattagatctaggtgacataaaatacacaaaagcataaagccatctgaatagtacagtcaacaagcaacaaccagtacaatcagcaataatagagaacttttaactttgtatgtcacagagaatgtatatacctttttaataaaaagcctgaataaaccaataactattaaagnaatcacaaagctgattaaaaatctactattaaaagtgtcatcaggnttagnttgttttacactttgtcctagctaacttttancaancaaattaattcntaatgct

SEQ ID NO: 1608 - DNA, 3119 bp, Homo sapiens
cgcggtatctgcatcgggcctcactggcttcaggagctgaataccctcccaggcacacacaggtgggacacaaataagggttttggaaccactattttctcatcacgacagcaacttaaaatgcctgggaagatggtcgtgatccttggagcctcaaatatactttggataatgtttgcagcttctcaagcttttaaaatcgagaccaccccagaatctagatatcttgctcagattggtgactccgtctcattgacttgcagcaccacaggctgtgagtccccatttttctcttggagaacccagatagatagtccactgaatgggaaggtgacgaatgaggggaccacatctacgctgacaatgaatcctgttagttttgggaacgaacactcttacctgtgcacagcaacttgtgaatctaggaaattggaaaaaggaatccaggtggagatctactcttttcctaaggatccagagattcatttgagtggccctctggaggctgggaagccgatcacagtcaagtgttcagttgctgatgtatacccatttgacaggctggagatagacttactgaaaggagatcatctcatgaagagtcaggaatttctggaggatgcagacaggaagtccctggaaaccaagagtttggaagtaacctttactcctgtcattgaggatattggaaaagttcttgtttgccgagctaaattacacattgatgaaatggattctgtgcccacagtaaggcaggctgtaaaagaattgcaagtctacatatcacccaagaatacagttatttctgtgaatccatccacaaagctgcaagaaggtggctctgtgaccatgacctgttccagcgagggtctaccagctccagagattttctggagtaagaaattagataatgggaatctacagcacctttctggaaatgcaactctcaccttaattgctatgaggatggaagattctggaatttatgtgtgtgaaggagttaatttgattgggaaaaacagaaaagaggtggaattaattgttcaagagaaaccatttactgttgagatctcccctggaccccggattgctgctcagattggagactcagtcatgttgacatgtagtgtcatgggctgtgaatccccatctttctcctggagaacccagatagacagccctctgagcgggaaggtgaggagtgaggggaccaattccacgctgaccctgagccctgtgagttttgagaacgaacactcttatctgtgcacagtgacttgtggacataagaaactggaaaagggaatccaggtggagctctactcattccctagagatccagaaatcgagatgagtggtggcctcgtgaatgggagctctgtcactgtaagctgcaaggttcctagcgtgtacccccttgaccggctggagattgaattacttaagggggagactattctggagaatatagagtttttggaggatacggatatgaaatctctagagaacaaaagtttggaaatgaccttcatccctaccattgaagatactggaaaagctcttgtttgtcaggctaagttacatattgatgacatggaattcgaacccaaacaaaggcagagtacgcaaacactttatgtcaatgttgcccccagagatacaaccgtcttggtcagcccttcctccatcctggaggaaggcagttctgtgaatatgacatgcttgagccagggctttcctgctccgaaaatcctgtggagcaggcagctccctaacggggagctacagcctctttctgagaatgcaactctcaccttaatttctacaaaaatggaagattctggggtttatttatgtgaaggaattaaccaggctggaagaagcagaaaggaagtggaattaattatccaagttactccaaaagacataaaacttacagcttttccttctgagagtgtcaaagaaggagacactgtcatcatctcttgtacatgtggaaatgttccagaaacatggataatcctgaagaaaaaagcggagacaggagacacagtactaaaatctatagatggcgcctataccatccgaaaggcccagttgaaggatgcgggagtatatgaatgtgaatctaaaaacaaagttggctcacaattaagaagtttaacacttgatgttcaaggaagagaaaacaacaaagactatttttctcctgagcttctcgtgctctattttgcatcctccttaataatacctgccattggaatgataatttactttgcaagaaaagccaacatgaaggggtcatatagtcttgtagaagcacagaaatcaaaagtgtagctaatgcttgatatgttcaactggagacactatttatctgtgcaaatccttgatactgctcatcattccttgagaaaaacaatgagctgagaggcagacttccctgaatgtattgaacttggaaagaaatgcccatctatgtcccttgctgtgagcaagaagtcaaagtaaaacttgctgcctgaagaacagtaactgccatcaagatgagagaactggaggagttccttgatctgtatatacaataacataatttgtacatatgtaaaataaaattatgccatagcaagattgcttaaaatagcaacactctatatttagattgttaaaataactagtgttgcttggactattataatttaatgcatgttaggaaaatttcacattaatatttgctgacagctgacctttgtcatctttcttctattttattccctttcacaaaattttattcctatatagtttattgacaataatttcaggttttgtaaagatgccgggttttatatttttatagacaaataataagcaaagggagcactgggttgactttcaggtactaaatacctcaacctatggtataatggttgactgggtttctctgtatagtactggcatggtacggagatgtttcacgaagtttgttcatcagactcctgtgcaactttcccaatgtggcctaaaaatgcaacttctttttattttcttttgtaaatgtttaggtttttttgtatagtaaagtgataatttctggaattagaaaaaaaaaaaaaaaaaaa

SEQ ID NO: 1609 - protein, 739 aa, Homo sapiens
MPGKMVVILGASNILWIMFAASQAFKIETTPESRYLAQIGDSVSLTCSTTGCESPFFSWRTQIDSPLNGKVTNEGTTSTLTMNPVSFGNEHSYLCTATCESRKLEKGIQVEIYSFPKDPEIHLSGPLEAGKPITVKCSVADVYPFDRLEIDLLKGDHLMKSQEFLEDADRKSLETKSLEVTFTPVIEDIGKVLVCRAKLHIDEMDSVPTVRQAVKELQVYISPKNTVISVNPSTKLQEGGSVTMTCSSEGLPAPEIFWSKKLDNGNLQHLSGNATLTLIAMRMEDSGIYVCEGVNLIGKNRKEVELIVQEKPFTVEISPGPRIAAQIGDSVMLTCSVMGCESPSFSWRTQIDSPLSGKVRSEGTNSTLTLSPVSFENEHSYLCTVTCGHKKLEKGIQVELYSFPRDPEIEMSGGLVNGSSVTVSCKVPSVYPLDRLEIELLKGETILENIEFLEDTDMKSLENKSLEMTFIPTIEDTGKALVCQAKLHIDDMEFEPKQRQSTQTLYVNVAPRDTTVLVSPSSILEEGSSVNMTCLSQGFPAPKILWSRQLPNGELQPLSENATLTLISTKMEDSGVYLCEGINQAGRSRKEVELIIQVTPKDIKLTAFPSESVKEGDTVIISCTCGNVPETWIILKKKAETGDTVLKSIDGAYTIRKAQLKDAGVYECESKNKVGSQLRSLTLDVQGRENNKDYFSPELLVLYFASSLIIPAIGMIIYFARKANMKGSYSLVEAQKSKV

SEQ ID NO: 1610 - DNA, 473 bp, Homo sapiens
  misc_feature (398)..(398): n is a, c, g, or t
gcacgagggaaagggtaggaagggtgggaagggagaagcagacatagtcatttatgatttgaaagttggaaatttgtaccatctgtttgagtatatgcacatttaaaaaatatcatatagtaaatgcaaacatgccaagtattttataaagattaataacagacctactcttacctggcagtttacttaacttactgttttgagtcctaaacttagagttgttaatgcttatatataatctaaccaaagagttacccagtagggttttagtttttgaacttttattttcttgttgattataaatcctgattttggaatctattgcgcaaaagaagtttcattttggttacttagacctaagatcacttattaaaaatccttattttctccaagcccancaaacgttgacttctgggcaaacctgaaaacctgaaaatgccactttcatgcagtttgtttgaagttaagtggaa

SEQ ID NO: 1611 - DNA, 376 bp, Homo sapiens
ccatccagttttttatcctcataatcttggctaaatatgcatttttcaaaattatctgttccatactcatagataatgcgtgagtcctgctgggttggtggtgctggctttatcagaggcacaagcagtaacaggagaagtgtagactgcagagtcttcattttagcaaaaatcaaggtgactggaagttaataaactagtggcctgctgactgtgggacaaaactctctttttcccgttgtagcctgttccaaaagttttttgcgggtcttctcaatagatgttcatgtctgtgcattagccccaagtgggagggtgaatgagaaaagctatgtcttgatttcaaactgctgagtaaaatttcagggcccagcag

SEQ ID NO: 1612 - DNA, 6793 bp, Homo sapiens
gtgagcggcgctcggggcgcgctaggcggggagccgagccgggctggcggcaggcggacggggcgggcgcgtgcggcgcgagccgggcgctgaggacaagggccgctggtagggccggccggccggcgggcggagcgccgccgccgacgcacacgaggtgaccaggcattgatgcacccccaggaaggccacgcgctcaggaggccccccccccgctggctgctgctcacatggtgtctgggcccttggcactccggtggtgcgcgtgggcagggcgcggggacatggggcccgacatggagctgcccagccactcgaagcagctcctgctgcagctgaaccagcagaggaccaagggcttcctgtgtgacgtcatcatcatggtggagaactccatcttccgggcccacaagaacgtcctagccgccagcagcatctatttcaagtccctggtcctgcacgacaacctcatcaacctggacacagacatggtcagctccacagtgttccagcagatcttggacttcatctacacaggcaagctgctgcccagcgaccagccagccgagcccaacttcagcaccctcctcactgccgccagctacctccagctgcccgagttggcagccctctgccgccgcaaactcaagcgagccggcaagccctttggctctgggagggcggggtccactggcatggggcggcccccccgcagccagcggctgtccacggcctctgtcatccaagctcggtatcgggggctcgtggatgggcgcaagggggcccacgccccccaggagctcccccaagccaaaggctcagacgatgaactctttcttggtggctctaaccaggatagcgtgcaaggtctgggccgggctgtctgcccagctggcggggaggcgggtctggggggctgcagcagcagcaccaacgggagcagcgggggctgcgagcaggagctgggcttggacctgtccaagaaaagcccacccttgccccctgccaccccaggtccccacctcactcccgatgacgcagcccagctgagcgacagccaacatggctcgccccctgcggcctctgcccctcccgttgccaacagtgcctcttattctgagctggggggcacccctgatgagcccatggatctggagggggccgaggacaaccacctgagcctgctggaggcgcctggtgggcagcctcggaagagcctccggcactccactcggaagaaggagtggggcaagaaggagcctgtggctggctccccctttgagcggagagaagcagggcccaagggtccctgcccgggagaggagggtgagggggtcggggacagggttcccaatggcatcctggctagtggggctggccctagcgggccctatggggagcccccctacccctgcaaggaggaggaggagaacggcaaggatgcaagtgaagacagtgcgcagagcgggagcgaggggggcagcggccacgccagcgcccactacatgtaccggcaggagggctacgagacggtgtcctacggggacaacttgtatgtgtgcattccctgcgccaagggcttccccagctctgagcagctcaatgcgcacgtggagactcacacggaggaagagctgttcatcaaggaagagggggcctacgagacaggcagtgggggtgccgaggaggaggccgaggacctgtcagcacccagtgcggcctacacggctgagccccggcccttcaagtgttcggtctgcgagaagacctacaaggacccagccacgctgcggcagcacgagaagacgcactggctgacacggcccttcccctgcaacatctgtggcaaaatgttcacgcagcgcggcaccatgacgcgtcacatgcggagccacctgggcctgaagcccttcgcctgcgatgagtgtggcatgcgcttcacccgtcagtaccgcctcacggagcacatgcgtgtgcactcgggcgagaaaccttacgagtgccagctgtgcgggggcaagttcacccagcagcgcaacctcatcagccacctgcgcatgcacacctccccctcctagaagccaaagacccgcgggcgccctctgccaccttgctccccgggaacccatggaaggagaagcgaggtgatgcagcagcaggggcaagaccctgggtccagtggaggctccgggtggcccctctggcccccactgcccacacccagagctttaatggacagtccgtaccaagcagagccgagaggagggaagccaggggtcccagcccgtctacctccccatcccacccaggcccccagctccccgcgggggccaccgcagggcctgtgggctgggtcacgtgggtctcgctgggacctggtccctttgttgcaggcggcttggagaaagggcagtgggacgctggccacggccagggtggtgtcgggagcaggcctcaccccgctggccgtgtctgtgtgtgtgcacgtgtgcttgtgtctgtgcgggcgcgtgcagccctggttctgcagggaaaaggtgctgggggtgcagatccctccctccttgagccagggtggcactgttcactggcgctgggacagtcagggtgaccccaccgcctacctctctacaactaaagagccctctgggcctgtgttgctgttattcctactgatctgttcctctgtttttctttttgatttttgttttttaaaccaaaacagacaatagcttattttctttccgccccctccggggctgagcctgggtctgaagactgaatgtaacaggggccgctggcactcctgcgcgtcccccggctctggcgctgcaggggtgtcggcgcgccacctctccaggccccagaagcccttcttgcccaaaggcttccctggtccctgagccctgcctcggctgcctcaggggagagtgcttttcctgtagtttccaaggaatattctttgtttagaggtacttgttttttattaagagaaaaaccagtgtaacgtttatgtgactgtttgaactggaaggtctggggttccggggggtggggggaggctagactcaatgccggggccgtcggtactcttgttttcatttgtgtgtgcgtgcgtgtgtgtgtgtgtatgtgcgtatgtgtgtgtctatgtgtggtgtgtgccgtatgcatgggcagatgtttcgctttccctccttcctcgctgaacaaggtggagacttctgaccttttgctacctcttgaattcatgacaacgatatgttggtgactggcagtggaagcccttgacactcttgttttccttcgcttagcacctaggaagtcgtgtgcaggagccagcagggcgccaagtggcccagtgcctgcagctcacctgtgggttttccctttgagcctttggccacatccacctcgaggggaccctggcaccccgggcacacaaacctctgtggtataggtgaggggtgtgaggccccagcctggagccaggcactgggtgctgacaggggaaccatgaggagggtggcaggtctttgcagctcccggccagggtgaggcggaagtgagccctcatcctgccactcctatcctccattcctgcaagagttttaagcttgagagagctgaccacagggccccccggggaacagggatggcacttccctgagcagtcctggcccccggccactgtctcggggcccacctctcgcccctcatcttggtaattagccagcctcagatacttctgtgggccctgaagtgggctctcaaggtcagaccaaggttgctgatctcagtcccactgtcttcagccagctgaagctgtggggctgggctggcagcctttattgtcatcttgcttcaccatttttttttctctctcttttcattctattttaagtttagaccaaaaaaatacagagtcatcccctacccccacccctctagagaccctccagctaaaaacagagcctgagttcagggacccaagtggtgagcggcgtcttttgggggtgagggagcttgggtagatgaggctcctggctgagccctccctgtggtgatcccagcctaagatggcccctcttccctcctggtgggagacagaggactggaccctgggtctcaggttccagcaagtcaggctagggacctggggggaggagacccatggacttcacccatactcagtgagggggctcctgccgtcctgacgccaccccgccccatcagcacttaagccacatgacacaaagtctgtaccgcacgggaaatgttcacgcgcctggccgtgtgcatggcctcccgggctgtgggcagccgcatctgtgaggtgactcgtgaaagtaggtgattcctttgcagaacttcagggactgggagcagaggcccctcactcaacgacgtttgtgcgacatagtattgtatccaccttagtattgtatcgagccttttctgtgttttaatgagaaagcagaacactagtttcctatttaagactttaagggtttgtggggcggggcgggattaacacaacatttggctttgttttctttttcctttgatttccacatcaggtgtgtgcgagtgtgtgtgtgtggagatgttaagagcctcacaaggaaactgggttattggaggccaaggcggcttacagttctctgcgttcgtcacttaattcctgaatgtttcagagaaacaggaatcagaaaatagcagatatcatgtaggaaagagaggataaacaaagaaaaaagaaaaaaaaataagctcatacccaaattcacaaagcctattttttaaaccaaagcacattttgaatgagtatggaacctccatgggctcagaaaaaagatgctaatatatttatctcattgtttacataagcttttacagtttcagacctcagcagctgtaaggccagtccagggaaccctcccctgctgctggaaacccttctgagttggccctggagtggctcacgggcagagaagggtagccctggggctgggggagggattggaagcctccctggagtcacctgagccctcgtccccattcccagggcccctccaagcccagctggcaccaaagagcttgggcccgtgctgaccagcccccaaggccctctggccggaccatgctggtcctgaccagctagcctacgcggggatggccgtcagttctggccacaggacccgagtctgggcttgggtccccctgctgctctgcccgtgacccttggggatgggttgatgcgagggtcccactcaagccaaaaagccgggacctttgcgcagctctgtcgactctggtgggtccccactcctggggccccctaaccccaccccaggcagcggaaggggctgactgggtctggtccttaccaacatagacggtgcaaacactcttaacagtgttgtttttgtatcaatatgtttgtgcagtgatgaatgtatttatttctcagacttggggcgagtgagcgggtggcaggccgggctccgccactgcatgctcccgccggaccgagccccagcaagggctcctccaggattgcaaaaaaaaaggaagagaaaagatgaacctttaagcaaataagaatctcagagactcgcagcatagccatacacctcagcctgtgaaatgaacgatccggaccctcaccaactttccccacctcaggcagccctgtgtgtttaccgttcatcaccactcgggggcaccgggccgcccacccactcccaaaatccgtcagtattcactggacctcaggccctgtgcaggagtgcgatccgggctgggccgctgggcaggctgaccccctgccctcctgcggccatcctgagttggggtgaggcctgggcagccggagggcagggctcagggagcaggaggctgcatccgtccacccccaggcgtgggggacaaaagccaaaggtgccaggccttagagcagacaagggctctcagccctggcatgccccctaaagggaccaaggtcctcctatttcccagaaccccgttggggcagatgttactgaacctgtgaatcagacgccaggagtgagggctggggagggacctaactggagcctcagtctgacattccacgccggggtgggggtgggcatgagcggtgggaactgaggctgcccaggacccccttcctaggatgccccggcttcagtcaccccactttaactttctaccaggaccccctccccctacctcaccttgctatttattgctgtaatttattgacctcaaaaatgctgcataacagacctcactggggcagggaggatccccagggctcccaccctccacttggcgggccccgtggggccaggtgctgaggggagcctctctaccccacccatcactagcttccctctgccctctcccaccccgggggggacccaggttgggcactggctcatttctcgcaaatacctcgaaggggaggggggagggatggggttatagctgttttgtttaattggaactggaagagggatcatgttttgttttatgcccttcccagaaggggggagggacaccgggatcgcactcctgtactggccaccgccgctgtcacttgtcacattgagttcatgtcccttgagagtttgtataaattcaggtcagagctgcagctacacagctgcccagtgtcatagaaaagcaattcaccaacgactgatctctccattcagaagtgtgcagtcttaaatgtacagcgataagaaactgttattttatgatcttttcattaaaagcttgattg

SEQ ID NO: 1613 - protein, 638 aa, Homo sapiens
PGIDAPPGRPRAQEAPPPLAAAHMVSGPLALRWCAWAGRGDMGPDMELPSHSKQLLLQLNQQRTKGFLCDVIIMVENSIFRAHKNVLAASSIYFKSLVLHDNLINLDTDMVSSTVFQQILDFIYTGKLLPSDQPAEPNFSTLLTAASYLQLPELAALCRRKLKRAGKPFGSGRAGSTGMGRPPRSQRLSTASVIQARYRGLVDGRKGAHAPQELPQAKGSDDELFLGGSNQDSVQGLGRAVCPAGGEAGLGGCSSSTNGSSGGCEQELGLDLSKKSPPLPPATPGPHLTPDDAAQLSDSQHGSPPAASAPPVANSASYSELGGTPDEPMDLEGAEDNHLSLLEAPGGQPRKSLRHSTRKKEWGKKEPVAGSPFERREAGPKGPCPGEEGEGVGDRVPNGILASGAGPSGPYGEPPYPCKEEEENGKDASEDSAQSGSEGGSGHASAHYMYRQEGYETVSYGDNLYVCIPCAKGFPSSEQLNAHVETHTEEELFIKEEGAYETGSGGAEEEAEDLSAPSAAYTAEPRPFKCSVCEKTYKDPATLRQHEKTHWLTRPFPCNICGKMFTQRGTMTRHMRSHLGLKPFACDECGMRFTRQYRLTEHMRVHSGEKPYECQLCGGKFTQQRNLISHLRMHTSPS

SEQ ID NO: 1614 - DNA, 536 bp, Homo sapiens
tgagtaaacatccttctaataatgaacagaccaataatgtcttaagagagaaaaagaacaatcttttcctttttgctgtttctggagagagctgtttgaatttggaaacccatgttggctgtcccaaatatgagatttggcatctttcttttgtggtggggatgggttttggccactgaaagcagaatgcactggcccggaagagaagtccacgagatgtctaagaaaggcagtaggccccaaagacaaagacgagaagtacatgaagatgcccacaagcaagtcagcccaattctgagacgaagtcctgacatcaccaaatcgcctctgacaaagtcagaacagcttctgaggatagatgaccatgatttcagcatgaggcctggctttggaggccctgccattcctgttggtgtggatgtgcaggtggagagtttggatagcatctcagaggttgacatggactttacgatgaccctctacctgaggcactactggaaggacgagaggctgtctttttcaagcaccaacaacct

SEQ ID NO: 1615 - DNA, 3053 bp, Homo sapiens
ctcctcccctccccctccgccctcctccgctccgggccagcgcggcggcggcggcggcggcagcagcaggagcagccccggctgcgggtcgcgacggcggcggggcgccccctcccccgtgccggggcgcggcggagggatgtggggccttgcgggaggaaggcttttcggcatcttctcggccccggtgctggtggctgtggtgtgctgcgcccagagtgtgaacgatcccgggaacatgtcctttgtgaaggagacggtggacaagctgttgaaaggctacgacattcgcctaagacccgacttcgggggtcccccggtctgcgtggggatgaacatcgacatcgccagcatcgacatggtttccgaagtcaacatggattataccttaaccatgtattttcaacaatattggagagataaaaggctcgcctattctgggatccctctcaacctcacgcttgacaatcgagtggctgaccagctatgggtgcccgacacatatttcttaaatgacaaaaagtcatttgtgcatggagtgacagtgaaaaaccgcatgatccgtcttcaccctgatgggacagtgctgtatgggctcagaatcaccacgacagcagcatgcatgatggacctcaggagataccccctggacgagcagaactgcactctggaaattgaaagctatggctacaccacggatgacattgagttttactggcgaggcggggacaaggctgttaccggagtggaaaggattgagctcccgcagttctccatcgtggagcaccgtctggtctcgaggaatgttgtcttcgccacaggtgcctatcctcgactgtcactgagctttcggttgaagaggaacattggatacttcattcttcagacttatatgccctctatactgataacgattctgtcgtgggtgtccttctggatcaattatgatgcatctgctgctagagttgccctcgggatcacaactgtgctgacaatgacaaccatcaacacccaccttcgggagaccttgcccaaaatcccctatgtcaaagccattgacatgtaccttatgggctgcttcgtctttgtgttcctggcccttctggagtatgcctttgtcaactacattttctttggaagaggccctcaaaggcagaagaagcttgcagaaaagacagccaaggcaaagaatgaccgttcaaagagcgaaagcaaccgggtggatgctcatggaaatattctgttgacatcgctggaagttcacaatgaaatgaatgaggtctcaggcggcattggcgataccaggaattcagcaatatcctttgacaactcaggaatccagtacaggaaacagagcatgcctcgagaagggcatgggcgattcctgggggacagaagcctcccgcacaagaagacccatctacggaggaggtcttcacagctcaaaattaaaatacctgatctaaccgatgtgaatgccatagacagatggtccaggatcgtgtttccattcactttttctcttttcaacttagtttactggctgtactatgttaactgagtgactgtacttgatttttcaaagacttcatttaacactgagtgaaatattactctgcctgtcaagtttttatacctgtacacacacagacacacaagcagacacacacatatatacatacgcaattgtatatatatgtgaactttctcagcatatatataaaatacacgtgtatatgaggatgtatgtgtatatgtttatacacacaggagtcagtgcccatgtgtatggaagacaaatacacatacatatatacattttgcagctatggacaatttaccacaggatgcatattaaagaaagtcatagtttttttcttttttaattgaaagggacaagtatcatctaaatattatgccttgagaatgagggcgtgaaacacaatatcatccccaaatgtgtcttgtattatcataagttagatgttttagtttaaaaatcagaaagacattcttagttaatctttgaaaactcatacagtggtattgctagtttaaaatgagtcacttacttcatatcctctcgttcagtttagtaagcaaaggcttcttggcttctctggtgatggggtttgttttcatcgggcatacgttttctgcaatggtttagtggctggggtgagccactggcagtgtgcttacctgttgtctgaaacatagatagatcccacgttgatgtctgaacgaccgtcttttgaaaactcatcgggagtgaatggcatctcgttgtaagtactctaatatacagtgtgtagtttgtttctgttgttcacttggagtggatccagcttcactgtcatgtgcgaacacagtgacacgtttggccagtgacatttcaatcactgaaaatgtgctctacatctcgtatggatttctaggcctgatatccaacagaaagcatagacgtctcaggttattcgttactctaaggtaaaaccatctaggatgattttcccccttgcagttatgttatcattcttataacattgtatgttaatagaaaatatatttgcataatatgcatatatatgtatatttaccaagattttgtttcttacgcttgctatcatggcagcatgcgatgtcatattttcctttatgtgatgtaactactttctgttatctagaaattaagattgaagctaaaacacttctactgttcaatttcagaaactaagaatcatcctcatgcctttatttctgtatctgacatatttcataagcacatccaactactcctagactgactaggattctgcaggaacatgacccgtacacaccacgcgtcacccaacgacccatgaccgttctctgaggcaaaggagggcaacctgacagcaaacacagtcactgttggttccttctgatccacagcctcatcagtatttggactttttaaagctcgtagaaacaagacaaggtgcaccggtttcatagacgcaaccttaacttactatttagatgagatctttctaaagaaaaaaaaaaaaaaa

SEQ ID NO: 1616 - protein, 473 aa, Homo sapiens [sequence omitted]

SEQ ID NO: 1617 - DNA, 589 bp, Homo sapiens
  misc_feature (506)..(506): n is a, c, g, or t
gagctcaaggatccttaattaaattaattccccccccccccgagcggcggctcctgcagcggtggtcggctgttgggtgtggagtttcccagcgcccctcgggtccgaccctttgagcgttctgctccggcgccagcctacctcgctcctcggcgccatgaccacaaccaccaccttcaagggagtcgaccccaacagcaggaatagctcccgagttttgcggcctccaggtggtggatccaatttttcattaggttttgatgaaccaacagaacaacctgtgaggaagaacaaaatggcctctaatatctttgggacacctgaagaaaatcaagcttcttgggccaagtcagcaggtgccaagtctagtggtggcagggaagacttggagtcatctggactgcagagaaggaactcctctgaagcaagctccggagacttcttagatctgaagggagaaggtgatattcatgaaaatgtggacacagacttgccaggcagcctgnggcagagtgaagagaagcccgtgcctgctgcgcctgtgcccagcccagtggccccggtcccagtgccatccagaagaaatccc

SEQ ID NO: 1618 - DNA, 946 bp, Homo sapiens
cttctgactgggctcaggctgacaggtagagctcaccatggcttcttgtgtccttgtcccctccccatcacagctgtggtgcagtccaccgtctccagtggctatggcggtgccagtggtgtcggcagtggcttaggcctgggtggaggaagcagctactcctatggcagtggtcttggcgttggaggtggcttcagttccagcagtggcagagccattgggggtggcctcagctctgttggaggcggcagttccaccatcaagtacaccaccacctcctcctccagcaggaagagctataagcactaaagtgcgtctgctagctctcggtcccacagtcctcaggcccctctctggctgcagagccctctcctcaggttgcctgtcctctcctggcctccagtctcccctgctgtcccaggtagagctggggatgaatgcttagtgccctcacttcttctctctctctctataccatctgagcacccattgctcaccatcagatcaacctctgattttacatcatgatgtaatcaccactggagcttcactgttactaaattattaatttcttgcctccagtgttctatctctgaggctgagcattataagaaaatgacctctgctccttttcattgcagaaaattgccaggggcttatttcagaacaacttccacttactttccactggctctcaaactctctaacttataagtgttgtgaacccccacccaggcagtatccatgaaagcacaagtgactagtcctatgatgtacaaagcctgtatctctgtgatgatttctgtgctcttcactgtttgcaattgctaaataaagcagatttataatacatatattcttttactttgccttgctttggggccaaagttttgggcttaaacttttttatctgataagtgaatagttgtttttaaaagataatcta

SEQ ID NO: 1619 - protein, 564 aa, Homo sapiens
MASTSTTIRSHSSSRRGFSANSARLPGVSRSGFSSVSVSRSRGSGGLGGACGGAGFGSRSLYGLGGSKRISIGGGSCAISGGYGSRAGGSYGFGGAGSGFGFGGGAGIGFGLGGGAGLAGGFGGPGFPVCPPGGIQEVTVNQSLLTPLNLQIDPTIQRVRAEEREQIKTLNNKFASFIDKVRFLEQQNKVLETKWTLLQEQGTKTVRQNLEPLFEQYINNLRRQLDSIVGERGRLDSELRGMQDLVEDFKNKYEDEINKRTAAENEFVTLKKDVDAAYMNKVELQAKADTLTDEINFLRALYDAELSQMQTHISDTSVVLSMDNNRNLDLDSIIAEVKAQYEEIAQRSRAEAESWYQTKYEELQVTAGRHGDDLRNTKQEIAEINRMIQRLRSEIDHVKKQCANLQAAIADAEQRGEMALKDAKNKLEGLEDALQKAKQDLARLLKEYQELMNVKLALDVEIATYRKLLEGEECRLNGEGVGQVNISVVQSTVSSGYGGASGVGSGLGLGGGSSYSYGSGLGVGGGFSSSSGRAIGGGLSSVGGGSSTIKYTTTSSSSRKSYKH

SEQ ID NO: 1620 - DNA, 549 bp, Homo sapiens
  misc_feature (2)..(2): n is a, c, g, or t
  misc_feature (47)..(47): n is a, c, g, or t
  misc_feature (119)..(119): n is a, c, g, or t
  misc_feature (124)..(124): n is a, c, g, or t
  misc_feature (518)..(518): n is a, c, g, or t
  misc_feature (536)..(536): n is a, c, g, or t
cnccatttttttttttgcgaagtgggctcgtgggttggcagtatganaaattgtaatggcccgactgttgagtgagggggagcaggggatcccaacggctttgcgctgcctttgcgcanagccnggcgggcggccacgtcgcggcctggctggggtaggagagggcggtccccagtgcagttgggtgaactaccgttgcacactggagtttctggtgtctttgcttggaactgacctagctcgtggcagggggaactcggctagcggccccacagcccctgctgactcaaaacaactgagttgtaagacgttcatcgccgtgttatccttgagtaaagaatgaactctggaagcccagccagggacaatgcaccttcacagagattctgcactaatctgagtgaaggtctaaggtttggaaatcttcccccttcatggagagaagctttggtatgggctgtcatgcttagacagtgattcctgcaactttgaaccttcaggcttgggaaaaggtgganagcccatgcctggttccnccttcccttgctt

SEQ ID NO: 1621 - DNA, 377 bp, Homo sapiens
aattcggtacgaggctggggttcaggcgggcagcagctgcaggctgaccttgcagcttggcggaatggactggcctcacaacctgctgtttcttcttaccatttccatcttcctggggctgggccagccagcgagccccaaaagcaagaggaaggggcaagggcggcctgggccctggtccctggccctcaccaggtgccactggacctggtgtcacggatgaaaccgtatgcccgcatggaggagtatgagaggaacatcgaggagatggtggcccagctgaggaacagctcagagctggcccagagaaagtgtgaggtcaacttgcagctgtggatgtccaacaagaggagcctgtctccctggggctacagcat

SEQ ID NO: 1622 - DNA, 4620 bp, Homo sapiens
ccggaggatgtgcagctgcggcggcggcgccggctacgaagaggacggggacaggcgccgtgcgaaccgagcccagccagccggaggacgcgggcagggcgggacgggagcccggactcgtctgccgccgccgtcgtcgccgtcgtgccggccccgcgtccccgcgcgcgagcgggaggagccgccgccacctcgcgcccgagccgccgctagcgcgcgccgggcatggtcccctcttaaaggcgcaggccgcggcggcgggggcgggcgtgcggaacaaagcgccggcgcggggcctgcgggcggctcgggggccgcgatgggcgcggcgggcccgcggcggcggcggcgctgcccgggccgggcctcgcggcgctagggcgggctggcctccgcgggcgggggcagcgggctgagggcgcgcggagcctgcggcggcggcggcggcggcggcggcggcccggcgggcggagcggcgcgggcatggccgcgcgcggccggcgcgcctggctcagcgtgctgctcgggctcgtcctgggcttcgtgctggcctcgcggctcgtcctgccccgggcttccgagctgaagcgagcgggcccacggcgccgcgccagccccgagggctgccggtccgggcaggcggcggcttcccaggccggcggggcgcgcggcgatgcgcgcggggcgcagctctggccgcccggctcggacccagatggcggcccgcgcgacaggaactttctcttcgtgggagtcatgaccgcccagaaatacctgcagactcgggccgtggccgcctacagaacatggtccaagacaattcctgggaaagttcagttcttctcaagtgagggttctgacacatctgtaccaattccagtagtgccactacggggtgtggacgactcctacccgccccagaagaagtccttcatgatgctcaagtacatgcacgaccactacttggacaagtatgaatggtttatgagagcagatgatgacgtgtacatcaaaggagaccgtctggagaacttcctgaggagtttgaacagcagcgagcccctctttcttgggcagacaggcctgggcaccacggaagaaatgggaaaactggccctggagcctggtgagaacttctgcatgggggggcctggcgtgatcatgagccgggaggtgcttcggagaatggtgccgcacattggcaagtgtctccgggagatgtacaccacccatgaggacgtggaggtgggaaggtgtgtccggaggtttgcaggggtgcagtgtgtctggtcttatgagatgcagcagcttttttatgagaattacgagcagaacaaaaaggggtacattagagatctccataacagtaaaattcaccaagctatcacattacaccccaacaaaaacccaccctaccagtacaggctccacagctacatgctgagccgcaagatatccgagctccgccatcgcacaatacagctgcaccgcgaaattgtcctgatgagcaaatacagcaacacagaaattcataaagaggacctccagctgggaatccctccctccttcatgaggtttcagccccgccagcgagaggagattctggaatgggagtttctgactggaaaatacttgtattcggcagttgacggccagccccctcgaagaggaatggactccgcccagagggaagccttggacgacattgtcatgcaggtcatggagatgatcaatgccaacgccaagaccagagggcgcatcattgacttcaaagagatccagtacggctaccgccgggtgaaccccatgtatggggctgagtacatcctggacctgctgcttctgtacaaaaagcacaaagggaagaaaatgacggtccctgtgaggaggcacgcgtatttacagcagactttcagcaaaatccagtttgtggagcatgaggagctggatgcacaagagttggccaagagaatcaatcaggaatctggatccttgtcctttctctcaaactccctgaagaagctcgtcccctttcagctccctgggtcgaagagtgagcacaaagaacccaaagataaaaagataaacatactgattcctttgtctgggcgtttcgacatgtttgtgagatttatgggaaactttgagaagacgtgtcttatccccaatcagaacgtcaagctcgtggttctgcttttcaattctgactccaaccctgacaaggccaaacaagttgaactgatgagagattaccgcattaagtaccctaaagccgacatgcagattttgcctgtgtctggagagttttcaagagccctggccctggaagtaggatcctcccagtttaacaatgaatctttgctcttcttctgcgacgtcgacctcgtgtttactacagaattccttcagcgatgtcgagcaaatacagttctgggccaacaaatatattttccaatcatcttcagccagtatgacccaaagattgtttatagtgggaaagttcccagtgacaaccattttgcctttactcagaaaactggcttctggagaaactatgggtttggcatcacgtgtatttataagggagatcttgtccgagtgggtggctttgatgtttccatccaaggctgggggctggaggatgtggaccttttcaacaaggttgtccaggcaggtttgaagacgtttaggagccaggaagtaggagtagtccacgtccaccatcctgtcttttgtgatcccaatcttgaccccaaacagtacaaaatgtgcttggggtccaaagcatcgacctatgggtccacacagcagctggctgagatgtggctggaaaaaaatgatccaagttacagtaaaagcagcaataataatggctcagtgaggacagcctaatgtccagctttgctggaaaagacgtttttaattatctaatttatttttcaaaaattttttgtatgatcagtttttgaagtccgtatacaaggatatattttacaagtggttttcttacataggactcctttaagattgagctttctgaacaagaaggtgatcagtgtttgcctttgaacacatcttcttgctgaacattatgtagcagacctgcttaactttgacttgaaatgtacctgatgaacaaaacttttttaaaaaaatgttttcttttgagaccctttgctccagtcctatggcagaaaacgtgaacattcctgcaaagtattattgtaacaaaacactgtaactctggtaaatgttctgttgtgattgttaacattccacagattctaccttttgtgttttgttttttttttttacaattgttttaaagccatttcatgttccagttgtaagataaggaaatgtgataatagctgtttcatcattgtcttcaggagagctttccagagttgatcatttcccctcatggtactctgctcagcatggccacgtaggttttttgtttgttttgttttgttctttttttgagacggagtctcactctgttacccaggctggaatgcagtggcgcaatcttggctcactttaacctccacttccctggttcaagcaattcccctgcctttgcctcccgagtagctgggattacaggcacacaccaccacgcccagctagtttttttgtatttttagtagagacggggtttcaccatgcaagcccagctggccacgtaggttttaaagcaaggggcgtgaagaaggcacagtgaggtatgtggctgttctcgtggtagttcattcggcctaaatagacctggcattaaatttcaagaaggatttggcattttctcttcttgacccttctctttaaagggtaaaatattaatgtttagaatgacaaagatgaattattacaataaatctgatgtacacagactgaaacacacacacatacaccctaatcaaaacgttggggaaaaatgtatttggttttgttcctttcatcctgtctgtgttatgtgggtggagatggttttcattctttcattactgttttgttttatcctttgtatctgaaatacctttaatttatttaatatctgttgttcagagctctgccatttcttgagtacctgttagttagtattatttatgtgtatcgggagtgtgtttagtctgttttatttgcagtaaaccgatctccaaagatttccttttggaaacgctttttcccctccttaatttttatattccttactgttttactaaatattaagtgttctttgacaattttggtgctcatgtgttttggggacaaaagtgaaatgaatctgtcattataccagaaagttaaattctcagatcaaatgtgccttaataaatttgttttcatttagatttcaaacagtgatagacttgccattttaatacacgtcattggagggctgcgtatttgtaaatagcctgatgctcatttggaaaaataaaccagtgaacaatatttttctattgtacttttcgaaccattttgtctcattattcctgttttagctgaagaattgtattacatttggagagtaaaaaacttaaacacgaaaaaaaaaaaaaaaaaaaaaaaaaaaaaaaaaaaaaaaaaaaaaaaaaaaaaaaaaaaaaaaaaaaa

SEQ ID NO: 1623 - protein, 802 aa, Homo sapiens
MAARGRRAWLSVLLGLVLGFVLASRLVLPRASELKRAGPRRRASPEGCRSGQAAASQAGGARGDARGAQLWPPGSDPDGGPRDRNFLFVGVMTAQKYLQTRAVAAYRTWSKTIPGKVQFFSSEGSDTSVPIPVVPLRGVDDSYPPQKKSFMMLKYMHDHYLDKYEWFMRADDDVYIKGDRLENFLRSLNSSEPLFLGQTGLGTTEEMGKLALEPGENFCMGGPGVIMSREVLRRMVPHIGKCLREMYTTHEDVEVGRCVRRFAGVQCVWSYEMQQLFYENYEQNKKGYIRDLHNSKIHQAITLHPNKNPPYQYRLHSYMLSRKISELRHRTIQLHREIVLMSKYSNTEIHKEDLQLGIPPSFMRFQPRQREEILEWEFLTGKYLYSAVDGQPPRRGMDSAQREALDDIVMQVMEMINANAKTRGRIIDFKEIQYGYRRVNPMYGAEYILDLLLLYKKHKGKKMTVPVRRHAYLQQTFSKIQFVEHEELDAQELAKRINQESGSLSFLSNSLKKLVPFQLPGSKSEHKEPKDKKINILIPLSGRFDMFVRFMGNFEKTCLIPNQNVKLVVLLFNSDSNPDKAKQVELMRDYRIKYPKADMQILPVSGEFSRALALEVGSSQFNNESLLFFCDVDLVFTTEFLQRCRANTVLGQQIYFPIIFSQYDPKIVYSGKVPSDNHFAFTQKTGFWRNYGFGITCIYKGDLVRVGGFDVSIQGWGLEDVDLFNKVVQAGLKTFRSQEVGVVHVHHPVFCDPNLDPKQYKMCLGSKASTYGSTQQLAEMWLEKNDPSYSKSSNNNGSVRTA

SEQ ID NO: 1624 - DNA, 386 bp, Homo sapiens
atgagatgtcagtgacagcgcagggccgctcccagggggtgggaggaggaagtgaacccctcctcctcaggccccagctgccccacaaacaggaaactggccaggcacctacggcctgagactaggaacttcagccaaccttccctcacccgcatcccagaggggtgcctctctctccctcctggcggggttttcccctctcaaatctccccgcatccccacgcgcaacagagccaaaagtgctggggcgggagcgggggccgggaggtaggggaaagcggtcgggggaacgctggacctgggctccaagtgtaggtctgggccccaaatgccccatttcccccttcctgggggcgggcaagggacagggaggttgtcgggaccac

SEQ ID NO: 1625 - DNA, 383 bp, Homo sapiens
taccaatctgaagggggagctgccgggagttggagcctgcgatgttcgagaccatgctgctgttctgcccgctgcggaacgggctgatcgtggaggagggacaacgctgccaccgcttcgcctgcaacacgtgcccctacgtgcacaacatcacccgcaagtaacaaatcggaagtacccaaaactgagagaagtggatgatgtgcttggtggagcagctgcctgggagaatgttgactctactgcagagtcgtgtcccaaatgcgaacatcctcgtgcttacttcatgcagcttcagacccgctctgcagatgagccgatgaccaccttctacaagtgctgcaatgctcagtgtggacaccgctggagggattagggccagg

SEQ ID NO: 1626 - DNA, 489 bp, Homo sapiens
ggcacgagggaggtgcaacgaacccggggggcaaacggactggggccaagagccgggagcgcgggcgcaaaggcaccagggcccgcccagggcgccgcgcagcacggccttgggggttctgcgggccttcgggtgcgcgtctcgcctctagccatggggtccgcagcgttggagatcctgggcctggtgctgtgcctggtgggctgggggggtctgatcctggcgtgcgggctgcccatgtggcaggtgaccgccttcctggaccacaacatcgtgacggcgcagaccacctggaaggggctgtggatgtcgtgcgtggtgcagagcaccgggcacatgcagtgcaaagtgtacgactcggtgctggctctgagcaccgaggtgcaggcggcgcgggcgctcaccgtgagcgccgtgctgctggcgttcgttgcgctcttcgtgaccctggcgggcgcgcagtgcaccacctgcgtgggcccgggcccg

SEQ ID NO: 1627 - DNA, 111084 bp, Homo sapiens
agcttgcccaactagagaaaggagtactacagttgaggcggtgctcattgctgtgtcctccccacatgaccaagtggaatttctcaagagcaaggtcaaagtagtctcacagcagagtccccaacccacccaacccatcgtgtctacagtcagccctatggccagtgcccttccttatttcctaggtcacttctcctcaccctctccaacacgacccccaggccagacctctgcctagtccttctccacagacctcacagcctcttcaagcgattaatttaatctacgtaacacatgcctagcagagcacctactagaagcccagtgcatcctaaacactttgaaaaccctaacttgcttattaactgattttccagatggagttagagttccctgaagaggaatcacatcacgtcaccctcctgctcaaaacccactgccagtgcctggcgcatggaataaaatccaaactgtcatccctgccgtggcccgcgaggccaagctgctccggccccagcctggctcctccacctgctcccaccctctcttggtggcacttatcattgtctaaaatgatcttcagtttcactggtcacctgactaggtcagctccacaagagccgggaaccttgctgcagcactcctgccccaggcacactgcacagcaacagtgagaacaaaccctcgtacagcgtgtgccgggttgggcactgctccaggcatactgtgggtaaatttgttttctcacaacaatccaaacagggaggtgattatcagcctcactttacagatgtggaaactgaggtggatggctgggtgcggtggctcacgcctgtaatcccagaactttggaaggctgaggcgggtggatcacttgaggtcaggagttcaagaccagcctggccaacatagtgaaacccatctctactaactaaaaatacaaaaattagctgggcgtggcagtgggtgccagtaatcccagctacttgggaggctgaggcaggagaactgcttgaacccaggaggcggaggttgcagtaagccaagatcacaccactgcactccagcctgagagacagagggagatggcgtctcaaaaaaaaaagaaaagaaaagaaacgaaactgaggcagagaggttcaattactggcctgaggtcagacaacttatttaagtgccaagaccaggatgtaaatcaggcagcctgatccaggatcgttgtttttttaccccgtgatatgctgccactgcacaagaaatgtctgaataagtaaaccccggcagatgtttgctgaatacacaaatgaaactagggcagggggttgtcaggaaaggcttcctgaaggaggtggcacaagatctgatccttcaacaatggacaggatgtagacaggcaagatggcgagagaaaggacaagaattccactgtggtgaacgagagctgacacccatctgccaagtgtgtcacatcccccagaaaaatgctcatttctcccaccctctgaacccacccggggcactctacatgcattgccaaagcctacagacacctaccacaggtcactttgccttcagaggaaggtctggcgggctctgactgctgctggggtgcggctggggcccctctccgccgccgtctggcaccaccactgggccggccccgactccgccgctgccgcttggttgggggggagcctgaggggaaaaaaatggggcaagttgaggaccaggatgacagctagagtgcccaggtgtatgcctggaaaagaactcaaggtgttctcggtgctgagaccctgagtgagccagtctgcctcccttcttcagtggccctgtctaaaagatgaagagtaccatctagcatcatctagaagggcaaatgagtacaccccagcacgctgcagcaggctcactccaggtgtgatgtgaccctagagaaatccctgcacacttacaccaggagacacacacgacaaccgccaccagggcattgtttatcatgatgaaaacctgagaacaacatatctggcaagaagaaacaggaatatagggagatgtccaggatagactgtttaaggaaataaagcaagatacaaaataagtgtctacagtgtgctgtactttgcataaggagggaaattaagattatatatatctgcaaaatgaaacactagaagcacagactagaaatgaatgaattgggggtgaggggcacccagcagtagaaatgacatgtctaaaaatacttttcatacttttttttttgagaccgagtttcgctcttgttgctcaggctggagtgcaatggcacaatcttggctcactgcaatctccgcctcccgggttcaagcaattctcctgcctcaggttcccaagtaaccgggattacaggtgtctgccacgacaaccggctaattttttgtattttaagtagagatgggtttcaccatgttggccaggctggtctcaaactcctgacctcaagtgatccacccgcctcggcctcccaaagtgctgggattatgggcattgagtcaccaagcccagccccacactttagttttgacttttgactcatataactgatttacacacttaaaaagttaaaatgaaataaaccataaaattaacacaaataggccgcacacggtgtggctcccgcctacaatcccagcacttttggaaggccgaggtgggtggatcacttgagatcaggagttcgagaccagtttgaccaacatggttgaaaccctgtctctactaaaaatacaaaaatcagctgggcgtggtggcgcctacctgtaatcccagctactggggaagctgaggcaggagaattgcttgaacccaggagctggaggctgcagtgagccgagattgtgccactgcactccagccagggtgacagtgtgagaccctgtctcaaaaaaaaaaaaaaaaaaaaattaaacacaaacagaagaaaatgaacctggtcggatgttgtggttcatgtctgtaatcccagcctacgccctaggagttcaagaccaacctggaacccgggcaacatggaaaaacccgtctctattaaaataaaatgtaaaaaaattagccgggtgtggtagcacgtgcctgtagtcccagctacttgggaggctgaggtgggagggctgcttgagcccaggagatctaggctgcagtaagcagtgtttgcgccactggactccagcctgggaaacagagctagaccctcaaagggagaagggagaagaaaaggaaggaaggaagggagagagggacggagggagggagggagggagggaaggaggaagagagggagggaggaagggagggaggggattgtatacataattggtaacaggaatactcagatgaaacaattattcaagtaacttgaagaacattctgactgtaaaatctcaatgggatatgctcagagaacaagaaacacaaataaaatctatgtttcattcactagatacagtcagcagttgtactgactttgttattttgatgctatttaattactgttgtaaaataaatcaaacaaacccacatcttaatgttattaagaggaaagacttttagtataaaaaagtctggctggggctgggtgcagtggctaacacctataatcccagcattctgggaggccgaggcgggcggatcacctcaagtcgggagttcgagaccagcctgaccaacatggagaaaccctgtctccactaaaaatacaaaattagtcgggcgtggtggcacatgcctgtaatcccagctactcaggaggctgaggcaggagaatcgcttgaacccgggaggcggaggttgcggtgagccgagattgtgccattgcactccagcctgggcaacaagagtgaaactctttctcaataataataataataataataataaattaattaattaaaaagtctggctgggagcagtggctcacacctataatcccagcactttgggaggccaaggcaagcaggtcacctgaggtcaggagttcgagactagcctggccaacatggtgaaactgcgtccctactaaaaatacaaaaatcagctggatatggtggtgtgtacctgtagtccccgctactcaggaggctgaggcaggaggatcacttaaacctgggaggcagaggttgcagtgagctgagatggcgccactgtactccagcctgggtgacagagtgagactccatctcaaaaaaaagtatttgtgatgtttttgtttctttgtttagagtggggatctcgttctgttgcccgggctggagtccagtggcatgccaccacacccggctcgttttttttttttctctgagacagggtcttgctctgtcacccagactggagtgcagtggcatgatctcagctcactgcaacctccaccttcccaactcaagcaatcctcctacctcagcctcctgaatagctgggactacacgtgcacatcaccatgccaggctaatttttatattttttatagagacagggttttgccatgttgcccaggctggtctcaaatgcctgggctgaagcagtccacccgccttagcctcccaaactgctggggctacaggtgtgagccactgcacccggctaggttttttatctttttagacacagggtcttactatattgcccaggctgatctcgaactcctggcctcaggcaatcctcctgcctcagccacacaaagcactaagattacaggcatgagccaccaaacatggctataacattaatctttaaaatactaacagaaactttttgaaaagtcaagtctctaacactgttcactgaaagaacctagaacaatatacacactcaacacccaggttttggtctctaaataccacagcttccttgaaaaacagctgattctagggtgcggaagggaaagttcaaagtcagcccaggacatcttgcagtgccacaaagcaggaagcacacaaagaatgatacaaacacatgaagaagacacaagaggctagccagttggaactgcaggaagactgactgactgtaacaagtcagtaaatagtgtatgggtctatagtgacactcaaactcaaaggggcattgggggaatacctcttgaaagagaaagaaaaaagaaaaagaattagaaaaatcaccattttgcaaacaccaatgtgataactggttcaggcaaagctcatagatgtgaaacccactgagtaaatggctattagggaacaggatatgccaaagtatcaccccatagactgtttactaaccatgagaactaaatgtcccttcacaatggacaaacatggcagatatccccttaaccaagtgaccaaactttcccacatcggaaaagccaggccgtacatgcctggagatgtactccaatatgaactagatggcagcaaccaaggattattcctgctaaagatgtataaactgaatctaaccaagcctcagacacaattcccatttaacaaaaaatgtaagggaaagagggacgagttacataactccatcaggaaaaaaacagacagataaagaaacaatcaggacattctacaaaacaaccggcctgctagggtgaaaaaatcaatgttacaggaaaaagaaaaaggtatggggtgtaggggcagtttctgtgctatagcaggagacataacaactgaatgcataccaactcaactatgaatagattctgaacggtcccacagtctggggatttttgaaaatggaccattagaatgtcagagaattcgtgtttattttcttaggtataatagtcttaaagtggtacaggagaatatccttattctccacggatgcctaatttaggggtaaagcatcctgatgtctgtaatttactttcaaagggttcaacaaaaaaatccagaattacgtatacacataaagcaaaagtagcaaaatcttaacaattattgaacctaagtggaagatgttaactgtactaatctttcaacttgtatgtttgaaatttcacataataaaaagaggggtggccagggcgcagtggctcaagcctgtaatcccaacactttcggaggcccaggtgggcagatctcttgaggccaggagttcgagaccagcttgggcaacatggtgaaacctcatctctactaaaaatacaaaaaaattagccaggcatggtgtcatgcgcctgtagttccagctacttgggaggctgaggcaggagaattgcttgaatctgggtggcagaggttgcagtgagccgagattgcaccactgcaccgaagcctgagtgacagaatgagattctgcctcaaaacaacaacaacaactagaggtggctggcatgatggctcatgcctgtaatccagcactttgggaggctgaggtgggaggactgcttgaggctaggagttcaagaccagcctggacaacaagggggagaccacacctctataaaggatgaaaaaattagccaggcatggtggcatacccctgtagttctagttacttgagaggctgaggtggaaggacagcttgagcccaggagttcaaggccgcagagagctatgatttcatcactgcactccagcctgggtgacagaccaagcccctatcttgaaaaagccaaacagaaaaaaacaaaaactgggggtggtgagaataaataagttaattggggcatggcaattaaaataatacaattagagatactcagcatgaataaatctcagacacatctagcaaagacagccaggtgcagagtaatacccacaatgtaatgccatttaaacgaaacacgaaactatgtgcaacaattctgtatgttgcttcagaacagagtatctgtagcaataaacacacacacacacacacacacacacacacagtgaaaatgagacagaataacccctcaggccccttccttgatgggcacaattcataaggaaaagagggatgctgccattacacccacccagctgggctcacctgtctcccactgaccctgctgagaatttgcagaactgcttgactgccgacggcgacggcagctaccctctgtcctctttgaagagctggaggtgccatagctatagcgttctggagacactggaggaagagaagaacaggaagaagcattcagcctcctggccctaattcccacccctggaagaatgcctgcaccacgaggtgcctaagttccccagtagtcagagcccaaatacccactcattctcaaacacctcctgcagaggttgctcagatgcctcctaagagagagaacttatcacgacttggggcaatctaacccacgtctacggcagctcaaactgtcaaggttattctgttgatagtcatggtaagggtccctgtaatggccctttgccctggcatcaactgcccccagctctccccaaggagtaagcaggcctctgtgcaggctccccaaatcttctcttctagagcgtgatcttcagacatagatatccaaaaatgctgtcagctcttccctagagctgtccttctcctgcttatctaaatcctgtgggcttactctgggtcagggaaggccataatcccccctccccaaactagccactgcccctttagtaacccagacaaaggcttggtctattcatgcacacggctaccggcagcctgaacccctcccagcttctcatgtgaaggctgctatcctccaggagcacttccttcacaaggattaagggcatcaactctggggacaagttggctaggtttgaatcctggctcccacacttcccagctacgttctctgcaagccccttcatgacataacttcttacctccctctcttccctagcttgggtcccctctgctcctgccacactggcctctgatgatgccaaactcattcccacctcaggccttggatgctccctgggattttctcccctggggtctatgcatggctggcagtgcagcctcagggcaaagcctcccttcaccttgctgctctcctgactctctctattccattacttttagtcttcctacaacagcgtctaaaaataagttctcttattatctgattgcccccactaaacttaaacttcatggaacaaacaccttgtcagctccatcatcctgtatccctcctaggcccagcaaacaggattgttattatacgtgcaaactgcttaacttctctgaacttgttattttcttggttacagtgaagacagtaacaggacttccttgtgagattactgggagactataaggcactagttcatatgaagggctgacagctgtgcctggcatgaaacaagccctccgtaaacagtggccaaaatcatcatcactgatgtggccaaattcccaaagccatgctttcttcctcttatgttgctcattgatattgtgggaagagagagtagcagaatgggacataagctgcctgatatggcactgtccgtatcagggcaccagggaggcccagcgggagccaggccctttcctcccaggaagtgtgacaccctcccattcaaccgtacctggccggcgccgcttgcgcgccaggtgcggcagcaggtcgtggcgggccagcacgcgcaggagttgccccagcagccgcaggttgctctcgtcgcactgcccgcggcgctccagctccagcaggagctctaggccgctgcgggcccgggctaagcctccggcggcgccaggagcctcatccagcagaaaggccaggagctccagctcgcactcggtcagttgcccgcccaccacctcgaacatacggtgaagcgacagcatcccgtagtagtccaggcactcatcctcctcccagcacggggccggggtcgacccggatagcgccattcccgggggagggaggcggaacaagctcagaacccggcctagaacccacacagcggggagggggcagtggtcagcgacgcggaggcccgaaccccacaccgccagcgcgtctcccccgcccaatcgcgccgggcagggccgctcccgcacccccaaccgcctcggcctccccctcccccgggagggaatggtcccgcccgaggtcccctaagaacaggtcgggacgccggagcccgctcggcttctgcccccaccaccgtgctacgttcggagctcgcctccggacctgaccaaacgatgcggcccaaacaagcctcggggcccaccccggggctccctgctgactgcccctgactctgggtaggactgcccagacgagccccttttctccgtccagcggtaccgtctgatgagtcccccggctctacgcaagtggtacctcccgaaagtgaccctctgccccctacacagaggagcgacccaggcagcccctttgctccacacaggtggtaccgtccgaacccgaccccctcgccctgcaagggcggccccgcccgctccccagagcccaggtggtcctgtctacccgccaccagtcaccattaggcctctctggatcctcaccagattctggcgtccgatgactcctgggcgacggccgcagccacttgttttggatctttctggcaccttctctattattacgcctgcgtcacctcgcccctcctccttcccccaactcgcgcaggtgcgaccgccacgccccttcggcgcatgcgcagaacgaggcctccaagccccgcccttcctgggccgcttgacctgcccccaaccgaagcatcttggttcgcgagtgctgcgcttgcgcagagcgagagcacgccgcctcttgggctgtatctggtacccggttccaggtccctacttcctgcccgtgactcaagccaccggggccatgtagcgccacgtcacgagtagttgtaactactcatctcataaactacagccccctcctgatcacgagctagacgcccacatcaccactgcccctagttgcccgtggcaaagtaacacaatcactactttcccgtctcccagtaaactcccaggccttatatgatctggtcctgggcactcctccattagattgtccctcacttctagtgacaaccagggatctacatctcaactgtgctctctcgtgatcccaaatggaaatcccgcccccccaccaccacccccgcagtctataagttccttcccctgatcaaaaccagaattccctcatctcacgttcaggacggatacctccttccaagcggcaacagaaccctccattccgactgtgtacatctcgatggcgtccatcacgacccccatcacagtcagatgtctccacccagagccaaaacggcccctccgtaaccccttccaatctctgccctccagggtcgcccagatacccgctccctaacttgcaacaactagagagggtctgtcagggagtctaggctgtggtgtatgcgtgtccccttaccgcggggccttgggtgtgacggtcgccacgccccccacttaggtgactcaaggtcaggacctgcatgtacttgagacaagtcccctccctggacctcttcccacccccgcaattaactcctcttgggagtcgggagatctgggtcctgcctagcactggcccagtactggctctgcctgagctgtagcagtgaattcaaaagaatcggctgcgcgcggtagctcacgtctgtaatcccagcactttgagaagccgaggtgggcggatcacacgaggccaggagttcgagaccagcctggccaacatgatgaaaccctgtctgttcttagccggatgtggtggcacgcgcctgaaatcccaactacttgggaggctgagacaagagaatctcttgaaccagggagcagtaagcagagatagtgccactgcactccagcctgggccacagggcgagactttgtctcaagaaacaaacaaacgccaggtgcggtggctcacgcctgcattcccagcactttgggaggccgaggcgggcggatcacctgaggtcgggagttcgagaccagtctgaccaacatggagaaaccccatctctactaaaaatacaaaattagccgggcgtgctgacgcatgcctgtaatcccagctactcgggaggctgacgcaggagaatcgcttgaaccctggaggcggaggttgccgtgagccgagattgcgccattgcactccagtccgggcaacaatagcaaaactctgtctcaaacaaacaaacaagaccggacgcggtggttcacgcctgtaatcccagcactttgggaggccgagacgggtggatcacctgagatcaggagttcgagagcagcctgaccaatatggcaaaaccccgtctctactaaaaaatacaaacattagccgggcgtggtggtggacacctgtaatcccaactactcgggaggctaaggcaggagaatcggttgaacccgggaggcggaggttgcagtgagccaagatcgtgccactgcactccagtctgggcgacagagtgagactccgtctcaaacaaacaaacaaaccctccaagaaatcccttcccctctctgggcctcagtttccctacttgtgaaacaaatggatggcaatggtaagctacggaagcatagtcctgggctaaactcacaagggggcctggtaagtgactatcattaaatcaaacgaagagtagggagaataggaaagcaatttaacaaactgtgaaggattctgtcttgctaagtgggttgtagtgggcgcctacagtgtatgagcgctgtgcatgtgtgatatcatccaatcccctaaacaatctttgaggtggctgtgactcaagctcacttcacaccagtaaaacagaggcccggagaggagaataactccaagtgtgtcgggctctaaagctgtactctcagaaatgctccgtctcttcagctttgaaatgacatctctgtcaaggtctcccgccgcccagttcactccatgggcccaacgctcaccaaaggttgcccgagtttctctacagaacttgccgacgcttagcccgggagcgacccagagaaatgcgcaggcgcatctcctcgccctgagccccgcccacagggcgaagatgtgtgcgtggataactcccagagccccgcctgtgtggcaacacgcaggcgcaaggtcgcgtgccctgcgctgcaggctctgattggtcgccacgggtaagggcaccgcccaatgggaggtgtggatagtgaggggtcccacacgcctggagccgagggtctgtgtcaagagcggcaggggctgcaggagataagagaaacgggtgagggcgccgcgcggggctggactgggaagagaacgctgggcggacggagggggcggaaggaaaactaaggggtctgcagggatcgaagagccttggggcctgcgctagggcgggagcggcgcgggctggaaggagagcactccttcctgtgtgccctggggctcctttagtgtgcgggagcctacgctggaactcgcccaccacccactgctgcgagctctcaccctgccgaggagctcagtctggtaggagacaagcgttgtaaagcgggaaagttgaatttccagggccctagtgggttccttcctggaaagacttactgatatactgtgtgaaaaacccccattctttccctaagtagttcacaattcaagagtgggagaaagaatcgtagacgaggaaagggcaaatttcaagtctcccgggccacctcgtagacatttattgggtacctgctttgtgcaagctttgcagcaggcactgggcctcgccctaggggagttctctgttggaaatggggctgtaatcaaggaaaaatggaactctcgggcccctggttgcctacttccaggaaggtcctttgtggaatggctgttgtgtgcaggggcctggcaactcaaaaattaggaaggggattggaatagtagataaggaaagtttagctccagctcctttagtgaataatttactcaaggagtatgtattgggcattaactgaaagcagggccctgtactgggctgtgtgttttgggaattcacagtctaatggggaagttggtctggtagaaatggactgtgcatagggacagttaaactcagggtcggccaggcagtggcttacacctctaattccagcgctttgggaggcctgggtgggaggattgcttgagctcagtagttcgagaccagcctgggcaacatagggagacctctctacaaataatttaaaaattagccaggggctaggtgtggtggctcacacctgtaatcccagcactttgggagaccatggtgggtggatttcttgaggtcaggagttgaagaccagcctgggcaacatgatgaaaccccatctctactaaaaatacaaaaattatccaggcgtggtggtgaatgcctgtagttccagctactcaggtgaccgaggcgggagaatcgcttggacccaagaggcggaggttgcagtgagccgagatcgtgccactgcactccagcctgggcaaaaagagagaaactctgtctcaaaaaaagtaaaataaaataaataaaaataaaaatttgccaggcatgatggcagatacctgtggtcccagctactcaagaggctgaggcaggaggatcacctgagtccaggaggtggaggcctcagtgagccaagatcgcaccactgcactgcagcctgggcaacagagtgagaccctgtctcaaaaggaggaaaaaaaaaaaaaaacctctcaaggtctcacttcccaagggaggctcactgcagcctccacctcctgggctcaagtgatcaaaccaccttagcctcccaaagtgctaggattgcagatgtgagccaccacacctggcctgggagcatttctcagtcactaaatatgtactgtgtgctagacattgttcttggcactggacgtgcttcagtgatgtgcaggctaaactgctaccgtctaggtgcttaatatgagcaacttttttttttttttttcctccttgagacagagtctcactctgtctccaggctggagtgcagtggcgcaatctcagctcactgcaacctccgcctcccggtttcaagccattctcctgcctcagcctcccaagtagctgggattacaggcgtgcaccaccacgcccagctaatttttgtattttttttagtagagacggggtttcatcatgttggccagcatggtctcgatctcttgaccttgtgatcgcctgccttggcccctagagtgctgggattacaggcgtgagccactgcgcccggcaatatgagcaacttctatatgcaaggctgtaaaccagactccacctgccctctggcactaatagattaggtgaaaaagaggtaaagaaggtgggtttgaattcataaaattagctgctaggcctgggagggaggcagtcatttgttgagtgtactctgagtccctgctgtgtgaaggggcctgggtggggttgagcccacatacgtagaagggaagatggggcatatagagggaagtttgaaagttaaaattcctgtccctgctcagaggttttgttgctgactggagcctccacaatgaatcagacccacaaactctcagtccagtgaggaacagtgagatgccaccccaaactcatgatatttgccatgatagaggtggcacaggataccataggaaccctgaggatgtagagatgtcagagaaggcttcacaaaaggtgctgggtaggagtttgtcagacaaaaagaggagagaagtttcttggcaaagggaatagcaacatcaaagacttagggtctaaaaacaatctttctggagaactacacagggttacagctgacctttacaagtaccagggactttgtgtcagtactacttttagccccattttacaggtaagaagacaacctcagaggaagtaagtggtagagctcagattcaagccaagggcagtctggttccagggcctgtgtttttaaacacttgggtgtatctgtgtgtgtatatgtaagaggcagaggaaaagcattgcacaaagagaaagctgcacgcaggcaaaggctatggtattctcagaaaaggtgtgcctggccctctcggtaaagaggccaggctggctgggccgggtgtggtggctcacacctgtaatcccagcactttgggaggccgaggcaggcggatcacgagggcaagagatcgagaccatcttggccaacatggtgaaaccccatctctactaaaaatacaaaaattggccgggcgtggtggctcatgcctgtaatcccagcactttgggacgcccaggcgggcagatcacgaggtcaggagattgagattgtcctggctaacacggtgaaaccctgtctctactaaaaatacaaaaaattagccgggcgtggttgcaggcgcctgtagtcccagctactcgggaggctgagccaggagaatggcctgaacctgggaggcagagcttgcagtgagcagagattgcaccactgcactccagcctgggcgacagagcgagcctccatctcaacaataacaacaaaaaaatacaaaaattagctgggcatggtggcgcacacttgtagtcccagctactcgggaggctgagacaggagaatcacttgaacctaggaggtggaggttgtagtgagccgagattgcgccactgtactctagcctggcaacagagcaagagtccatctcaaaaaaaaaaaaaaaaaaaaaaagaggccgggctgttggccggggtggtggctcacatctgtaatcccagcactttgggaggccaaggcgggtggatcacctgaggtcaggagttcaagaccagcctggccaacatggtgaaaccttgtctctactaaaatatatatatatatatatatatatatatacaaaaattagccaggcatggtggcacacccctgtagtcccggccactcaggaggctgaggcacgagaatagcttgaacccaggagcgagaggttgcagtgagccaagattgtgccactgcactccagcttgggtgacagaccaagtctctgtctcagaagaaaaaaaaaaaaaaaaaagaggctgggctgagtggtgtttctctcctgcaggctgccgtggggtgtgtgtaggcttcagagacatgggatcacggaagactgaagcagaaacagtggattaagacttcctgagcgatagctggtgagtagtgggatgtgcaagagaattccacctccccttggtttcctgctgtctcactggctcctgcccctctttctccaggcactgccttccccacaatggcagaggtggtggctgaggtggccgagatgccaacacagatgtcaccaggggcagtggagatgtcaacacctatgtcggcagagatgatggagatgtcaacagaagtgactgagatgacacctggggaggcccttgcctcatccctcttcttccagcatcaccagttcatgtgctctgagtgtggcagcctctataacacactggaggaagtcctctcacaccaggagcagcacatgcttgctgtctcagaggaggaggcactgaccacacagaatgttggcctggagccggagctggtgccgggtgctgaggggcccttccagtgtggtgaatgcagccagctcatcctctcccctggggagctcctggcccaccaggatgcccacctccgagagtctgcaaaccagatccaataccagtgctgggactgccaggagctgttcccctcgcccgagctgtgggtggctcatcgaaaggcccagcacctttctgctacggtagctgagccaccagtgccacctcctttgcctcccccaacaccactgcctccaccttctcccccatccgaagtcaagatggagccctatgagtgtcctgagtgctctaccctctgcgccacccctgaggagttcttggagcatcagggcacccactttgactccctagagaaagaggagcgcaatgggttggaggaggaggaagaggacgatgaggaggatgaagaagatgatgaagagatggaggatgaggaggccatggcagaggtcggtgatgatgctgtgggaggtgacgagtccacagctggctgggctcagggctgcggggactgtccccagcaccagccctcagcaggggctcgccggcaacaccggcggacggctcacagcccggcatctgccacccaccccttccactgcagccagtgtcagcgcagtttcagctccgccaaccggctgcaggctcatgggcgggcccatgttggtggcacacatgagtgtacaacctgctccaaggtcttcaagaaagcagcatcgcttgagcagcacttgcggctgcatcgcggggaagcccgctacctctgtgtagactgtggccgcggctttggcacagaactcacgttggtggctcaccggcgggcccacactgccaacccattgcatcgctgtcgttgcggcaagacgttcagcaacatgaccaagttcctctaccaccggcgcactcacgccggcaaaagcggggcacctcccacaggagcaacagctcccccagctccagcggagcccacccctccaccaccaccccctgccccacctgcccagctgccctgcccacagtgctccaagtcctttgcctcagcttcccggctgtcccggcaccggcgtgcagtacacgggccccctgaacggcgtcaccgctgtggggtttgtggcaagggcttcaagaagctgatccacgtgcgcaaccacctgcggacacacacgggtgagaggcccttccagtgccactcatgtggcaagacctttgcttctttggccaacctcagccgccaccagctgacccatacgggtgcacgtccctaccaatgcctggactgtggcaagcgcttcacacagagctccaacctgcagcagcaccggcggttgcacttgcggccagtcgcctttgcccgcgccccccgcctccccatcactggtctctacaacaagagtccctactactgcgggacttgtggccgctggttccgcgccatggcgggcttgcgactgcatcagcgggtccatgcccgagctcggactttgacgctacagcctcccagatcaccatctcctgccccacccccacctccagagcctcaacagactatcatgtgcacagagctgggggagaccatcgccatcattgagacatcccagccactggcgcttgaggacaccctgcagctgtgccaggctgcactgggggccagtgaagcaggcgggctcttgcagttggacacggccttcgtgtgacgcagctgaaaagcaacaacaaaagggtttggttgcaacagccagtgtgggtacctctggggagagaggacctcctctgacaaactggtctggtacccaccatgtgccaggatccaccctggcctctttttacccactgactccccagaacaacccttccaggcttctcttgtcatctttctctgcctgaggggaaactgaagctctgaaatgcgatgtgatctgtaccaggtcacccagctatgctgcaaagtgggttggccaaggccctttgcactgcatcaccctggtgcccagcaacatcaggtaaccttcactgagcaccaagcttatgccaggtctgtgctggccactctcatatacctcttcagatcctctgcttgtacccccagcccttgccttccctggattttgggcacccaggactttgctctgcctggtggagggtacttgatttctctgggcttccttcatctcaattctgacagtgtggaaggaaatctgtaggtacccaggtcctcagctccagactgggtgatgctggagacccaggagcaagtcagcacaggctctgcccacaggaggcatgcacaatctggtaggagaaacgcacaagtacagatagcttgctctctgagtgtgtctcattgattcattcagcctgtgtgtcctaaagcctcccttctcccatactgggtgatgctgggggcagagatgagtcaggcctaaggcttctctgggctgtgatggggatgtgcagggacagtgggatcccaggaaacagacctccatggtgggagatcaggagttaaggacttcctagagaaggtagtccctgaaggaaaagtaggaatctggcagtgaaagaggaaaagaacattccaggcagacagcactgcaagagggtgagctcttggtgtatttggagaccatccagttattcatctgactgcctacctgaggcaagcaccacacttaccactgtatgtgtactatgatcccaacaggcttgtgacatagatttcatattatccctgttgtatagatttttaaaactggtggctgggcgtggtggctcacgcctgtaatcccagcactttgggaggccgaggcgggcagatcacgaggtcaggagatcgagaccatcctggctaacacggtgaaaccccgtctctactaaaaatacaaaaaattagccaggagtggtggcgggcgcctgtggtggccagctactcaggaggctgaggcaggagaatggcgtgaacccgggaggcggagcttgcagtgagccgagatcgcgccactgcactccagcctgggcgacagagtgagactccctctcaaaagaaaataaaaataaaaataaactggccaggtgcggtggctcacgcttgcaatcccagtgctttgggagactgaggcaggaggatcacttaaggccaggagttcgagaccagcctgggcaacagcaagacctcatctctacaaaacttaaaagttagccaggcctggtggcacatgcctgtaatccgagtgctttgggaggctgaggcaggaggatcactcgagctcaagaattcaagacctgggcaagagagagagactttgtctctattaaaaataaaaatgattggccgagcatggtggtgcacaccagtattcccagctactctggaggctgaggcggaggcaggattgcttgatatgagggagattgaggctgcagtgagctgtgttcacaccactgcactccagtctgggcaacagtgcaagaccctgtcacttaaaaaaaaaaaaaaggaaaaaaaaactaaggacagagatttgcccaaggtttcacagctaggcagagatgtgagatttgagtacgggaggcccctgcggcccacatttgtaacccatactattctgagtgattaagacctgaaacttgtgcaggggtaggggatcagaggaagattcattctaactagaggaaaagtaaaccagtgtcagagctattgggatttgaaggggcttcgaaacatcaaaggtcttgagagcaggaagattcccacctttttcagaggttacctaggataatagtctttctctccattgattgattgattgattgagatggagtcttgctctgttgcccaggctggagcacagtggtgcagtctcagctcactgcaacctccaccttccaggctcaagcgattctcctgcctcagtctccctaatagctgggattacaggcccccaccactgcacccagctaatttttgtattttagtagagacagggttttgccacgttgaccaggctggtctcaatctcctgacctcaggtgatctgcccgccttggcctccctaagtgctaggattacacgtgtgtgccactgagcctggccataatagtctttatctccctaagcacatgcaggtgattcctgataggctcctcccaggcccctgcagcccagggtgctcaggcagggcaggcagaatgcagttggggatggaattgtccaggagggaggcctagactttggaaggccttgaaagctggctgagtagttccaggttgggggagggtcgtaactggtgttagatctgggctcaaagtggggtgagtgggaagctaaagatggtccagcagaagacagggctggacctgggaaggggtcatggggtggtagaagggtgagggacacctcactgacttcacggctgaccacgtgtgagtagcagggaggaaggcgtccccaggatcccaaggtctgcccctcgcccagaacagccatcctcccccttatccatcagcttgctctgtatgttcattcattgatactacaaaccaggcgaaatctgggtggtgttgagcaaggaaggggcagggtctgtcctatcccaggcagtgtaaagatgcccctggagtgggttgagcaaactggagagcccagaccccacaggaacagtcccttcactccatctgggacatttgaaactcctccctttttgttcaccggtggaatccagtagggggcatacccattgctcctccccaggcccccttccacctctggggtgtcctggccacactcactgctcggtgccatgtggaggagataacatttccttccgcccatgccccactatctggccccagcatgttttaagtgaggataaaagtcaagttctctgtccccaccttcacagggttgtcacttcccaacatccctaagaggtggaccaggtaggtgtcctgtttaagacttggaaatgaaggcttggaatcttctagggttccatctccagccatggccacccaacaaagagtctacaagcaggctaagttttggcctgagtgactcctcatcatctcatgtccccccagaccctagagcagcaggcagcttgggctaagacagacggcccattgttcaagtcctgactcttctgtcacttaagctccatggccttcccctctctgatccccagttggctcaccagttactgggaggttaatccctccctccctaagcagaagcagatgatttatgctgggtcatggagcaggctcctcctaggcctctacagcagataacccagatggagctcatcaccacacgtgcagagaaagccacggtgtgagaaggttgggcacctgagccagggccttcggacagccctctgcctgagatgcagctcactcccgtcccagaacagtccccccaccggaagcccccaccacctcagcggaaacaggcagccggacagaaagcaggttttcatgccaataatttattgaacggaggtctgtacacaggcaaaccttactgtggaaactaagacatcaggagctctctccactcccctggccctccagggtggggtgaggagggagtagaccttgggggcagaggacaggaggggagttacagctgtaggaggggcggggccaggttggacggtgcgaatcgacgttttctttaagaaaaaaattataacaatctatttacacccgggggccagggaagggaagaggagacgggctgggctggttctatttacaagggacacaggaggggagggggtctggaggaggtggaggtctgggggaggggagggggccaagggggtaggaggtcctcatccccccaacaccctgtccttctcttccctccccacaaccagttaaaatcctcttaaaaagcccaccacaggggtgaggctggtgagggagggactggaggtggggacagggactcatttacctctgccctctagtctaggggcccagccagggcaggagcttgatgggctatggccccccttcccagcccctcttggggctcccagatggaagtggaagggtgcttggtggggccctcaggaggagttagtgagggtaggtgtggcatcggtcgactgccagtctgagctggtcggagtctcagttaaagctggagggaggcagggaaggagcagagttagcctttgcctttcagacaccccttcgcccaacccaaaagtaggaattctcttgtcatagatgctacattaaaagttacaagctgttactttaggtgaagggttgcaaactcaagtgctaaagggccacgatagtaactgagtgacacaccagagtgccaggctccatataaggcggtggctgggctgggcacagtggctcacgcctgtaatcccagcactttgggaggctgaggtgggcagatcacaaggtcagcagttcgagaccagcctggccaacatggtgaaactccatgtctactcaaaatacaaaaataagccaggcatggtggtatgagcgtgtaatcccaggtacttaggaggctgaggcaggagaatcacttgaacccaggaggcagaagttggagtgagccgggattgtgccactgcactccagcctgggtgacagaaaaagactccgtctaaaaaatataaagggcgcccactgtctactgtcagtaggatgggcgggcccattgctgcccaatctgattttcttccccaagagaaacaggaaatctgaatttttacataaaatagccccatttttaaacgtggacaccatggccaggcacagcggttcacgcctgtaatcccaacactttaggaggccaagcgggaaaatcacctgaagttcaagaccagtctggccaacatggtgaaacctcatctctagtaaaaatacaaaaattagccaggcgtagtggtgtgtgtctgtaatcccagctactcggaggctgaggcaggagaattgcctgagcccaggaggcggagattgcagtgagccgagatcgagccactgcactgcagcctgggtggcgagtgaaactctattgcacaaaaaaaaaaaaaacaaacttgggcaacgaattcaactttttgtttgtgttcaggccagacgttatttctctggctttcccattggcattaaacacatttaaacatttgtacgcaagaataccctctaaaggtggtcattcacatgttgtaagatgtgtttcctatgccatcaaaatgtcgatgatttaaaaatacattcaggaaacccagtcactgagcgaacagccccaccctctccaggctgagagatactttaacccccagcagatggtccccacttaccttgtgaggacggggtgagggtggtagtgcccgctggggacctcaagtgaggagggataagaatggcgttgagagacggttggatggagagttctagaaacaggaattgacatgctagtcagggtagactacagcagggttatgatgggcaccaaatgggaacccagctattgggaaggccagttgtttgtggacaccttcagccacagacctctctcaatgaaaaaccagaaaaagcttagcacaaggcagatcacagtaaagcacaactgaagcaggttcgattccccctgaatctgggagtcatctttcctgagccccaggcctgccttgtaccctgcccttagctccccactcctgcttcaacaccaagctcctcacaatctttggctgcccccctaccccgccccactccccagatcccaggctatgccctcaccaccagcactgaagttgaagagagggggaagtgggcggttgttaggcagctgggttcccagacatcgcagttcatcaaagaagctgtgcgcacaggcctctagtggggagagccttgaggatggggtgtactccagcaggctagagcagagcgcgatggcctctggcggcgttcgagatttgaacacctgagggatgggtgcagggctcatgagggtgagatgccctggacactggcatactcctgttatctcactgccacagtgcctgcggcaagttatgactggttgcttcccacacccccaccttccaaatgaagaaactaaggcccaaccactaaggagaggtcagtttgtatcgggtaagcaggcagcccaggtctgggactatatgagccctgctgaccctccataaaaattggaatcttgaatttacttgtgggttctcaacttttaaaatgccataaactttgaaagcggatggatgttattgatccctggataactcttcaaatcctcccaagccgtgattctgaggctaggtccacagaacagttgacctccaagggggaccagctctcagccatactgccctgagcccctagccctgccccacctttgtccaggggtgagctttaatctgagggaacttgaactccgtgtagttggggttcatctctcggatttgttcccgggttggtgttcccagcacctgtaaagagagggaggggtctgagacaagggccccatccctcagccccaccccctgcccagcccagccccgcccctcaccttgatgatctccaccagctggtccaccccactgtccccagggaagatgggctggcccaagaggagctctgccagtacacagccagctgaccaaacatctgaggggaaatggagggagcgtcagggctaggcgagtagggccaccaacctcccaatgcttttattcctcatggccatcctaagagtgtcaggagccccgttttctcaaagacaaagcacctggcccaaggtcacatgcagcttagaaacatgggcccgaccttgaccctgcctttgctgtactctctagtctaggtgtgtttccagccctcagttcctctctctgctaaggaccccaatgagctccttctctcccgctagccttggacgacagaccaaattaggcccaaacctgccaacaggcacccatgttctttgggccacaggaaggtacagccttaaatcctggactgccttcctcttgttccagcctctctcctgcccatgagaagagctgcagcgtggcagtctcacccctccctgctttgtaccttgacccccacagcacgagttcatacctaaggactccacagttcgtcatgctgctgtggaaggtgccctttcaaactctcatgcccattccctcaattcagacttcccctcatgcctggaaaatggcagttgtccccacaaacagggaaggacacagaggccctgggagcaagttgcaccttcatggtggcaaagccttgcttcccggttcccccaaggtctccagcagcccttccccctagctgagaacagagggctgacagggaggttccagagctggtatggactctggagtcaggtcagctttcaaatcccagtcctgcccagtcctagtggtgccagtgcgggcaggcggcctcacagctctaagctcatctgtaaaattagcattcaacagcatcagcctcctaagtttgtgaggactggatacaagaacagaagttaagctttcatcaccaagcttggcatacagcacacagaaaactccaaaacttcccagattgccactccccccgccaccctcccataactctgaccgatggatgaggtgtaatcagtggctccaaagatgagctctggggcccggtagtagcgagaacagatgtaggagacattgggctcccctcggaccaactgctttgcactgtgggaagagatgggcaggggtacacgtgaggcaagggttggggtcccccctgcctcttcagccacccaacatgccccaggcccacctgccaaaatcgcagagcttgaggacagcagtgtcagggtccaccagcaggttctggggcttgatgtcgcggtgacacacgccctgggagtggatgtaggccaagctgcggaagagctggtacatgtacacctgcggcgggcacaggatagcagaactttagcccagctttccccatacagcaccactaccccaccagcttggcctgaagagcccttccaggcccactctccctgctgcccccacagctttggggaaacccatttgaaaccttggttctcttaatgtgcaccacaatcacttgaaggacttgttaaaacagggactactggctgggcgtggcgggtcacgcctgtaatcccggtattttgggaggccaagaccagcctcgccaacatgttgagatcccgtctctactaaaaatacaaaaattagccgggcgtggtggtgcacacctgtaatcccagctactcgggaggctgaggcagaagaatcacttgaactcaggaggcggaggttgcagtgagccgagatcgcaccactgcactccagcgtgggtgacagagaccctgtctcaaaaaaaacaaaaaaaaagggactgctgggccccactcttagagtttctgatcagtgagttctgaatgaggcatttgcaacaagctctccagcactgatgctggtccccggaccacactctgagaaccactgctttaatcacaacccttggcagaagcctgatgagtaaggtacatcgggaggttgtcataaaacaggctagggagccaggcactcagcttccccctcaccaaaaccactggctccttaatccgacaatcaaaaccacccctgagcctgccccctctccagctccattttcctgccactctccctcccactgactagaacagaagtaccgtgagagcaggattttgagtttcagttactgctgcatcccccagggcctagacagaccaggtcctgacacggctgcttcctaggcccccttccttttattccagttcccctcggccaaagatgccacttccttgccctgtgcttggtctcctccaggaagccttccttgatccttctcacccacaaaccaggctgggtgcttcctccatttccagaattccctgtgctccttctggtatggcagcagctagttcatttaatagttttctgtgatgacgcctttctaccctaccaaactgagagctcttcaaggccaaggcctgggtcgcagtcagtggtgcctctggaattcctcagccctgggacccgtatgcaggcagccacaggacagattcgccaaaccagagagctcccctcctgggaagtgaggtccaacagccacaaccactggtagagcccacgtcggctcacccgtgcttggtacgtaaagccagcaggagcagcagctgggccccaagtgaccttcagcaaacaaacccacccacctccttccaatgcagtaggctgctccagcctgttcgccacatcatccctgggctgcaatcattcattcattcattcaaacacctcctgaaggtctgtaacacccagggcacgatgccaggcactggggaatgagcctgcacagatgatggacggagatgcattcctggctctgtggatgctaaccttcctccagccctaactccttcccacctacccccagccaaggctctaaaggcccgaactctggcctcagcagctgtctctgtgcagtcctggtccccaccacccccttatcctgagctaactccaacatctctggtgccactggactccctgtatggacctgagcaactacctggcagcttctgcaaccccaggtgtcaggctgccttcctgattcagtcaggccttgcctgccttggccctcccctgtgttaggcgagctccatctcggggggttatgggaacaacagcaggggacatggggcctccaaaaaccaacataaacttggcggatgagggatcccataaaaggcaggaggctccagagcccctggctttgtgggcctgggtcccagcagcccacctgctggcctaccttgacatagaggatagggatggtcaacttggccttggtgaagtggcgggccacccggtacactgtctcgggcacatattccagcaccagatttaggtaaagctcgtctttctgcagggagcaaaggagaggtgtgaggcactgtgagaagagtgaggagggggaaggaaggtatgcagggagcagtgggggaaaggcaggcaggcaggaaaatggctggagcaacccaccaccaccacctcgagatctcaccttctcgccactggagtagaaaaagtatctcagcctcacaatattgcagtggtccagcttacgcatgatctgcagctctcggttcttgagggcaaagggagagtctcagaatacaaccaactctctcggctgctcctccctactcacactcactcccaacaacagccaggcagctactccctgtgtcccagctccaaggtcccctggagtatcccccaattccttgtctccagactattcccctcccacaggagctggaagcccacaggttaaacccaggccacagatgtgttttcttcaccccatttttttttttttttgagacagagtcttgctctgttgccaggctggcatgcagtggctcaatatcggctcactgcaacctctgcctccctgggtcaagcaattctcctgcctcagccttccaagtagctgggattacaggcatgcaccaccacgcccagctaatttttgtatttttagtagagatggggtttcaccacgttagccaggatggtctcgatctcctgaccttgtgatccacctgcctcagcctccctgacctcatgatccacaggcctcagcctcccaaagtgctgggattacaggcgtgaggcaccgcgcccagccaccccacttaaaaaaaaattttttttcaacttattgctgacatgtaaaagccaaatggcaccttctgatttttttctccaaaataaagttttaaaaaggataggccagggccaggcgtggtggctcacgcctgtaatcccagcactttgggaggctgaggtgggtggatcacgaagtcaggagattgagaccatcctggttaacacggtgaaaccctgtctctactaaaaatacaaaaaaaattagccaagcatggtggcaggcacctgtagtcccagctactcgggaggctgaggcaggagaatggcgtgaacccaggaggcggagcttgcagtgagctgagatcgcgccactgcactccagcctgggcgacagactctgtctcaaaaaataataataataaataaataaataagataaaatttattattattattatttttaaaagaacctggctatgttggccaggttggttttgaactcctagtctcaggcaatcctcctgcctcgggctctccaagttcaaggattacaggcatgagctaccatacccagccttaaaataaaaataaaataaaaaacagctgggcatggtggctcacccctgtaatcccagcactttgggaggccaaggcagggaaatcacttgaggccaggagttcgagaccagcctggccaacgtggcaaaaccccatctctactaaaaatacaaaaaaattagctgggcatggtggcgcacgcctgtgattccaactactcaggtggatgaggtacaagaattgcttgaacccaggaggcagaggttgcagcgcttgaacccaggaggcagaggttgcagtgagccgacatcacaccactgcactccagccttagtgacagaacgagattctgtcttaaaaaaaaaaaaaaaaaaatagagaccatcctggctaactcggtgaaaccccgtccctactagaaatacaaaaaattagccgagagtggtggcacacgcctgtagtcccagctactagggaggctgaggcagaagaatcgcttgaacccggcaggcggaggttgcagtgacccgagatcacgccaccacactccagcctgggtgacagcatgagactccgtctcaaaaaaaaaaaaaaaaaaaaaaaaaagatttcacatctaaatccagttttcagtttgtcttgaaaaatcagggctaggtatgctggctcatgcctgtaataccagcactttgggaggtcgaggtgggggcggattacttgaggtcaggagttcgagaccagcctggccaacatggcaaaaccctgtctctactaaaaatacaaaaaaaaaaaattagccaggcatagtggcccatgcctgcaatcccagctactcaggtggttgaggcacaagaatcgcttgaacctgggaggcagaggttgtagcgggccaagatcgtgccactgcactccagcctgggtgacagagtaagactccatctcaaaaaaaaaaaatcaggcatgggcacatgaggcttgcccccctacctggcacaagcaacaacagacaggtagtggccatccagctcactctggtcccgtggaagcatctgggtcctcgaactctatctaggatcctgagtcccagactccaggcattggacttttcccagaatgcggtctcagcattcttccccattctctattcctcagtgaggcctaggaactccctgcccctacatccctcttacttctggaactcaactccaatcaaattctgacaccctggagctcctcctgcccaagggccctccctgccaagaccgaggccctggtctggttcctttccagtctaggctcagttctcctacatccagactagtctaagctccaaatgccaggcccttaaacaccaattattcctcaacttccacttcctccatctccttctagttccctgagcctctcctagctcacagggcacctccattccattctgcgctggccaaacacctgggaagagcgcgaccttcagaaccacccgcgctagccctgccaggtccctttctctcctgggaagaagtgtaaccaaatggttaaggtagagggtttgggaatcagattccagccttgactggggcacttgctctatgacctcaggcaatcctcttacctgagtttgtttccctgcttttaaacttagcttacacttagaatgggtataaccacagtacctaccctcagagaatctttatgtaaattaaacaagaatttgcttattaagcacttacattgagcaaatgcccagtaaaagctctgggctctcctgggatccacatttcccatctttcacaggtctcatttcctcttttcccccttctcttctggcccatggctctgaaacccaagcctccagctctctggctcaggttctcccaccagtcacacccagtccccaaacctccctgtccccatcccgcccaagctaccttgaacctcttgtcctggagaaccttcttgatggcgactagttccctggtctctgccagccgtgcctggtacacgaccccaaatgagccattgccaatcactttgatgtccgtgtaagccacttcttgggagcgctctgggccttggcctagagtggctacgactgtggtcaccttcccgctgtcacctggggaacaaaggggatacacgatccactgacccatcctgcctgcgcatcaccctatcctggggctgtgggaggaagggaaatctctgcaggaagctcgttggggacctctttgtcccctcctcctctttgaggaaaggtggatgctgggaccttcccagtgacttttcccctcttcctttctgggaatcttaagtcctgctcccctccacataggaggatattgatacctaaatctctctgcttcaagggttggcaaccccaaatttctacttctaggaagcaacagatcactggtccatcttggtactgggagacatcagatgttgactccatctactctggatctactgccctctggcccctcctatttggagaaagcttgaccgagcctcttccacttcagggagcagtaaccctgaggtactcctactttaggaaagcactaacctctctcacagcctagaggatactgacctctaagtcctcccctgtagagctggtaactttactggttcttggtgacagaaatgaatgtcctctcctgctataagtgccagtgccctgaccctcactttttggtactttgaggttagaaaaaaacactgacctgacctcttcatctgagtggtccagagacccagacccctcactatatgtgggtggtccctaatggacaagcaccaaattatgataatgatgaacctgacctttattatcaaggagctattccagcctcagtcctttgaaggaaagctataattcccaattcccattattcaaatggtggcaaaccttggtgccattcttagaggatagtgacccctttgagtaactgatgaaccaaatccatttttttgtttttttttttgagacacagtttcgctctcgttgcccagctggagtgcagtggcacgatctcgactcactgcaacctccgcctgctgggttcaagcgattctcctgcctcagcctcccgagaagctgggattacaggcgcccgccaccacgcccagctaattttttatatttttagtagagacagggttccaccagttggccaggctggtctcgaactcctgaccgcaggtgatccgcccacctcagcctcccaaagtgctgggattacaggcgtgagccaccgcgcccggccaccaaatccattttgaggggccagtgacaagttctttcagagggagataaccctacatcacttttttttttcagagccaatgacaccataccttagaacaattattaaaaaagtataaccttagatccatattctgtaggaaactgtgacctaccctgctccattccatttttgttaaaggagacacaccaagccatgtattttaaaacatggactatggacttggtttgaaggatatgctgactcccaatgtctttatatctaaaaggcagtaactattaattctcaccattggcagtacagctcaacaagatttagggtgggtaatgatgccaggtcttggttttaatagggaagatgatctgagtaccaggtttggaaagcctggccctattctttggggacaaaacacagtaacctcaaagccctgcttctaagtgatattcgctccaaatccccatcttctgaaggacagggaatgcagatccctctttttcggggttggtcttattcttgttctcttaggagacaataaccctagatccccatttgcaagcgactgtgacctctgatccaatattataatgaatagcaacatcagatacctgttcttaaggctcaaggacccaagacctcaataatggaagaacagagacttgtaacccgtttctttaagtgttagtaattctgatccacgagtaattctgatctccaagagatggtaaccccaagactccttttcctgggaggaagagggctcggatccccggtatggggaggcacagtgacctcgagctcctatctaagcacatgaaagaatctgatggatgtctgaggagctttgggaaccctaatcaccaccctacacgggcgccactagtactcacggcccagcttcaccccgggcggcgggaagctagtgcctgcgccggggcctccgctgcctcctccgccgctgccgccgggtccacccccggagctcgaggccccgacgcccccacccatggccccgacagatgcctttccgccgccggtgccgcctgggccggaggccgagcctccggggccgccgccgcctcctccgcctccgccgccgggctccgcgaacgagctagtccgcgccctgcccgagcccccagggccgcctcccgaaggcccgccgccgctcatggcgccgagcacaggcccaggctgcggggctcgggctgcccgggctgccccagccgccgccgctgccgccgcctcccccgggccctggcctcttccaggccgcgccgctctggcttgggctccggctccggcccagcgcccgccgcggggcacgccgggagatgcagtccggctgtcgtccgcgccgccgtcaccgccctcggcccgcacagagagccgcgtggcacgccgggaaatgaagtccacaaaagcctcagagtagaccgcgggaatgatgggcgggaatgacgggtcacgctgtacgtcgggaaatggagtccagggtaatctgtcagccgactgtacgacggggagccctgaagcactttaggaagcagagagcctgatgcacgctgggaaacggagtccactcactcagtctattagctgtgtatgcctcccagagctcggtgcgctctgggaaattgagtcggcccgcgtgaacctgcgggtctcgggccgtgaggcaagccgggaaatggagtcgtcgccacgccctcaccgcattgcaggtgtaaagcgatttttaaagcacgccgggaaatggagtctcaggtggtttttaagccccaggtggatactgcagttccggagatgggcgaggaaatggagtaggtttacgcgctcctctttccaggtacgctgggccgcagtccctgccgggaagtgtagtcagcaccaaggcctcagtgcagttgccacagcgagccctggtgtgttctgggaaatggagttcgacgtatcctccccattgactgagggggcgggatcgcccatgagctccaagcatgctggggaatagtccagacctgaccctctgtgaggccagtctgcggaggcttgccgggaagcgaagtccaatggccaccatcaggggcgtgtgaacgaaaggttagagactgcggcagttccctggagagacttaaaagtgtttcagcgcctccttcctcgcccccaggtccttctttaagaaagagccgaggtcgatcaaggactgctggaaaatggatccaagcacctttaagttccaggtgaccatagatcaggaaagaaaaaatgtcccctctctaaccgcaactctgcaaagattcgggaaacaaagttcccggcggtttctcagaacactaactagtcttcggatacagtctagcttttcctagcaatgtggttcgcaccaggaagctgaatggagcattaaaaagacggaaatgtcatttctgggcctggcgctgtggctcaggctgggcgccagtagctcacgcctgtaatcctagcactttgggaggccgaggctggcggatcatccgaggtcaggagttcgagaccagcctggccaacatagcgaaacccccgtctctactaaaagtacaaaaattagccgggtgtggtggcgggcgcctgtaataccagctactcaggaggctgaagcaggagaatcgcttgaacccgggaggcataggttgcagtgagccgagatcgcgccactgcactccagtctgggcgaaaagagtgagactccgtctcaaaaaaaaaaaaatcctgtcttgaaccaccattcagttttcagtttttggtttgttttgagacagggtctcgctctgccgcccaggctggcgggcagtggcgcaatcacaggtcactgcagcctctaactcccaggctcaagcaatccccccacctaagcctcccatgtaggtgggactacaggcgtgcaccatcacgcccagctaatttggtttggtttgttttttggggtggtggggggtagcggggtgggcttcgccatgttgcccaggctggtctccaattcctgggctcaagcgattctacctcagcctccaacgtgctggtatttcaggcttgagccacggcaccgggcctcccactcttgtgttttgcatcctccgcttcctaaattacaagatcccggaaagccaaaaataaggaagccagctgcctcaggttttgtgtactcagtgagtcgtcctatttatcgattaatacccgaaggagagtagcccccaaaaggcgctgggaaacagagttcctgtgtctgtatgtgtctcttcctcccccggaaatacttagaagtagaatgaaagcgttctcagcccctcccgcatcctggaatggtgggaaatggagtctctggacttcacgttaatccgagcttgtgcttatactaactgtcctgtcctttctgaaaccagaagaaagtcctgtccactcagtttgttcctgactgcaattccccgcggacacaactgcgggggtcggtagcgccaaagcctgttgagactacattacccagaaggcaaagtgcggaacacttccgctcccttcacaaagcaggtggccgcaccacgcgcggctaggcgcgggcgtttctgggagttgcagtttcccagccaaatggtacctgctgccctctgatggcagctctgagtcaaaaagtaaaaatttcagtcgagccccttggcctagggattccaacgcgggaccaagacggctcaaaagggcggcgacatggggcaggatagcgagggttatttaaccgccagaacccgtggggcatgcgccgctgcgtgtgggcaaccgccacgaggggattggggtccgtgggagtttgaaggtgacggtctgcaatctatcaggatgtttgtagaggatgagaatgttcatagagggatgctaggaagggttgtaaacgtctgagagaggcctatgggtgtctagaagggctaagaggagtccgtggagtggtgaaggggtctttgatgagcttagttgacaggataattactggggaccagtggagaagcctgaggggacttaggctgtctgctaaaagttctatgggtgggtggacgcgatggcttacacttgcaatcccagcactttgtgaggtcaaggccgtggatcacttgaggtcagtcagaagttcgagacccgcctggccaacatggaggaaaccccatctctactaaaaacacacaaaaaaattagccgggcgtggtggcccacgcctgtaatcccagctactcgggaagctgaggcacaagaatctcttgaacctgggaggctgaggttgcagtgggctgagattgcaccactgcactccaccctgggcaacagagtgagactctgttttgaaaaaaaagaaaaaaaaaaaaggtctatgggagacagaaattactggtgaccaaggggatctctgagcgacctgaaggggtgagggatggttgagaagcattgggaaggggctttgagagtctgtggaggtactggggctacacgtacaaagcagggaggtctctgatgagattaattaatatgtgaagtgccttgagagcatctgtaaagggctttctacttggaagcaaggatctcagaggatatggatgggaccaagggtgtcttcttgcaggaacatttcaagccagctagctaatagatttaggtgggcgattaaaggttagagtagccgctggagttttcaaggccaaatgccacctgtgacatcctacacagccagaatctggggcaacttgtctggtagggctgtggtctgacctggacagcagttagggagctgagctgagcacttatgattccatattagatgtggttagaggtgctttgaaggcactgggttcaggggctgaggccagtagttagggtcctctcctcccgagtgacaacatccccttctccatcaccccaccaccaccaccaactcagctgcaactatgttgccaggagacatgtctcatcccagcttccagaaatagcccagtggcccccaccccagggaatgacttacatcacccaggagagggagcagtttcccgcaggccgcctcgggagcctcggtttcctgccagtatcctagccctggatcctctcttccctgccaaccgacatcatctgggaccacccaccctggctggcatgaaatgagatgcgagtgggtagcagttgccagtcaacgtttcttccccctcagggttgcacagggtggagtttcatggcgaagccagtccaacaagccctcaattgccactccatctcttagcagctgtgtggccttggggaaaccccttcccctttctgggcctcaggcacctcacctgcatggtggagacagaacttgtctctaagggtacttccagcctggattattcctcctaattctttcatccctgattcaagctctccaatctcagcttctagctctatgagctcatctcaaatcctctgatcctgaaagcctgatctggatccaactatcttggtgttaggaaggaaaagtcaggagttgttgaaagaacgtgggctttgaagtcctggctcagccacagggccctgggcaagtcacttagcagcactggttgcccctaccttactggatactgaaggagctacaacactgcagctcttaagtattggacacacagtaggtcaacagcatcgatgactagtgagccagtcccttggctgtgtgctggctgggggtgttcccatacctggacctgaagatcaccaagttaccttgcaaggtctacatttcaagagacaccacaggctgttctccaaaggactcccagctgaactcagagcaacaagagaggggtgtgggcagggtgcgaggggcagtgcaaaagggagctcctggtcttcactggggacctggggtgtgggaagaattcctagccacaagtgggaaggcatccaggcaatcagaagagcaagggcagtggggttgtggtgaaaaacagtgggaagagctttcaaggacaaggtccccatggaacagaggagcagtctgatgaagccggcgcatgcctgagaccactatcatcaagctctggggctcatgtgcctctgaggtcaggagacggtttcccaggcctggatttggcccattctgattagggttaggccctctatactgatctggccacagacccactagcagccagggtggggcccctccttcagaatcaagcaaaagctgtggccctcagggggctgcaccgagcacctaggacattgatcactgcatccaaaggtccaaagttttattgttttgaatacattctccagcggcccctctactccccccaccctcagtccccaatacagaataaggcttgaccacagccccccaccccaccccagaggccccagctgggaggcagagggggcttccagtttggtttcagggcacccccttcccatccccccacccgcctgcccatgggccagtcctaggagcagctggggatgaaggggttggaccggtgctggggtggggagtgggagagggatagcaggcacttgtagagatttgtggcccatgggcggcacccctcaccctcctccgccccccaccccccaacacatggaatttttggttcattataaaattgtccctccctcccctgctgtgaccttgtggggtatgagaaacctaggcactcatggccccctggaggggcagggcaggcagggctggggctgaggagggctgggagtggggcagagcgggtgggtcagaggggtacaagaggcagagaacagggagggagacaaggctttacttcctaagcgattgtaatagaaaagttcctgggtgttaaggccaaagcctcaattcaaatataaattccccagaatggaggtgacccccttaacttccccctccctccccctaccaccactttgcccagagcttagaaacccacagagacagggaatagcccctagccctgggcacccacccacccccaccatttttaaaaaaaagaaattaaagttttatacaaaatgtggggagggaaaagggaggaggcagggaagagacaagagagctgccctcacctccagggcatagggggcttaaggcagcaaaagaagcatggggggtgcggggcacacaggtcccctgcccacagccctcaggagtctcggtgctccagggagagctgggccgtggcatgctggaggtcagagctcacccgccttggggtgaggggccccccagcctccccaggcccctccccacgcaccttcttgtcctcaccctcatcctcaaagcccccagcggggcccccacccccttcgaggcgacagtcttcactccagcgccgcttaaagcgtagcttgaggggcatgcactgggatgccccgggtgcctcgccgggctcaggcttagggggtgcaggtggggcacggggcgtcttgaacacctccccgtcttcctcatcctcatcactgatgtcagtcacctctacctcctccgactcgccttccgagatgggctccaccttgatctgtggtggcgggggcggtggggctagcgcccctgccccctcagccagcccgcctgcactgccaccgctcttgtcagcaccggctacggccttctccccagctgcccgctgccggcgtccgagtgggggcggctggagcttaaacttgaatggggaggaagaagaagaagaggatgacgaggccgaggaggggaccggtggggtctcgggtgccatgggcggcagcgggcacttgtcagggcgctggggctggggcaccaccagcccagggtagtgcaggaaggcgcgggggctgaggtggtagttgtagacgctttgggtgtgggcctgcaggtaccgtttcatgtcctcagggctgaaggagaagtgggagcctccccctgagccgctgggccccccgccaccactggggtacatcgggctcagcgtgggcgagggagtgtaggccaggtgggtgggcgtcatgggcagagccggggagagctgagggggcagcagggatccaggaccggccagaggcgacacagggaaggggctgaggggttcagggccaccccgaggccggggatagactcggaagacaccagggtcatggggcaggcgggccagcgggggccctcggaaggcacccagatccggagggccgggtggtcgggcgcggggatcctctcccagcggttcctccagctctgacgtgccatcactacagtcactgactgagcctcggcccaggcggcgggccaccacagccgagaagagggaagatgaagatgaagagcaggctggtggtgagcgggggtcctcggtgggggacagcacctcggagggcgttgagggagggaagcggaagtggctaccacccgacggcactggcggggcactctggggcactgcaccccctggcagaagggagacagtgtcaaggcccctggcctagcctgaaggggcatgtagaccctctccacaccaaccatccctggtactcaccagccaaccccacatcaatgaatgggtaattgaccagcaccagtttgttgaaattgaacttgtaggtgaaccgtttccccttggtcttgtgcagaatgcgcttgttatagtaatagctgtgggtacagaaatgccattgggaaggtcaggtacgtgggacccaggtctagactccacaccttaacacgcacttaggtgtggttcccaaaggccaactgaggaacgtaggccacaaaagacaaatcaagtgcccagagggtgggtaccagctctctcctcacatctaaggcaggactagaggatccactggtgactgtaatctctcctcaggatacgtctgtgttaccaaggggctcagggaagggctgggagtggcccaaggtcacacagctaggatttggcaaagccaggggtcagacccaatgcttgttcccacaggcaaggggctgtgcaaccccgggggggcactccacatgtgctcaggggtccccagcccgtcctcaccgcagggcccggctcagcttgtcgtaattcatctggggcttgcacttgcgaacgccccacagccgggccacctcatcagggtctttgatgacgaattccccgtagtccccctgccaggcaatgacgccctggtactcctccttccgcagcagctccaggataaagtgccacagctggatctgccttgagccaggggacgactctggcttgtaggcccaatccgggaaggcaaaccctggggacgggaggcagggagtggcctggggtcaggctgccaagtccagggctctgggtcccatcccagggtccacctctgccctgccttcaacatggggaaatctgtctcacctcagccaagtcaagatctgatttaagagaagacagtgcgtgtctgtctgtctgcatgtgaggggctagacaggagctgggggggaggggaagctggagcccgctccagcgacaccgggagaaacaggaaaccgtcggcggtgggtcccggggccagtgccagggggccaggcaccaagccaggctggcgggcagggctgccagtgggggaggggcaggaaggggcacacgtggccagccgggttggggtacagccccccagcttacccccactcccattcagagccagttgcaccaccccagctcctcggatgtcctccttagaaacatgcactgtctcctccgaagacccaacagagcccctactcccaaccccaagacctgagaggaagattttttttttttttcttaaaaggaccaggaggggtggggtgactcggttgccgatgaggtcagcgcttgcacacacagaggcttctgtcttccctggagagtgaaacccagactgtctgagaggccccccaagccctggaccctctgagctacactgccctccccagacccaggcatccaggccccacctggctggagggcccagcccaggcctggagcttgagcaggcaccctggagctgtcaccctcttcccacttctgccttctcatcttcagctccttccctgcccacctgcctgcccacccccagcattaaccttgggtagaggttggcggtgggctggctggtctctggagggggtgggcagcctggggtggggggtggggggtggggggactgcggttgttgtcatttcccaacaacaggggccatcaataattcagcaccaggcagccggtaatggaggggtgggaggagggaaaggggaggaagggaaggagtggggaggcagagcagggtccctggtgccactagagagagaaggccaaggtggccagctaaagatgggcggctcccaaatccagtcaggctgcaggggtcaatccgcctcccttggccccagctcaaacaggtaccaacaaggcctccaggcaacacatccaccctcaaagactccacccaagtctggaatccaacaagggatccttccccttgggaatccagggaatcagtagttcctgctcccacagggaccaccccctccaaatccagagctcactgtaggcccccaactcctgcccagactgggctgcagtaccacatagcccccggagtccctgccccattcagatatatcccagccttccaccagcccctcagggtgccagggatatgacctccagctgttcacagaccagcaccaacagcccctgttccatttaaaagtgacagcctttgacaaccccttccagagaccccagagcaccatcgctctcttgggaatctaggtgttcaacccattatcctcacccttctagagaatccagatcacaaggtctcctgcaaggcccagggtcctttggaacccaggtgacccagccaccagcttcatggaccctcatatcccctccaaaaagctcccagcccctctcagggaaccaagctccatgttacttccacctcagccccaatctggctctagacctagaaggggggccaaagcccctgagacatcaatctgggggtgggggatgtactgacttccaccctccccccaaaattaaagccacccttcccagcccacccgccccagcctccgtgtcccggtaaccaggcaacgtgtgtgcagcgacagtcctgggagcgggggagcaggaggctaaaaataaactttgcagaagagagggagtgagagagactacatgcaacacaaagggaactcggaaaggaggtgggggggctctggaaaggcctcaagccgcattctgggagctgtcccaggcccccttgttaaaccccttccctgagcaacccctcctccagggcctggaccctggctcccacttctggcagggacccttccccactcccaagcccaccacaacggcggctttcctcatcggacacagcatacatgaaggcctgttcccggctttgggggggggagaatgaagagggggtgacgtcagggtgtctcaatggggctctgttccccaggccttggagccaggagccaggcacgggcaaggggagcatgtgtgagtgtgctgtgtatgcgtccacgtgcttaaaacagggaaacaccagacctgcacggaggaagcttgggggtgcgggacctcgggaacatgggggccagtgaggcagggagagagcaggcacatggagagaggggttcaggagactgcgagacagagtgcagaagtggcagcagtcagacagcaagggctgggatggcgaggtcccagaagcacacctgggtcccacagaggcggggtagggattctcccagacagactatgcaagcctggggggacaaaactcctgggcaccccccaacctcacgtgacggcccaaactttttttaagggactatgagggtcggaagggaggagtggtggcagaggaagaacacgccggcctcctggggggccccaccacctcccccactccaggcggccctctatggcgccagagccgggaagaaaacaggaagtgggaaacagccacggcagagagagggaccgggatggagaactggatggaggggtgcggagcggcaggccaggaggcagacgggaaagatgcaccgatcggaggccattccaggcctccttcccctcccctcccccagccggaaaacccacacactgtcccgccccccgacagggttggggaagcgacccgcggatcctatcaggccaaggccggtagcagggagagaagatgaagcgaggttgtctgggtgcctcggcctcctccttgggcgagggtaggctcctgctgcccccagggcccagccacccgggagcgagtggaagccgggggagtgtgtaggacgcacgtgactgaccctaccgcactccgcaccccggccccacccccagggcccctcctcggtccgggtcccaatcccctggcgccggatcccagctcggagccctttaagattaagccgcccccacccgccgagcagggggatggggatgggaatggggtgggaatggggtggggatggggtggggtgggtgggccggtcggggcacacacccgcacacaggagcccgagccgccgccgccgccgccgccgccgccgggggaaggaaacaagtttgaacagcggcgcccggcccccttccccctcccccgtccccgccccgggccggattccgacggggtagacgggcagggggcggctgggacccctccccctgcgcgctcgggcgcaaagtccagcccgcgcgagcccgggggcggcgggggaggggagggggaaaagtccgagtgggagggggagttaatcccgctgccccccgcccgccgaccgagggggaggggaaccttggccccttaaggaggagcaagttggcggggaagagaggggcggagggaagagacggcccgctgaaagagaagaggtggatccgggagggggggcgaggggggagcctctgcgtctccccccaccttccccaccctcctcaaccccgggccaccggtggcgcgggaggagggtacccaggtctccccggagccaccttaaagccgcgcgttctaaggtcggaaacaaaaagttcctttttcgaacgttcgggctgcgctttggaactttgcgactcggcgagggcgggggagcgaggagccgacagaggcgggcgggggaggggcggcgcagccaggaccccgagtcccgggctccccactcacgccctcctcctagaggccatcccgtatcccccgctaacctggtgcagggcacgcgccgccgtgaaggtcaccagcaggaccgcgcagcgcagaaccagggatagcgggcccggtggacgagcccccccgccccgcacacgtcccggcccccagagtgcaacgtgacaagagcggaggggaaggaccccgccacccccgtgatcccgggagtgggggagagcccggcctgcggggtcccggtagggatacaggaccaagacccgcagcacccacaccactccgcccggagccaggaatcgggggtcccaggcagcaaccccgctcgcgccacgagaagcaacaggtctccagtgcttgaggggtcccccagaactggggatcactcgggctcccccggaccccttcagcccccccaaagtttctccgttcggtttcccggggcaacaagtctcccccacacgtgctgcccccgcccccacctgtgtccgccggggtcttcatgctggggggcccggggcgaagcgccccgattccgggccgcggctcccggcgccctcgctgccccgtcccgtcccgcgcccgtcgggccgccctcgccgcctcacccggcctcgcctctcagagcctctcccctccccgccgccgcctcccgggttaatatcgcactccggggccgggacgcccacgccccccggccggcgacgtcaccgccgcgtcgccatggagacactgcgcccgccccctccccgcgcactcacacacacgctcgtcggcgcgcagccactgaggaccggccggctctgggcttaaaggggccgcgcggcgggggagggaggaaggagggggtgggggtgggatggggtcccgcgggtcatgaccctagtcagaggctccgagtctgcagctaacttaagtcttcggcactcgctacctgctgcccctcctcctctcctgcccactgcgggctccagagtttcttttgggagcctgtatgggaaaacggggggcccttccgaggaagcgggggtcagaaacttttgtggggagggggcagaatcttctctgcagaggggcggggtcaggaccttagaagatgatgaagaccacagcatttcccagcttggttttacccaaccccccaaccctgagcctgaatgggggcagctgtccaggggtggggtggaatgggtgggatgcatttcccagcatcggaaatggggaggcggctgtgccctccgctcctgtggggatggggtcttggcttccctgataacccccgtccagctggggaggaagtgaccagagagaatgcatttggaagcccccaccaccaccgtccccaggctgcagctgtcccggggatagggctggcgccggaggtccccccacgtccactactaggaccgggggttccggaggcggggccgggatacgagggggcgaccaaagtctgaacaaatgtgctcccaaggggcactgagggtcgccaggagagaggaagacagggcttaagatcgaaagccagagcgtagagaagtgttaagtctccgttctctgcctcagccgggagggaaggatgaagcctgaggctctgggaaacaggaaatcacagcgcagatctgatggagcccaggagccggcagcagggtagaggccaaatagaagcaatattcacaggcatagcctggaaacagagtctcaaaaaagactctgaggttccgaaggaggggcgtatgggtggcgggcgggagttgggggggctgggtgggggacgaatccagaagatgggcggggagacagaaaagtcacagatagggaaggcctgcggagctcaggctcccggtacccagggcttcaatcccagcctcctcgcttgcggggtacctagtccaccttagacaggctcctcaccagtgcctaaaaaaaaaagtctcaggcctcctccttggggagaccaagggctccagggaagctttcccccacaacccccgggaattatgtaaccttgcctacggacagtacagctcccccacggatattgtaaccctctgggagcggtgtggtccagcaataataatcatcttcattgttcgaataacagctcccgaattccgagtgttcatgatgtgccaggcaccgggccaagcattgtcaggggcatcttctcatttaatcctcacaaaatcccaacgaggggaattactgctgttatccccatttacagataaagaaagtgatgctctctgagggaaaatcagtccactaaatcttacagccaggaagtattggaactaagattcgaacccagatctaaccaattccaaaccaccacatttaccctttaccattatgctttattacctcttttactaccccctccaaaaaaaaaaaaatgcagattttcaaagatactacatcagggcccggcgcagtggcgcacgcctgtaaacctagcactttgggagccgaggcgggagatcacttcaggtcagaagttccagaccagcctggccaacatggtgaaaccccatctctactaaaagtacagaaatttgccaggcgtggtggcgcacctgtaatcccggctactcaggaggctgaggcaggagaatcgcttgaacccaggaggatcgcttgaatccaggaggcggaggctgtagtgagccgagatcgctccgctgcactccaccctgggtaacagcaaaactccgtctaaaaataaataaataaaaaggctgggcgcggtagctcacgcctgtaatcccagcactttgggaggccgaggcaggtggatcacctgaggtctgtagttcgagaccagcctgaccaacatggagaaaccccgtccctactaaaaatacaaaaaattagccgggcttggtggtgcatgtctgtaatcccagctgctcgggaggctaaggtagaatcgcttgaacccgggagggggttggttgcggtgagctgagatcgcgccattgcactccagcctgggcaacaagagcgaaactcagtttcaaaacaaacaaacaaacaaaaagataacacatcagtaacaaacccagtgacccctaccctcccaccagcaagacagagatgagttacacccaaccttttttttttttttttgagacggagtctcactctgtcgtccagggtggagtgcagtggccccatctcggctcactgcaagctccgcctcccgggttcacgccattctcctgcctcagcctactgagtagctgggactacaggcgccccccaccacgcccggctaatcttttgtatttttagtagagacagggtttcaccgtgttagccaggatggtctcaatcttctgacctcgtgatccgccagcctcagcctcccaaagtgctgggattacatgtgtgagccaccacacctggctgttacacccaacctttgctacttcttgtctctgacaaggcaagtgaactcagttcacctctttttttttttttttttttttttgagatgggggtctcactgtgttgcccaggctggattgcagtggcacaataatggctcactacagcctcgacttccctgcctcaagcaattctcccacttcagcctcctgagtagctgggactacagacacatgccaccatgcccagttacttttttttttttttgagatggaattttgctcttgtcacccaggctgtaagtgcaatggcacgatcttggcccactgcaacctctgcctccctggttcaagcaattttcctgtctcagcctcctgagtagctggaattacaagcgcccaccaccatgcccagctttttttttttttttttttttttgagacgcagttttgctctccttgcccaggctggagtgcagtgacaccatcttggcacatcgcaacctccgtctcctgggttcaagcaattctcctgcctcagcctcccgagtagctaggattacaggcatgcgccaccacgcccagctaatttgtatttttagtagagacggggtttttccatgttggtcaggctggttttgaactcctgacctcagatgatccacccgcctcagcatcccaaagtgctgggattacaggcgtgagccaccatgcccagccaacccagctaatttttttttatttttagtggagttggggtctctctgtgttgaccaggatagtctccaactcctgggctcaaacgatccgcccaccttggcctcccagagtgctggaattacaggtgtgagtcaccctgcctagcgaagttcacctctttttttttttttttttttttgagatggagtctcgctctttcgcccaggccagactgcagtggcgctatctcggctcactgtaagctccgcctcccgggttcacgccattctcctgcctcagcctcccgagtagctgggactacaggcacccgccatcacgcccagctaattttgtgtatttttagtagagacgggatttcaccgtgttagccagaatggtctcgatctcctgacctcgtgatccgccctccttggcctcccaaagtgctgggattacaggcgtgagccactgcgcctggccaagttcacctctttgagcctcaattttcctcatttgtaaaatggaggtgttaatagatcctacatgatcaagttattgtgaaaaatcagagatgtggccaggcgaggtggctcacacctgtaatcccagcactttgtgaggccgaggcaggtggatcacctgaggtcaggagttccagaccatcctggccaacatggtgaaaacccgtctctattaaaaatacaaaaattagctgggcgtggtggctggcgcctgtaatcctagctactcaggaggctaaggcaggagaatcatttgaacccgggaggcggaggttgcagtgagccgagatcatgccattgcactccagcctgagtgacagggcgatactccgtcttaaaaaaaaaaaaaaaagaaaaaaagaaaaatcagagatgcaaagtaagtatgcaataaatactgttaataattattagcagagtgaactctatgccccatggataacaagagcactctaccctacagactccaactgtaacaacagttagagtaaacagcaataaacaggctggctgcagtttgtgtctgacacatgtaatcccagcactttgggaggccgaagcaggagaatttcaagaggccaggagttcaagaccagcctgggcaacagagtgagactctctctacaaaaaatttatttatttttttttttatttatttgagatggagtctccctgtgtcacccaggatgcagtgcagtggcaggatctcagctcactgcaacctcttcctcccaggttcaagcaattctcctgcctcagcctcccgagtagcctagattacaggcttgcgccaccacgcccggctaattttgtgtttttagtagagatggggtttctccatgttggccaggctggtctcgaactcctgacctcaggtgatccgcccacctcggcctcccaaagagctgggattacaggcgtgagccaccaagcctggccgggaggatggttcttactggcagatctgtgtccgtggtgtccaaagggcagcccaggcttatgttttctttttcttcttttttttttttttaatttttattttaagttctgggatacatgtgcaggacgtacaggtttgttacataggtaaacgtgtgtcatggtggtttactgcacctatcaacccatcacctaggtgttaagggacattttttcttaaaaataaaatttaaaaaaataaagcacactgcactgacagtgtgaaattgtgtattaatgtcataatcccactctgacccagatggttggctcaaactcagtgtttctatgaaacacaatcacggatgatcggcatgcctcgtgggagaatctgaacgatccgcggagagtgaaagtccctcgtgaaaatgtcgtctgggcctcttaagtttggtggtttgtgcaaacgtgtccatggatattgtaatctttcagtggcctatgtgactccaattgctttatcaacactgatacccacccccagagatggtagagatggtgaaatattggccaggtgcggtggctcatgcccgtaatcccagcactttgggaggctgaggtgggcaggtggatcacctgaggtcaggagttcaagtccagcctggccaacatggtgaaaccctgtctctactaaaactacaaaaattagctggacatggtgtcgggtgcctgtaaccccagctactcagaaggctgaggcaggagaatcgattgaacccaggagacagatgttgcagtgagctgagattgggttcaagtgattctcctgcctcagactcccgagtagctaggattacaggcgcacgccaccatgcccagctaatttgtttttgtatttttagtagaggcagggtttcaccatgttgccacgctggtctcaaactcctgacctcaggtaaccaccctctttggcctcctgaagtgctgagattacaggcctgagccaccacacccagcttttttattttttatttattattttttttttgaggtggaatttcgcttcgtcacccaggctggagtgcgttggcacgatctcggctcactgtcacctccacctcttgggttcaagcaattctgcctcagcctcccaagtagctgcgattacaagtacccgccaccacgcctggctgaaaaccctgttttcttcccccccgagacagagtctttctctattacccaggctggagtgcagtggcacaatcttggctcactgcaaccaccgcctcccgggttcaacctattcttctgcctcagcctcccaagtagctgggattacaggtgcccaccaccatgcccggctaatttttgtatttttagtagagatggggtttcaacatgttggacaggctggtcttgaactcctgacctcgtgatctgcctcagcctcccaaagtgctgggattacaggcgtgagccaccgagccctgtttctttctttctttttttttttttgagacggagtctcaccatgtcgcccaggctggagtgcagtggcgcaatctcagctcactgcaactcagcctcccgggttcacgccattctcctgcctcagcctcccaagtagctgggactacagaggcccgccaccacgcccagctaattttttgtattttttgtagagatgggctttcaccatgttagctaggatggtctcgatctcctgacctcgtgatccgcctgcctcagcctccaaaagtgctgggattacaggcgtgagccactgcacccggcctaaccctgtttcttaagaaaaaaagatagtgtgatgcgggggattgagtccaatctctccccctctgcaaaaccctgttgcagtgttctctatcaaaacaaaacaaaaatttaaaaaatgaatagtatgactcatctcatatggtatagccaccatacacagtgtgaccacctctaaacagaatgtcacccccttagagtatcactctttctcatctccctgactgaagatgctgaaggcaccagggctcagatccctcttttctcctgtctagactcattcccttgataacctccaccagtcccacagtggatatgccatctctatgctgattacacccacagttatttatttatttattggtttatttatctctctcctctccttctgtctccctccctccctctctctctctctctctctctcgtctctgatctctctctctctctctttctttctttcctctttttccttcttgacagggtctcactctgttgtctggctggagtgcagtggtgcgatcacagctcacagcagccttgacacccttaggctcaggtgatcctcccacctcagcctcctgagcagctgagactacagctgtgcaccaccacacctggctaatttttgtatctttttggagagatggggatcttactatgttggccagactggtcttgaactcctgggctcaagtgatgctcccacctcagcctcccaatagtgttgggattacagctgtgaaccaccgcgcccagcctccgcccacaattctatctcaatctcgactctcccctgaactccaatctggcacatccaactacctcaccagtgtgtctatctggatttctcaagcttgccaaatcaaaaatggtcttcctgaactcccccaaactgctgcccccacaagcttccccatctcaggaaattgcaattccattttgctggctgttcaggctgaataccttggagtcatccttgccccctttctctcatccgatatccaatctgaagggaatttccaccagctctacctttgactattctagaatcagctacttttttcttccttttttcgagatagggtttggctctgttgcccagggtggagtgcagtgacaccatctcggctcactgcaacctccgcctgccaggctcaagccatcctcctacctcagcctcccaagtaagtgggaccaagtcatatgccaccactcctggctaatttttttttttttttttttttttgagatggagtctcgctctgttgccaggctggagtgcaatggcgtgatctcagctccctgcaacctccgcctcccgggttcaagggattctcctgcctcagcctcctgagtagctgggactacaggcgcctgcccccacgcccgactaatttttgtaattttagtagagacggggttccaccatattggccaggctggtctcaaactcctgaccttgtgatctgcccacctcggcctcccaaagtgctgggattacaggcgtgagtcaccatgcccaaccactcctggctaatttttttgtgtatttttttgttgagatggggtttcactatgttgctcaggctggtctcaaactcctggactcaagtgatcctcctgtctcagcctcccaaagtgctgggattacaagcgggaggcattgtatccagcttattttatttatttatttatttatttatatttttctgagacagagtttcgttcttgtgtgttgcccaggctggagtgcaatggcacaatctcggttcactgcaacctctgcctcccgggttcaagcaattctcctgcctcagcctcctgagtagctgggattacaggtcagggtggtctcaaactcctgacctcaaatgatccacctgccttggcctcccaaagtgttggaattacaggcctgagccactgaaccgaactggattcagtctatatttttcactgccttgtcaccagcgcctagaccagtgagtgtcatagaataggtttgtaatattggctgggcacgatggctcatgtctataatctcagcactttgggaggccgaggcaggcggatcatgaggtcccaagatggagaccatcctggctaacacagtgaaactccatctctactaaaaatacaaaaaattagccgggcatggtggtatgcacctgtagtcccagctactcgggaggctaaggcaggagaattgattgatcccaggagacagatgttgcagcggactgagatcacgccactgcactccagtctgggcaacagagcgagactctgtctcaaaaaaaaaaaaaaaaaaaaaaaagagagagaataggctgataatatgtatttgctgaagtaagtgaactgagtgcacattcacctggtccaacccacaaaaaatatgaacccatacaaatggtgcaatgtccataactaataaacccccacatacagtgtgagccccagtgtagaaagtgagaccctcaaatgcattgtgagtctctcatatagatggcaagatagcatataaataatttgtgggtcacgcgcagtggctcatgcctgtaatcccagcactttgggaggctgaggtgactggatcacttaaggtcaggagttcgagaccagcctcaccaacatggtgaaaccctgtctctactaaaaatacaaaaaaattagccaggtgtggtgacgtgcacctgtaatctcaactacttgggaagctgaggcatgagaatcgcttaaacccgggaggcggaggctgcagtaaggtgaggtattaccactgcactctagctctggccaacagagcaagactgtctcaaaacaaacaaacaaacaaacaaacaaaaaaccaatttgtgccccacacaatctacttgtgagtgttatcgaggcagtataatttctttttttttttttgagatcatgaggcagagtctcgctctgtcgcacgatcttggctcactgcaaccaccaccttccaggttcaagtgattctcccacctcagcctcccaagtagctgggattataggcgcttgccgccacgcccggctaatttttgtatttttgtagagatgaggtttctccatgttggccaggctggtctcaaactcctgacctcaggtgattcgcccgcctcggcctcccaaagtgctaggattacaggtgtgagccaccgcacccggccatttcttcttttttttgagacggagtctcactctgttgcccactacaggcgtgtgctaccacacccagctaattttttgtatttttaatagagacggggtttcactgtgttagccaggatggtcttgatctcctgacctcgtgatccgcccgccttagcctcccaaaacgctgggagtacaggcatgagccaccgcgcctggcctgtatttttattttttggagacacagtcttgttccgttgctcaggctggagtgcaatggcgcaatctcagctcactgccacctctgtctcctgggctcaagcaattctcttgcctctgcctcccgagtagttgggattacaggcacccgtcaccatgccttgctaatttttgtggtatttttagtagagacagggttttaccatattggccaggctggtctcaaactcctgatctcaggtgatccacccacctcagcctcccaaagtgctgggagtacaggcgtgagccatcacacccagccgaatttttgtatttttagtagagatggagtttcaccatgttggccaggctggtcttgaactcctgacctcaagtgatctgccttcttggcatcccaacatggtataactcttgtaagcagggggaatccctacatggacattacaaattcaccacagccagagaacatcctaaactgacagtcgagacctcctttcactgcagcaggctccctaggccaagtgaattccctcatgcagagtacacacctctctgctaaaagtctaattctccctcactcctgatgcaaacggactgtggaacacaaaaccctaccctgatcaataaaaatctcccccaaacataatgtaagctcccatgggcaatgtgaacctctgtcccttatgagcctccccacagacattgtaatctctttcatatcgatgacaaagttaacacagacagggcacatctccatgcatggagaactctctgtggctgctgtgaaccccttttgtgatagcatgaagcactccccatggggctacctacaaaggcagtgtgcactctcttgagtgtaaatttcccccagattcagcatctacccaatgtgcacaatataaactgctttgtcaaacctccctcaactccgggtccacccaatatggaaggatgaattgtcttttaggattacattaacggctagatgcagcggcttatgcttatgatcccagcactttgagaggccaagatggaaggatggcttgaggctagaaattggagaccagcctggacaacatagtgagactccatctctacaaaaaaaaaaaaaaaattagcagggcatggtggtgcatgcctgtggtcccagctactcaggaggctgaggcaggaagattgcttgagcccaggcactcaaggttgcagtgagctatgatgctgctactgcactccagcctgggcgacagagtgagaccctgtctgaaaaaaataataataaaataaaaataaataaaattaggccgggagcagtggctcatgcctgtaatcccagcactttgagaggccgaggtgggcaggtcatgaggtcaggagttcgagaccagcctgaccaaaatggtgaatccccgtgtctactaaaaatacaaaaattaaccaggcatggtggcatgcgcctgtaatcccagctacttaggaagctaaggcaggagaatcgcttgaacccaggaggcacaggttgcagtgagccgagatcgcgccactgcactccagcctgggtgacagagcaagactccgtctcaaaaaaaaacaaatttaattaaaaataaataaataggccgggtgcagtggctcacacctgtaatcccagcactctgggaggccgaggcgtgcagatcacgaggtcaggggatcgagaccatcctggctaacacagtgaaacctcgtctctactaaaaatacaaaaaattagccgggcgcagtggcgggcgcctgtagtcccagctactcgggagcctgaggcgtgaacccgggaggcggagtgtgcagtgagccgagatcatgccactgcattccggcctgggcaacagagcgagactccatctcaaataaataaataaataaataaatacaattatattgcagtagtactagtagtatgatagtttaagattatataaataatgtaacagggccgggcgcagtggctcacgcctgtaatcccagtactttgggaggccgaagtgggtggatcatgaggtcaggagttcaagaccatcctgaccaacatggtgaaaccccgtgtgtactaaaaatacaaaaattagccgggtgtggtggtgtgtgcctgtaatcccagctactcaggaggcttagacaggagaaacacttgaacccaggaggcggaggttgcagtgagccgaggttgcgacattgcactccagtctgggcgacagagcaagactctgtttcggggaaaaaaataataataataataacaacagtgtaggttataagattccttccgagtgtgaactcctcgtggacagtgaatttcccccaatctcaacacaaataatttgtgaacagtgggactttctcatagatgtgaatatccttcatattccatgaaccccattggacaactaatatttcttctatgctatgaactagctctatgccctagcacattctttcacacgtagtttgagtgtttcatggacagtatgacttgcaatagactggatgcagtttcctcacaagtggtgtgaattccagtgtggaatctgaacctgtcacaggcaaaagaaagcctccctgcggccagcgtacccatattgcttcccattagcctcggaccagggcgaatacaaagtggagggcatagatgcattgcagacaggttcaccatctggttgtaaacccgtatctgggcagcaggcatctactacaaacagggcatctccctgtcctcctccactccagtgtgataccctcctacccctgggatctttaaaaatctgcctctgtcaggggcgtacacccacaaagtgtagctctccacgtaatgcagtgcgaagccccaagaagcgctgcatttcgtcatctcggccccctgccccaatgcctagtgggctgtcaaactgcgctgtcctaaatgtcaaactcttggaggaggtgacctgtcccccgggccccaggccgcgcgcgttgcctatactgcagcgcgcgacaccccacaagcgcgcgttctctcccctcccggtggcaacagggctttccgcggggccgcgccagacttttcgagaccgtcaattggtcgtagtcccggccacccggcagccaatcaacaaggggaaaggtgacatcactggttctcctcccctcccccaatccaaacttccctactccgtctaccggcagcaacaaccacgtgggggaggggtaagagagtagaaccggtgaggtcattgcaccgccccggccgctgctgattggctgcggggctcgcgggtggcggttggctgctccttgcacctccccctcgtgccgctaccgctgccactgagaggagccaccggcgacgccagagccaggaatacgggtgagtcggggccctgggtctaagatactcctggcgtccagtgagactcacgacgaactgcccttttcgactttttctcctcgccgggtttctttggtgctccaagcactctgtcacatgggagttgtagtctgccttgtactgtcggctatgggccgaagacgtgagaagactacggttcccagcaggaactgcgactagccggtcaacaaacgttcgggccacgccttctacctccgttcattggacaacccgtcccttagcccctcctcctttcatttcattggctactgtccctcacagaggctgggttccggcctaggctgcatggcgactgggtactgtatttgtcatttggaactaagacggcctgcaattggacacgactggtgtccttcacttgttgtagggtagggccctaggcagatcaggcagtcgtaggctcaggttggtgtcggtcccggagggaggccggtcttggactttggccccgccccctagcgctgcccgatgggcccaattggtcgccgcgagcgtcgctcgtcgtcgagaggcggagccgaccagtctgcggatatctattggtctaggctggcgccggtcagtggggttgtgatcgctgattggctggctgctccagctgttgcaggtccattcaccattttgtgtgttggagtaaaaaaaaaagggagaatcgagagggagagccggagggggggcggggagggaccggaccggaccgagccggggccacggccccccgccccgaaaccccgccgagcccaaggtgaggggcggggccagggctgacacaggaaaggggggtccggggggctgggggccgagaggggacaggtggcagggacggggagggggtacagggggaaaggggtgggcggaatggtgggaagggaggagggagtggaggaagtggtgggggtttgacagaaaaagggtaactgggggagggggtggtgggcaaagaagggtaacaggaatggaggggtgacaggactagatcagggtgacagggagagggaggggacagagttggagagtgtgacaaggagaggtgatggggagagaaggtgacaggtccggagatggctgacaggacagtgactgggaggaataggtgacagagataaatgggggtgacaaggagggggtgacaggagggggcctagggcattttaaccgagaggtagagatagaggtagtgacaggatgagagagagagtgtcagagaagctggtgccaggagggctaatgggaacagagggtatgagaccccaaagagccagggcctgggctggcctgggctccgggagttactactcagatctgaggaaggtgagggcccccggggcttgggtgggagttattcagacagggtggacaggaagagagtaggccctaggggaaagaaagcagctctggggcgaagagaggctgggccaggcagcaaggtctaggggtccaggcggcatagttgtaggccctgggtggggtatgcaaaggtttgtgcttggaaaaaactggagccagatctcagtccccaacatggtagtctagtgggtcagcgggtattaggtggtgatggctgcccaacttctgggcatttgggtgccagccccgggacgccctccaggctctgcctgtgaggaccccaggattggcccaagaaagggcaggcctgggactccagggtccacaggaggagcaggcccctagtgagagagcatgaggtcaagggtcccccagtagctggaagactgagtcggggttgcctctcattgtgtttggcttatggttctgggtcccccaaccctcctagaggcctctgttttggcctctcaggttctcttagtcacttcagagtaaagttttttccccttttcttttctcagggcagctcgaaagggggcgggcagtaatgactgttcaggaagtgggtgaggttggcctgttgggcttgtcctgctttctttgaccttatcccacctatccccacttggagttggagggcatatttgggggcctgcggggggctagccgactcagccaccctgccagagccagcccagccagggcggggatgcatgcaggcaagaagaggggggctgggcttgcgggtatcacgctgggtgctgtggggggaggagcaggctcccatccagtgggacagagaaaccctggggtgtagctctgtgtcccactgtgtgatgacgtgtgcgtgcttctgtgcgtgtgtgtgtgtttgtgcgcgtgcgtgtgctcatgcacggccccgtggcagtgctgggtatgagctcttgccccagacatgcccctgcctgctccctgccaggatctggggagatggctgtacctggcagccctagggtgcagagcagagtgggcagccgtccctcgggactctcagctgcccacttcttcccacagtgcctggccatgccaggctgcccagaggggcagagggagggtgggggggtggagaaaggctcatatcacagcccagtcaccaccctttttgtgacttggtacttgtgcatgtgtgtgtgtgtctgagtgcatgtactctctgcatggtgacagtgcgagtaaatgtgccctctggatcatgtgacaggcagcacactgaaatggtcaggagcacggactctggagccagagagcctgggttcagaccctagcactgctgtttcccacctggatgatcttggacaagttgtctcatctttttgtggctcagtttcctcaggtgtgaaatgaggccgatagtagcacctgcttttagggctgttgtgaggatgaaacaggttaataaaggcaagcttagcatggagttcaggacacagggagtgctccataggtgtgaactgttagtgcttttgatgtccccttggggcattcagagcatgtgctctgtgtcctttgcagagccagcaggtgtctgttccccaaggagccagagtgtgtatactcaggggactcaggtgctcacctgtgcctggtgctgactgaggtatcacatgagttgacagcagccagagaggaggccttggggatggtgggatggagacagtagactcagcaagtgggaaatcttagggtacactggctctggagaggttcctgagttgctccgcgtaatcctccgctctcccaccctgcaggtggacaaaaatgaagccaatgaagaaggcatgcactggcctttcaggtcctggcagtggcagcaagtcccccccagccaccagggccaaggctctgaggcggcgaggggctggggagggtgacaagccagaggaggaggatgacgaggcacagcagccgcaaccacagtccgggcccgaagaggctgaggaaggggaggaggaggaggctgagcggggccctggggctgaaggtcctccactggagctgcaccctggcgacccggctccaggcccagcagaggaccccaaaggggatggggaggcaggccgctgggagccctcactcagccgcaagacagccacgttcaagtctcgagcgcccaagaagaagtatgtggaggagcacggagctggcagcagtggggtggctggggcccctgaagagcgggtgcggacccctgaggaggccagtggcctgggggtgcctccacggccacccacctccactcgttcctcctccactgacacagccagcgagcactcggcggacctggaggatgagccggctgaggcttgtggtccaggcccttggccccctggcagcaccagtggcagctatgacctgcggcagctgcggtcccagcgggtgctggctcggcgtggtgatggccttttcctgccggctgtggtgcgccaggtgcgccgaagccaggacctgggcgtgcagttccctggtgaccgagccctgactttctatgagggggtgccaggcgctggtgtggatgtagttttggatgccacacccccaccaggtgccctggtggtgggcacagctgtctgtacctgtgtggagcccggcgtggctgcctaccgggaaggtgtggtggtggaggtggccaccaagccagctgcctacaaggtccgtctcagccctggccccagctcccagccaggcctaccaggcagcctcccgcagcccccacagccactgcaccgtgagccagaggaggctgtgtgggtggcccgctccagcctacgcctgctgcgccccccctgggaacctgagaccatgctgaggaagccccctacaggccctgaggaagagcaggcagagcctggggccaccctgccaccctgccctgctgccctggaccccaaacagcccgaggatgctgaggtctctaagatcagctttggtggcaacctgggtactcactgtgaggagggcgaggagaagcaccctccagccctgggtaccccagccctgctcccactgcccccaccccagctcctgtcaccaccacccaagtctccagcctttgtgggccccggccgccctggcgagcagccctcgccctgccaggaggggagccagggcggcagccgcagcagcagcgtggcctccctggaaaaggggacagcaccggcagcccgggcccgcacgccactgacagccgcccagcagaagtacaagaagggcgatgtggtctgcacacccagcggaatacgaaagaagttcaacggcaagcagtggcgccggctgtgctcacgagatggctgcatgaaggagtcacagcggcgaggctactgctcacgccacctgtccatgcgaaccaaagagatggaaggcctggcagacagtgggcctggcggggcgggccggcccgcggccgtggcagcccgtgagggcagcacggagtttgactggggtgatgagacgtcgagggacagtgaggccagcagtgtggcggctcgtggagactcacggccacgcctggtggcccctgctgacttgtcacgctttgagttcgacgagtgtgaggcggccgtgatgctggtgtcgctgggcagctcgcgctcaggcacgccctccttctcacccgtctccactcaatcgcccttctcgccagccccatcaccctcaccctcaccactcttcggcttccgccctgccaactttagccccatcaatgcctcaccagtcatccagcgcactgcagtccgcagtcgccacctgagcgccagcacccctaaggcaggcgtgctgacgccaccagacctgggcccccacccaccgccacctgccccccgagagcgccactcctctggaatcctacccaccttccagaccaacctgaccttcaccgtgcccatcagccctgggcgacggaagacagagctgttgccgcatccaggggccttgggggcccctggcgcagggggtggaggagccgccccagactttcccaagagtgacagcttagactctggtgtggactcagtgtcccacacacctacaccctccacgccggctggcttccgggccgtgtcccctgctgtgcccttctctcgctcccgccagccctcaccattgctgctgttgccaccccctgccggcctgacctcggatccagggccctctgtgcgcagggtgcctgctgtgcagcgggactcacctgttattgtccgcaaccctgatgtgccactgccctccaaattccctggggaggtgggcactgctggtgaggtgcgggctgggggacctgggcggggctgccgtgaaaccccagtgccccctggggtggccagtgggaagcctggcctgcccccacctctgccagcccccgtgcccatcaccgtgcctccagctgcaccaactgccgtggcccagccgatgcccgcctttggcctggcttcttcaccctttcagcctgtggccttccacccctcacctgctgccctgttgcccgttttggtgcccagcagctataccagccaccctgcccccaagaaggaagtcatcatgggccggcctggaacaggtaagaggtggaagtggatgggctgcgccaggctcacctcgtagagggcctcttgcaagctgaactcttgagaggtgagctcctcaccttgggagggcttcaaggggaggccggcctcctctctgcacagatgttgctgttggaattcacatgtcaggaaagggattggacttttaaggctcaaggcaccgtttccagaggcctcctgtcagagaacgtggtctcaagaggtctatcagtcagcaaacctttcttgagtgcagactgagtcaggtctccatggagctgatgggataagagaatgataattgtggcaacagcttccacatcttgggggactgggcgagggcattgccatggtaagcactgcgtgtaggtgagcttgccaaattttcacatccacctcatagagcacttaccacctgttctaaagacccttttcaaatattagctcattttatcttcacaaccaccctaacaggaaagtgctatgattatgcttctttagaggaaactaaggccagggtcataatttgtccagggttacatggctagtcaatcctggagcagccctcaaacccaggcaggctggcccgtgaccacgtggtcatagtgctggattacagatgggcagatggaggctctaacaggtccttcccaggaggtggcaggaccaggactggagccctcatctttaccactgtgtccagtaaacatcacaggcacggccatggaaggcagcgggggtgtgctgggcacttctccaggtgtgaatctagcctggctacactgaggacagggcgtgtaagccaggagttgaaggatgagtgggaacctgcaaccgtggggtggaagagcctcctgggaggagggcgatgggacagccccaaggccagaaggagcacagcctaggaggggaagagggaaggccagggtggctggagagctgaggctgggggtggaagagtggcatttctgagatggtgctgaacagccacggacccaggctaggctgggccttgtaggagcaacacagagagggtgacagacctgtcggaagctccttcctagcatttctttcttatttgtttatttatgtatatatttttttatttttatagagatggggtcttgctgtattgcccaggctggtctcgaattcctgggctcaagcagtcttcctgtcttggcctcccaaaatgctgggattacaggtgtgagccactgcacctggccttatttatttttatttatttattaatctactgttgattcagggcctggccctgtgctgtgcctggccctgtgctggatggtgctgaggacacagccctacttacacagggctcacagcctctggaaaagacagacccctccctagacagtaacagtctggggtggtcagggatggggtggaggaagccaggaggccgtgggagcccagagaagatgcctgtccagcctgagaagtcagagaaggcttcttggaagaagggccagatgcctatgaactgaaacctgaagggtgtgcagatgtgagcccggcagggtaggcaggaaggatcttcaggcagaggaaagagtttgtgcaaaggccttaaggcaaaagcagatatttgtaagatgttgaatctggaaagtcaaagactctaaatggcaggtgagtgttggggatgtgtggctggattggtgagcaagggtcagatcagagaggacccttaagtaagatcattatgaactgtatcctgagggtactagggagtcatggaaggttttgagcagattcaaccactgctgcaccatagagggtgtgtttgagtctctgaggccagaagcagggagaccagggaggaaggaggctgggtgtggatgtgggtaggagccgctgtggcttgggcttggggcaagagccctttcaggaaggagcactggcctggcccttcccttttggggctccagcccaggccagtcccgagggacagggcacagggacacgggttatgcctgcccctgatgttcatatacagaactgaggctgtgagctgtgtgtttcaccctgacaccaacattttttacatttgttgttataggtggtacaagcaaaatttcacagcagggatttctgtccttaggtaatgaagaaactaaatcagagggtctctaaccactcccctacccttcacccccccatatgcccacaacccccaacatggcccctacagcattgtctcatgtggccactcctgctgtgtggggaggaatggctctggtgcaggggatgctgaggcttaccagagtaggcccagcagggctcttgttaccattttccagatgaggaaaagtgaggccctgacaaatggagagtcttgattgaggccagccagccagtgaggggcaggatgagagctttgagtcatctcccaacctctagactgtgggactctcactaccaaaagtggcagtaataataactcaccgagcagcactggtgatgcacgtgcctggcacacttcaatgagtcctgctgagcctttactccctgaatcctcacaatgccccaggctagtaccatgattattagttccattggacagaggaggaaaccgtagcctgaaaggctaagtgacttgcccgggtcctccagctaggaagagagagagccaggattttgagacagagtctggctctgtcacccaggctgcagtgcagtagcgcaatcttggttcattgcaacctctgcctcctgggttcaagcgattctcccgcctcagcctcccgaatagctgggattacaggagtgtgccaccacgcccggctaatttttgtatttttagtagagccgaggtttcaccatgttggccaggctggtcttcaactcctgacctcaggtggtcctcctaccttggcctcccaaagtgctgggattacaggcttgggtcaccacaccgagctgtcaagagccaggatttgaactcagactgtgcggctccagatcccaggcccttaagcactttcaataataacaatgataacaataatacctactctactgagcgaagactgtgtgcctaaccccgggcttggggccgtttcatcagctccgcctgatgctgtgaagtagattgccaggcctgttgtccaggggtagactgaggatcagagaagggaggccccttgctgggggccacctggttgtcataacttgtccagtgcctatcctggcagttctgaggagcgcctccctaacaacacccatgctgaggtatccaggctgccttcaggttcctgaacagcctgccctttcattcttctcccagaggcctccctaagcccttgggaggtaggcagcttggagccttctccccatggggcccagatagggcagaccgtgttcagtggtatagtgaggttgcaggcctggtcccttctgctggcccatgccagggcctgaccctccatcagagggcagcaggtgtgagggggcggcccagggcagcctgcctgctcctgcccccagccaggcatttgcttccgctgggggacttgctggggcaggcggctggcattctccacattctgtgcatggcatggccagccagctgccgttgccacctccctctgaatcttcccgcctgctccccaggagaggatcccgccccagggcctgcagccccagtccaggaggccagatgtctcagccccattcctggtatggcctccctcccagctcccagcttcctgcctggcttccccttgttgacaggcgttgctccttctcctgggcctctgtctggcggtctggctctgtctgtcttatccttggcttcctatatctctctggtctcctatttctaggtctatacgtgtgtctctctttggacctctgtctgtctgactcttctttgagtctgggggctccctgtgccttcctgggtttgtccctctctggacttcagtcctcgtctgagctttcagcccaccctctttctgttttggctgccagctggcatcctgtgtctctgagccagccttggcctctctttggccctcctactcccactctttagatggacttgctgcccccatgccagcctcccagccccaccctgtgcatatcaggtgttctgttcttttaagacagtgggcagttgccaagcaccaggtctcctacttccttcttggggagtgttgggaggttgtccaggccagggagccccctcatgctctttgacaaattaactgcctactactgtccctgaaatctgctgagaagtgctgagatccatcctgcagacccatccaccatccaagcacctgttcccaagacaggcaggaaagcgggggctgtatggaccaagctaggagatccggctgtagggggcggcaggaaagaagcttcagtgcccacccacctgccagagggcatgacccaggtcatcctacctccccctttaccccttgcctttcatttgatgccagcttcattgaaaggagtcccagatatagtgcaccccaatgggtagggcctcagagacgaggcagtacccaccaactatgcttgggcaggtggggaaaaagaggggccaaaggggttaagcctgggtctcctgactccccagatccagatactgcccaccataatttccattttgtttcaaacagtgaaccctatctccaccagcagaagccagctccctcctcatccctctgccaggcccagggctgagcagtcctggggcaggtgggtgaggaaggcagatgtggatgcaggcacaggcaaggatgagcccagggaggtactgagtctggggaagccaaggggcagggacaactcagtggttcatgggggctgataagggaggatcaggtaggtttctcactggaggtgacatttgagctgaagtatgaggaatgagtagatttcagaatagtcaaagaaaggaaaaggcaattccacctgaaacagctgcatgagcaaagaccaggaagagtgaaagtgcatgaactccgagtggctagttgaggctggagctgacaccagagtccaggcttagcagaagggtgccgtggacgacaggcccagcttgaatgccaggctgagaagctggggctctacgcgggccagtaaagagtcaagaaggcatttagagcaggggagggaaaatgttggatctaggtgtcagagacccctggagaccgccctggaaaggcaggagttgggaagaagatggcttggggaagaggaggagaggaggaagagcttgtgaaggtgcaggagtgagtcttggtaactgtagaagagaccccagctcccccagcttagcagcccccagcaccaggagctgcgaggcgtcaggctgcctcctggcggcaggcggcggcgggacagcaggcgcgcgcatgcgcggcagagggggttggggggtacgtcccggagcccccggtgcccgggtattaatggctccattagtggccgggagggaggcgcattagcggcggcgacggcgtctggctcccattaccaccggcggcagcggctgcaccgcaggcggctggaccctagcccgccgcgccgcctcctccacccccaccctatcccctgttcccgctccccacgagggcccgggcagggaactcccgtccccctatttcagcggaaaagctgattgtgaagccagatagatttgggttcaaatcccggccgtgccacctcgcggctgcaagatgctatcccccctctgagcctgtttcttgcgaagtagtcggggaaaccgggtgctccgggggctgtgtagaagcggactggcacccagcgagggccgcgcccagcccccgctggcacctaggggtgtgggttcccgcgcgcccctgggtgcagacctcctgtgtcgggcctccgtccttctcattggctgccgtctcgcccgctgaccgctgattggccgagacctgcttctccgcccctgagcgattaacccctgcgctgccgcgtcctcgggctgggtggggtaccctccctcccaccgcagacagctcgggtgccagctggccggcgccccgccgcggcccgcgtgggtgtcaggccggccgggcacccgtccgccctccctgcacaaagcggctttgtggagcctgccgggggttggctgggggccaggcggcgagtggaaaatctcgtgagcgcggggaggggaggggaacgcagggcggcgccccctcctctgctcgggccttggcgcctccctcagcccgcgccgaccaaccctcccagcccaagcgcctgtacacccctttcccgcccccgcaccttcccttccccaaacccacgtctctcaacccccccacccccgcatcccacccatctcccaatccctggggaccatcccccacacactctccccagtctctcttttcctcctggtccccctgcctaccccagccccactcacactgactcaccccggcgctatttttagccccccatccttgccgagccgcgccagcccaatcctgggctcgttccccaggcaaccctggccgtcgccgacgccgcccggggtgggtgggtgggtgtgtatgtggaaagcgggtgaggggagctggggacaccggggtggtgagctgaggcggggacccgggcctggagagcagggtggggagccgcaggcggccggcaggggtgcggtgcctcgcgggctcaataaatgggccccatgagtttagagtgcgcgtctgcctgtccctcggtctgtcagcatccctggctgctcgccccaggcctctgggcaggcctcagcctgtaccgcccgcccgggtggctgttgatgtcttcgtctgggttccctgtccccaggcctgggtgtggtggcacagtgggggctgtttaggggcagtccttctgtggagttggttaggggttggtgcagggggtggctgccatcacagtcctgctcagtacctttttccaactagggaggccccaattagggttggggatggcaagagagtgggagctgtctagggataggacctgctccctcccctctgctcctaatccacccccacccagggttcctccaccctgaacaatagaagctaagtatagggctggcccagcgcccagggcaggggggcccttcccgcccggattcccgcccctccctgccaggctaggcccccacttggttgtaccctgccccggacggggcctcttcccatctctcctccgtgggcactgtgtattctaccagatgtgcacccctcccagatgtgtggggccctctttccctcctgtgccatgcctggctctttttctcaaccaacagaagtcggggatctggggggcagagctcctctgagctctgtccttggactgcattgcagtagagaaggggttaacttgccagtaggtgactcactcaccggtggggagaggagggggcagtggtaggggcagtggtggggagatagcaggccacattgatttcagcctcaattcgtgcctcacattgcagtccctggggcagtgaagtaatggagggtctgagtctggggctgcataggaaggagggggcagtcacctaatagtccctctggttgcccctccaggctcacagccaagtgtctggccctgcagtctctggaggtcagagggctacagaccttcccttcccttttgggctcaggttacccagtttttgccccctctccattccttcagctctgtcagtggatgaggcaggttggggaaagggctcgtctgctcctgttgaccatccaacctgtgtaagagcccagtcttggtccatctgagcctgtgcaacctttacgtgcccaagtgtgtgaccccagtcctgtgcctttactgggtatggctccagggcccctcttgggtgatccagggcctctgggtctctgccagatgggctccacatccttgcctgtgtctttgtgtgagcccccctcgcctttctgtggtccacgtggctctgtatcattgtctaactatattccccagcctctgtttggagttccctccctgggtccaccctgaggttaagccttgagtaatggaaacagcacttgagttagagctctgggctggtacatcttgactgcatgatcttgccacagtttattcaatctctgaggctcattttttcacctgaacaatgggtgtaataaagcatacctccctaggtggctgtgaggattcaatgaaccagataatacatacaagctcccagcacacagcagccccagtaagtgttagtttcctttcttcctggccctttttttctgggagggggggcggggttagtgggtggctggcagagcagtgtggtggggccagccatggtgtgctctgtggttccctgccttatactgctagacagagggtccagagtggccaatgagtgtcagggtgggtggctgaatgatggcggtggccactgagctctgtatacctgatgggcctgggtactgaagcaggtagcacccattagggtaggattatatagagggtggggtcggtatgatggtgtctgtgagagctgagtgtgcactggggataggaggcgctttgtgagtgctaggaaggctgtgtgtgtgacggaggagtgtgtggttgtgtgggaggggtgtggagtgtgtgtagtggacaagcagggctatgctgagttcctcctgtttgacatgttgtctgtttgcatgattcatgtgggctggtgggggtgtgatgaggatgcgggttggcgaagcatgtgtgacagggcatggatgagatgggtgatgtgaacaggatgggtgaatgcacgatggtgggtggggagcgatggaccgtgagcgtgtgaggttgtacatctgtgtgagcaggtatgtgaggtgtgacagcgtgggtgtaagacagagggcatatgtgcccgtggggtgtgtaggagataatgggtgtggcacgaaagtgtgtctgtatgtctgtgaggagtgtgagtgtgagtaggtgagggctcaggatgcctcgcccagccctacgcgcagtttgtctgcccagcggggccaggcgcgcccaggcgggtgtgcgggaggcgggccgagccgcgcgtgagcgtgttcctcgcgcggactggacacacaacagcaccacgcacaacccagagacctccgcagcgcggcgccccgaaccgcccccctggctcggtgcctttactgcagtgcgccctccctgccaccctcctaccgcggccccgcccccggccggctcggggccaaccggagcccgccccgccctgcccttatttgcatatgactgacgttcccccggggcggccaatgggggcgggcgcggcggggcctgacccgcgcgcggcggcggcagccaatgggctcacgcgcggggggccgggcttgcgcggaaggccgcgggggaagcggggaaggggcggggggaggcgcggcggggggaggggagcgcgtagtagtggcggggcggggaggcggtggtggttcggcgcggggctcgctcggagcgcacggacgcacgcacgctggtccgtctgcccgcccggggccggaggtcgacccggcgctgagcctcgggcccggggcccggaaaggcggggcggcggcgccggcagccgggacgcgcggggccagagccgttacccgccggagctgcgagggagggagggaacgagcgagccagcgagcggggaagggagggggccgcccccgcgcacgcgcgtcgcgccccgccccgcctgccccgcctgccccgcccgccggactccgcgagggaggagggagagggagggggcggtgccgatggcccccgtgccgcgcgccccgtgacggcccccgcgcgcgccggggggcggggcggggccggtgcgcgctgacctcccccgccccccgggcggcgggaggcaggcggcgctgtgcgcaggcgcgcccggcagagacccccgcgtggggcggccggaggggggcggcgggggggggggcatgcggcgacggcctcccgctccccccgggcccaagcggcgacggccgaggagcgggctgcgggcggagcggcgtcggccgctgaggaggtgcgagcccctgccgggtcccccctgcgccggaccatgtattcggcccacaggcccctgatgcccgcgtccagcgcggcctcccgtggcctcggcatgttcggtcagtagcgcctgggccctgggactgcaggggtcaaggtgtcggggtgctaagtgcggagtaacggtggtgggggtatagtaggggagagaacagtagaggcagagtaaagggatgacggggaaagttacggagctcggccgggccgagtggttagtgatggcaggtgggagtgtagcggagtggggcgtatctggggacagctgtgatgttaaagtgatgggatggcacaggtccgctgtaatagaaaggtgaggggtgcagagtaactggctctggagcatggggtagaataggaacagcacgagacctgctggtcctaggggaggaggcttggattgggtagtggggctaaggacagggctcaggaagcgagtgaggcactgttagctgagatcagagtgacaggctgcagtgtgtggtgtagtttgcagagagcgcgacacctaagaacctggagggttgtgcactggggaggggttcaggagggagcaggaccaaaggactgccctccattgtctgctgggtcccttttccccaccccccagaaaagaggaggccttgatgggaaagatctttgcaaagagaggcacaggtctaagtccctggaggcttttatatggggttggagggcccagcgggttttcaggggtaagggacagggtcatcgtagtcttgagtgctcttcagtgctgtcttcgtgatcccagtcccttgtttcctgaggtctactttttcctttgtcagcccctctcagaatcaggtctcgaggccagtgcctcgcacagagctcccccctgtccaggcttctgaaggcatggggaggtcacctcaggtcaggttgatccggatcaagggaaggcctggaatgatggagagcagggctagggcggttccctcctcccttcttcatcttccccgagcaggggcctctctcctctgctggttccacttcccccagggagccaggcagtgtgaggggaagcccactggtatcctaggcccgccccaaaagtccagccaggggtaggtcccagcctagggcttgctcttccaccacccacctcttggggctgaaggttggacccctgggaccagcctcttggtgaggaagcatcttcctgtgcatatcctcaaggaaacacctggcacttgtgccctctctgggtagagacttgttacaattctctcttctggcccattgtccgtggtttttcttccaaggagtttaccacaccctcccctgttttgggcaagggggctggaccctggactacagataagccgaggggctgatggggaagggaggctgggaggccgatttctggatggtgcattgtctttgtgggggcaaaggagagagctgctggagccacctgtgcccagccaggaagggcaggtctggcactctgtgtttgtggtgggggaggaaggcaaggagcaggacctctcccacaccacagttgtaagagaccccacagcctgtgcatagtgaacggagagttggaggggaggggacgtggggccgtatgcctcaggaaagggaaagagagcatgaggccaaggtgagacgctgtgttgggcggcgactgggctgctgggaatgtggcatgacgggggtgggggtcccagcccgtagaggtctggggccttgggagtgtgggatggcagccaagcatgacctggtttgtggcaggagcaaatcgttcctctggcctggtccctggtggcagggctggtggagattggtggggggaggagtggggcgtgagtactatttcccttccctgcttctgttttcttttttataaatctagaaacctttcagggaggagtttttcctgagtgacgttgcatggacgagtccaagaggctctggtgttgggggtggggggtagacaaaaggggtggggctacctcatctagggtggggaagagcttgagttggggttggggccaggctctcctgctgcacagctcacctggctcctttccacagtgtggacgaatgtggaacctcgctctgtggctgtgttcccttggcactccttagtccccttcctggcacccagccagcctgacccctccgtgcagccgagcgaggcccagcaacctgccagccacccagtggcctccaaccagagcaaaggtgagggctggtggggactggggggaggcaagggtgtggggtccaggtggcctaggagccctctgatctacctctgtgtccccagaacctgctgagtcggcagctgttgctcatgaacggccaccaggtgggacagggagtgctgaccctgagcggccccctggagccacatgccctgagagcccaggacccggacccccacaccctttgggggtggtggaatctggtaagggtccgcctcccaccacggaggaggaggcctccggccccccaggagagccccggctggacagtgagacagagagtgaccatgatgatgcgtgagttccctgaggcctgggacttgggggtgggatggccagagacatggccctcactgtccctgctgccccgccgcagcttcctctccatcatgtctcctgagatccagttgcctctaccgcccggaaaacgtcggacccagtccctcagtgccctacccaaggaacgggactcatcttctgagaaggatggacgcagccccaacaaggtactttatccctgcctgtcctgtgctcaccccgtggccacccacacctgtctgccaggtcctaactgtcccgctctgggctgtgtttaatgcagcgggagaaggaccacatccggcggcccatgaatgccttcatgatcttcagcaagcggcaccgggccctggtccaccagcgtcatcccaaccaggacaaccggaccgtcagcaagatcctgggcgagtggtggtatgccctggggcccaaggagaagcagaagtaccacgacctggccttccaggtaacgctgttgcctcttggctcctcccagcttcttctggtggggtgggtgagtgaagggttgccctgccctctcctgccaggtgaaggaggcccacttcaaggcccacccagattggaagtggtgcaacaaggaccgaaagaagtccagctcagaggccaagcccacgagcctggggctggcaggagggcacaaggagacgcgggagcggagcatgtcggagacgggcactgctgctgcccctgggggttagtcagccccttggctctcccaccctgccacctccctccccgagagccaccagctacccccttgcttgctcctcccctgccccagcagctcctctctgctctatcgctttaatttggcgacccttatccgtaaaggaaccggcagttgattcatgtgacggagccagggagatccacacagatactaagattcccaaacagcaatctcgttatcaactgttgtttaacgagtgtttactatgtgcctggcactacagggaatataagctgtagtctgcaaaaccccattctatttctagaagaagaaactgaggttcagagaggcaaaatcacttgcttaaagtcataaacaagcaaatgacagagccagaatgtaaaccccagttcggcgggcccccagcaccatagttggggccactgcagctcgcaaacacccctgatgggctgcttccacttattgaggttgtctggtgtgcctggcggtgttctggggcacatttttggagtgagcctatgggtatggcagttctgtgaggttagatggatagttgctatggatatgcacttctatgagagtggggacactagttacttcctctttgagatgagggaaccgaggctcaggccagcggttggctagccagcaccacatgaacctctctccaggcctccttactttcaggagggctgccccccagggaatgggcctgctgcaaccccagagggcaggaatcagcaggaatgagatgctggactggtggtgggtggtggtttttttttttcaccaagtggcccagaaattccagcctgcttctgcctagtacctagaaatatctatgggttgttgggccagtctaggtgctggtgacaggcttactgactgtcatagcgccactctctactttacagtgtcctctgagctcctgtccgttgcagcccagacactcctgagctcagacaccaaggctccggggagcagctcctgtggggcagaacggctacacacagttgggggacctggctcagcccggccccgagctttctcccacagcggggtacacagcctggacggcggagaagtagacagtcaggcgctacaggaactgacgcaggtctagggtgcaggccccctagtgggggtgggcagggaacctgtccagggcagcagccccgctgaaccctctctgccacctatcctgcagatggtgtctggccctgcatcgtactctggcccaaagccttctacccagtatggagctccaggaccctttgcagcccctggtgagggaggtgccttggcggccactgggcggcccccgctgctgcccacccgagcttctcgttctcagcgtgcggccagtgaggacatgacgagtgatgaggagcgcatggtcatctgtgaggaggaaggggatgatgatgtcattggtgagcattgcagggcccagaatcttgcccaggacccagcaggccaaggctcagagggtgggcagaacttggatccaggcccctaggcccctttgttttcttttccacttggtttatggttgcatgtggccagttcaggccctgccgagtaaatccagccctgccctcaggaagcccccagccctgcaggaaatctggaggacagggggcatgaccagatcttcaggtgcagtgttaggggctctgtcctgcaggctcataggctcctgcactgggcagtgggcactgggcatgtgggcacagccctgggctgaggagtagccttcctggacagcactccctgccggtttggagcagagctgagatccaggctccagactgtttctcctgggtccccctgcatctagccccctccccatactgttccctccactccctcagctgacgatggcttcggcaccactgacattgatctcaagtgcaaggagcgggtgaccgacagcgagagtggggacagctctggggaggacccagagggcaacaaggtgagggcttgggtcacggtgctgtcccatcacactccctcctaagccatgggaatgtctgtttctcccgggcttgagagagggggagattaaggtccagagagggcaagctgcttgccccgtggggagttgggtcatagtcaggatgaattgaggccttcagctggcaggggtgcagccctaggctggcctggctgacaggctggatgggcatggctagggggctgctatcgaggtgtcggagtgtcctgacctggggtgtctcccttcctttcatgcagggctttggtcggaaggtgttttcacctgtgatccgttcctcctttacccactgccgccccccactggaccctgagcccccagggcccccggatcctcctgtagcctttggcaaaggctatggttccgccccatcctcctctgcgtcctcgcctgcttcctcctcagcctcggcagccacctccttctcactgggctcaggaaccttcaaggcccaggagtctggtcagggcagcacagcgggccccctacggcccccaccccctggggctgggggtccagcgacaccttccaaggcaacccggttcctcccaatggatcctgccaccttccggcgcaagagacccgaaagtgtgggtggcctggagccaccaggcccctcagtcatcgcggcccctcccagcggaggaggaaacatcctgcagacactggtgctgcccccaaacaaggaggagcaagagggcggcggagccagagtgccctccgcccccgccccatcactggcctatggggccccagcagctcccctgtcccgtcctgccgccaccatggtcaccaatgtggtgcggcctgtcagcagcactcctgtgcccatcgcctctaagcccttccccacctctggccgggctgaggcgtctccaaatgacacagcaggtgccaggactgaaatgggcactgggtctcgggtgcctgggggctccccgctgggtgtcagcttagtgtattcggacaagaagtcggcagcagccacctcaccagccccacacttggtggctggacccctgctgggcactgtggggaaggcgcctgccactgtcactaacctactggtgggcaccccggggtatggggcccctgcgccccctgctgtccagttcattgcccagggggcccctggtggtgggaccactgcgggctcaggagcaggtgctgggagtggccccaatgggccagtacccctgggcatcctgcaaccaggtgccctgggcaaggctgggggaatcacccaggtacagtacatcctgcccacgctgccccagcagcttcaggtggcacctgccccagcaccagcccctgggaccaaggcagcggctcccagcggccctgcacccaccaccagcatccgtttcaccctcccaccgggcacttccaccaacggcaaagtcctggctgccactgcacccactcctggcatccccatcctgcagtctgtaccctccgccccaccccccaaaggtgagacctgggccgggcagcactaggggaggggccatagtcctgtttggctcccttgtaaccttttcctttcttgcctcttaacttccagcccagtcagtttctcccgtgcaggccccgcccccgggtggctcagcccagctgctgcctgggaaggtcctagtgcctctggccgcccctagcatgtcagtgcggggtggaggggccggccagccactgccactggtgagcccgcccttctcagtacctgtgcagaatggtgcccagccccccagcaaggtgagggcctgcctttctctctacctgctggatgttggcccctgtaccccatcatttctttgtcttttttttcagtcttttctccttctccatgtatctggttctctgtcttgccatcttccgtgatgtctctgtgcatcctgactctctcaagtcctcagtgtctgtaccctcctccttctctgtgtccccacctctcactgtcatcttgcccatcctgttctcaccccaagttctgtgttccttgcttttgcttagagtcccacttgaggtcttggtcttcccctgccccagtctggggccacagctcaccctggcctatgggtgcccttctccacagatcatccagctgaccccggtgcctgtgagcacacccagcggcctggtgccgcccctgagcccagccacactccctggacccacctctcagcctcagaaggtcctgttgccctcctccaccaggtaattgcagctgagcccatactcagaggccagggaaggggtggggcggggccggcttacctcactcctccccatttcctctcctgcggcagaatcacctatgtgcagtcagcgggcgggcacgcgctgcccctgggtaccagccctgcgtccagccaggctggaacagtcacctcgtacgggcccacgagctctgtagctctaggcttcacctcgctggggcccagcggccccgccttcgtgcagcccctgctctcaggtgaggggcggcctggcaggcagtgctggggacccagggtggggctgaggcagtccgggccctaacttggtctcctgcttcttcttctctgtctttcagcaggccaagccccactgctggctcccggtcaggtgggcgtgtcacctgtgcccagtccccagctgccgcctgcctgtgcagcccccggaggtcctgtcataacagcattttactctggcagccctgcacccacctcctcagcacccctggcccagccatcccaggcccccccaagcctggtctacactgtggccaccagcacaaccccacctgcagccaccattctgcccaagggcccgccagcccctgccactgccaccccagccccgactagccctttccccagcgccacaggtaggtgtcagatcaacccagagcagagtgagttgggggacccaggggatgggctccagtcaggcctggctcagcaaacaattttctccccactagcaggttccatgacctacagcttagtggcccccaaggcccagcggcccagcccgaaggccccccagaaagtgaaggcagccatcgccagcattcccgtggggtcctttgaggcaggtgcctctgggcggcctggccctgcaccccggcagcctctggagcctggcccagtccgagagccaactgccccagagtctgagcttgaggggcagcccacaccaccagcccctccacccctgccagagacctggactcccacggcccggagcagccccccactgcccccacctgctgaggagcggaccagcgccaagggccctgagaccatggtgagcgcctgcaggccgtggggctcccactgccacttggctgtgcctctccattgacgtctttgcttttctgtcctactcttctttccatgcctgtgtgtctctcaggttaaagggtcccctctgtcccttctgcctgcctgtgttgtctcctctcccatctgaggcccctgtcttggccttcctgaggccgtgtgacagccttctcaaggggtctgctgggcgggctcagatccaactctttgtttctggcctttgccccagagtctgagctcagtgttcgccatctccctgcccatctccaccccaggccagcaaattccccagctcatcttcagactggcgcgtccctgggcagggcctggagaatcgtggggagcctcccactcctcccagcccggccccagctccagctgtagcccctggtggcagcagcgagagcagcagtgggcgggcagccggggacaccccggagcgcaaggaggcggctggtactggcaagaaggtgaaggtgcggcccccgcccctgaagaagacctttgactctgtggacaagtgagcatgggctggggccttggtggagcgtgttagggtggcgggagtgggagcagctgcaggctgaggcgggggaggtgaccctgccggccctccagcagggtcctgtcagaagtggacttcgaagagcgctttgctgagttgcctgagtttcggcctgaggaggtgctgccctcccccaccctgcagtctctggccacctcaccccgggccatcctgggctcttaccgcaagaagaggaagaactccacgggtaggcgagcattgggcacccagggtccttaggtggagggcagactggggccacctgcactgagtctgcttctgtttggccagacctggattcagcacccgaggaccccacctcgcccaagcgcaagatgagaagacgctccagctgcagctcggagcccaacacccccaagagtgccaagtgcgagggggacatcttcacctttgaccgtacaggtgccgtggtgggcagaactttgggggcctggggacctgcaagaggagtgggtctctggaaggcggttagagagtgagagaggtagggtgggtccatccaggctgggaggaagcacagcctgtcagtggtgggttctggagtctggcaggcccctaggttgccctgtgactgtgggcaggacccctctctgactcccctgtgaaatagaatgcagtgagggcttgggtgggcactcagacggtggcaggaaggccctgccgctgctgcagccttgccatgctgcctgtgccctgcacaggtacagaagccgaggacgtgcttggggagctagagtatgacaaggtgccatactcctccctgcggcgcaccctggaccagcgccgggccctggtcatgcagctctttcaggaccatggcttcttcccgtcaggtgagcctgtctcggagtcttggggtcactcgggtgggacttatctgtacatctcatcctgtgctccccaccgtttttctatctccagcccaggccacagccgccttccaggcccgctatgcagacatctttccctccaaggtttgtctgcagttgaagatccgtgaggtgcgccagaagatcatgcaggctgccactcccacggagcagccccctggagctgaggctcctctccctgtaccgccccccactggcaccgctgctgcccctgcccccactcccagccccgcagggggccctgaccccacctcacccagctcggactctggcacggcccaggctgccccgccactgcctccacccccagagtcggggcctggacagcctggctgggagggggctccccagccctcccccccacccccaggtccctccacagctgccacaggcaggtgagggacccctgagaagatgccaggacttatagtaccccctcaggacatggacagtatgtgggggcaggaaggttatctcctcccgggtaaagccatttcgtcctctccagtttggggcggaatgaggcctgctcctcttgtaaatacccccttccctcgaagctccctcccggtgctggggggcagctgaggggctgcaggggcagtctccctcctccaagcccctgtacataacctggagcgtgtgaccttcagagcttttcactttatgcaaaatggctcctgtgagggctgcaagctggagggtggtgcaggccttgggccacagggaggcgcctgtggaatagggggagttcatgcaccccttttttccccagaggggctggactcaggttagtttgggggtgggggctcctgcactttgccacaggcacggggagggttttctcctcaccccctctgccctcccaacttgggttgtactttctaagaaggtgattccccctgcccttgcccccttccccagaacaaaacatgttgatcatgtgcaatatttcttactgtgccgagaagccgcaatgagcgagattaaagctgtttaacacacctgtgtggctgtaggctcttaacagggagggctgttggttgtaccagtcctgtcctgagttgtcatggagcggtaggctttccatgaggtgggggcaacaattccagtaccactgcccccaacttcagaggaaccccataggccaggtccctgacttgctgtggaccagatggcccctctccagtttaggagcctgtgcgctccgggagcctcaatgcctgctggccctgttctcagccattggactgcgtgagtttggggaaggcctgaggcaagatgccactggatggtttaccctcactggctctggggtcattcgtactcaggaaacaggtcccaagaggtcctagcccagaggtggcagtgggtgggagggagcctagtctacctggaatacccttggtcctcagtgtgacccctgctgcccccatgtggcctgggcctgcactgcaactgggcttgaaggaacctcccctgggtgacacccctcctgctcagcatgtggacacagtgcccacctgaggtgacaagatacctacaccctgtgtggagggatgacaactaggagtgggagggtcaggacacctccacagaagtggcatctaagctagagatggagcaccaggaagttccagccagggcaaccgcatatgcactgggtcactatgttcccagaattcttgcctgagcttggtcctgtaggatagtgctggaaagctggtcttaactagtgtttactgattggtaacgcctgcctgaagcacactattgtgatagtggaaattaacctaaccacaagaatcacagtgccttaatggatcagtgatacctgccctgggcagaaatagaaccacagccaggcatggtggctcatgtctgtaatgccagcaccctgggaggccgaggcaggtggattgcttgagctcaggagtcagatcagcctgggcaacatggcaaaaccacttctctacaaaaaatacaataagctggacctagtggcacatgcttatagtagcagctattcaggaggctgaggtgggtggatcacttgagcctgggaggttgaagttgcagtgggctgtggtctcaccactgtactctagcctgggtgacggagagagaccctgtctcacacaaaaaacaccttgcagaactgcagggtcacagatcaggataaggactaatggtggtacccagatacccagacaggttcgaccataaagcaggaaacagcacactgaggaaggagagtttaatgttgtgggaaggcagcaggatgcttagggtgcgggctccagcaggggagcaccttggccctggtcttgggccagcagacgcagaagcagggagtgcagagcccggcaaacaggtgtgtagcccaggcggctcagatgcaggtaatcatacatgtcatgatggctgatggtgccatctgagtgcacaaagccagggtcggcatctaggaagtgggcccgagggtggccagccagtgccgcccgtaccagctcgttcacctgtcggttcttctcccgaagtgggttgggatgttggcctcgcggaagcaggccctgagcaggaacacgaggcgtagtaaggaaacaagcatttgagtatcttgttctctgtgccaacctgtcctccacccaccaccatgaagtttccagctgcagaaaacactagggatgggcaagtggggagggtgggagggtagttcctaaatatcacatcctagccctcatttagcaagagacttctgggttttaccctctttcgttttcttttttttttttttttgagacagagtcttgctctgtcgcccagactggagtgcagtggcgcgatctcgactcactgcaagctccgcctcccaggttcacgccattctcctgcctcagcctcccaagtagctgggactacgggcacccaccatcatgcccggctaattttttgtatttttattagagacggggtttcaccgtgttagccaggatggtctcgatctcctgacttcatgatccgcccgcctcggcctcccaaagtgctgggattacaggcgtgagccaccatgcgcggcctagcctctttccaagtatcacttagaaaaatgttgacattggctaggttcagtggctcacgcctgtaatcccagcatgatgggaggcagagctggataggtcgcttgagcccaggagttcgagaccaacctgggcaacatggtgaaaccccatctctaacaaaaatacacaaaaattagtgggacatgatggcgtgtgcctgtagtcccagctactcgggaggctgacgtgggagaatcacttgagccctggaagcagaagttgcagtgagctgagatcatgccaccgcactccagcctgggcaacagagccagatcctgtctcaaaaaataaataggccaagggaggttgctcacgcctgtaatcccagcactttgggaggctgagacgggtggatcacttgaggtcaggagtttgaggccagcccggccaacatggtgaaatgccatctctactaaaaatacaaaaattagccaggtgtggtggcacgcgcctgcagtctcagctactgtgaaggctgaggcaggagaatcacttgaacccaggaggaggaggttgcagtgaggccagattgcgtcactgcactctggcctggcaacagagcaagactctgtcccaaaataaataaataaataaaagatatcaacatcatggctcatgccaagggatcaatccgttttcagaagaggaaatatcctagctacctacaagtgatggagcctagatttaccccaggaatgcctgacaacttttggcctattcaaggttttttgagggtttttcttttgttttctggtgagacagggtctctgtcacccgggcgagagtgcagtagcatgatcacagctcactgttaccttgaattcctgggctcaagtgatccttctcctttagcctcccaagtagctggggttacaggttttgcgcaccatcatacccagctaattctttttttttttgagatggagtcttgctctgttgcccaggctggagtgcagtggcacaatctcggctcactgcaagctccgccccccgggttcatgccattctcctgcctcagcctcccaagtagctgggactacagacgcctgccaccacgcccggctaattttttgtatttttagtagaaacggggtttcaccttgttagccaggatggtctcgatctcctgactttgtgatccaccctcttcagcctcccaaagtgctgggattacaagtttacaggcgtgagccaccgcacccggcttttttttttttttgagacagagtttcgctcctgttgcccaggctggagtgcaatggtgcaatcttggctcaccccaacctccacctcctgggttcaagcgattctcctgccttagcctcccaagtagctgggattataggcatgtgccaccacgcccagctaattttgtatttttagtagagatggagtttctccacgtgtggtcaggctggtcttgaactcccgacctcaggtgatctgcttgcctcggcctcccaaagtgctgggattacaggcatgagccactgcgcccagcccatgcccaactaatttttttttttttgagacggagtctcgctctgtcgcccaggctggagtgcagtggcacagtatcagcttactgcaagctccgcctcccaggttcatgccattctcctgcctcagcctgccaagttagctgggactacaggtgcccgccaccacgcccggctaatttttttttgtatttttagtagaaatggggtttcaccgtgttagccaggatggtcttgatctcctgacctcgtgatccacctgcctcggtctcccaaagtgctgggattacaggcgtgagccaccgtgcctggcccgttttttagtttttcaatacccccaaagtcttaagccatccctgggcaaaaaaggctaattggtctcggagcatattctcaaccacagccactctgaagggtatagcaagctccaacgtgagattctgcctaaaagccactgctctatgtcaagctgcctagaactgtgccaactgtggctatatctgagggggtcccagaccactgccattcttcctttcccactctcccagcctctcaccagcaccacaacccgggcctggggctgtcgctcattcaccagttgcacaatggccttgatgccaccagtcacctgctctgctgtgtgtccgtggttgttggtgcccacccagaccaccacaatctgtggaaaaagagacatgaagcagcggtgagggggcagccaaaagatgttttagagccccacccaagccccgctcaccttgggccggatgtgttccagctccccattctccagccgccacagtacatgctgtgtgccgtcaccaccaatgccaaagttaagtgcatgcagaggagagaagagctcgcgccagatctgtgggcaagaagtggtgtgggcaagaagtggtaggggcacaagggcactgtccgcatggaccatccccctctgtccaggtgttaaccaaatgccattatggaagaaccttacttcatggaagcagtcttaaaattttacctggagcaaactccagcatggctgaacctcactttatagaaatctattagagtctctcacttattttattttattttatatttttgagacagagttattttatttttgagacagagtctcactctgtcacccaggctggagtgcactggcactatctcggctcactgcaacctccgcctccctagttcaagtgattctcatgtctcagcctcctgagtagctgggactacaggtgtacgccaccacgtccagctaattttttgtatttttagtagagatggggtttcaccatgtgggccagactggtctcgaactcctgacctcaggtgatccacctgcctcggcctcccaaagtggtgggattacaggcgtgagcccatggtgcccagcctatttattttttgagacggagttttgctcttgttgcccaggctggagtgcagtagtgcgatctcggctcattgcaatctctgcttcccaggttctggcgattctcctgcctcagcctgccaagtagctgggactataggcatgtgccaccatgcccagctaatttttgtatttttagtagagacaggatttcgccatgttggccagggtggtctcgaactcctggcctcaggtcatccgcctgccttggcctcccaaagtgctgggattacaggcgtaagccaccacaccctgcctagagtctctcactttaaaccaagccccaggctctgttgctcatgctgaggtgggcggactgcttgagcccaggagttcaagaccaacctgcgcaacagggcaaaaccccatctctacaaaaattacaaaaattagccaggtgcatggtgatgtgcacctgtagtcccagctactcggagactaaggtgggaggatcacttgagcccaggaggcagaggttgcagtgaacagagatcataccactgcacgccagcctgggtgacagagcaagaccctgtctcaaaaaccaaccaaccaaccaaccaaccaacaaaacaaaccaagccccatagaagcaagactcacttcatgaaaatccagtctgcttgagccatgcattgaatcaatggcattacagttgaaacttattttgatgaaacccattacagttggacatgctttgtggaaagatattattatgattgagtcctctttgtggagtgccattagagttgcccttcgcttcctgtaaagtgactatagctttgtgtaaacccaacagggctgcgcactacttaaagcaaacaagaaagagcctcactttaggcaagcctatggcaggaaagcctcattttaggtcttagtacattatacacaaatccaatctgataaaaccaaggcatacatttctttctcaatagaatgttgcaccttacaccaagattctcagagcctcgggctgcctgaggccaatctgggtactctcataatacctcacctggcctgggttctggtccagatgtgtcagcatggacacagggctggatggggcagggggagagggactgccctcacctcgcactggtgcatgagctggaccaaggagtccccgatgaagacgacttcgggttccttatctttgctgtcagccacgaaccgatggtgctgcgggagcgcgcgagagggagtcaatggcatgcacgctccagggcccgccccgccctgctcccttaggcagcgcctcctcaactgccctcagtttcccaatcaggtagtgagagtggcacgaaccagccgttctcctgagccaccccccgcgcccccggactcctcaatatcccaggtgggaacgctcaccagggacatccagcgcccgtcgccctgtacgtcctgcaccggcgtgggcttgctggctgggttctcctctccactcatcttggcgccgcagctcctgcaggatgagcgagtcgggtcggcccgggagtgttccgaacggagctggctccgccacgcccactcctacccctcgcggcaacaaaggaccgtcccaacgctagcacacccgcggaggacgaaggccgatacagggcgccgcctcctctccagggacggaagccttcacttaggaggtaggtggaatcaggaaccttcgcttcccccacgacggccgcacagtgggctcgcccggcgcttcccgctcgggccgctgactcccaggccgcgcacccggcacggggtggggggagggagaggcgagaccatccagctcccgaggcggggaggagggagaaaccacccaccggtcacggggaggggcgaactacctgaagagtcgagagtgggcggggaaaatctagccctctgtctagcaaatgggaagaaaccatttgctgtacagagtgaaatgtgcggaagggaccacctactgttgcgggggggggggtgacccattcacgtggtggggggaggggagcgagtggacgagtccattcttatattcccttgaaggggtggctcgaatgcacctggctgggggggacgctcctattttctactgatgtgggggacagaaaaggaagatgacaaaatgtgaaaattcgaggctcccttctaaggagccactctaaggccgcgccagggctttagtgagcctatctactcgtgggcttcccctactcaaaacaccgtgggtgtgtgtgtgtgtgtgtgtgtgtgtgtgtgtgtgtgtgtgttgaaatctaaagtacatatctttgcattcaagacatcacaggacccctactcaaaacaccgtgtgtgtgtgcgcgcgcgtggcataacatataaactacatatctttgcattcaagacaccataggacctgcttggagggtagaagaaggtgcagaaagagaaaggaaattagagacgcctccagggctcaggtccagtctggcgtccctccggcagatcatcttgcagatctgcagcctctacactctctctaaacccacaggccaactgggtatgtctgagctctgaaacctacatccatagccaaggccacctagggtcgcgcctctcccccaacgctgccccaaattaatctcagacctcagtgtcttctcagatctccctcttctctgggaccaggtggggggctcactccctgctaaacgtcctggtcatgttcttgtagcctcactccaggtgggaccttcccatgtattcattccttcgaggtggattgatactgagacagagatgagtgttattcattgtgtttatgttttcaatccactttcctggaactgggccgggcacacagtggttattccacaagtgcttgctgaatgagtagtaaatgagtgggtcagctcctgaccttgtcccaatgtgtttagggagacagatccagacacagaggtgtaggggtgtcaaagttgtgtttgagggagagacagggacctctggggaggaagaggagaaggactctgaggactatgggtttcctaggagtagtatctcagctgggtctgaaagataatgaagaatgggcaagcagaaagaaaagacacaggtaatcactttcttattaggtttggggaatatcgtggaatagcttgattttaaagtctgagggaggccagcatggaggctcatgcctgtaatcccagcactttgggaggctgacatggtcggatcacttgaggtcaaccagcctggccaacatggcgaaaccacgtgtctactaaatatacaaaaaaaaaaaaaaaattagctaggcatggcagcacacgcccgtagtcccagctacttgggaaggctgaggcaggacaattgcttgagtctgggaggcagaggttgcagtgagctgagatcgcgccactgcagcccagcctgggcaacagtggcccagcttgggtgacacagcgagactctgtcttaattacaaaaataaacaaacaaataaagtctgagggagccaggtgcagtgatgcatgcctgtagtcccagctactggggaggctgaggtgcgaggatcgcttgaacccagaagtttgagaccagcctgggtaacacagtgagaccctgtctaaaaaaaaaaaaaaaaaaaggctgggcgcggtggctcacgcctgtaatcccagcactttgggaggccgaggtgggcagatcacgaggtcaggatcgagaccatcctggctaacacggtgaaaccccgtctctactaaaaatacaaaaaattagcggggcgtggtggcaggcgcctgttgtcccagctacttgggaggctgaggcaggagaatagcgtgaacctgggaggcagagcttgcagtgagccgagatggcaccagtgcacttcagcctgggagacagagcgagacgccgtctcaaaaaaaaaaaaaaaaaaaaaaagggcaagtgcctgtagtcccagttagttgggaggctgaggcaggaggatagcttgagcctgggagatgaggtggcagtggcccatgatggtgtcactgcactccaggttgggtgacagagtgagtccctgtctccaaaaaagaagtcataatcagctaggcacggtggctcactcctataatcccagcactttgggaggctgaggtgggcagatcacttggcgtcaggagttcaagaccagtctgaccaacatagcaaaaccccatctctattaaaaaatacaaagattagctgggcaaggtggtctgcgcctgtagtcccagctacctgggaggctgaggcaggagaatcgcttgaacccgggaggtggaggttgcagtgagttcagactgtgccactgcactccagcctcagtgacagatttaaattccatctcaaaaagaaaaggaaagaaaagaaaagaaaagaaaaaagtcttaattatgccttcaagtcagtgatataagagagaattttttttttttttgatagagtctcgctctgtcgcctaggctggactgcaatggcgcgatctcggctcactgcaacctctgcctcccaggttcaagcgattctcctgcctcagcctcctgagtagctgggactacaggcgtgtgccaccacgcccggctaattttttgtatttttaatagagaagaggtttcactgtgttagccaggatggtctcgatctcctgacctcgtgatctacctgccttggcctcccaaagtgctgggattacaggcgtgagccaccatacccaaccgagaaaaaaatttttaaaaataaagtcttagaggataagttggagcagttcctgaagcaaagcttagtgagaaacaaagcttccaggcattcttcattcaccaggcccatttcaagttagacatattggtctagtttatccttctagcaaccaaatgaggaaggtagttttattaccaacccaattttacaggtcagaaaactaagtctgaccagttacaaacatttccaaggtcacacagcccagttgtgccattttgggcatttaaaccaagcctagctatgaatcacaacactacactaacttttttttgagatggagtctttctctgtcacccaggctggaatgcagtggtgtgatctcggctcactgcatcctccacttcccaggttcaagcaattctcctgccccagcctgctgagtcgctgaatatacagtcgtgagccaatgcatgtggcctaatttttgttcttttacagggtcttgccgtctccctcaggcgggcgtgatcatggctcactgctgcctccacctcctaggcttaagtgatcctcctgcatcagcctcccaagtagctgggcccacaggcaagagccactgcgcccagcttatttatttatttagagacggagtctcgctctgtcgcccaggctgaaatgcatctcggctcactgcaagctccgcctcccgggttcacgccattctcctgcctcagcctcccgagtagttaggactacaggcgcccgccaccacgcccggctaattttttgtatttttagtagagacggggtttcaccgtgttagccaggatggtcttgatctcctgacctcgtgatccgcccacctcggcctcccaaagtgctgggattacaggcgtgagccaccacgcccaaagctaatttattttttgtagtcagggtctccctatgttgtccagggtggtcttgaactcttgggctcaagccagcctcctgcctctgcctcccaaagtgctgggattacagacgtgagccaccacgcccggccaactgtataagttttctagggattatgtctgtggctgcttgggggacagctgtgcatgggggctaccatgacccttcttccctttggcacgcctggtctcaactagccctcgaaagaccgctgatagctatctgaaccaatcagcattcaggaagggggcggacctagtgaacctcacagccaattgagggctgggaggtgctgagaccaagaaagggagatttctgaaattgaggctgggaggggaggggctataaccggcgcttccctggcacgcgccgctaggtttccgtcctctcagagccacgaagccaaagggcatggaaagggcacgcgcatgcgtgtgggggagcccgaggcccggaacagcgccaggtgacttcgagagctggggtcaccgcggaaaagaagccattgcgccccacagctacgtgaagtgggaagggccggggttcgttggggcgagagaggtgcccttcccacaccctgctcctgccaaccgtaccccactcccttcactctgcccaccctgccctaccgcggctggccaccatgcttcctctcctaccctaggcccttcctttgtgatcaggccctgtccctgatcgcgcctctgtctcccttcctgttctcttgaggttttctcaggctttccagacttctcttgctgctctccctctcctgcttctctttctctactatctctttccactttctgcattcccctgtacctcgtctacccctggatttctccgtccagaatcactttctggtcccccaaatccctccaatctcatgaccccttcaccaccctccatcttttgttgttgttgttgttgttgttgttgttgagacagagtctcgttgtgtcccccaggctggagtgcagtggcgcgatctcggctcactgcaacctccgcctcccgatttcaagcgattctcctgcctcagcctctttgagtaggtgagattacagtcattcaccaccacgccggctaatttttgtatttttagtagaggcgaggtttcacatgttgcccaggctggtctcgaactcctgacctcaaatgatctacccacctcggcctcccaaagtgctgggactacaggcgtgagccactgcgcctggcccccaccctccatcttttttttttttttttttttttttttttgagatggagtctcgctcggtcatccaggctggagtgcagtggcgcgatctcggcccactgcaagctccgcctcctgggttcacgccattctcctgcctcagcctcccgagtagctgggactacaggcgcccgccaccgcgcccggctaatttttggtatttttagtagagatggggtttcaccgtgttagccaggatggtctccatctcctgacctggtgatccgcccgcctcggcctcccaaagtgctgggattacaggtgtgagtcaccgcgcccggctcaccctccatcttttaactgtttccccatgtccctgttcctaatagcctctctctgtttcctggcttatcttcccattagctgtgactccttcgacttcatcttacccctgtgattccttatctgaccaaaccttttccaatctctctctgctcacttattttctctcatcttctctctctcttttaagagacaaggtctcactctcttgcccaggctggggcacagtgatgcaatcatagctcagagtaacctccaactcctgggctcaagtgatcctcctacctcagcttccctagcagctgggactacaggtgtgggccaccgaatccagcttttttttttttttttttttttttttgagatagagtctcactctgtcactcaggttgaagcgcagtggcgcaatctcggcttactgcaacctccgtctcctgggttcaagcgattctcctgcctcagcctccagagtagctgggattacaggcgcgcaccatcacatacagctaatttttgtatttttagtagagacaggatttcggcatgttggccaggctggtctcgaactcctggcctcaagtgatctgctcgccttggcctcccaaagtgctgggattacaggcatgagtcaccacacctggcatcatccagctaatttttatttttattttttgtagagatgagggtctcactttgctgctcaggttggtcttgaattcctagcctcaagcgatactcccgcctcagcctcccaaagtgctaggattacagatttgagccaccatgcctggcctcatctggtcattctaaatagtattcccaccacaccccaaaacatctccctattcacttgttttgttttgttttgtttttgagatggagtctcactctattgcccagactgaagtgcagtggcacaatcgtgactcactgcaacttctgccttctgggttcaagcaattctcctgcctcagcctcctgagtagctgggattacaggcgtgcaccaccatgcccagctaattttttttttttttgagatggagtcttgctctgttgcccaggctggagtgcaatggcatgatctcagctcaccgcaacctccacctcctgggttcaagtgattctcctgcctcagcctcttgagtagctggaattacaggtgcatgccaccacgtctggctaatttttgtatttttagtagagatggggtttcactatgttggccaggctggtctcgaactcctgacctcaggtaatctgcctgccttggcctcccaaagtactaggattataggtatgggccactgcggctggccaatttttgtattttcagtaaagacagcattttgccatgttggctaggctggtctaaagtgacctggcctaagtgatcggcctgccttggcctaccccagtgttggtattacaggcataagccaccgcgcccagccctccctattcactttgctactccccttgacttatctgcatgctgatggccaccctatctttatattccaggacaccatggatacccagggaccagtctcccagccttttcagcagcctgagaaacctggtcgtgtccgtcgtcggaagactaggcgggaacgtaacaaggccctggtgggcagccgccggccattagcccaccacgatcctcctgtggccattcgggatccacctgtggtccctactgcctccaagctcgtggtcataacccagggccggctgagccgggagcaccggggtctcttcaaccacgaggtgaaatccctagatgttgcaaggctgcttagcagtgggaccctggtgccaggcagccccacactccccgccaagccctccccaagcccaggcagggcccaggaaccagccccacggtccagggacaaagagaaccaggtgcctggaggttcgggcccaggcccacccagttccccagagttgtctggcgtggggcagctgctggcagagctgcagtgtcagctgagtttgccacaggccttcccccggaggaacctgattcaggatgccagggatgccatcgtgcacaccttgcaggcctgtcatggttgtgtgcctgaccttgccctggtgcttcggggctgccagccacccttgccaggtgagcgtccctcctgcccctgtactcccctttcctttgtcggctctagctcagctagcctctatgcttctttcctctgtgccaggggccaagcctggggtctctgagagaaagatgacacccttctggattaatagccctgatcaagtcccagagcaggagaggcaaaggaagcaacaagggacaaaggagttcaccttccccatgccctacacctccagcatgcccactgcgcacagggggagtctggcaccgccaagaggtccctggccaccatactttccctcactgtcttcgccatctggaacagcctggggtcccccaacagcgtttgacttgttaaaaagcatctggctggtagccacgccaccccctcctcggccctggggggttggcctccctcagcccctgcctcagccttcatcacccctgttgccccgaacctctgtcctggactggagccccagccccccttccccactgcccagcctctcctgggtagtagcccagagcagtccggaagcctggtcttttccacccatgagactgtactgaggagaggctgaggctagggctggggacagatatcttgtactcccagtgacctcaataaagtacttttcatggtcctcttgattttcagtgagttgctgactcagaagagcagcttttcttagctctgagttctaggtccaagatggaggggaaggtactgttgcttgttaccttcatagggcctgaggagccagcatggtggggaaaattgggacttcaattagtccaacacatatgcccactgtggctaactgtgtacctgaccctgagctctggtgatgctggggctccagagtgagtgagacaaaggccttgtcctcatgaggctcccagtttggtggtcggcacacacaaccccagctccagtgattgtgtctaggagagcaagagaggtgcaggggctggggcagtccaaggagggagtgatggctgccctagtgaggagggaattcttcgtagaagagctgtgtttttctttctttctttctctctttctttctttcttttctttctttctttttccttccttccttccttccttccttccttcctttctttccttctttctttctttctttcttttttggagacagagtcttgttttcttgcccaggctagagtgcaatggcacaatcttggctcactgcaacctccgccacccaggttcaagcgattctcctgcctcagcctcccgaggagctgagattacaggtgtgcgccaccatacatggctaatttttgtattttaagcagagatggggtttcgccatgttggccaggctggtctcgaactcctggtctcaagtgatcctcctaccttggcctcccaaagagctgcaattacaggcatgagccaccgtgccctgcgaaccctctatttttcaagggtggtggaaacttggtacttgaggaaaagaacatttcaggcaaggggaacagcatatgcaagtcctggaggaggctgcatagcagatacagggccattttcactcagcaaatccctaggccatgctgggacctagagtaagccacatctgggcctgcccttgagcgcctcctggtctgtgaacacagggaacagtgtatgtgcaggctcagggcaggagtgacagatcagggctgaatctggcccacaggctttttttagtttcacccacgatatgttttaaatgttggaatcaattgcctactgttacaaaccaggcagtttgctttttttttttaaattgcatttctggcttctttcagaaggaaagaaaaaataaaaaaggatctggcagcagcactacaatccttcctggcaacaactggccaagtagcagaggccccctctttgtgggatccatgctctccattaaaaatgtttcacttatatttccagcttggccccttggcttagaaaatttgtaaaaaatggtattttgagcagcccccgttttctgcagtggagaaggatgaagctagaaatgtttgttggagtctgatcaggaaaatcaaggtgaagggcatggcttctactctggaaaagcctttctagggcttgctgttgtccactgggaaaccatagggttgatatctgcatagaggggactgggctaggagatcatagggctgaatgacttggcccaggtcttatggtggacaagtgaaaaagtaggggtcaggctgggatttgaatgaacccaagcaagttattttaacttggatctgaaacatgcttttggctatctcacactaccacctctgtctctcacagcaacccagcttcacagcatggtaagcagtgacaggtcatggtcaggcagaggggtacggtggttatactgaagcctccaccaccaccatgtggtgtaacaagtggcttcccctctctgtgcctccatgggcactttgcagggtgcatcagatctagaacgctggcaactccaggatggacacagctggggatggctgcaatagaggtggtgatgggcaatcaaagacttgttggccaggcgcggtggctcacgcctgtaatcctagcactctgggaggccgaggtgagcagatcactttaggttagaagtttgaaaccagcctggccaacatggtgaaaccctgtctctactaaaaatacgaaaaaatcatccgggcgtggtggtgggtgcctgtaatccctgctactcaggaggctgaggcaggagaatcgcttgaacctgggaggtggaggttgcagtgagccgaggtcgcgccactgcactccagcctgggtgacaaagcaagactcgtctcaaaaaataattagtttggggactacattgaggggaggccaggacagagcatgggtctggggatccggagaaggcagtctggaggaggcatggctttggaagacgtgagttcagtttaggacacaggaaaccataggtatctacgggactccaggaggggagggctggggcggggtgacagaggatgaacgtccccctcccacgcggagaagataggagtcaggttgggccctcttggaggagggggcagggagcgcggcgcccggcggcccctttaatcgggggcgcgcgctggccagcccgcgcgctctcgcctccattgccgggccagtgcgggagccggagcggagccggggccggagcgggcggaatggagcccctgcgcgcgcccgcgctgcgccgcctgctgccgccgctgctgctcctgctgctgtcactgcccccccgcgcccgggccaagtacgtgcggggcaacctcagttccaaggaggtgagcatgccgagccctcctctgcggcccgccggcccccgggggacgcaagggaggcgaggggagcgggtaccgcctcgccccctgccgcccctcctggcggactccgggagcctcgggggagtggggccgagggcgatgggggactgggccagagtcgaggctaaggggagccgtagggtcgcggccagacctgggggttgtaggagggacgttgaggtcagagctgagcggggagggggagcgggttgggagagtcagagtttgggaagggtggtgcagaggtggtgctgaagggacagcacttttcactcagcagagagccccgagctcgccgccacactcccgctcaggaccgggagggggccgtttggaagattcccccgcgcgggatggtctttgggagcacggggtggggtgcaggggagtgtggatattgggggaacggggttagatattggccaggacatgaggtggccaggatgagcatctggcccctaaggtctttctccccagaaagatcccgggaaatgcagggaggagtgtttgaatggaggggaggaaacttgggggggcaatggagggagaaaatcagggcggcaggaatcctggacccacagtgacgggatcagggaaggagtttggaggtgacctggtctccttctagtacttgggaagccaggtacctggggggtagggaagaaaagttgggggtctatggagtaaagagttcttgaaggactcagcggagggtcagactgggcccctttttcaggactgggtgttcctgacaagattttgtttcctctcggattacggccgactggacttccgtttccgctaccctgaggtgagtctcccccaacactcgccatgctgaggctgggtacttcccttggcctccaaaggcacaggctgccccagctcccggtccccaacatctctggtctgcaggccaagtgctgtcagaacatcctcctctattttgatgacccatcccagtggccagccgtgtacaaggcaggggacaaggtgagggctgtgaagagggcatagggggagaggggagaaggtcgttgctggccgggggagtgaccctgtccctgccttccccaggactgcctggccaaggagtcagtgatccggccggagaacaaccaggtcatcaacctcaccacccagtatgcctggtccggctgtcaggtgcaggctcagcctgggggagtgggcaggtgctgaaggatgaagccttcggggcatcaaggacaggcttcagccttctcgtttgtccccaggtggtatcagaggagggaacccgctacctgagctgctccagtggccgcagcttccgctcagtgcgtgaacggtggtggtatattgcgctcagcaagtgtggggtaaggggctggggtggccacctggaccaccttctctttgccttcctgccaacccccaacttgcccagggccccccttaggcctccctaccccccacagggtgatggattgcagctggagtatgagatggtcctcaccaatggcaagtccttctggacacgacacttctccgctgatgagtttggtgagcacgtggggacctagaaaccaggctctctgtgggacaccagagctgggtgcccactgaggggacatccacctgaatgaaccttactcctcctaccaaatcggcagggatcctggagacagatgtgaccttcctcctcatcttcatcctcatcttcttcctctcttgttactttggatgtgagtctggcacatggggtgtgggggaagagataggagggagcagggttgggggaggtgagctgctctccctttctgcctgtggacagcctttccctaccttgcttcctagatttgctgaaaggtcgtcagttgctccacacaacttataaaatgttcatggccgcagcaggagtagagggtgaggttccgtgtcccaacttttgggttctgaaagagaaggcacttggggccagacacctgggcctaagaggaatgcctgggggcctggactcctgggtcctgggggaggaggggctgggggcctggactcctgggtccaagggagaagggcctgggggcttcgactcctgggtcctgggggagaaggggctggagccctagttcctgggggaggatgggctggggacctggacccctggttcctgggggaggagggggtgggacctgacacccctgggtccttgagggagtataaaggccggaactaggctggacacggtggctcacacctgtaatcctagcacttggggaggccaaggtgggcggatcacgaggccaggagttcaagaccaacctgaccaacatggtgaaaccctgtctccactaaaaatacaaaaattagctggacatggtggcgtgtgcgtgtaatcccagctactcaggaggctgaggcaggagaattgcttgaacccgggaggtggagattgcagtgagccgagatcacgccactgcattccaacctgggtgacagagagagactctgtctcaaaaaacaaaacaaaacaaaacaaaacaataaaggcctgaactcctgagtctgggggaggaggggctgggagcctggactcctgggtctgagggaggaggagctgggggtctggacccctgggtcctggaggaggagggtctgggggcctgagcccctgggtctgaaggaggagggggtgggggcctggacccctgggtctgaggggggagggggtgagggcctggacccctgggtctgagggggtagggggtgggggcctgggcccctgggtccttggggagcagggttgggggctggactccagattctcctagcaggtgagtcggggtagaaggtctggagtcctaagggaggaggcgggattcagactgcctggatggtagtgctagagaacagtgatgccccagagctgctttctatcctttcttatctgcccatcctcccctcagtcctgagcctcctatttttctgcatctactggggtcaatatgccaccgatggcattggcaacgagagtgtgaagatcttgggtgagaatgaagctgggtggggagagggtggagcccagggctcaggttgggcatcaggtctgagcctggctctgagccgccccctcctcccttctcccagccaagctgctcttctcctccagcttcctcatcttcctgctgatgcttatcctcctggggaagggattcacggtgacacggtgcccgggcagggcgtgctcgtggggcggctggtgggggagcagggcaggggcagggttggggggctgggtgcatcctcctccctgacggcccccaccctgctgtctcccctcatggcctgctgccaggggccgcatcagccacgcgggctccgtgaagttgtctgtctacatgaccctgtacacgctcacccatgtggtgctgctcatctacgaggcggaagtgagtccgactggcccctggccgggccctgccttcccctgcttttggcgccgcctcccccttgacctgtctgctcgcccttgcccacatcctgctcctgctggctcgctctctctcccactcttcgattttctgctttcccatctgtctaagtgattcctcctctcttcaccatcccgcagcagctttctttctcctccctctgtctctcactgtctgtcacatttgtgctcaatatcgtgactaagagttcaggagtcacacagacctggattccacaccagctctcccacttcctagctgcctgaccttgggtgacgacccctgtctctgggcccattttcttcttggaaaattgggaggatcttacctaccccatggagcccctctaaggctttctatcgtctgtatggctttggccaaagggcttccctcttagccttagtttcctcttctgtgagatggagcagtaataagacctacctcgttgagtagatgctgatggaaaaactcacacatgagaggggtttagccctgtgttgagcaaacagtaactgatttattctcttcctgtctttttcaccctctctctctacctcaatatgcttctgtctccgtgcctggctctcctgttgcttgtgttctgaccgagtacctctgttcccaagtgcccaggggtggggtccggggaccctaatagaggggaggaggccaggctgtgatggaccctctcctgcgggtctagttctttgacccaggccaggtactgtacacgtatgagtcgccggccggctacgggctcattggactgcaggtggcggcctacgtgtggttctgctatgctgtgcttgtctcactgcgacactttcctgagaagcagcctttttatgtgcccttctttgctgcctataccctctggtgagaattggtgggccccagcctgtccctgcctccctctcggggctccccagaagtggttgccccccatctcagaccctccatagtgagggagatggacttttcactcaggcagctgttgcccagaatctgccacttactcactttgtgaaaaattactttcacaagaagtgcatcaggtttacccataaaacaacaggatctcgccaggcgtggtggctcacgcctgtaatcccagccctttgggaggccgaggtgggcgtatcacaaggtcaggagattgagaccatcctggctaacatggtgaaaccccgtctctactaaaaatacaaaaaaattagccagccatggcagcatgcacctgtagtcccagctgctggggaggctgaggcaggaaaatggcgtgaacccaggaggcggagcttgcagtgaaccaagatcgcaccactgcactccagcctgggccacagagcaagactccatctcaaaaaaaaaaaaaaaaaaccaaacaggatctcctcaggccgggcgtggtggctcacacctgtaatcccatcactttgggaggccaaggcgggtggatcacctgaggtcaggagttcgagaccagcctgatcaacatggtgaaaccccatctctaccaaaaaataaaaaaattagccgggcatgctggtgggcacctgtaatcccagctactcaggaggctgaggcaggagaattgcttgaacccgggaggcagaggttgcagtgagccgagatcacatcattgcattccaacctgggcaacagagcaagacttcatcttcaaaaaaaaaaaaaaacaggatctcctcaaagggatatcttgagcaagcataggccactatatgagggccgagtgtctggcacatagtaaatgttcagtaaaaaactattgtagactgggtgcgctggctcatgcctgtacccccagcactttgggaggccaaggtgggtggatcatttgagatcaggagttcaagaccagcctggccaacatggtaaaaccccgtctttactaaaaatacaaaaaaattagccaggcatggtggtgcacgcctgtactgccagttactcgggaagctgaagcaggagaatagcttgaacctgggagactgaggttgcagtgagttgagatcgtgcccctgtactctagcctgggcaacagagtgagactccatctcaaaaacaaacaaaaaacaacaacaacaaacaaaacaaaaaaacacccaaaactattgtaattattatcgttcaccataacatagcaataaggttggcagattctgagccagactgtccgggttcagatctcagctctaagct

SEQ ID NO: 1628 - protein, 483 aa, Homo sapiens
MSGGGPSGGGPGGSGRARTSSFAEPGGGGGGGGGGPGGSASGPGGTGGGKASVGAMGGGVGASSSGGGPGGSGGGGSGGPGAGTSFPPPGVKLGRDSGKVTTVVATLGQGPERSQEVAYTDIKVIGNGSFGVVYQARLAETRELVAIKKVLQDKRFKNRELQIMRKLDHCNIVRLRYFFYSSGEKKDELYLNLVLEYVPETVYRVARHFTKAKLTIPILYVKVYMYQLFRSLAYIHSQGVCHRDIKPQNLLVDPDTAVLKLCDFGSAKQLVRGEPNVSYICSRYYRAPELIFGATDYTSSIDVWSAGCVLAELLLGQPIFPGDSGVDQLVEIIKVLGTPTREQIREMNPNYTEFKFPQIKAHPWTKVFKSRTPPEAIALCSSLLEYTPSSRLSPLEACAHSFFDELRCLGTQLPNNRPLPPLFNFSAGELSIQPSLNAILIPPHLRSPAGTTTLTPSSQALTETPTSSDWQSTDATPTLTNSS

SEQ ID NO: 1629 - DNA, 2660 bp, Homo sapiens
gccctgccagccccagacaagggcacagaaacagccaggccacaccaactacagcagctattccaagcggaagcgcctcactcggggccgggccaagaacaccacctcttcaccctgtaaggggcgtgccaagcgacgacgacagcagcaggtgctgcccctggatcccgcagagcctgaaatccgcctcaagtacatttcctcttgcaagcggctgaggtcagacagccggacccccgccttctcacccttcgtgcgggtggagaagcgagacgcgttcaccaccatatgcactgttgtcaactcccctggagatgcgcccaagccccacaggaagccttcctcctctgcctcctcttcctcatcctcgtcctcgttctccttggatgcagccggggcctccctggccacactccctggaggctccatcctgcagccgcggccctccttgcccctctcctccacgatgcacttggggcctgtggtttccaaggccctgagtacctcttgccttgtttgctgcctctgccaaaacccggccaacttcaaggaccttggggacctctgtgggccctactaccctgaacactgcctccccaaaaagaagccaaaaactcaaggagaaggtgcggccagaaggcacctgtgaggaggcctcgctgccgcttgagagaacactcaaaggtcccgagtgtgcagctgccgccactgccgggaagccccccaggcctgacggcccagctgacccggccaagcagggcccactgcgcaccagtgcccggggcctgtcccggaggctgcagagctgctactgctgtgatggccgggaggatgggggcgaggaggcagccccagccgacaagggtcgcaaacatgagtgcagcaaggaggctccggcagagcccggcggggaggcccaggagcactgggtgcatgaggcctgtgccgtgtggaccggcggcgtctacctggtggccgggaagctctttgggctgcaggaggccatgaaggtggccgtggacatgatgtgttccagctgccaagaagccggggccaccatcgggtgctgccacaaaggatgcctccacacctaccactacccgtgtgccagcgatgcaggttgcatattcatcgaagagaacttttctttgaaatgtcccaaacataagaggctgccgtagtaatccaccccaacggccggaggagccgccggagcccgcctgcccgcccgccgccgaaggagaggagccgcctgcgcagcccccgggcctttgagctgctcccagcgctggtccagagccgatccttgatccgggtcccggatcgtggatccggccgcctagggctcagacttgcggccccgggttgggaggaaaacccgttccggagccgcctgctcccggaaccggacggcacagggcgttcttgcccaccccaggggccaggcttgcggagggggagcccgcggagcggccagactccccggggcgctcagcctccggcgagggtgggagacggctttgtcctggggacactttccctctggaatctcaagacgacgtggcacacattccacgtgggtgctgccgccaccccagtcggtcgtggcgtgcagctgggagccctgggcttgggggtgggggtcgaaacagtactggaagaggcggagggcggctcctagctccgtggactaggcgggggagaaaggaagcctttctgagagcgggctaggccggcactggagaggccggagcctttggaacaaaccgtgcggaacgcgtccaggggccttcccgcccagcctttgccagatctctcgtgcggttcgggcaaagccggggtagacctgggctatgctcagttaggggttgcgggatccccgagtgtgggcgggactgggacaccctttggcctctgtttgtcccctttccagtcctccaccccacccctggagcccagcctgggagcgcaaaacccaagaagcggccagaacgcacctccggctccggcggacgcgcgaccgttgtgcaccaccagggaccgccgcgcctactctgcacgggagcagggacagcgctagatttcgtgtacaaaacctgtgtacccctctatatatatgttacatagaatgtatatatgttgggaacatgctcgcttctcccgtgtgtcgccgccgtgcgtcgtgcgcccgcaacagagccccaaccgggcctttgccgggtaaggggctaccgcgacgccacttgtccacgcagccaccaccggcccgggccagtccctgccagtccgtccgcctgtccgtccgtgtcctcagctctgtccacgcttcgataggcctgacgcagcccccagcccagggccgccctagcaacttcctgtacatatgactgtaaaatggtaaacgtgtgtattatatctggcctcgttatatagtgtatatatatgtatacatatacatatatataatatatatgaagactgtaaatgttaagacgactagtgttcttattagtatattgcttcacactgaagattgtgtgtatcgagctgtttctaaaagatgtttattttccttaagagtaaaaaacagtcattgcattcagaaaaaaaaaaaaaaaaaaagtcaataaagatacaacgattgttttggaaaaaaaaaa

SEQ ID NO: 1630 - protein, 392 aa, Homo sapiens
PCQPQTRAQKQPGHTNYSSYSKRKRLTRGRAKNTTSSPCKGRAKRRRQQQVLPLDPAEPEIRLKYISSCKRLRSDSRTPAFSPFVRVEKRDAFTTICTVVNSPGDAPKPHRKPSSSASSSSSSSSFSLDAAGASLATLPGGSILQPRPSLPLSSTMHLGPVVSKALSTSCLVCCLCQNPANFKDLGDLCGPYYPEHCLPKKKPKLKEKVRPEGTCEEASLPLERTLKGPECAAAATAGKPPRPDGPADPAKQGPLRTSARGLSRRLQSCYCCDGREDGGEEAAPADKGRKHECSKEAPAEPGGEAQEHWVHEACAVWTGGVYLVAGKLFGLQEAMKVAVDMMCSSCQEAGATIGCCHKGCLHTYHYPCASDAGCIFIEENFSLKCPKHKRLP

SEQ ID NO: 1631 - DNA, 1807 bp, Homo sapiens
gcacgagggaagagggtgatccgacccggggaaggtcgctgggcagggcgagttgggaaagcggcagcccccgccgcccccgcagccccttctcctcctttctcccacgtcctatctgcctctcgctggaggccaggccgtgcagcatcgaagacaggaggaactggagcctcattggccggcccggggcgccggcctcgggcttaaataggagctccgggctctggctgggacccgaccgctgccggccgcgctcccgctgctcctgccgggtgatggaaaaccccagcccggccgccgccctgggcaaggccctctgcgctctcctcctggccactctcggcgccgccggccagcctcttgggggagagtccatctgttccgccagagccccggccaaatacagcatcaccttcacgggcaagtggagccagacggccttccccaagcagtaccccctgttccgcccccctgcgcagtggtcttcgctgctgggggccgcgcatagctccgactacagcatgtggaggaagaaccagtacgtcagtaacgggctgcgcgactttgcggagcgcggcgaggcctgggcgctgatgaaggagatcgaggcggcgggggaggcgctgcagagcgtgcacgcggtgttttcggcgcccgccgtccccagcggcaccgggcagacgtcggcggagctggaggtgcagcgcaggcactcgctggtctcgtttgtggtgcgcatcgtgcccagccccgactggttcgtgggcgtggacagcctggacctgtgcgacggggaccgttggcgggaacaggcggcgctggacctgtacccctacgacgccgggacggacagcggcttcaccttctcctcccccaacttcgccaccatcccgcaggacacggtgaccgagataacgtcctcctctcccagccacccggccaactccttctactacccgcggctgaaggccctgcctcccatcgccagggtgacactggtgcggctgcgacagagccccagggccttcatccctcccgccccagtcctgcccagcagggacaatgagattgtagacagcgcctcagttccagaaacgccgctggactgcgaggtctccctgtggtcgtcctggggactgtgcggaggccactgtgggaggctcgggaccaagagcaggactcgctacgtccgggtccagcccgccaacaacgggagcccctgccccgagctcgaagaagaggctgagtgcgtccctgataactgcgtctaagaccagagccccgcagcccctggggcccccggagccatggggtgtcgggggctcctgtgcaggctcatgctgcaggcggccgaggcacagggggtttcgcgctgctcctgaccgcggtgaggccgcgccgaccatctctgcactgaagggccctctggtggccggcacgggcattgggaaacagcctcctcctttcccaaccttgcttcttaggggcccccgtgtcccgtctgctctcagcctcctcctcctgcaggataaagtcatccccaaggctccagctactctaaattatggtctccttataagttattgctgctccaggagattgtccttcatcgtccaggggcctggctcccacgtggttgcagatacctcagacctggtgctctaggctgtgctgagcccactctcccgagggcgcatccaagcgggggccacttgagaagtgaataaatggggcggtttcggaagcgtcagtgtttccatgttatggatctctctgcgtttgaataaagactatctctgttgctcac

SEQ ID NO: 1632 - protein, 331 aa, Homo sapiens
MENPSPAAALGKALCALLLATLGAAGQPLGGESICSARAPAKYSITFTGKWSQTAFPKQYPLFRPPAQWSSLLGAAHSSDYSMWRKNQYVSNGLRDFAERGEAWALMKEIEAAGEALQSVHAVFSAPAVPSGTGQTSAELEVQRRHSLVSFVVRIVPSPDWFVGVDSLDLCDGDRWREQAALDLYPYDAGTDSGFTFSSPNFATIPQDTVTEITSSSPSHPANSFYYPRLKALPPIARVTLVRLRQSPRAFIPPAPVLPSRDNEIVDSASVPETPLDCEVSLWSSWGLCGGHCGRLGTKSRTRYVRVQPANNGSPCPELEEEAECVPDNCV

SEQ ID NO: 1633 - DNA, 420 bp, Homo sapiens
  misc_feature (366)..(366): n is a, c, g, or t
tcggaaaataggttaatgcatattgcttctaacaagtgcatgaagaaatagaagaagctatgtagctttcagttctgacagaaaagggtgaaggagggtatcatttcaagaaaaaaaatagctatcacgcaatggttatctctgaaaatatttgtattaagatgtgtatacatggccaggcatggtggctcatgcctgttaatcccagcactttgggaggcaggtggatcacgaggtcaggagatcaagaccatcctgggccaacatggtgaaaccttcatcttcttacttaaaaatacaaaaatgaggcggggtgtgggtggcccatgcctgttagtccccagctgcttcggggagacttgattntctttgagcctgggggaagccagaggtttgccattgaacttgagttccgcttca

SEQ ID NO: 1634 - DNA, 629 bp, Homo sapiens
ggcacgaggcagagagcaggcgctgggcagtgtggaggtcgttggagtcacttccgcgtcaccagctcctgtgcctgccagtcggtgcccctcccgctccagccatgctctccgccctcgcccggcctgccagcgctgctctccgccgcagcttcagcacctcggcccagaacaatgctaaagtagctgtgctaggggcctctggaggcatcgggcagccactttcacttctcctgaagaacagccccttggtgagccgcctgaccctctatgatatcgcgcacacacccggagtggccgcagatctgagccacatcgagaccaaagccgctgtgaaaggctacctcggacctgaacagctgcctgactgcctgaaaggttgtgatgtggtagttattccggctggagtccccagaaagccaggcatgacccgggacgacctgttcaacaccaatgccacgattgtggccaccctgaccgctgcctgtgcccagcactgcccggaagccatgatctgcgtcattgccaatccgggtaattccaccatccccatcacagcagaaagtttcaagaagcatggagtgtacaaccccaacaaaatctttcgcgtgacgaccctggacatcgtc

SEQ ID NO: 1635 - DNA, 1730 bp, Homo sapiens
gtggtgagggtgactggggactaggcactaggcctttggtgcaggcgcctgaggacktggttgcactctcccttctggggatatgcccttgagcccaggcagaggagagcacagcccagggcaggacctggcagccctggtacagagcccagagggggcatcagttcctgctggtcctgctctgtttacagacaasctgctgtcctccctgcaaaggggagtgggtggggcagagggcaaktgccaggggggcacaaggctgggcatgtggctggcatgagacggtgtctgagtaatgtcaggcacctggaggcattgaccccaggaccttggaccccagacctctgaccgtggggcagccagcgtccaggtaccccaacccctgccctgggtccggcgtccccccattagtgagtcttggctctacttatagcatctgacaccagaggggccgaaaatagcccctggagaagggggaggagggggctatttaaagggcctgggaggggagagagaatgaggagtgatcatggctacctcagagctgagctgcgaggtgtcggaggagaactgtgagcgccgggaggccttctgggcagaatggaaggatctgacactgtccacacggcccgaggaggggtgagtgtgggtctgctagagtccctgcctctgctcccccagagcaccctcactgagccatgaggccagagcatgaagccctggagaaatttctgggggtgggggcaggaagaatgccccatggggagagcaaaggggaaccacccttcctgcccccaggtcccagcagcccaggggagccccccacccagcctgtgcccagagagcaacagctcccaggagctcactgcccctcccctctccccagctgctccctgcatgaggaggacacccagagacatgagacctaccaccagcaggggcagtgccaggtgctggtgcagcgctcgccctggctgatgatgcggatgggcatcctcggccgtgggctgcaggagtaccagctgccctaccagcgggtactgccgctgcccatcttcacccctgccaagatgggcgccaccaaggaggagcgtgaggacacccccatccagcttcaggagctgctggcgctggagacagccctgggtggccagtgtgtggaccgccaggaggtggctgagatcacaaagcagctgccccctgtggtgcctgtcagcaagcccggtgcmcttcgtcgctccctgtcccgctccatgtcccaggaagcacagagaggctgagagggactgtgacttgggctccgctgtgcccgccccctgggctgggcccttcctggctaggacctgtggaggggcagctcgctggcccatggctgctttgtagtttgcccagagttgggggctaggggaggggggagccagaggccaggatgcctgagccccctgagttcccaaagggagggtggcagagacagtgggcactaagggtggagagttgggggccagcacagctgaggaccctcagccccaggagaagggacaaaaggtactggtgagggcaagaggtgcctgggaggagtggccctgatccaggaaaatgtgaggggaatctggaacgctctaggcagaagaagctgggagggagggggaggtgaaaagggcagaggcaaggatggtggggcccccagcaccctctgttagtgccgcaataaatgctcaatcatgtgccag

SEQ ID NO: 1636 - protein, 167 aa, Homo sapiens
MATSELSCEVSEENCERREAFWAEWKDLTLSTRPEEGCSLHEEDTQRHETYHQQGQCQVLVQRSPWLMMRMGILGRGLQEYQLPYQRVLPLPIFTPAKMGATKEEREDTPIQLQELLALETALGGQCVDRQEVAEITKQLPPVVPVSKPGALRRSLSRSMSQEAQRG

SEQ ID NO: 1637 - DNA, 1916 bp, Homo sapiens
tgagcgaagctcctgcacctcatcctccacccaccagagagatgggaagttctgtgactgctgctactgtgagttcttcggccacaatgcgccacccgctgccccgacgagtcggaactataccgagatccgggagaagctccgctcgaggctgaccaggcggaaagaggagctgcccatgaaggggggcaccctgggcgggatccctggggagcccgccgtggaccaccgagatgtggatgagctgctggaattcatcaacagcacggagcccaaagtccccaacagcgccagggccgccaagcgggcccggcacaagctgaaaaagaaggaaaaggagaaggcccagttggcagcagaagctctaaagcaggcaaatcgtgtttctggaagccgggagccaaggcctgccagggagaggctcttggagtggcccgaccgggaactggatcgggtcaacagcttcctgagcagccgtctgcaggagatcaaaaacactgtcaaagactccatccgtgccagcttcagtgtgtgtgagctcagcatggacagcaatggcttctctaaggagggggctgctgagcctgagcctcagagtctacccccctcaaacctcagtggctcctcagagcagcagcctgacatcaaccttgacctgtcccctttgactttgggctcccctcagaaccacacgttacaagctccaggcgagccagccccaccatgggcagaaatgagaggcccccacccaccatggacagaggtgagggggccccctcccggtatcgtccccgagaacgggctcgtgaggagactcaacaccgtgcccaacctatcccgggtgatctgggtcaagacacccaagccgggctaccccagctccgaggagccaagctcaaaggaagttcccagttgcaagcaggagctgcctgagcctgtgtcctcaggtgggaagccacagaagggcaagaggcagggcagtcaggccaagaagagcgaggcaagcccagccccccggcccccagccagcctagaggttcccagtgccaagggccaggtcgctggccccaagcagccaggcagggtcctagagcttcccaaagtaggcagctgtgctgaggctggagaggggagccgggggagccggccaggaccaggttgggctggcagtcccaaaactgagaaggagaagggcagctcctggcgaaactggccaggcgaggccaaggcacggcctcaggagcaggagtctgtgcagcccccaggcccagcaaggccacagagcttgccccagggcaagggccgcagccgccggagccgcaacaagcaggagaagccagcctcctccttggacgatgtgttcctgcccaaggacatggacggggtggagatggatgagactgaccgagaggtggagtactttaagaggttctgtttggattctgcaaagcagactcgtcagaaagttgctgtgaactggaccaacttcagcctcaagaaaaccactcctagcacagctcagtgaggccctgcccaggctgagctgcttcagggcatcctgaggccctgactgccagctgaaggcgtataatttttccctccgtgtgccccacctacccgtccaagaccctctgtgctccccaccatcctggtccaaccaaaagctgaacggatgccacactgtgctggggccccttgacctcagcagagccgcttcctggtgctacgcagcctccacactcagagcccgtggactgggctggcctaagggccagggctgatggtactgctggcccaacactgctctctttgtgtttggtttttttgtttttgtttttattttgtttttttccaattctttacttttgatactgtgaagatctttcgtgccgaaagataaagcaacatttggacac

SEQ ID NO: 1638 - protein, 448 aa, Homo sapiens
MKGGTLGGIPGEPAVDHRDVDELLEFINSTEPKVPNSARAAKRARHKLKKKEKEKAQLAAEALKQANRVSGSREPRPARERLLEWPDRELDRVNSFLSSRLQEIKNTVKDSIRASFSVCELSMDSNGFSKEGAAEPEPQSLPPSNLSGSSEQQPDINLDLSPLTLGSPQNHTLQAPGEPAPPWAEMRGPHPPWTEVRGPPPGIVPENGLVRRLNTVPNLSRVIWVKTPKPGYPSSEEPSSKEVPSCKQELPEPVSSGGKPQKGKRQGSQAKKSEASPAPRPPASLEVPSAKGQVAGPKQPGRVLELPKVGSCAEAGEGSRGSRPGPGWAGSPKTEKEKGSSWRNWPGEAKARPQEQESVQPPGPARPQSLPQGKGRSRRSRNKQEKPASSLDDVFLPKDMDGVEMDETDREVEYFKRFCLDSAKQTRQKVAVNWTNFSLKKTTPSTAQ

SEQ ID NO: 1639 - DNA, 5655 bp, Homo sapiens
aaaaaatcctgcggtgcagtttttataccagaaactgataggttggctaaatgaagatcaaaggaaggattttggtttcctggtggacattttgtacagtgctctccggtgctgtgacaatgatatggaaagaaaaaaagtcttggatgatctaaccaaggtggacttgaaatggaattctcttcttaagattattgaaaaggcatgtcctagttcagataaacatgctttagtaactccttggctcaaaggcgatatccttggtgagaaattggtcaacttggcagattgtctttgtaatgaggacttggaatccagggtatcttcagaatctcacttctcagaaagatggactcttctaagcttggtattatcccaacatgttaaaaatgattacttgattggagacgtatatgttgaaagaatcattgttagacttcatgaaactttattcaaaacaaagaaattatcagaagctgaaagcagtgactcatcagtgtcttttatctgtgatgtggcctataactatttcagctcagcgaaaggatgcttgctaatgccatcatctgaagatttattattaactctctttcagttatgtgctcagagcaaagaaaaaacacatttgccagattttcttatctgtaaactgaaaaatacttggctctctggtgtaaatttattggttcatcaaactgacagttcatataaagagagtaccttcctacatttgtctgctctgtggctgaagaaccaagttcaggcttcatctttggatatcaacagtctccaagtcctcttgtctgctgttgatgatttgctaaatacacttctagagagtgaagattcttatcttatgggagtttatattggaagtgtaatgccgaacgacagtgaatgggaaaagatgaggcagtctcttcctatgcagtggttacatagacctcttttagagggaagattgagtttgaattatgaatgtttcaaaacagattttaaggaacaggacataaagacacttcccagccatttgtgtacttcagcattattgagcaaaatggtcttaattgcactgagaaaggaaacagtcttagaaaataatgagcttgagaaaataattgcagaactgctttattcactgcagtggtgtgaagaattagataacccacctatttttctaattggattttgtgaaatacttcaaaaaatgaatattacgtatgataacttacgtgtacttggtaatacgtcgggccttttgcagctgttatttaacaggtccagagaacatggcacactgtggtctcttattattgctaagttgatcctttcccgaagcatttcatctgatgaagtaaaaccacattataagagaaaagaaagtttttttccactaactgaaggcaatttgcataccattcaaagtctatgtccatttttgtcaaaagaagaaaagaaagaatttagtgctcaatgtatacctgctcttttgggctggactaagaaagatctttgcagcactaatggaggttttggacatcttgccattttcaattcttgtctgcaaaccaaaagtatagatgatggagagctattacatggaatattaaaaatcataatatcctggaagaaagagcatgaagatatttttcttttcagttgtaatctatcagaagcaagtccagaggtactgggtgtaaatatagaaataatccggtttctttccctgtttctgaaatactgctcatcccctttggcagagagtgagtgggacttcatcatgtgctccatgttggcttggttggagacaacaagtgagaatcaggcattgtattctattccacttgtgcaactgtttgcctgtgtcagctgtgatttggcctgtgacctcagtgctttctttgattccacaactctggataccattggcaatcttcctgtaaatctaatcagtgaatggaaagaatttttttcccaaggcatccacagtttgcttttacctattttggtgactgttacaggagaaaacaaagatgtgtctgaaacatcctttcagaatgcaatgctgaaacccatgtgtgaaacattaacgtatatctcaaaggaacagctattgagtcacaaacttcctgcaagattagttgctgaccaaaaaacaaacttaccagaatatctccagactttgttaaatacattggccccattactcctcttcagagctaggcctgtgcaaattgctgtttatcatatgctatacaaattgatgcctgaattaccacagtatgatcaggataatctaaagtcatacggagatgaagaagaagagccagccttgtcaccaccagcagcactgatgtctcttcttagcattcaagaggacttactagaaaatgttttggggtgtattcctgttggacagatagttactattaaaccactgagtgaagacttctgttatgttctgggataccttctcacttggaaattaatactaactttcttcaaagctgcatcatcacagcttcgggctttgtattccatgtatcttcggaaaacaaagagtttgaataaattgctctatcacctgttcaggcttatgccagaaaatccaacctatgcagagacagcagttgaggtcccaaataaggaccctaaaacattctttactgaggagctccagctgagtattagagaaacaacaatgcttccataccacattccacacttggcttgttcagtctatcatatgacattaaaagacttgcctgccatggttaggttgtggtggaatagcagtgagaagcgtgttttcaatattgtggatagatttacaagcaagtatgtcagcagtgttctttcttttcaagaaatatcttctgtacaaacaagtacacaactatttaatggcatgacggttaaagctcgagctactactcgagaggtaatggctacttatactattgaggacatagttattgaacttataatacaactgccttcaaattatccactgggttcaataatagtagaaagtgggaaaagagtaggagtagctgttcagcagtggcggaactggatgctgcagttaagcacttacctcacccatcagaatggaagtattatggaaggcttagctttatggaaaaataacgtagacaaacgttttgagggtgttgaagattgcatgatctgtttctcagtcattcacggtttcaactattcccttcccaaaaaagcctgtagaacatgcaagaaaaaattccattcagcctgcttgtacaaatggtttacatctagcaacaaatccacttgtccactgtgtcgtgagacgtttttctgagatttttttcactggaagggatccctgaagtacatcaaacaaaggcattggatttggatccgtctgaaagtgtggatgtggggaagccagtgagcattacttttaaataggaccttctctggaaaattattttggttaatgtaataatcctaaaatcaggtttacttaactttagattgctttgtaaatgtttggaaactttcttttacaaaagaatattacatatttgagagaaaatatttctattaatggtttaatttctttgtatatttaaaaataaatatgaaaaacccctaaattacagaattggaatttgtgaaaagattgcacaactatattattgataaacccattccgtttgttgatctgtgttttagaatagtccaagtgaagcaaaacgaactgagagagctgatttacatctatagatattttaagccttatttattagttatgacaataaattagtattctgatatttgtagattattttaatgataaaaatgacactaagctattaatacggcttgtcttaagatatctggaggcatgctctgaaatcctatataaaagagtttaaactgaactttaaggtgcctccatttatcaagggttatgaaactcagaaaattaaattcttgatgctgacctttttgcttgtgggagaattatttctatatattagtgaaatttgaattgtaaacttgtcagtgaatttatcactctgagcgagtctctagagggtgagaatttgagagaaatagtaatttgattatttcattcatgaagcggagtggtagttatccttctattgagagggaagaaataaatgagtattactgaaacttaaagatcagtggaaaaaaaaaacatttaaaaatgttgtaggagactttcaattttggaagcaaactgagctattcttaccagccaaagttatactaaataagagacttgggggagcaaatgtttttcagccttcagaaatgaaagttaaggattttagcactaggtaaaattcagtataataggctgaagtggagtaagtgaaaacctgccttttgccactcttaaaaattgtgcccaaaatataaaagtgtggaactttagaacttggaataattttattgcagtcttccattacatggaaatagcatatctaatatctaggttacttgagagaccagctaatcatctctgttgcacatgtttaattggcaaaaagcaattcatgataaataaaattactgctttccatctactgggtaaaatgactattgaaatagtatgaatgtggtcagaggattatagttgagagtgaagtactatgtgtgagttatagatctctcgaattatatttatagatgcagtgtcctgcccagttttgtttgcctcctacattttactgtaaaatatttattgtcttctagccttgagcctctgagggtcagtaagtgaagtacagatagcaaaattttactacctcgttaacccttttcttaaaatattctctatctttctatgtctctttctgacatagtaatcccaaaggattgtgttactccccgtgaaagttattacttttcctttaaaaatggttttataataagactgtttaaaacctttccagtattggtacatcttggcttctggcccaaaccccaagcagaaaagaaaatggaataatggagcattgtttttccacattagtattagggcatcagattcttggtgaaacactataattaagtagttataattaaataactgttcttcatacttaggactcttaatacatttctttaagacttgtaagtataattgtaaagcttgttaactgtttatatactaaagaaaaagctttacaagataagactgaaattcagaataccacattaaagttttatctgtacagcgttgacaactctaactaaaaggattacagcccttaaaattttagcttaaggacattttaaaattgcatgagattagcaaaattattaatttaaaaccccaaagtaaattgcaaattttaaaatttatttttgactcttttatcacatgctccaatgtatgtacataagtgtctgtggcttaaataatatgttgttatttgatacatttttgtggtgcaagtaattaatgttattatttgattgttataccatatgtgcccattaaaattctttttaattaaaaatatttcaaatatgcagaaaaataataatataaatgcccttgtacccttcacatactattttgccatatttgcttctgatttttaaataaataaaatgttactcttttgtacttct

SEQ ID NO: 1640 - protein, 1112 aa, Homo sapiens
KNPAVQFLYQKLIGWLNEDQRKDFGFLVDILYSALRCCDNDMERKKVLDDLTKVDLKWNSLLKIIEKACPSSDKHALVTPWLKGDILGEKLVNLADCLCNEDLESRVSSESHFSERWTLLSLVLSQHVKNDYLIGDVYVERIIVRLHETLFKTKKLSEAESSDSSVSFICDVAYNYFSSAKGCLLMPSSEDLLLTLFQLCAQSKEKTHLPDFLICKLKNTWLSGVNLLVHQTDSSYKESTFLHLSALWLKNQVQASSLDINSLQVLLSAVDDLLNTLLESEDSYLMGVYIGSVMPNDSEWEKMRQSLPMQWLHRPLLEGRLSLNYECFKTDFKEQDIKTLPSHLCTSALLSKMVLIALRKETVLENNELEKIIAELLYSLQWCEELDNPPIFLIGFCEILQKMNITYDNLRVLGNTSGLLQLLFNRSREHGTLWSLIIAKLILSRSISSDEVKPHYKRKESFFPLTEGNLHTIQSLCPFLSKEEKKEFSAQCIPALLGWTKKDLCSTNGGFGHLAIFNSCLQTKSIDDGELLHGILKIIISWKKEHEDIFLFSCNLSEASPEVLGVNIEIIRFLSLFLKYCSSPLAESEWDFIMCSMLAWLETTSENQALYSIPLVQLFACVSCDLACDLSAFFDSTTLDTIGNLPVNLISEWKEFFSQGIHSLLLPILVTVTGENKDVSETSFQNAMLKPMCETLTYISKEQLLSHKLPARLVADQKTNLPEYLQTLLNTLAPLLLFRARPVQIAVYHMLYKLMPELPQYDQDNLKSYGDEEEEPALSPPAALMSLLSIQEDLLENVLGCIPVGQIVTIKPLSEDFCYVLGYLLTWKLILTFFKAASSQLRALYSMYLRKTKSLNKLLYHLFRLMPENPTYAETAVEVPNKDPKTFFTEELQLSIRETTMLPYHIPHLACSVYHMTLKDLPAMVRLWWNSSEKRVFNIVDRFTSKYVSSVLSFQEISSVQTSTQLFNGMTVKARATTREVMATYTIEDIVIELIIQLPSNYPLGSIIVESGKRVGVAVQQWRNWMLQLSTYLTHQNGSIMEGLALWKNNVDKRFEGVEDCMICFSVIHGFNYSLPKKACRTCKKKFHSACLYKWFTSSNKSTCPLCRETFF

SEQ ID NO: 1641 - DNA, 400 bp, Homo sapiens
ctgccctcccttgtttccgctgcatccagacttcctcaggcggtggctggaggctgcgcatctggggctttaaacatacaaagggattgccaggacctgcggcggcggcggcggcggcgggggctggggcgcgggggccggaccatgagccgctgagccgggcaaaccccaggccaccgagccagcggaccctcggagcgcagccctgcgccgcggagcaggctccaaccaggcggcgaggcggccacacgcaccgagccagcgacccccgggcgacgcgcggggccagggagcgctacgatggaggcgctaatggcccggggcgcgctcacgggtcccctgagggcgctctgtctcctgggctgcctgctgagccacgccgccgccgcgccgtcgccca

SEQ ID NO: 1642 - DNA, 2076 bp, Homo sapiens
aggttgctcagctgcccccggagcggttcctccacctgaggcagacaccacctcggttggcatgagccggcgcccctgcagctgcgccctacggccaccccgctgctcctgcagcgccagccccagcgcagtgacagccgccgggcgccctcgaccctcggatagttgtaaagaagaaagttctaccctttctgtcaaaatgaagtgtgattttaattgtaaccatgttcattccggacttaaactggtaaaacctgatgacattggaagactagtttcctacacccctgcatatctggaaggttcctgtaaagactgcattaaagactatgaaaggctgtcatgtattgggtcaccgattgtgagccctaggattgtacaacttgaaactgaaagcaagcgcttgcataacaaggaaaatcaacatgtgcaacagacacttaatagtacaaatgaaatagaagcactagagaccagtagactttatgaagacagtggctattcctcattttctctacaaagtggcctcagtgaacatgaagaaggtagcctcctggaggagaatttcggtgacagtctacaatcctgcctgctacaaatacaaagcccagaccaatatcccaacaaaaacttgctgccagttcttcattttgaaaaagtggtttgttcaacattaaaaaagaatgcaaaacgaaatcctaaagtagatcgggagatgctgaaggaaattatagccagaggaaattttagactgcagaatataattggcagaaaaatgggcctagaatgtgtagatattctcagcgaactctttcgaaggggactcagacatgtcttagcaactattttagcacaactcagtgacatggacttaatcaatgtgtctaaagtgagcacaacttggaagaagatcctagaagatgataagggggcattccagttgtacagtaaagcaatacaaagagttaccgaaaacaacaataaattttcacctcatgcttcaaccagagaatatgttatgttcagaaccccactggcttctgttcagaaatcagcagcccagacttctctcaaaaaagatgctcaaaccaagttatccaatcaaggtgatcagaaaggttctacttatagtcgacacaatgaattctctgaggttgccaagacattgaaaaagaacgaaagcctcaaagcctgtattcgctgtaattcacctgcaaaatatgattgctatttacaacgggcaacctgcaaacgagaaggctgtggatttgattattgtacgaagtgtctctgtaattatcatactactaaagactgttcagatggcaagctcctcaaagccagttgtaaaataggtcccctgcctggtacaaagaaaagcaaaaagaatttacgaagattgtgatctcttattaaatcaattgttactgatcatgaatgttagttagaaaatgttaggttttaacttaaaaaaaattgtattgtgattttcaattttatgttgaaatcggtgtagtatcctgaggtttttttccccccagaagataaagaggatagacaacctcttaaaatatttttacaatttaatgagaaaaagtttaaaattctcaatacaaatcaaacaatttaaatattttaagaaaaaaggaaaagtagatagtgatactgagggtaaaaaaaaaattgattcaattttatggtaaaggaaacccatgcaattttacctagacagtcttaaatatgtctggttttccatctgttagcatttcagacattttatgttcctcttactcaattgataccaacagaaatatcaacttctggagtctattaaatgtgttgtcacctttctaaagctttttttcattgtgtgtatttcccaagaaagtatcctttgtaaaaacttgcttgttttccttatttctgaaatctgttttaatatttttgtatacatgtaaatatttctgtattttttatatgtcaaagaatatgtctcttgtatgtacatataaaaataaattttgctcaataaaattgtaagcttaaaaaaaaaaaaaaaaaactcgagactagtgc

SEQ ID NO: 1643 - protein, 447 aa, Homo sapiens
MSRRPCSCALRPPRCSCSASPSAVTAAGRPRPSDSCKEESSTLSVKMKCDFNCNHVHSGLKLVKPDDIGRLVSYTPAYLEGSCKDCIKDYERLSCIGSPIVSPRIVQLETESKRLHNKENQHVQQTLNSTNEIEALETSRLYEDSGYSSFSLQSGLSEHEEGSLLEENFGDSLQSCLLQIQSPDQYPNKNLLPVLHFEKVVCSTLKKNAKRNPKVDREMLKEIIARGNFRLQNIIGRKMGLECVDILSELFRRGLRHVLATILAQLSDMDLINVSKVSTTWKKILEDDKGAFQLYSKAIQRVTENNNKFSPHASTREYVMFRTPLASVQKSAAQTSLKKDAQTKLSNQGDQKGSTYSRHNEFSEVAKTLKKNESLKACIRCNSPAKYDCYLQRATCKREGCGFDYCTKCLCNYHTTKDCSDGKLLKASCKIGPLPGTKKSKKNLRRL

SEQ ID NO: 1644 - DNA, 516 bp, Homo sapiens
gcggccgcagcttctcctggccgcccacgtcccagaagtggcagctgatgcccttggccgtgccgttgctcagcttgatcttctcggtgttgaagccgatggtgggcaccgtgttcacgaactcgttgaacttgagccggtagagcaccgtggtcttgccggccgagtccaagcccaacatgacgatatgcagggactggaaggccgagatgttagaggagatgttgcccatggctcctggctgcggcgccagccactgcggctgcggcgggagggcgccgccccccgagcagtcacgggcccgacgcggccgggcgcacctgggccccgcccgccgccgcccgcaccggccccggggctcggcgtccccgcgggcgcacggcttggcgcgctcagacgccgcagtccccgcgccctcgccggccgggctcgcgatcggcgggcatcgcgtctctacgcgcggctttgtctcccgcgaagccgcctcagatgttcggcgccctccccaggcctggg

SEQ ID NO: 1645 - DNA, 506 bp, Homo sapiens
  misc_feature (474)..(474): n is a, c, g, or t
tttgactgagcaaccctagtgacaggagccgaagcagcagcgcaggttgtccccgtttcccctcccccttcccttctccggttgccttcccgggccccttacactccacagtcccggtcccgccatgtcccagaaacaagaagaagagaaccctgcggaggagaccggcgaggagaagcaggacacgcaggagaaagaaggtattctgcctgagagagctgaagaggcaaagctaaaggccaaatacccaagcctaggacaaaagcctggaggctccgacttcctcatgaagagactccagaaagggcaaaagtactttgactcaggagactacaacatggccaaagccaagatgaagaataagcagctgccaagtgcaggaccagacaagaacctggtgactggtgatcacatccccaccccacaggatctgccccagagaaagtcctcgctcgtcaccagcaagcttgcggngtaacctgagcccccctctcctccccttcctc

SEQ ID NO: 1646 - DNA, 16382 bp, Homo sapiens
ctgcagccatgggtgccctatggagctggtggatactctgggctggagcaaccctcctgtggggattgacccaggaggcttcagtggacctcaagaacactggcagagaggaattcctcacagccttcctgcagaactatcagctggcctacagcaaggcctacccccgcctccttatctccagtctgtcagagagccccgcttcagtctccatcctcagccaggcagacaacacctcaaagaaggtcacagtgaggcccggggagtcggtcatggtcaacatcagtgccaaggctgagatgataggcagcaagatcttccagcatgcggtggtgatccattctgactatgccatctctgtgcaggcactaaatgccaagcctgacacagcggagctgacactgctgcggcccatccaggccctaggcaccgagtattttgtgctcacaccccccggcacctcagccaggaatgtcaaggagtttgccgtggtggccggtgccgcaggtgcctcggtcagtgtcacgctgaaggggtcagtgacattcaatggcaagttctatccagcaggcgatgtcctaagagtgactctacagccctacaatgtggcccagctacagagctcagtggatctctcggggtcaaaggtcacagctagtagccccgtggctgtcctctctggccacagctgtgcgcagaaacatacgacctgcaaccatgtggttgagcagctgctacccacgtctgcctggggcacccactatgtagtacccacgctggcctcccaatctcgctatgatttggccttcgttgtggccagccaggccacaaagctgacctacaaccatgggggtatcactggctcccgtgggctccaggcaggtgatgtggtagagtttgaggtccggccatcctggccactctacctgtctgcaaatgtgggcatccaggtcctgttgtttggcacaggtgccataaggaatgaagtgacttatgacccctacctggtcctgatcccagatgtggcggcctactgcccagcctatgtggtcaagagtgtaccaggctgtgagggcgtggccctggtagtggcacagacgaaggctatcagcgggctgaccatagatgggcatgcagtgggggccaagctcacctgggaggctgtgccaggcagtgagttctcgtatgctgaagtggagctcggcacagctgacatgatccacacggccgaggccaccaccaacttgggactgctcaccttcgggctggccaaggctataggctacgcaacagctgctgattgcggccggactgtactgtccccagtggagccctcctgcgaaggcatgcagtgcgcagccgggcagcgctgccaggtggtaggcgggaaggccgggtgtgtggcggagtccaccgctgtctgccgcgcccagggcgacccccattacaccaccttcgacggccgtcgctacgacatgatgggcacctgttcgtacacgatggtggagctgtgcagcgaggacgacaccctgcccgccttcagcgtggaggccaagaacgagcaccggggcagccgccgcgtctcctacgtgggcctcgtcactgtgcgcgcctacagccactctgtgtcgctgacccgcggtgaagttggcttcgtcctggttgacaaccagcgctcgcgcctgccagtctccctgagtgagggtcgcctgcgtgtgtaccagagcggaccacgggccgtggtggagctggtctttgggctggtggtcacttatgactgggactgccagctggcactcagcctgcctgcacgcttccaagaccaggtgtgcgggctgtgtggcaactataatggtgacccagcagacgacttcctcacgcctgacggggctctggctcctgacgctgtggagttcgcaagtagctggaagctggatgatggggactacctgtgtgaggatggctgccagaacaactgtcccgcctgcaccccaggccaggcccaacactatgagggcgaccgactctgtggcatgctgaccaagctcgatggccccttcgctgtctgccatgacaccctggaccccaggcccttcctggagcagtgtgtatatgacctgtgtgtggtcggtggggagcggctcagcctgtgccgtggcctcagcgcctatgcccaggcctgtctggagcttggcatctcggttggggactggagatcaccagccaactgccccctgtcctgccctgccaacagccgctatgagctctgcggccctgcttgcccgacctcctgcaacggggctgcggcgccgtccaactgctccgggcgcccctgcgtggagggctgcgtgtgcctcccaggcttcgtggccagcggcggcgcctgcgtgccggcctcgtcgtgtggctgcaccttccagggtctccagctcgctccgggccaggaagtgtgggcggacgagttgtgccaaaggcgctgcacctgcaacggcgccacccatcaggtcacctgccgcgacaagcagagctgcccggcgggtgagcgctgcagcgtccagaacggcctcctgggctgctaccccgatcgcttcgggacctgccaggggtccggggacccacactatgtgagcttcgacggccggcgcttcgacttcatgggcacctgcacgtacctgctggtcggctcatgcggccagaacgcagcgctgcctgccttccgggtgctggtggaaaacgagcatcggggcagccagactgtgagctacacgcgcgccgtgcgggtggaggcccgcggggtgaaggtggccgtgcgccgggagtaccccgggcaagtgctggtggatgacgtccttcagtatctgcccttccaagcagcagatgggcaggtgcaggtgttccgacagggcagggatgccgtcgtgcgcacggactttggcctgactgtcacttatgactggaatgcacgagtgactgccaaggtgcccagcagctatgctgaggccctgtgtggactctgtgggaacttcaacggggacccagctgatgacctggctctgcggggtgggggtcaagctgccaatgcactggcctttgggaacagctggcaagaagagacgaggcccggctgtggagcaactgaaccgggtgactgtcccaagctggactccctggtggcccagcagctgcagagcaagaatgagtgtggaatccttgccgaccccaaggggcccttccgggagtgccatagcaagctggacccccagggtgccgtgcgcgactgtgtctatgaccgctgcctgctgccaggccagtctgggccactgtgtgacgcactggccacctatgctgctgcatgccaggctgctggagccacagtgcacccctggaggagtgaagaactttgcccactgagctgcccaccccacagccactatgaggcgtgttcctacggctgcccgctgtcctgtggagacctcccagtgcccgggggctgtggctcagaatgccatgagggctgcgtgtgcgatgagggctttgcgctcagtggtgagtcctgcctgcccctggcctcctgtggctgcgtacaccagggcacctaccacccaccaggccagaccttctaccctggccccggatgtgattccctttgccactgccaggagggcggcctggtgtcctgtgagtcctccagctgcggaccgcacgaggcctgccagccatccggtggcagcttgggctgtgtggccgtgggctctagcacctgccaggcgtcaggagacccccactacaccaccttcgatggccgccgcttcgacttcatgggcacctgcgtgtatgtgctggctcagacctgcggcacccggcctggcctgcatcggtttgccgtcctgcaggagaacgtggcctggggtaatgggcgagtcagtgtgaccagggtgatcacggtccaggtggcaaacttcaccctgcggctggagcagagacagtggaaggtcacggtgaacggtgtggacatgaagctgcccgtggtgctggccaacggccagatccgtgcctcccagcatggttcagatgttgtgattgagaccgacttcggcctgcgtgtggcctacgaccttgtgtactatgtgcgggtcaccgtccccggaaactactaccagcagatgtgtggcctgtgtgggaactacaacggcgaccccaaggatgacttccagaagcccaatggctcacaggcaggcaacgccaatgagttcggcaactcctgggaggaggtggtgcccgactctccctgcctgccgcccaccccttgcccgccggggagcgaggactgtatccccagccacaagtgtcctcccgagctggagaagaagtatcagaaggaggagttctgtgggctcctctccagccccacagggccactgtcctcctgccacaagctggtggatccccagggtcccttgaaagattgcatctttgatctctgcctgggtggtgggaacctgagcattctctgcagcaacatccatgcctacgtgagtgcttgccaggcggctggaggccacgtggagccctggaggactgaaactttctgtcccatggagtgccctccgaacagtcactacgagctctgtgcggacacctgctccctgggctgctcagctctcagtgcccctccacagtgccaggatgggtgtgctgagggctgccagtgtgactccggcttcctctacaatggccaagcctgcgtgcccatccagcaatgcggctgctaccacaatggtgtctactatgagccggagcagacagtcctcattgacaactgtcggcagcagtgcacgtgccatgcgggtaaaggcatggtgtgccaggaacacagctgcaagccggggcaggtgtgccagccctccggaggcatcctgagctgcgtcaccaaagacccgtgccacggcgtgacatgccggccacaggagacatgcaaggagcagggtggccagggcgtgtgcctgcccaactatgaggccacgtgctggctgtggggcgacccacactaccactccttcgatggccggaagtttgacttccagggcacctgtaactatgtgctggcaacaactggctgcccgggggtcagcacccagggcctgacacccttcaccgtcaccaccaagaaccagaaccggggcaaccctgctgtgtcctacgtgagagtcgtcaccgtggctgccctcggcaccaacatctccatccacaaggacgagatcggcaaagtccgggtgaacggtgtgctcacagccttgcctgtctctgtggccgacgggcggatttcagtgacccagggtgcatcgaaggcactgctggtggctgactttggactgcaagtcagctatgactggaactggcgggtagacgtgacgctgcccagcagctatcatggcgcagtgtgcgggctctgcggtaacatggaccgcaaccccaacaatgaccaggtcttccctaatggcacactggctccctccatacccatctggggcggcagctggcgagccccaggctgggacccactgtgttgggacgaatgtcgggggtcctgcccaacgtgccctgaggaccggttggagcagtacgagggccctggcttctgcggacccctggcccccggcacagggggccctttcaccacctgccatgctcatgtgccacctgagagcttcttcaagggctgtgttctggacgtctgcatgggtggtggggaccgtgacattctttgcaaggctctggcttcctatgtggccgcctgccaggctgctggggttgtcatcgaagactggcgggcacaggttggctgtgagatcacctgcccagaaaacagccactatgaggtctgtggcccaccctgcccggccagctgtccgtcccctgcaccccttacgacgccagccgtatgtgagggcccctgtgtggagggctgccagtgcgacgcgggtttcgtgttaagtgctgaccgctgtgttcccctcaacaacggctgcggctgctgggccaatggcacctaccacgaggcgggcagtgagttttgggctgatggcacctgctcccagtggtgtcgctgcgggcctgggggtggctcgctggtctgcacacctgccagctgtgggctgggtgaagtgtgtggcctcctgccatccggccagcacggctgccagcccgtcagcacagctgagtgccaggcgtggggtgacccccattacgtcactctggatgggcaccgattcaatttccaaggcacctgcgagtacctgctgagtgcaccctgccacggaccacccttgggggctgagaacttcactgtcactgtagccaatgagcaccggggcagccaggctgtcagctacacccgcagtgtcaccctgcaaatctacaaccacagcctgacactgagtgcccgctggccccggaagctacaggtggacggcgtgttcgtcactctgcccttccagctggactcgctcctgcacgcacacctgagcggcgccgacgtggtggtgaccacaacctcagggctctcgctggctttcgacggggacagcttcgtgcgcctgcgcgtgccggcggcgtacgcgggctctctctgtggcttatgcgggaactacaaccaggaccccgcagacgacctgaaggcggtgggcgggaagcccgccggatggcaggtgggcggcgcccagggctgcggggaatgtgtgtccaagccatgcccgtcgccgtgcaccccagagcagcaagagtccttcggcggcccggacgcctgcggcgtgatctccgccaccgacggcccgctggcgccctgccacggccttgtgccgcccgcgcagtacttccagggctgcttgctggacgcctgccaagttcagggccatcctggaggcctctgtcctgcagtggccacctacgtggcagcctgtcaggccgctggggcccagctccgcgagtggaggcggccggacttctgtcccttccagtgccctgcccacagccactacgagctctgcggtgactcctgtcctgggagctgcccgagcctgtcggcacccgagggctgtgagtcggcctgccgtgaaggctgtgtctgcgatgctggcttcgtgctcagtggtgacacgtgtgtacctgtgggccagtgtggctgcctccacgatgaccgctactacccactgggccagaccttctaccctggccctgggtgtgattccctttgccgctgccgggagggcggtgaggtgtcctgtgagccctccagctgcggcccgcatgagacctgccggccatccggtggcagcttgggctgcgtggccgtgggctctaccacctgccaggcgtcgggagatccccactacaccaccttcgatggccgccgcttcgacttcatgggcacctgcgtgtatgtgctggctcagacctgcggcacccggcctggcctacatcggtttgccgtcctgcaggagaacgtggcctggggtaatgggcgagtcagtgtgaccagggtgatcacggtccaggtggcaaacttcaccctgcggctggagcagagacagtggaaggtcacggtgaacggtgtggacatgaagctgcccgtggtgctggccaacggccagatccgtgcctcccagcatggttcagatgttgtgattgagaccgacttcggcctgcgtgtggcctacgaccttgtgtactatgtgcgggtcaccgtccctggaaactactaccagctgatgtgtggcctgtgtgggaactacaacggcgaccccaaggatgacttccagaagcccaatggctcgcaggcaggcaacgccaatgagttcggcaactcctgggaggaggtggtgcccgactctccctgcctgccgccgcccacctgcccgccggggagcgagggctgtatccccagcgaggagtgtcctcccgagctggagaagaagtatcagaaggaggagttctgtgggctcctctccagccccacagggccactgtcctcctgccacaagctggtggatccccagggtcccttgaaagattgcatctttgatctctgcctgggtggtgggaacctgagcattctctgcagcaacatccatgcctacgtgagtgcttgccaggcggctggaggccacgtggagccctggaggaatgaaactttctgtcccatggaatgccctcagaacagtcactacgagctctgtgcggacacctgctccctgggctgctcggctctcagtgcccctctgcagtgcccagatgggtgtgctgagggctgccagtgtgactccggcttcctctacaacggccaagcctgcgtgcccatccagcaatgtggctgctaccacaatggtgcctactatgagccggagcagacagtcctcattgacaactgtcggcagcagtgcacgtgccatgcgggtaaagtcgtggtgtgccaggaacacagctgcaagccggggcaggtgtgccagccctccggaggcatcctgagctgcgtcaccaaagacccgtgccacggcgtgacatgccggccacaggagacatgcaaggagcagggtggccagggtgtgtgcctgcccaactatgaggccacgtgctggctgtggggcgacccacactaccactccttcgatggccggaagtttgacttccagggcacctgtaactatgtgctggcaacaactggctgcccgggggtcagcacccagggcctgacacccttcaccgtcaccaccaagaaccagaaccggggcaaccctgctgtatcctacgtgagagtcgtcaccgtggctgccctcggcaccaacatctccatccacaaggacgagatcggcaaagtccgggtgaacggtgtgctcacagccttgcctgtctccgtggccgacgggcggatttcagtggcccagggtgcatcgaaggcactgctggtggctgactttggactgcaagtcagctatgactggaactggcgggtagacgtgacgctccccagcagctatcatggcgcagtgtgcgggctctgcggtaacatggaccgcaaccccaacaatgaccaggtcttccctaatggcacactggctccctccatacccatctggggcggcagctggcgagccccaggctgggacccactgtgttgggacgaatgtcgggggtcctgcccaacgtgccctgaggaccggttggagcagtacgagggccctggcttctgcggacccctggcccccggcacagggggccctttcaccacctgccatgctcatgtgccacctgagagcttcttcaagggctgtgttctggacgtctgcatgggtggtggggaccatgacattctttgcaaggctctggcttcctacgtggccgcctgccaggccgctggggttgtcatcgaagactggcgggcacaggttggctgtgagatcacctgcccagaaaacagccactatgaggtctgtggcccaccctgcccggccagctgtccgtcccctgcaccccttacgacgccagccgtatgtgagggcccctgtgtggagggctgccagtgcgacgcgggtttcgtgttaagtgctgaccgctgtgttcccctcaacaacggctgcggctgctgggccaatggcacctaccacgaggcgggcagtgagttttgggctgatggcacctgctcccagtggtgtcgctgcgggcctgggggtggctcgctggtctgcacacctgccagctgtgggctgggtgaagtgtgtggcctcctgccatccggccagcacggctgccagcccgtcagcacagctgagtgccaggcgtggggtgacccccattacgtcactctggatgggcaccgattcgatttccaaggcacctgcgagtacctgctgagtgcaccctgccacggaccacccttgggggctgagaacttcactgtcactgtagccaatgagcaccggggcagccaggctgtcagctacacccgcagtgtcaccctgcaaatctacaaccacagcctgacactgagtgcccgctggccccggaagctacaggtggacggcgtgttcgtcactctgcccttccagctggactcgctcctgcacgcacacctgagcggcgccgacgtggtggtgaccacaacctcagggctctcgctggctttcgacggggacagcttcgtgcgcctgcgcgtgccggcggcgtacgcgggctctctctgtggcttatgcgggaactacaaccaggaccccgcagacgacctgaaggcggtgggcgggaagcccgccggatggcaggtgggcggcgcccagggctgcggggaatgtgtgtccaagccatgcccgtcgccgtgcaccccagagcagcaagagtccttcggcggcccggacgcctgcggcgtgatctccgccaccgacggcccgctggcgccctgccacggccttgtgccgcccgcgcagtacttccagggctgcttgctggacgcctgccaagttcagggccatcctggaggcctctgtcctgcagtggccacctacgtggcagcctgtcaggccgctggggcccagctccgcgagtggaggcggccggacttctgtcccttccagtgccctgcccacagccactacgagctctgcggtgactcctgtcctgggagctgcccgagcctgtcggcacccgagggctgtgagtcggcctgccgtgaaggctgtgtctgcgatgctggcttcgtgctcagtggtgacacgtgtgtacctgtgggccagtgtggctgcctccacgatgaccgctactacccactgggccagaccttctaccctggccctgggtgtgattccctttgccgctgccgggagggcggtgaggtgtcctgtgagccctccagctgcggcccgcatgagacctgccggccatccggtggcagcttgggctgcgtggccgtgggctctaccacctgccaggcgtcgggagatccccactacaccaccttcgatggccgccgcttcgacttcatgggcacctgcgtgtatgtgctggctcagacctgcggcacccggcctggcctacatcggtttgccgtcctgcaggagaacgtggcctggggtaatgggcgagtcagtgtgaccagggtgatcacggtccaggtggcaaacttcaccctgcggctggagcagagacagtggaaggtcacggtgaacggtgtggacatgaagctgcccgtggtgctggccaacggccagatccgtgcctcccagcatggttcagatgttgtgattgagaccgacttcggcctgcgtgtggcctacgaccttgtgtactatgtgcgggtcaccgtccctggaaactactaccagctgatgtgtggcctgtgtgggaactacaacggcgaccccaaggatgacttccagaagcccaatggctcgcaggcaggcaacgccaatgagttcggcaactcctgggaggaggtggtgcccgactctccctgcctgccgccgcccacctgcccgccggggagcgagggctgtatccccagcgaggagtgtcctcccgagctggagaagaagtatcagaaggaggagttctgtgggctcctctccagccccacagggccactgtcctcctgccacaagctggtggatccccagggtcccttgaaagattgcatctttgatctctgcctgggtggtgggaacctgagcattctctgcagcaacatccatgcctacgtgagtgcttgccaggcggctggaggccacgtggagccctggaggaatgaaactttctgtcccatggaatgccctcagaacagtcactacgagctctgtgcggacacctgctccctgggctgctcggctctcagtgcccctctgcagtgcccagatgggtgtgctgagggctgccagtgtgactccggcttcctctacaacggccaagcctgcgtgcccatccagcaatgtggctgctaccacaatggtgtctactatgagccggagcagacagtcctcattgacaactgtcggcagcagtgcacgtgccatgtgggtaaagtcgtggtgtgccaggaacacagctgcaagccggggcaggtgtgccagccctccggaggcatcctgagctgcgtcaacaaagacccgtgccacggcgtgacatgccggccacaggagacatgcaaggagcagggtggccagggtgtgtgcctgcccaactatgaggccacgtgctggctgtggggcgacccacactaccactccttcgatggccggaagtttgacttccagggcacctgtaactatgtgctggcaacaactggctgcccgggggtcagcacccagggcctgacacccttcaccgtcaccaccaagaaccagaaccggggcaaccctgctgtatcctacgtgagagtcgtcaccgtggctgccctcggcaccaacatctccatccacaaggacgagatcggcaaagtccgggtgaacggtgtgctcacagccttgcctgtctccgtggccgacgggcggatttcagtggcccagggtgcatcgaaggcactgctggtggctgactttggactgcaagtcagctatgactggaactggcgggtagacgtgacgctccccagcagctatcatggcgcagtgtgcgggctctgcggtaacatggaccgcaaccccaacaatgaccaggtcttccctaatggcacactggctccctccatacccatctggggcggcagctggcgagccccaggctgggacccactgtgttgggacgaatgtcgggggtcctgcccaacgtgccctgaggaccggttggagcagtacgaggggcctggcttctgcggacccctggcatctggcacagggggccccttcaccacctgccatgctcatgtgccacctgagagcttcttcaagggctgtgttctggacgtctgcatgggtggtggggaccatgacattctttgcaaggctctggcttcctacgtggccgcctgccaggccgctggggttgtcatcgaagactggcgggcacaggttggctgtgagatcacctgcccagaaaacagccactatgaggtctgtggcccaccctgcccggccagctgtccgtcccctgcaccccttacgacgccagccgtatgtgagggcccctgtgtggagggctgccagtgcgacgcgggtttcgtgttaagtgctgaccgctgtgttcccctcaacaacggctgcggctgctgggccaatggcacctaccacgaggcgggcagtgagttttgggctgatggcacctgctcccagtggtgtcgctgcgggcctgggggtggctcgctggtctgcacacctgccagctgtgggctgggtgaagtgtgtggcctcctgccatccggccagcacagctgccagcccgtcagcacagctgagtgccaggcgtggggtgacccccattacgtcactctggatgggcaccgattcgatttccaaggcacctgcgagtacctgctgagtgcaccctgccacggaccacccttgggggctgagaacttcactgtcactgtagccaatgagcaccggggcagccaggctgtcagctacacccgcagtgtcaccctgcaaatctacaaccacagcctgacactgagtgcccgctggccccggaagctacaggtcgacggcgtgttcgtggctctgcctttccagctggactcgctcctgcacgcacacctgagcggcgccgacgtggtggtgaccacaacctcagggctctcgctggctttcgatggggacagcttcgtgcgcctgcgcgtgccggcggcgtacgcggcctctctctgtggcttatgcgggaactacaaccaggaccccgcagacgacctgaaggctgtgggcgggaagcccgctggatggcaggtgggcggggcccagggctgcggggaatgtgtgtccaagccatgcccgtcgccgtgcaccccagagcagcaggagtccttcggcggcccggacgcctgcggcgtgatctccgccaccgacggcccgctggcaccctgccacggccttgtgccgcccgcgcagtacttccagggctgcttgctggacgcctgccaagttcagggccatcctggaggcctctgtcctgcagtggctacctacgtggcagcctgtcaggccgctggggcccagctcggcgagtggaggcggccggacttctgtcccttgcagtgccctgcccacagccactatgagctctgcggtgactcctgccctgtgagctgcccgagcctctcagcacccgagggctgtgagtcggcctgccgtgaaggctgtgtctgcgatgctggcttcgtactcagtggtgacacctgcgtacccgtgggccagtgtggctgcctccatgatggccgctactacccactgggcgaggtcttctacccgggccctgagtgtgagcgacgctgtgagtgtgggccaggtggccatgtcacctgccaggagggcgcagcctgtgggccccatgaggagtgccggttagaggatggtgtccaggcctgtcatgccacaggctgtggccgctgcctggccaacgggggcatccactacatcacccttgatggccgtgtctacgacctgcatggctcctgctcctatgtcttggcccaagtctgccacccaaagcctggggacgaggacttttccatcgtgcttgagaagaatgcagctggacatctccaacgcctcctggttactgtggctggccaggttgtgagcctagctcaggggcagcaggtcaccgtggacggcgaggctgtggccctgcctgtggctgtgggccgcgtgcgggtgaccgccgagggccgaaacatggttctgcagacgaccaaggggctgcggcttctctttgatggcgatgcccacctcctcatgtccatccccagccccttccgtggacggctctgtggcctctgtgggaacttcaatggcaactggagtgacgactttgtcctgcccaatggctcagcagcgtccagtgtggagaccttcggggctgcatggcgggtgcccggctcctccaagggctgtggcgagggctgcgggccccaaggctgcccagtgtgcttggcagaggagactgcaccctatgagagcaacgaggcctgcgggcagctccggaacccccagggccccttcgcgacctgccaggcggtgctgagtccctctgagtacttccgccaatgcgtatacgacctgtgcgcgcaaaagggtgacaaagccttcctgtgccgcagcctggcagcctacacggcggcctgtcaggcagctggcgtggccgtgaagccctggaggacagacagcttctgcccgctccattgccccgcccacagccactactccatctgcactcgcacctgccagggatcctgtgcggctctctccggcctcacgggctgcaccacccgctgttttgagggctgtgagtgcgacgaccgcttcctgctttcccagggtgtctgcatccctgtccaagattgtggctgcacccataatggccgatacttgccggtaaactcctccctgctgacctcagactgcagcgagcgctgttcctgttcctcaagctctggcctgacatgccaggccgctggctgcccaccaggccgtgtatgtgaggtcaaggctgaagcccggaactgctgggccacccgtggtctctgtgtcctgtctgtgggtgccaacctcaccacctttgatggggcccgtggtgccaccacctctcctggtgtctatgagctctcttcccgctgcccaggactacagaataccatcccctggtaccgtgtagttgccgaagtccagatctgccatggcaaaacggaggctgtgggccaggtccacatcttcttccaggatgggatggtgacgttgactccaaacaagggtgtgtgggtgaatggtctccgagtggatctcccagctgagaagttagcatctgtgtccgtgagtcgtacacctgatggctccctgctagtccgccagaaggcaggggtccaggtgtggcttggagccaatgggaaggtggctgtgattgtcagcaatgaccatgctgggaaactgtgtggggcctgtggaaactttgacggggaccagaccaatgattggcatgactcccaggagaagccagcgatggagaaatggagagcgcaggacttctccccatgttatggctgatcagtcatccaccaggaacgaagatttcctgaagaagacctggtccctctggaggttgcggtggctgaaggatgcatcatgtgctcctaccctgctctaccgcttttctgggtcacagaggccaaatgtgagagcattgaataaatatcttaagct

SEQ ID NO: 1647 - protein, 5405 aa, Homo sapiens
MGALWSWWILWAGATLLWGLTQEASVDLKNTGREEFLTAFLQNYQLAYSKAYPRLLISSLSESPASVSILSQADNTSKKVTVRPGESVMVNISAKAEMIGSKIFQHAVVIHSDYAISVQALNAKPDTAELTLLRPIQALGTEYFVLTPPGTSARNVKEFAVVAGAAGASVSVTLKGSVTFNGKFYPAGDVLRVTLQPYNVAQLQSSVDLSGSKVTASSPVAVLSGHSCAQKHTTCNHVVEQLLPTSAWGTHYVVPTLASQSRYDLAFVVASQATKLTYNHGGITGSRGLQAGDVVEFEVRPSWPLYLSANVGIQVLLFGTGAIRNEVTYDPYLVLIPDVAAYCPAYVVKSVPGCEGVALVVAQTKAISGLTIDGHAVGAKLTWEAVPGSEFSYAEVELGTADMIHTAEATTNLGLLTFGLAKAIGYATAADCGRTVLSPVEPSCEGMQCAAGQRCQVVGGKAGCVAESTAVCRAQGDPHYTTFDGRRYDMMGTCSYTMVELCSEDDTLPAFSVEAKNEHRGSRRVSYVGLVTVRAYSHSVSLTRGEVGFVLVDNQRSRLPVSLSEGRLRVYQSGPRAVVELVFGLVVTYDWDCQLALSLPARFQDQVCGLCGNYNGDPADDFLTPDGALAPDAVEFASSWKLDDGDYLCEDGCQNNCPACTPGQAQHYEGDRLCGMLTKLDGPFAVCHDTLDPRPFLEQCVYDLCVVGGERLSLCRGLSAYAQACLELGISVGDWRSPANCPLSCPANSRYELCGPACPTSCNGAAAPSNCSGRPCVEGCVCLPGFVASGGACVPASSCGCTFQGLQLAPGQEVWADELCQRRCTCNGATHQVTCRDKQSCPAGERCSVQNGLLGCYPDRFGTCQGSGDPHYVSFDGRRFDFMGTCTYLLVGSCGQNAALPAFRVLVENEHRGSQTVSYTRAVRVEARGVKVAVRREYPGQVLVDDVLQYLPFQAADGQVQVFRQGRDAVVRTDFGLTVTYDWNARVTAKVPSSYAEALCGLCGNFNGDPADDLALRGGGQAANALAFGNSWQEETRPGCGATEPGDCPKLDSLVAQQLQSKNECGILADPKGPFRECHSKLDPQGAVRDCVYDRCLLPGQSGPLCDALATYAAACQAAGATVHPWRSEELCPLSCPPHSHYEACSYGCPLSCGDLPVPGGCGSECHEGCVCDEGFALSGESCLPLASCGCVHQGTYHPPGQTFYPGPGCDSLCHCQEGGLVSCESSSCGPHEACQPSGGSLGCVAVGSSTCQASGDPHYTTFDGRRFDFMGTCVYVLAQTCGTRPGLHRFAVLQENVAWGNGRVSVTRVITVQVANFTLRLEQRQWKVTVNGVDMKLPVVLANGQIRASQHGSDVVIETDFGLRVAYDLVYYVRVTVPGNYYQQMCGLCGNYNGDPKDDFQKPNGSQAGNANEFGNSWEEVVPDSPCLPPTPCPPGSEDCIPSHKCPPELEKKYQKEEFCGLLSSPTGPLSSCHKLVDPQGPLKDCIFDLCLGGGNLSILCSNIHAYVSACQAAGGHVEPWRTETFCPMECPPNSHYELCADTCSLGCSALSAPPQCQDGCAEGCQCDSGFLYNGQACVPIQQCGCYHNGVYYEPEQTVLIDNCRQQCTCHAGKGMVCQEHSCKPGQVCQPSGGILSCVTKDPCHGVTCRPQETCKEQGGQGVCLPNYEATCWLWGDPHYHSFDGRKFDFQGTCNYVLATTGCPGVSTQGLTPFTVTTKNQNRGNPAVSYVRVVTVAALGTNISIHKDEIGKVRVNGVLTALPVSVADGRISVTQGASKALLVADFGLQVSYDWNWRVDVTLPSSYHGAVCGLCGNMDRNPNNDQVFPNGTLAPSIPIWGGSWRAPGWDPLCWDECRGSCPTCPEDRLEQYEGPGFCGPLAPGTGGPFTTCHAHVPPESFFKGCVLDVCMGGGDRDILCKALASYVAACQAAGVVIEDWRAQVGCEITCPENSHYEVCGPPCPASCPSPAPLTTPAVCEGPCVEGCQCDAGFVLSADRCVPLNNGCGCWANGTYHEAGSEFWADGTCSQWCRCGPGGGSLVCTPASCGLGEVCGLLPSGQHGCQPVSTAECQAWGDPHYVTLDGHRFNFQGTCEYLLSAPCHGPPLGAENFTVTVANEHRGSQAVSYTRSVTLQIYNHSLTLSARWPRKLQVDGVFVTLPFQLDSLLHAHLSGADVVVTTTSGLSLAFDGDSFVRLRVPAAYAGSLCGLCGNYNQDPADDLKAVGGKPAGWQVGGAQGCGECVSKPCPSPCTPEQQESFGGPDACGVISATDGPLAPCHGLVPPAQYFQGCLLDACQVQGHPGGLCPAVATYVAACQAAGAQLREWRRPDFCPFQCPAHSHYELCGDSCPGSCPSLSAPEGCESACREGCVCDAGFVLSGDTCVPVGQCGCLHDDRYYPLGQTFYPGPGCDSLCRCREGGEVSCEPSSCGPHETCRPSGGSLGCVAVGSTTCQASGDPHYTTFDGRRFDFMGTCVYVLAQTCGTRPGLHRFAVLQENVAWGNGRVSVTRVITVQVANFTLRLEQRQWKVTVNGVDMKLPVVLANGQIRASQHGSDVVIETDFGLRVAYDLVYYVRVTVPGNYYQLMCGLCGNYNGDPKDDFQKPNGSQAGNANEFGNSWEEVVPDSPCLPPPTCPPGSEGCIPSEECPPELEKKYQKEEFCGLLSSPTGPLSSCHKLVDPQGPLKDCIFDLCLGGGNLSILCSNIHAYVSACQAAGGHVEPWRNETFCPMECPQNSHYELCADTCSLGCSALSAPLQCPDGCAEGCQCDSGFLYNGQACVPIQQCGCYHNGAYYEPEQTVLIDNCRQQCTCHAGKVVVCQEHSCKPGQVCQPSGGILSCVTKDPCHGVTCRPQETCKEQGGQGVCLPNYEATCWLWGDPHYHSFDGRKFDFQGTCNYVLATTGCPGVSTQGLTPFTVTTKNQNRGNPAVSYVRVVTVAALGTNISIHKDEIGKVRVNGVLTALPVSVADGRISVAQGASKALLVADFGLQVSYDWNWRVDVTLPSSYHGAVCGLCGNMDRNPNNDQVFPNGTLAPSIPIWGGSWRAPGWDPLCWDECRGSCPTCPEDRLEQYEGPGFCGPLAPGTGGPFTTCHAHVPPESFFKGCVLDVCMGGGDHDILCKALASYVAACQAAGVVIEDWRAQVGCEITCPENSHYEVCGPPCPASCPSPAPLTTPAVCEGPCVEGCQCDAGFVLSADRCVPLNNGCGCWANGTYHEAGSEFWADGTCSQWCRCGPGGGSLVCTPASCGLGEVCGLLPSGQHGCQPVSTAECQAWGDPHYVTLDGHRFDFQGTCEYLLSAPCHGPPLGAENFTVTVANEHRGSQAVSYTRSVTLQIYNHSLTLSARWPRKLQVDGVFVTLPFQLDSLLHAHLSGADVVVTTTSGLSLAFDGDSFVRLRVPAAYAGSLCGLCGNYNQDPADDLKAVGGKPAGWQVGGAQGCGECVSKPCPSPCTPEQQESFGGPDACGVISATDGPLAPCHGLVPPAQYFQGCLLDACQVQGHPGGLCPAVATYVAACQAAGAQLREWRRPDFCPFQCPAHSHYELCGDSCPGSCPSLSAPEGCESACREGCVCDAGFVLSGDTCVPVGQCGCLHDDRYYPLGQTFYPGPGCDSLCRCREGGEVSCEPSSCGPHETCRPSGGSLGCVAVGSTTCQASGDPHYTTFDGRRFDFMGTCVYVLAQTCGTRPGLHRFAVLQENVAWGNGRVSVTRVITVQVANFTLRLEQRQWKVTVNGVDMKLPVVLANGQIRASQHGSDVVIETDFGLRVAYDLVYYVRVTVPGNYYQLMCGLCGNYNGDPKDDFQKPNGSQAGNANEFGNSWEEVVPDSPCLPPPTCPPGSEGCIPSEECPPELEKKYQKEEFCGLLSSPTGPLSSCHKLVDPQGPLKDCIFDLCLGGGNLSILCSNIHAYVSACQAAGGHVEPWRNETFCPMECPQNSHYELCADTCSLGCSALSAPLQCPDGCAEGCQCDSGFLYNGQACVPIQQCGCYHNGVYYEPEQTVLIDNCRQQCTCHVGKVVVCQEHSCKPGQVCQPSGGILSCVNKDPCHGVTCRPQETCKEQGGQGVCLPNYEATCWLWGDPHYHSFDGRKFDFQGTCNYVLATTGCPGVSTQGLTPFTVTTKNQNRGNPAVSYVRVVTVAALGTNISIHKDEIGKVRVNGVLTALPVSVADGRISVAQGASKALLVADFGLQVSYDWNWRVDVTLPSSYHGAVCGLCGNMDRNPNNDQVFPNGTLAPSIPIWGGSWRAPGWDPLCWDECRGSCPTCPEDRLEQYEGPGFCGPLASGTGGPFTTCHAHVPPESFFKGCVLDVCMGGGDHDILCKALASYVAACQAAGVVIEDWRAQVGCEITCPENSHYEVCGPPCPASCPSPAPLTTPAVCEGPCVEGCQCDAGFVLSADRCVPLNNGCGCWANGTYHEAGSEFWADGTCSQWCRCGPGGGSLVCTPASCGLGEVCGLLPSGQHSCQPVSTAECQAWGDPHYVTLDGHRFDFQGTCEYLLSAPCHGPPLGAENFTVTVANEHRGSQAVSYTRSVTLQIYNHSLTLSARWPRKLQVDGVFVALPFQLDSLLHAHLSGADVVVTTTSGLSLAFDGDSFVRLRVPAAYAASLCGLCGNYNQDPADDLKAVGGKPAGWQVGGAQGCGECVSKPCPSPCTPEQQESFGGPDACGVISATDGPLAPCHGLVPPAQYFQGCLLDACQVQGHPGGLCPAVATYVAACQAAGAQLGEWRRPDFCPLQCPAHSHYELCGDSCPVSCPSLSAPEGCESACREGCVCDAGFVLSGDTCVPVGQCGCLHDGRYYPLGEVFYPGPECERRCECGPGGHVTCQEGAACGPHEECRLEDGVQACHATGCGRCLANGGIHYITLDGRVYDLHGSCSYVLAQVCHPKPGDEDFSIVLEKNAAGHLQRLLVTVAGQVVSLAQGQQVTVDGEAVALPVAVGRVRVTAEGRNMVLQTTKGLRLLFDGDAHLLMSIPSPFRGRLCGLCGNFNGNWSDDFVLPNGSAASSVETFGAAWRVPGSSKGCGEGCGPQGCPVCLAEETAPYESNEACGQLRNPQGPFATCQAVLSPSEYFRQCVYDLCAQKGDKAFLCRSLAAYTAACQAAGVAVKPWRTDSFCPLHCPAHSHYSICTRTCQGSCAALSGLTGCTTRCFEGCECDDRFLLSQGVCIPVQDCGCTHNGRYLPVNSSLLTSDCSERCSCSSSSGLTCQAAGCPPGRVCEVKAEARNCWATRGLCVLSVGANLTTFDGARGATTSPGVYELSSRCPGLQNTIPWYRVVAEVQICHGKTEAVGQVHIFFQDGMVTLTPNKGVWVNGLRVDLPAEKLASVSVSRTPDGSLLVRQKAGVQVWLGANGKVAVIVSNDHAGKLCGACGNFDGDQTNDWHDSQEKPAMEKWRAQDFSPCYG

SEQ ID NO: 1648 - DNA, 945 bp, Homo sapiens
  misc_feature (743)..(743): n is a, c, g, or t
ttttctaagtcattactttttattttgaaagatttgtgaaactcttcacatcatggtgagagtttgtatgattaataagaagcagctttttcatgaaatgcttggaggtgaacgagttctcagcctgtgagatccgaccatcccattaactttgaagtttctcttgattaatagaagaaaaaaaaggggagggtgaagaaaaggaggaacatgctaaaaaccttatgacaatcatccaaatgtgaggaaagaacaaccgattcaccaactccactttttctattttacaactttctacatctcactcttgattttggccttcctggctgaaacagcctggcagtccctagagcccctgagaagcgcctggaggcaggagaccaccccgtggagctgctggccccggacttccaagagaactataacatgtacatcttccctgtacactggcagttcggccagctggaccagcaccccattgacgggtacctctcccacaccgagctggctccactgcgtgctcccctcatccccatggagcattgcaccacccgctttttcgagacctgtgacctggacaatgacaagtacatcgccctggatgagtgggccggctgcttcggcatcaagcagaaggatatcgaccagaatcttggatctaaatccactccttcacagtaccggattctctctttaaccctccccttcgtgtttcccccaatgttttaaatgtttggatggtntgtgttctggcctgaaaacaggtgctaacataaaattaagtgaatacatttaccgtgctaaaaatgaaaatctaaccccagacatgacattcttagctgaaacttaactattaaagccttttcccacgccaataatagtcccattttctcttggccttggagcttttgcccatgcctaatgggcccatgtgggaaaccgatc

SEQ ID NO: 1649 - DNA, 648 bp, Homo sapiens
cgggcagaagtgctggtctcggcgggattccgggcttggtcccaccgaggcgggactgcggtaggagggaagaggtttggacgcgcgtgtgcctccacgcggcgtgtgccatttgcgggcatttatttccagttccaaacatggaactattaattgcctgggcaacgccagcctcatcgaggaccatttgaccaaaaaagcacttgggttctggcttgcgcagaattgggaaagggaccactttataggctttttaaggaaagccattgtgatcaattttgcaaacttaggtgctaccatcagatctgtggagcgtattcattggtggggcaaaaaaaattaacggcgtggatatttcctcgagggggaatttgtgtgggtcagagggaagaaaattgttggtcctacttaggagaaatagactttggaaaaaggagagtgacacatccctccagcaagtatccatttgaacgaaattctagaagaacaaagggtggaacagcagaccaatgctggaagcagagaagttgaaatgtgcaggccctgaagggacccggaggggttctttttccaatttcccttcggagcagatactctttgatgagtactaatctttggcccagaggcttgtaggggccttcttttgga

SEQ ID NO: 1650 - DNA, 507 bp, Homo sapiens
  misc_feature (3)..(3): n is a, c, g, or t
cgntttacattaaggaggtgtagataagggtgttagctccttcatcagtctgagggtagcaaggacagttccactgcagaagcagtggcagagaggctttcagttgcccctggaggctctctccagggagtggctgagttgctactggctcaacagttctggtagggggggttaggtagaggtccaggcctgcaagacttgcctagtgagaagatataggaatgggaacccaggtaacagtctggccacttttccatagggctgctgcagtatgcccagggcccgctccagtctctagtagcctcagattttccagtacctggagttatcatcagtgaagcctgtgaaacagcaaagatggcagcctaccgctccctttggaagctttgccctagggaggtatgaatgaacttgttgctggcccaaacacacctgtaggaggtggctggagaccccagtttggaggttttgcccagcgaggaggaatggcattgggaaagtgctcaa

SEQ ID NO: 1651 - DNA, 2365 bp, Homo sapiens
gaggggtgtccagagccaggcagcaaggaccagaggaaggtggacagagaccgaaaggacaaaggagagacacagagaaaaaaagagaccaaccccaaagggacaaagaccccaacgtttgtccacattgccgcagaggcagctggagccagtgctgcctgtccgtccccatgggccaccataggccatggctgcacgcttctgtcctctgggctggggtggccagcctgctcctccccccggccatgacccagcagctcagaggggatgggctaggcttcagaaaccggaacaacagcactggagtcgccgggctctccgaggaggcatcagcagagcttcgccaccacctccacagccctagagaccatccagatgagaacaaggatgtttccacagagaatgggcatcatttctggagccacccagaccgtgaaaaggaggatgaagatgtctccaaggaatatgggcacctactcccaggccacaggtcccaagaccacaaagtcggagatgagggtgtctcaggtgaggaggtctttgcagagcatggtgggcaggcccgtgggcacagaggccacgggagtgaagacacggaagactcagctgagcacaggcaccacctccccagccacaggagccacagccatcaagacgaggatgaggatgaagttgtgtccagtgagcatcaccatcatatcctcaggcatggacaccgaggccatgatggggaagatgatgaaggagaagaggaggaggaggaggaggaggaggaagaggaggcctccactgagtatggacaccaggcccacaggcaccgaggccatgggagtgaagaggatgaggatgtctcagatggacaccatcatcatggccccagccacaggcaccaaggccatgaagaagatgacgatgatgatgatgatgatgatgatgatgatgatgatgatgatgtctccattgaatatagacaccaggctcacaggcaccaaggccacgggattgaagaggatgaagatgtctcagatggacaccatcatcgcgaccccagccacaggcaccgaagccatgaagaagatgacaatgatgatgatgatgtctccactgagtatggacaccaggcccacaggcaccaagaccacagaaaggaagaggttgaggctgtctcaggtgaacaccaccatcatgtccctgaccacaggcaccaaggccacagagacgaggaagaagatgaggatgtgtccactgaacgttggcaccagggtccccaacatgtccaccatggccttgtagatgaggaagaggaagaagaggagatcacagtccagtttggccactatgttgcaagccaccaacctcgaggccacaagagtgatgaagaggacttccaagatgagtataaaacagaagtccctcaccatcaccaccacagagtccccagggaggaagatgaggaggtctctgctgagcttggccaccaggcccccagccacaggcaaagccaccaagatgaagaaactggccatggtcaaagagggtccatcaaagagatgagccatcaccccccaggacacacagtggtcaaggatagaagccatttgaggaaggatgattctgaggaggaaaaggagaaggaagaggaccccggctcccatgaggaagacgatgaaagttcagagcagggagagaaaggcacccatcatggcagccgggaccaggaagatgaggaggatgaggaggaaggtcatggcctcagcctgaaccaggaggaggaagaagaggaagacaaggaggaggaggaggaggaagaagacgaggagaggagggaagagagggctgaggttggggccccactgagcccagaccacagcgaggaggaagaggaggaggaggaggggctggaggaagatgagccccgcttcaccatcatccccaacccactggacaggagagaggaggctggaggtgcctccagcgaggaggaaagcggtgaggacacaggtccacaggatgctcaggagtatgggaactaccagccagggtccctgtgtggctactgctccttctgcaatcgatgcactgaatgtgagagctgtcactgtgatgaggagaacatgggtgagcactgcgaccagtgccagcactgtcagttctgctatctctgcccgctggtctgcgaaacggtctgcgctccaggaagctacgttgactatttctcctcgtccctttatcaggccctggcagacatgctggaaacgccggaaccctgacccagtcgctcgactgcgacgcaggtgtacctccccctgccttccaacccctttccacgagctatatttatttctccgaataaacgtgctccccg

SEQ ID NO: 1652 - protein, 699 aa, Homo sapiens
MGHHRPWLHASVLWAGVASLLLPPAMTQQLRGDGLGFRNRNNSTGVAGLSEEASAELRHHLHSPRDHPDENKDVSTENGHHFWSHPDREKEDEDVSKEYGHLLPGHRSQDHKVGDEGVSGEEVFAEHGGQARGHRGHGSEDTEDSAEHRHHLPSHRSHSHQDEDEDEVVSSEHHHHILRHGHRGHDGEDDEGEEEEEEEEEEEEASTEYGHQAHRHRGHGSEEDEDVSDGHHHHGPSHRHQGHEEDDDDDDDDDDDDDDDDVSIEYRHQAHRHQGHGIEEDEDVSDGHHHRDPSHRHRSHEEDDNDDDDVSTEYGHQAHRHQDHRKEEVEAVSGEHHHHVPDHRHQGHRDEEEDEDVSTERWHQGPQHVHHGLVDEEEEEEEITVQFGHYVASHQPRGHKSDEEDFQDEYKTEVPHHHHHRVPREEDEEVSAELGHQAPSHRQSHQDEETGHGQRGSIKEMSHHPPGHTVVKDRSHLRKDDSEEEKEKEEDPGSHEEDDESSEQGEKGTHHGSRDQEDEEDEEEGHGLSLNQEEEEEEDKEEEEEEEDEERREERAEVGAPLSPDHSEEEEEEEEGLEEDEPRFTIIPNPLDRREEAGGASSEEESGEDTGPQDAQEYGNYQPGSLCGYCSFCNRCTECESCHCDEENMGEHCDQCQHCQFCYLCPLVCETVCAPGSYVDYFSSSLYQALADMLETPEP

SEQ ID NO: 1653 - DNA, 199 bp, Homo sapiens
tgacaccagcgcctttgacttctcggatgaggcgggggacgaggggctttctcggttcaacaaacttcgagttgtggtggccgatgacggttccgaagccccggaaaggcctgttaacggggcgcacccgaccctccaggccgacgatgattccttactggaccaagacttacctttgagcaacagtcagctgagtttg

SEQ ID NO: 1654 - DNA, 443 bp, Homo sapiens
tttctggtgggagaagacattttattgttcctgggtctctggaggcccattggtggggctgggtcactggctgcccccggaacagggcgctgctccatggctctgcttgtggtagtctgtggctatgtctcccagcaaggacagaaactcagaaaaatcaatcttcttatcctcattcttgtcctttttctcaaagacatcggcgaggtaatttgtgccctttttgtcacaggcactaaggaagttggggaagttctccttcatcatcgtcagcaggcttggcttgtcaatcttgtcatcacgtctggtgtatttgtgaaacatgtcgatcatgcctattatggacctctcagcttgagtgttgctcatctttgctttcaaaaagcttcccaaagcagatctttcagccagtagtcagtctgggctggcctgcaccccaagcc

SEQ ID NO: 1655 - DNA, 623 bp, Homo sapiens
cagatagcccaccaggggtggggagggtgagcagggacagggcgcccccactgacttgggaccctcctcctccaggcccacacctcagcacccaggacatctgggccccccgcccccagcgctgtctagtttggttgcctggccgtcactcccagcctggttcccactcctgtgtcttctggggatggccctcaaggacagcatgttgacacatcaggcccagctctatcactggggagggagataggctgccagggacagaaagggctctttgagaaggccactctgcctggagtgggggcgccgggcactgtcccccaaggtcgcggcagaggagataggggtctgtcctgcacaaacaccccaccttccactcggctcacttaaggcaggcagcccagcccctggcagcacccacgatgcgggacctgcctctcaccagcctggccctagtgctgtctgccctgggggctctgctggagactgaggccctcagagcagaggagccagctgtgggcaccagtggcctcatcttccgagagacttggactggcctccaggcatcccacaagagcctctgtgcctggtggcactggggcgggacagcaatggcagcagctccc

SEQ ID NO: 1656 - DNA, 620 bp, Homo sapiens
gaaccagtcgcaggcgctttctatgcaaccaggctccacataaacacggtttccttgcaatggccgccatgcacgatgctgtgcttcctggacgtgattccctttatggaagctggacctggaccaggactacacgggttacctgctttcaccttcctggagcccctgcttcagtcgtgtgcccaggaaatggctaaattcatttcacaaaacaaatcacgtgagcctgtgctagtcttcatctgcccgcatctatgatgatcaatggaagatgtcaggaggggctgcgcaccctgtgccgaggctggggccaaaatttcaataattgacatacagtgaattttatagcacttgcgtgggacatcctttgtggaccatccagggatgtcccttccagccctggtgatggactagatgagcacagccaagacctgagtgggaggctgcgggccattctccagacatcaggaaaactgaaggatgggcctcagtctctaaggaaggcagagacctgggttgagcctcagcaatactaagatcttcttccaagaaatgctaacaggctgttcaccaccatctccagctgatcacagacaccagcaaagcaatgcactcctgac

SEQ ID NO: 1657 - DNA, 408 bp, Homo sapiens
  misc_feature (26)..(27): n is a, c, g, or t
  misc_feature (50)..(50): n is a, c, g, or t
  misc_feature (89)..(89): n is a, c, g, or t
  misc_feature (95)..(96): n is a, c, g, or t
  misc_feature (197)..(197): n is a, c, g, or t
  misc_feature (214)..(215): n is a, c, g, or t
  misc_feature (278)..(278): n is a, c, g, or t
  misc_feature (285)..(285): n is a, c, g, or t
  misc_feature (288)..(288): n is a, c, g, or t
  misc_feature (303)..(303): n is a, c, g, or t
  misc_feature (315)..(316): n is a, c, g, or t
  misc_feature (362)..(362): n is a, c, g, or t
gggattgctccactgaaccccagacnncagcctcgttctgggccctcaanccctagatccagggaccccagccccatttcagcccttgngccatnngtaggatgcgaggccctagtctcagccaccagcccatccgtggcccaggcactgggcggggctgaggtcctctgagaagggacacagggcctggggggctntctcagcccatcagcannagaggactgattccagaaaaatcagcgtttgtacccactcaggctgagatcacctgtgtagantttcccnaangctcaaccttcagangttcatgagganntcttgcccagaatgtccacagagttcatgaggccccttgagatgtncacagagttcatgaggctccttgcccggaatgtccacattttgaaa

SEQ ID NO: 1658 - DNA, 2776 bp, Homo sapiens
ggaaaacgacacctagaagtaggagtgagattcgctgaagttcccttctgaggaagacccacccctccgcctggagagccggggctggcggtgcctgaggaccccttcggcctggacagcccacgcgggcttggggggcctcgctctgccctcatggggcggccatcggttcccgaagcggcgagtgaaaattcaaatggccagtagggggcgcactcggaagtggccgccccgcatgaggcagttcagcggccccgagagtccggggagggaggtttattctccgcctgcacgagactgtgaaatccgcaaccatgagcaggagaggcggccctggtggggaagaggccaccaacatctggacggcaggtacccagagagtgagcagctccacgcgggactgtgcacggtggccgacacccgcagggacgcccgccggacgagcacgcggagggccctcgcctccacggatgcaccatgccggtgtgaggagcatctgttcttcccactctctgcagttaacaaacccaacccaaaccaccacaggtgctcctcctggggagtttcctgtctgacaaatgccaggctcacttcaaggagaatcacgcttctttctaaagatggattcaccatttaaaacagagctctgggagcctttcggcaaatcttgaaagctgcacggcgcagagacatggatgtgacttcccaagcccggggcgtgggcctggagatgtacccaggcaccgcgcagcctgcggcccccaacaccacctcccccgagctcaacctgtcccacccgctcctgggcaccgccctggccaatgggacaggtgagctctcggagcaccagcagtacgtgatcggcctgttcctctcgtgcctctacaccatcttcctcttccccatcggctttgtgggcaacatcctgatcctggtggtgaacatcagcttccgcgagaagatgaccatccccgacctgtacttcatcaacctggcggtggcggacctcatcctggtggccgactccctcattgaggtgttcaacctgcacgagcggtactacgacatcgccgtcctgtgcaccttcatgtcgctcttcctgcaggtcaacatgtacagcagcgtcttcttcctcacctggatgagcttcgaccgctacatcgccctggccagggccatgcgctgcagcctgttccgcaccaagcaccacgcccggctgagctgtggcctcatctggatggcatccgtgtcagccacgctggtgcccttcaccgccgtgcacctgcagcacaccgacgaggcctgcttctgtttcgcggatgtccgggaggtgcagtggctcgaggtcacgctgggcttcatcgtgcccttcgccatcatcggcctgtgctactccctcattgtccgggtgctggtcagggcgcaccggcaccgtgggctgcggccccggcggcagaaggcgctccgcatgatcctcgcggtggtgctggtcttcttcgtctgctggctgccggagaacgtcttcatcagcgtgcacctcctgcagcggacgcagcctggggccgctccctgcaagcagtctttccgccatgcccaccccctcacgggccacattgtcaacctcgccgccttctccaacagctgcctaaaccccctcatctacagctttctcggggagaccttcagggacaagctgaggctgtacattgagcagaaaacaaatttgccggccctgaaccgcttctgtcacgctgccctgaaggccgtcattccagacagcaccgagcagtcggatgtgaggttcagcagtgccgtgtagacagccttggccgcataggcccagccagggtgtgactcgggagctgcacacacctgggtggacacaaggcacggccacgtcatgtctctaaactgcggtcagatgtggcttctggctcctcggggcctcgcgagggtcacgcttgcctggtcaccctggggctgcttaggaaacctcacgactggtcaccttgcactcttcacacagaattgctacaatcccaaagcgctcgccccgcagggtccaaaggccagcggtgaccagcctgtcacccagctcctccccgccaaccctgcctgccgctgcacctgcctgccgctgcaggaaacatttgacaccgtcgaccaggaaagccacacggagaggccactgtgggtgaagcgcctcagttacacaggaaccctaaagcaaatctgccaccgtgggggaactgacgctggagatgcaaggtgctggtgggtctgagctggacgtcgcggtgtgtcctctgtgcccacggtctgagctagctagcgcaccgccgagttaaagaggagaaggaaaacatgctgctctggtgcacgcctgagcgtcctccatcttccaggatggcagcaatggcgctgtgcggcctcaccaggcccacgaggagcagcagcgctcggcccggagcagcaggaaggcccctctgtggagcgcccgccgtctgctccggggtggttcagtcactgcttgttgacatcaacatggcaattgcactcatgtggactgggaccgtgcgagctgccgtgtgggttagtcgggtgccaggacaatgaaatactccagcacgtgtggctgacgaatttgtttctacagaaataacagctggggacaactgcggtgatgatgtaaaaaccttcccataaaatgtaagaaaagctgatgaggctggtgacgttcagcctttgtcaataaacctgtcatgtgcggatcctt

SEQ ID NO: 1659 - protein, 375 aa, Homo sapiens
MDVTSQARGVGLEMYPGTAQPAAPNTTSPELNLSHPLLGTALANGTGELSEHQQYVIGLFLSCLYTIFLFPIGFVGNILILVVNISFREKMTIPDLYFINLAVADLILVADSLIEVFNLHERYYDIAVLCTFMSLFLQVNMYSSVFFLTWMSFDRYIALARAMRCSLFRTKHHARLSCGLIWMASVSATLVPFTAVHLQHTDEACFCFADVREVQWLEVTLGFIVPFAIIGLCYSLIVRVLVRAHRHRGLRPRRQKALRMILAVVLVFFVCWLPENVFISVHLLQRTQPGAAPCKQSFRHAHPLTGHIVNLAAFSNSCLNPLIYSFLGETFRDKLRLYIEQKTNLPALNRFCHAALKAVIPDSTEQSDVRFSSAV

SEQ ID NO: 1660 - DNA, 561 bp, Homo sapiens
  misc_feature (208)..(208): n is a, c, g, or t
taaaacctcagctgataaaagtataaaaataaagttaaaacatattaaagacaaaacccaagaatcagcttcctcttccttcattactcttgcatgggtgttggctctaatttctccatctagttaggcagtcctttgctttttattgcttgtttattgatgacatttgccatttgtagcaatagtaatagaatcatctatatatttntggccttgttgaatgtagaaaaaggatagtggcattttctaattgtgtaaccctataacaccttgacgggggactacagttcatatgctggaccttttgtgtttgttcatggcgtgtgggttgctttaatatacttagcacattgtcctaattgccatccttttggggagggctatatatccaagctaatatggtagcatttttgttttaacatagagctgacccaaggtagacgtaaggtttgttcatttttgcctaatactaataaaattacctaattgttgaagcttggagcttgaatctaggcattttatgtcattcaagtacaccctagtattttaaaggcataaaat

SEQ ID NO: 1661 - DNA, 474 bp, Homo sapiens
tttgtacagcatattaacatttgttttttcttcattttcttgttttaaggtgcatctatcatgctcttccttcagtttcttgggaaattgctgaggttatgttttcccaatctttctttgttgggttaatctgtcagcagcagaagaagatgtactatgacatatattttctgatagttgtattttttcacttttgtatgtattatttccttctttgacctgtggttgcttcttttcacttctttcacgcctttgttgctcttcctctgaagccactggtaaggctttttctgttgacaaattcactgttttagttcaaatgaactgctctcaatgtctgtacattctttctttgtactgctcctttcacagcaggatcttccatttcagtgctaggcttcaaggaagggatgttttgcagggaggtccttcaattgccatggagctttaattttcttaatattcaaaaatata

SEQ ID NO: 1662 - DNA, 557 bp, Homo sapiens
  misc_feature (228)..(228): n is a, c, g, or t
atccttaattaaattaatctcttccccccccgctctcccctcgtccaccgctgccgcctccttcttctgccgctcctggtgctgcttgtgtgctcgtttggtgcggacctggtacctcttttgtgaagcggcagctgaggagactccggcgctcgccatggccgacgaaaagcccaaggaaggagtcaagactgagaacaacgatcatattaatttgaaggtggcggngcaggatggttctgtggtgcagtttaagattaagaggcatacaccacttagtaaactaatgaaagcctattgtgaacgacagggattgtcaatgaggcagatcagattccgatttgacgggcaaccaatcaatgaaacagacacacctgcacagttggaaatggaggatgaagatacaattgatgtgttccaacagcagacgggaggtgtctactgaaaagggaacctgcttctttactccagaactctgttctttaaagaccaagattacattctcaattagaaaactgcaatttggttccaccacatcctgactactaccgtatagt

SEQ ID NO: 1663 - DNA, 4597 bp, Homo sapiens
cgacattttaactgaactgcgggataaagtgaaatctttccgtgcagctctacgagaggaggaaattgttcctcgtctgataagacaacagtggagaaaggacgcatgctgtttcttagggacacggctgacttccagatatgaccatgtatttgtggcttaaactcttggcatttggctttgcctttctggacacagaagtatttgtgacagggcaaagcccaacaccttcccccactgatgcctaccttaatgcctctgaaacaaccactctgagcccttctggaagcgctgtcatttcaaccacaacaatagctactactccatctaagccaacatgtgatgaaaaatatgcaaacatcactgtggattacttatataacaaggaaactaaattatttacagcaaagctaaatgttaatgagaatgtggaatgtggaaacaatacttgcacaaacaatgaggtgcataaccttacagaatgtaaaaatgcgtctgtttccatatctcataattcatgtactgctcctgataagacattaatattagatgtgccaccaggggttgaaaagtttcagttacatgattgtacacaagttgaaaaagcagatactactatttgtttaaaatggaaaaatattgaaacctttacttgtgatacacagaatattacctacagatttcagtgtggtaatatgatatttgataataaagaaattaaattagaaaaccttgaacccgaacatgagtataagtgtgactcagaaatactctataataaccacaagtttactaacgcaagtaaaattattaaaacagattttgggagtccaggagagcctcagattattttttgtagaagtgaagctgcacatcaaggagtaattacctggaatccccctcaaagatcatttcataattttaccctctgttatataaaagagacagaaaaagattgcctcaatctggataaaaacctgatcaaatatgatttgcaaaatttaaaaccttatacgaaatatgttttatcattacatgcctacatcattgcaaaagtgcaacgtaatggaagtgctgcaatgtgtcatttcacaactaaaagtgctcctccaagccaggtctggaacatgactgtctccatgacatcagataatagtatgcatgtcaagtgtaggcctcccagggaccgtaatggcccccatgaacgttaccatttggaagttgaagctggaaatactctggttagaaatgagtcgcataagaattgcgatttccgtgtaaaagatcttcaatattcaacagactacacttttaaggcctattttcacaatggagactatcctggagaaccctttattttacatcattcaacatcttataattctaaggcactgatagcatttctggcatttctgattattgtgacatcaatagccctgcttgttgttctctacaaaatctatgatctacataagaaaagatcctgcaatttagatgaacagcaggagcttgttgaaagggatgatgaaaaacaactgatgaatgtggagccaatccatgcagatattttgttggaaacttataagaggaagattgctgatgaaggaagactttttctggctgaatttcagagcatcccgcgggtgttcagcaagtttcctataaaggaagctcgaaagccctttaaccagaataaaaaccgttatgttgacattcttccttatgattataaccgtgttgaactctctgagataaacggagatgcagggtcaaactacataaatgccagctatattgatggtttcaaagaacccaggaaatacattgctgcacaaggtcccagggatgaaactgttgatgatttctggaggatgatttgggaacagaaagccacagttattgtcatggtcactcgatgtgaagaaggaaacaggaacaagtgtgcagaatactggccgtcaatggaagagggcactcgggcttttggagatgttgttgtaaagatcaaccagcacaaaagatgtccagattacatcattcagaaattgaacattgtaaataaaaaagaaaaagcaactggaagagaggtgactcacattcagttcaccagctggccagaccacggggtgcctgaggatcctcacttgctcctcaaactgagaaggagagtgaatgccttcagcaatttcttcagtggtcccattgtggtgcactgcagtgctggtgttgggcgcacaggaacctatatcggaattgatgccatgctagaaggcctggaagccgagaacaaagtggatgtttatggttatgttgtcaagctaaggcgacagagatgcctgatggttcaagtagaggcccagtacatcttgatccatcaggctttggtggaatacaatcagtttggagaaacagaagtgaatttgtctgaattacatccatatctacataacatgaagaaaagggatccacccagtgagccgtctccactagaggctgaattccagagacttccttcatataggagctggaggacacagcacattggaaatcaagaagaaaataaaagtaaaaacaggaattctaatgtcatcccatatgactataacagagtgccacttaaacatgagctggaaatgagtaaagagagtgagcatgattcagatgaatcctctgatgatgacagtgattcagaggaaccaagcaaatacatcaatgcatcttttataatgagctactggaaacctgaagtgatgattgctgctcagggaccactgaaggagaccattggtgacttttggcagatgatcttccaaagaaaagtcaaagttattgttatgctgacagaactgaaacatggagaccaggaaatctgtgctcagtactggggagaaggaaagcaaacatatggagatattgaagttgacctgaaagacacagacaaatcttcaacttatacccttcgtgtctttgaactgagacattccaagaggaaagactctcgaactgtgtaccagtaccaatatacaaactggagtgtggagcagcttcctgcagaacccaaggaattaatctctatgattcaggtcgtcaaacaaaaacttccccagaagaattcctctgaagggaacaagcatcacaagagtacacctctactcattcactgcagggatggatctcagcaaacgggaatattttgtgctttgttaaatctcttagaaagtgcggaaacagaagaggtagtggatatttttcaagtggtaaaagctctacgcaaagctaggccaggcatggtttccacattcgagcaatatcaattcctatatgacgtcattgccagcacctaccctgctcagaatggacaagtaaagaaaaacaaccatcaagaagataaaattgaatttgataatgaagtggacaaagtaaagcaggatgctaattgtgttaatccacttggtgccccagaaaagctccctgaagcaaaggaacaggctgaaggttctgaacccacgagtggcactgaggggccagaacattctgtcaatggtcctgcaagtccagccttaaatcaaggttcataggaaaagacataaatgaggaaactccaaacctcctgttagctgttatttctatttttgtagaagtaggaagtgaaaataggtatacagtggattaattaaatgcagcgaaccaatatttgtagaagggttatattttactactgtggaaaaatatttaagatagttttgccagaacagtttgtacagacgtatgcttattttaaaattttatctcttattcagtaaaaaacaacttctttgtaatcgttatgtgtgtatatgtatgtgtgtatgggtgtgtgtttgtgtgagagacagagaaagagagagaattctttcaagtgaatctaaaagcttttgcttttcctttgtttttatgaagaaaaaatacattttatattagaagtgttaacttagcttgaaggatctgtttttaaaaatcataaactgtgtgcagactcaataaaatcatgtacatttctgaaatgacctcaagatgtcctccttgttctactcatatatatctatcttatatacttactattttacttctagagatagtacataaaggtggtatgtgtgtgtatgctactacaaaaaagttgttaactaaattaacattgggaaatcttatattccatatattagcatttagtccaatgtctttttaagcttatttaattaaaaaatttccagtgagcttatcatgctgtctttacatggggttttcaattttgcatgctcgattattccctgtacaatatttaaaatttattgcttgatacttttgacaacaaattaggttttgtacaattgaacttaaataaatgtcattaaaataaataaatgcaatatgtattaatattcattgtataaaaatagaagaatacaaacatatttgttaaatatttacatatgaaatttaatatagctatttttatggaatttttcattgatatgaaaaatatgatattgcatatgcatagttcccatgttaaatcccattcataactttcattaaagcatttactttgaatttc

SEQ ID NO: 1664 - protein, 1143 aa, Homo sapiens
MYLWLKLLAFGFAFLDTEVFVTGQSPTPSPTDAYLNASETTTLSPSGSAVISTTTIATTPSKPTCDEKYANITVDYLYNKETKLFTAKLNVNENVECGNNTCTNNEVHNLTECKNASVSISHNSCTAPDKTLILDVPPGVEKFQLHDCTQVEKADTTICLKWKNIETFTCDTQNITYRFQCGNMIFDNKEIKLENLEPEHEYKCDSEILYNNHKFTNASKIIKTDFGSPGEPQIIFCRSEAAHQGVITWNPPQRSFHNFTLCYIKETEKDCLNLDKNLIKYDLQNLKPYTKYVLSLHAYIIAKVQRNGSAAMCHFTTKSAPPSQVWNMTVSMTSDNSMHVKCRPPRDRNGPHERYHLEVEAGNTLVRNESHKNCDFRVKDLQYSTDYTFKAYFHNGDYPGEPFILHHSTSYNSKALIAFLAFLIIVTSIALLVVLYKIYDLHKKRSCNLDEQQELVERDDEKQLMNVEPIHADILLETYKRKIADEGRLFLAEFQSIPRVFSKFPIKEARKPFNQNKNRYVDILPYDYNRVELSEINGDAGSNYINASYIDGFKEPRKYIAAQGPRDETVDDFWRMIWEQKATVIVMVTRCEEGNRNKCAEYWPSMEEGTRAFGDVVVKINQHKRCPDYIIQKLNIVNKKEKATGREVTHIQFTSWPDHGVPEDPHLLLKLRRRVNAFSNFFSGPIVVHCSAGVGRTGTYIGIDAMLEGLEAENKVDVYGYVVKLRRQRCLMVQVEAQYILIHQALVEYNQFGETEVNLSELHPYLHNMKKRDPPSEPSPLEAEFQRLPSYRSWRTQHIGNQEENKSKNRNSNVIPYDYNRVPLKHELEMSKESEHDSDESSDDDSDSEEPSKYINASFIMSYWKPEVMIAAQGPLKETIGDFWQMIFQRKVKVIVMLTELKHGDQEICAQYWGEGKQTYGDIEVDLKDTDKSSTYTLRVFELRHSKRKDSRTVYQYQYTNWSVEQLPAEPKELISMIQVVKQKLPQKNSSEGNKHHKSTPLLIHCRDGSQQTGIFCALLNLLESAETEEVVDIFQVVKALRKARPGMVSTFEQYQFLYDVIASTYPAQNGQVKKNNHQEDKIEFDNEVDKVKQDANCVNPLGAPEKLPEAKEQAEGSEPTSGTEGPEHSVNGPASPALNQGS

SEQ ID NO: 1665 - DNA, 4826 bp, Homo sapiens
tctcactatagggctcgagcggccgcccgggcaggtctgaccacagtggttccggggagaagccttccaggacccatgtgtaggcacaactgttttccctgatcaggatacttccggcactcaacagaggaaagaaattcctaagggaacactgctcagaaagtactgcagcatgtcttcaaatgcctgaggatcaagttggaaaactagaagcaacagaaaacacaataagcgcaatggcggcggccgcggcggagcagcaacagttctacctgctgctgggaaacctgctcagccccgacaatgtggtccggaaacaggcagaggaaacctatgagaatatcccaggccagtcaaagatcacattcctcttacaagccatcagaaatacaacagctgctgaagaggctagacaaatggccgccgttctcctaagacgtctcttgtcctctgcatttgatgaagtctatccagcacttccctctgatgttcagactgccatcaagagtgagctactcatgattattcagatggaaacacaatctagcatgaggaaaaaagtttgtgatattgcggcagaactggccaggaatttaatagatgaggatggcaataaccagtggcccgaaggtttgaagttcctttttgattcagtcagctctcaaaatgtgggactgcgggaagctgcccttcacattttctggaactttcctggaatttttgggaaccagcaacaacactatttagatgtcatcaaacgaatgttagttcagtgtatgcaagatcaggaacacccgtcgatcaggacgttatctgctagagctacagctgcatttatacttgcaaatgagcataatgttgctctgttcaaacattttgcagacttgctaccgggattcctacaggcggtaaatgactcgtgctaccagaatgatgattctgtcctaaaatccctcgttgagattgcagatactgttccaaagtatttgcgtcctcacttggaagcaactctacagctaagtctaaagttgtgtggagacactagcctcaacaatatgcaacgccagcttgcccttgaagtgatcgtcaccctctctgagactgcagctgctatgttaagaaaacataccaatattgttgcacagactattcctcagatgttagcaatgatggttgatttggaagaagatgaggactgggcaaatgcagatgaactagaagatgatgattttgacagcaatgcagttgcaggcgagagtgctctagatcgaatggcttgcggacttggtggaaagctcgttctgccgatgatcaaggaacacattatgcaaatgcttcaaaatcctgactggaaataccggcatgcaggattgatggccttatctgccattggtgaagggtgccaccagcaaatggaaggaattctaaatgagatcgtaaattttgttttactttttctccaggatcctcatccaagagtaaggtatgcagcctgtaatgccgtgggacagatggctacagattttgcacctggtttccaaaagaaatttcatgagaaggtgattgcagctctgctgcagaccatggaagaccaaggcaatcaacgtgtgcaggcccatgcagctgctgccctcattaactttactgaagactgtcccaagtcactacttattccatacttggataatttggtgaaacatctgcattccattatggtactgaagcttcaagagctgattcagaaaggcaccaagttagttttggaacaagttgtgacatccattgcatcagttgccgatactgcagaagaaaaatttgtcccctactatgatttatttatgccatcactgaagcacatcgttgagaatgcggttcaaaaagaactgagacttctgagaggaaaaactattgaatgcattagcctcattggtctggctgttgggaaggaaaaattcatgcaggatgcatcagatgtgatgcagcttttgttaaagacccagacagacttcaatgatatggaagatgatgatcctcagatctcttacatgatctcagcatgggccagaatgtgcaaaatccttggaaaagaatttcagcaataccttccagtggttatggggcctttaatgaagacggcttcaattaagcccgaagtagcccttttagatacccaagacatggagaatatgagtgatgatgatggttgggaatttgtgaaccttggagatcagcaaagctttggtattaaaactgcaggactagaagaaaaatcaactgcttgccagatgttggtttgctatgctaaggagttaaaggaaggctttgtggagtacaccgaacaggttgtcaaactgatggtccctttactgaaattttatttccacgatggtgttcgagtggcagcagcggaatccatgcctcttctcctggagtgtgcaagagtccgtggtcctgagtatctcacacagatgtggcattttatgtgtgatgctctaattaaggccattggtacagaaccagattcagacgtcctctcagaaataatgcattcttttgcaaagtgcattgaagtaatgggagatggatgccttaataatgaacactttgaagaactgggaggtatattgaaagcaaagcttgaagaacattttaaaaatcaagaattacgacaagttaaaagacaagatgaagactatgatgaacaggtcgaagagtcactacaagatgaggatgataatgatgtttatattctgaccaaagtgtcagatattttacactcaatattcagtagctacaaagaaaaggtgttaccatggtttgaacagctgcttccattaattgtcaacctcatttgtccacatagaccatggccagacagacaatggggattatgcatctttgatgatgtcatagaacactgtagtccagcctcatttaaatacgcagaatatttcttaagaccaatgctccaatatgtatgtgacaacagcccagaagtcaggcaagcagctgcatatggcctgggagtcatggcacagtacggtggagataattatcgccctttttgtacagaagcacttcccctgctggtaagagttattcagtctgcggattctaagaccaaagaaaatgtcaatgctacagagaactgcatctcagcagtagggaaaatcatgaagttcaagcctgactgtgtaaacgttgaagaggtccttccacactggttgtcttggcttccactacatgaagataaagaagaagctgttcagactttcaattatctgtgtgacctgattgaaagtaatcatccaattgttcttggcccaaacaataccaatctgcccaaaatatttagtataattgcggaaggagaaatgcacgaggcaattaaacatgaagatccttgtgccaaacgtctggccaatgtcgttcgccaagtacagacttctggaggactgtggactgagtgcatagcacagctcagtcctgagcagcaggccgccattcaggagctcctgaactctgcgtgaagggccttaatgtcacccaccagaaaactaactccaaataaacgcttaccctttcctttaggtttctttgttttgtttttgagcaaaagagatcggtagtgttgtgtgtaggccattcttctggagagccacaagcaggaagagcagcgctgtgttgcagaatggagtttccatggatttctaccagaccactgaaggagttcctggaagccctgcgtacgtagcactgaagactatttttctattggtataacccgcccacctgaaggggaaagggaaatcaaattaatttttctcgttagacataaggaaatttaaggaaaaacagctttaagaacagttactcagcgtagatgtgtgttcacacaaattgccttgcattcagtgttcattgtgaattgggagtgtgagtctttctgtagggtacaaagaagcctcctacccagcaaaccagtagacccaaaagttgaaaaaaactggatgacagacaacaagcatgaagatggcatatttgatgtcactttggttctttttcccagaaggcttatacagtgactcagtcgggaagctttccagcttcagcccttgaatgtgaagtgtcattggcatgtctggcagtagtctctcattcactcccaataaacaacattgaatacaaaagaggcttgtgtaaaaactcagtactgtctggcttggattcatttcatgttttttaatataagaatgatctaatatttttttaaagtaatagctatcagtaatagctgagtgttttttcccctaatattttccttgtgcaattcagacttaagcatcgagtttttaccatcttccactttaagctaagttatgatacctattccattcacaattggtgttctttttaaggtttgcaaatttcagccaattttgtagctaagattgttctgatcagctcaaaaagatttggcttagtgttttcattgcaaattataattgctgtagagccacacacaacttttgaacttttaattataagtgttatggctaaagttatttactgaaaatttcagtaaaatgtgtgaatgtttctttatgtattaacctcatagcagtaaatgacttgctgttgtttaatttttctaaggcatcttaatagacttctcttggaaaaacctttccaaggtgttaacatttttatagtttgtactaaatttaaccgtgatataaaaatgaattttatgcatagatcagaattttaaattaaaggttttttctttaaaaaaaaaaaaaaaaaaaaaaaaaaaaaaaaaaaaa

SEQ ID NO: 1666 - protein, 1097 aa, Homo sapiens
MAAAAAEQQQFYLLLGNLLSPDNVVRKQAEETYENIPGQSKITFLLQAIRNTTAAEEARQMAAVLLRRLLSSAFDEVYPALPSDVQTAIKSELLMIIQMETQSSMRKKVCDIAAELARNLIDEDGNNQWPEGLKFLFDSVSSQNVGLREAALHIFWNFPGIFGNQQQHYLDVIKRMLVQCMQDQEHPSIRTLSARATAAFILANEHNVALFKHFADLLPGFLQAVNDSCYQNDDSVLKSLVEIADTVPKYLRPHLEATLQLSLKLCGDTSLNNMQRQLALEVIVTLSETAAAMLRKHTNIVAQTIPQMLAMMVDLEEDEDWANADELEDDDFDSNAVAGESALDRMACGLGGKLVLPMIKEHIMQMLQNPDWKYRHAGLMALSAIGEGCHQQMEGILNEIVNFVLLFLQDPHPRVRYAACNAVGQMATDFAPGFQKKFHEKVIAALLQTMEDQGNQRVQAHAAAALINFTEDCPKSLLIPYLDNLVKHLHSIMVLKLQELIQKGTKLVLEQVVTSIASVADTAEEKFVPYYDLFMPSLKHIVENAVQKELRLLRGKTIECISLIGLAVGKEKFMQDASDVMQLLLKTQTDFNDMEDDDPQISYMISAWARMCKILGKEFQQYLPVVMGPLMKTASIKPEVALLDTQDMENMSDDDGWEFVNLGDQQSFGIKTAGLEEKSTACQMLVCYAKELKEGFVEYTEQVVKLMVPLLKFYFHDGVRVAAAESMPLLLECARVRGPEYLTQMWHFMCDALIKAIGTEPDSDVLSEIMHSFAKCIEVMGDGCLNNEHFEELGGILKAKLEEHFKNQELRQVKRQDEDYDEQVEESLQDEDDNDVYILTKVSDILHSIFSSYKEKVLPWFEQLLPLIVNLICPHRPWPDRQWGLCIFDDVIEHCSPASFKYAEYFLRPMLQYVCDNSPEVRQAAAYGLGVMAQYGGDNYRPFCTEALPLLVRVIQSADSKTKENVNATENCISAVGKIMKFKPDCVNVEEVLPHWLSWLPLHEDKEEAVQTFNYLCDLIESNHPIVLGPNNTNLPKIFSIIAEGEMHEAIKHEDPCAKRLANVVRQVQTSGGLWTECIAQLSPEQQAAIQELLNSA

SEQ ID NO: 1667 - DNA, 574 bp, Homo sapiens
  misc_feature (467)..(467): n is a, c, g, or t
  misc_feature (500)..(500): n is a, c, g, or t
  misc_feature (533)..(533): n is a, c, g, or t
ttccgaagaaacaggaccagagagggaaggtgacctgaaagtcacagaataattttttagagctgaacaagaatccaagcctgcaactgcagagacgagagatctttctgctgtctatactcttggaaagcacatcctaagatctttgcagattatcctgtggaaggaaaatgcctaaagtcaaaagaagccggaaagcacccccagatggctgggagttgattgagccaacactggatgaattagatcaaaagatgagagaagctgaaacagaaccgcatgagggaaagaggaaagtggaatctctgtggcccatcttcaggatccaccaccagaaaacccgctacatcttcgacctcttttacaagcggaaaccatcagcagagaactctatggaatattgtattaaaggaaggctatgcagacaaaaacctggattgcaaaatgggaaaaagccaagggtttgnagaactttgtgctgcctgcgggtgcattccagncacgggggcacccactttcgggacgaactggcncttgccgccgttccccaaagccaacttggaagtgggccgca

SEQ ID NO: 1668 - DNA, 170 bp, Homo sapiens
gcacgaggctcttggtacctcagcgcgagcgccaggcgtgcggccgccgaggctatgttcgagtccgatttccgcactgagttctacgaggtggtccagagccagagggttcttctcttcgtggcctctgacgaggatgctctgagagcgtgcaagatccttcaggcctt

SEQ ID NO: 1669 - DNA, 1804 bp, Homo sapiens
ggggccgggcggggccagcggcgcattagcgccttgtcaattcggctgctcagacttgctccggcctccgcgtccgcgcccagcgcgcccagcgacgtgcgggcggcctggcccgcgccctcccgcgcccggcctgcgtcccgcgccctgcgccaccgccgccgagccgcagcccgccgcgcgcccccggcagcgccggccccatgcccgccggccgccggggccccgccgcccaatccgcgcggcggccgccgccgttgctgcccctgctgctgctgctctgcgtcctcggggcgccgcgagccggatcaggagcccacacagctgtgatcagtccccaggatcccacgcttctcatcggctcctccctgctggccacctgctcagtgcacggagacccaccaggagccaccgccgagggcctctactggaccctcaacgggcgccgcctgccccctgagctctcccgtgtactcaacgcctccaccttggctctggccctggccaacctcaatgggtccaggcagcggtcgggggacaacctcgtgtgccacgcccgtgacggcagcatcctggctggctcctgcctctatgttggcctgcccccagagaaacccgtcaacatcagctgctggtccaagaacatgaaggacttgacctgccgctggacgccaggggcccacggggagaccttcctccacaccaactactccctcaagtacaagcttaggtggtatggccaggacaacacatgtgaggagtaccacacagtggggccccactcctgccacatccccaaggacctggctctctttacgccctatgagatctgggtggaggccaccaaccgcctgggctctgcccgctccgatgtactcacgctggatatcctggatgtggtgaccacggaccccccgcccgacgtgcacgtgagccgcgtcgggggcctggaggaccagctgagcgtgcgctgggtgtcgccacccgccctcaaggatttcctctttcaagccaaataccagatccgctaccgagtggaggacagtgtggactggaaggtggtggacgatgtgagcaaccagacctcctgccgcctggccggcctgaaacccggcaccgtgtacttcgtgcaagtgcgctgcaacccctttggcatctatggctccaagaaagccgggatctggagtgagtggagccaccccacagccgcctccactccccgcagtgagcgcccgggcccgggcggcggggcgtgcgaaccgcggggcggagagccgagctcggggccggtgcggcgcgagctcaagcagttcctgggctggctcaagaagcacgcgtactgctccaacctcagcttccgcctctacgaccagtggcgagcctggatgcagaagtcgcacaagacccgcaaccaggacgaggggatcctgccctcgggcagacggggcacggcgagaggtcctgccagataagctgtaggggctcaggccaccctccctgccacgtggagacgcagaggccgaacccaaactggggccacctctgtaccctcacttcagggcacctgagccaccctcagcaggagctggggtggcccctgagctccaacggccataacagctctgactcccacgtgaggccacctttgggtgcaccccagtgggtgtgtgtgtgtgtgtgagggttggttgagttgcctagaacccctgccagggctgggggtgagaaggggagtcattactccccattacctagggcccctccaaaagagtccttttaaataaatgagctatttaggtgcaaa

SEQ ID NO: 1670 - protein, 422 aa, Homo sapiens
MPAGRRGPAAQSARRPPPLLPLLLLLCVLGAPRAGSGAHTAVISPQDPTLLIGSSLLATCSVHGDPPGATAEGLYWTLNGRRLPPELSRVLNASTLALALANLNGSRQRSGDNLVCHARDGSILAGSCLYVGLPPEKPVNISCWSKNMKDLTCRWTPGAHGETFLHTNYSLKYKLRWYGQDNTCEEYHTVGPHSCHIPKDLALFTPYEIWVEATNRLGSARSDVLTLDILDVVTTDPPPDVHVSRVGGLEDQLSVRWVSPPALKDFLFQAKYQIRYRVEDSVDWKVVDDVSNQTSCRLAGLKPGTVYFVQVRCNPFGIYGSKKAGIWSEWSHPTAASTPRSERPGPGGGACEPRGGEPSSGPVRRELKQFLGWLKKHAYCSNLSFRLYDQWRAWMQKSHKTRNQDEGILPSGRRGTARGPAR

SEQ ID NO: 1671 - DNA, 808 bp, Homo sapiens
ccccccccccttttttttttttttttttttttttttttttaaggaaaaaaacccccgccaaatccgaaccgggttgtagctcggtccccgcctcctcagggggctgtcgggtgcaacaaacctcccccatcattttaaaaaataattatagagcgcggggccccgccctcgctcctgccagggggcgctttggtcctattttttggattatttcattacgaagcacgtgaatgaatctagcccccacaccttcaagaaagaaactcgcggactggggttgaaaagcccaggtgggcgggtcaactccagctgacctggaagggtcagcgccgggtccctcccttttcccctgcgtgcgttcggaaccagtactcgccaccctcacccgagtccccatacgaggcccggtttgccaactttgcgacctgccaggcacccttgggtgtccgaccctgggtggtcccagcagagaacagtccgagcctggggttggggagccctctcccaacactggtccctgcccccaagcctcgtctaagtgctgtcagttttgcagagtaaacggtgacgggaggttggagaagaggatgcttaagggagatgaggaggcaggaagaggaaggggggcggacgtggagagaaaaggggaatgattaaaaacggaaagaaggaggcctgaggttgaagatgcaagacatgaagcgaggaagcttgccatgccgagtagcgcacagcttatccacagtaagatggcacccggagttgatggttacccaccagtagttttgcaaaagcagaccgcggcccg

SEQ ID NO: 1672 - DNA, 707 bp, Homo sapiens
  misc_feature (566)..(566): n is a, c, g, or t
ctgatattgaagatgaggacatggaagaacttcttaatgacacaagactcttgaaaaaacttaagaaaggcaaaataactgaagaagaatttgagaagggcttgttgacaactggcaaaagaacaatcaagacagtggatttagggatctcagatttggaagatgactgctgattccagtgccacagatgaacccacaaggacatagctgttccctaactgggtggatggctccagtttgcttttaacgaaaatcacaacttcaggagacatctgaaaagaatgatgtctctgaaagctgtcctttcagatgagggagaaatgaaggatttcacacttcagaatattttactaaaaacattccagtcttggccgggtgcggtggctcctgcctataatcccagcactttgggaggctgaggcaggaggatcacttgagcccaggagttcaagaccagcctgggaacacagcgagaccctctcattaaaaacaacaaaacaaaacaattccagtcttggagtagtctaacagaagaaaatgtaaaattatttgagtgtaaataatanatgtcagtatttatcatgatgggtcacatatagacatatgttcatattatatatatatatatatatatatatatatatatatatatatatatatatataagctcttttttctgaggctattttatagttatttttaaacat

SEQ ID NO: 1673 - DNA, 453 bp, Homo sapiens
  misc_feature (41)..(41): n is a, c, g, or t
  misc_feature (45)..(45): n is a, c, g, or t
  misc_feature (47)..(47): n is a, c, g, or t
  misc_feature (362)..(362): n is a, c, g, or t
  misc_feature (384)..(384): n is a, c, g, or t
  misc_feature (398)..(398): n is a, c, g, or t
  misc_feature (446)..(446): n is a, c, g, or t
ggaaaacttgtctctgcggttgtggggaggacgcgcgctcnggantnttttcaagcgtaggcccccgggaactcgagctgccatgagcctctgggtggacaagtatcggccctgctccttgggacggctggactatcacaaggagcaggcggcccagctgcggaacctggtgcagtgtggtgactttcctcatctgttagtgtacggaccatcaggtgctggaaaaaagacaagaattatgtgtattctacgtgaactttatggtgttggagtggaaaaattgagaattgaacatcagaccatcacaactccatctaaaaaaaaaattgaaattagcaccattgcaagtaactaccaccttnaagttaattcccttagtgatgnggaaatagtgaccnagttagtcattcaggagatgttgaaaacagtggcacaattcacagcantgaaaca

SEQ ID NO: 1674 - DNA, 6942 bp, Homo sapiens
ggcatggaacctaaagactagaggcggttgtgtgagtcaggaagaggggccagatatctgagtgttcctctttagtttcttcaattgcagataatatggtgtctaattttatgttgttcaggaaagacagtggttcctgactcaggaagacagtctcagaaacatgtggaatgatattgagctgctaacaaatgatgataccggaagtgggtacctgagtgtcggttcaagaaaagaacatggaactgctttatatcaagtagatttgctagtgaagatctcttctgaaaaggcctcattaaatccaaagatacaggcatgcagcttaagtgatgggtttattattgtagccgaccaatcagtgatattgcttgacagtatttgtagatcacttcaattgcatcttgtctttgatactgaagtggatgtagttggcctttgtcaagaaggaaagtttcttttggttggcgagagaagtggcaacctacatcttattcatgtaacatcaaaacaaacactactcactaatgcatttgttcagaaagctaacgatgaaaatcggcggacttaccagaatcttgtcattgagaaggatggttcaaatgaaggtacctattatatgctacttcttacatacagtggatttttttgtattacaaaccttcagcttttaaaaattcaacaagcaattgagaatgtagacttcagtacagcaaaaaagttacaaggacaaatcaagtccagttttatttctactgaaaattatcatactcttggttgtctcagtcttgtggctggagatttagcaagtgaagttcctgtgataattgggggaaccggtaattgtgcattctcaaaatgggaaccagattcttccaagaaaggaatgacagttaagaaccttattgatgcagagattattaaaggtgcaaagaagttccagctgatagacaatctactttttgttcttgatactgataacgtgctgagtttatgggatatttacactctaactcctgtatggaactggccctctcttcacgtagaagagtttcttcttactacagaagcagactctccttcatcagtcacgtggcaaggaattacaaatctcaaattaatagctctgacagcttcagctaataagaagatgaaaaacctcatggtttattcattacctacaatggaaatactatattctttggaagtatctagtgtttcttctctggtccaaacaggaattagcacagataccatataccttttagaaggagtttgcaaaaatgatccaaaattgtctgaagactcagtctctgtgttagtactcagatgtcttacggaagctttaccagaaaacagattgagtcggttacttcacaaacacagatttgctgaagctgagagttttgccattcagtttggactagatgttgagcttgtttacaaggtcaagtcaaatcatatattggagaaactggcattgagttctgtggatgccagtgaacagaccgaatggcaacaacttgtagacgacgctaaggaaaatctacataagatccaggatgatgaatttgtggtgaattactgcctgaaagctcagtggataacctatgaaaccactcaagagatgctgaattatgccaaaaccaggcttttgaagaaagaagataaaactgctctcatttattctgatggcttgaaagaggtgctaagagctcatgcaaaattgactactttttatggagcatttggaccagaaaaattcagtggcagttcttggattgaatttctaaataatgaagatgatcttaaagatatttttttacagctaaaagaaggaaaccttgtttgtgcacagtatctttggcttcgacatcgggcaaactttgaaagcagatttgatgtgaaaatgctggagagcttgctcaactcaatgtctgcatcagtctctttgcaaaagctgtgtccatggtttaaaaatgatgtgattccatttgtaagaaggactgtgcctgaaggacagataattcttgcaaaatggttggaacaagcagccaggaaccttgaattaactgataaggcaaattggccagaaaatggacttcaattggcagagatattttttacagcagaaaaaacagacgagttgggattggcatcttcctggcattggatttccttgaaagattatcagaacacagaggaagtatgtcagctaaggactttggtaaataacttgcgagagttgatcacgttgcataggaagtacaactgcaaattagccctctctgattttgagaaggaaaatacaaccaccatagtgttccgaatgtttgataaagtgctggccccagagcttattccctccatcttagagaagtttataagagtttacatgagagaacatgacttgcaagaggaggaacttctcttgctgtacatagaggatttactgaatagatgcagctcaaagtccacatcactctttgaaacagcatgggaagcaaaggccatggcagtaatagcgtgtttatctgacacggacctcatatttgatgccgtgctcaagatcatgtatgcggcagtggttccttggagtgcagctgtggagcaactggtgaaacagcacctggaaatggaccatcccaaagtcaagttattacaggaaagttacaaactaatggagatgaaaaaacttttacgaggctatggaataagagaggtaaatctcttaaacaaggaaataatgagagtggttagatacattctcaaacaagatgtcccatcttctttagaagatgctttaaaggtagcccaagcgtttatgttatctgatgatgagatctacagtctaagaattattgacctgattgatagagaacagggtgaagactgtctccttctgttgaagtctttgcctcctgctgaagctgagaaaactgcagaaagagtcatcatatgggcacgactggcattacaagaagagccagatcattctaaagagggcaaggcctggagaatgtctgtagcgaagacatccgtggacattcttaagatactatgtgacattcagaaagacaatctgcagaagaaggacgaatgtgaagaaatgttgaaactatttaaagaggttgctagcttacaggagaactttgaggtctttctttcatttgaagattatagcaatagttccctggtagcagatctccgtgagcagcacattaaagctcacgaagttgcacaggcgaaacacaaacctgggagcaccccagagcccatagctgctgaggtgaggagcccaagcatggaatcaaagctgcacagacaggcactggccctgcagatgtccaaacaagagctggaggcagagctgaccttgagagccttaaaagatgggaacatcaaaacagcactgaaaaaatgcagcgacttgtttaagtatcactgcaatgctgacactgggaaattgctatttctgacatgtcagaagctttgtcagatgttggctgataatgtcccagtgacagtgcctgtgggactgaatcttccttccatgatacatgatctagcaagccaagctgccaccatttgcagtccagattttttactagatgctttagaactatgtaaacatactttaatggctgtagagctttccagacaatgccaaatggatgactgtggaatcctcatgaaagcttcttttgggacacataaagatccatatgaagagtggtcttacagtgacttcttcagtgaagatggaattgttcttgagtcacagatggtgcttccagtgatttatgaactgatttcatctcttgtgcctctagctgaaagcaagagatatcccttggagtctaccagtttgccatactgctcccttaatgaaggagatggccttgttttacctgttataaattccatctctgccctgcttcagaatcttcaggaatctagccagtgggagctagccctaagatttgtggttggttcatttggtacctgtcttcagcactctgtgtcaaacttcatgaatgccactttgagtgaaaagttatttggagagactacattagttaaatcaaggcatgttgttatggaattgaaagaaaaagctgttatatttatcagggaaaatgctacaacactactgcacaaagtatttaattgtcgcttggtagatcttgacctggcgttgggttactgcactctcttacctcaaaaagatgtgtttgaaaatctctggaagctcatagataaagcatggcagaattacgacaaaatcttggcaatatctctggtgggctctgagctggcaagtctctatcaggaaatagaaatggggcttaagttccgtgaactcagtactgatgcccagtggggcattcgtcttggtaaacttggtatttcttttcaaccagttttcaggcaacattttctcaccaagaaagacctcattaaagctcttgtggagaatatagatatggacacaagcctcattttggaatattgcagcacatttcagttggactgcgatgcagttcttcagctcttcattgaaacgctgctccacaacacaaatgccggccaaggccagggagatgcaagcatggactctgcaaagcggcggcatcccaaactcctggccaaagcccttgagatggttcctttactgacgagcacaaaagatttggtcatcagtcttagtggaatactacataagctggatccttatgactatgaaatgattgaagttgtcttgaaagttatagaacgagctgatgaaaagataaccaatattaatattaatcaggcattgagtattctgaaacatttgaagtcatacagaagaatttctcctcccgtggatctagaatatcagtatatgttggaacatgtcataactttgccatcagctgcccaaactagactgccttttcacctgatattctttggcacagcacagaacttctggaaaattctctctacagaactcagtgaagaatctttcccaacattgctcttaatttcgaaattaatgaagttctctctggacactctgtacgtgtctacagcaaaacacgttttcgaaaaaaaactgaagccaaagctcctgaagttaacacaagctaaatcctcaacactgattaacaaggaaataactaagatcacgcagaccatcgaatcctgcttactctctatagtcaacccagagtgggctgtagctattgccatcagccttgcccaggatatccctgaaggttccttcaagatatctgctttgaaattctgcctttatttagctgagagatggctacagaatatcccatcgcaggacgaaaaacgtgaaaaagccgaggctttgttgaagaagcttcatatccagtaccggcgatcgggcacagaagctgtgctcatagcccacaagctgaacactgaggaatatttaagagtgatcggaaagccagcacatcttattgtcagtctctacgaacatcctagcatcaatcaaagaattcagaattcatctggcacagattatcctgatattcatgcagcagctaaagaaatagccgaagtcaatgaaattaatttggaaaaagtctgggacatgttgttggaaaaatggctatgcccttcaacaaaacctggtgaaaaaccatcagaattatttgaacttcaagaagatgaagccctacgaagagtgcagtatctcctcctgtctcgtccaattgattatagttcaagaatgctgtttgtatttgcaacatcaactacaaccacattaggtatgcatcagttaacttttgcccatagaactcgagctcttcagtgtctcttctatttggctgacaaggaaactatagaatctctctttaaaaaacccattgaagaagtgaaatcttatttgagatgtataacttttctggcatcatttgagactttgaatatccccatcacatatgaattattttgcagcagtcctaaagaaggaatgattaagggtctgtggaaaaaccacagccacgagtccatggcagtaagattggtgactgagctgtgtttagaatacaaaatctatgacctgcagctttggaatggactcttgcaaaagcttctgggcttcaatatgattccttatctaaggaaagttttaaaagccatctccagtatccattctttatggcaggttccctacttcagcaaagcgtggcagcgtgtgatacagataccactgctttcagcctcttgtcctttaagtcctgatcagctgtcagattgttctgagagtctcatcgctgtcctcgaatgtccagtctcaggtgatcttgacctgatcggagtcgccaggcagtatatccagttagaacttccggcttttgcattagcttgtctgatgctcatgccccactcagagaaaagacaccagcaaattaagaattttctgggttcctgtgaccctcaggttattttaaagcaattggaagagcatatgaacacgggccagctagcaggattttcacatcaaattagaagtctgattttgaataatatcatcaataagaaggagtttgggattttggcaaagaccaaatactttcaaatgttgaagatgcatgcgatgaataccaacaatatcactgagctagtgaactatttggcaaatgacttaagtttagatgaagcttcagtcttgataactgaatattcaaagcactgcgggaaacctgtgcctccagacactgctccctgtgaaattctgaagatgtttcttagtggattatcgtaaatcactgaacctttttttcaagaaggacaagaattttggagtctgctattaatggaccatatttattacagtttttaaattgtacaatctctgtattatagctatttgtctaacattaccccacatgtaataaataaaacaatatgagc

SEQ ID NO: 1675 - protein, 2209 aa, Homo sapiens
MWNDIELLTNDDTGSGYLSVGSRKEHGTALYQVDLLVKISSEKASLNPKIQACSLSDGFIIVADQSVILLDSICRSLQLHLVFDTEVDVVGLCQEGKFLLVGERSGNLHLIHVTSKQTLLTNAFVQKANDENRRTYQNLVIEKDGSNEGTYYMLLLTYSGFFCITNLQLLKIQQAIENVDFSTAKKLQGQIKSSFISTENYHTLGCLSLVAGDLASEVPVIIGGTGNCAFSKWEPDSSKKGMTVKNLIDAEIIKGAKKFQLIDNLLFVLDTDNVLSLWDIYTLTPVWNWPSLHVEEFLLTTEADSPSSVTWQGITNLKLIALTASANKKMKNLMVYSLPTMEILYSLEVSSVSSLVQTGISTDTIYLLEGVCKNDPKLSEDSVSVLVLRCLTEALPENRLSRLLHKHRFAEAESFAIQFGLDVELVYKVKSNHILEKLALSSVDASEQTEWQQLVDDAKENLHKIQDDEFVVNYCLKAQWITYETTQEMLNYAKTRLLKKEDKTALIYSDGLKEVLRAHAKLTTFYGAFGPEKFSGSSWIEFLNNEDDLKDIFLQLKEGNLVCAQYLWLRHRANFESRFDVKMLESLLNSMSASVSLQKLCPWFKNDVIPFVRRTVPEGQIILAKWLEQAARNLELTDKANWPENGLQLAEIFFTAEKTDELGLASSWHWISLKDYQNTEEVCQLRTLVNNLRELITLHRKYNCKLALSDFEKENTTTIVFRMFDKVLAPELIPSILEKFIRVYMREHDLQEEELLLLYIEDLLNRCSSKSTSLFETAWEAKAMAVIACLSDTDLIFDAVLKIMYAAVVPWSAAVEQLVKQHLEMDHPKVKLLQESYKLMEMKKLLRGYGIREVNLLNKEIMRVVRYILKQDVPSSLEDALKVAQAFMLSDDEIYSLRIIDLIDREQGEDCLLLLKSLPPAEAEKTAERVIIWARLALQEEPDHSKEGKAWRMSVAKTSVDILKILCDIQKDNLQKKDECEEMLKLFKEVASLQENFEVFLSFEDYSNSSLVADLREQHIKAHEVAQAKHKPGSTPEPIAAEVRSPSMESKLHRQALALQMSKQELEAELTLRALKDGNIKTALKKCSDLFKYHCNADTGKLLFLTCQKLCQMLADNVPVTVPVGLNLPSMIHDLASQAATICSPDFLLDALELCKHTLMAVELSRQCQMDDCGILMKASFGTHKDPYEEWSYSDFFSEDGIVLESQMVLPVIYELISSLVPLAESKRYPLESTSLPYCSLNEGDGLVLPVINSISALLQNLQESSQWELALRFVVGSFGTCLQHSVSNFMNATLSEKLFGETTLVKSRHVVMELKEKAVIFIRENATTLLHKVFNCRLVDLDLALGYCTLLPQKDVFENLWKLIDKAWQNYDKILAISLVGSELASLYQEIEMGLKFRELSTDAQWGIRLGKLGISFQPVFRQHFLTKKDLIKALVENIDMDTSLILEYCSTFQLDCDAVLQLFIETLLHNTNAGQGQGDASMDSAKRRHPKLLAKALEMVPLLTSTKDLVISLSGILHKLDPYDYEMIEVVLKVIERADEKITNININQALSILKHLKSYRRISPPVDLEYQYMLEHVITLPSAAQTRLPFHLIFFGTAQNFWKILSTELSEESFPTLLLISKLMKFSLDTLYVSTAKHVFEKKLKPKLLKLTQAKSSTLINKEITKITQTIESCLLSIVNPEWAVAIAISLAQDIPEGSFKISALKFCLYLAERWLQNIPSQDEKREKAEALLKKLHIQYRRSGTEAVLIAHKLNTEEYLRVIGKPAHLIVSLYEHPSINQRIQNSSGTDYPDIHAAAKEIAEVNEINLEKVWDMLLEKWLCPSTKPGEKPSELFELQEDEALRRVQYLLLSRPIDYSSRMLFVFATSTTTTLGMHQLTFAHRTRALQCLFYLADKETIESLFKKPIEEVKSYLRCITFLASFETLNIPITYELFCSSPKEGMIKGLWKNHSHESMAVRLVTELCLEYKIYDLQLWNGLLQKLLGFNMIPYLRKVLKAISSIHSLWQVPYFSKAWQRVIQIPLLSASCPLSPDQLSDCSESLIAVLECPVSGDLDLIGVARQYIQLELPAFALACLMLMPHSEKRHQQIKNFLGSCDPQVILKQLEEHMNTGQLAGFSHQIRSLILNNIINKKEFGILAKTKYFQMLKMHAMNTNNITELVNYLANDLSLDEASVLITEYSKHCGKPVPPDTAPCEILKMFLSGLS

SEQ ID NO: 1676 - DNA, 1968 bp, Homo sapiens
cgcagggccacagcagctcagccgccggtgccccctcggaaaccatgacccccggcgcgggcccatggagccatggcctatagggtcctgggccgcgcggggccacctcagccgcggagggcgcgcaggctgctcttcgccttcacgctctcgctctcctgcacttacctgtgttacagcttcctgtgctgctgcgacgacctgggtcggagccgcctcctcggcgcgcctcgctgcctccgcggccccagcgcgggcggccagaaacttctccagaagtcccgcccctgtgatccctccgggccgacgcccagcgagcccagcgctcccagcgcgcccgccgccgccgtgcccgcccctcgcctctccggttccaaccactccggctcacccaagctgggtaccaagcggttgccccaagccctcattgtgggcgtgaagaaggggggcacccgggccgtgctggagtttatccgagtacacccggacgtgcgggccttgggcacggaaccccacttctttgacaggaactacggccgcgggctggattggtacaggagcctgatgcccaggaccctcgagagccagatcacgctggagaagacgcccagctactttgtcactcaagaggctcctcgacgcatcttcaacatgtcccgagacaccaagctgatcgtggttgtgcggaaccctgtgacccgtgccatctctgattacacgcagacactctccaagaagcccgacatcccgacctttgagggcctctccttccgcaaccgcaccctgggcctggtggacgtgtcgtggaacgccatccgcatcggcatgtacgtgctgcacctggagagctggctgcagtacttcccgctagctcagattcacttcgtcagtggcgagcgactcatcactgacccggccggcgagatggggcgagtccaggacttcctgggcattaagagattcatcacggacaagcacttctatttcaacaagaccaaaggattcccttgcttgaaaaaaacagaatcgagcctcctgcctcgatgcttgggcaaatcaaaagggagaactcatgtacagattgatcctgaagtgatagaccagctccgagaattttatagaccgtataatatcaaattttatgaaaccgttgggcaggacttcaggtgggaataagcccacgaaaggaaagggctctcaagggctcttctgctcatctcttccgtgagatttgctcccagaccctcttatctccctccaacaaaccctggctccagccccctttcccaacttgagttgcatcatcttggaaccaggaagcccagctaaagccaagagaccagagagtctctgccactagttttcatcagtctgttcaagcaaagttgatctgctcctggcacgtccagtaaattccagaatcattctcctttctgcccataaagggccttggagaattgctttaagaagagtgaatgttccaatgatgatagatattataagcgacgatggttctgttgctatgaacacagcagtcggtccctgtcattgtccacccaggagtggccttgttaattccaagtggcatgtatcttccctctgagcttcatttcttcaagatgctctgggtggtgggatgggagaccatcctcagccctcctcagaccttatcaattcattgagagattgcaaagctgaaagcacctccggccactcctgggagacagaccctttggtgatgaaataaaccagtgacttcagagcctatggtctcaactgtgcttgaaaaacactgtctctgaaaacaactttgtgattctccctgctccctgtggacaaaagcacataattctgctgttacgggtactttgctcatacgagctttcatgttcagcatgcaatggaatcatgcttgtccatgtgaaataaatatggctctctcgtgtccttaaaaaaaaaaaaaaaaaa

SEQ ID NO: 1677 - protein, 367 aa, Homo sapiens
MAYRVLGRAGPPQPRRARRLLFAFTLSLSCTYLCYSFLCCCDDLGRSRLLGAPRCLRGPSAGGQKLLQKSRPCDPSGPTPSEPSAPSAPAAAVPAPRLSGSNHSGSPKLGTKRLPQALIVGVKKGGTRAVLEFIRVHPDVRALGTEPHFFDRNYGRGLDWYRSLMPRTLESQITLEKTPSYFVTQEAPRRIFNMSRDTKLIVVVRNPVTRAISDYTQTLSKKPDIPTFEGLSFRNRTLGLVDVSWNAIRIGMYVLHLESWLQYFPLAQIHFVSGERLITDPAGEMGRVQDFLGIKRFITDKHFYFNKTKGFPCLKKTESSLLPRCLGKSKGRTHVQIDPEVIDQLREFYRPYNIKFYETVGQDFRWE

SEQ ID NO: 1678 - DNA, 2483 bp, Homo sapiens
cggaccgcgaacccacatccctacaaagcaggaaagtatgcttgggagaggccaagtgagtggggaatcagcccaaagccaggcgtccagggtctccctcacctgaagctgactttttccccaccttggacagagggcgggagatgccatccccactgaacccagtgctttcaccagccatattagctcccactcaccccccgtcgtggaagcctcggccgtcacacctgcagggccggggcgtgcatggcctcagggatggcctgttcagctgctgggtgactcgggtccaggtgcctcaccacctgctgagctctgtgtgatttctggacgcttctgctcgttgcctttgggctcagtgaagagtctggagtttatctggagtgaggtggccggttcttggtgggatctgagcagagtccattcaggagcaggaaagttcatctcagaccctaaatccagccacgtcatgccacgcttaacacctctaacaacttcccctggcacttaggacagcgtctggctccttccctcggctcatggccctcagaatctgcgtcacatacaccccagctctcccgataggtctctgcactcgctgttgcctctgcctggaacagtctccctcctggtgtcattgtctccgtggtgtgtccttcctgaccttccacctccaccaggtgccgacacttccctgaccccagtaacctcttctcttgggtgggtgaatgccacctgctgatgtctgatttattcatcggttttcttgtctgtagtctgtcccccttggggacagggactcgttgctcatgttcacccggcaggctggacacttcgtggagggctccaaagctggcagatcccggggccgcctctgtctctcccaggccctgcgtgttgcggtgagaggagcatttgtgtctctgtggtttgctgctggagctggtgaccgggagagaaacaagggagacaagggtgcccagacaggtgcggggctcagccaggaggcagaagacgtggacgtgtcccgggccaggagggtcacagatgcaccacaaggcactctgtgtggcactgggaacaggaattctgggagtcagtctgcaagggcggtgggcgttgctcacctgggagaagcctttagagtgggcgttgagcaggccattagctcgtgccctgaggaggtgcatgggcggcatgggctctccatggaaattatgtgggcgcaaatggatgtggctctgcgctcacctgggcgaggacttctggccggtgccggggcactctgcatgaccctggcagaatcgagctgccctgactatgaaaggggaagaagagcatgcctgaccctccaccggcaccccacccctcactgctccacctggggcctgcctctgcgggtggctgggtcctggctgactgttgtgactgttgaggccctggggcggtggcgcatgggagttaggaggactggccaggtggggcccactatgcacccacccccagtgtcaggtgcttctcctctcctcctccaccacctcctcctcctcctcctcatcatcatcctcacttgttgaggacgtcctgtgtgccaagtggtttatatgcccagcctcatttaatcctcagaatgactccatgaggtagctactaaaaccccccacttaacagatgaggaaactgaggcctagagaagctcaacaagttgcctaagttccaagtttcctctcccaactctcctaccctctcctcttccttctcctttctcccattcttccctgcctcttccctaactagacaattttttattgagtgtctcccaggtgcaggcatgagccaggtgctgggaaaatcatgataacccagctccttctggtcattttctcagctggttagaggctgggaggacacgcaagttcagctccagccgactggggcattggtggtagcccctggagacattgtgcaatggggctacgaggctgcatctggctccagggaagcgtgttgcaatccatgagtgatgtctgccatgcgtacaggcatggagagtgaggcgcctgtactgtctttctgtagaccctagactggtggggcctctgaaatgcatccagacactgtgctgggtgtgttgcatggccctcccaaccaattcagtatttttctccccattttccagggagaaatctaaggcgtcagaatgtaaggttcttattggaacccaggctccagggtccctggttttctgtgacatcatgctgcaggaccctgtttctctctttgctttggctgctggggagctcagaagggagctttaggcttgctctcagtcaccacattagctcaggggtttgggcatttttgtcgccgtctcctttgggctctgtctcctccctgctgtgcttcctgaggagcaggccggatgtaagttatcaactataaataaaaccaagacttccgttctggctctcaaaaaaaaaaaa

SEQ ID NO: 1679 - protein, 313 aa, Homo sapiens
MALRICVTYTPALPIGLCTRCCLCLEQSPSWCHCLRGVSFLTFHLHQSVPLGDRDSLLMFTRQAGHFVEGSKAGRSRGRLCLSQALRVAVRGAFVSLWFAAGAGDRERNKGDKGAQTGAGLSQEAEDVDVSRARRVTDAPQGTLCGTGNRNSGSQSARAVGVAHLGEAFRVGVEQAISSCPEEVHGRHGLSMEIMWAQMDVALRSPGRGLLAGAGALCMTLAESSCPDYERGRRACLTLHRHPTPHCSTWGLPLRVAGSWLTVVTVEALGRWRMGVRRTGQVGPTMHPPPVSGASPLLLHHLLLLLLIIILTC

SEQ ID NO: 1680 - DNA, 580 bp, Homo sapiens
ctgctgcctgcaccgtagaggaggaactgcacacaccctgcatgttttagttcacgagcagctatcaaagcctgttagccatcctggttacctgcttgtgcagacagaacttactgtcccaggtaagcacctaattatttaagtcttagttcctgtcacaggcccacttggattccaggcttctccactgtcccgcctctgcccatcaggtggtggcccaatgagctgtgtacagagcaggcttgggcaagacagttcacagttgtggggaccaggccttctccgggggtggctgtggtcagtggcagcagggtcttgttggggttgaggtcggtgtcagggactccttcctggtggctacagggtgtccttgactacagctttcccacgccttcctccagctctgcatcatccggtcgtgctccccagccacagccctccaggcagagagctctctggtccacctctcctggtgggtcacttcaggtctcatcacagcaacctgcaccttcgaagtcttgttccctgctgaggagaggacagagcagcgatactcagcgctttccctgatggcgtcctg

SEQ ID NO: 1681 - DNA, 458 bp, Homo sapiens
  misc_feature (292)..(292): n is a, c, g, or t
  misc_feature (345)..(345): n is a, c, g, or t
  misc_feature (419)..(419): n is a, c, g, or t
cgtcggggacagccggaacagagcccggtgaaggcgggaggcctcggggagcccctcgggaagggcggcccgagagatacgcaggtgcaggtggccgccggatcccagccgcacttctggcgtgagtatccggactgcaggggccgggacgaggtcggtgttcgaatcttcccagctctggttggcccgcagcctggttagcaggtcctcgtagcgtttccgcaactctcggaatctggagtccttcgtgtgcaactctgagggtccccggaaacttgcgcggctcgcctcnggcagagacagggcgcccccatgcggcagccacgagagcacccagcacaccangagcatctgagagccattcacgttctgagttcttgcccggcattgctgtgagcgtgtggcctctggcccattcngcacgaggctcgtgccgatcttggctcgaggccaatccc

SEQ ID NO: 1682 - DNA, 4955 bp, Homo sapiens
ccaagcattcagaatgagctgacgcagccgccaaccatcaccaagcagtcagcgaaggatcacatcgtggacccccgtgataacatcctgattgagtgtgaagcaaaagggaaccctgcccccagcttccactggacacgaaacagcagattcttcaacatcgccaaggacccccgggtgtccatgaggaggaggtctgggaccctggtgattgacttccgcagtggcgggcggccggaggaatatgagggggaatatcagtgcttcgcccgcaacaaatttggcacggccctgtccaataggatccgcctgcaggtgtctaaatctcctctgtggcccaaggaaaacctagaccctgtcgtggtccaagagggcgctcctttgacgctccagtgcaaccccccgcctggacttccatccccggtcatcttctggatgagcagctccatggagcccatcacccaagacaaacgtgtctctcagggccataacggagacctatacttctccaacgtgatgctgcaggacatgcagaccgactacagttgtaacgcccgcttccacttcacccacaccatccagcagaagaaccctttcaccctcaaggtcctcaccacccgaggagttgcagaaagaacaccaagcttcatgtatccccagggcaccgcgagcagccagatggtgcttcgtggcatggacctcctgctggaatgcatcgcctccggggtcccaacaccagacatcgcatggtacaagaaaggtggggacctcccatctgataaggccaagtttgagaactttaataaggccctgcgtatcacaaatgtctctgaggaagactccggggagtatttctgcctggcctccaacaagatgggcagcatccggcacacgatctcggtgagagtaaaggctgctccctactggctggacgaacccaagaaccttattctggctcctggcgaggatgggagactggtgtgtcgagccaatggaaaccccaaacccactgtccagtggatggtgaatggggaacctttgcaatcggcaccacctaacccaaaccgtgaggtggccggagacaccatcatcttccgggacacccagatcagcagcagggctgtgtaccagtgcaacacctccaacgagcatggctacctgctggccaacgcctttgtcagtgtgctggatgtgccgcctcggatgctgtcgccccggaaccagctcattcgagtgattctttacaaccggacgcggctggactgccctttctttgggtctcccatccccacactgcgatggtttaagaatgggcaaggaagcaacctggatggtggcaactaccatgtttatgagaacggcagtctggaaattaagatgatccgcaaagaggaccagggcatctacacctgtgtcgccaccaacatcctgggcaaagctgaaaaccaagtccgcctggaggtcaaagaccccaccaggatctaccggatgcccgaggaccaggtggccagaaggggcaccacggtgcagctggagtgtcgggtgaagcacgacccctccctgaaactcaccgtctcctggctgaaggatgacgagccgctctatattggaaacaggatgaagaaggaagacgactccctgaccatctttggggtggcagagcgggaccagggcagttacacgtgtgtcgccagcaccgagctagaccaagacctggccaaggcctacctcaccgtgctagctgatcaggccactccaactaaccgtttggctgccctgcccaaaggacggccagaccggccccgggacctggagctgaccgacctggccgagaggagcgtgcggctgacctggatccccggggatgctaacaacagccccatcacagactacgtcgtccagtttgaagaagaccagttccaacctggggtctggcatgaccatcccaagtaccccggcagcgttaactcagccgtcctccggctgtccccgtatgtcaactaccagttccgtgtcattgccatcaacgaggttgggagcagccaccccagcctcccatccgagcgctaccgaaccagtggagcaccccccgagtccaatcctggtgacgtgaagggagaggggaccagaaagaacaacatggagatcacgtggacgcccatgaatgccacctcggcctttggccccaacctgcgctacattgtcaagtggaggcggagagagactcgagaggcctggaacaacgtcacagtgtggggctctcgctacgtggtggggcagaccccagtctacgtgccctatgagatccgagtccaggctgaaaatgacttcgggaagggccctgagccagagtccgtcatcggttactccggagaagatttacccagtgcccctaggcgtttccgagtccggcagcccaacctggagacaatcaacctggaatgggatcatcctgagcatccaaatgggatcatgattggatacactctcaaatatgtggcctttaacgggaccaaagtaggaaagcagatagtggaaaacttctctcccaatcagaccaagttcacggtgcaaagaacggaccccgtgtcacgctaccgctttaccctcagcgccaggacgcaggtgggctctggggaagccgtcacagaggagtcaccagcacccccgaatgaagctactccaaccgcagcttacaccaacaaccaagcggacatcgccacccagggctggttcattgggcttatgtgcgccatcgccctcctggtgctgatcctgctcatcgtctgtttcatcaagaggagtcgcggcggcaagtacccagtacgagaaaagaaggatgttccccttggccctgaagaccccaaggaagaggatggctcatttgactatagtgatgaggacaacaagcccctgcagggcagtcagacatctctggacggcaccatcaagcagcaggagagtgacgacagcctggtggactatggcgagggtggcgagggtcagttcaatgaagacggctccttcatcggccagtacacggtcaaaaaggacaaggaggaaacagagggcaacgaaagctcagaggccacgtcacctgtcaatgctatctactctctggcctaacggagcccacccaggcacagccaccactttgcaagtgggaggaggggagaaggggagacaaaaccactgcagacctaccacgaagccaccaccaccttcagtaacaagggtacgatatgggggtctgccaagctgtgaggaccagtagccaccaagccacccacaagccccctcccaatgaccccccttcagccccgggtgccaccagtgtgggagagctggagccgtggctgagctcagctggagggagcctggccccttgcccggtctcgcagccaccccgagcgttccaccacactgtccgcccttggcctcggcacacgctcaccttttctgttggttacgggacttctcattgtcttaatttcgctttgtgcatcttcccctccagacccaatgtctctgttttcttttccttttgaaaaagagtccctggaaaagaaagaataagtggattctcccccaggagaatcctttttgcaaagataggcaaaaaggattgaatccataccagaacacgtagacaggctgtaatattcaaaccacctctgggccaatgcatttccaaaggatgcctttctcgccatatgcctcccctggcccccagcccctctgcctcggccttgtcagttgctgagctgggcttggctcctttctggaaaatgacagtatttttggcagggagaaggtgcgcaggcctccttgctgctctctggtttggttgggaggtgtgtttacctcttgctcctcattcctcccctgcccttttctctggaatatctaagatgtgagctgcattgactctgaagacgtttgaggaacaggagtgggcactgatagaaaggacttcaacgccagtgactgtgtacctccagcagaagaaaatcaggtgtctggtcttgggggcactgtgctcacctctagagagaagaaaaaggctgggtttggacttcatgcctcctcactggtgaaacccaggatgtagatagagggccacacccaccctgtccagagtagagggcacctgtccacgtggccagggcccatgctgccaccctcgaggagatggaaccctgtgatgcaaaagctttgctggtgtgtttggggcataaggcactgctccccttccatctctagcagatatcatcttctcagccaattctgtaggacactgaggctcttgtttgacatggtgtgtggatggggacttgccccaagactgagcaggtctgccctttcattggggtgtatacatatcaggggaccctgaggtggcaccgtactcagtgttgtgatgcccccacctagggaggactcaatgctctttgtatgccttatgcagcgctgatctgtccctggagttcccaggttcccagctccccccctgcaagccttgaagcctccagcaacgtctatctccaggagagcagggcagcctatgcaagtgttccggcaggaccagaagtggccactcaacacacgtcctcaccagtcaccccaaatggagacactcgcagacctgcagttctcagaccgaaggtgctgccttcatcctccccacctaatgcatttttgaaaccaaaggtacctagcctcagagacagagaaggagagggggagatcttgagtctaagaggaaccctttagctgtttctgcagctgaggtcagtttcaggagggtgaagctgatccccaggaatggatcagctgccatgggcacagcctccgatttgagcctctccggctgccagccagggggcctgggccagaccagggctctgtccttccgtgactttattaaagcaacatttgccacatgtttaagccgc

SEQ ID NO: 1683 - protein, 1041 aa, Homo sapiens
PSIQNELTQPPTITKQSAKDHIVDPRDNILIECEAKGNPAPSFHWTRNSRFFNIAKDPRVSMRRRSGTLVIDFRSGGRPEEYEGEYQCFARNKFGTALSNRIRLQVSKSPLWPKENLDPVVVQEGAPLTLQCNPPPGLPSPVIFWMSSSMEPITQDKRVSQGHNGDLYFSNVMLQDMQTDYSCNARFHFTHTIQQKNPFTLKVLTTRGVAERTPSFMYPQGTASSQMVLRGMDLLLECIASGVPTPDIAWYKKGGDLPSDKAKFENFNKALRITNVSEEDSGEYFCLASNKMGSIRHTISVRVKAAPYWLDEPKNLILAPGEDGRLVCRANGNPKPTVQWMVNGEPLQSAPPNPNREVAGDTIIFRDTQISSRAVYQCNTSNEHGYLLANAFVSVLDVPPRMLSPRNQLIRVILYNRTRLDCPFFGSPIPTLRWFKNGQGSNLDGGNYHVYENGSLEIKMIRKEDQGIYTCVATNILGKAENQVRLEVKDPTRIYRMPEDQVARRGTTVQLECRVKHDPSLKLTVSWLKDDEPLYIGNRMKKEDDSLTIFGVAERDQGSYTCVASTELDQDLAKAYLTVLADQATPTNRLAALPKGRPDRPRDLELTDLAERSVRLTWIPGDANNSPITDYVVQFEEDQFQPGVWHDHPKYPGSVNSAVLRLSPYVNYQFRVIAINEVGSSHPSLPSERYRTSGAPPESNPGDVKGEGTRKNNMEITWTPMNATSAFGPNLRYIVKWRRRETREAWNNVTVWGSRYVVGQTPVYVPYEIRVQAENDFGKGPEPESVIGYSGEDLPSAPRRFRVRQPNLETINLEWDHPEHPNGIMIGYTLKYVAFNGTKVGKQIVENFSPNQTKFTVQRTDPVSRYRFTLSARTQVGSGEAVTEESPAPPNEATPTAAYTNNQADIATQGWFIGLMCAIALLVLILLIVCFIKRSRGGKYPVREKKDVPLGPEDPKEEDGSFDYSDEDNKPLQGSQTSLDGTIKQQESDDSLVDYGEGGEGQFNEDGSFIGQYTVKKDKEETEGNESSEATSPVNAIYSLA

SEQ ID NO: 1684 - DNA, 478 bp, Homo sapiens
  misc_feature (203)..(203): n is a, c, g, or t
  misc_feature (435)..(435): n is a, c, g, or t
cgccttccgggttcaagtgactctcctgcctcagcctccccagtagctgggattacagatctgcaccaccatgcccagctaattttgtatttttagtagagacggggtttctccatgttggtcaggctggtctcgaactcctgacctcaagtgatctgtccacctcggcctcccagagtgctgggattacaggcgtgagcacntgttcccagcaggaatttcttttttatagtattggataaagtttggtgtttttacagaggagaagcaatgggtcttagctctttctctattatgttatcatcctcccttttttgtacaatatgttgtttacctgaaagaaagggtttctattcgttggttgtggacctggacaaagtcaagtctgtggaacttaaaaccttgaaggtctgtcataggactctggacaatctnacaccttagctattcccagggaaccccagggggcaactgacag

SEQ ID NO: 1685 - DNA, 2173 bp, Homo sapiens
attggcttcaacatatggtgtttaaaagtttcccactcaaatgcacacttgaaaattgggtccctcagcctcattactgaactaaataagtgaagaagttgtatctttggggtaaaactttccagggccacttaattttttaaccagttaagtacgcatcttcctggtggttcagactttttaagtcagtgctaaagctgaaaagcgccttctaaatatgactgtgagtttagtttgtatcttacatttagtaactgttctgttgggccaggactatgactttaattactatgtacttattcatcccacactctgcactaaatacaccatagctactatagcattgtggcaggcactcatttttgtggactcattccatacttctgctggcatatttcgtttaaaatctagctaaagattttcatagtactgtgttaactagccagggctgaaaagtgtgacaggatatcaaattgactttccttggggaaaatgttgctttggcaatagtgaagtccaaccccttcatttacagaattagtgattactcatcaatttttgaaagttgtagattaagtagttttatttactaaattcttaaccactttgaagatttaagccagttgaaatgaaacattggctggatgcagttggctagcacctgtaatcccaacactttgggaggccaaggtgggaggattgcttgaggccaggagctcaagaccagcctgggaaacatagatttgaaatcttttcaaaaatgtataaaaatttaataaataaataaatgaatccttactcaaccataattatggctttaaaacccaaccaacagtaaacacttacttgaagccaaaacagtaaattttgaatgaaatttgaattatgcttttggaagctgccatgtcttaattcttgctggattttgattttcaattttggaagtttttatcaaaactgtccagtcatgagtatatcaggtagcagcctttaaggatctaagtttcattcctataaagaacaggaggtgctggtatttcttgtcttagcaagtgatctgatgcaggtctaaatgggggttagcatctatactatggcttaaaagtttcctccttggtcaccatttgggaggtgatggcttcaaagctaagctttgctctcatgtgacccttctttatcttaatacccaataagatataaacctttcagagtcaacccagtgtagactcaaagggtcttagcttcatctatcagataagatctatctgatttatacaaagaatggtgctgtttttatatacatactaaaaaaatctaattctcaaacaattttcttaatatttatgccagcaaggtcaggaaagactattttgtcctgtttaactttagtagtgaacaaactgctagagacatctgtcatccttaacaggccactgtggtccttatatactgaccctcctttccaattaacgtcctttaatcccatactagttccataagagacttggcacataaaagcagtattttttttaatgcctagtaaactggccagaaaaaaatattgccatggtggacctgtttctatccacctctttctatggctatataagtctatacatgccagttccgtacatactccatttccaaagagcccccaaaccctggacagtagcactaccatgaattttagggtcacaaaacatttccttctgaaggaagcagctgcctcagcagtgtcactttagtgaccactgcccaggcttacttcactttgcctccccctacacatcactgccctctttctgccaccaaacctcactattccagcaatgatgcctccctggtgtctggaaaacccatctggtgcactaaaatgctatgcaacaccaaatggcttcttcccctaatattgctcaacaatgtaaattcttcaggaataaacttcatgctaggttaacatcaatgtatggttacagcttccttttttttttttcccttttaaaatgaagcaaaccacctccattaaaatccatgttttggggcttgtttttgtctctcaagtgtgaaatataaatcatgtttttatgatttttgtaaatctttttacaccttgtttttgtaagcaaaagtttcttattaaaagaataaaatgacaaaaaaaaaaaaaaaaaaa

SEQ ID NO: 1686 - DNA, 247 bp, Homo sapiens
  misc_feature (22)..(22): n is a, c, g, or t
  misc_feature (66)..(66): n is a, c, g, or t
  misc_feature (115)..(115): n is a, c, g, or t
  misc_feature (125)..(125): n is a, c, g, or t
  misc_feature (202)..(202): n is a, c, g, or t
  misc_feature (215)..(215): n is a, c, g, or t
cccgaggagatcactggccttntggatgaggagaccttcctgaaagctgcggtggaggggaaaatnaaggtcattgagaagttcctggctgacggggggtcagccgacacgtgcnaccagttccntcggacagcactgcaccgagcttccctggaaggccacatggaaatcctggagaagcttctagataatggggccactntggacttccaggntcggctggactgcacagccatgcattgggcct

SEQ ID NO: 1687 - DNA, 524 bp, Homo sapiens
cttgacaccagcagggtgacatccgctattgctacttctctgctcccccacagttcctctggacttctctggaccacagtcctctgccagacccctgccagaccccagtccaccatgatccatctgggtcacatcctcttcctgcttttgctcccagtggctgcagctcagacgactccaggagagagatcatcactccctgccttttaccctggcacttcaggctcttgttccggatgtgggtccctctctctgccgctcctggcaggcctcgtggctgctgatgcggtggcatcgctgctcatcgtgggggcggtgttcctgtgcgcacgcccacgccgcagccccgcccaagaagatggcaaagtctacatcaacatgccaggcaggggctgaccctcctgcagcttggacctttgacttctgaccctctcatcctggatggtgtgtggtggcacaggaacccccgccccaacttttggattgtaataaaacaattgaaacaccaaaaaaaaaaaaaaaaa

SEQ ID NO: 1688 - protein, 131 aa, Homo sapiens
LDTSRVTSAIATSLLPHSSSGLLWTTVLCQTPARPQSTMIHLGHILFLLLLPVAAAQTTPGERSSLPAFYPGTSGSCSGCGSLSLPLLAGLVAADAVASLLIVGAVFLCARPRRSPAQEDGKVYINMPGRG

SEQ ID NO: 1689 - DNA, 3890 bp, Homo sapiens
cctctgaagatggaaacatcaggaatgacaacaccgtcactgaagacagacggtgggagacgcacagccacatcaccaccccccacaacctcccagaccatcatttccaccattcccagcactgccatgcacacccgctccacagctgcccccatccccatcctgcctgagagaggagtttccctcttcccctatggggcagacgccggggacctggagttcgtcaggaggaccgtggacttcacctccccactcttcaagccggcgactggcttcccccttggctcctctctccgtgattccctctacttcacagacaatggccagatcatcttcccagagtcagactaccagattttctcctaccccaacccactcccaacaggcttcacaggccgggaccctgtggccctggtggctccgttctgggacgatgctgacttctccactggtcgggggaccacattttatcaggaatacgagacgttctatggtgaacacagcctgctagtccagcaggccgagtcttggattagaaagatcacaaacaacgggggctacaaggccaggtgggccctaaaggtcacgtgggtcaatgcccacgcctatcctgcccagtggaccctcgggagcaacacctaccaagccatcctctccacggacgggagcaggtcctatgccctgtttctctaccagagcggtgggatgcagtgggacgtggcccagcgctcaggcaacccggtgctcatgggcttctctagtggagatggctatttcgaaaacagcccactgatgtcccagccagtgtgggagaggtatcgccctgatagattcctgaattccaactcaggcctccaagggctgcagttctacaggctacaccgggaagaaaggcccaactaccgtctcgagtgcctgcagtggctgaagagccagcctcggtggcccagctggggctggaaccaggtctcctgcccttgttcctggcagcagggacgacgggacttacgattccaacccgtcagcataggtcgctggggcctcggcagtaggcagctgtgcagcttcacctcttggcgaggaggcgtgtgctgcagctacgggccctggggagagtttcgtgaaggctggcacgtgcagcgtccttggcagttggcccaggaactggagccacagagctggtgctgccgctggaatgacaagccctacctctgtgccctgtaccagcagaggcggccccacgtgggctgtgctacatacaggcccccacagcccgcctggatgttcggggacccccacatcaccaccttggatggtgtcagttacaccttcaatgggctgggggacttcctgctggtcggggcccaagacgggaactcctccttcctgcttcagggccgcaccgcccagactggctcagcccaggccaccaacttcatcgcctttgcggctcagtaccgctccagcagcctgggccccgtcacggtccaatggctccttgagcctcacgacgcaatccgtgtcctgctggataaccagactgtgacatttcagcctgaccatgaagacggcggaggccaggagacgttcaacgccaccggagtcctcctgagccgcaacggctctgaggtctcggccagcttcgacggctgggccaccgtctcggtgatcgcgctctccaacatcctccacgcctccgccagcctcccgcccgagtaccagaaccgcacggaggggctcctgggggtctggaataacaatccagaggacgacttcaggatgcccaatggctccaccattcccccagggagccctgaggagatgcttttccactttggaatgacctggcagatcaacgggacaggcctccttggcaagaggaatgaccagctgccttccaacttcacccctgttttctactcacaactgcaaaaaaacagctcctgggctgaacatttgatctccaactgtgacggagatagctcatgcatctatgacaccctggccctgcgcaacgcaagcatcggacttcacacgagggaagtcagtaaaaactacgagcaggcgaacgccaccctcaatcagtacccgccctccatcaatggtggtcgtgtgattgaagcctacaaggggcagaccacgctgattcagtacaccagcaatgctgaggatgccaacttcacgctcagagacagctgcaccgacttggagctctttgagaatgggacgttgctgtggacacccaagtcgctggagccattcactctggagattctagcaagaagtgccaagattggcttggcatctgcactccagcccaggactgtggtctgccattgcaatgcagagagccagtgtttgtacaatcagaccagcagggtgggcaactcctccctggaggtggctggctgcaagtgtgacgggggcaccttcggccgctactgcgagggctccgaggatgcctgtgaggagccgtgcttcccgagtgtccactgcgttcctgggaagggctgcgaggcctgccctccaaacctgactggggatgggcggcactgtgcggctctggggagctctttcctgtgtcagaaccagtcctgccctgtgaattactgctacaatcaaggccactgctacatctcccagactctgggctgtcagcccatgtgcacctgccccccagccttcactgacagccgctgcttcctggctgggaacaacttcagtccaactgtcaacctagaacttcccttaagagtcatccagctcttgctcagtgaagaggaaaatgcctccatggcagaggtcaacgcctcggtggcatacagactggggaccctggacatgcgggcctttctccgcaacagccaagtggaacgaatcgattctgcagcaccggcctcgggaagccccatccaacactggatggtcatctcggagttccagtaccgccctcggggcccggtcattgacttcctgaacaaccagctgctggccgcggtggtggaggcgttcttataccacgttccacggaggagtgaggagcccaggaacgacgtggtcttccagcccatctccgaggaagacgtgcgcgatgtgacagccctgaacgtgagcacgctgaaggcttacttcagatgcgatggctacaagggctacgacctggtctacagcccccagagcggcttcacctgcgtgtccccgtgcagtaggggctactgtgaccatggaggccagtgccaacacctgcccagtgggccccgctgcagctgtgtgtccttctccatctacacggcctggggcgagcactgtgagcacctgagcatgaaactcgacgcgttcttcggcatcttctttggggccctgggcggcctcttgctgctgggggtcgggacgttcgtggtcctgcgcttctggggttgctccggggccaggttctcctatttcctgaactcagctgaggccttgccttgaaggggcagctgtggcctaggctacctcaagactcacctcatccttaccgcacatttaaggcgccattgcttttgggagactggaaaagggaaggtgactgaaggctgtcaggattcttcaaggagaatgaatactgggaatcaagacaggactataccttatccataggcgcaggtgcacagggggaggccataaagatcaaacatgcatggatgggtcctcacgcagacacacccacagaaggacactagcctggcgcgcgtgcacacacacacacacacacacgagttcataatgtggtgatggccctaagttaagcaaaatgcttctgcacacaaaactctctggtttacttcaaattaactctatttaaataaagtctctctgactttttgtgtctccaaaaaaaaaaaaaaaaa

SEQ ID NO: 1690 - protein, 1156 aa, Homo sapiens
PLKMETSGMTTPSLKTDGGRRTATSPPPTTSQTIISTIPSTAMHTRSTAAPIPILPERGVSLFPYGADAGDLEFVRRTVDFTSPLFKPATGFPLGSSLRDSLYFTDNGQIIFPESDYQIFSYPNPLPTGFTGRDPVALVAPFWDDADFSTGRGTTFYQEYETFYGEHSLLVQQAESWIRKITNNGGYKARWALKVTWVNAHAYPAQWTLGSNTYQAILSTDGSRSYALFLYQSGGMQWDVAQRSGNPVLMGFSSGDGYFENSPLMSQPVWERYRPDRFLNSNSGLQGLQFYRLHREERPNYRLECLQWLKSQPRWPSWGWNQVSCPCSWQQGRRDLRFQPVSIGRWGLGSRQLCSFTSWRGGVCCSYGPWGEFREGWHVQRPWQLAQELEPQSWCCRWNDKPYLCALYQQRRPHVGCATYRPPQPAWMFGDPHITTLDGVSYTFNGLGDFLLVGAQDGNSSFLLQGRTAQTGSAQATNFIAFAAQYRSSSLGPVTVQWLLEPHDAIRVLLDNQTVTFQPDHEDGGGQETFNATGVLLSRNGSEVSASFDGWATVSVIALSNILHASASLPPEYQNRTEGLLGVWNNNPEDDFRMPNGSTIPPGSPEEMLFHFGMTWQINGTGLLGKRNDQLPSNFTPVFYSQLQKNSSWAEHLISNCDGDSSCIYDTLALRNASIGLHTREVSKNYEQANATLNQYPPSINGGRVIEAYKGQTTLIQYTSNAEDANFTLRDSCTDLELFENGTLLWTPKSLEPFTLEILARSAKIGLASALQPRTVVCHCNAESQCLYNQTSRVGNSSLEVAGCKCDGGTFGRYCEGSEDACEEPCFPSVHCVPGKGCEACPPNLTGDGRHCAALGSSFLCQNQSCPVNYCYNQGHCYISQTLGCQPMCTCPPAFTDSRCFLAGNNFSPTVNLELPLRVIQLLLSEEENASMAEVNASVAYRLGTLDMRAFLRNSQVERIDSAAPASGSPIQHWMVISEFQYRPRGPVIDFLNNQLLAAVVEAFLYHVPRRSEEPRNDVVFQPISEEDVRDVTALNVSTLKAYFRCDGYKGYDLVYSPQSGFTCVSPCSRGYCDHGGQCQHLPSGPRCSCVSFSIYTAWGEHCEHLSMKLDAFFGIFFGALGGLLLLGVGTFVVLRFWGCSGARFSYFLNSAEALP

SEQ ID NO: 1691 - DNA, 263 bp, Homo sapiens
  misc_feature (91)..(91): n is a, c, g, or t
  misc_feature (165)..(165): n is a, c, g, or t
cccagccctgggcggccgtatcatcaggtgctcctgtgcatctcggccagcacgggagccagtgccgcgcaggaatgtggggtcccctgtnttccctcgccagaggagcacttggcaaggtcagtgaggggccagtagacccccggagaagcagtaccgacaatnacgaagataccagatcccttcccaacccctttgcaccggtcccactaaggggcagggtcgagagaggaggggggatagggggagcagacccctgagat

SEQ ID NO: 1692 - DNA, 219 bp, Homo sapiens
aacatttttgaaagatcactcagctttaacacaccttggctgggtctggataaaaaaaaagtgagcactgcaaatttctagaagaaaacatcaggagaagaaagagagagggggatttattcaaagttgtttccaattccttcaaaacctcaaaccaggtggctatggtatggatgtaaccaagaaaaacaaacgagatggaactgaagtcactgagag

SEQ ID NO: 1693 - DNA, 415 bp, Homo sapiens
cacgaggggttaggcggctgtagcggagctcgaaaagagtggcgcagggtcgcgcggccccgcctccttccccgcccagcgaagctctctgaccacccctcttttctagagttctgcctcgcttcccggcgcggtcgcagccctcagcccacttaggataatggcgacagctgaggtactgaacattggtaaaaaattatatgagggtaaaacaaaagaagtctacgaattgttagacagtccaggaaaagtcctcctgcagtccaaggaccagattacagcaggaaatgcagctagaaaaaaccacctggaaggaaaagctgcaatctcaaataaaatcaccagttgtatttttcagttattacaggaagcaggtattaaaactgccttcaccagaaaatgtggggagacagct

SEQ ID NO: 1694 - DNA, 693 bp, Homo sapiens
aaaacttaggctagtacgaggctgggtgtcgggagtgcagtggcgtgatctcagttcactgctgctttccctcctgggctcaagcggttctcccacctcagcctctcgactaacagggactataatcttgcagcaccatgccgagctaattttattttttgtagagatgagctctcactatgtcacccaggttcgtctcaaactcctgaaccctagtaattctcctatctcagcctcccaaagtgctagggttacagacatgagccactgtgcctgtctagacttgtactttcaactgtccatttctccctgtctgtcccatgggcactcatgaaaaaacagaatgctcccaactttattcatcttccaagcctgtagctcttggtatactcactgttgcaagtcagaagcttgatttcatcattgatgtttttctcacgtttcacatctcactcatcaccaagtcatgtaggtgttaatttctgattaacccttgaatttaccgtcttctcatcctctgtacaaaagcctcaagtgagggtcaaattcaacattatcctgatctagacagcccccattctcaatccacccttttccaagttgattgcccaaggacttctaacaataaactctcttttgcaccacagacttctttgacaatatacatgctgttgaccctctctgtagaaaacg

SEQ ID NO: 1695 - DNA, 468 bp, Homo sapiens
  misc_feature (316)..(316): n is a, c, g, or t
  misc_feature (391)..(391): n is a, c, g, or t
tgttaccttccaaaagtgaaggcagagcaaaattaagcatgtttagccctggatttgagccaatccaacataaggaaattttgttttttttaagtagcattgcttttagaacctgtgaattttccttttgcatgaagatgagtgcagtactgtcttcaaaatgattgtagaatttcttggtagctttacaccgaaaaatgcgtgtaactaaataccagacatcttgaccattcagctagaaccctggcagcaacagagctatttaattgtacaaatgtgtgtaagggttatttttagtgtactaataaattaaaanccaaagctaccctgtcctcgttagtcattgctattcaatcattccagtcccaagttatttttgtgccacttggantacaagtatttctattggtaactacaaactctatcctgtgtttgtaagaggagctgtgtaagatttttttcatttaa

SEQ ID NO: 1696 - DNA, 579 bp, Homo sapiens
gtgacactatagaagagctatgacgtcgcatgcacgcgtacgtaagcttggatcctctagagcggtcgcctactactactaaattcgcggccgcgtcgacatctggatggcatctacttcgtatgactattgcagagtgcccatggaagacggggataagcgctgtaagcttctgctggggataggaattctggtgctcctgatcatcgtgattctgggggtgcccttgattatcttcaccatcaaggccaacagcgaggcctgccgggacggccttcgggcagtgatggagtgtcgcaatgtcacccatctcctgcaacaagagctgaccgaggcccagaagggctttcaggatgtggaggcccaggccgccacctgcaaccacactgtgatggccctaatggcttccctggatgcagagaaggcccaaggacaaaagaaagtggaggagcttgagggagagatcactacattaaaccataagcctcaggacgcgtctgcagaggtggagcgactgagaagagaaaaccaggtcttaagcgtgagaatcgcggacaagaaagactaccccagctccca

SEQ ID NO: 1697 - DNA, 86080 bp, Homo sapiens
gatcagagtagtaaagggtgaggcagcatggtaaaatggggagagtacaagccttgaagtccaaaacccaagatccaaggccagcctctgcgagttgtgtgaccttgggccggtagcagtgcctctctgagccatttcttcatctgtgggattggacctgtctgtggggtctccctcacagagagaccatggtaaatgggaacccgggtataagtcacctagcttgtgctgggtacacagcgttggtgcttggcaagaggaatgtcccgtctttgaaccatggtaaggggcaggggataggaggagaaagtgacaggtaggccactgtttactgaaccccatgacgtgccacacactgtgctaagcattttaacatgatctcatctagtgctcctcctatgaggtagcaacgattatccccacttgactgcagagctttgtaaattataaaggtctatactcactctgtcaccaaggctgatgtgcagtggtgctattatagctcactgcagcctctatctcctgggctcaagtgatcctcccacttcagcctcccgagtagctgggactagaggtgcaccaccacccctggctttttttttttttgtatttttatagagatggggtttcaccatgttgcccaggctggtctcgaactcctaggctcaggggatccttccaccttggtttcccaaagtgctagaattacagtcatgaggcaccatgcccacccatgttgatgattcttattattaatcctgactggagggaagttgggacagacagtccttggggcacctgtccagatggaaaaatgtatggagggatggaggagaggaggatgtgcatttggaggagaaataatcattgaaagcaaagatccttctctgaaagttaccttctccagggaaagggtgtttggattcactttttttgaagtaaggagtaggcaggggaaggttctttaagtggtaaaaggacagctggccccttcctagagctcagtgaagaaatctggtcatctggggagtaaaggggtgggcagaccaagtccagagggagcccaacctgagaatccacaaggtgcaggctgggcactggggagtaggcaaggcttgtagacagtggctacgtggacagaaagagcaccaagacaaccgatagcaggctctggggccaggaaaggggggctggacaccaaggaatgcagatggacagtggcaactgggctgcccccttcccctatatatagacattcccaaggaaagctcagcagggctgggccaagctaaataaggcctcccccaggcaggcagggtgccaaagggtgagggagacccatgggattccaatttagtttttattgttttttggttttttggggttttgtttttgagacagactctcactctgtcacccaggctggaatgcagtggcacaatctcggctcactgcaccctccgcctcctaggttcaagtgattctcatgcctcagccttctgagtagctaggattacaggcacataccactacgcccagctaatttttgtttttggtttttttttttttttttttttgagacagagttttgctcttgttgcccaggctggagtacaatggtgcaatctcggctcaccacaacctccgcctcttgggttcaagcaattctcctgcctcagcctcccgagtagccggaattacaggcatgagccaccatgcccggctaattttgtatttttagtagagacagggtttctccatgttggtcaagctggtctcaaactcccaacctcaggtgatccgcccacctcagcctcccaaagcactgggattacaggtgtgagctaccacacccggcaaattttttactttttgtagagacaaggtttcatcgaccgggcacggtggctcaggcctgtaatcccaccactttgggaggctgagatgggcggatcacgaggtcaggagatcgagaccatcctggctaacacagtgaaaccccatctctactaaaaatacaaaaaaattagccgggcatggtggtgggcgcctgtagtcccagctacttgggaggctgaggctgaggcaggagaatggtgtgaacctgggaggcagagcttgcagtgagccgagatcacaccactgcactccagcctgggcaacagagcaagaccccgtctcaaaaaaaaaaaaagtttcatcatgttggccaggctggtctcaaactcctgacctcaagtgatccgcctgcctcagcctcctaaagtgctaggattacaggcatgagcccctgagcccagcctttgttcttttgtttattcaagggattaggtaaggcccaaattgcttaatgtagccaagcaaggtcccattggcccttctaatctcactccttccctccacatcatgttgctgtctgctctgatcagactttaaaatactgctctaggctgggcacggtggctcatgcctgtaatcccagcattttgggaggtgcaggctggcagatcacgaggtcaggagttcgagaccatcctggccagcatggtgaaaccctgtctctactaaaaatacaaaaaattgctgctgggtgtggtggtgggcgcctgtagtcccagctacttgggaagctgaggcagaagaatcacttgaacctggcaggcgaaggttgcactgagccaagatcatgccactgctctccagcctgggcgacaaaaggagactgcatctcaaaaaaaaaaaaaaaaaaaaaaagactactctaaacaccaccttctatgaaccttcaagcctttgcacatgctgtttttttctgccagaaactcccatctttcctctcttcatctgtctacttccctatcatctttctaagctctaacatcacttcctcggggatccttcccccactgtgtccagaccagggagtccaaggtggtctctagtagtttcctcaatcatagcactgagcataccttatgctcacaacccattctatgttctacagatcatcacatttcccagtgctcagcacttgctatgtagcaggtgttcaacagatattatattctacataagaataactgaactggatggtatttagttcaatataagggggaacttcctaatagtcatagttgaacaataatgggaacaggtggcctcaggaggtaatgagctccgtatcactgagtatacccaaacaggagctagatgaccatttctcagggaggctgtagggagatatccatacagaatttaagaatgggggcagtggctcacacttttaatcctagcacattgggaagctgaggcaggtggatctcttgagcccaggagttcaataccagcctgggcaacatggcgagacgctgtctccaattaaaaaattaaaataaaacaaagaatggtgggtggtagctcatacttgtaatcccagcacattgggaggcagaggtaggaggatctcttcaggccaagagttcaagatcagcctgggcaacatgcaaccccacctttacaaaaaataaaatactagccaggcatggtgggcacatatctgtagtcccagatacttgggaggctgaggtgggagaatcacttgagcccaggagtttgaggctgcagtgagctatgatcgcacccctgcactccagcctcacaacagagtgagactctgtctctgaaagaagaggccgggcacggtggctcatgtctctaatcccagcactttgggaggctgaggcaggtggatcatttgaggtcagcagttcgagaccagcctggccaacatggtgaaaccccatctctactaaaaatacaaaaattagccgggtgtggtggcacatgcctgtaattccagctacttgggattacttgtaattccagctacttgggattacttgaggcaggaaaatcgcttgaacccaggagatggaggttgtagtgagccaagagtgtgccattggactccagcctgggtgatggagtaagactctgtctcaaaaaaaataaaataaataaaaataaataaaaaaggaagaagaagcaggaggaggaagaaggaagcaaaaagaagaagaaataataatagtggagaatgcgcaaccttcagatctcctagttctgactgtttatatgacccagcataagcccttcccctcactaagcctcagactacctatctgtaaaatggaggtgataggccagatttctgaggggccctcctgctctaacaacccatggtttcatgaagaccagctttgtgcccagacatgtaaggcatataccgaaggacaagttattttttaaccaatggttggtgaatgagtgagtgttgaattaatgaatgaagtatgccttttttgtcccaatatcttgcccataagccaaatgaagagtaattcgaggtttgaaattgtgcaaactggccaggcacagtggctcacgcctgtaatcccagcactttgggaggtagaggcaggtggatcacttgaggccaggtgttccagatcagcctggccaatatggtgaaaccccacctctactaaaaatacaaaaattagccgcatggtggcacatgcctgtagtcccagccactcaggaggctgaggcaggagaattgcttgaacctgggaggcagaggttacagtgagccaagattgcatcactgtactccagcctgggcgacagagcaagactctgtctccctctctaaaaataaataaataaataaataaaattgcacaaacttaggcttaaaatcccagcccctctatttcccagatgtggatcttggggaagtcactttgcctcagtttcttcatcttgaaaatggaccattaatgtccagttacagcctcttccccaggacgctgtgagggagagatgtgacagtaaagtgcctagagcaggatgtagaaagtggaccctcagaaaataagaaccccagcctttctgctcacatgggagggcagggagctgaaataccttctgcttatcccaaggcattttcccccacccttctctcctgtgccactcagaaagggtaggagctactttggagagattttgattttatttattgtattgtataactatcaaaatctgccctaacaactgatacctaggctttgtgacaggaagccacaataactttttcttgacctgcagctgccctgcggataaaagataaaacaaagctggggagccactgagattatcaggcctgctgcacaggaaaagggcagtatgcagcaggggacctgggctccaggccccatactcagaaacctctgagggaggcagaggcaggtggatcacttgagcccaggaattcgagaccagcctgggcaacatggccaaatcccatctctacaaaaaatacaaaaattagctgggtgtggtggcgaacgcctctattcctagctactggggaggctgaggtgggagggatgacctgagcccagggaggcggaggttgcagtaagcagagatggtgccactgcactccagcctaggtgacagagtgagactccatctcaaaagagaaagaaagaaagaaagagagagagagaaagaaagaaagagagagagagaaagaaagaaagaaacctctggcaagctgtgtggttaagccaagtaactcaccctctctggtcctcagtttccctgtttgcctacttcccatgtgtgaggttcaaatcagattgtgcaagcctgtgaacactgtagaaacaataatcattatgtaagtgatcatttcgtcagcctttgctctatgccaggcacgggacgagcgttcttacaagagctgcaaaattagttttagcagtattgttcctgttttacatatgagaaaacctaggctcagcgaggtcagattccaaccaacccaaatcacgcatcttctcctggcccttcgttttctctcgggagacatggcctccctactattgcataattactttgtgaagttaaagagcgttgggtggaaatgagtgggacagattggagatgacgtgggtggggtgggaggattcaaggagggtacgcgcctggccggactgggatgactctgcggcaggcctgggactccctcaggccgacccaggcttcccaagtccctcctggagccaagggcccgggattctcgggcggctcgggcgagcgggcggggcaggaggcggggcggcggcaggaagctgcccgagcggcgctctgagcggcctgagcccggcggagccctgcagaacccggccgacctccatgggctgcggggggctgcacccggacccctggggcgcggcgcgcccctgaatgcaccgtgggacgcaggaggtagaggcgcacgaggcggcgcaagagacatcgggagggtcctgagcccctccggggaggaacgcggtcctaggctgagtgggttggggggaaagcgatgctggctgggtcccctggttcgcaagacctcggactgccagggggtggggcctcaccgcgcccctccctctccggttcgggccccgcccctcctcctcctgcgccgggctggggtacccctcctccgggatccggtacacagcgtcgcgcgctccccccagggtgccatggcctcccggctcctgcaccggctgcggcacgccttggccggcgacggccccggggaggcggcggccagtccagaggccgagcagtttccggagagctcagagctggaggacgacgacgccgagggcctgtcctcccgactcagcggcaccctcagcttcaccagcgccgaggacgacgaggacgacgaggacgaggacgacgaggaggctggccctgaccagctgcccctcggggatgggacgtcaggagaagacgcaggcgagtgcaggaggacggaggcgggaaccctggggctcgattaggcctccatcccagccgcgttcccagagcatccagggcgctaagttgatccagctgaaactcccacacttcttaaagcgcctgggccacctcttggctgtgtgaccttgagagagtcttaacccccctctgagccaagttttcccttgtgtcaagtgggagaactcactctcatctcagaattgctgcaggcattaaatgtacagggcttgggatccgaatggaaatgatgtattaacgatattttgagggtggagctattaatttagcccctactgtctgccaggcacggtgtttggctcctcggtgcctctctgtccctcagtttccatttctgtaaaaagggggtaagtcctgcctcacactgggaggatgagtgaggccacgtcagtggttgatgtcgaccctggccctaggcccattgatatgactggtcatgtgtctgcagaacggagccccccacctgatgggcagtggggcagtcagctcctggcgcggcagctgcaggatttctggaagaagtcccggaacaccttggcaccccagcggctgctcttcgaagtgaccagcgctaacgttgtcaaggacccgccctccaagtacgtggtgagtgagggtctagaacccctgggctgtgagtccagaagtatggctaggagcaagtagggaagaccccaacttcctgaggggtctatgtagttataaatggttaccttgtttacaaatggggaaactgaggtcagaaaggggatgtaacttgagcaaatcctcacacaagacttagtttccttgagactgactgaagtggggattaaggaccttcctcttaacctggttttgagactaagagaactggtgtgtgcacttccccacccagcccacaaggtttttgcaaattgtagcaagatgtgagatacagagagacagatgttatctgggtcaaacttgagatccaagttgcatgggctggtagttaaggaaataggctttcgatccagaccaatcttgactcccacttatttccagttgtttgactctgggtgagttgtttaaccttggtcatcttccgtttcctcattatagcaatggggaaaatgcagaagattacagcaggagttaaatgagacaatggacaaaaagcccttagcagtgtgcctggcattatgacgtggtcaatgaaatggtagctatgtcatcattatttaactttgggttgaaaatgtttgtcatctagggcctgctgtgtccttataacgcacaggtcaatcagttctcaagcacccgaccttgtccctaagggctagacttagagggttggtggaggttaggatgaagagcaatgttggggaggaccttggagtcccttgctgttttccttgctgttgagagactgacttggagaatgaggtctgctcctttaatgcccacagcgactcctgctccagtcccttttcaggccaggcctgaaagccagctgagctggccactcctgtcagtggcagctctccatctctcactcccctcctcttcaccacccttctccacctctgactcagcaggagggggcctggagcccagtcccacatctgggcctctccacccttttctgttgctgttagtaagcaagggccacacccatggggtgactactccaatttcagcagggaccgactccgattattgagtcttttaaaaaaatttttgaggccgggcgtggtggctcacgcctgtaatcccagcactttgggaagccgaggcgggcggatcacgaggtcacgagaccatcctggataacacggtgaaaccccgtctctactaaaaatacaaaaaaatagccgggcatggtggcaggcgcctgtagtcccagttacttgggaggctgaggcaggagaatggcgtgaacccaggaggcagagtttgcagtgagccgagatcgagccactgcagtccggcctgggcaacagagcgagactccgtctcaaaaaaaaaaaaaaaaaaaaaaaaaaattttgagacagggtctcgttctgtcactcaggctggagtgcagtggtgcagtcataactcactacaacctccaactgggctcaagctatcctcccacctcagcctcccaagtagctaggactacagctgtgcaccaccacgtgtggccaatgatgaagtctgaagtggcaaaggtctcagaactctgggttcatacactggaaggggacaccaaggaatagttcagaggctgagaggaatgggggtgactgtgggtacctggatgggaagggatgacaagatagagcaggatggccaagtatgccccggcctgtgtctggagaagcaaggcacctcctgtgtacaatggggaccctaattccccactcaacttgtgggggtgaagagcacaggctttggaatcagatcaacctgagtttaaatcccagctgggctgttttccagctgtgtgacttacggcaagtctttgagcccttttccccctctttgagcctgcttcctcagctgtcagagataaggaccttccttgcagtgctgttgtgatgattaaatgaaatcacagatgtaaagagtgcttggtacaacaggaggcacagggtaaatgcttgggtaatggaactactgtcattatcacccatctggctgcatgttacaaggtcaatgagataatggatacaaaatgtaaactagatgaacataaaggcttattatatagaccagtgtgtcctgaagaaaactggtgtcctaaagtgtgtcctgcagaaaactagttccctggaatgttaatagctgtttctaaataaaggttttgcaggcaatatgttttgagaatgcagagttaaatgagaatacaataagtttctttattgttaaagtatttaatccctaatagtgatatacactgtgaatcttcaagaggacagagtaagcaaacctaactgaccaggagtggctagagtattgtcagttccacagaacaaatgtgagagaaagatctggatttggtgttagggtgcctttaacatctaacactggttaactctccttttaaacctgttggcttggcattataggttaatccatattcaggttctcagacctgggaggcggggaacttcgtgatcatcttgttcagtgttttccaaacctcagtcattccaatacctccctgattcttgtcctatctaaaaatgccacttgtgtccttttcttcttaacatttttctttaaatgaacctatttttttttctttatctttttttttttcttttttgagacagagtcttgctctgttgcccaggctggagtgcagtggtgcaatctcagctcactgcaacctccacctcctaggttcaagcaatcctcccgcctcagcctcctgagtagctaggattacaggtgcccaccaccatgcctggctaacttttgcattttcagtagagatggggtttcactgttggccaggctggtcttgaactcctgacctcaagtgatctgccgcctcagcctcccaaagtgttgggattacaggtgtgagccactacgcccagccgaacctattttttttcttaaataagtttatcgagacggagtcttgctctgtcgcctaggctggagtgcagtggcgtgatcatagctcactgcagccttgaactcgtgggctcacatgattctctgcctcagcctcctgagtagctgggaccacaagtgcccaactaattctttttctttttctttttcttttttttagagacagggtcttgccatgttgcccaggctggtctcgaactcctggccttaagctgttctcctgcctcagcctcccaaagtactgggattacaggtatgagccactgtgcccatcctttaagtaattttaaaagacaacttcatagcactaccgtacgtggaaagtctcacttgccaccgagagaagctagccataaaaataaaaggtgaggcacggtggctcacacctgtaatccccgcactttgggaggctgaggtgggcagatcacctgaggtcaggagttcaagaccagcctggccaacacggtgaaaccccgacactactaaaaatacaaaaattagccggatgtggtggtaggcgcctgtaatcccagctactcgggagattgaggcaggagaattgcttgaacccaggaggcagaggttgcagtgagcggagattgtgccactgcatgccagcctgggcgacagggcgagactaaataaataaataaagtaaataagtaagtagtgaaaatgaaacgtcattaaatcttgcctagatgttgttgcctgaaggaggccctgacctgagatccactttctgactcttttctaaaaatggagatgagaagtgttagagaagtactttttttttttttttttgagagagagtttcactcttggtgcccaggctcgagtgccatgagcaatctcggctcaccacaacctccacctcccaggttcaagcaattctcctgcctcagcctcccaagtagctgggattacaggcatgtgccaccacgcctggctaattttgcatttttagtagagacagggtttctccatgttggtcagcctggtctcgaactctcaacctcaggtgatccacctgcctcagcctcccaaagtgctgagattacaggtgtgtgtgtgagccactgcaacctgcccaagaagtcctttttttaaaaccaaactgagagctggccaggcgcggtggctcacacctataatcccagcactctgggaggcaaaggcgggcggatcacaaggtcaggagatcgagaccatcctggctaacacagtgaaaccccgtctctactaaaaaatacaaaaaattagccgggcgtagtggcaggcgcctgtagtcccagctactcgggaggctgaggcaggagaatggagtgaacccaggaggcggagcttgcagtgagccgagatcgtgccactgtactccagcactccagcctgggcaacagagcgagactccgtctcaaaaaaaataaaaaaataaaaaaaccccaacaaaaccaaactgagagcttctcaatttgtagtcagaaagattaaaaaacaattaggctgggtgtggtgctcatgcctgtaatcttagcactttgggaagcctagctaggaagattgttcaaggccaggagttcaaggccagccctagcaacatagtgagaccccccctcatctccatacaaaaaaaaaaaaaaaaatttttttaaatagctgagtgtggtggtgcatgcctatagtcctagctacttgggaggctgaggcaggaggaatgcttcagcccaggaggttgaagctgcagtaagctatgattgtaccagtgtactccaacctggccaacagtgagaccctgtctcaaaaaataataattaaaaggggaccaacctcctgatacagtgatatttactctagtgcacaccacctaaaaacctcaggtaccaatacttgtacatgtctcatttttggacaaacactgacttgaccgagcacttccttcactagaaacagaagtggacccagagggggactcccttgcctgggtcacacagagaaggagtagctgacctggggttagaacttgagtcctaggccagtatacttttcacagttatggcagttgtggctatctacagacctgtcctctgggtctagtttggaaaagcctgaccagggatgtggaggccaggtgtccaaagtggaacaagctccaagctggtcctaaaggagccccaagagattggctggggtttcagcttatgtctggttttccagagggggctgtcagaagaactaatgctctatgggaagggagtacaaaaaaaggggcagcagccccgggcactgaagctcatctctgtctttctctcttcttgctgccttgggcctgggtcatttcagacaaacctcaggtaagatgggactgggcttccccgccactgcgcagcagctcccgccctcctgggtgctgtcccaggggtgaaaggaagaggtggggaggtacagctgggagtgtgggggatggggaaggatggggagggaacgggcccgtggacaacttgcatttgccctgacacccaccctccctgcagctctacaccctcgccgtgatcggcccaggaccgccagattgccagccagcccagatctctcgccgttactcggactttgagcggctgcaccgaaacctgcagcggcaattccggggcccaatggctgccatctccttcccccgtaagcggctgcgccggaattttactgcagagaccattgcccgccgtagccgggcctttgagcagtttttgggtcacctgcaggcagtgcctgagctgcgccatgccccggacctgcaggacttcttcgtgctgccggagctgcggcgggcacagagcctcacctgtactggcctctatcgtgaggctctggcactctgggccaatgcctggcagctgcaagcccagctgggcaccccctctggcccagaccgccccctgctgaccctggctgggctggccgtgtgccaccaggagctggaagaccctggagaggcccgggcatgctgtgagaaggccctgcagctgcttggggacaagagcctccaccctttgctggcaccctttctggaggcccatgtccggctctcctggcgcctgggcctggacaaacgtcaatcagaggctcggctccaagccctgcaggaggcaggccttacccccacaccaccccccagtctcaaagaattgctcatcaaggaggtgctggactaacccttgcctagatttaaggccactgtgaggagaggggttgccccagaaggcaggggaaggacctgatgagaacagaatagctgggaggctgcagagggtgctgggagcccctagaagttccaaaagagaatgtgaagcagatcaaggaaacttctgttgagctaggctcagggtgagctttggctggggttgcccttgtgtagtacagggaagtctgacacagcctctccagcctataaacagccggggggctgtggcacaggttggggcaatgttcccttgttggtgggcccccaagctggcaaggcctcttggctgaaggccagggactctgcccctggagtcctggagttaagggatgaaggcaaggctgcaggtctggcccaggggaattaaaagccagccactccagtggtatcagtctctttattggatgtgagggccaaaagggactgtaactcctgtctcaggaatggggatagatgggaggttcttgaagccccaggcgaagctggtacctctggctacagcttgctctctgagacctggggcttcactcggatcacgccctcctgggcacaggtcacagctaggactccatcctgacgccacagccgcccatggaccagcccccgagagccacctgtgggtgaggtgaagggtgatgatggcctgcttcagaacagccaaatacactttttttttttttcctgaaacagagtctcactaagttgccaggctggtctcaagcgcctgggttcaagggatcctcccgcctcagcctcctgagcagctgggattacaggcgcacatcaccatgcccaacctccaagtggacttcttgcaaagggtctggcccagggcagggctgccccacacaagggtgcactgagtgtcgtggctgctccaaatgccccttcatgagcttattatggaccgtcattgaggggtaactcctcccacaggaaccccagttgacagtttaaaagcactttcacacctctcctcgcttcctcaaaaagatcacagagggaggagctctgagaacagtctccttcaacagttcggccaagcagaactgctgtacctctgaccacttgtgttaggaaaactatcggctccctgtataataaatcaagccaggtcctccaagtggtaattcatgaaaaatatccccactaccaccaccaaggggaagaaaggactcagaagagaggacttgaggccatgaggtctggcctcttccctccccatctggagactctttctcccttgctggctttgggcccaagtttgatgtttatgaggatgattgctggtttcccttacacatagcagagctcactcagttctcacagtagccaaatgaagcagttatgtgttgtccagttttccagaccaggactgaaatccagagagggtcaggaatttggccccatgatgaagccaaatctgaacccatgtcctcacttcaaggttatcaatcttggattgtgatgctattggtacttgagaataccccttatctgagtataaagaatccttgagttttgtccttggtttatcaagcaaagcttttcttcatttgaaatgtactcccttggaaaggaggtcagggttctgaagctagacattgatgaacgagtcttgtttctctcccctgcaaggaaggtccaagcaggcccttagggaccactgaatgccccgatcccaatcaggttaatcagaatcacttagagaacttaaaaatacagtttcctggaccttatccaagacctactgagtgagaatcttgagggtggaatcagaatctattttgaaaaggcatccccaaatggcagtctgatggactgcgggtttggataccactgctgtaatgtaaccctctttgtttagatgaggaaactgaggttcagatggaagatatgatttgcctattgtaatacaaagaatctgaactggttttgggactagaactgggtccctgggagaaggtgaatcacatttccagcacattctagaaatttagagcagagcaggtgtcccggcctcaccctctcattttgaagatgaagatgccaaagcctgggagggaaggaaaggaagtgacctgtgcagcgccacacaggaagtcgggaaatcagcatcacccaagaaagcaggctcctgccactcaaggtcagtgcccttgtcccacacggccccacactcaccggcccaggggctctcgcattcatagagcatccagtggtcagctcggaagggggcgtggaaccacatggaatggtccagtgagaccatgaagtgcaccttgtgctgccactggtgaggcagcagtgcagtgcccaagaaggcatagtcggagatataggcggccacgcagcagtgcatcttcatgtcgccctcgcctgcaacaggtccccatcagccctgggctcctgggctttccagctcaggacctgcacggaggtagggggaaaagggactcccgtgcatgggtgtgcagactggttgctgcacaagagcgcttggcctacagtgtgtgtgtgtgataggggagaagtgagatggcgacttggggagggcaggggtgagcagggactgaaattcagtcttcaccacccaagtctcccactctaggccccaaaaggggtgtcttcttccaatttgcacaaagatactttatagttagcagcaaagctggacaacaaccccagcgaggtgccttttgccttcctcagaaaggccttgtgtcgggattatagtcatctccaccttctccccatgcaaagggctgagagggcccaggtgagaagctaagccaacttccccatcatgcagataaggaaacaggcccagagaagggaactcatgtgcccaaggccacacagcaaatgagtggtagaccccttggagagtggtttcctcccatccatggggtactcttaccaatatagccccgggctcgcacccagaacatctgtttgggctccattctctgcagctggctcaggggggatgggtttactggcttgatctcaatggggacctcctgagcagcaattcggttgagcgccaatgggtacctcttttggaggttagggtccctgaaagtaaagggaagagggtcggggtgagacccaggaagagagggagtcacatctgcattgcctcttctgactcccctcattcttccacagggacccctgatatccccaaagctcccctcccctgtggcaggcaggatagtgcagcgtttgaatcccttcttggccacttacgagccatgtggtctcgtgctaattagtaatctgagtctattttcccatctgcaaaatgtggataatgatagtaacctacctcataaccaacactgtgaagacaagatcatgaatatctaaccaacacatcatagtaataaggcataccctgtaatatgcactgttctaagcattgtacatacaatagtattcctcacaacaaccctgtgagataggtactattatcacccccatttcatcagtgaaataagcacagagtccaggtagcttgcttaaaaattggagagacaggatttggactcaggcaatctgggtccacagtatgattattttctatttttttagagacaaggtcgtcttctcacccaggctggagtacagtggcgcaatcagctcactgcagtctccaactcccaggctcaagccatcctcttgccttggcctcccgagtagctgggactagaggtgtacgccactgtgcctggctaacatttttattatttctttattttgagacggagtctagctctgtcacccaggcttgagtgcggtggtgcaatctcagctgactgcaacctccgcctcccaggttcaagtgattctcctgcctcagcctcccgagtagctgggattacaggcgcctgccaccatgcccagctaatttttgtatgtttagtagagatggggtttcactgtgttggccagggtggtctcgaattcctgacctcatgatccgcccgcctcagcctcccaaaatgctgggattatttttacttttttttgtagagatggggtctctttatgttgcccaggctggtctcaaaatcctggccttaagtgatcctcctacttcagcctcccaaagtgctgggattacaggagtgagctgctgtgcccagccacttcattattttaaacactcaagaaacaggctgcctgacttggcctgagttaccaaaccctacacagtagggaacattgcatccccccagggggaggagcccattccaaggaactcccttcaatacagtgacaaccacccatagtgctctgcacaggtcctgccattttcacccctatcctctggagtgctgttggacagaacctcctatgatgatggaatgcctatctgcacagcacactatggtagccactagccacatgtgactatggagcacctgaaatgtggctaatgcaactgaggaacagaattgttcattctactgactttggtttttttttgtttttttttttttaagacggaatctcgctctgttgcccagtcaggagtgcagtgactcaatcttgcttactgcaacctctgccccctgggtccaagcgactctcctgcctcagcctcctgagtagctgggattacaggcacgggccaccacgcctggctaatttttttgtgtgtgtatttttaatagagatgaggtttcaccatgttggccaggctggtctcaaactcctgaccttgggtgagccacccgccttggcctcccaaagtactgggattacaggcatgaaccactgcgcccggacctatttaattttaattaatgtaatatagccacgagtggctagagactaccttattaacagcacagatctaaattcaaggtcctttaacaatgtcttcctttcatttcagcaaacatttgtcgaactgcaaccacacaccaggccctgtgttttttctgttaatagtgatataactacaattcactgccattgtgctagttagtactagcacgctaagtgccttttctctcttatttaatcctcacagcagccttatgaggtaggaatatgattagcaccattttataatggtgagtactggctcagagtgggaaagcaacttgcccaaactcacacagctagtagggacaaaatctagaattgaatccaggcctttcaggttcccaaacccacatccatcccgtcatactctgctgcctccccagtatctaacacgagatagagacattctctccttatgatacagctaagaagtaggcagggcagaaatgagcattcccattttttagaagaagaaactagggccctggggagttgggcactgtcccacagcaggtgagcattcacagaggcacagccctggacagaatccatgtgtctatcctttgtctggacccagagctctttcccctgtaccagcatttttcaaacttgattaggtgtgatccaaataaatatattttaccaggtattcaaaatatctaacatgctccctggtggtctaatggttaggggaaaatacatatttgtatttttgtacatatgttttatatacataaaacatgtggccgggcacggtggctcacgcctgtaatcccagcactttgagagaccaaggcaggtcgatcacttgaggtcaggagttcaagaccagcctggtcaacatagcgaaacctggtctctactaaaaaaatacaaaaattagccaggcatggtggcatgtgcctgtaatcacagctgcttgggaggctgaggcacgggaattgcttgaacctgggaggcagaggttgcagtgagccgagatcatgccactgcactccagcctaggcaacagggcgagactctgtctcaaaacaaacaaacaaacaaaaacatgcactaatgcaaaggcagtgaccaaacataggccatagcgctgcagctctccagaggacactcactcctggtgtgcattaagtcctaagttgctggaccaggggcctgggggagagagggaatcacttagggggctggggaggtggtacttaacaagtggttacggaagtatttctatatacatatatatataaaatatatatatggttttttttcccaggtatggtggctcatgcctataatcccagcactttaggaggtcaaggtgggtggatcacctgagatcaagagtttgagaccagcctggatagcatggtgaaacgccatctctactaaaaatacaaaattagctgggcatggtagcaggtgcctgtaatcccagctacttgggaggctgaggcgggaggatcacttgagtctgggagtcagaggctgcagtgagccgagatggtgtcactgcactccagcctgggcaacaagagcaagactccatctcaaaaacaaacaaacatgtatatatataaacaacaacaaaatatatattctttttttcttttttcagacagagtcttgctcttgttgcccaggctggagcacagtaacacgatctcggctcactgcagcctccacctcccaggctcaagtgatccccccgcctcagcctcccaagtagctgggactacagacacatgccccgacacccggctaatttttgtattttttatagagacagggtttcaccatgttgcccaggctggtcttgaactcctgggctcaggtgatcctcccacttgggcttcccaaagtgttattataggtatgagcccccacacccagccccagccttatttttaaattagagatggagtcttgctatgttggcgaggctagtatccaactcctggtctcaagcaatcctcctgccttggcttcccaaagtgctgggattataggtatgcgccactgcacccggccaagcccttcattttataccatgacccagtacagacacacaccagaaacacacatgactaaacctcaagtttcacaaaaggattcttgcccttaatacatacatattattcactccagtatcttcttttctaatctgtattttaaaaatgctggtcaagacccactaaaggattctatgacccacaaacagatagcagctgcattttgaaaagtctgccatggagcctccaggtctctcaccttaaatactggtcaatgagggtctcacagtcaagcagctcttctggtggtggcacagtgggcatggagaactggtgctgcatggggctgggctgggcctgctggaaggaggcctggcagatgaagatgggcttcccatgttgcacggccttcacagagcgcaccgagaagctcgaccctgttcgtgtccgctccacttggtacagtactggcagcttcgggtcccctgcagtgggcacaaggacacagtgggtccacaggccctgtcatcatcacaacgcctgacaggcactctactactcatcttccattccatttcatctcagtgactactaactgaggtctgctaaggtccaggcccagggatacagagaccaccaggccctgtcatcaggcttctccctgtgcaggtggagcttttctctaacagcacaaacagcagagacattgacagattccttgcattcaaatcctggctccaccactcaccagccgtgtgacccttcacttctctgagcagtgtgcttatttgcaaactggggatcatcatggtgctcatcgcttacaggattttaatgataatgaaatgaatccgtagttgtaaagtgtttagaataatatctggcacatagtgagggctctatatgtgtttgttaaataaaattaatactccttgcttctatcttgctccatctatgcctgggatcttgtcatcagtccaaaaccattattctagatcagggagcagtaaatctagcctgcagcctgtttactgtttattctgttgttgttttcttttttgagaacaaacaaaggctatttattcagcgcttgttcttttttttgtttgtttgagatggagtcttgctctgtcacccaggctggagtacagtggtgtaatctcggctcactgcaacctccacctctcaggttcaagcgattcctgtgactcagcctcctgagtggggggggactacaggggtgcatgaccatacccagctaattttttttttttttttgagagacagtttcgctgggtcaccgaggctgaagtgcagtggcgctatctgggctcactgcaacctctgcctcccaggttcaagccatgctcatgcctcagcctcctaagtagctgggactacaggcgtgcgccgctacacccaacaaatttttgtattttttgtagagatggggtttcactgtgttgcccaggctggtctcaaactcctgacctcaactgatccacccaccttggcctcccaaagtgttgagattacaggcatgagccactgcgcccagccaatcagagcttgttgtagcaggaagtcaaccaccatcacttgcttttggcagagacttagaggcaggcaaaggaatgggaatgctctgtagtggaaaaaaaggcttcagggatgctcccattgcaggctgttggcatggggaagctgttggtgggctaactagaagcatgacacctggctgggcacggtggctcacacctgtaatcccaacactttgggaggctgaggcgggcagatcttctgagaccaggagttcaagaccagcctggccaacatggcaaaaccctgtctctactaaaaatacaaaaaattagccaggcctggtggcacacacctgtaatcctagctactcgggaggctgcagcaggagaattgcttgaagctgggaggtggaggctatggcaggagaactgcttgaacctgggaggtggaggctgcagtgagccgaaattgcaccactgcactccagcctggggaacaagagtgaaactctgtctcaaaaaagagtgggacatcctatgtgattggttaggagtacatatttggctttctccggttggtcctaagttggaagcaggggcaaaaattagggcagctatcagttattaatcaagtcctggctttggaggccaattgttacagtggtcattatttggcttgctggactggttggtaaagatagtggtctgacttcctacaagtctgacttgtggatagtaggctggcttcctgtgctggttgctgctattgtgcgtcagagttctgtttttctacatggtctagccattgtctgtttgtatattcagcctctcccaggcaagggccactgtcagtcacttcacccctgatgtatatggaagccatttggtccttcactgtcaggtgtctctgctccaaagcagagtggaagagcctaggcaacacagggagaccctgtttctacaaaaaataaaaaataaaaattagctggacatggtggcatgtgcctatagtcccagctaatcaagaggctgaggcggaaggatcacttgaggccaggagatcaaggctgcagtgagccatgactgcgtcactgtgctccagcctaggtgacagagcaagaccttgtctcaaaaacaacaagaccaccaccaccagagtagaaggcactggccagggataaggcagccaacaacaagcaggtgagggaagatttggagaggaagagaacttccctggtttccctgaagttctcactttgtctgagtcaggctgaccttgaggaaccctgacatctgggccatgagacatcttggggatgactttcaaccttcagatgaaagaagcaggtctagagaagtgttgcttccttcactctgatccaaatggggagtcaaccaggcaccagggctcaatcaacagcaataaacatcactgtctgaggtcaactggcttgctcagctctctgttatcaggcactgccaccagcagcacttctatcagagtgcgagctcctcaaggttaaaggcatttgagaagggcttaccaagagtccagacactagacaaagttacttgtgcagtctgctttcagacactgggaatgaagtcttcctccctaccaccaaacttggggggaaaaaacaaaaaaaaacctctaatccaatccttggtctgcaggtaagctaaagtgcagattcctgaggaggatcacagaaacttcagtactctggtctacctttcagtgtgaatgagttccagccctattcttgaaaattgttattggaacagagcaggtaggccctgaggcatattgaagggagttaatgattatggagtgatgcagggtgcctgacagcattggacaggagggtatgttttctcatgttggtctcacaataactatgtagagccactcttacccccattgtacagatgaggaaactgttgccttaaaatacaatttttttgtaataaagtcatgctaatttgtttacatattgtctatagttgctttcactggcaaaacctaaaatgtttactatctggccctttctagaatgtttgctgaccttgttctgaattcttcaagctctaaatttacctctgtagagaaaaactaaaaacaaaacaaaaacccaactaattcacattctttcctgggcttttagaaaaagaactgatttgataaatggccaaggaccaaccctccccctcccccataacatcttttatttttaaaatgtaattgaaacatctcttttttgttttgtttttttgagatggagtctcgatctgtcgcccaggtgggagtgcagtggcgcagttttagctcactgcgacctccagccgccgggttcaagcaattctccttgcctcagcctcagcctcagcctcccgagtagctgggatcacgggctaaggtcaccacgcccagctaattttcctttttttttttagatggagtcttgctctgtcacccaggctggagtacagtagcacgatctcagctcactgcaacctccacctccagggttcaagcgattctcctgactcagcctcctgagtagctaggactacaggtgtgcaccaccacacctggctaatttttgtgtgtgttttttttttttagtagagatggagtttcgccacattgtccaggctggtctcgaactcttgacctcagccgatctgcccgcctcggcctcccaaagtcctgggattacaggcataagccacatgcccagccaaaaaacagcattggttttaatatctgatatagctggcagagtcacaccacaaacagataagagctctcccctttttgccttgcagccaggaagctcagaactaaaccttgtatgaaactgcaacaatatggcttagccaaattttttgacatgatcgcttctcccaaatcccattactactggcctaatgtcctttgacttttaatattcccataataactaccaattattttagctatcttgcagcctttcaagacacaagcaagggcacaaataattatttttatttatttatttatttttgatggagacaagagtctcgctctgtcgcccaggctggagtacagtagcatgatctcagctcactgcaacctccgcctcctgagttcaagcaattctcctacctcagcctcctgagtagctgggactacaggcacatgccgccatgcctggctaatttttagtattttagtagagactgggtttcaccatgttgcccaggctggtctcgaactcctgagctcaggtgatccgcccgcctcggcttcccaaagtgctaggattacaggcatgagccaccacgcccggccaaataattatttattttgaaatggtggcttggacacagctcatttcacgctgctcctggatgaagactttccaagaaagaggatcttttccccagaacctgggatgggtaccctggcagctctctcattgtttagaattattgcccaagagcgaagcaaagaagcaggaaagagtttggcactcaaagacacataaaccaggttcaaatcctggctctgcctccttgggcactgtgggagctggttccaaacctcttcaggtcccagtttccttaggtaagaatgatggcaggaatgcctgccacccatgtttacttatgaagactaaacaagataatgcacacaactatgctctgtatcatgcaaattttaattattcccataagttaatcatcaaaaactaataatatttatggaaaactagattatgccaagccctgcactagatactttactggcaaagactcattgaattcttccatcacaggatgaagagattcagagttcaagtaatgcccccacccacacaaaagaaaacagccaggtatttcactaggctggaaggattacaatatcaaaaggctggtacttacaaacaaattaaagaaacaaagcacatatttactcccaactagcataaagataagaacctggctgagcccaaggtaagtattcaaatactttatagcagtgactgggggccgagaagaggggggccaatcaatactcctcagggatgaggagtaagagacacgggacagtatgaaaaagtgtatttaccattacagggataactttcatatttacaaaatgaagggggaaaccccatggttttcttaatacaaatcacatactgtaaaggtccacaaactcttctcagctggggatctacgcagaacacatgagggcatctgctctgggggtaacagggaaggaaagaaaacagtgagggttttttttgtttgttttttagcataggttttgcttttattttccttttatttatttttttgtagagacaaggtctcgatttattgccctggctggtcttgaattcctgggttccaacaattctccgcattggcctcccaatgtgcggggattataggcatgagccaccacacataggttttttgtttttgagacagagtctcgctctgttgcccaggctggagtgctcgcccaggctggagtgcagtggcacgatcttggctcactgcaagctccgccttccgggttcacaccattctcctgcctcagcctcccgagtagctgggactacaggcacccaccaccacacctggctaatttttttatatttttagtagagacggggtttcaccgtgttagctaggatggtcccgatctcctgacctcgtgatccgcccgccttggcctccaaagtgctgggattacaggcgtgagccaccgcgcccggcctcacacataggttttaagttacattatctgaccccagagctgtaagaagctgtagagatcatcccactaaaatacccttggtcccacccttctccattttacagctgaagtaaaccaaactgtagggcggggaggtaacctcacaaggctgcatggtaaattatggacaaaactgaagctaggccctacatctttggtttgtttttattgaccctatgctcagttgacaaaagaagccttagatcccttgactctcaggctggtgctctcttctccaacccaagctgccctacctccacacctctagcacagaggtcacagcacactgagaacctagcacagcgctccgcaccaggagctatgttaagaatggaagaacaaaagcccacaaggagcagttaagcaacaaagtcttgtgtcattatcagccagacatcaggtacccagtgagtcccagcaggtgtgaggtccaaggctcattgttagccccagacctcgttccaccctagacacctcttagggtggtagtgtccgccacccctccccttgtcttccagtctccctctcttcccttttgacctcagcccccaaggccagaaatggctgctgggccaccagggttgggttggggcaggaagtggggggtttacctgcccgaacaaagtagcagtgcagggagtgcacgtggacgtcttcactcacagacttggctgcagccaccagggcctggcccacgatctgaccaccaaacagcctcttggccggtacccagtaatgccttcctctgtagggagagggggaaagagggaaagacttgggaactgggccaaattctactaccctcactaagactctaatgcatgatctcttcaccatattggggtttaagatccttttgagaatatggtaaaagccataggtcctttccccaggcaaatatccttatgcataaaaatcctctgggccgggcgcagtggcttacatctgtaatcccagcactttgggaggccgaggcaggtggatcatttgagatcaggagttcaagagcagcctggccaacatggtgaaactccatctctactaaaaatacaaaaattagctggacgtggtggcatgcacctgtaatcccagctactcaggaggctgaggcaggagaatcacttgaacccaggaggcagaggttgaggtgagccaagatcgcaccactgcactccagcctgggtgacagagcaagactccatctcaaaaaataaaattaaataaatgtataaatgaataaataacaagagccctcagacatcaagtctaactccttcagtgtacagatgagaaaactgcagcttggccccagagatgaaaatgcttgcccagaatgtaggcccattggaagctgaataattatgtctctagcctcccacgtcccagctgtttggcattttctgtaacaatgagttatgaacagccctccatgacctggcaggtggctctcgcctgtaatcaatcccagcactttgggaagccgaggtgggaggatcgcctgagcccatgagttcaaaaccagcctgggctccaaagtggggcctcatgtctactaaaaataaaaaagttagctggatgtggtggcaagcgcttatggtcccagctaaacgggagactgaggcagaagggtcacttgggcccaggaggtcgaggttgcagtgagccatgttcgtgccactgcactccagcctggacaacagggccagatcttgtcttcaaaaacaaaaatcaaatagccctccaagaagttatttacaattccttaagtggaaggaagggagctcaaagtaagataacttccagtaaagccaggagaagccttggaggtcaaagctgttagaagccttgctgcagggggctgggcgcggtggctcatgcctgtaatcctagcactttggcagaggtgggcagattacaaggtcaggagttcgagaccagcctggccaacacggtgaaaccccgtctctactaaaagaagttaaaaaattagctgggctgtggcgcgcctgtatgtcccagctaatcaggaggctgaggcaggagaaatgcttgaacccgggaggcggaggttgcactgagccgagatcgcaccactgcactccagcctgggcaacagagcaagactccgcctcaaagaaagaaagaaacccttgctgcagtcaagaacttcagcgatgctgggaaagaaaaaaacatgcttaggcctcagaataagtaatgagaaaccagacccaccaaatggtactgggggcgggatattgtgagaagaaaaggatactgaagacacaaggagctgcggcgtcggttttaaggctgatccatcagctgtgtgcccttgggcaaatcactgccctctctgggctagctcccccgtgaaggcttagggcaggctgccgagcagggtctctcaggtcaccactatatttgctcagctgtgcagacctcgcagcgcggagaggaagggaggaagccagagcagagaggacagctctgttgggggcgagttctctcctaatcgtggcagagggtgcatcccacgcagagccatactagtcccggagccaggggccccgggcggcggcagtcaagatcaagtttctgccctaaaggaggggatgctgggcaggagctgccggctacctgaagagatcctcgtccagcggctcgaggttgagcacggtcgtgaccaagacgctacggaggtccccagggggatcgccgcggtcgccacagccctgcccatcttctggggcctgcggggacgacatctagttcaatgctgcaggccctgcacacccgctccgcggaagacgcggagacatacacagaacctgactcttccggcagattgccctagtaaccggaagtctcctgcagaccccgggaaggaggaatctaggttatgattggtcaggactcctgtcagtccgctggtggctgtggccctctttctctagcaattggagaaaatgaatgccaatctgcgaatcctgtgtgtgactggatatgtcgctgaggaggcggaacctcgggactggataatatggactgagtgtcatttcccctgtcagatagcaaatacacccccttcctcttgtaacccggtcaggcctagggttcctccctgagttccagaataggccacccagttggggcggacccttaaggcattctgggcccacgcctgcctataaaccctcatagtgtgacctttgacccctggtgtgatcttgggcccgggctgggaccagcccctagtgtgggttgtgggggcggccatggagctgggcagctgcttcaagacctatgaggacttcaaggagtgcttcagcgcctacaaaagggagaacaggtgctccttcattctcagggactgcgtctccgtccgcttccacaacctcaaccatggcacctccatccgcgaagacatcctgtaagggcgggcggggcggggcgggccaagagggtggggaggaggctggacctccggagggctgcctggaggaggaggggtgcataggcacgcattgggctgcgtggccattcattcaacaggcactcattgagcacctgctgtgtgccttgtgaagagagctaagcctccacggccattggtttttgaccacccactccactttcactccattcacaggcttttctggaatttataactgcagtttctcccattgttttgagcagctgcagcaacccaaatacaaagtatggctttcataaacggataaaaacaccttggcgataatttccttcatcagtctcctctttacaaaacagtcacatggtcgttggaatgttcgttcattcattcattcagtttttagttcttatatatttgttgaaacagggtctcactctgtcccccaggctggagtgcagtggcacaatcagctcactgagccttcaactgctgggctcaagcgatcctcccacctcagcctctcaagtagttggaactggaggtgcacgccaccatgcctggctaattatttgattttgtacagactgggtcttgttatgttggctaggctgttcccagactcctggactaagcgatctttcggcgtctcaaagtgttaggattacaggcatgagccactatgcctggtctattcattcattttgtaaatggtttttgagctccttatattaaccgttttcaaacactttccatgtgccaggcagtgttctctatgcatgctttaccctgcagggcttttttttcagaattatagataaatgttatttttttgcatttgacagatgagaagatttgacagatgagaagtcaggcttagaggttaagacaggagttgaaaactcaaatgccttcagggattaggtgaaacaacccaatgtaagaaagttttaactttgaattttactttaagaaaaagaatgatgaaatagcaaccaacaccaggtctttgtgctagggacaacagaagtgtgaaatgggccaaatggagagtagatgccatctaatcagctccagctgatggctgccatatgaaaataaagatctagtgttgccagaattttgggcaagagttgtcagaaatccacactttatgtggattttcccatttaaaaaaattgaatcagttcaaattttaactcagagcatgcgggccaactcagagttaaagcatatccgagtttgagacttggattgagatgctcaaccaaagctcctcaattagacagccaggctatattctttccactgttctgaagtccagtgctatgctgggtataggtgacataaagatgaataagtgttcaaactatccccagagaactaggataaacttgaactcaagcaaactggtgtgtgataaatgctttaaaaggaatgtggaaaaaaaaaaaaaaaaagaaatgtacggagaaagaaatgaatgacaaatgcctgggaggtgggggaagtcttcacactggaattgatggtttccctgggctgtgaatgaatgtagagtgctagagtagatctgtggttaattactgagtaccatggaggcatttgaccagaagttgctgtgcagaaggacctacaggagcaaagacaaagatacatgaaagaaggttggcatgttagagtaacagtgagggataccatgtttggcaggagatgaagtcatttgcagtctaagggtctttagggaccattgtgaggtgtttggaccttgtcctttatgggtaggaccttgctaagcaatgagaggaatacaaaaaaaaaaaaaaaaaaaaaaaaccacagttgcccgtaaacacccttcaggaagaccatctcaggtggctagcacaaggtgtggcccatagcaggcattaaataattattgaatgagtgagttatcaagtactaaccatgtgattcagggaaataggtgctgcgggaactcagaagagaaaaatcactgcgagctagagacgtaagagtgaaagggaggcttgagctgggcccccaaagatggagagctgtcagaaggtgtattggttttctgtttgccactctagtgaattaccacaagtttaatggtgcaaagcaacacaaatttattatcttagagttatttaggttagaagtcaggcacaggtcttagcaggctaaatcaagatgtctgcagggctgtatttctttctggagtccctgggtaagaatccatttcccgccgggtgcagtggctgatgcctgtaatcccagcactttgggaggccaaggtgggcagatcacttgaggtcagcagttcaagaccatcctggccaacatggtgaaaccccgtctctactaaaaatacaaaaattagctaggcgaggtggcacatgcccgtaatcccagctactcaggaggctgaggcagcagaattgcagccgggaggtggaggttgcagtgagccaagatcgtgccattgcactccagcctcggcaacagagcgagactccatctcaaaaaaaaaaaaaaaaaaaaaaaaagaatccttttcctttccttttccacctcctagaggctgcccaacacaccttgggtcatggcccccttcctccatcttcaaagccagcagtagcaggttgagtcatcacatcactctgaccttgcttctgtcatcacgtctctgactccctcttctgcctccctcttccacttttaaggatccttgtgattatattgggcccacccagataatcccagataatttccctattttgaagtcagctgatagccaccttaattctatctgcaaccttaattctcctttgccatgtaacctaacgtattcacagagtctaggattaggacaaggacatcttcaagggaccattctgcctgccacaagaagattaataacctggaggtaaaaatggtgtgagtcagtacagacgtaaacatgacgtgcttctattagaaaacagtgatgggctgggcacggtggctcacacttgtaatcctaatactttgggaggctaagacagggagattgcttgaaatgaagagtttgagaccagcccagactataatcctgggcaacaaaatgagatccccgtctccacaaaacaaaatttaaaattaggggccaggttgtggcagctcacacgtataattccagcactttggtaggctgaggcaggcagatggcttgaggccaggcattctagaccagcctgggcaacatgccaaaacctcatctgtacaaaaaatacaaaaagtagccaggcatagtggtgtgtgcctgtagtaccagctactctggaggctgcggcaggaggattgcttgatcccaggagtcagaggttgcagtgagctatgatcgcaccactgcacactacattttagcctgggcaacaacagagtaagatcctgtctctaaaaaaaaaaaaaaaagcaagcagtgatgtatgtttgcacgcacatacaaaagccatgaggagacctgcttagctagaaggaaggatttatgctggagcagcaggaaaggaaattggagggttgataagcaggttggtgggttgggatttgttttgtttgttttaggagacaaggtctcgctctattgcccaggctagagtacagtgggagggtcatagtttactgtaaccttgaaatcctggcctcaagtaatcttactacctcagcctcctaagtagctaggactacaggtatgcacccccatgccaggctaatttttttttttcaattttttgtgtagagacagggtcttgccatgttgcccaggctggtcttgaactcctaggctcaagctgtcctcctgcctcagcctcccaaagtgttgggattacagatatgaaccaccatgctggacctgtttttgtttttgaaggtgaacaattttaaaagtgtttttgggccaggcacaattcaatcacttgaacccaggaggcggaggttgcagtgagtcaagatcatgccactacactccagcctgggcgacacagcgagactctgtctcaaaataaataaataaaaagtgtttttgtgtttgagtggttaacataattaaaaatattttcaaaaagtacagaagggactaaaagggtcacctccactgcattagcttttggttttttttggttttttttttttttgagagatggagtttcgctctgtcgccaggctggagtgcagtggcgcgatcttggctccccgcaacctttgactccctggttcaagcgattctcctgcctcagcctcccaagtagctgagattacaggcacgcaccaccccacccagctaatttttgtatttttagtagagacagggtttcaccatgtttgcgaggaaggtctcaatctcctgacccggtgatccacccgcctcagcctcccctgctgggattacagatgtgagccaccgtgcccagtctgcattatcttttttatctatttatttatttcatttttatttatttacttacttacttacttattttgagatggagtcttgctctgtcacccaggctggagtgcagtggtgcaatcttggctcactgcaacctctgcctcccgggttcaagtgattctcctgtctcagcctcccaaggagctgagactacaggcatgcaccaccacgcctggctaattgttgtatttttagtagagacagggttttgccatgttggctaggctggtgttgaactcctgacctcaagttatacacccatctcagccttccaaagggctgcgattacagctgtgaggtgccacgcccagcctatgtatttatttatttttatttttgtagaggtgaggtctcactatgttgcccaaactgatattgaactcctaggctcaagtgatcctccctcctcggccttggaaagtgctaggattacaggcatgagccactgtgcctggcccactgcattattatatagaggcaatcagcgttaccttcctgagagatactgaggctgaacaaacatgtcttgtatatgcatttgcatctttttgttgttttaacacaagtggcagcatgctatttagacatagccttctgtacctgctgtacctggctcttctcacttaccaatatatcttggaaattatgccaccgtatgggcaatttgatttgactttcattgatttccttgtttttttttttgtttgtttgtttgtttttttgtttgttttttgcagttgttaactaaaaagttactccatgctggtgtctggagatacgttgttgaaaaatataaattgaatctctgctcttgtggagacaaatactaatctataatcacagaaataataatttccttaaagtggtagtagagctccaaaggaaaaacccagggtgccctgtggaggggtgatggtgacacttattctgattgtcaggaacagggtgggggtgctggttgacaccctaaaccaatgcaggctcttgctcagaaaaaactgtcagccctgagattttgcagatactttacaaagcacattcacctttattacctgacctggttctctgaataaccttgtcagaggcaaattttgctgttcccactaaattagttaatacatgtaaagtgcttacagcagtgccttgtagatggaaaatagtccacaaatattgtattgttttacagatggggagacagagccaggagaagtcaaacattaagagacaaatagtttagggccaggcgcagtggctcatgcctgtaatcccagcactttgggagaccagggcagacagatcacctgaggtcaggagttcgagaccagccaggccaacatggtgaaaccctttctctactaaaaataaaaaaattagccaggcatggtggtacgtgcctgtaatcccagctactcaggaggctgaggcaggagaatcactttaacccaggaagaggaggctgcagtgagctgagatggcaccactgcactccagcctgagcagcagagcgagactctgtctcaaaacaacagcataaataactgaaaattagacccagcctatttactgacagagctcttaattgttgtacttagccactgggctctaatagttttctaatgtcacttgtccatttttccctcaacaaacttgtggtaagaggctaagtgtttaccatgggccaggagtacaaagatgagctggagtacaaagatgaggaaattgtaggctccacccctgaggacaatagcggactgagatagcttaggaggcggtgaattcatgagcagcacaggtctttagcagaaacaagttgactgctggttgtgatgttataaaggacattcttggatcatttattgcaaactggctctgtgcagagctcactgtcttgggctttttgagtgatacgtgggtgtcttgggggactggagggttggtgggggaaatgtttttaggaggtaatttagtacatgtttctgcagccaaatacacatattactgggtggtcaggtgagatgatattaatacttatgtgaaaatgtagacataaagttccttgataagcaaagtaaagcaagtgaactaatttaaagaaaaccatttacagctggatgttgctcacgcctataatcccaacactttgggaggtcgaggcgggcggatcacttaaagtcgggagtttgagaccagcctgcccgacatggtgaaaccaactctactaaaaatacataaattagccaggcacggtgatgggcatctataatcccagctactcagggggctgaggcaggaggatcccttgaacccgagaggcggaggctgcagtgagctgagatcacgccactgcactccagcctgggtgacagagtgagactccatctcaaaaaaatttttgaaaataatggtgcagggccgggcgtggtggctcacgcctgtaatcccagcactttgggaggcccaggtgggtggatcatgaggtcaggagatcaagaccatcctggctaacacggagaaaccctgtctctactaaaaatacaaaaaatttatccaggcatgtagccggggcgcagtggctcacacctgtaatcccagcaatttgggaggccgaggcgggcggatcacttgaggtcaggagttcaagaccagcctggccaacatggcgaaaccccatctctactaaaaatacaaagaatagctgggtgtggtggcgcacacctgcaatcccagctacttgggaggctgaggcaggagaatcgcttgaacctgggaggcagaggttgcagtgagccaagatcatgtcattgcactccagcctaggcaacaagagcaaaactctgtctcaaaaaaaaaaaaaaaaaaattatccaggcctggtggcgggcgcctgtagtcccagctactcagaaggctgaggcaggagaatggcgtgaacccgggaggcggagcttgcagtgagccaagatcgtgccactgtactccagcctgggtgacagagtgagactccatttcaaaaaataaaaagaaaagaatagtgcaaatattatatgggtggctatggcagatgtaaaggtgattggcaattctttttctggaaaagctggcccaagggttaaaaggaagagctctggagtgaaagagactgcctttgcccttgaccttgggtaaaacttaacctcttcacatagtttcatcctttacaaaatgagaagggtgtggcaatgattaagaaaaattcagggctgggcgtggtggctcatgcttgtaatcccagcactttgagaggccgaggcgggcagatcacgaggtcaggagattgagaccatcctagctaacacggtgaaaccccatctctactaaaaatacaattagctgggcgtggtggcaggcgcctgtaatcccagctactccggagggtgaggcaggagaattgctggaacctgggaggcagaggttgcagtgagccgagatcacgccattgcacttcagcctggatgacagagtgagactctgtctcaaaaaaaaaaaaaaaagaaaaagaaaaaaaaaattcaggctagggggcatgcctgttatcccagcacttgggaggccaaagtgggaggattgcttgagcccaggagttcaagaccagcctggccaacatggtgaaaccgtctctactaaaaatacacaaattagtcgggtgtggtggtgggcacctataatcccagctactcagggggctgaggcaggaggatcatttgaacccggcagaggttgcagtgagctgagatctcaccactgcactccagtcttggtgacagagcgagactccatctcaaaaaataaaattgaaaataatagtgcaaatattatatgggtggctatggcagatgtaaaggtcattgggaattctttttctacaaaactggcctaacggttaaaaggaagagctctggagtaaaaaagacccccccttgcccttgaccttgggcaaaacttaacctcttgacacagtttcatcctttacaaaatgagaagggtgtggggatgattaaggaaattcaggctaggggcagtggctcatgcctgtaatcccagcacttgggagaccaaggtgggaggattgcttgagcccagaagttcaagaccggcctgggcaacatagcgagaccccatttctacaaaaaataaattaactggtcgtggtgacatgttcttgtggtcccagctactcaggaggctgaagccggaggatcacttgagcccaggagtttgaagctacagtgagccatgcttgcaccactgcactcctacctgagcaacagagaccctgtctcaaaaaaagagagaaagaagaaaaggaaaggaaaatgctcgtagcacctaaaacagtgctcagtaaatgtttgctgaagctgtaactatagtatgtagtagaaagtggtagttatttgaaagagagtcaaagatacgtgctctgggaattaccactaaatgaccaaaagttcacgtcaaaaaaataaaatcagatcaagttagaaatttttttttttttttttttttgagacagaatctcactcttgtcacccaggctggagtgcagtgacgctatctctgctcactgcaacctccgccttccgagttcaagcaattctcgtgcctcagcctcctgagtagctgggattacaggtgcccgtcaccacgcccagctaatttttgtagttttagtagagacagggtttcaccatgttgggcaggctggtctcgaactcctgacctcaagtgatccacccacctcagcctcccaaagttctgggattacaggtgtgagccaccgcacctggccagaaaaaattttattatgcacacaaaagaacagttggagattagtcagatgctccagtcactgtagtgagggcagtgttaataaagcctaaggaaggattttgaccttttttgtgattggctgttatacattaacaatctgtttacagccagtagagctgttcaaactgttttgtctatagttgattcctttaattttactgaattatgctgacaaggatgtaaagctttgtgttctgtttatgattgattagagctacatttcagggaatcaggatatcttaaattccggctatgtggctgtgggcagttggccttggagtatatctaaactgtggcctccactttcatttttcttgaaacattgctatcaactgggaagagtatgtgactttatgcccagtttcccctctcagatttttatgacggttgtttttctttttgttatgccatttgagggattgatgtttcttaaactatgaagtacttggctgtctctctccattgctgttcaggttaacagccaccatttgtaaacactttgttggagctcattccttctctgctaggaactttacaagaattgtctcaatcctaccacacctttggcaggacccttgttatcagagttttcattatccatgtatccatagttacaaggctatatagaaaagcaaaagtcatcacacaagaatcttgctaacaaactacttataaaattagtcactacttaaccatccctctgcttatccctgccagtcccattaacatgtttggtagtcaatttctggctgatgaagagatacattaagcatcaaggtaatgcaaatgtaaataaaactgactgtagactgaaatggcacatctcccaaaacttgtaggactaggcgaaatccctgcaagtgatgatagaaaaccttcagccttataccagttaacaaaggaagaagggaaatcaacaaagatgatgagatggtaaaaacttgaaaagtagaggatttgcctaggaaaaattaagcccttcggaaacttagtaaagctaaggaatattttggcaaaaccatcttttgtatgttgcaaaagtgagacaggaaatgaagtatagtgtttgggaattttttttttttgagatagagtcttgctctcctgtccaggccggagtgcagtggtgcgaccttggctcactgcagcctcagcctcctgagtagctgggattacaggcatgcgccaccacacccggctaatttttgtatttttagtagagacagggtttcaccatgttggccaggctggtcttgaactcctgacctcaggtgatccactcgcctcggtctcccaaagtgttgggattacaggcatgaaccactgcacctggcctagtgtttgggaaaactatactaggaaaagaatagttgctttaagtcattctttgattattctgagaattggcatatagctgccattataacctacttttgctaaatataataataataatcattatttttattttttgagacagggtcttgttttgtcaccccggctggagtgaagtggcgcaatctcggctcactgcaacctccacctccgggtgcaagcaattctcctgcctcagcctcttgagtagctaggattacaggcacaagccatcatgcccagctaatttttgtatttttagtagagacagggtttcaccatgttggtcaggctggtcttgaactcctgacctcaggtgatccacccgcctcggcctcccaaagtgctgggattacaggcgtcagccactgtgcccggccctgctaaatataatattaactttataattttagtctcattttccacccagatcttgtttatcactatctgggtggtagtgataaagttccacccagatcttgtttatcactattccctatgaaatgtttctgggtggccgggcgcagtggctcatgcctataatcctagcaatttgggaggccaagacaggtggattgcttgaggcccggagttcaaaaccagcctggccacatggtgaaaccctgtcactactaaaaatacaaaaaattagccaggcatgatggtgggcgcctgtaatcccagctactcgggaggctgaggcaggagaatcacttgaatctgggaggcaggggttgcagtgaggcgagatcatgccacggcactccagactgggcaataagagcaaaactccgtctcaaaagaaaaaaaaaagaaatgtgtctgggtatgtttttggctgcaattagctgaaaaccctgactcaaaatggcttattgcagatacttagaagcccagaggtgggcctccaaaggtcattgtctcagtggcctggactctgcatttttccactctgccatgttcaggtctcagctttgtccttaggaaggctccccatgtggcacaaatgcaggagtcacatccagaagaagaagcctttcttgccgggcgtggtggctcacacctgtaatcccagtgctttgggaggctgaggtgggtggatcacgaggtcaggagttcaagaccagcctggccaacatgatgaaacccccatctctactaaaactacaaaaattaaccaggcgtggtggcgggcacctgtaatcccagctactcgggaggctaagccaggagaatcgctggaacccaggaggcggaggttacagtgagtcgagatcttgccactgcactccagactgggcaacagggcaaaactccgtctcaagaaaaaaaaaaaaaaaaagaaaaggccaagcgtggtggctgtaatcctagcactttgggaggctaaggcaggcagatcacgaggtcaggagtttgagaccagcctgaccaacatggtaaaaccctgtctctactaaaaatacaaaaattagccgggcacggtagcatgcctgtagtcccagctactcgggaggctgaggcaggagaatcgcttgaacccgggaggcggaggttgcagtgagccaagaccgtgccagtgcattccaacctgggtgacagagggagactccgtctcaaaaaaaaaaaagccttccttggtttcctgccaatttcctgtcatgtttctttgtcccgaattgggccaatatccatgcccattcctaatacaattaccttaattgacttagattagccctgaagcatgtagtgatgtgggggaggaatgacaactgaagaaaatagaaaagaagggacaaaggttgttgagttggcaaccaacaattcctgttatagctttttaaattaattcactttaagtggtactgattattcatattgttatttccatgtatagagagagaagaaattggaggcttagaggaagtgaagtgacttgtccaaggtcacatagctaagtggaatttattttttttttttttacttttctgagacaaagtctcactctgtcgcccaggctggagtgcagtggcgtgatcttgactcactgcaacctctgcctcctgggttcaagtgattcttctgcctcagccacccgagtagctgagattacaggtgtgcaccagcatgcccggctaattttttgtatttttagtagagatggagtttctccatgttggccaggctggtcatgaactcttggcctcaagtgatccacctaccttggcctcccaaaatgctaggattacaggtgtgagccacggcgcccagctactggaagtcatgatgcaagctgttgtttgaatcatgaattccaaacttaatgagtgctaggttgaagttattttttttctgtttcccttaatcttctattgagatataacatgtattgaagcacagacatcttttgcaagaattcattgagcactatagttatattcatctgtacttactgtctccctggtaaaggcataaactcccttcaagatggggacatggttttatactttcctgaatctcctttagtgcttatatctaacagcacttaaccaggatctggagggggtcaaccagtcttgcttccttccaatctactctgtagatgtttgtgtttttctactgtaactatagaggtaaaggagccaatggtgtttccagtgtctggcacataataggtgctctatgaatgtcaaatgaatgactgaggcataaaaagttcttcctatgacataagtagtataataggaagatcactgggatagaattttcttagaagacgtggctcctagtcctagcactattactcttactgactataactttggacaagtcatttgtttaatttcaaacatttactgaattctgtgtaccaaatactgtacaagttgttcaaaaggctacagagtctctactctcaaagtctagtcaggggagagattacacaggagtgaaaccccatctctactaaaaaaaaaaaaaagaaagaaaaaaatagccaggcatggtggcaggcacctgtaatcccagctcttgggaggctgaggcagaagaattgcttgaacccaggaggcagaggttgcagtgagtcaagatcacactactgcactccagcctgggcaacagaacgaatatctgtctcaaagaaaaaaaaaaaaagaaaaaaaaagtatgtttagagatccttaaggaagttttgaacctatccaatatgttgggagtcaagatgaggagggtaaaagtaggaattcagagaaaggataaatattttgaaggaaggcagcataatggttaactagtcagactgcagacaaacaagcagtacaaatcccatgttcccaggtcttagctggaggattaaatcccagattctcatccttgagaacctctttaagcttgttttcccatctgtaaaatgtagatgataatagaatccttttcctactgtaaaatgatgcacattgggggcttcatgtagccagatatataataaatcctcaatacatgtagcagtggtaggggagaactaaaagacttgttaacatattggatgtaggtgagaaagaagaatcaaaaagaatatccaggttcccgccctgggaggggcagacataaatggagccaggaatggtacaaggagctttgtggtgggcactcactagtacctttctttggaatagctcaacaaatgttcactaagtacacataaagtcaatataacttgatgagctagagttaggctaagatgttgagttagcagaagagtagtacccaactaagggcttgaggaaggcttcctagaaaagataatgggtgcacgtagtcctgaaggatgagcaaggcttgcgaggagggaaggtaggaagggcattccagacaaagggacaaacatgcacaaaggtgagacagagcatggtgaacacacaaagttgtaggcattttgtctttctaggacacaaaaaacaaggtgatgaaaacaaggctggagagacaagcggagaccacaagtggtcacccctcactggcctcgctgtactactggactgctccagcccttcctggcccagagctagagatggcaccacccccgcactgtgcacacaataggtacagacactctcagccccaaacccctccagcctgttactgtgagactcacacatcctgttttcccaagcttgccccacagggtgagcaaactggaccagctggattagagtatttggaaaagtgcaggtggagtttctaggctatgccacgtcaggccagggggtgagatttttttcccttcccctggtctttgggctggggcactccctgaggagggaggggtgtgacccatcccacccattggtggtccatgatccattcatccagtacatcatccataagcatctgctgagccgggcgcagttgctcacgcctgtaatcccagcactttgggaggccgaggtgggcggatcatctgaggtcaggagttcaagaccagcctggccaacatggtgaaaccccgtctctactaaaaatacaaaatttgccgggcatggtggcgcatgcctgtaatcccagctactcgggaggctgacacaggagaatcgcttgaactcaggaggcagaggttgcagtgagtcgagatcgagccatcgcactccagcctgggcaacaagagtgaaacgccatctcaaaaaaaaaagcatctgctgaaggcacagtattgtgttagaggcttggactaccctgaggaataatagtcctgacacttgaggacatccccatccaattggaaaggcactggataaacatctaagaaaatgtcacaaggcataaaagctgtaataataatagctaacttgtatttagggtaaacaaaaggctgaatcaggctttggactaaatattttgcctgtggctcatttaatcttaataacaaccataagattatctcattttatgatgaggaaactgtatacagagaggtgattgacttgcctaaggttgaacagcttatgagtagtagagccagtattcaaatccagtcagcctccagtgtcccctctctttagtcattagatatagtgctacccagagaatctgctaagccttatagataaatgctatgaattcagaggcaggagcaattactgtggcttgggggcatccacaaagactttctaaggtggtgacacctgatttgggccttgaaactggttgaatagagataagaaaagaacagataatcaatttaactgccgttgtgttttgaatcatcactttaagcctagaatgacaaagctggaaaagaccctaaatatcatctagcccagtggttatcaaattttcttaggatgtggacatttttctttaaatgaaacatgagtagaagccagatgcagtggctcatgcctgtaatcccaactacttgggaggctaaggtgagaggattgctcaagcccagaagttggacaccaacctgggcaacggtgagaccttgtctcaaaaaagaaagaaagaggccgagggcggtggctcacgcctgtaatctcagcactttgggaggctgacgcgggtggatcacttgaggtcaggggttcgagaccagcctggccgacatggtgaaaccctgactctactgaaaatacaaaaattagtcaggtgcagtgctgcatgcctgtcatcccagctactcgagaggctgaggcaggagaatcgcttgaaccccagaggtggaggttgcagtgagctgagattacaccactacactccagcctgggtgacagagtgagactttaatttcaaaaagaaagatgagcagtaatcttgtctcttaaaaaggaggaccaaacattccctagccccaaaacattccctgaaaagttcagttgagaaccactgatctagtccaatgtcctgggatcctcgcttttatctttgctatctggagaaggaagagacagcggtagttcccaaaagacacaaacaatggggacattttaaacgggagtaaccagctaagcactctgctgctgctgcttgtctatttgccctcttgtcctgcctcagggtgaattgttggcagctacaaatggcaaccaagagagaatggagttggggcttagaagtgcggtagaggaatatgaagggggctggagttggagaggctcttaaagaaagagctgactatattgggactggagagttaatgtaaatctcttcttggttcatggggattttgttgttattgtttttttccccatgacacaactctcaggagatcctgagaacacgtgccctgatttggggggggttttaattttaactttttttttttttttttttttttgacagagtctcactctgtcacccaggctggagtgcggtggcgccatcttggctcactgcaagcaagctccgcctcccgggttcacgccattctcctgcctcagcctcccaagtagctgggactacaggcgcctgccaccacacccagctaattttttgtatttttagtagagacggggtttcactatgttagccagaatggtctcgatctcctgatctcgtgattcacccgcctcggcctcccaaagtggtgggattacaggcgtgagccactgtacctggccaaaatttttttttaattagagacagtctcttgctgtgttgcccaggctgatctcaagcagtcctcccaccttggcctcccaaagtgctgggattacaggcgtaagctatagcacccagccttccttctttccttaattctatttttttttttgtttgtttgtttatttgtttgcttttgagatggggtcttgcactgttgcctgggctggagtacaatagcgtgatctcggctccctgcaacctctgcctcccaggttcaagggattctcctgcctcagcctcccgagtagctgggattacaggtgcctgccaccatgcctggctaattttttgtatttttaacagagacagggtttcactatgttggccaggctagtctcaaactcctgaccttgtgatctgccctccttggcctcccaaagtgcggggattacaggcatgagccaccatgcccagccttccttaattctattaatatatgaatccttttcttttttttaaaaaaaagagatagactcttgatctgttgcttaggctggagtgcagtggcacaaatcagagctaactgcagcctcaaactcctgagttcaagcaatcctccagcctcagcctcccgagtagttgggaccacagttgggaaccactacacttggccctactacgggtttttcctgtttgtttgttttttgtttttttgtttttttgtttttttgttttgagacggaagtttgctctcgttgcccaggctggagtgcaatggcgcgatctcagctcactgcagcctccgcctcccgggttcaagcgattctcctgcctcagcctcccgagtagctgggactacaggcatgcactaccatgcccggctaattttgtatttttagtagagtcggggtttctccatgttggtagtcaggctggtcttcaactcctgacctctggtgatccgcccatctcggtctcccaaagtgctgggattacaggtgtgagccaccgcgcccagctgtttgtttttttgagatagggtctcactctgttgcccaggctggagtgcagtggcatgaacatggcttactgcagccttaacttcccaggctcaagcgatcctcccttctctgcctcctgaatagctgggaccacaggaatacaccaccacacctggctgatttttaaattttttgtagagccagggtctctccatgttgcccaggctggtctcagactcctgggctcaagtgatcctcccacctcagcctcccaaagtgctggggttataggcatgagccactgtacccagcccccttcagggtcttatctttataaggggtggggggtggtcagcacctttctcattgttacctctaccttccctaggtatgtgcaggtgaaatttgtctgcattcggacccaatcaaacaggaagagaacgcgggaggcagacatgtgcccagcgtacttgctcctaaggtacaacgagagactagatagactatttatcagtgaactaaacacacagcacatacatggtgactctaaagtggctagtcctggaggagacaccactggcaaatctcaaaagacaatgtgcctgcagagactccagcctgtgcagcccacaaccaaaaaagaccttgacactgccgagaagtccctggttgagccatcgttttgcctagataaggtacaagtgtcctcaaagccagagcaggaaggcatcactccttctgacctggccaagatagcaaaagtgatgaagaactttcttaaggtagatgagggttccatggcttccttcagtgtgggtgacagccagcacctggaccggctcagcttccagagcagtaagatgaccgacctgttcatccgcttcccagagaatctcttgctacaccgggtggagaacacccagggccacatcctctatgctttcttggtggagaacaaggaacgagaaagtcgagtggtgcactttgctgtgctcaaggcggagacagtcacctctgtggccaagatgctgagcatcttcacagagttcaactccgattggcccaaggtcaaggtggtctttgtggacccttcattccattaccgggctatcctgcaggagatctttcctgctgcccgcatcctcctttccatctaccacacaacccgactcttggagaagaagttgcatcgtagttcagcaaatccatcctttaaaaggctcatgaaggaagccctgcgggaggccgtgtttgtcacttctgaagccagcctgaaaaatctctgccagatgtcccaggccgtactggatgaggatctcttcaacttcctgcaggcccactggttcacctgtgaactgctgtggtacatgcatgttaggaagggcctgcttgcgtgtaacacctacatggacagcctagacattgtcaccagcaaggtgtcaagcctctttcgggaacagcagtcgctgctggactgcatcctctgctttgtggattacatagacttctttaataccaaaggcttgaagaacttgcccacacctcctcccaaattaaagagagctcggccggcaagcatgccactgaagtccaagaaggcttttggaatctgtggagagagccttaccagcctccctgcagaagagaccaagccagacgcacagcaggtacaggtacagcagcagtcacaagtgccgccctcgcaggttggcatgctggacaccttgcaccagagtggctctgaactagcctacaagctgtgccacaatgagtgggaggtggtacagaactccacccacctggtggacatggctggctcttcagtggacgttcagctgctagaggactctcaccaggttagcaaagatggctgtagctgcagctgttcctttcaacaatggtaccacctgccatgccgacacattttggctctgctgcacaccagccagcagccggttggtgaagccatggtgtgccgccggtggcagaagaagtaccagtacctccttgggcccaatggggagctccaggatcgtggtatggtcccaaacacaggccagcctgagaagcaaggacggaacgacatgattcaggacctaagcagggagttagcaaacctgctcatgcagaccgaggggccagagctggaggaacgctactccaccctgcgcaagattgtggatatctgggctggcccctcccagccatctgagctctttcagcagccaggagactttaaggacgtgggccgcctccctttcctctggggaaagcaagaagaaggggagggattccctcctgctacagctgtgatgcattattgaagcactttagctgaagcattggaccacaaacacttctccttggaagtgtgagagtttaaagtgggcaggacatactagggtttagcattttagccaatgtcttcctaggtggggctaggaatattgttacagtagagaggaagggaactccactgtgtgacagtcctttcaatctgccccttttcagccctacttttggcattccttgggagcctcagttgttgttcaaggccaaagttatctccgtgctgcaaggtcaccctcttcctcccccagcccctgagatcagatcttatttgctctgcaaagatgaatccctgcctcaggttagggtgagacaaaatcggtctggtaaaagggcctgttttcagggacaaagggaatgaggatgatctttggctgttgctgctctttatgaagaatcttatttgtaactttttattcatattaaagttgtttttaataaaattaaacaagggaaatgtgttctgcttgatcagggaaggaagaggaattgcatagcaataggactcgactttacagttaggaagtggctgctctaggtggatttattaattttaaagaaaattgaggccaggcgcagtggctcacactcataatcccagcactttgggatgtcgaggcgggtggatggatcatctgaggtcaggagttcgagaccagcctggccaacatggcgaaaccctgttctactaaaaatacaaacattagccaggcgtggtggcgcacctgtaatcccagcttcttgggaggctgaggcaggagaatcgcttgaacccaggaggcggaggttgcagtgagcctagatcgtgccaccgcactccagcctgggtgacagagtgagactctatctcaagcaaaaaacaacaacaaaaaaaaaagaaaagaaaattaagtattagcaacctaatggggttgtggagccaaatagaacctgatgcctcacattcaaggatttggcaatctgcgtcttaatttgcctccttcctacaactaagccttcaaggttgatttcaggtttccttatattctagcgggaagaggccaaatagactggagggtgtgggggaaaaacctgaatcttagacttgactgccagcaacttgctggggaactgtgggcaatttctttgacctcagtttcctctgtaaaaattagcatgttggcctgttctaatcccagatttcccctctaggtttacataagcacctttttgttttttgttttgagatggagtttcgctcttgttgcttgttgcccaggctagagtgcaatggcagaatctcggctcactgcaacctctgcctactgggttcaagcgattctgcctcagcctcttgagtagctgggattataagcatgtgccaccacgcctgcctaattttttgtatttagagatggggtttcaccatgttggtcgggctggtcttgaactcccgatctcaggcaatccacctgcctcagcctctcaaagtgctgggattaaagggatgacctactgcacccagcccaataacattttcgatgcgtaagtaccaacactgatttgatgttgctagttggtaatcttaatcctccaaggcctggtaaacacccagttttctaagtctgccatcttcaagggaactgaggacaagagaccagttagtaggcccttgcactactgtagtaggaccctaaataagtcatggcatcattctgtagaatactggagggggttgggctagagaatgccaagttttggcttgtttaaggggatctggatttcctcagctctaaaagttgggctcctgatccccgaaggaggagtagaatttgagacctggaactcagtttccccataaggtagaatatgcgttatgactatatatgcactgtttcctaaattccaggggctttagagtttcacacacacacacacaacaaaacaaaacccgcggtggctcacgcctgtaatcccagcactttgggaggctgaggtgggcgaatcacgaggccaggagttcgagaccagcctggccaacagggtgaaaccccgtctctactaaaaatacaaaaaattaactgggcgtggtggcgggtgcctgtaatcccagctactcaggaggctgaggcaggagaatcatcgcttgaacctgggaggcggaggttgctgtgagtcgagatcttgccactgcactccatcccaggcgacagtgcgagactccatctcaaaaaaagaaaaagaaaaaatatatatataactgctatttattttccttttcattttctgcttttgagggagtttccatagtaacgtgtccttccagtcgcctagcctgaagggaagccccggagctccagcttcaaggctcagctctcccagatgcaagtatctttacctccagccagctccttgtaaccctggcaacacggcccgcccgcgaatcgtcacgctacgattggtccgtggtgctaaagcctgaaagcgaattcctcagacattggtccgagtcactgcgatgctgacgctgtggttggtgagtttggatgtcagtcagagtcggaggcagggtcaaatagggagaaatggcgacggagcctggctgtgggtgagtgcttcctgaaggggtgaaagtgtgagacagcggatcaccgcagttagccgtcacacagctcccaaagggatgggagggaggttttcttctcatccggctccagctggactctgggaatgtcagacatccacatctcccacccaggttagaggtgagaggtcaaaggccgtattccctctgttggtttttggaccccaggtactgtggacagcagtcaggatcccgaaccaaagactcaactttcagctacttacagagtaatggtgggcaagtcacttagcttctttgagccttagtttatcatctgtaaaatgaggacagtaactcggtctggggccaaatagaggaaacaatggaatagagtattgctgctaaaagagggatatagtagaggcaggagaagctatgcacatttgttagccatattttatggtggaagggattgaggctcagagagggtcattgacttgcccaagataacacagcaagtttggagcaattgcagttctcttatacataccaggaccaaaggaaagaatggatgccaatcagtcatttataaatataaaatcgtatttttattttattttattttttgagacagagtttcactctgtcacccagagctggagtgcagtggcgcaatctcggctcactgcaacctcagcctcctgggttcaagcaggtctcctgcctcagcctcccgagtagctgagactacaggcatgggccaccatacccggctaattctttttgtatttttagtagagacgggttttcaccatgttggccaggctggtctcgaactcccaacctcaagttatctgcccaccttggcctcccaaagtactgggattacaggtgtgagccactgcacctggctagaatgctatttttttaaaaggccatatgcagctctggccatacctatttaaatcccctggaaccatatctttccatagctaacttcttatcatttagatttcagctccaatgtcatccttctcccctgagaggccttccattaccactttaactaaagtatccctcccttccccagcttactctctgacatgttactcaggtttatggtctttgtaagcttcattattggatatatatttgcttatttgtttacatgtttattgtgtatcttcccctagaacagtgctgacatatagtaagtgttcaacaaatattgtgtggatgaataattgaagagccaggtccctgctgtctccttaaacctctgttactctccataggcccatctttggaaaaaagatctgggaatgattgtctagcctccagcctcaacttacttgatgcttgagagactcaaagccccgtggtcagctgccctgcaaagaaagtattttgaccttggcatttggacagctcccatctctcccatggccctgacaatgctgaatgggctcctgattaaggactcaagcccacctatgctgctgcaccaggttaacaagactgcccagttagataccttcaactaccagagctgctttatgcaaagtgtctttgaccatttccctgagatcttatttatccaccggacctataacccaaggggtaaggtcttatataccttcctggtggatggacctcgggtgcagctggagggtcatcttgcccgagcagtctactttgccatccctgccaaggaggacactgaaggcctggcccagatgttccaagtattcaagaagtttaatccagcatgggagagagtctgtaccatcctggtggatcctcatttccttccactgcctatcctagctatggagttccccacagctgaggtccttctctcagccttccacatttgtaagttcctccaggccaagttctatcagctgtcccttgaacggcccgtggaaaggctgctcctgacctccctgcagagcacaatgtgctcagccacagcaggcaacctgagaaagttgtatacactcctgagcaactgcatccctccagccaagctgcccgagcttcactcacactggctgctcaacgaccgcatctggctggctcaccgctggagaagccgagctgagagcagccactacttccagagcctcgaggtcaccacccacatcctcagccagttctttggtaccaccccatctgagaaacaaggtatggcttctctgttccgttacatgcagcagaactctgcagacaaggcaaacttcaaccagggcctgtgtgcccagaacaatcatgctccctcagacaccatccccgaaagccccaaactggagcagctggtagaatcccacatccagcactccctcaatgccatctgcacagggccagcagcccaactgtgcctgggcgagcttgctgtggtccagaaatccacacacctcattggctctggctcagaaaagatgaacatacagatcctggaagatacccataaggtgcagccccagccccctgccagctgcagctgctactttaaccaggccttccacctgccctgccgccacatcctagccatgctcagtgcccgccgccaggtgctccagcccgacatgctgccggctcagtggacggcaggctgtgctaccagtctagacagcatcctgggcagcaagtggagtgagaccctggataagcacctggcagtgactcacctcaccgaggaggtgggtcagctgttgcagcactgcaccaaggaggagtttgagcggaggtatagcaccctgcgggaactggccgacagctggattgggccttatgagcaggtccaactctgattattctcgatgcccagagatgctcatgcacctgtgcacactcacatccacccatacacacacacacacacacacacacacacacacacacactcccttacactgttgtacttccgtgggccctccttccagaacaaggacaacaaggacaaggttgaagggtcttctcatctaccatggcctgctacctagcatgtgtctagctcaatgagacaggagtcagcaaatcttaatctgtttagtttactcaggtggccacatacagtctctgttgtatattcttggttttgttttaatattttttttctttttttttttttttttttttttgagaaggagtctgtctccgtcacccaggctggagtgcagtggcgcaatctctgctcactgcaagctccacctcctgggttcacaccattctcctgcctcagcctcccgagtatctgggactacaggcgcccgccacaatgccgggctaattttttgtatttttagtagagacggggtttcaccgtgttagccaggatggtctcgatctcctgacttcgtgatctgcccgcctcggcctcccaaagtgctgggattacaggcgtgagccatcgcacccggcctgttttaacattttcataaggtaaaaacctttcttagctcaaaggtctttaaaaaagcaggcaatccagctgggcatggtggctcacgcctgtaatcccagcattttgggaggctgaggtggacagatgacttgaggtcaggagttcaagaccagcctggccaacatagtgaaaccctgtctctactaaaaatacacaaattagccaggtgtggtggcgggggccctgtaatcccagctactcgggaggctgaggcaggagaatcgcttgaacctgggaggcagaggttgcagtaggccaagatcctgctgccactgcactccagcctgggagggtgagactccatctaaaaaaaataaaataaatggcaacccctggtctaagataagagataaaacatcaggtggtgaggttgaggtttggggcttggtagcagttgccccagtcatgagatgactcacttaacccgtctcctttaagtgagctgggctgggaggcttcctacaggggaagaggcccctctggggagctgactcagccaggctccctgaacttttttccttgtcccatcctggggtcaataaaactgaatgttgcatattctagcacttgtctagttttttttttgttccatagaaggcagtttagggtatatcatggagagaatagactttagagtgttatacaacatgtgaatcctggttggttccttccctgcttgatttttgtgcctggttctgccttttactagctatgagacttattaggataagttacccctctaaacctcaacctgattatctgtaaaaatggggatctccacagggtatgttcacagagcaggcatacctagtgggtgctcaattaagtattaattttccttccttgcctatggtcctatgacctgccttcaacatgctgggaaatttaaggcaagaggagaattcaaatacctaggacttaatataagaaattctggccaggcatggtggctcacacctgtaatcccagcactttgggaggccgaggcaggcggatcacctgaggtcgggagtttgagaccagcctgaccaacatggtgaaaccgtgtctctactaaaaatacaaaaattagccgggcgtagtggcaggcacctgtaatcccagctattcgggaagctgaggcaggagaatcacttgaacctgggagacggaggttgcagtgagccaagatcatgccattgcactccagcctaggtgacagagcaagactctgtctaaaagataaaaattaaaaaaaaaaaattctgggtaggccaggtacggcgtctcacgcctctaatcccaacaccttgggaggccaaaacaggcagattggagcagcctgggcaacatggcaaaaccccttctgtacaaaaaatacaaaaattagctggatgtagcacgtgcctgtagtcccagctactcaggaaggctgaggtaggaagatcacttgagcccaggaggttgaggctgcagtgagctgtgattgtgccactgcactccagcattggtgacacagtgagaccctatctcaaaaaaaaaaaaaattctgatcaagtcttcaaaacaacataaaagcagccttaactctccaagcaggggcccctacctcagataatttccattgtatctacctgacaaaacctatctcctgtcttagtggtatctggagaaactttagggtctggaagtccctgatgaaggactggaatttgtcagaatggctcaaccaccagctctatccccatccctgccataggccctcctcccaaccctgtctgcccaagaaccatacggagaaaccaccctacatatctggtgctatttcatccatctacaagcaggagccaggaggctggccccttttagatctcactaggggcatcttcccagaggctgtgtgggcatgtgcctgctcccaccgcgccccctccacagcaccctctggctccggatgggccatcatgaaagcttgagcggcccagatcaggtcctcttcccgaactcctgggacgggcacggtggggatgccagcgatcatcatggcgagggtgaggatgcagatatcaggctgggagctggcctccttccccactgcctcagagggtaccggtagaacccgtggtgacagcccacacagcatcaggggcctaggcctgctggggccacccaggtcaggggctctgcttctggagtagccattgtcccagcccaagctctccagctgcctcacatgcgggaatttgtggcagtttcggctgtattccttccgtagtgtctcccagctagtccccccagggcagcccctggcttgtggcattgccagggctgggccccaggcctgggcagcaggtgccacctgctcagctttctggctcagtgggcctgttccaccagaggccaccaccactggctctacaggactacagaggccaagggacaagcctggagaagcagccccacctgcagagacaggaatgaaatggaacgttattctcagttctttgaggagggggccctgaggggcagggcatgggagcagagcttgggggcgtaactaagaccagccccagcggactgtctagaggttgggaactaggtgttactcatatccacactcccagtccccaacacggagtaggtgatggagaagcgtttgttgaattaatgaatagtgagcaagcgggtagttattgattggcaaggatgtttggaatggcttttcttctaaaagaattgattctagggccagcccccaaatgcccagcagaaccgccacctccccagagccagaaagcaacttctcaggggaagctgccgcactccctccaattgcaggtgccccccgctcaccttggccggaaggcagaggacctggatgagtttgtggagtcctgaagtaggacatggcttccccaaagccccggtttgtgagggaatagtgatctgccgcctgtcctcccttcttcacccttctagaatgtcacctcatagaccctccccttcacacttggaatccactttacagcgttgacctattcattctagaacctggacatgacaataggatgaggttaaaagagcaccagaccaggagctgggtgttctaggttcttgccctaaccttgaacgagtcacccagatagttttgttccttgatatccttatctgtaaagtgtgtctgatgactgcccactacctcattaggagttttgaggatgaaatgagatcatttgtatggaagcagatgaccagagatggaaacacaggagccaagtgcttcgtgccttgtagagtaagacttcgggtcagacccagtattggtatttttctttttctttttttgagacagagtctcactttgtcgccatgactggaaggctggagtgcaggagcaagacctcagctcactgcaacctctgcctcctgggttcatgcaattctcctgcctcagcctcccgagtagctgggactacaggaacctgccaccacacctggctaacttttgtatttttagtagagacagggtttcaccatgttggccaggctggtctcaaactcctgacctcaagtgatctgcccacctcggcctcccaaagtgctgggattacaggccaggtattggtatttttcaaaattcctcaagtgattataatatatgacaaagttggaaccttttttctagggacatacttctcaaccctggctgtacatgagaatctcttgagaagcttttacaaaacacaatgtctaggcctaatttcccaacaaatcaaatacgaatccctagggatgggatgtgggacaccagcactctttacatatcctaagatgactctaacaagcagccagcctagggacccctgctcttttgctccgacctgctgacctgcagtgattctaaacgaagtgactctcataggctgtaggggcaaggagaccttccagtgatcaagatgtcagcatcggctgtttatttctggtcttggctggcagcaatgtggccaacttcggaccagccagccacaggtctggggctccaggatgcagctgtgctctggtgcactgtgggtcttcactcatacttgcagaaatccttaagttctttgggcaggtggagcccatcaatggccagccggtgcaccatgctcctttgtatcactaggcggcacagagtctgcagggatggcactgtgggaagaagactgtgaaaggcaaactgaactggagggtgggtctgaggccaagatccagaaggtctaggtcatggtccccactttgtcattaaatgtgggcaagtccttactgctctctgggcccagcctgcttcatggggctgagagaagcacctcttcctgagagctgccacaaagctgcagccctgtttatatcataacacttagcacaatcccttccccattcacttagcagcttctgggggcaggggtagtgtctgatttgcctgtgcaactgaagcctccagcacaggcctggcacaaagagggttctggtgcattgagttcatgaaatgtgatgagaggtataactgcaatgcttaccagggctataatgaatcatactcagcattaagaagctctcagtctggggtttgttatgcctcgaagccaatagccaatatgcccaagtctatgagcatgtttctttcttttctttctttttttttttttatttaaagagagagggtcttgctctgtcacccaggctgaagtgcagtgctcagtgaactgcagccttcaattcttgggctcaagcgatcctcctgccttagcctcccaaatagctgggactacaggcatgcaccaccatgcccagataattatttaattttttgtacagatggggtctcactttgttgcccaggcttgagctagctagcttgcttgcttgcttgctttctctctcttcctctctctctctctttcttttttttttcagagtcttgctctgttgcctaggctggagtgcactggtgagatctcggctcattgcaacctccacctctcgggttcaagtgactctcctgcctcagccttctgaatagctgggattattggcacatgccaccacacccagctactttttgtatttttagtagagacaggctttcaccatgttggccaggctggtctcgaactcctggcctcaagtgatctgcctgcctccccctcccaaagtgctgggattacaggtgtgagccactgtgcccggccaagcatgtttctaagaaaagggcaaacaattctcaaagaggcccctaatatctaaaattggtttagaatccctgccctaggtgaatacaggaaacactatcaaaactaaaagggaacttgtagggcatcttaatcaatcaaccaagataggtaccaaggcccaaaaccatgtagaggcttgtgcaagatcacaagcagaggtgcaatttgaagctagattctcccactcttaaactagtgccggacagacgaaggcctagcacatgggctacggagccctagtagattccagtccccacactgagccaggaggggtcgctgcccagggatacctacagccatactcgagctggacaaggcgcacgctctttgtggaagcaaacacgtccaccaccgcgtagaggggctgcgcagctggcagtccccgggcgctcgggcccatgtcctcgccgttgatgatgatgtgcatgtcggccgtgccatcggggcgcgggcaaaagaggacacccaggcggctacggcgcgcggtcggaggcagcacgttcagctcatagagctggtccaagagatggctgtagagccctggccggctgcggcccaccaggcggtcccggggaatgcgaaactgctcaatgcgcagatatggttccacgaggagggttggaggtcggctgggggccgctgcctccgcctccgggcggccctcccggggcacgcggttgtggtggcgcgtgatggcgaagacccaggtgtggcccaggttgaccagatcgggcagagaaaactcgggaacgggggccagactggcggggtccagcgcggtcagaccgagacgcagatgtccgcaccagcccagctctttctcctcgatctcgaccaggaagacctggcccggggccagcggctcgcggctgaagcacacgccgtgggcgaagctctccacgcgtgtggcccgcgtcccagaggggtccacgcggatgttggcaccgtgcacccgatggaagcgggtgggagggggctccgggcgctcgagtccccagagtgcacccgaatccacgggctcggaggcagcagccatctctcggccatagggcaggccagctggcgccgggggctattttgggcggcgggcaatgatggtgaccgcaaggcgaccttgtaaggcatttcccccctgactcccttccccgagcctctgcccgggggtcctagcgccgctttctcagccatcccgcctacaacttagccgtccacaacaggatcatctgatcgcgtgcgcccgggctacgatctgcgaggcccgcggaccttgacccggcattgaccgccaccgccccccaggtccgtagggaccaaagaaggggcgggaggaagactgtcacgtggcgccggagttcacgtgactcgtacacatgacttccagtccccgggcgcctcctggagagcaaggacgcgggggagcagaggtgagctggcaccggaggctggaggggatccccgagcccgggatcggtgcgcggcagaggaggctcgcgggtgggagctggcgctggggccggggcttccctcgcggaggcgccgccagcaactccccgggggctgctgcacggaagcgctgaggagcgagtcaacagcccctctgctgcctcccgtagatgatccgagccgcgccgccgccgctgttcctgctgctgctgctgctgctgctgctagtgtcctgggcgtcccgaggcgaggcagcccccgaccaggacgagatccagcgcctccccgggctggccaagcagccgtctttccgccagtactccggctacctcaaaggctccggctccaagcacctccactactggtctgccgccctgccttctgggcgggattgggagaagagatgacggatgagggatggggggtagttctgcagacccctgaggatgcctgggagccgggagggctggaaagggcccctccaactgcgccaaccctgccctgacccccctcccaggtttgtggagtcccagaaggatcccgagaacagccctgtggtgctttggctcaatgggggtcccggctgcagctcactagatgggctcctcacagagcatggccccttcctggtgagtggacagcagggggaaagcacagttcccaaagtaaaaggctggggaaagcgagagaggggctttgtgattttccaaaaagtttccttccttctaagcctcgggattttcctctatgccattggctttgctgcctgtacctctcagaggttttacccacatgtaaagtgcctctcatggtggccctttccctccacccagctggcccttgggacttactcagccatctctttcctcctcaggtccagccagatggtgtcaccctggagtacaacccctattcttggaatctggtatagctggagctgtgggtgtgtctgggcacttggatggggtggcatttagctaatttttccctcccctctagattgccaatgtgttatacctggagtccccagctggggtgggcttctcctactccgatgacaagttttatgcaactaatgacactgaggtgagtctggtgcctgcccatctgccccaggctccccggtcctccatccatggcatgatgctgggagagagagcatggccttggagtctacttttcgctctgtcatatgctattgtggtatggtggccagtcacttcctcttgcacaaatagggtgggttaatgtcattatctctgaagttctttccagttcaaataccaaagcttcctgattccctctgtcttgctctgccatccccaggtcgcccagagcaattttgaggcccttcaagatttcttccgcctctttccggagtacaagaacaacaaacttttcctgaccggggagagctatgctggcatctacatccccaccctggccgtgctggtcatgcaggatcccagcatgaaccttcaggtgcagggtagctgcaggagggaagggaggtagcttgaggctgtggccttacagttagcaaggtcagactgactggtcaatgtccccatccaacccagcttcctgcataacctccccaccaccggctgccctaggtctgtctgtgtgcctcccacacaggaaactcacctgtcaggctgccagctctgtgttttgcattgagtggcctctcatacccaccggcctacataaaccaccctgggtttcagcttccggattgctgaaggtctgggtggtagggtgagggaggctcttcctttttgccctccacatgagctgagcaccctgggtgtttcacaggggctggctgtgggcaatggactctcctcctatgagcagaatgacaactccctggtctactttgcctactaccatggccttctggggaacaggtatgggatagggcagttgggcaatctctggggtgaggcaggtcacatgatctcaggtctgtcctccaggcacatgatatgacaggcccagcccaggtttatgagcagcaggtgggttgcagaaagaacctagtgctgaaaggccaaagaatagagatcagtttttctttctttcttttttttttttttgagacagattcttactttgtcacccaggctggagtgcagtggcacgatcttagctcactgcaacctccacctcccaggttcaagcaattctcatgcctcagactcccaggcagctgggactacaggcgcgtaccaccacacctgcctaattttttgtatttttagtagagatggggttttgctgtgttggccaggctggacttgaactcctggcctcaaatgatcttcccaaagtgctgggattacaggcatgagctacagcgcccagccagaaatcagattttaaaggaactaaggaggcctgtctgtatgaccctggggcacctctttgggagctagcttagatgacatacagaccacaccctgtgatatctttcccagtctcctagggtcagggaggttggtgggaggtggggggtatgctcgcctcctctgccttcctcttcccaccagcagctgatgcgcttttcactctcatctcctacaggctttggtcttctctccagacccactgctgctctcaaaacaagtgtaacttctatgacaacaaagacctggaatgcgtgaccaatgtgaggttctgccatcactttgcatgagctctcccatccctaatcctgagaacaggaccacattccctccttggggactccttgttctccgtccctcattgctttcttgcacctttaagcaatttagtgttctctgggacatgtgtctaagtgtgtattcccaccaccacctcctatggtggcaaatcccataacctccgtgaggagaaaggacttcttcacatttatcaaacacctgcaacgtggcaggcactgtgctgaactgtgtctatgtagattatttaagcttcaagattccccctcaaatgagatcatactacccacattttccagataaggaaactgagggctatgaattttgaaatcactgtctgaagtcacagtgttgggaggcagtgatgctaggatttggacccaggtctgggaagattcctgccactgagcctcagtttccctacctgtgaaaaaaagtgggtgaagaggtgaaatccaagagcagtaaatcttgggacaacttggtggggtcgtggagaggctggggatctgtaaagcatggtggcttggtgtatcattgcagcttcaggaagtggcccgcatcgtgggcaactctggcctcaacatctacaatctctatgccccgtgtgctggaggggtgcccagccattttaggtaggtgctgctgggtgcccctggagccaaccccagccccatctggaggctccacacccattcccccacctcacattgcaggtatgagaaggacactgttgtggtccaggatttgggcaacatcttcactcgcctgccactcaagcggatgtggcatcaggtgtgcgagggcgtgggcttcctcctggtgaggtgggggcagggggaggggcagggaagcagaggccctgacccactgtctgtgccttccaggcactgctgcgctcaggggataaagtgcgcatggaccccccctgcaccaacacaacagctgcttccacctacctcaacaacccgtacgtgcggaaggccctcaacatcccggagcagctgccacaatgggacatgtgcaagtgaggttccgtggccacctgtgacttggggtggtgggttgctggggcttgtgggcatcggcaggtttctcagggatcttctgtgtagagtttctcaatgagatgagctgtagaggatgtttaacatccatccctgacccctcagtggattgagagtcagccaattcattcttttatcttttttaaatttaaaatttttttgtttgagacaaggtctcactctgtcacctaggctggagtgcagtggtgtgatcatagctcactgcagcctcaaactcatgggctcaagcaatcctcccacctccccagtagctgggactacagacgcaccaccacccccaacaagtttttgtattttttgtacagatggtgttttaccacattgctcaggctggttttgaactctggggctcaagtgatctgcccatttcagcctcccaaagtactgggattacaggcatgagccaccccgcccagccccatttcattacgtagccacattggttgttgtttcacagttcactacagcctcaacctcctaggctcaagcgatcctcccaccttagtctactgagtagctgggtctacaggcacatgccaccattcctggctaatttttaaaaaatttttttgtagagacagggtctcactatgttgtccaggttggtctcaaactcttggtctcaagcaatcctccctccttggcctcccaaagtgctgggattacaggcgagggtccccacacccggccatcacattggttaataactattacttccgactgggcgcagtggttcacgcctgtaatcctagcacttttggaggctgaggtgggggaatcacctgaggtcaggagttcgagaccagcctggccaacatgaagaaaccccatctctactaaaaatacaacaattagccaggtgtgctgttgggcacctgtaatcccagctattcaggaggctgagggaggagaatcgcttgaacccaggaggcagaggttgcagtgagctgagatcatgctactgcactccagcctgggcaacaaaagtgaaactccatctcaaacaacaataacaaactgttaacttccatgtccagtctcctgtggccacccccccccacaaccccaagtaaaagggtaacactgggcccagcagggctgctcaggtccattttgattggtcagtgctcacactctaccctgttgtatgttgtgactcccacacctgctggcccctagacactaaatgccagatgcatcccagtcctcgtaacaaccaaaatgcgtcccttgtacatttctttttctttttttttttgagatggagtcttgctgtcactcaggctggagtgcagtgctgcgatcttggctcactgcaacctccgcctcccgggttcaagtgattctcctgcctcagccttctgagtagctgggactacaggcacgcaccaccacgcctggctaatttttgtatttttttttttagtagagacggggtttcaccatgttggtcaggctggtctcgaactcctgacctcgtgatccactcacctcggtctcccaaagtgctaggattacaggcgtgagccaccacgcccagcatccctgtacctttctaaatggtggtgagttgaggctgtctgaatcccagcccatccagcccaacatccaagtcagtcctagagaggtggcccccccccaaaaaggggagtggaacccagctgtctgccttctgggttggagcttggagataggagagaaggtctgatctgttgactacttttcgccccgacctggtcttcctggggcctgctcgtatgttcccggcagctttctggtaaacttacagtaccgccgtctctaccgaagcatgaactcccagtatctgaagctgcttagctcacaggtgagtggggagagcacagctggatcaccagcagccttaggaccccagagtagcacagcaagctgggggcccttgagacttcctgtcaggacaagggaagctgaaactccgaaaggcgaagcccagggtcctgtgattggtggggtcagaatttgaacctgggtttgtccccacccatgctgtcctgctataggaggcctaggggtctgcatcagccacggagtcttaagggtgagaagagcttcattcatgccaaaaatgggccagcagaggtccagggtgggaggagaccttgcacaaggtgatataggaagcactggcagggccaagttaggactaggttctgtccagcacagtggttaatagcatgggctctggagtcacatggcctgggtgcaagtccctgtactagccacataatcttgggcaaatttcttaaatatgagcctcaggttctccatctgtaaaatggggataataatgatatctaccttcacagataaaacatttagtagaatactggacatgcagtaagtcgttagaaaacatgaaaattccctggttcgtgttatctagcttggccccttgaatttcctgaggggtaggccttgaactagggaagggctggggactgggcttgttccacacccctcatttttaccccatcctgctttagaaataccagatcctattatataatggagatgtagacatggcctgcaatttcatgggggatgagtggtttgtggattccctcaaccagaaggtaaggtagagattcctggccctgggataggggctgctgtggaggattgggagcgggtatgcctgggagtggccagctggctgcctggctctggcccacagagggcaagtgtggaggaattcccagccctaaggtcttgctggtagctgtgagcaaggatgcagctgctgtaggctgatgtctttcctggtggggcagatggaggtgcagcgccggccctggttagtgaagtacggggacagcggggagcagattgccggcttcgtgaaggagttctcccacatcgcctttctcacgatcaaggtagggactgggcctgctgagagataactgggccggaggcaaaggagcaggacccacccgtcctttccctctggctgccttttaggctgggtcatgggtcaccatctggcccctgtatgggcaagtttttttggagaggggtggggagggttctgggaagaataaagggtttgggatgaaggaattgcccccgagtgagcagttatatggggaggagggaatggtggggtcaggagctcacgaacattgctcctcagggcgccggccacatggttcccaccgacaagcccctcgctgccttcaccatgttctcccgcttcctgaacaagcagccatactgatgaccacagcaaccagctccacggcctgatgcagcccctcccagcctctcccgctaggagagtcctcttctaagcaaagtgcccctgcaggccgggttctgccgccaggactgcccccttcccagagccctgtacatcccagactgggcccagggtctcccatagacagcctgggggcaagttagcactttattcccgcagcagttcctgaatggggtggcctggccccttctctgcttaaagaatgccctttatgatgcactgattccatcccaggaacccaacagagctcaggacagcccacagggaggtggtggacggactgtaattgatagattgattatggaattaaattgggtacagcttcaaatcccgtcttctctgtggcactgggggttagagggggcactacaggctatgaatgtgggaaaagaggggctgagaggggttggggtcctgaatgacagctgccagcttggggattgagggctcagacagctgctgtggacggtgtgggggcagtggacgccctgacatcagcaggccggttcttctcaatcacctctcgcagccctttggcaaagtggagatcagccccgatggtgaggaatccctgtgttggggagaggggagcctcatttattcattcagttattgaggccagagtttagagatcaagagacagagtgtttgtctttcaggaactcaatctaatggataattccatgtcaaggtgttaaaatgaggctgtaggagtgtagactatgggtgtcaaggagggcttcttggaggaggtgacctctgagctaagacctgaacaattagtaggtattgggatgggagaagagtgctccaagaagtcacagtgtgtgcaacggcttttaggagtctaagattaaaatgggaggggcgactggtaatgggggagctggggtcaggtaatggagggcactggggagctatagagagaggggaaggccctccctccttccccatcctgcccccactcaccgcatggttcgtcaccacctcatgcacaaagttgatgccctcaggtagtgggatctgcaccccacgccaggtccgctctgtgggtgggagcaccccgctcagtctgggcccgcccagttcacccctcctttcttcctccatcctcacaccccagccttaccattgagcatgggcatcaccccaatctgcagcatggtcttcagaggggcctgtaatgggatcagctgggaggggcgagggcggaaacagggcagtgagtcagggttgggtttgcctttagctgcccgcaggtgagcagttatatgaggagggggggatggtgagggtcaggatctcacgaacccagcccagcccacccacccttccccactcacagccagcgactccagtgcagaatggttggaatagattcggaacctgcgggaaagaaaggagccctgtgggcaggaagcctggaagctccccttcctcaggccacccaggcctacctgccagaggtgtctgagttgcaggctcagatgcccacctaggcacctttccaagtgctacaactttccaggtatcctcggggcagtcattgctgccacttgggtctccttttctccaagactgctactttttatttattgagcacctcttttttttttttttttttttttttttttgagacagagtctcgctgtgtcgcccacgctggagtgcagtggcgcgatctcggctcactgctccgtctcccgggttcacgccattctcctggctcagcctcccgagtaactgggactataggtgcccgccaccaagcccagctaattttttgtgtttttagtagagacggggtttcaccgtgttagccaggatggtctcggatttcctgaccttgtgatccgcccgtctcggcctcccaaagtgctgggattacaggcgtgagccaccacgcccggcctttattgagcacttctaatgtgccagacttctgctggtagctttgcaggtgttatttattttatgtaacaaaacttcacattgcttagttcctgtcagacactaagcatatttattttctttttttatttttatttatttttgagacagcgtctcactgtgttgcccaggctggagggcagtggtgtaattttactcactgtggctttgacctccagggctcaagtcagcctcccacctcaggcttccaagtagctgggaccacaggcgtgcatcactatgaccaactaacttttaaatttttttgtagagacaggatctcactttgtagctcaggctggtatcgaactcctggcctcaagcgatctacccgccttggtctcccaaagtgttgagattacaggtgtgagccactgcacccagccaacgtgtttaaaaagttaatattagtaaactgttttaaaatacagtaccaactggtttagtcctcaaaacaagcccaaggagtgggcactattaggatttgcactaatttatagatgaggaaaatgaggccctgcaaggttaagtaatttgcctgaagtcacacagctggaaagtgtcagaagctgcctctagaacctagggtcctaacctacattatctcctttaaccttagaacagcactgtccagtcagattttctgtgaaacgttttgtatctgcaccgtctactatggtagtcactagccacatgtggctaatgaaatgtggcttagtgcaactgaaaaactatttaattataattaatttaaatgtaaatagtcacatgtggctagtatctaccatattggatagcacagccctagaaggcagatgctacttttgcctgtattaaacacatggagaaaatgaggcctagaaagacaaaatgggctgggtgcggtggctcacgcctgtaatcctagcactttgggaggctaaggtgggacgatcacttgagcccgagaattggagaccagcctggacaacaaagtgagaccccatctctacaaaaaataaaatagtcaggcatggtagtgcatgcatgcagtcccagttactcgggaggctgaggctggacgatcacttgagcccaggaggtcaaggctgcagtgagctatgattgcaccactgcactccagcttgggcaacagagtgagactctgtctcaaaaataaataaatacaataaaataaggccaagcacagtggctcatacctataatcccagcactttgggaggccggggcaggtgaatcacctgaggtcaggagtttgagaccagcctgaccaatatggtgaaaccctgtctctactaaaaatgcaaaaattagccgggcgtggtggcgcacacctgtaatcccagctactcaggaagctgaggcagaattgcctaaacccgggaggcagaggtggcagtgagtcaagaccacgctattgcactccagcctgggcaacaagagcgaaactccttctcaaaaaaaaaaaaaaaagaataataacatttttaaaaaagataaaatggcctcaaggtcacaaagctgtgttgtgctgaggtttttgtcaaaacccatgttctgatctttgctgtgtgactgtgggcatgttatttaacattgctggacccatttgttcatctctcataatacctgccctgcctgcctctgggacatgtgagaatgcagaggagtcagactttaccaaagcactttggcatgcattaacaaagacagaccccagctctcagtggcttacaggtatcactgtactttaagcgcaacatccctgtggacaggtgtgattgtcctccaatcactgaggtgcagggaagtgcgcctgcctacctgcgcaggtccagctgcgtgcgcagggccttcccccggagagccatcttggcgctgagacgggcgtcctgcaggaacatggggaggaggatgttactgacccagaaggtcagtaacccacagcccatttttccctgacccccagccagcagcccccactctgggacccgtaccatagtcatgctggacagctggacctcaggctggtctggtgggaccagggcaatggtgacgctagcagtgacagagatggtggtgccagagggcttgatggtgcagcgcggtggggccaggacccgcagctccagcttcaatggggagtcaatcactgctgggctctgggggatgagcagcaggggcgggtcaagtccctgccatttcctttggagcccccagggaagaaggggaaggaaggcaggtgcagcttctgtcctctggggactctcatattgcaaatacagagggagctctggcttccaaaactctcacatctgcatctagccttcatgcctttgccacacaaagaaacaggaatgtgttcttctctttctgcttcctaaatacatctcaatattcaggtctatctccaatccagactctttgtggatgtcctttttgcattagtatctcagcccttgccatgtcttctgtttttgatatggagtctcactttgttgcccaggctggagtgcagtggcacaatctcggctcactgcaactctgtctcccaggttcaggcgattctcccgcctcagcctcccaagtagctgagattacaggcacctgccgccatgcccggctaagttttgtatttttaatagaaacggggtttcgccatattggccaggctagtgattcgcccacctcggcctcccaaagtgctgggattacaggcatgagccaccacacccaaaccccttgccatatctttttgctctctctctcctttttttttgagacagggtctctgttgcccaggctggagtgcagtggcatgatcacggctcactgcagcctcaacctcctcagctcaaattatcctgccacatcagcctcctgaacagctgagaccacaggttcatgccatcacgcctggcttatttttgtatttgttttttgttttggtttttgcttttgtgttttcgtagagacggggtttggccatgttgcccatgctggtctcaaactcctgggctcaagtgatctgccggcttcagcctcccacagtgttgggattacaggcgtgagccaccgtgcctggccatatcttctttctctaaactgctatgccttcttctataggcagtgaaggaatactataagatgcaactgcctaatcttcaccaaacatgattctaaacactgtatatgtgttggttcctttaaacctcataataaccatgtgaggccgatattattactgccaattttgttgttgttattttttacaaatttatttttcaggctgagtcgtcatggcagagaattgcttgaacccgggaggttcaattgcagtgagccaagattgcgccactgcactccagcctgggtgacagagtgagactttgtccccccaccgaaaaaaaaagatctgactaaaaatttatttttcaatagagacagtgtctcactgtgttgcccaggctggtctcaaactcctgggctcaagcaattttcctaccttgacctctcaaagttctcagagtataggcgtgagccatcatgcccagccatatccccatttttgagatggggaaattgaggcacagataggttaagtaacttgtagaggttatgtagttactcagtttcagaactaggcttgaagcccaggcagtctgacaatagagaccctgccctgccataaattggatgatgataatgactgaattatttcttttaaaatttgtaattctgctaggtgcggtggctcacacctgtaatcctagcactttgggaggccaaaaatgggtgatcacttgagcccaggagttcaaggacagcctgagcaacataatgaaactctgtctcaacaaaatataaaaattagcggggtgtggtggcacaagcctgtaattccagctactcaagaggctgaagcaggaggatggcttgagccctgggaggcagaggttgcagtgagcctagattgtgccactgcattccaacttgggtgacaaagtgagactcttgtctcaaaaaaaaaaataaataaaatgtgtaactcttactctcctccccaatacacaaataaacaaaagtatatgtgaattattattaaagccctcacacttgcaaagcttgggttctcactaatcctcacagcagctctgcgaaggagatggggcaggaaggagcaggaaggagcagaccgcttcacagacaggaacagccatgacaaggcgagggggattggccacagacaagaggccagggccctgtctgcgtggctgccactgggggccccacctgcacccctccttggtctcactggtgtgcaggtggccctatccctgcccccgccagcactcaccagcaggacaatgctcccaaagtaggtggccctcagcagcatgtccaggtcgtggggcacctgaacaggggaatcaggagtgagggagtgagctctgtcacagaccttctcttgcccatcccacaaacaggccatgacataccttgtcccccaccagcaacagctgcagggcccccgcccggaagtagctctccatggcagagtcgaagaagaactcagagaaggccacatacaccatccgctcttcctcctgcagctggggctccactgcccggttggggaggctccagttcctctcagtcagggggaagaaggccccctggggtggggcattcacagtcagggtcaaggcagactggcctggcacctggactgacagcaggtgtctcccagccccgtgctaggcactgtggggggatggtgggaacccagctgctgttcttggaggattcacaagcacatctcttaaaaggcattggaaggaggacacctgctaccagggggcgagcccgtcagactggaggagggagggtcaggaaaggtttcagggaagaggtgacatctgagtgggccttgaaagctagaggcagtaacaacagctactgtttacatatattgtgcatactcatgcttctttgccaagtactctaagctcttcacatagatcgacttctttaatctgcataacaacgtgtgttttcttactagattatttccatttacatgttaggaaactggccaactgaaaacttatgcttagggccgtgcagctagtcagtggcagagctaggatttgaacttcaggcattctttttctctttgtagagaaggaggtctcactatgatgcccaagctggtctcaaactcctgggctcaagcgatcctctcgcctgggcctcccaaagtattgggattacaggcatgagccactgcacccgactgattctagctcccgagtctgcactctgaaactgctatactcctctgggagaccaaaggtagtggctacacactggctatgtggccttgggcaagtgacgtcacctctatgagtaagtctccacattcctaaaattaggatgatgttagtacctgactcacagggttgtgagagaatgaaatgagattatttgtatagaaatttatgtccagctccttcgggggagttggggaaaggccgtgcatgagcaaaggccctgaggtgggaagccagggtccaatttgggaaagagcagctgcaaagaaacaggatgagatataaaaggtggggccaggtaagattaacaggggctcaaatgccagacccaggaggctgaacctaattctgtagtaacagggagccatagcattctcagtaatgggagtggcctcatcagagctgtgctttaagaagtaaaatcttgcaacttagcagagaaagaggtcttgttaggaagtcagaggtcatacaccagcccaagcagctcacccggaagtccatgtccaggttgctggtggaagccacaggatccttcatgagggaatagtcaatgccaacaagctcgtccacagaactgcgcactgcaggaaggggctcaagtcactcacggctgtgtgatgtgggataaggtgcttaacctctccaggctcagaggcccacccataaaatgaggatacatccttcacagggttgtcatgagggtcaaattagttttatgtggaaagcacttagggcctggtgtgtagttaggtgctcattaatgttagttattattattactaccactatagaggtttcaaaaaaataactaaacaagatggcatgggggggccgcgcatggtggctcacacctgtaatcccagcacttagggaggtcaaggcgggcggatcacctgaggtcaggtgttcgagaccagcctggtccaccacggtgaaaccccgtctctactaaaaatacaaaaattagttgggcatggtggtgggcgcctgtaatcccagctactcaggaggctgaggcaggagaatcgcttgatcctgggaggtggaggttgcagggagccaggattgcaccactgcactccagcctgggtgacagagcgagactccatctcaaaaaaaaaaaaaaaaaaaaaagatggcatgaggttcctttcccttggtttctcctacctcctccttcgcttcccatgcctgtgtgttaggtgtgatgggaaaatacctttgccccacagtagacagaggtcatggcttagaaaaagggaattcatggccaggcacagtggctcatgcctataatcccagcactttgggaggccaaggtgggcagatcaggaggtcaggagatcgagaccatcccggccaacatggtgaaaccccgtctctactaaaacacaaaaaactagttgggcatggtggtgcacgcctgtagtcccagctactcgagatgctgaggcaggagaattgcttgaacccgggaggtggagattgcagtgagctgagatcgcgccactggactccagcctggcaacagagtgagactgtaagactccgtgcaaaaaaaaaaaaaaaagaaagaaaaagaaaaagggaattcatgttaattgagcacctattagatgctaggtgatgaagacaaatgggatgccagtgatcagcatgcacatattgaggaccttgacaactattctctcagataatcctcacagcaaccccaggaggaggcactgccagccaagtgaggaaacaagcactttgcccagacagaaatgagcacttcacccaaaatcgcacaacaagtcagctccaggggccacatttgaacccaggactgttcaacagcagggctcggaaggggcctgctctgaggtgctgcatgacagctgcacacccagactcacccgccaccaactcaccaggcacggtgtccaggagggagttgagcaggaccgtccctgcgtggtagaggacagggcagatctgcgaggtgggagccagagtcagggccttctcaaagtgagagcatgcccacccttgccaccctgcgacctgtcgctgcccacacctgctggttgaggaggaagcgcatccctgaggtgatgaacgtggagagaaaatcatacaccttcctgtgaggagaggagaggccggatgagcccagaacctgcctccaccccagtccaggtccaggagaaatcagtgactagggaaatagtggcagtaggagtcctcagcttcagcctgaataacagctcctccacgtaggttttccaagaaccaggcccaaattccctctccagtctaattctcaagacctcctgacctactctctggtcccatcagtcaaatgaatccacccacattgcctcaaacccactctgagcatccccacatccatcggcttactgatgccctcccttccgccctctgcattcctactctgtattttcccatctgagctcagatgcttcctcttccaggcagtcttcccagattcccctcctctgaatccccaaagcattttcttagtccttctctccaggccctgatatcaaatgttttttgctccagataggctctgagctccttcctgcatcctcagggactggcatacactttgtttgatgaataaataatactgacagtgtaccaacaccaggttataatccatcatcttctctcccccatcctcttccagaacaagaacaatatccccttctcagcagcaaaaataaaaaaataggccgggcacagttgctcaggcctgtaatcccagcactttggtaggccgaggcggacagaccacctgagatcaggagtttgagaccagcgtggccaatatggcgaaaccctgtctctactaaaaatacaaaaaaagtagttgggcatggtggtgcatgcctgtagtcccagctacttgggaggctgaggcaggagaatcgtttgaacccaggaggtggaggttgcagtaaaccgagatggcgccactgcactccaggctgggtgacacagtgagactccctctcaaaaaaaaaattattatttttgttattattatttagagataccaattattgagaatccagtacatggccaaatgtgcatatcagatagtcctcacagttactcttatctaagtggccagcacttaaatatacatttatcatatgccaggtgctgttctaaatttttttttttttttttttttgagatggaatcttgctctgtcaccaggctggagtgcagtggcacgatctcagctcactgcaacctccgcctcccgggttcaagcgattctcctgcctcagcctcccacgtagctgggactacaggcacgtgccaccacgcccagctaatttttgtatttttagtagagatggggtttcaccatgttggccaggatgatctcgatctgttaaccttgtgatccgcccgcccagacctcccaaattgctgggatttcaggcatgagccaccacagccagccttgttctaaatattttttacatataccaacacaaataatcctgacaacgatcttataaaataggatcttataaaatgaggatattgaggcaccaagcttcagtgacttggccacgttcacacagccaggaagtgacagagctgagctttggacccagttggtctgattcccaggcctatgcactttgcattgcgctaggcagatgagctgtggggctcgaaaagggtgagctggggttggggctggggcttacttgaaggttcccccgaaggccgcgtgcattctggagacagaggcctggcaggagacattggacactttcatccgtccagcgggatcccgggagagctccagaccagtgcggatggacacaccctcagctgaggcgttgatgtagcccccatcatagctgccaggggggttaatattcactccaggtaggagctcaattgagtcttcagtgcccccatgcatcaccatacctcttaataaggtttcacctctttccacacatcctaccaaaccttcctatcaactcgtatgaaatgcatatgcctgtttctgttacacagatgaagaaacggaaactcaggaaggctaagggggctgcccacagccccacagcacctccagccctcctgacccactctccactcccctgagggtgctgggtccttacaagaaccagtagagcagctgtctccggaagcgcagccccaaggaggcattggtgatttgaagcatcagctcctgctgtggctggaaatcgagctcggaagatgtcagttgcagctctgtgaccttcaccctacaggaggcctcagggtcagatccagggccaagaagagggaacttcccccaacgacaggaaatttgtctgctcccctttcaagtccaggcctggggaagcgggagtgggtggaatgaattcttccattgtccctcaagtgcccaacttagacttgggtggctcaaagttgaacttgggtggctgagagaggaggtcttcctgatccaggtgttaaaaatgagcttcaccccatcgcttaaaagtcttgtttgtttgtttgccaggtgcggtggtggctcatgcctgtaatcccagcactttaggaggccgaggagggcggatcacttgaggtcaggagttcgagaccagtctggccaacatagtgaaacccgtctctaccaaaaatacaaaacttagcagaccgtggtggcacgcgcctgtagtcctagctactcgggaggctgaggcaggaaaatcgcttgaactcgggatgcggaggttgcagtgagccaagatcgcgccactgcactctagcctgggcaacagaacaagactccctctcagaaaaaaaaaaaaaaaaagtcttgtttgcttgcaccccctcccctcccacaccctggggttgctacacccggtcttttaatagagtccgttcactttgcctccatcacctaagctccgtctcacatctcaattccttattccccctccctcatcctaaaccatacttagagccttcagtttctccacccctccgattaactccaccccgtgcccgagactccactctcatctattgggaagttccttgactccacctttctgttgttcttcgaccacgcctcacatccactggtcctgcttccttcttggccccctctacattttcaaggccacgcccatctgcctggtcccgcctatgatgactggcttggcctttatcttttcggccccatccggtttcttaagtcttgcctcatcgatttggccacgccccatcccactcagcctccagtctcccgagaccctgagatttctcgggccccgcctccaccgccgaggccccgccccggatcgcgaggccccgccccccacttactcagagatgttgtagtagaagtggccttctttgccccgcaggtccggaatggtgatagtctccagctcttgctccagaaagcgcagcccctcctgcttcactgaagcagcagagaaacccttacttagctcccgtgcccactgttggggcgaccccaaccccgtccgctcccgtccgtccctgtctgcccctgcgccttacccagctccagcgccttggaggtgacgcggatcttgcagcctgggaactctgcatgtgcgcctgccagcagcgctaggaagagggccccgaagagggccatggcgagcgggcctgggggtggggtggggtcgcaggagttatctgagccgcttaaacccattccttggacgtccaaccataagtgggaactagcctggatcgttaccctccagataactcttcggggaacttggaaccaataatcttgcctccatatggcagatgtggaaactgaggctcagagaggcgatgcgacttgcgttctggctcccagaggatttgggacacgggggaggggacgttcccagttccctcgtgctaccgccgcgtgatgagtttggacctccaggggaccagcccccacacccccaacaacctcccctttcctttagcggtgggcccatgcaggcttgcacgttgccacggcaacgactgcacgcgcattcttggagggtggcttgcggtctcataggcctcgcgcccggggaggagaggaggtggccgaccagaccgtgggctcccgggtctcccggctccctcaggtcctaaatctctcccattagagattctgcctggagcccccatgttagcgttctccttcatcggctctcctccccacgccggcttcagtgcaccacgcggctcggcgagggactgggaacgggatagggacgcgccccaactcactcagcggtggagctggggggcggcgcggtcacgtgggatggcgggcagctcaggggatccgggcgacggggtctggcgggcagggttgttccagccgcctttataaagccggcctccccgacccctcctcctctctgcagctctcccctcctcccttgggggctgggaggggacggggcgggacgctggcagccgggagagtggaaaaggctgcacagagccccgtgacaagcccggccgctgtctggacaagtgggagacccaagcccagggagagggaaggaaatgcaggagccggcccactcagccccaacaatcccactttgctgggaccttggttcaaattacaattatccatgtcttcctgcatgatcttgggcaagtcacttcacttgggtcactgaccctcagtttcttccttcagcgaaatgtgcacgatgataggaactacctcttgggcctttattacaaccaggtccaggcacaaagtcaaggaatattttttctttccctgccacccacaatcatctcgggacctccttgcctggctttgctatgggcccccctacctgtctctgtgtcaccacctggggaccttaaggtcccagagacctttcccacttgggaaagcaagactagacaagtgctgtcagcccaggaacataccacaccggctgaaatcagaaggaggtctgccatttatcgtggctggtggattgttttttctattttttttatttttattttttgagacggagtctcgctctgtcccccaggctggagtgcagtggcgcgatctcggctccctgcaagccccgcctcccgggttcacgccattctcctgcctcagcctccccagcagctggggctacaggcgcacgctgccacgcccggctaattttttttgtatttttagtagagacggggtttcaccgtgttagccaggatggtctcgatctcctgaccttgtgatccgcccgcctcggcctcccaaagtgctgggattaaaggcatgagccaccgcgcccggtccactggtggattttttaatgaacccttggagcaaggtgctctgaacagcatccccgcccccacccccacccccacctccatctactgcttacagggttcccggaccctaggacagggcacagagtgggtgcttgccacctttttgttgccaaatggacgaaagaaaggggaagcaataatcatgtctgctgagcatgtatttagcaccaaacactcatctaggaaggatgactaactcatcctgatttgcctaggactttccccattgtgtcttttttttctgatataatccacagattcacaaaaatagttccatttccttttttatttaattaattaattaatttttttgagacacagtcgtgctctgtcaccaggctgcagtgcggtggtgtgatcttggctcactgcaacctctgcctcctgggttcaagtgattctcctgcctcagcctcccaagtagctgggactacagccatgtgccaccacacctggctaatttttgtatttttagtggagacagggttttgccattttggccaggctggtcttgaactcctgccctcaagtgatc

SEQ ID NO: 1698 - protein, 372 aa, Homo sapiens
MHRGTQEGAMASRLLHRLRHALAGDGPGEAAASPEAEQFPESSELEDDDAEGLSSRLSGTLSFTSAEDDEDDEDEDDEEAGPDQLPLGDGTSGEDAGDPPPDGQWGSQLLARQLQDFWKKSRNTLAPQRLLFEVTSANVVKDPPSKYVLYTLAVIGPGPPDCQPAQISRRYSDFERLHRNLQRQFRGPMAAISFPRKRLRRNFTAETIARRSRAFEQFLGHLQAVPELRHAPDLQDFFVLPELRRAQSLTCTGLYREALALWANAWQLQAQLGTPSGPDRPLLTLAGLAVCHQELEDPGEARACCEKALQLLGDKSLHPLLAPFLEAHVRLSWRLGLDKRQSEARLQALQEAGLTPTPPPSLKELLIKEVLD

SEQ ID NO: 1699 - DNA, 688 bp, Homo sapiens
taggctagggtgcgggctgggtgttgaatcggccgaggcatgaaggcactcctggccctgccgctgctgctgcttctctccacgcccccgtgtgccccccaggtctccgggatccgaggagatgctctggagaggttttgccttcagcaacccctggactgtgacgacatctatgcccagggctaccagtcagacggcgtgtacctcatctacccctcgggccccagtgtgcctgtgcccgtcttctgtgacatgaccaccgagggcgggaagtggacggttttccagaagagattcaatggctcagtaagtttcttccgcggctggaatgactacaagctgggcttcggccgtgctgatggagagtactggctggggctgcagaacatgcacctcctgacactgaagcagaagtatgagctgcgagtggacttggaggactttgagaacaacacggcctatgccaagtacgctgacttctccatctccccgaacgcggtcagcgcagaggaggatggctacaccctctttgtggcaggctttgaggatggcggggcaggtgactccctgtcctaccacagtggccagaagttctctaccttcgaccgggaccaggacctctttgtgcagaactgcgcagctctctcctcaggagccttctggttccgcagctgcactttgccaactc

SEQ ID NO: 1700 - DNA, 477 bp, Homo sapiens
  misc_feature (438)..(439): n is a, c, g, or t
agcggccgctcgcgatctagaaccggacgcgtgggtcgaacccacgcgtccgacgcggggccggagcgcctattagccgccaggacctcggagcgccccgaccacccctgagcccctctggcttcggagccccccagcaccccttcccgggtcccctcgcccaccctaatccactctccctccctttcccggattccctcgctcaccccatcctctctcccgccccttcctggattccctcacccgtctcgatcccctctccgccctttcccagagacccagagcccctgaccccccgcgccctccccggagccccccgcgcgtgccgcggccatggcggccgtgcgcggggcgcccctgctcagctgcctcttggcgttgctggccctgtgccctggagggcgcccgcagacggtgctgaccgacgacgagatcganngagttcctcgaggggcttctgtcagagctagaacctga

SEQ ID NO: 1701 - DNA, 614 bp, Homo sapiens
tacggctaggtacgaggctgggtttggtgcgggcgcggcagcgaacaaaggagcagggcgccgcgcagggacccgccacccacctcccggggccgcgcagcggcctctcgtctacgggcaccatgaccgccaacggcacagccgaggcggtgcagatccagttcggcctcatcaactgcggcaacaagtacctgacggcctgaggcgttcgggttcaaggtgaacgcgtccgccagcagcctgaagaagaagcagatctggacgctggagcagccccctgacgaggcgggcagcgcggccgtgtgcctgctgcagccacctgggccgctacctggcggcggacaaggacggcaacgtgacctgcgagcgcgaggtgccctggtcccgactgccgtttcctcatcgtggcgcacgacgacggtcgctggtcgctgcagtccgaggcgcaccggcgctacttcggcggcaccgaggaccgcctgtcctgcttcgcgcagacggtgtcccccgccgagaagtggagcgtgcacatcgccatgcaccctcaggtcaacatctacagcgtcacccgtaagcgctacgcgcacctgagcgcgcggccggccgacgagatc

SEQ ID NO: 1702 - DNA, 2644 bp, Homo sapiens
agcggccgctgaattctagccaggatttctctcttcctatttcaggaggactctcacaggctcccacagcctgtgttaagctgaggtttcccctagatctcgtatatccccaacacatacctccacgcacacacatccccaagaacctcgagctcacaccaacagacacacgcgcgcatacacactcgctctcgcttgtccatctccctcccgggggagccggcgcgcgctcccacctttgccgcacactccggcgagccgagcccgcagcgctccaggattctgcggctcggaactcggattgcagctctgaacccccatggtggttttttaaacacttcttttccttctcttcctcgttttgattgcaccgtttccatctgggggctagaggagcaaggcagcagccttcccagccagcccttgttggcttgccatcgtccatctggcttataaaagtttgctgagcgcagtccagagggctgcgctgctcgtcccctcggctggcagaagggggtgacgctgggcagcggcgaggagcgcgccgctgcctctggcgggctttcggcttgaggggcaaggtgaagagcgcaccggccgtggggtttaccgagctggatttgtatgttgcaccatgccttcttggatcggggctgtgattcttcccctcttggggctgctgctctccctccccgccggggcggatgtgaaggctcggagctgcggagaggtccgccaggcgtacggtgccaagggattcagcctggcggacatcccctaccaggagatcgcaggggaacacttaagaatctgtcctcaggaatatacatgctgcaccacagaaatggaagacaagttaagccaacaaagcaaactcgaatttgaaaaccttgtggaagagacaagccattttgtgcgcaccacttttgtgtccaggcataagaaatttgacgaatttttccgagagctcctggagaatgcagaaaagtcactaaatgatatgtttgtacggacctatggcatgctgtacatgcagaattcagaagtcttccaggacctcttcacagagctgaaaaggtactacactgggggtaatgtgaatctggaggaaatgctcaatgacttttgggctcggctcctggaacggatgtttcagctgataaaccctcagtatcacttcagtgaagactacctggaatgtgtgagcaaatacactgaccagctcaagccatttggagacgtgccccggaaactgaagattcaggttacccgcgccttcattgctgccaggacctttgtccaggggctgactgtgggcagagaagttgcaaaccgagtttccaaggtcagcccaaccccagggtgtatccgtgccctcatgaagatgctgtactgcccatactgtcgggggcttcccactgtgaggccctgcaacaactactgtctcaacgtcatgaagggctgcttggcaaatcaggctgacctcgacacagagtggaatctgtttatagatgcaatgctcttggtggcagagcgactggaggggccattcaacattgagtcggtcatggacccgatagatgtcaagatttctgaagccattatgaacatgcaagaaaacagcatgcaggtgtctgcaaaggtctttcagggatgtggtcagcccaaacctgctccagccctcagatctgcccgctcagctcctgaaaattttaatacacgtttcaggccctacaatcctgaggaaagaccaacaactgctgcaggcacaagcttggaccggctggtcacagacataaaagagaaattgaagctctctaaaaaggtctggtcagcattaccctacactatctgcaaggacgagagcgtgacagcgggcacgtccaacgaggaggaatgctggaacgggcacagcaaagccagatacttgcctgagatcatgaatgatgggctcaccaaccagatcaataatcccgaggtggatgtggacatcactcggcctgacactttcatcagacagcagattatggctctccgtgtgatgaccaacaaactaaaaaacgcctacaatggcaatgatgtcaatttccaggacacaagtgatgaatccagtggctcagggagtggcagtgggtgcatggatgacgtgtgtcccacggagtttgagtttgtcaccacagaggcccccgcagtggatcccgaccggagagaggtggactcttctgcagcccagcgtggccactccctgctctcctggtctctcacctgcattgtcctggcactgcagagactgtgcagataatcttgggtttttggtcagatgaaactgcattttagctatctgaatggccaactcacttcttttcttacactcttggacaatggaccatgccacaaaaacttaccgttttctatgagaagagagcagtaatgcaatctgcctccctttttgttttcccaaagagtaccgggtgccagactgaactgcttcctctttccttcagctatctgtggggaccttgtttattctagagagaattcttactcaaatttttcgtaccaggagattttcttaccttcatttgcttttatgctgcagaagtaaaggaatctcacgttgtgagggtttttttttttctcattt

SEQ ID NO: 1703 - protein, 555 aa, Homo sapiens
MPSWIGAVILPLLGLLLSLPAGADVKARSCGEVRQAYGAKGFSLADIPYQEIAGEHLRICPQEYTCCTTEMEDKLSQQSKLEFENLVEETSHFVRTTFVSRHKKFDEFFRELLENAEKSLNDMFVRTYGMLYMQNSEVFQDLFTELKRYYTGGNVNLEEMLNDFWARLLERMFQLINPQYHFSEDYLECVSKYTDQLKPFGDVPRKLKIQVTRAFIAARTFVQGLTVGREVANRVSKVSPTPGCIRALMKMLYCPYCRGLPTVRPCNNYCLNVMKGCLANQADLDTEWNLFIDAMLLVAERLEGPFNIESVMDPIDVKISEAIMNMQENSMQVSAKVFQGCGQPKPAPALRSARSAPENFNTRFRPYNPEERPTTAAGTSLDRLVTDIKEKLKLSKKVWSALPYTICKDESVTAGTSNEEECWNGHSKARYLPEIMNDGLTNQINNPEVDVDITRPDTFIRQQIMALRVMTNKLKNAYNGNDVNFQDTSDESSGSGSGSGCMDDVCPTEFEFVTTEAPAVDPDRREVDSSAAQRGHSLLSWSLTCIVLALQRLCR

SEQ ID NO: 1704 - DNA, 523 bp, Homo sapiens
cggccgctccaacatcagaatcaatatttcttaccaatgtcaaatgtttttaatatcttctagttcagaattgatattttgagaaaaatacatgtgagtcattttttctgtttctcttttctcttaacgattatcactgtaattctgaatctgaaaggtaaaacaattagtcaaaatattattgccatcattctacctgtgttatgaaactacttattcatagttaatactcattaacacttacatttccataaagaaaactcaagtattaataaaagagactttactggcttaagagggctgtgaaagatttttgatagtgaatcatgaccctaagggagagatttgtgtgataaaagtattgtatataatagatcagcgatttttgtaaggcaaacagaatttgtaagttggcagatcttcctaagttgcaaaatgtaatgatgagcttggtggagaagaatgagtcgttcttggaatacctatgtgcagccactacccatctcaatgtcaccttgtttgc

SEQ ID NO: 1705 - DNA, 2755 bp, Homo sapiens
attgtctgggaattgcagccgcggggcgggcggcggcggcggcggcggcggccgggacccagcgggccaggtggggacggcgcggagcgggtgcgggagatgccgtgcgggactggggccacctgagccgcccgcctcgtccccgccttctgtgggaaggatgtgcgcgcggatggccggtcgcacaagagcggcccctcgggggccctacggcccctggctctgcctcctggtggccctcgccctggacgtcgtgagagtggactgtggccaggctcccctggaccctgtctacctgcatgtgacagccgcccgcccagcccagcccacactctggactgccaagctagaccgcttcaagggctccaggcaccacaccaccctcatcacctgccaccgtgctgggctcacagagccagattccagcagtccccttgaactgtctgagttcctatgggtggactttgtggtggagaatagcactggtgggggcgtagcggtcactcgccccgtcacgtggcagctggagtacccaggccaggcccctgaagcagagaaggacaaaatggtgtgggaaatcctggtgtctgagcgggacatcagagcccttatcccactggccaaggctgaggagctggtgaatacagcaccactgactggagtgccccagcatgtccccgtgcgccttgtcactgtggacggcgggggggccttggtggaggtgacagagcatgtcggctgcgagtctgccaacacacaggtcctgcaggtgtctgaggcctgtgatgccgtgttcgtggctggcaaggagagccggggcgcccggggggtgcgagtggacttctggtggcgccggctccgcgcctcgctgcggctgaccgtgtgggccccgctgctaccgctgcgtatcgagctcaccgacaccaccctcgagcaggtccgcggctggagggtacctggccctgctgaagggcctgcggaacccgctgcagaggcgtcagatgaggccgagcggcgcgcccgtggctgccacctgcagtaccagcgggccggtgtgcgcttcctcgcccccttcgcggcccacccgctggacggcggccgccgcctcacgcacctgcttggccccgactggctgctagacgtgtcccacctcgtggcgccacacgcccgcgtgctggactcgcgtgtagcctctctggagggtggccgtgtcgtggtgggccgggagcccggtgtcacctccattgaggtgcgttccccactgtctgactccatcctgggggagcaggcgctggctgtgacggacgacaaggtctcagtgctggagctgagggtgcagccagtgatgggcatctcgctgaccttgagccggggcactgcccaccccggggaggtcacagctacgtgctgggcacagtcagcccttcccgccccaaagcaggaggtggccctctccctatggctgtccttctctgatcacactgtggccccagctgagctctacgaccgccgtgacctgggactgtccgtctcagccgaggagcctggtgccatcctgccagctgaggagcagggtgcccagctcggggtggtggtgagtggggcaggcgccgaggggctgccgctgcatgtggctctgcacccgcccgagccctgccgccggggccgccaccgtgtgcctctggcctctggcaccgcctggctggggctgccccctgcctccactccagcccctgctctcccatccagccctgcttggagcccaccagccacagaagccaccatgggtggtaaacggcaggtggcaggcagtgtcgggggcaacacaggtgtgaggggcaagtttgagcgggcagaggaggaggccaggaaggaggagaccgaagccagggaggaggaggaggaagaggaggaggagatggtccctgcccctcagcatgtcactgagctagagctgggcatgtacgccctgctgggagtcttctgcgtggccatcttcatcttcttggtcaatggtgtggtcttcgtcctgcgctatcagcgcaaagaacctcccgacagtgccactgaccccacctccccccagccccacaactgggtctggctgggcactgaccaggaggaactgagccgccagctggaccggcagtcccctggcccgcccaagggggaggggagctgcccctgtgagagtgggggaggaggggaggcccctaccctggcccctggccctcctgggggcaccaccagctcctcaagcaccctggcccgaaaggaggctggggggcggcggaagcgagtagagtttgtgacatttgtgccagcccctccagcccagtcacctgaggagcctgtaggggcccctgctgtgcagtccatccttgtggcaggcgaggaggacatccgctgggtgtgtgaggacatggggctgaaggaccctgaggagcttcgcaactacatggagaggatccggggcagctcctgaccctccacagccacctggtcagccaccagctggggcaacgagggtggaggtcccactgagcctctcgcctgcccccgccactcgtctggtgcttgttgatccaagtcccctgcctggtcccccacaaggactcccatccaggccccctctgccctgccccttgtcatggaccatggtcgtgaggaagggctcatgccccttatttatgggaaccatctcattctaacagaataaaccgagaaggaaaccagaaaaaaaaaaaaaaaaaaa

SEQ ID NO: 1706 - protein, 774 aa, Homo sapiens
MCARMAGRTRAAPRGPYGPWLCLLVALALDVVRVDCGQAPLDPVYLHVTAARPAQPTLWTAKLDRFKGSRHHTTLITCHRAGLTEPDSSSPLELSEFLWVDFVVENSTGGGVAVTRPVTWQLEYPGQAPEAEKDKMVWEILVSERDIRALIPLAKAEELVNTAPLTGVPQHVPVRLVTVDGGGALVEVTEHVGCESANTQVLQVSEACDAVFVAGKESRGARGVRVDFWWRRLRASLRLTVWAPLLPLRIELTDTTLEQVRGWRVPGPAEGPAEPAAEASDEAERRARGCHLQYQRAGVRFLAPFAAHPLDGGRRLTHLLGPDWLLDVSHLVAPHARVLDSRVASLEGGRVVVGREPGVTSIEVRSPLSDSILGEQALAVTDDKVSVLELRVQPVMGISLTLSRGTAHPGEVTATCWAQSALPAPKQEVALSLWLSFSDHTVAPAELYDRRDLGLSVSAEEPGAILPAEEQGAQLGVVVSGAGAEGLPLHVALHPPEPCRRGRHRVPLASGTAWLGLPPASTPAPALPSSPAWSPPATEATMGGKRQVAGSVGGNTGVRGKFERAEEEARKEETEAREEEEEEEEEMVPAPQHVTELELGMYALLGVFCVAIFIFLVNGVVFVLRYQRKEPPDSATDPTSPQPHNWVWLGTDQEELSRQLDRQSPGPPKGEGSCPCESGGGGEAPTLAPGPPGGTTSSSSTLARKEAGGRRKRVEFVTFVPAPPAQSPEEPVGAPAVQSILVAGEEDIRWVCEDMGLKDPEELRNYMERIRGSS

SEQ ID NO: 1707 - DNA, 942 bp, Homo sapiens
aggtgagcggttgctcgtcgtcggggcggccggcagcggcggctccagggcccagcatgcgcgggggaccccgcggccaccatgtatgtgggctatgtgctggacaaggattcgcccgtgtaccccggcccagccaggccagccagcctcggcctgggcccgcaagcctacggccccccggccccgcccccggcgcccccgcagtaccccgacttctccagctactctcacgtggagccggcccccgcgcccccgacggcctggggggcgcccttccctgcgcccaaggacgactgggccgccgcctacggcccgggccccgcggcccctgccgccagcccagcttcgctggcattcgggccccctccagactttagcccggtgccggcgccccctgggcccggcccgggcctcctggcgcagcccctcgggggcccgggcacaccgtcctcgcccggagcgcagaggccgacgccctacgagtggatgcggcgcagcgtggcggccggaggcggcggtggcagcggtaagactcggaccaaggacaagtaccgcgtggtctacaccgaccaccaacgcctggagctggagaaggagtttcattacagccgttacatcacaatccggcggaaatcagagctggctgccaatctggggctcactgaacggcaggtgaagatctggttccaaaaccggcgggcaaaggagcgcaaagtgaacaagaagaaacagcagcagcaacagcccccacagccgccgatggcccacgacatcacggccaccccagccgggccatccctggggggcctgtgtcccagcaacaccagcctcctggccacctcctctccaatgcctgtgaaagaggagtttctgccatagccccatgcccagcctgtgcgccgggggacctggggactcgggtgctgggagtgtggctcctgt

SEQ ID NO: 1708 - protein, 265 aa, Homo sapiens
MYVGYVLDKDSPVYPGPARPASLGLGPQAYGPPAPPPAPPQYPDFSSYSHVEPAPAPPTAWGAPFPAPKDDWAAAYGPGPAAPAASPASLAFGPPPDFSPVPAPPGPGPGLLAQPLGGPGTPSSPGAQRPTPYEWMRRSVAAGGGGGSGKTRTKDKYRVVYTDHQRLELEKEFHYSRYITIRRKSELAANLGLTERQVKIWFQNRRAKERKVNKKKQQQQQPPQPPMAHDITATPAGPSLGGLCPSNTSLLATSSPMPVKEEFLP

SEQ ID NO: 1709 - DNA, 214 bp, Homo sapiens
  misc_feature (47)..(47): n is a, c, g, or t
  misc_feature (93)..(93): n is a, c, g, or t
  misc_feature (105)..(105): n is a, c, g, or t
  misc_feature (192)..(192): n is a, c, g, or t
ccaagatgtccattgtggcgtccgcccagcctggcggtgagcccctntgcaccgtggacgtgtgagggaggtggcacgggccagggcgcgggngccgccagccgnacttctgaggagaccagcagtcatgcatcgtgcaccacagtgtcaggcctccaacccatgctccttccctgtggccaacctgtgggnccggccttagggtggaggcagg

SEQ ID NO: 1710 - DNA, 567 bp, Homo sapiens
ctagtcagacggtgttatcggacgaggcagtgctgcgaaacacgtgggtcccgggcgcgtttcgggtgctggcggctgcagccggagcttcaaacctaagcagctggaaggaaccatggccaactgtgagcgtaccttcattgcgatcaaaccagatggggtccagcggggttttgtgggagagattatcaagcgttttgagcagaaaggattccgccttgttggtctgaaattcatgcaagcttccgaagatcttctcaaggaacactacgttgacctgaaggaccgtccattctttgccggcctggtgaaatacatgcactcagggccggtagttgccatggtctgggaggggctgaatgtggtgaagacgggccgagtcatgctcggggagaccaaccctgcagactccaagcctgggaccatccgtggagacttctgcatacaagttggcaggaacattatacatggcagtgattctgtggagagtgcagagaaggagatcggcttgtggtttcaccctgaggaactggtagattacacgagctgtgctcagaactggatctt

SEQ ID NO: 1711 - DNA, 350 bp, Homo sapiens
  misc_feature (29)..(29): n is a, c, g, or t
  misc_feature (72)..(72): n is a, c, g, or t
  misc_feature (118)..(118): n is a, c, g, or t
  misc_feature (143)..(143): n is a, c, g, or t
cgggaagcgcggcggggcctccagaccgnggcgggcttaagggtgacatctgcgctttaaagggtccgggtnagctgactcccgactctgtggagtctagctgccagggtcgcggcantgcggggagagatgactggggagcnacccagcacggcgctcccggacagacgctgggggccgcggattctgggcttctggggaggctgtagggtttgggtgtttgccgcgatcttcctgctgctgtctctggcagcctcctggtccaaggctgagaacgacttcggtctggtgcagccgctggtgaccatggagcaactgctgtgggtgagcgggagacagatcggctcagt

SEQ ID NO: 1712 - DNA, 387 bp, Homo sapiens
  misc_feature (4)..(4): n is a, c, g, or t
  misc_feature (36)..(36): n is a, c, g, or t
  misc_feature (50)..(50): n is a, c, g, or t
  misc_feature (56)..(56): n is a, c, g, or t
  misc_feature (60)..(60): n is a, c, g, or t
  misc_feature (198)..(198): n is a, c, g, or t
  misc_feature (222)..(222): n is a, c, g, or t
ggcncgacccgagcagccggttccctcctctccagnccccctcctcattncacccncgcngcctggcccagcgacccgtcccttcgtctccccgcggaatggggccggcactgctcagggtcgcgcgccctggacccagctcgctctcggtctcgcgctgtcaggactgcccggctcgcgccgcctcgcgctctgccntcagtcaagtggcgccgaagtccngtttaagcggcggcggcggttcctgtttccgtttcttcctctccgttcggtcgggagtagcatcctccactcaagccacccttcccactcccccatcgtggggcaagctgcggctgaaggggctgtggctttggcagctgcgacggggagcggcggagaacgctt

SEQ ID NO: 1713 - DNA, 843 bp, Homo sapiens
gcatataggatcgagcagggttagatcggacgagggccgccggtctgttaggctggagtagcgctagggagaatccctgcaggtaatatttgacttttgcttcatattaatctgagtggaaaataaaagggccctcttctcctctcgcttccctgccgggcaggcgccatggcggaagcctcggcgacgggcgcctgcggagaggcgatggcagcggcggaaggctcctcgggcccggcgggcttgactctgggccggagcttctcgaactaccggcccttcgagccccaggcgttgggcctcagcccgagctggcggctgacgggcttctccggcatgaagggctgaggctgcaaggtcccgcaggaggcgctgctcaaactcctggcgggactgacgcggccggacgtgcggcccccgctgggccggggcctggtgggtggccaggaagaggcgtcccaggaagccggcctgccggcaggagcgggccccagccccacctttccagccctgggcatcgggatggactcctgcgtcatccccctgaggcacgggggcctgtcactggtgcagaccacggacttcttttaccccttggtagaagatccctacatgatggggcgcatagcttgtgccaacgtgctgagtgacctctacgccatggggattactgagtgtgacaacatgttgatgttactcagcgtcagccagagtatgagtgaggaggaacgcgaaaaggtaacgccactcatggtcaaggctttcgggatgcggtgagggaagagggccggcgtgacggtgggcaacggtggtcaccctggatatatcggggggtggcccggt

SEQ ID NO: 1714 - DNA, 764 bp, Homo sapiens
ttaggctaggtgcgaggccgggtgtttatcggccgagcgaatctgagacacttatgttcaattggatgtatctgttcaaatttattcccacgtgacgtggaagtccttcgttggatgtcacaacactacatttaaggttggtaaggatgacttggaggtccatggttttcattaccaacattttaagattctgaatgtcgatggagtctcactgaagagtcaccaaaggtacctgccctcctcccctgctggaagtgtcagttggagactgtcccaagggtgctgaagaatccagtggcaggggttctggctgctttccatctgagtgtgggatgggaggggtgttcatgatcatttggatatagcaatctactctgagaaatggaacacaaggagttacctatcactttcacttataattccaaaagatgactacaaccatgtccatgctcagattcaaacagttttccatatcacttttgggtggtaagatgatttacagttctttttttaattggcagcaccactaaccattccttacattcttttcgtcatgtgtggttccttttatttaacccgcagccgacatcgtagttctggtaatggtttggttttacagagctgttgcatgacttatgttaccatcctataaaaccactatattaaacatgggataactcgtgctttttatgaattaggcttttttgaacatcctgtgtcgggatcaaatgtgttttcactttgggaacagaagctctgtaggg

SEQ ID NO: 1715 - DNA, 620 bp, Homo sapiens
  misc_feature (386)..(386): n is a, c, g, or t
  misc_feature (540)..(540): n is a, c, g, or t
ctggcccgggcggcggaggcgctctcacttccctggagccgcccgcttgcccgtcggtcgctagctcgctcggtgcgcgtcgtcccgctccatggcgctcttcgtgcggctgctggctctcgccctggctctggccctgggccccgccgcgaccctggcgggtcccgccaagtcgccctaccagctggtgctgcagcacagcaggctccggggccgccagcacggccccaacgtgtgtgctgtgcagaaggttattggcactaataggaagtacttcaccaactgcaagcagtggtaccaaaggaaaatctgtggcaaatcaacagtcatcagctacgagtgctgtcctggatatgaaaaggtccctggggagaagggctgtccancagccctaccactctcaaacctttacgagaccctgggagtcgttggatccaccaccactcagctgtacacggaccgcacggagaagctgaggcctgagatggaggggcccggcagcttcaccatcttcgcccctagcaacgaggcctgggcctncttgccagctgaaatgctggactccctggtcagcaatgtcaacattgagctgctcaatgccctccgctaccatatggtgg

SEQ ID NO: 1716 - DNA, 7194 bp, Homo sapiens
agatctctaccgagggcagagacctacctccccgcagtgctacaagtggggcgccggaagagccccaggcgtgcagaagctcacaaaaggccacccgtcctcggtccattcatttttgttcactgttgattcagccccattcattgatgggctggggccgtgcgctgagcgcccacagtcgatggggaaaggggctctgaccgacagtccccacgccgggcgacaagtgctgtcccagcgttatcagtcgggcgccttgccagccgaaagggcctgtctaaattcgtttcctgtcccctaactcatcccggcgctggctggcctggagagggtaggatggggcggcgccgagaatggccgttatgaggaccctaagaggtgagaccctctcgccttctggggtgggggggtcccgtcctttcccccactgaggacagaggcccgcccagcgatctgagcatgtgtggacgtcaatcttgcagcccctcttccaggccccctccccagccttgcagggctcaggttacccctggcctttcctaaaggtcactcattcctcttgacgtttgcaaaaggggaatgtaatcctggggtggggggagacccctcatctgtagcccctcccttgctcctcccaaagggtggaattagaacagggactgttattgggagacagaaagtgggggatagtagttgacctttggtaagggggcaggtgcccagggccagaggcttctgcttcaggctgtagtgggcacttggctgccagcccagtgtgaaggggggaggatggagagaaagagaggcggggctggctggggaccgagtggctcagggataaatgcgcagcctgagagggggtgagctgacactgtcccagctgccacctagactcggagctccatccaaacctccagcgaagacatcccaggtcgggtgaatcttccagccctgggggtggaggtagtaaagggtgagcatggtattggcttggaggaagtgggggacatttctgctttttttcctcctgggactggagatgcttgaaaaagctgggggaaggggcggctggagcaagcagatgggacaaactctgggaacaccgaaggatctagggaaaggaggctgtgaggagggcagcagggatggatagaaaagggcagctagagctggaacctgatagggaattgggggcccaaggagatttcggagcaggaaaatgagaaccagaaaggatttgaaggccaccagccatggagaacagactgcttgaccagaggggtggaaggagaaggcctaagtggaggcttgggggaggtgggggcttggtgagcggtggcatcccaggagctatagataagaggcccctggattcttaggatgggagggtggaataagagctgttctgagtgggggagggggctgcgcctgcctctttggtctgtgacctttttgtagggtatttttagctccagcacctgccttcttggagtggggaagaatcttaaagggcaagggatttctggttccttaagagatcaactgtctacactcactcacacctcctgtcctgcagccatggccatgcagaaaatctttgcccgggaaatcttggactccaggggcaaccccacggtggaggtggacctgcacacggccaagggtaacacaaggcccattggataggctcgctccgaagaccccaaccctttggcctttgcccccagttctgtgccatatcctctcctttctctcgggttccctttcccagacttcttcccaagcccccttcttccaacgtggaaccagagctggaagctaggagaagcaggagtctctctctgcactgcctcctgtccctgagctcagagaggacacctcagccctttgagaggtagagagactccctgtgaggtccttttttttgttttgttttgttttgagatggagtctcgctctgtggcccgggctggagtgcagtggtgcaatctcagctcactgcaacctctgcctcccgggtttaagtgattcttgtgcctcagcctcccaagtagctgggattacaggcctgtgccatcacgcccagctaattttttttttttttttgagatggagtttcactctgtcgcccaggctggagtgcagtggcgcgatctaggctcactgcaagctccgcctcccgggttcacgccattctcctgcctcagcctcccgagtagctgggactacagctaattttttgtatttttagtagagatggggtttcacggtgtcagccaggattgtctcgatctcctgatctcgtgatccgcccgccttggcctcccaaagtgctgggattacaggcgtgagccaccgcgcccggcctcagctaatttttgtatttttagcagagacggtttcgccatgttagccaggctggtcttgaactcctgatctcaagtgatccacctgcctaggcctctcaaagtgctgggattacaggcatgggccaccgcgcccagccatccctgtgatcttccaattcctcctgtcccaggccgattccgagcagctgtgcccagtggggcttccacgggtatctatgaggctctggaactaagagacggagacaaaggccgctacctggggaaaggtgaggagacaccagcgcagaaggagcctgtgtgggcggctttaggacatgggtgcacaatgggtagaggactggaacccccaaggctcttgaggagctggggtccacagaaaggggcccagttgattgagctccaaaactcatcctctggcctgtctaggagtcctgaaggctgtggagaacatcaacaatactctgggccctgctctgctgcaaaaggcaagtggggaagcccgctcgctgcagcctcctccccatgcccctgctccctcagcccagacaggcctctcccgaaacattttcccttatccttcccctgcatgtgccctgacttctgagaaatctgacctctgctctcccttctcaaactcaccttccagaaactaagcgttgtggatcaagaaaaagttgacaaatttatgattgagctagatgggaccgagaataagtgtgagtgaagggctagcggtggggaagggatgaggtgtgggagagatggcgagaggccatggggtgaggcctgatgggttatttctgggtcccccattttgggtcacaccgcagctggatggatttgtgttcattccacaggcatttcctatgcctgccttctgccaggcctgggccgggctgtggacacagacatgcagcggacacattcccccgggtgggggttcccagggctactcaggctgttggggagagatctgttaaccaattcttcatgctcagtggtttggagctctggcgtcttcctggagtagccaccccaaaccctgcagaagctctcatcctttcttcccgcttgcctccttccagccaagtttggggccaatgccatcctgggcgtgtccttggccgtgtgtaaggcgggagcagctgagaagggggtccccctgtaccgccacatcgcagatctcgctgggaaccctgacctcatactcccagtgccagtgagtgcagctacccgcccttcccagatctcgcctggacagagccaaccccgcccagccaggttggcccccctggaaaatccacctttcagaccagctcctaagaagcagtttcctgaaattgaatctctcctgctgtggtcccacccctccctctcttccacaatccaaaccttccctgaaggctctatgtgcttccttccctgccatataacccagttccttcccattccaatcctaggctcgataactccagcctcgttccacaccccccaccaccctacacccaaatcatattgagagtttctttgaggcaaagatcttggcatttctttgtatcttcttgagtccttcttaaaccagtgccttcttgatgaatggaaactctttgaatttaatctcaataataatgttaccatttcttgttacttactaggaggattgcataagagcatggtctctagagatagattgctgggtttgaatcctggctctgcctgttattagttgtatgattttaggcaagttctttaactgctctgtctcagtttccccatctgtaaaatggggggtaataacgataccaatgaatagaggtgttttgagaatgaaatgggctaatacatgtaaagtacttagtgcgtggcatgtagtaagtgctatataaaagtgttagctattatatactaggcacatgctaagaactttacattcaatttctctaattttcagcaaaagatcctacagggaagtaggtgctatccccattttacagaaatgaggaaagagaggctgggcacagtcgtcacgcctgtaatcccagcacttcgggaggccgaggcgggcagatcacaaggtcaggagttcgagaccagcctgaccaacatggtgaaaccccgtctctactaaaaatacaaaaattagccaggcatggtggcacccacctatagtcccagctactagggaggctaaggcaggagaatcacttgaacccgggaggcggaggttgcgccattgcactccagcctggtgacaaagtgagactccgtctcaaaaaaaaaaaaaaaaaaagaaagaaatgaggaaagaggctcttgagcaaaactactcatcctagaccactgagctagtaagtagggaagccaggtttccaccccaacaccccccgcccctgtcccttcttgagctctcatgccccggcccaggtccagacaccctctccccatctcaggccttcaatgtgatcaacgggggctcccatgctggaaacaagctggccatgcaggagttcatgattctgcctgtgggagccagctccttcaaggaagccatgcgcattggcgccgaggtctaccaccacctcaagggggtcatcaaggccaagtatgggaaggatgccaccaatgtgggtgatgaaggtggcttcgcacccaacatcctggagaacaatgagggtcagtgctgagcaccctggggggcagaccccctggatctccacatgggcaggggaggctgcagacaaggggacactggagtctcaggtcctttcttggtcctcccccagccctggagctgctgaagacggccatccaggcggctggttacccagacaaggtggtgatcggcatggatgtggcagcatctgagttctatcgcaatgggaagtacgatcttgacttcaagtcgcctgatgatcccgcacggcacatcactggggagaagctcggagagctgtataagagctttatcaagaactatcctggtgaggcgttcgggtgtcccagtgttcctgcccgaatcccgtgcagctgcctaatatactgatttcagtgacctgctttgccatcgacttggatccttccaattcttagccccattaaaatccccatttaagctcttctgccctgtcacccctccatgaggctccttctgacctctagccgtgtctctgccctgtctctgccttgtctctgccctgtctctgctctgtctctgccctgtctctgccctgtctctgccctgtctctgctctgtctctgccctgtctctgccctgtctctgctctgtctctgccctgtctctgctccaaaccccaccagtggtctccatcgaagacccctttgaccaggatgactgggccacttggacctccttcctctcgggggtgaacatccagattgtgggggatgacttgacagtcaccaaccccaagaggattgcccaggccgttgagaagaaggcctgcaactgtctgctgctgaaggtcaaccagatcggctcggtgaccgaatcgatccaggcgtgagtgcctcctgaccctgaggctcaccatagcctgcctctgccccagctctgcccactccagctacagtcttacccaccaactccaagcttacctttcccctggcacctgacttacccacaccttgatctcaagactttgtttgactaatccttggcctgactccaagagctttgcccctgtggctctgtcatgaccccccacccccagcccacaccattcctctctcagattccgctgttctcagcagcatctcaagagcccgaaatcaagataagtcttttcctctcctacttcccaaagaacttagtcactgccctccctgcagagtgcttgctacccaaaacagaagggagaggcccacccaacccctgctttcccactgaggaggttctagaaggccacatcaaatgtcctctccactcaggtgcaaactggctcagtctaatggctggggggtgatggtgagccaccgctctggggagactgaggacacattcattgctgaccttgtggtggggctctgcacaggacaggtacttgtagcttctctctactgagtgtctcaccaagttttcttggggtccctggcctcctgcctttgaggttaatgctcccttggggccaggtccaacccctcctttccagcctcacctaaccctccaaattcttcttccctcatcagatcaagactggcgccccctgccgctcggagcgtctggccaaatacaaccaactcatgaggtacagcgggaacagtgggcctgggcattggggtgctggaggctgttaggttggaagttcagcagccctaaccttgcctgcattctaggatcgaggaggctcttggggacaaggcaatctttgctggacgcaagttccgtaacccgaaggccaagtgagaagctggaggctccaggactccactggacagacccaggtcttccagacctgcttcctgaaataaacactggtgccaaccaagacagctgtgtgcttctttgtgggagctaggggatgctggtttctgggctgagctggggaaaacaggaggtggcgagatgggggcggggaggggaggcaaatagatatgtaacctgctaggacaaagaggaggtgagggactcacagaggaagctgggtggttctagaacaacagaggtgttcacatttccaaaggaggtaggggaagcagatgctatatggtaaaatgaagctgcagagttgccaatggagccgggcatggtggcgctcgccttgtagtcccagataccttgggaggctgagtttgagaggatcgcttt

SEQ ID NO: 1717 - protein, 434 aa, Homo sapiens
MAMQKIFAREILDSRGNPTVEVDLHTAKGRFRAAVPSGASTGIYEALELRDGDKGRYLGKGVLKAVENINNTLGPALLQKKLSVVDQEKVDKFMIELDGTENKSKFGANAILGVSLAVCKAGAAEKGVPLYRHIADLAGNPDLILPVPAFNVINGGSHAGNKLAMQEFMILPVGASSFKEAMRIGAEVYHHLKGVIKAKYGKDATNVGDEGGFAPNILENNEALELLKTAIQAAGYPDKVVIGMDVAASEFYRNGKYDLDFKSPDDPARHITGEKLGELYKSFIKNYPVVSIEDPFDQDDWATWTSFLSGVNIQIVGDDLTVTNPKRIAQAVEKKACNCLLLKVNQIGSVTESIQACKLAQSNGWGVMVSHRSGETEDTFIADLVVGLCTGQIKTGAPCRSERLAKYNQLMRIEEALGDKAIFAGRKFRNPKAK

SEQ ID NO: 1718 - DNA, 4567 bp, Homo sapiens
cctcgcccgccccgcgcgtgactgacagggccactcagggcgcgcgtgcgaggtgctcgcttgggtaatctacctgcgtgggcccgccggcggtaccctgcacagcctgctagaaactgagaccccgggtggtgacagctctggcatcgcccctgggtcctcgggaagaggggacagaaggtcccgagtctcccaggccacacgaagcaagtcactgctcttcctggcctcagtttactcctcctgataaaggaggccataatagtgcctcacctggctgttggctctttctctttagggcaaggcaggttggaggggaaaataggacctgtgcttaccgccggagcagggcgagagtgattctgggccagttctgaacctctctgagattcggagatctcttgtcagtggggcttctggacaactgagtgggctgattgatgcgcggcccagcacgcggcccagtgctcgaggcagggagcgtgtttatcaagagggataaacttgatacgaactctgtacgaaggaaggtgtaggtggatggaggggtgtgtgctgccactgagcacaagaacccacggggtggcctgccaaagttcaaaacgagggagacaggttgatctggacccaggaactacagtgctgaatcctaaaccggggaaagatgagacctagaagagggaggtggtaacctaattggagggtgaggagggaaagagcctgccacagatggggcatctataggggtgctgttgataacagagcagctgacttaagcccgaagtgggtacttctccctgggcagatgggaggtctgggacaggctcctctggcagaagggctcctggccaccctgtcctaaggtgggtcagtcacttcctccttcaccagttccacagcatcttactatgagcttggcattcgaggcttctcttggcagggccctgcactcctagcctctccttgcacattgcacccccattccagagaggtttagttaaaggcgggggttaccaagtcagtcagatcttgggcaagtcaccactcctccagagcctcagtttccttatctggaaagtggaggtcatggcaacccgccaacctggttggatgggagcctgagctgttgtgttgcaccttgcctggggcccacgactttgtagctcctgtcctgcactgggcttatgttttcattcattccagaaaccttttcagagagtccctttggggagtgtgggggacaggagggaaagaaacctggtccttgtagccgttcgtctgctccctgccctgggcagaggacatggggactcaggccagcctgagatcactgggaccagaggaggggctggaggatactacacgcaggggtgggctgggctgggctgggctgggccaggaatgcagcggggcagggctatttaagtcaagggccggctggcaaccccagcaagctgtcctgtgagccgccagcatggatgacatctacaaggctgcggtgagggacagggctgggtagggctggggtgggcaggcccactgggggctcactcagctgagagtgcggggttagtagccccagggaagtggtggggaccaaggagaaggcctacgtgccttcaacccaggccctcacagggacagtgattctggtgtttgaggatgcagaagggggtagggggttccgggtctgaagggtggtggaggaggttgcagctttctgatcgtgtctcactctctgtttccaagtgtctgtggtctgtggcactgtcgctcagccacatgtctctgcatttgtctctggacgtttttgccttcctcttttcatctcttcctcctgagctgtctgagtccccattactgtctccctgtccccaacccccactttctgcccctcacattctgcttctcacatgctcaaaatctgccacccactccagcccttggcgggccgaagatgcttggagggtggagggtgtgagaggaggggtctgtagagcctgagtcctgggctggagatggggctttgaagtttgaggcagggaagttctggacatgagggagaaccaaggaagaaggaacagagaactggggccccagctcccatcatgcctggcaggctcagggctcagtggcttagctaggggtgagagcgagggaatgagggctggagagtggtcaccccaagcccctgcaacctcctgggtcactgagggtcttcagatgctattctatcctgggtggtggtacctccccaacccagagcaaggacatcctggcatggccagctgtccccaggggaacccctccctcagcctccctcactcctgggcagggaagtgctatagccagctctgggggcacgcctgcttatcctgtgggagtccatggagccggggtggggacagccctccacccagtgcccatacaaggcctggcggagttggggactaattttggcttctgaggcggcactagcagccagggggccagataacgctgccccctgcatgccaaagtccccagaacaatcaccaggtttcactttgttcctcgttaaaaatagcccagtggccaccctggtcaggttaccgtgggtggcttgcctgcctccacactggttttattatcccaacttagggacagctgtccttccggcccacccagcttgagtttcatcaggggccgaaagggcattgagtggtcactgactattgttactgagggtcaccttggtcctgaagggggtgcccacctgtcaccctggccctgagcccagtcgcagtgaggccagctgggtcacgtcagggctttgggggcagggagggaggactgagacctccactctgtggcctggaaatagccagcctcctccagctccagccttctcacctgtggaatgggttggttcctacgcagcagctatacctgagtctgagaccttgagattccctttccttctaggtagagcagctgacagaagagcagaaaaatggtgagaatccctatcacacatgtgggagaccagcgggtccaggctggcatggggaccccttatcagaagaggaccccaggccagagaccagaggcttggtccctcttgctctgccctcagagaggtctccgagggaggtgggcaggttggcaggtggccccagggttctggccctccgtggtcctggctgctgagccctgactaccgtgccccccaacccctgaacacagagttcaaggcagccttcgacatcttcgtgctgggcgctgaggatggctgcatcagcaccaaggagctgggcaaggtgatgaggatgctgggccagaaccccacccctgaggagctgcaggagatgatcgatgaggtggacgaggacggtgagcccccctcctccccaggctccagaagaaccccagctggctgggggctggaatgctggctctgtttagctgggagcaatttagcctatccgagccttggttgcctcatctataaaatgggcataagggctacacaagcctggcgtttggtgtgaggatgcggtgagaacatgggggttcgtgtcgaaggtgctgcctgcagtacctaccctggcctctgtaacggccatgctgcccacccccaggcagcggcacggtggactttgatgagttcctggtcatgatggttcggtgcatgaaggacgacagcaaagggaaatctgaggaggagctgtctgacctcttccgcatgtttgacaagtgagcacgtgacccttgacctctgaccctgacccacactcaagccgagctgtacaggagggcagtctcagattccaggcctagggaccctgtggcctctgcctgataggggagagggatgccccatctcccagtgtccctgctctgcctcctggggcatgggtggggctgcctcatgccctccccacagccctaccctgagccccctccccacagaaatgctgatggctacatcgacctggatgagctgaagataatgctgcaggctacaggcgagaccatcacggaggacgacatcgaggagctcatgaaggacggagacaagaacaacgacggccgcatcgactatgatggtaagcgggtgggtgggctgatctcctgcctccatgccctgcccagcccctaccctcaacccacacctgcccctctttccacagagttcctggagttcatgaagggtgtggagtagatgctgaccttcacccagagctgcctatgcccagcctccaactccagctgagtcctggggttggggagggggtcggggtcccaggacctgagcctggccatgtcctcaaccccaaatcccccgactccctccccagatctgtcctgggggatgcaaataaagcctgctctcccaaggtctgctatctggctctggtgtccctgggccgtggactcatccccaggacccactcttacccaatggccgcttccttccctgtcctaggcaggctggctgcagagcctggcgcctgaccaccgctccacactgccttctgcaggggggtgagatgagatcggagactgccgtgtggcctgccctgct

SEQ ID NO: 1719 - protein, 161 aa, Homo sapiens
MDDIYKAAVEQLTEEQKNEFKAAFDIFVLGAEDGCISTKELGKVMRMLGQNPTPEELQEMIDEVDEDGSGTVDFDEFLVMMVRCMKDDSKGKSEEELSDLFRMFDKNADGYIDLDELKIMLQATGETITEDDIEELMKDGDKNNDGRIDYDEFLEFMKGVE

SEQ ID NO: 1720 - DNA, 5510 bp, Homo sapiens
agccggccgtggtggctccgtgcgtccgagcgtccgtccgcgccgtcggccatggccaagcgctccaggggccccgggcgccgctgcctgttggcgctcgtgctgttctgcgcctgggggacgctggccgtggtggcccagaagccgggcgcagggtgtccgagccgctgcctgtgcttccgcaccaccgtgcgctgcatgcatctgctgctggaggccgtgcccgccgtggcgccgcagacctccatcctagatcttcgctttaacagaatcagagagatccaacctggggcattcaggcggctgaggaacttgaacacattgcttctcaataataatcagatcaagaggatacctagtggagcatttgaagacttggaaaatttaaaatatctctatctgtacaagaatgagatccagtcaattgacaggcaagcatttaagggacttgcctctctagagcaactatacctgcactttaatcagatagaaactttggacccagattcgttccagcatctcccgaagctcgagaggctatttttgcataacaaccggattacacatttagttccagggacatttaatcacttggaatctatgaagagattgcgactggactcaaacacacttcactgcgactgtgaaatcctgtggttggcggatttgctgaaaacctacgcggagtcggggaacgcgcaggcagcggccatctgtgaatatcccagacgcatccagggacgctcagtggcaaccatcaccccggaagagctgaactgtgaaaggccccggatcacctccgagccccaggacgcagatgtgacctcggggaacaccgtgtacttcacctgcagagccgaaggcaaccccaagcctgagatcatctggctgcgaaacaataatgagctgagcatgaagacagattcccgcctaaacttgctggacgatgggaccctgatgatccagaacacacaggagacagaccagggtatctaccagtgcatggcaaagaacgtggccggagaggtgaagacgcaagaggtgaccctcaggtacttcgggtctccagctcgacccacttttgtaatccagccacagaatacagaggtgctggttggggagagcgtcacgctggagtgcagcgccacaggccaccccccgccgcggatctcctggacgagaggtgaccgcacacccttgccagttgacccgcgggtgaacatcacgccttctggcgggctttacatacagaacgtcgtacagggggacagcggagagtatgcgtgctctgcgaccaacaacattgacagcgtccatgccaccgctttcatcatcgtccaggctcttcctcagttcactgtgacgcctcaggacagagtcgttattgagggccagaccgtggatttccagtgtgaagccaagggcaacccgccgcccgtcatcgcctggaccaagggagggagccagctctccgtggaccggcggcacctggtcctgtcatcgggaacacttagaatctctggtgttgccctccacgaccagggccagtacgaatgccaggctgtcaacatcatcggctcccagaaggtcgtggcccacctgactgtgcagcccagagtcaccccagtgtttgccagcattcccagcgacacaacagtggaggtgggcgccaatgtgcagctcccgtgcagctcccagggcgagcccgagccagccatcacctggaacaaggatggggttcaggtgacagaaagtggaaaatttcacatcagccctgaaggattcttgaccatcaatgacgttggccctgcagacgcaggtcgctatgagtgtgtggcccggaacaccattgggtcggcctcggtgagcatggtgctcagtgtgaacgttcctgacgtcagtcgaaatggagatccgtttgtagctacctccatcgtggaagcgattgcgactgttgacagagctataaactcaacccgaacacatttgtttgacagccgtcctcgttctccaaatgatttgctggccttgttccggtatccgagggatccttacacagttgaacaggcacgggcgggagaaatctttgaacggacattgcagctcattcaggagcatgtacagcatggcttgatggtcgacctcaacggaacaagttaccactacaacgacctggtgtctccacagtacctgaacctcatcgcaaacctgtcgggctgtaccgcccaccggcgcgtgaacaactgctcggacatgtgcttccaccagaagtaccggacgcacgacggcacctgtaacaacctgcagcaccccatgtggggcgcctcgctgaccgccttcgagcgcctgctgaaatccgtgtacgagaatggcttcaacacccctcggggcatcaacccccaccgactgtacaacgggcacgcccttcccatgccgcgcctggtgtccaccaccctgatcgggacggagaccgtcacacccgacgagcagttcacccacatgctgatgcagtggggccagttcctggaccacgacctcgactccacggtggtggccctgagccaggcacgcttctccgacggacagcactgcagcaacgtgtgcagcaacgaccccccctgcttctctgtcatgatcccccccaatgactcccgggccaggagcggggcccgctgcatgttcttcgtgcgctccagccctgtgtgcggcagcggcatgacttcgctgctcatgaactccgtgtacccgcgggagcagatcaaccagctcacctcctacatcgacgcatccaacgtgtacgggagcacggagcatgaggcccgcagcatccgcgacctggccagccaccgcggcctgctgcggcagggcatcgtgcagcggtccgggaagccgctgctccccttcgccaccgggccgcccacggagtgcatgcgggacgagaacgagagccccatcccctgcttcctggccggggaccaccgcgccaacgagcagctgggcctgaccagcatgcacacgctgtggttccgcgagcacaaccgcattgccacggagctgctcaagctgaacccgcactgggacggcgacaccatctactatgagaccaggaagatcgtgggtgcggagatccagcacatcacctaccagcactggctcccgaagatcctgggggaggtgggcatgaggacgctgggagagtaccacggctacgaccccggcatcaatgctggcatcttcaacgccttcgccaccgcggccttcaggtttggccacacgcttgtcaacccactgctttaccggctggacgagaacttccagcccattgcacaagatcacctcccccttcacaaagctttcttctctcccttccggattgtgaatgagggcggcatcgatccgcttctcagggggctgttcggggtggcggggaaaatgcgtgtgccctcgcagctgctgaacacggagctcacggagcggctgttctccatggcacacacggtggctctggacctggcggccatcaacatccagcggggccgggaccacgggatcccaccctaccacgactacagggtctactgcaatctatcggcggcacacacgttcgaggacctgaaaaatgagattaaaaaccctgagatccgggagaaactgaaaaggttgtatggctcgacactcaacatcgacctgtttccggcgctcgtggtggaggacctggtgcctggcagccggctgggccccaccctgatgtgtcttctcagcacacagttcaagcgcctgcgagatggggacaggttgtggtatgagaaccctggggtgttctccccggcccagctgactcagatcaagcagacgtcgctggccaggatcctatgcgacaacgcggacaacatcacccgggtgcagagcgacgtgttcagggtggcggagttccctcacggctacggcagctgtgacgagatccccagggtggacctccgggtgtggcaggactgctgtgaagactgtaggaccagggggcagttcaatgccttttcctatcatttccgaggcagacggtctcttgagttcagctaccaggaggacaagccgaccaagaaaacaagaccacggaaaatacccagtgttgggagacagggggaacatctcagcaacagcacctcagccttcagcacacgctcagatgcatctgggacaaatgacttcagagagtttgttctggaaatgcagaagaccatcacagacctcagaacacagataaagaaacttgaatcacggctcagtaccacagagtgcgtggatgccgggggcgaatctcacgccaacaacaccaagtggaaaaaagatgcatgcaccatttgtgaatgcaaagacgggcaggtcacctgcttcgtggaagcttgcccccctgccacctgtgctgtccccgtgaacatcccaggggcctgctgtccagtctgcttacagaagagggcggaggaaaagccctaggctcctgggaggctcctcagagtttgtctgctgtgccatcgtgagatcgggtggccgatggcagggagctgcggactgcagaccaggaaacacccagaactcgtgacatttcatgacaacgtccagctggtgctgttacagaaggcagtgcaggaggcttccaaccagagcatctgcggagaaggaggcacagcaggtgcctgaagggaagcaggcaggagtcctagcttcacgttagacttctcaggtttttatttaattcttttaaaatgaaaaattggtgctactattaaattgcacagttgaatcatttaggcgcctaaattggttttgcctcccaacaccatttctttttaaataaagcaggatacctctatatgtcagccttgccttgttcagatgccaggagccggcagacctgtcacccgcaggtggggtgagtctcggagctgccagaggggctcaccgaaatcggggttccatcacaagctatgtttaaaaagaaaattggtgtttggcaaacggaacagaacctttgatgagagcgttcacagggacactgtctgggggtgcagtgcaagcccccggcctcttccctgggaacctctgaactcctccttcctctgggctctctgtaacatttcaccacacgtcagcatctaatcccaagacaaacattcccgctgctcgaagcagctgtatagcctgtgactctccgtgtgtcagctccttccacacctgattagaacattcataagccacatttagaaacagatttgctttcagctgtcacttgcacacatactgcctagttgtgaaccaaatgtgaaaaaacctccttcatcccattgtgtatctgatacctgccgagggccaagggtgtgtgttgacaacgccgctcccagccggccctggttgcgtccacgtcctgaacaagagccgcttccggatggctcttcccaagggaggaggagctcaagtgtcgggaactgtctaacttcaggttgtgtgagtgcgtt

SEQ ID NO: 1721 - protein, 1496 aa, Homo sapiens
SRPWWLRASERPSAPSAMAKRSRGPGRRCLLALVLFCAWGTLAVVAQKPGAGCPSRCLCFRTTVRCMHLLLEAVPAVAPQTSILDLRFNRIREIQPGAFRRLRNLNTLLLNNNQIKRIPSGAFEDLENLKYLYLYKNEIQSIDRQAFKGLASLEQLYLHFNQIETLDPDSFQHLPKLERLFLHNNRITHLVPGTFNHLESMKRLRLDSNTLHCDCEILWLADLLKTYAESGNAQAAAICEYPRRIQGRSVATITPEELNCERPRITSEPQDADVTSGNTVYFTCRAEGNPKPEIIWLRNNNELSMKTDSRLNLLDDGTLMIQNTQETDQGIYQCMAKNVAGEVKTQEVTLRYFGSPARPTFVIQPQNTEVLVGESVTLECSATGHPPPRISWTRGDRTPLPVDPRVNITPSGGLYIQNVVQGDSGEYACSATNNIDSVHATAFIIVQALPQFTVTPQDRVVIEGQTVDFQCEAKGNPPPVIAWTKGGSQLSVDRRHLVLSSGTLRISGVALHDQGQYECQAVNIIGSQKVVAHLTVQPRVTPVFASIPSDTTVEVGANVQLPCSSQGEPEPAITWNKDGVQVTESGKFHISPEGFLTINDVGPADAGRYECVARNTIGSASVSMVLSVNVPDVSRNGDPFVATSIVEAIATVDRAINSTRTHLFDSRPRSPNDLLALFRYPRDPYTVEQARAGEIFERTLQLIQEHVQHGLMVDLNGTSYHYNDLVSPQYLNLIANLSGCTAHRRVNNCSDMCFHQKYRTHDGTCNNLQHPMWGASLTAFERLLKSVYENGFNTPRGINPHRLYNGHALPMPRLVSTTLIGTETVTPDEQFTHMLMQWGQFLDHDLDSTVVALSQARFSDGQHCSNVCSNDPPCFSVMIPPNDSRARSGARCMFFVRSSPVCGSGMTSLLMNSVYPREQINQLTSYIDASNVYGSTEHEARSIRDLASHRGLLRQGIVQRSGKPLLPFATGPPTECMRDENESPIPCFLAGDHRANEQLGLTSMHTLWFREHNRIATELLKLNPHWDGDTIYYETRKIVGAEIQHITYQHWLPKILGEVGMRTLGEYHGYDPGINAGIFNAFATAAFRFGHTLVNPLLYRLDENFQPIAQDHLPLHKAFFSPFRIVNEGGIDPLLRGLFGVAGKMRVPSQLLNTELTERLFSMAHTVALDLAAINIQRGRDHGIPPYHDYRVYCNLSAAHTFEDLKNEIKNPEIREKLKRLYGSTLNIDLFPALVVEDLVPGSRLGPTLMCLLSTQFKRLRDGDRLWYENPGVFSPAQLTQIKQTSLARILCDNADNITRVQSDVFRVAEFPHGYGSCDEIPRVDLRVWQDCCEDCRTRGQFNAFSYHFRGRRSLEFSYQEDKPTKKTRPRKIPSVGRQGEHLSNSTSAFSTRSDASGTNDFREFVLEMQKTITDLRTQIKKLESRLSTTECVDAGGESHANNTKWKKDACTICECKDGQVTCFVEACPPATCAVPVNIPGACCPVCLQKRAEEKP

SEQ ID NO: 1722 - DNA, 544 bp, Homo sapiens
tgaagtgtgcggggtactcgccctgcagcagcgcctcgaagtgcaagcggcagtagaccaggctgtccttcatgccgaagtggtcgcccgtggtcagcatcttgttacacgtggtgcacgtgaagcagttgaggtgataaaccaagtcccgagcgcgcatcaccatctccgaggccgagatgcccaggtggcagcgggcgcagcgctgcacagagaagcgcctgtagtagtcttccttgcagtagatgctaccgtccttgctgaaacaggtgagctccgactccaggttgagcttgcactcgcagcacttgaggcagcgcatgtgccactgcttgtccaccgccagcaggtagtagcggtccgagatcttgcccccgcagccggcgcacagcgcggcgcggtcactgctgatggacggcatggtcgtctcggtgtcgccgcggtcgatggcggagctgatggcgggagcctcgctcttggccctgcggtccatctcgtcgatgaccacgtgcacctcggggcccgacagactgtggaacagcat

SEQ ID NO: 1723 - DNA, 172 bp, Homo sapiens
ttttagaattgaagtctgaaacaaacaaaagcaattcaatgtcaatagacattaagcaacataatagacaaacatctcctaagggaacatttgttacagctgctccttccctgaactgtgctttggaagataagctctgtcctgagtccaaaccaagcccttccaagagaga

SEQ ID NO: 1724 - DNA, 525 bp, Homo sapiens
  misc_feature (503)..(503): n is a, c, g, or t
ttttttttttttttttttttttttttttgcaaacaccattctaaacactttattatgttaagtcccataatccttatgacaaccccatgaaggggataccatcatcatctccattgtacagatgacaaaacaaaggcacagaatatttaaatagcttgctcaaggtcacacagctgcaggggcagagcaaggattcaaagtctggttccagagtccatgctcttaaacgctcagctagaacaccttgggttgcgctcgacgaggaaatgcaactttggggtcaatcgtcttggaatctaactcatgggggggctgacctaatactttatctacacttgctgggtctgcgaacgtgacgaaaccgaagcctttggagcggtttcgaagtggatctctcatgaccatacattcttttatttctccaaatttgctaaaatagtctttaaggcgtttctggtgagtcttgcagctcaatccaccgataaacattttacacggggcgngcgcggaatgttggcgctgtcc

SEQ ID NO: 1725 - DNA, 586 bp, Homo sapiens
acgcgtccggtggggagtcggcgcctgcgtactaagacccgtgtgcagcagcggcggcggcggtagaggcggcggcggcggcggcagcgggctcggaggcagcggttgggctcgcggagagcggacggggtcgagtcagtgcgttcgcgcgagttggaatcgaagcctcttaaaatggcagatgacttggacttcgagacaggagatgcaggggcctcagccaccttcccaatgcagtgctcagcattacgtaagaatggctttgtggtgctcaaaggccggccatgtaagatcgtcgagatgtctacttcgaagactggcaagcacggccacgccaaggtccatctggttggtattgacatctttactgggaagaaatatgaagatatctgcccgtcaactcataatatggatgtccccaacatcaaaaggaatgacttccagctgattggcatccaggatgggtacctatcactgctccaggacagcggggaggtacgagaggaccttcttctccctgagggagaccttggcaaggtgatgagcagaagtacgactgtggagaagagatcctgatcacggtgct

SEQ ID NO: 1726 - DNA, 918 bp, Homo sapiens
cccccccccccccccacccccacccgccgcaccacaccggccagcaagaccccgcaaacttaggctaggtacgaggcctggtgttagcggtgcgacgaaggagtaggtggtgggaatcctcaccgtgggtcgattagccttttctctgccttgcttgcttgagcttcagcggaattcgaaatggctggcggtaaggctggaaaggactccggaaaggccagacaaaggcggtttcccgctcgcagagagccggcttgcagttcccagtgggccgtattcatcgacacctaaaatctaggacgaccagtcatggacgtgtgggcgcgactgccgctgtgtacagcgcagccatcctggagtacctcaccgcagaggtacttgaactggcaggaaatgcatcaaaagacttaaaggtaaagcgtattacccctcgtcacttgcaacttgctattcgtggagatgaagaattggattctctcatcaaggctacaattgctggtggtggtgtcattccacacatccacaaatctctgattgcgaagaaaggacaacagaagactgtctaaaggatgcctggattccttgttatctcaggactctaaatactctaacagctgtccagtgttggtgattccagtggactgtatctctgtgaaaaacacaattttggccttttggtaattctatttgagcaagttggaagtttaattagctttccaaccaaccaaatttctgcattcgagtcttaaccatatttaagtgttactggtggcttcaaagaagcctattgattctgaagtagtgggttcgattgagttgactgtttttaaaaacactgttgtgcgttttacttggtgatgccgaacgttatagtaacccaacatttgggttttgtccgaccttttttccctcctggga

SEQ ID NO: 1727 - DNA, 4266 bp, Homo sapiens
cagggctccttcccgcccgccgccgccgagacccaggctgaagctggggaggacggtggagcccggcccaggccgttctcctgcccccgcggctggagcatcgtctgggactactggctgaaggcgagccccgcagcccaagcgcaggacacgcgcgccccgcgccaccgccgttctctcttccctcccctcctctcccctcccctctcctccgcccccggcctcggctgcggcgggaggaagaacgcttcccaaccagccaggagagcccagatctattcccattcggggagaaagaagagaccccgcacttggatccgaccgacttctcgccccggggccacggaagtggctcgccgtccaccggagagtccccgccgagcgtagccctccaaccctcgcccaaccgcagccgcatagacagcgctccccagcggcccccggccccgcgagcccactccccgcgcggggccggggccggggccggcgatgcctggcacggcagcggcggtggccgcggctgctgctgctgctactgccaccgctgccacggctgctggcgcgggcccgggctgggggcttgagtctctgcagtggggctgagcccgcagtcccgccccccgatcctgaggccgctgctccgccgggcgccgggcctcctccgcccgcgcctccgccccaggagctggagccaagcggggagctcgggccccgcgcccaggcccggaccatgcatggccaccgagccccgggggggcgccgggccttcggagcccgaacacccggccacgaacccgccggcgccgctccgccggcctgtgccgactcggaccctggagcctcggaacccggactgctggcgcgcaggggctcaggttcggctcttggcggcccactggatccccagtttgtcggaccctcggacaccagcctgggcgctgctccaggccaccgggtcttgccctgcggtcccagtccacagcaccaccgggccctgcgcttctcttaccacctggagggctcgcagcctcggcctgggctgcaccagggaaaccggatcctggttaaaagtttgtcccttgaccctggccaaagcctagagcctcatccagaaggtccccagcggcttcgctcagacccaggtcccccgactgaaacccctagccagcgtccttcaccactgaagcgggcaccgggcccgaagccacaggtgcccccaaagcccagctacctgcagatgccccggatgccccccccactggagcccatcccccctccaccatcacgcccactgcctgccgacccccgagtcggcaagggcctggctcccagggcagaggccagccccagttctgcagcagtatcctcactgattgagaagtttgaaagagagcctgtgattgtcgcctcggatagaccagtccctggccccagcccaggtcccccagagccagtcatgttgccacagccaacctcgcagccaccagtgccccagctccccgagggtgaggcctcccgctgcctgtttctgctggctcctgggccccgggacggtgagaaggtgcccaaccgggacagcggcattgatagcatcagctcgccatccaacagcgaggagacctgcttcgtcagtgatgacgggccccccagccacagcctctgccctgggccccctgccctggctagtgtgcctgttgccttggccgacccccaccggcctggctcccaagaggttgacagtgacctggaggaggaggacgacgaggaggaggaggaagagaaggacagagaaatcccagtgcccctgatggagagacaggagtctgtggagttgactgtgcagcaaaaggtgtttcacattgccaatgagctcctgcaaactgagaaggcctacgtttccaggctccatctcctggatcaggtgttctgtgcccggctgctggaagaagctcggaaccgcagttccttcccggccgacgttgtccacggcatcttctctaacatctgctccatctattgcttccaccagcagttcctgctgcctgagctagagaagcgcatggaggaatgggaccgctatccacgcattggagacatcctgcagaaactggcccccttcctcaagatgtatggtgagtatgtgaagaactttgaccgggccgtggagctggtcaacacctggacagagcgctccacccagtttaaagtcatcatccatgaggtgcagaaggaggaagcctgtggcaacctgacattgcagcaccacatgctggagcctgtgcagcgcatcccccgctatgagcttcttctcaaggactatctgttaaagctgccccatggctccccggacagcaaggatgcccaaaagtctctggagctgatcgccacagcagcagagcactcgaatgctgccatccgcaaaatggagcgaatgcataagctgctgaaggtatatgagctgttagggggcgaggaggacattgtcagccccaccaaagagctcataaaagaaggccacatccttaagctgtcagcaaagaatgggaccactcaagaccgatacctcatactattcaacgaccgcctcctttactgcgtgcccaggctgcggctccttggccagaagtttagcgtgcgggcacgcattgatgtagatggcatggagctaaaggagagctccaacctcaatctgcctcgaaccttcctggtgtcaggaaagcagcgctccctcgagctccaggccaggactgaggaggagaagaaagactgggtccaggccatcaactccaccctcctgaagcatgaacagacgctggagactttcaaactgttgaactcaacaaacagggaagatgaagacaccccgcccaactctccaaacgtggatcttgggaagcgggcacctacgcccatccgggaaaaggaagtcaccatgtgcatgcgctgccaggagcccttcaattctatcaccaaacgcaggcaccactgcaaggcctgcgggcatgtggtttgtgggaagtgctccgagttccgggcccgcctcgtctatgacaacaaccgctccaaccgtgtgtgcactgattgctatgtggccttgcacggggtgcctgggagcagtccagcctgcagccagcatacaccccagcgccggaggtccatcctggagaaacaggcctcagtggctgcagagaacagcgtcatctgcagcttcctgcactacatggagaagggtggcaaaggatggcacaaggcatggttcgtggtccctgaaaatgaacccttggtgctgtatatctacggagcccctcaggatgtgaaagcccagcgcagcctgcccctcattggcttcgaggtgggaccgcccgaggcaggggagcggcctgacagaaggcatgtcttcaagatcacccagagccacctcagctggtacttcagccctgagacagaggaactacagcgacgctggatggctgtgcttggccgggcgggccgaggggacacgttctgcccggggcccacactgtctgaggacagggagatggaggaggcaccggtggctgctttaggagccactgctgaaccccccgaatccccccagacccgagacaagacctagagggtttgggacaaactgggagcccccaccccacactctagttgcccatgtctgattgggggctctagccccttccctcccagctcagtcaatacttgaactcccatcacgggcactttcaatcccgaatgctgggtcttgggttttttaattcatcttttcacaaaaacgtgggctttttaaaaaatatattcctacagtgatgtcaatttttattaatccctgtccccagggagggtgggagccgttgccagtcctacctgaattaggtcgtttttctccctcatccctcaataccctaccacagatcctgcctccacccagttccccacaaagcaccagaggtaggagacctggattcaagtgccagctctgccactgaccctggggccccgacccagccctgcctcctcagccaggtcttcacacgtacaactccacgtgggtgcaactagacctctcctgcctctcccatggctacagctctacccggccccaaggctacccagtattttatcgtccagacccatggcagggccagcgggcaggacagggaaacaggggggaggacaatggatactcagttttttgtgtttttttgtgtgtttttttttttttaagaaaaatacagtttatttcaggctttacag

SEQ ID NO: 1728 - protein, 961 aa, Homo sapiens
MHGHRAPGGRRAFGARTPGHEPAGAAPPACADSDPGASEPGLLARRGSGSALGGPLDPQFVGPSDTSLGAAPGHRVLPCGPSPQHHRALRFSYHLEGSQPRPGLHQGNRILVKSLSLDPGQSLEPHPEGPQRLRSDPGPPTETPSQRPSPLKRAPGPKPQVPPKPSYLQMPRMPPPLEPIPPPPSRPLPADPRVGKGLAPRAEASPSSAAVSSLIEKFEREPVIVASDRPVPGPSPGPPEPVMLPQPTSQPPVPQLPEGEASRCLFLLAPGPRDGEKVPNRDSGIDSISSPSNSEETCFVSDDGPPSHSLCPGPPALASVPVALADPHRPGSQEVDSDLEEEDDEEEEEEKDREIPVPLMERQESVELTVQQKVFHIANELLQTEKAYVSRLHLLDQVFCARLLEEARNRSSFPADVVHGIFSNICSIYCFHQQFLLPELEKRMEEWDRYPRIGDILQKLAPFLKMYGEYVKNFDRAVELVNTWTERSTQFKVIIHEVQKEEACGNLTLQHHMLEPVQRIPRYELLLKDYLLKLPHGSPDSKDAQKSLELIATAAEHSNAAIRKMERMHKLLKVYELLGGEEDIVSPTKELIKEGHILKLSAKNGTTQDRYLILFNDRLLYCVPRLRLLGQKFSVRARIDVDGMELKESSNLNLPRTFLVSGKQRSLELQARTEEEKKDWVQAINSTLLKHEQTLETFKLLNSTNREDEDTPPNSPNVDLGKRAPTPIREKEVTMCMRCQEPFNSITKRRHHCKACGHVVCGKCSEFRARLVYDNNRSNRVCTDCYVALHGVPGSSPACSQHTPQRRRSILEKQASVAAENSVICSFLHYMEKGGKGWHKAWFVVPENEPLVLYIYGAPQDVKAQRSLPLIGFEVGPPEAGERPDRRHVFKITQSHLSWYFSPETEELQRRWMAVLGRAGRGDTFCPGPTLSEDREMEEAPVAALGATAEPPESPQTRDKT

SEQ ID NO: 1729 - DNA, 566 bp, Homo sapiens
  misc_feature (531)..(531): n is a, c, g, or t
ccgcatttgtgtgtttgcagctgatgtatttataagcttagcatgtctgctttattagttatcctggaaagaatgctattcagtttatatttttaagtgtctacactcaaggaatgaatgctaaatgagcccatttatgcagcctgaaatcaaatactgcatttattttttgaaactcttggtagcaaaagaaaaagctgattaaaatatgattgtgttacaatgactaaagggttaacttctcattaattctaaattcttcaaaatgtacaagcatcataataaaggcttttgatgagacatgactggtgatgatcatatgtgccaatttaataatttatttgtcacagaaaattcagattcactgcaatattgtgttctggcttcccaaagctgcagggaaatacaagttttttgtctcttgatttttgtttagagacagagtgtcactttgtcacccaggctagaatgaagctgtatgatcatagttcactacagccccaaactcctgggctcagatgatcctcccgncttgggctcccaaagtgctaggattacacgggagc

SEQ ID NO: 1730 - DNA, 2275 bp, Homo sapiens
ggcgggcgggatcacgaggtcaggacatcagatccatcctgactaactcggtgaaacccgtctctactaaaaatacaaaaaattaaccaggcgtagtggcgggcctgtagtcccagctactcgggaggctgaggcaggagaatggcgtgaacccgggagcggacttgccgtgagccagattgcgcctgcagtctagcctggagagagggcgaccccgtacgaaaaaaaaaaaaaaaagatgcaagaaacaagaaagcaagtttgccactgtccatgcttacaggattcatgtacacctgggatatacatatgacatgagttgatgaaaatttagtaacacaaattagaaagagaaagatgaaaattagtttaaagaggtaatttacttaaggaaagttttgcattaggcataaggaagtgacttccattaattggtgtgaaatggggagaattttatgtgcacaggcatagagacggacatgtttaggtgaaggtgaagaaaaggagttcaagtgaccttgattagaattgaaatgtccaccgtagattatagagatagatgaactaactatgaactgatgattagggtgtaaagaaatatctccattgccagatatagccttatactagtggacaagcatatttttcctgcagagatttatcaaagacctataaatgtatttgcccctctttcaaatatgacacaaaaattactgcttagatagatccagaaatacattggaaagttttctggtatgaggatctggaaagtatacacataaaagtctaaattagaaatatttatactaatctttagagtaatgcagaaaaaatgaccactttctctggtactcttttgctattctatgtgataaactctttctcttccagtttcctaaaaagttatgtcatgaaaaggctgattctctagaaacttgcttgcttcccaggcagcataaaatggaatctcacagaagactctggcttgctgaagaaattgtgagaaatggaaacagctatagataagtatctaacttttaggaagccattcaaacattgctgaaatacttgtcttttgatatttgcctgaaacttaacttcctaggacccaggtggtgatgaagtcgaaggggcataccggtgaggcatttctttccgtgagtctcttacagtctcctatttaaattgagttaggattacttctggcaaaatcccaacataaaaatcttctaggaagatcagttctgtaaattagacatactagataaatgggcatcaagcagtttttcaaaattatgcagttgttaacttcataaggggaaataaaaatgtatgcatttacattgtatgattaaaacaaggcagagcatttctatacgttcctaagttatacaaacatatatgtaagagtgaaatatgtaaaaaaacttttacataagcagatgcatacaaactccagatgtgctctttttcttactgtgggttgtgtcttctataagggaaaaagaaatatttatcatttcttttactgctgaggggatgggtgcggctctcatatttcagaaaggggctggaaagtgagggaagccaaactttttcctatttaaggccaaagcaaaggaatctcagtggctgagttttatgacgggcccggtgcctgaagggcagggaacaacttgatggtgctactttgaactgcttttcttttctccttttgcaccaagagtctcatgtctgatatttagacatgatgagctttgtgcaaaaggggagctggctacttctcgctctgcttcatcccactattattctggcacaacaggaagctgttgaaggaggatgttcccatcttggtcagtcctatgcggatagagatgtctggaagccagaaccatgccaaatatgtgtctgtgactcaggatccgttctctgcgatgacataatatgtgacgatcaagaattagactgccccaacccagaaattccatttggagaatgttgtgcagtttgcccacagcctccaactgctcctactcgccctcctaatggtcaaggacctcaaggccccaagggagatccaggacctcctggtattcctgggagaaatggtgaccctggtattccaggacaaccagggtcccctggttctcctggcccccctggaatctgtgaatcatgccctactggtcctcagaactattctccccagtatgattcatatgatgtcaagtctggagtagcagtaggaggactcgcaggctatcctggaccagct

SEQ ID NO: 1731 - protein, 176 aa, Homo sapiens
MMSFVQKGSWLLLALLHPTIILAQQEAVEGGCSHLGQSYADRDVWKPEPCQICVCDSGSVLCDDIICDDQELDCPNPEIPFGECCAVCPQPPTAPTRPPNGQGPQGPKGDPGPPGIPGRNGDPGIPGQPGSPGSPGPPGICESCPTGPQNYSPQYDSYDVKSGVAVGGLAGYPGPA

SEQ ID NO: 1732 - DNA, 2382 bp, Homo sapiens
ccctgccccgcgccgccaagcggttcccgccctcgcccagcgcccaggtagctgcgaggaaacttttgcagcggctgggtagcagcacgtctcttgctcctcagggccactgccaggcttgccgagtcctgggactgctctcgctccggctgccactctcccgcgctctcctagctccctgcgaagcaggatggccgggaccgtgcgcaccgcgtgcttggtggtggcgatgctgctcagcttggacttcccgggacaggcgcagcccccgccgccgccgccggacgccacctgtcaccaagtccgctccttcttccagagactgcagcccggactcaagtgggtgccagaaactcccgtgccaggatcagatttgcaagtatgtctccctaagggcccaacatgctgctcaagaaagatggaagaaaaataccaactaacagcacgattgaacatggaacagctgcttcagtctgcaagtatggagctcaagttcttaattattcagaatgctgcggttttccaagaggcctttgaaattgttgttcgccatgccaagaactacaccaatgccatgttcaagaacaactacccaagcctgactccacaagcttttgagtttgtgggtgaatttttcacagatgtgtctctctacatcttgggttctgacatcaatgtagatgacatggtcaatgaattgtttgacagcctgtttccagtcatctatacccagctaatgaacccaggcctgcctgattcagccttggacatcaatgagtgcctccgaggagcaagacgtgacctgaaagtatttgggaatttccccaagcttattatgacccaggtttccaagtcactgcaagtcactaggatcttccttcaggctctgaatcttggaattgaagtgatcaacacaactgatcacctgaagttcagtaaggactgtggccgaatgctcaccagaatgtggtactgctcttactgccagggactgatgatggttaaaccctgtggcggttactgcaatgtggtcatgcaaggctgtatggcaggtgtggtggagattgacaagtactggagagaatacattctgtcccttgaagaacttgtgaatggcatgtacagaatctatgacatggagaacgtactgcttggtctcttttcaacaatccatgattctatccagtatgtccagaagaatgcaggaaagctgaccaccactattggcaagttatgtgcccattctcaacaacgccaatatagatctgcttattatcctgaagatctctttattgacaagaaagtattaaaagttgctcatgtagaacatgaagaaaccttatccagccgaagaagggaactaattcagaagttgaagtctttcatcagcttctatagtgctttgcctggctacatctgcagccatagccctgtggcggaaaacgacaccctttgctggaatggacaagaactcgtggagagatacagccaaaaggcagcaaggaatggaatgaaaaaccagttcaatctccatgagctgaaaatgaagggccctgagccagtggtcagtcaaattattgacaaactgaagcacattaaccagctcctgagaaccatgtctatgcccaaaggtagagttctggataaaaacctggatgaggaagggtttgaaagtggagactgcggtgatgatgaagatgagtgcattggaggctctggtgatggaatgataaaagtgaagaatcagctccgcttccttgcagaactggcctatgatctggatgtggatgatgcgcctggaaacagtcagcaggcaactccgaaggacaacgagataagcacctttcacaacctcgggaacgttcattccccgctgaagcttctcaccagcatggccatctcggtggtgtgcttcttcttcctggtgcactgactgcctggtgcccagcacatgtgctgccctacagcaccctgtggtcttcctcgataaagggaaccactttcttatttttttctatttttttttttttgttatcctgtatacctcctccagccatgaagtagaggactaaccatgtgttatgttttcgaaaatcaaatggtatcttttggaggaagatacattttagtggtagcatatagattgtccttttgcaaagaaagaaaaaaaaccatcaagttgtgccaaattattctcctatgtttggctgctagaacatggttaccatgtctttctctctcactccctccctttctatcgttctctctttgcatggatttctttgaaaaaaaataaattgctcaaataaaaaaaaaaaaaaaaaaaaaaaaaaaaaaaaaaaaaaaaaaaaaaaaaaaaaaaaaaaaaaaaaaaaaaaaaaa

SEQ ID NO: 1733 - protein, 580 aa, Homo sapiens
MAGTVRTACLVVAMLLSLDFPGQAQPPPPPPDATCHQVRSFFQRLQPGLKWVPETPVPGSDLQVCLPKGPTCCSRKMEEKYQLTARLNMEQLLQSASMELKFLIIQNAAVFQEAFEIVVRHAKNYTNAMFKNNYPSLTPQAFEFVGEFFTDVSLYILGSDINVDDMVNELFDSLFPVIYTQLMNPGLPDSALDINECLRGARRDLKVFGNFPKLIMTQVSKSLQVTRIFLQALNLGIEVINTTDHLKFSKDCGRMLTRMWYCSYCQGLMMVKPCGGYCNVVMQGCMAGVVEIDKYWREYILSLEELVNGMYRIYDMENVLLGLFSTIHDSIQYVQKNAGKLTTTIGKLCAHSQQRQYRSAYYPEDLFIDKKVLKVAHVEHEETLSSRRRELIQKLKSFISFYSALPGYICSHSPVAENDTLCWNGQELVERYSQKAARNGMKNQFNLHELKMKGPEPVVSQIIDKLKHINQLLRTMSMPKGRVLDKNLDEEGFESGDCGDDEDECIGGSGDGMIKVKNQLRFLAELAYDLDVDDAPGNSQQATPKDNEISTFHNLGNVHSPLKLLTSMAISVVCFFFLVH

SEQ ID NO: 1734 - DNA, 580 bp, Homo sapiens
tggcgaattcggcacgagggcgggacccgttggcagaggtggcggcggcggcatgggtgccccgacgttgccccctgcctggcagccctttctcaaggaccaccgcatctctacattcaagaactggcccttcttggagggctgcgcctgcaccccggagcggatggccgaggctggcttcatccactgccccactgagaacgagccagacttggcccagtgtttcttctgcttcaaggagctggaaggctgggagccagatgacgaccccatagaggaacataaaaagcattcgtccggttgcgctttcctttctgtcaagaagcagtttgaagaattaacccttggtgaatttttgaaactggacagagaaagagccaagaacaaaattgcaaaggaaaccaacaataagaagaaagaatttgaggaaactgcgaagaaagtgcgccgtgccatcgagcagctggctgccatggattgaggcctctggccggagctgcctggtcccagagtggctgcaccacttccagggtttattccctggtgccaccagccttcctgtgggccccttagcaatgtc

SEQ ID NO: 1735 - DNA, 275 bp, Homo sapiens
  misc_feature (9)..(9): n is a, c, g, or t
  misc_feature (39)..(39): n is a, c, g, or t
  misc_feature (81)..(81): n is a, c, g, or t
  misc_feature (116)..(116): n is a, c, g, or t
  misc_feature (167)..(167): n is a, c, g, or t
  misc_feature (185)..(185): n is a, c, g, or t
  misc_feature (258)..(258): n is a, c, g, or t
ctcgtgccngtggttctgccttcttgatgagtgattgtnaaaaacacctgcataagggtgctaattggttgtttatttttncatttatttgaaatcaaactgagaacacctctttncggtttacagcataacatggcttgaagtaaaaggcagtatccaagtccttnacctggtcttgccctgtntactttctgatcattctgatggtctgatgtggctgttgatgtggaactgcagaagagttcagaggagagtatncaaccaaaagccatagg

SEQ ID NO: 1736 - DNA, 5817 bp, Homo sapiens
gagcggcgccctgctctggccgttgctcccgctcctgctcctgctgctgtcggcgcgggacggcgtgcgcgccgcgcagcctcaggccccgggttacttgattgcagctccctctgtttttcgcgcgggcgtggaggaagtcatcagcgtgaccatctttaactctccaagggaagtcacggtccaggctcagctggtggcccagggtgagccggtggtgcagagccagggagccatcctggataaagggacaatcaaactcaaggtgcccacgggcctccggggccaagcgcttctgaaagtgtggggccgcggctggcaggcggaggaggggcccctctttcacaaccagacctcggtgaccgtggacggccggggcgcttctgtattcatccagacggacaagcctgtgtacagaccccagcaccgagtgctcataagcatcttcaccgtctctccaaatctgaggcctgtcaacgagaagctggaagcctacatcctggacccccgaggctctcggatgatagagtggagacacttaaagccgttctgctgcggcatcaccaacatgagcttccccttgtccgaccagcctgtgttgggagaatggttcatttttgttgaaatgcaaggccacgcgtacaacaagtcttttgaagttcagaagtatgtgttgcccaagtttgagcttctgattgacccgccccggtatatccaagacctggacgcctgtgagacaggcactgtgcgggccaggtatacctttgggaaacctgtggctggtgccttaacgatcaacatgactgttaatggtgtagggtactacagccacgaggtgggacgccctgtcctcagaacaaccaagatcctcggctcccaggacttcgacatctgcgtgagggacatgatcccagcggacgtccctgagcacttccggggcagggtcagcatctgggccatggtgaccagtgtggacgggagccagcaggtcgcgttcgatgactccacccccgtgcagaggcagctggtggacatccggtactccaaggacacgaggaagcagttcaagccgggcctggcctacgtggggaaggtggagctatcctaccccgatggcagcccagctgagggggtgacggtccagattaaggcagagctgacaccaaaggataacatctacaccagtgaagttgtgtcccagcgtggactagtggggtttgaaatcccctccatccccacgtcagcccagcacgtgtggctggagaccaaggtgatggcactgaacgggaagcccgtgggggctcagtacctgcccagctacctctccctcggcagctggtactcccccagccagtgctacctgcagctgcagccaccctcccacccactgcaggttggggaagaagcctatttttctgtgaagtccacatgtccctgcaactttaccctgtactacgaggtggctgcacggggcaatattgtgctatcgggccagcagcctgcccacaccacccagcagcgaagcaagcgggcggcccctgccctggagaaaccgattcgtttaacacacctttctgagacagagcccccaccagccccagaagctgaggtcgacgtgtgtgtgacctctcttcatctggccgtgacccccagcatggtcccccttggtcgcctgctggtcttctacgtcagggagaatggagaaggggtcgccgacagccttcagtttgcagtcgagaccttcttcgaaaaccaggtttcagtgacgtattcagcaaatgagacccaacctggggaggttgtcgacctgcggatcagggctgcaaggggcagctgtgtgtgcgtcgccgcagttgataagagtgtctacctgctcaggtctgggttccggctgactcctgcccaggttttccaggaactggaagattatgatgtttctgattcctttggcgtgtccagggaggatggtcctttttggtgggctgggctgacggcacaacgacgccggcgctcctctgtcttcccgtggccttggggcatcaccaaggactctgggtttgccttcaccgaaacgggactggtggtgatgaccgaccgagtgagcctgaaccaccggcaggacggtggcctctacaccgatgaggctgtccccgctttccagccccacacagggagcctggtggcagtggctccttccaggcacccccccagaacagagaagagaaaaaggactttcttccccgaaacatggatttggcattgtctcaacatcagtgacccatctggtgaggggacactcagtgtgaaggtcccggactccatcaccagctgggtgggtgaggccgtggccctgtccacctctcagggcttaggcatcgccgagccctccctgctgaagaccttcaagcccttcttcgtggacttcatgctccccgctctcatcatccgtggggagcaggtcaagatcccgctcagtgtctacaactacatgggcacctgcgctgaggtgtacatgaagctctcggttcccaagggcatccagtttgttgggcatcctggcaaacgccatgtgaccaagaagatgtgtgtggcccccggggaggctgagcccatctgggtcgttctgtccttcagcgacctgggactcaacaacatcacggccaaagcccttgcttacggagacacaaattgctgccgggatgggaggtccagcaaacaccctgaggagaatcacgccgacaggagggtccccatcggggtggatcacgtcaggcgcagtgtgatggttgaggcggaaggagtcccccgggcgtacacctacagcgcattcttctgtcccagtgagagagtccacatctccacccccaacaagtatgagttccagtatgtgcagcggccactgcgcctcacccgctttgatgtggctgtgcgagctcacaatgatgcccgtgtggccttgtcttctgggccccaggacacagcaggcatgatcgagatcgtcctgggggggcatcagaacaccaggtcatggatctccaccagcaagatgggagagcccgtggccagtgcacacacggccaagatcctctcctgggatgaattcagaacattctggatcagctggcgtggtggccttatccaggttggccatggtccagagccatccaatgagtctgtcattgtggcctggaccctcccgaggccaccagaggtccagttcattggcttttccaccggctggggctccatgggtgaattccgaatctggaggaagatggaggtggacgagagctacagcgaggccttcaccctgggggtcccacacggcgccatccctgggtctgagcgagccaccgcctccatcatcggggacgtcatggggccaaccctgaaccacctcaacaacctcctgcggctgccgtttggctgtggagagcagaacatgatccactttgcacccaacgtctttgtcttgaagtatcttcagaaaacccagcagctcagccctgaggtggagagagagaccaccgactacctagtacaaggctaccagcgccagctgacctacaagcgccaggatggctcctacagcgcgtttggggagcgggacgcatcggggagcatgtggctcacagcctttgtcctgaagtccttcgcacaggctcgcagctttatcttcgtggacccccgggagctggctgccgccaagagctggatcatccagcagcagcaggccgatggctccttcctggccgtgggcagggtcctgaacaaggacatccagggtgggatccacggcattgtcccgctgacagcctacgtggtggttgctctcctggaaacaggcacagcctcagaggaggagagaggctccactgacaaagcgaggcacttcctggagtctgctgcgcccctggccatggacccttatagctgtgccctgactacctacgcgctgaccctgctccgcagcccggcagcccctgaggcactgcgcaagctccgtagcctggccatcatgcgagatggggtcacccactggagcctgtcaaattcctgggacgtggacaagggcacattcttgagcttcagtgacagggtctctcagtcagtggtctcggccgaggtggaaatgacagcctacgcccttctgacctacactctgctgggtgacgtggctgccgccctgcctgtggtgaagtggctgtcccagcagcgaaatgcacttgggggcttctcctccactcaggacacctgcgtggctctgcaggccttggctgaatatgccatcttgtcctatgctggaggcatcaacctcactgtctccctggcctccaccaacctggactaccaggaaaccttcgagctgcacaggaccaaccagaaggttctgcagacagcagcgatccccagcctccccacggggctgtttgtgagtgccaagggggacggctgctgcctgatgcagattgatgtcacctacaatgtgcctgacccggtggccaagccagctttccagctgctcgtaagcctccaggagcctgaggcccagggacgcccgccccccatgcctgcctccgcagctgagggttcccgaggagactggcccccagctgacgatgatgacccagcggccgatcagcatcaccaggaatacaaggtgatgctggaggtgtgcaccaggtggctgcatgcagggtcttccaatatggctgtcctggaggtgcccctgctgtcaggcttccgggcagacatcgagagcctggagcagctgctccttgacaagcacatggggatgaagaggtatgaagtggctggacgccgagtgctcttctactttgatgagatccccagccggtgcctgacgtgcgtgcggttccgtgctctccgggagtgcgtggtgggcaggacgtcggcgctgccagtctccgtgtacgactactacgaacccgccttcgaggccactcgcttctacaacgtcagcacgcacagcccactcgcccgggaactgtgcgccggacccgcgtgcaacgaagtggagcgcgcccctgcccggggcccgggctggttccccggcgagtcgggccctgccgtggcccctgaggagggggcggcgatcgcgcgatgcggctgcgaccacgactgcggcgcccaggggaacccggtgtgcggctccgacggggtggtctacgccagcgcctgccgcctgcgggaggccgcctgccgccaggccgcgcccctggagcccgcgcctcccagctgctgcgccctcgagcagcggctgccggcctcgtcgtcctccacctacggggatgacctggcttctgtggccccggggcctttacagcaggacgtgaagctgaatggagccggccttgaggtggaggactcagaccctgagcctgaaggggaggcggaggacagggtcacagccgggcctcggcctcctgtgagcagcgggaacctggaaagcagcacccagagcgccagcccgttccacagatggggccagactccggcccctcagagacatagtggccgggtggtgggggcccacaggccagggcttctgagccctgtcttcgtctacagcccagcctttcagagtggtggggaggagggtttatggatgtcaaacacctgcaccttgagataatcctacaaccacatgcagttgtgggaccgcagtttggtcctggggaccattcatacccacacacccagcttgtgcctgtggttaacatctcagaaaactctggtaaatgatcactccaggatattgacacgaatacacgttactgatcttactcacatgtt

SEQ ID NO: 1737 - protein, 1884 aa, Homo sapiens
SGALLWPLLPLLLLLLSARDGVRAAQPQAPGYLIAAPSVFRAGVEEVISVTIFNSPREVTVQAQLVAQGEPVVQSQGAILDKGTIKLKVPTGLRGQALLKVWGRGWQAEEGPLFHNQTSVTVDGRGASVFIQTDKPVYRPQHRVLISIFTVSPNLRPVNEKLEAYILDPRGSRMIEWRHLKPFCCGITNMSFPLSDQPVLGEWFIFVEMQGHAYNKSFEVQKYVLPKFELLIDPPRYIQDLDACETGTVRARYTFGKPVAGALTINMTVNGVGYYSHEVGRPVLRTTKILGSQDFDICVRDMIPADVPEHFRGRVSIWAMVTSVDGSQQVAFDDSTPVQRQLVDIRYSKDTRKQFKPGLAYVGKVELSYPDGSPAEGVTVQIKAELTPKDNIYTSEVVSQRGLVGFEIPSIPTSAQHVWLETKVMALNGKPVGAQYLPSYLSLGSWYSPSQCYLQLQPPSHPLQVGEEAYFSVKSTCPCNFTLYYEVAARGNIVLSGQQPAHTTQQRSKRAAPALEKPIRLTHLSETEPPPAPEAEVDVCVTSLHLAVTPSMVPLGRLLVFYVRENGEGVADSLQFAVETFFENQVSVTYSANETQPGEVVDLRIRAARGSCVCVAAVDKSVYLLRSGFRLTPAQVFQELEDYDVSDSFGVSREDGPFWWAGLTAQRRRRSSVFPWPWGITKDSGFAFTETGLVVMTDRVSLNHRQDGGLYTDEAVPAFQPHTGSLVAVAPSRHPPRTEKRKRTFFPETWIWHCLNISDPSGEGTLSVKVPDSITSWVGEAVALSTSQGLGIAEPSLLKTFKPFFVDFMLPALIIRGEQVKIPLSVYNYMGTCAEVYMKLSVPKGIQFVGHPGKRHVTKKMCVAPGEAEPIWVVLSFSDLGLNNITAKALAYGDTNCCRDGRSSKHPEENHADRRVPIGVDHVRRSVMVEAEGVPRAYTYSAFFCPSERVHISTPNKYEFQYVQRPLRLTRFDVAVRAHNDARVALSSGPQDTAGMIEIVLGGHQNTRSWISTSKMGEPVASAHTAKILSWDEFRTFWISWRGGLIQVGHGPEPSNESVIVAWTLPRPPEVQFIGFSTGWGSMGEFRIWRKMEVDESYSEAFTLGVPHGAIPGSERATASIIGDVMGPTLNHLNNLLRLPFGCGEQNMIHFAPNVFVLKYLQKTQQLSPEVERETTDYLVQGYQRQLTYKRQDGSYSAFGERDASGSMWLTAFVLKSFAQARSFIFVDPRELAAAKSWIIQQQQADGSFLAVGRVLNKDIQGGIHGIVPLTAYVVVALLETGTASEEERGSTDKARHFLESAAPLAMDPYSCALTTYALTLLRSPAAPEALRKLRSLAIMRDGVTHWSLSNSWDVDKGTFLSFSDRVSQSVVSAEVEMTAYALLTYTLLGDVAAALPVVKWLSQQRNALGGFSSTQDTCVALQALAEYAILSYAGGINLTVSLASTNLDYQETFELHRTNQKVLQTAAIPSLPTGLFVSAKGDGCCLMQIDVTYNVPDPVAKPAFQLLVSLQEPEAQGRPPPMPASAAEGSRGDWPPADDDDPAADQHHQEYKVMLEVCTRWLHAGSSNMAVLEVPLLSGFRADIESLEQLLLDKHMGMKRYEVAGRRVLFYFDEIPSRCLTCVRFRALRECVVGRTSALPVSVYDYYEPAFEATRFYNVSTHSPLARELCAGPACNEVERAPARGPGWFPGESGPAVAPEEGAAIARCGCDHDCGAQGNPVCGSDGVVYASACRLREAACRQAAPLEPAPPSCCALEQRLPASSSSTYGDDLASVAPGPLQQDVKLNGAGLEVEDSDPEPEGEAEDRVTAGPRPPVSSGNLESSTQSASPFHRWGQTPAPQRHSGRVVGAHRPGLLSPVFVYSPAFQSGGEEGLWMSNTCTLR

SEQ ID NO: 1738 - DNA, 573 bp, Homo sapiens
  misc_feature (313)..(313): n is a, c, g, or t
  misc_feature (363)..(363): n is a, c, g, or t
  misc_feature (385)..(385): n is a, c, g, or t
  misc_feature (389)..(389): n is a, c, g, or t
  misc_feature (394)..(394): n is a, c, g, or t
  misc_feature (461)..(461): n is a, c, g, or t
  misc_feature (478)..(478): n is a, c, g, or t
  misc_feature (482)..(484): n is a, c, g, or t
  misc_feature (497)..(497): n is a, c, g, or t
ttgtattggatttcactttattttgttccctttcccgtctgttttggcgtagaaaaaatatcaccgagaggaagcagcaggagagggcaggtggagctcgactgcctggactggaggggggcgggcatgggcaggggccgggggcagggccagggcctcagcccaggggttctgcttacggtaccctaatagggtttggaggaaaaggggacaggcatatggcaggcagaatggtgggaggacaggccgaggtttttaggcctttacagtcttaggcgggtagggtgaaagtaggacaagcctgggggatggnaagcaggtgggtgggggggggtgccaggcaaggagttattaaagctgcgngaagggggagtgcgcagcctanccanaaggntgaaaaggggaccccactgtggacccaggggacattgggacccgctccaagcccccgctattctggngctgcactcttatcctntctnnntggggggtgaccnggggaaggggggctacccccagcttgcgggcacttccgataaaggaaagggcacccacccctcgtgcccgaaatct

SEQ ID NO: 1739 - DNA, 8686 bp, Homo sapiens
gagtctttgaggacacagcctcgctggaggcagtttctggtgccagtgacggggtggcccgtgagctgatgacgaggactggcttttaatccttggtggtgattaagagaaagcttattggggcctgggagcagctccccgccgacccccaccaccatgtcgggctccacacagcctgtggcacagacgtggagggccactgagccccgctacccgccccacagcctttcctacccagtgcagatcgcccggacgcacacggacgtcgggctcctggagtaccagcaccactcccgcgactatgcctcccacctgtcgcccggctccatcatccagccccagcggcggaggccctccctgctgtctgagttccagcccgggaatgaacggtcccaggagctccacctgcggccagagtcccactcatacctgcccgagctggggaagtcagagatggagttcattgaaagcaagcgccctcggctagagctgctgcctgaccccctgctgcgaccgtcacccctgctggccacgggccagcctgcgggatctgaagacctcaccaaggaccgtagcctgacgggcaagctggaaccggtgtctccccccagccccccgcacactgaccctgagctggagctggtgccgccacggctgtccaaggaggagctgatccagaacatggaccgcgtggaccgagagatcaccatggtagagcagcagatctctaagctgaagaagaagcagcaacagctggaggaggaggctgccaagccgcccgagcctgagaagcccgtgtcaccgccgcccatcgagtcgaagcaccgcagcctggtgcagatcatctacgacgagaaccggaagaaggctgaagctgcacatcggattctggaaggcctggggccccaggtggagctgccgctgtacaaccagccctccgacacccggcagtatcatgagaacatcaaaataaaccaggcgatgcggaagaagctaatcttgtacttcaagaggaggaatcacgctcggaaacaatgggagcagaagttctgccagcgctatgaccagctcatggaggcctgggagaagaaggtggagcgcatcgagaacaacccccggcggcgggccaaggagagcaaggttcgcgagtactacgagaagcagttccctgagatccgcaagcagcgcgagctgcaggagcgcatgcagagggtgggccagcggggcagtgggctgtccatgtcgcccgcccgcagcgagcacgaggtgtcagagatcatcgatggcctctcagagcaggagaacctggagaagcagatgcgccagctggccgtgatcccgcccatgctgtacgacgctgaccagcagcgcatcaagttcatcaacatgaacgggcttatggccgaccccatgaaggtgtacaaagaccgccaggtcatgaacatgtggagtgagcaggagaaggagaccttccgggagaagttcatgcagcatcccaagaactttggcctgatcgcatcattcctggagaggaagacagtggctgagtgcgtcctctattactacctgactaagaagaatgagaactataagagcctggtgagacggagctatcggcgccgcggcaagagccagcagcaacaacagcagcagcagcagcagcagcagcagcagcagcagcagcccatgccccgcagcagccaggaggagaaagatgagaaggagaaggaaaaggaggcggagaaggaggaggagaagccggaggtggagaacgacaaggaagacctcctcaaggagaagacagacgacacctcaggggaggacaacgacgagaaggaggctgtggcctccaaaggccgcaaaactgccaacagccagggaagacgcaaaggccgcatcacccgctcaatggctaatgaggccaacagcgaggaggccatcaccccccagcagagcgccgagctggcctccatggagctgaatgagagttctcgctggacagaagaagaaatggaaacagccaagaaaggtctcctggaacacggccgcaactggtcggccatcgcccggatggtgggctccaagactgtgtcgcagtgtaagaacttctacttcaactacaagaagaggcagaacctcgatgagatcttgcagcagcacaagctgaagatggagaaggagaggaacgcgcggaggaagaagaagaaagcgccggcggcggccagcgaggaggctgcattcccgcccgtggtggaggatgaggagatggaggcgtcgggcgtgacgggaaatgaggaggagatggtggaggaggctgaagccactgtcaacaacagctcagacaccgagagcatcccctctcctcacactgaggccgccaaggacacagggcagaatgggcccaagcccccagccaccctgggcgccgacgggccacccccagggccacccaccccaccaccggaggacatcccggcccccactgagtccaccccggcctctgaagccaccttagcccctacgcccccaccagcacccccatttccctcttcacctcctcctgtggtccccaaggaggagaaggaggaggagaccgcagcagcgcccccagtggaggagggggaggagcagaagccccccgcggctgaggagctggcagtggacacagggaaggccgaggagcccgtcaagagcgagtgcacggaggaagccgaggaggggccggccaagggcaaggacgcggaggccgctgaggccacggccgagagggcgctcaaggcagagaagaaggagggcgggagcggcagggccaccacagccaagagctcgggcgccccccaggacagcgactccagtgccacctgcagtgcagacgaggtggatgaggccgagggcggcgacaagaaccggctgctgtccccaaggcccagcctcctcaccccgactggcgacccccgggccaatgcctcaccccagaagccactggacctgaagcagctgaagcagcgagcggctgccatcccccccatccaggtcaccaaagtccatgagcccccccgggaggacgcagctcccaccaagccagctcccccagccccaccgccaccgcaaaacctgcagccggagagcgacgcccctcagcagcctggcagcagcccccggggcaagagcaggagcccggcaccccccgccgacaaggaggcagagaagcctgtgttcttcccagccttcgcagccgaggcccagaagctgcctggggaccccccttgctggacttccggcctgcccttccccgtgcccccccgtgaggtgatcaaggcctccccgcatgccccggacccctcagccttctcctacgctccacctggtcacccactgcccctgggcctccatgacactgcccggcccgtcctgccgcgcccacccaccatctccaacccgcctcccctcatctcctctgccaagcaccccagcgtcctcgagaggcaaataggtgccatctcccaaggaatgtcggtccagctccacgtcccgtactcagagcatgccaaggccccggtgggccctgtcaccatggggctgcccctgcccatggaccccaaaaagctggcacccttcagcggagtgaagcaggagcagctgtccccacggggccaggctgggccaccggagagcctgggggtgcccacagcccaggaggcgtccgtgctgagagggacagctctgggctcagttccgggcggaagcatcaccaaaggcattcccagcacacgggtgccctcggacagcgccatcacataccgcggctccatcacccacggcacgccagctgacgtcctgtacaagggcaccatcaccaggatcatcggcgaggacagcccgagtcgcttggaccgcggccgggaggacagcctgcccaagggccacgtcatctacgaaggcaagaagggccacgtcttgtcctatgagggtggcatgtctgtgacccagtgctccaaggaggacggcagaagcagctcaggacccccccatgagacggccgcccccaagcgcacctatgacatgatggagggccgcgtgggcagagccatctcctcagccagcatcgaaggtctcatgggccgtgccatcccgccggagcgacacagcccccaccacctcaaagagcagcaccacatccgcgggtccatcacacaagggatccctcggtcctacgtggaggcacaggaggactacctgcgtcgggaggccaagctcctaaagcgggagggcacgcctccgcccccaccgccctcacgggacctgaccgaggcctacaagacgcaggccctgggccccctgaagctgaagccggcccatgagggcctggtggccacggtgaaggaggcgggccgctccatccatgagatcccgcgcgaggagctgcggcacacgcccgagctgcccctggccccgcggccgctcaaggagggctccatcacgcagggcaccccgctcaagtacgacaccggcgcgtccaccactggctccaaaaagcacgacgtacgctccctcatcggcagccccggccggacgttcccacccgtgcacccgctggatgtgatggccgacgcccgggcactggaacgtgcctgctacgaggagagcctgaagagccggccagggaccgccagcagctcggggggctccattgcgcgcggcgccccggtcattgtgcctgagctgggtaagccgcggcagagccccctgacctatgaggaccacggggcaccctttgccggccacctcccacgaggttcgcccgtgaccatgcgggagcccacgccgcgcctgcaggagggcagcctttcgtccagcaaggcatcccaggaccgaaagctgacgtcgacgcctcgtgagatcgccaagtccccgcacagcaccgtgcccgagcaccacccacaccccatctcgccctatgagcacctgcttcggggcgtgagtggcgtggacctgtatcgcagccacatccccctggccttcgaccccacctccataccccgcggcatccctctggacgcagccgctgcctactacctgccccgacacctggcccccaaccccacctacccgcacctgtacccaccctacctcatccgcggctaccccgacacggcggcgctggagaaccggcagaccatcatcaatgactacatcacctcgcagcagatgcaccacaacacggccaccgccatggcccagcgagctgatatgctgaggggcctctcgccccgcgagtcctcgctggcactcaactacgctgcgggtccccgaggcatcatcgacctgtcccaagtgccacacctgcctgtgctcgtgcccccgacaccaggcaccccagccaccgccatggaccgccttgcctacctccccaccgcgccccagcccttcagcagccgccacagcagctccccactctccccaggaggtccaacacacttgacaaaaccaaccaccacgtcctcgtccgagcgggagcgagaccgggatcgagagcgggaccgggatcgggagcgggaaaagtccatcctcacgtccaccacgacggtggagcacgcacccatctggagacctggtacagagcagagcagcggcagcagcggcagcagcggcgggggtgggggcagcagcagccgccccgcctcccactcccatgcccaccagcactcgcccatctcccctcggacccaggatgccctccagcagagacccagtgtgcttcacaacacaggcatgaagggtatcatcaccgctgtggagcccagcaagcccacggtcctgaggtccacctccacctcctcacccgttcgcccagctgccacattcccacctgccacccactgcccactgggcggcaccctcgatggggtctaccctaccctcatggagcccgtcttgctgcccaaggaggccccccgggtcgcccggccagagcggccccgagcagacaccggccatgccttcctcgccaagcccccagcccgctccgggctggagcccgcctcctcccccagcaagggctcggagccccggcccctagtgcctcctgtctctggccacgccaccatcgcccgcacccctgcgaagaacctcgcacctcaccacgccagcccggacccgccggcgccacctgcctcggcctcggacccgcaccgggaaaagactcaaagtaaacccttttccatccaggaactggaactccgttctctgggttaccacggcagcagctacagccccgaaggggtggagcccgtcagccctgtgagctcacccagtctgacccacgacaaggggctccccaagcacctggaagagctcgacaagagccacctggagggggagctgcggcccaagcagccaggccccgtgaagcttggcggggaggccgcccacctcccacacctgcggccgctgcctgagagccagccctcgtccagcccgctgctccagaccgccccaggggtcaaaggtcaccagcgggtggtcaccctggcccagcacatcagtgaggtcatcacacaggactacacccggcaccacccacagcagctcagcgcacccctgcccgcccccctctactccttccctggggccagctgccccgtcctggacctccgccgcccacccagtgacctctacctcccgcccccggaccatggtgccccggcccgtggctccccccacagcgaagggggcaagaggtctccagagccaaacaagacgtcggtcttgggtggtggtgaggacggtattgaacctgtgtccccaccggagggcatgacggagccagggcactcccggagtgctgtgtacccgctgctgtaccgggatggggaacagacggagcccagcaggatgggctccaagtctccaggcaacaccagccagccgccagccttcttcagcaagctgaccgagagcaactccgccatggtcaagtccaagaagcaagagatcaacaagaagctgaacacccacaaccggaatgagcctgaatacaatatcagccagcctgggacggagatcttcaatatgcccgccatcaccggaacaggccttatgacctatagaagccaggcggtgcaggaacatgccagcaccaacatggggctggaggccataattagaaaggcactcatgggtaaatatgaccagtgggaagagtccccgccgctcagcgccaatgcttttaaccctctgaatgccagtgccagcctgcccgctgctatgcccataaccgctgctgacggacggagtgaccacacactcacctcgccaggtggcggcgggaaggccaaggtctctggcagacccagcagccgaaaagccaagtccccggccccgggcctggcatctggggaccggccaccctctgtctcctcagtgcactcggagggagactgcaaccgccggacgccgctcaccaaccgcgtgtgggaggacaggccctcgtccgcaggttccacgccattcccctacaaccccctgatcatgcggctgcaggcgggtgtcatggcttccccacccccaccgggcctccccgcgggcagcgggcccctcgctggcccccaccacgcctgggacgaggagcccaagccactgctctgctcgcagtacgagacactctccgacagcgagtgactcagaacagggcgggggggggcgggcggtgtcaggtcccagcgagccacaggaacggccctgcaggagcggggcggctgccgactcccccaaccaaggaaggagcccctgagtccgcctgcgcctccatccatctgtccgtccagagccggcatccttgcctgtctaaagccttaactaagactcccgccccgggctggccctgtgcagaccttactcaggggatgtttacctggtgctcgggaagggaggggaaggggccggggagggggcacggcaggcgtgtggcagccacacacaggcggccagggcggccagggacccaaagcaggatgaccacgcacctccacgccactgcctcccccgaatgcatttggaaccaaagtctaaactgagctcgcagcccccgcgccctccctccgcctcccatcccgcttagcgctctggacagatggacgcaggccctgtccagcccccagtgcgctcgttccggtccccacagactgccccagccaacgagattgctggaaaccaagtcaggccaggtgggcggacaaaagggccaggtgcggcctggggggaacggatgctccgaggactggactgtttttttcacacatcgttgccgcagcggtgggaaggaaaggcagatgtaaatgatgtgttggtttacagggtatatttttgataccttcaatgaattaattcagatgttttacgcaaggaaggacttacccagtattactgctgctgtgcttttgatctctgcttaccgttcaagaggcgtgtgcaggccgacagtcggtgaccccatcactcgcaggaccaagggggcggggactgctcgtcacgccccgctgtgtcctccctccctcccttccttgggcagaatgaattcgatgcgtattctgtggccgccatttgcgcagggtggtggtattctgtcatttacacacgtcgttctaattaaaaagcgaattatactccaaaaaaaaaaaaaaaaaaa

SEQ ID NO: 1740 - protein, 2507 aa, Homo sapiens
MSGSTQPVAQTWRATEPRYPPHSLSYPVQIARTHTDVGLLEYQHHSRDYASHLSPGSIIQPQRRRPSLLSEFQPGNERSQELHLRPESHSYLPELGKSEMEFIESKRPRLELLPDPLLRPSPLLATGQPAGSEDLTKDRSLTGKLEPVSPPSPPHTDPELELVPPRLSKEELIQNMDRVDREITMVEQQISKLKKKQQQLEEEAAKPPEPEKPVSPPPIESKHRSLVQIIYDENRKKAEAAHRILEGLGPQVELPLYNQPSDTRQYHENIKINQAMRKKLILYFKRRNHARKQWEQKFCQRYDQLMEAWEKKVERIENNPRRRAKESKVREYYEKQFPEIRKQRELQERMQRVGQRGSGLSMSPARSEHEVSEIIDGLSEQENLEKQMRQLAVIPPMLYDADQQRIKFINMNGLMADPMKVYKDRQVMNMWSEQEKETFREKFMQHPKNFGLIASFLERKTVAECVLYYYLTKKNENYKSLVRRSYRRRGKSQQQQQQQQQQQQQQQQQPMPRSSQEEKDEKEKEKEAEKEEEKPEVENDKEDLLKEKTDDTSGEDNDEKEAVASKGRKTANSQGRRKGRITRSMANEANSEEAITPQQSAELASMELNESSRWTEEEMETAKKGLLEHGRNWSAIARMVGSKTVSQCKNFYFNYKKRQNLDEILQQHKLKMEKERNARRKKKKAPAAASEEAAFPPVVEDEEMEASGVTGNEEEMVEEAEATVNNSSDTESIPSPHTEAAKDTGQNGPKPPATLGADGPPPGPPTPPPEDIPAPTESTPASEATLAPTPPPAPPFPSSPPPVVPKEEKEEETAAAPPVEEGEEQKPPAAEELAVDTGKAEEPVKSECTEEAEEGPAKGKDAEAAEATAERALKAEKKEGGSGRATTAKSSGAPQDSDSSATCSADEVDEAEGGDKNRLLSPRPSLLTPTGDPRANASPQKPLDLKQLKQRAAAIPPIQVTKVHEPPREDAAPTKPAPPAPPPPQNLQPESDAPQQPGSSPRGKSRSPAPPADKEAEKPVFFPAFAAEAQKLPGDPPCWTSGLPFPVPPREVIKASPHAPDPSAFSYAPPGHPLPLGLHDTARPVLPRPPTISNPPPLISSAKHPSVLERQIGAISQGMSVQLHVPYSEHAKAPVGPVTMGLPLPMDPKKLAPFSGVKQEQLSPRGQAGPPESLGVPTAQEASVLRGTALGSVPGGSITKGIPSTRVPSDSAITYRGSITHGTPADVLYKGTITRIIGEDSPSRLDRGREDSLPKGHVIYEGKKGHVLSYEGGMSVTQCSKEDGRSSSGPPHETAAPKRTYDMMEGRVGRAISSASIEGLMGRAIPPERHSPHHLKEQHHIRGSITQGIPRSYVEAQEDYLRREAKLLKREGTPPPPPPSRDLTEAYKTQALGPLKLKPAHEGLVATVKEAGRSIHEIPREELRHTPELPLAPRPLKEGSITQGTPLKYDTGASTTGSKKHDVRSLIGSPGRTFPPVHPLDVMADARALERACYEESLKSRPGTASSSGGSIARGAPVIVPELGKPRQSPLTYEDHGAPFAGHLPRGSPVTMREPTPRLQEGSLSSSKASQDRKLTSTPREIAKSPHSTVPEHHPHPISPYEHLLRGVSGVDLYRSHIPLAFDPTSIPRGIPLDAAAAYYLPRHLAPNPTYPHLYPPYLIRGYPDTAALENRQTIINDYITSQQMHHNTATAMAQRADMLRGLSPRESSLALNYAAGPRGIIDLSQVPHLPVLVPPTPGTPATAMDRLAYLPTAPQPFSSRHSSSPLSPGGPTHLTKPTTTSSSERERDRDRERDRDREREKSILTSTTTVEHAPIWRPGTEQSSGSSGSSGGGGGSSSRPASHSHAHQHSPISPRTQDALQQRPSVLHNTGMKGIITAVEPSKPTVLRSTSTSSPVRPAATFPPATHCPLGGTLDGVYPTLMEPVLLPKEAPRVARPERPRADTGHAFLAKPPARSGLEPASSPSKGSEPRPLVPPVSGHATIARTPAKNLAPHHASPDPPAPPASASDPHREKTQSKPFSIQELELRSLGYHGSSYSPEGVEPVSPVSSPSLTHDKGLPKHLEELDKSHLEGELRPKQPGPVKLGGEAAHLPHLRPLPESQPSSSPLLQTAPGVKGHQRVVTLAQHISEVITQDYTRHHPQQLSAPLPAPLYSFPGASCPVLDLRRPPSDLYLPPPDHGAPARGSPHSEGGKRSPEPNKTSVLGGGEDGIEPVSPPEGMTEPGHSRSAVYPLLYRDGEQTEPSRMGSKSPGNTSQPPAFFSKLTESNSAMVKSKKQEINKKLNTHNRNEPEYNISQPGTEIFNMPAITGTGLMTYRSQAVQEHASTNMGLEAIIRKALMGKYDQWEESPPLSANAFNPLNASASLPAAMPITAADGRSDHTLTSPGGGGKAKVSGRPSSRKAKSPAPGLASGDRPPSVSSVHSEGDCNRRTPLTNRVWEDRPSSAGSTPFPYNPLIMRLQAGVMASPPPPGLPAGSGPLAGPHHAWDEEPKPLLCSQYETLSDSE

SEQ ID NO: 1741 - DNA, 3887 bp, Homo sapiens
gcaaacatactttaataagttaaagaaaataacaaaaacagtacagcaaagatactgggcaatgaaagaaagaaacatacaatttcaaaggtataacaaactgaggcattctgtaatatacattcaggctatttttaggggaaagaaagctagaagacatttaaaaatgatgcatatagccgcaactctcattcagaggagatttagaactctaatgatgagaagaagattcctctctctcaagaaaactgctattttgattcagagaaaatatcgggcacatctttgtacaaagcatcacttacagttccttcaggtacaaaatgcagttattaaaatccagtcatcatacagaagatggatgataaggaaaaggatgcgagagatgcacagggctgctactttcatccagtctactttcagaatgcacagattacatatgagatatcaggctttgaaacaggcctccgttgtgatccaacagcaataccaagcaaatagagctgcaaaactgcagaggcagcattatctcagacaaagacactctgctgtgatccttcaggctgcattcaggggtatgaaaactagaagacatttgaagagtatgcattcctctgcaacccttattcagagtaggtttagatcattactggtgaggagaagattcatttccctcaaaaaagctactatttttgttcagaggaaatatcgagccaccatttgtgccaaacataaattgtaccaattcttgcacttaagaaaggcagccattacaatacagtcatcttacagaagactgatggtaaagaagaagttacaagaaatgcaaagggctgcagttctcattcaggctactttcaggatgcacagaaaaaaaaatatattacatttcagacttggaaacatgcttcaattctaattcagcaacattatcgaacatatagagctgcaaaattgcaaagagaaaattatatcagacaatggcattctgctgtggttattcaggctgcatataaaggaatgaaagcaagacaacttttaagggaaaaacacaaagcttctattgtaatacaaggcacctacagaatgtataggcagtattgtttctaccaaaagcttcagtgggctacaaaaatcatacaagaaaaatatagagcaaataaaaagaaacagaaagtatttcaacacaatgaacttaagaaagagacttgtgttcaggcaggttttcaggacatgaacataaaaaaacagattcaggaacagcaccaggctgccattattattcagaagcattgtaaagcctttaaaataaggaagcattatctccacattagagcaacagtagtttctattcaaagaagatacagaaaactaactgcagtgcgtacccaagcagttatttgtatacagtcttattacagaggctttaaagtacgaaaggatattcaaaatatgcaccgggctgccacactaattcagtcattctatcgaatgcacagggccaaagttgattatgaaacaaagaaaactgcaattgtggttatacagaattattataggttgtatgttagagtaaaaacagaaagaaaaaactttttagcagttcagaaatctgtacgaactattcaggctgcttttagaggcatgaaagttagacaaaaattgaaaaatgtatcagaggaaaagatggcagccattgttaaccaatctgcactctgctgttacagaagtaaaactcagtatgaagctgttcaaagtgaaggtgttatgattcaagagtggtataaagcttctggccttgcttgttcacaggaagcagagtatcattctcaaagtagggctgcagtaacaattcaaaaagctttttgtagaatggtcacaagaaaactggaaacacagaaatgtgctgccctacggattcagttcttccttcagatggctgtgtatcggagaagatttgttcagcagaaaagagctgctatcactttacagcattattttaggacgtggcaaaccagaaaacagtttttactatatagaaaagcagcagtggttttacaaaatcactacagagcatttctgtctgcaaaacatcaaagacaagtctatttacagatcagaagcagtgttatcattattcaagctagaagtaaaggatttatacagaaacggaagtttcaggaaattaaaaatagcaccataaaaattcaggctatgtggaggagatatagagccaagaaatatttatgtaaagtgaaagctgcctgcaagattcaagcctggtatagatgttggagagcacacaaagaatatctagctatattaaaagctgttaaaattattcaaggttgcttctataccaaactagagagaacacggtttttgaatgtgagagcatcagcaattatcattcagagaaaatggagagctatacttcctgcaaagatagctcatgaacacttcttaatgataaaaagacatcgagctgcttgtttgatccaagcacattatagaggatataaaggaaggcaggtctttcttcggcagaaatctgctgctttgatcatacaaaaatatatacgagccagggaggctggaaagcatgaaaggataaaatatattgaatttaaaaaatctacagttatcctacaagcactggtgcgtggttggctagtacgaaaaagatttttagaacagagagccaaaattcgacttcttcacttcactgcagctgcatattatcacctgaatgctgttagaattcaaagagcctataaactttacctggctgtgaagaatgctaacaagcaggttaattcagtcatctgtattcagagatggtttcgagcaagattacaagaaaagagatttattcagaaatatcatagcatcaaaaagattgagcatgaaggtcaagaatgtctgagccagcgaaatagggctgcatcagtaatacagaaagcagtgcgccattttctcctccgtaaaaagcaggaaaaattcactagtggaatcattaaaattcaggcattatggagaggctattcttggaggaagaaaaatgattgtacaaaaattaaagctatacgactaagtcttcaagttgttaatagggagattcgagaagaaaacaaactctacaaaagaactgcacttgcacttcattaccttttgacatataagcacctttctgccattcttgaggccttaaaacacctagaggtagttactagattgtctccactttgttgtgagaacatggcccagagtggagcaatttctaaaatatttgttttgatccgaagttgtaatcgcagtattccttgtatggaagtcatcagatatgctgtgcaagtcttgcttaatgtatctaagtatgagaaaactacttcagcagtttatgatgtagaaaattgtatagatatactattggagcttttgcagatataccgagaaaagcctggtaataaagttgcagacaaaggcggaagcatttttacaaaaacttgttgtttgttggctattttactgaagacaacaaatagagcctctgatgtacgaagtaggtccaaagttgttgaccgtatttacagtctctacaaacttacagctcataaacataaaatgaatactgaaagaatactttacaagcaaaagaagaattcttctataagcattccttttatcccagaaacacctgtaaggaccagaatagtttcaagacttaagccagattgggttttgagaagagataacatggaagaaatcacaaatcccctgcaagctattcaaatggtgatggatacgcttggcattccttattagtaaatgtaaacattttcagtatgtatagtgtaaagaaatattaaagccaatcatgagtacgt

SEQ ID NO: 1742 - protein, 285 aa, Homo sapiens
MKERNIQFQRYNKLRHSVIYIQAIFRGKKARRHLKMMHIAATLIQRRFRTLMMRRRFLSLKKTAILIQRKYRAHLCTKHHLQFLQVQNAVIKIQSSYRRWMIRKRMREMHRAATFIQSTFRMHRLHMRYQALKQASVVIQQQYQANRAAKLQRQHYLRQRHSAVILQAAFRGMKTRRHLKSMHSSATLIQSRFRSLLVRRRFISLKKATIFVQRKYRATICAKHKLYQFLHLRKAAITIQSSYRRLMVKKKLQEMQRAAVLIQATFRMHRKKNILHFRLGNMLQF

SEQ ID NO: 1743 - DNA, 341 bp, Homo sapiens
  misc_feature (46)..(46): n is a, c, g, or t
  misc_feature (130)..(130): n is a, c, g, or t
agtcttttgtgcagcaccctttaaagggtgactcgtcccacttgtnttctctctcctggtgcagagttgcaagcaagtttatcggagtatcgccatgaagttcgtcccctgcctcctgctggtgaccttntcctgcctggggactttgggtcaggccccgaggcaaaagcaaggaagcactggggaggaattccatttccagactggagggagagattcctgcactatgcgtcccagcagcttggggcaaggtgctggagaagtctggcttcgcgtcgactgccgcaacacagaccagacctactggtgtgagtacagggggcagcccagcatgtgccagg

SEQ ID NO: 1744 - DNA, 148497 bp, Homo sapiens
gatccagggtgcctctctctgttggtgatcacaccaattcttcccaggttggcacctccagtcaccatacacaggttaccagtgtcgaacctgatgaagtcagtaatcttgccagtctccaaatcaatctgaatggtgtcattcaccttgatgaggggatcagggtagcagatggtacgagcatcatgagtcaccagatgagggattccttttgtgcgcacaaatattttttctcacttttcacaacttgtacttggcctcctcaggtgtaatacgatgtacagcaaagtgacccttggtgtcacagatcagacagaaattctctcccatcttgtcaatgctgatgacatccatgaatccagcagggtaggttatatcagtgcggaccttgccatcgatcttaatgaaccgctgcatgcaaatcttctttacttcctctcctgtcagggcatacttaagtctgttccttatgaaaatgatgagggggagacactctctcaacttgtggggactggtggatggatgaggagcaaacacaccagtcaatttatccagcatccaatgctttggagctgctacctgctttagatgcttcttgggaccacgagccatggctacgttaggcacagaaaaagaaaaaataacaattttaaaaattagccaggcatagtggcacaagcctgtagtcctaactactcaggaggctgaggcaggaggattacttgaacccaggagtttgaggctgtagtgagctatgactgcaccactgcactccagcctggacaacagagatagaccctgtctctaaaaaaataaaaaagaaaataatgaggatatagaagaattgaacaacaccttcaaccaacaggatctaacagaacaaacaaccctataacagcagaatacatgtgcttttcaagtgcctagggagcattcaccaagattaaccatgtcctggattttaaaccaatctcaacaaatgctaaaaaaaaataataaaactagaaatccctaatcactgccctcttttccaagctgcctgtgactcttacccagatgttctcaatacataagctttcaacaggggagaatgatagaaattactggagaacccccattccaggtcactgaggcacatgaccttctactaaagaaataatttccagtaaaaggatacaataaagggaatagatgttcccactaggcctggattaatgagtactctatcttggagaaaagtgattatttccagagctgcctctggcattcttcctccacccagaagtgatgctgtgagaagtgaaattacttataaatcagtagtgcccaaagcactttataaaggaggtcccacatgtaagctccaccaagtataaataataacactaataacacctccctcatcttgtctttatatctgggtcttggaggatcaaagccatccgagaggtacagcttcaaaggcgtctccttcccagatccaggaatgggcgcactccaacaggcccctacatccttggcttccacatttcacaactgttagaggctccaaagcatttacagtggttgatagagtctttctgaatatgatacctcttttataaaattaatggcactatttccggtggtggcatcagcaaagaaactccttttcaagggcagcgtgtccctcccattgtttgattttctgccatccctttaagtgccttaatggaatgcttgtacgaataaagttgactgccaacaaattttgctttgaatatcttttacatttcaaggcacccctggaaataatcggagactatgggagacatggaattagggagctgtgggaaagcagggttgacagtgtcatctcaagatttggtggacttcattattcagtggccagaagtagggaggaggggagtctggggcctgagaagagggttgccctgatgggctggtactggctctggagtcactgactgtgccagggaccagatgcctgcagaagcatggttcagcgttatacctgcagggagacgaatcacccaagagtgtctaaaaccatcctcatagggatttgtggaacttcaaacttgagagagatgatttcgggtatctggtggaagaaatttctaagcagcaaagcattcaagaggaagcagagcatggaaatttggaaaatttgcagcctgaacatggaatagaaaagaaaaacccattttctggggagaaatttaagcctgctgcagaaatttgcataagtaacgaggagccaaattttaacctccaaaacaatggggtaaggtctccacggtatgtcaaaaaccttcatggcagcccctcccatcacaggtccagaggcctaggagggagaaatggtttcctgggctgggctcagggacccctgctgtgtgcaaaatagggacttggtgccctgcatcccagctgcttcagctgtggctaaaaggggccagagtacagctcagtctgtagctttagagggtgtaagcccaagccttggcagcttccacatagtgttgagcctgcaggtacacagaagtcaagaattgaggtttgggaacctctgcctagatttcagaggatgtatggaaatgccaggatgttcaggcagaagtttgctgcagtggtggagtcctcatggagaacctctgctagggtagtgagggagggaaatgtggggtcagagcctccacacagagtccttaatagggcactgtctagtggagctgtgagaagagagccaccatcatccagactccagaatggtagatccaccaacagcttgcaccatgtacctggaaaagccacagaaatgcagtgccagtttgtgaaaacagccaggagtaggggacagtaccctgcaaagccacagaggtggagctgcccaaggctgtgggaacttacctcttgcatcagtgtgacctggatgtgagacatggagtcaaaggagatcatttgggagctttaaggtttaatgactgccctattggatttcagatttgcatggtgtctgtagccccttagttttggccaattcctctcatttggaatgggtatatttacccagtgcctgtacccccattgtatctaggatgtaactaacttgttttgattttacaggctcataggaggaagaaacttgccttgtctcagatgagactttggatttggacttttgggttaattctggaaaaagctaagactttagggtactgttggaaaggcatgattgtgttttaaaatgtgaggacataagatttgggaggggccaggggtggaatgatatggtttggctttgtccccactcaaatctcatcttgaatagtagttcccataatccccatgtgttgtgggagggatgcagtgagaggtaatcgaatcatcggggtggtttctcccatgctgttcttgtgatagtaagtgagttctcacaagatctagtggttttataaggaccatcccttgtaagggttttccccctttgttcagcacttctccttcgtgcctcatgtgaagaaggatatgtttgcttccccatccaccatgatcgtaagcttcctgaggtctccccagccctgcagagccatgagacaattaaacctctttcttttataataataataataataaaaccatcctcatagggttaacaagaatttagatgccaggtttggggcagaaatatagttataattaagcattaatcaggctgcactctggcccacttccttaaactgaaagtcatgcagctcaagatactgactgtttaaatcccattttccccatagataggacttctgatgttagaatcattaggcttttgtttaagaattgctcaagatattcttcatatcctgaattccatcaggaaaggctgatgccaatgagtttgaagaccccacgaggaaccaaatcagcatgagaatgcagtttcttcatctccctgtcctatgacttcaccctgcactcttccaccaatcaacaatccccacatctcagccctttccaaagcccttaatatccgtagctccaaattccttaggttggtggatttgaggtttcttcccacctcctcatttagctctcctatgattattagactttttctctgcagcaatcccccttgtcttgttatattgacttgccaggcattgggcaaacgatcctgttacatatccactgagccatatgtggaagcctcggccagtgccagtcaatatcaaggaatttggtccatttctagataagaatttggggttgttgattagttgggataaggggaaggaaatcatcaggatgtggaaactgcattctttggtgactcagctcctgtgaggtccttaagaccagctggcatcagtagtttcattggtatgcagaaactgaaagagtatctcaaatggaaaagttaatgttttataatgttgaagttgttatctatagagcagctaaggggaaggatcatctcgtaacagggttcatgtaatcctgagtcgataggccccagacagctgtgaggaagtggatcagagagcaagcggacctcatggtcaatgctgagtgtgctgcaagcttggtttatcttcatttctcccccttccttctttcctgattaattttataaagtctatagggacagtttcaccacttagatgttcccatccctcctctgctgtcatctctctaggctggaaccccattgtgcatgggctcagcataccctttggccagataatgggaatggtggtctgttcccacctgctcccacctctgtagcgacttttctctagcaattaacccctctctttcctgtgccatcaactgtccccataaaccaactcctccccagcattcaaacatctcccccatcttaaaaaaacaaaactgatcttgattcccattctggaagcggccccttcccctcctccccaaataactaaacttacttaagagtgccctgcatccagcctgcattccctcctcacccagcagagctgcacctgtggaaagcaggctgcagctctcgtgttccaccgcaccctgctgcggccctgtccacagaccatctgattggcacccgacagtgtacataccccaggactcattaccctcctccttgaaacttcctctgctgcgttcgttgctgccatgttttgtgttcttcctgcctctctggtttcttcttcagatgcatggctggtttcctctctgcgcatgagcttcagtcctgctctctctctcttttcttttgctccttagcagtactttatccctgggttccaagtgtcaccaatgtgctgacaaccactgggcttaaatttccagtgcagccaatcccctgagctctgaacgcatcctgccgactgcctgcctcgcatcttccactggaaaatggcacttctctccacgtgagtgtgaacctacactcctaccttccctcacccctgcacccaaaccctcagcaacccctgcacctgctccctctgaaatctcctctgccagcggcttctccttacatccactgtcactactcatgtccagagcaccggcatctctccctcgacctccacaagcctcccagcttccactcctgccttctccaaaccccacacagcccttgagccacccatggtcatcatgtctctttcttgcccgaagtcttcagtggatttccactggctttcactgagagctctaagtcctgaacatgacctccgaggcctggcatctgctgccatgggccccctttcttgctgttctcatgtccttacccctttgtcactgtgtccagccacactgacctcctttcaattccctgaactcacagagccctttctcctggtcaggacggtgctccctctgctccctctgcttggagcagcctccctcccattctctggccagctcacaccaactcctctctaggtcagtgccataaatacccatccccagggaggccttccctccaccccagcatgcatctcaccttccattgtgatctcttgtcacacctcagcttctccctctcagcatgtattacattttgcattctgaaatgttcatttgtgtgaatcattgtttaatatctatttcttccacttaacaacaacctaagggcaggggtgatcctgtctgttttcaccatgactataaccccctagctttcagaatagaaataggcacagagtaggggttcaataaatttttttgaatgagtactaagtattctgcagtaacagataaacacacagacacacagatgcttattaaatacaaaagcctgattgcctgttgtagctgttggtgacccacccaatctctttcactgttctggagtccgcatcctcccagctgctgtgtgtatcggcttcaaatgtctcacagctgccctgcttctttggggagctgccctcagcagaggagagctgcctggctggcaaccctcagcgccatggatggcaggcctgccccttgcctcccggtagggtcagcaggacagggaaggggaaggcagccctgcagtgctgttcatgctccagggttccctatcagtaggctgacgctagacatgcctaagcccacttctctccctctcgtgctcccataaccagtatttcttgagagttctcccaccgtaagccacttgaacaagaaactctgaagtggggcatggtggctcgtgcctgtaatcccagcaatttgggaggctgagatcatttgagtggatcgtttgagcccaagagttggagaccagcctaggcaacatagtgagacccctgtctctacaaaaaaaattttaaaaattaggtgggcatagtggcacatgcttgtagtcccagctacttgggaggttgaggtgggggatcacttaagcccagaaggtcaaagctgcagtgaaccatgatcatgccactgtacgtcagcctgcaacagagtgagactctttattaaaagaaagagagagaagagagacacagagagagagaatcaagaaagcaagagagaaagaagagaagagaagagaaaagaagggagggagagaggaaggaaggaaggaaggaaaaagaaactatgtcccaggttctgcttctaggaagtccagtaaaaaacacttataatggggaagaaaatatatgtggcatcagggatgagagggagaaattaaacgaaacaaaatgagagaaaagtcttgtaccagcgcatgtgcctaagaattgaggtgaatgagtcaaatctcgcatcttttatccttccttggaattattgaattaataaatgggagaagagaaagaaggagtggaagagaggagagcagagtggaggacagcagaggatttctcttttagtgcccctaggaggtcatgatgtgtcccatgaagccagaaggggtctgctggtccccaatcccttaatggaatctcagccgcttctaaaggaggaaaaatgaacattagttccctaagcctcctttgccttggagccaaccagcatgccctgtgttctacaacataatcctttgctaatcactagctagggcactaggtaaagcagtttttcaaatcctggctggagctcatggcatttgagatatacaaatatgttgccatggtgacacactgacagattaattactgaaacctccaggagtaaagctgctttaatggtgtaaccttagtggataggagcttgtgggggggtgggggggtgggggcgtgtagtgattcacagccctctcagcacaaagttggggccagcagatctggggctagaggtaggtggagcagccacaacccttacctcacaccaacatttcctggagccctgggcttcctgagtctgtcctgcctctagaaatggaatctctaaccccaaagcttgtccttgaaaaatacctgcatcatccttttatccacgcctttgccagtcattatgcagcctgcatctctgcatgattaatgagcaaatcctcacagccactcccacttcccccaccactaagctcttcttagctggaaaatcctctgaagctattggctagcagggctctgcccaacaagagtattaatgttaggcatatgattcctcaaaggaagagagaagaaaaatattcggggacaaacacaatggatgcagatctcatcagggaacccaaggtagaatctagcccacatttttaagttaacaagattagaaaattatgtaattctcacaaataagcttgtcccttaaaatccacaatagacttttacaaattcaggtgggttctttggcccaggctggagtgaaatggcataatcttggctcactgcaacctccacccactgggttcaaacgattctcctgcctcagcctcccgggtagctgtgattacaggcatgcaccaccatgcccagctaatttttgtatttttagtagagatggggttttgccatgttggccagactggtctctaacacctgacctcaggtgatccgcctgcctcggcctcctgaagtgctgggattacaggcatgagccaccttgcctggcctcaggtgggttcttatatgagccttggtggctctcatttctcccaaatgatgagctgagatgaaggcatatatatctttgactggttatggagttgagatattcacagtaagtttgcaataataacagaagcgactattaccacacctcagtggaaacggagttttccaaaaagccacaatttcagataaacctgactctaagtgggaaaagaaataagacattaaaggagatatttcgaagctttagaaaggcattcgaaaagtttttgagcccatctaacaagcatctctttgtgttttgtctcctttctctaatatttaaatgtaattttgatgtctgccagattaaattatccattgaccaatttatgtcattaaacttaaatgctataattatccttaataagtataactactagcctgtttttgcttaatggttgtaaagttttatgccttttaataatcctcctacaggtttgaagtttgtgtttctcagatagctgaaattctgctctgcatagtgtcaaaccagatcaaagagtctcgctttgttcacgagaacaatatgagcttgaaaatgcggggttggaagaaaaaacacaccagaaaatgatgttctttcaagaaaactggcaaaccaagaaaatcctacacaaattttgcaaaaagaaggctaatctagaatacgtttttctctacatacacagttcaagtgcaattaaaaaaagaatttttttcagcattaagtttatataaaatgggccctctttttattccatgtgcttcataatcttctttctcagggatatttagagttggatttttgcagatgatgccctgttctcttcatgtcacagcatgcgtttttgttttttgttttgagagccagggtctgcccaggcgcggtgattcatgtctgtaatcccagcactttgggagtccaaggtgggtggattgcttaagctcaggagttcaagaccagcctgggcaacatggcaaaacctcatctctactaaaaatccaaaaattagccaggcatggtggtgcacgcctcccagctactctggtggctgaggcaggagaattgtttgaatccgggaggtggaggctacagtgagccaagatcgcaccatttcaccccagcctgagcaacagagtgagaccctgtctcaaaaaataaataaaataaaatagggagttggggtctggctctgtcacccaggccagagtacagtaatgcaatcatagctcacagcagcctcaaattcctgggctcaagcaatcttcctgcctcagcctctcctgtagcttgcattacaggcatgagccatctcacccagaaaacaacatacacttttcattccagattttacatctctccactctgggttatttttttgctttggttctatctattgaggtgtcttattttcaactaagtgttgtgtttaggaacttctttttgtgggtgaatgtttatactaactcccatccttaacccagagtgggattaagacttttttcttcttttttttccccttacttatatggcatcaaaaacaaaagcaaaaataaatcttggagtagtacagagaaacctgattccaaaaggtcatcataccagcctgggtaacacagcaaagctctgcctccacgacaaatacaaaaattagctaggtgtggaggtacacacctgtagtcctagctctctgggaggctgaggtgggagaatcgtttgagtctaggagtttgagggtgcagtgagctatgatcagaccactgcactccagcctaggcaacagagtaagaccctgtctcatacaaaaacaaaaaagattattgtaaaggtgaaggaaactggctattacaataggaagaactctctaaccataagatctgcaaatgtctcaagagttaagcaaaaaggggttttcttttatagggaagagaaaatgaggctagaaagtggggtaaatggaagtgtcatgatcagaaaacagatcagcagccgggcacggtgggtggctcacgcttataatcccagcagtttgggaggccaaggcaggcagatcacttgaggccaggagtttgagactagcctgaccaacatggtgaaaccctgtctctactaagaatacaaaaaaattagccggccatggtgatgggcctctgtaatcccagctacttcagaggctgaggcaggagaatcgcttgaatccgggaggtggaggctgcagtgagccaagatcatgccactgcactccagcctggacgacacagtgagactccatctcaaaaaaaaaaaaaaaaaaaaaggaaaagaaagaaaagaaaaaagagagtagatcagagaaggttgcaccccaggtgggcctaggctcaggaggggctgctgaggaagagcttgttctggcccaggctgagagtgggccaagttcagggccctggggaaaggagattttgattaagaagggttttgttttgtttgatcaatagggacctgctgctcagccaatcatttatgaggtaaagaacaggaatttggcaggttcgtatctggctttttctaggtaaacaagggcaggggtcccaagcccctgggccacggaccagtaccagtctgtggcctgttaggaaccgggccccacagcaggaggtgagcagcgggccagccagcactaccaccgagctccacctcctgtcaggactttaacttctcacaggaccacgagccctattgtgaactgtgcatgggagggatctaggttgcacactccttatgagaatctaactaatgcctgatgacctgaggtagagcagtttcatctggaaaccactgcccccacccatctgtggaaaagttttcttccatgaaactggtccctggtgccaaaaaggttgagaactgttgaactaaggggcatccatgactcttatctatgttatatgtggaaggggggggggttcatcttcgcagtacatgccttttgtttcccagaacacaaaagtagggggatttcttaaccctcactcttttccaagagttacagggtactcttaggtaaggtttagtgttgtcagtgaccacattcaagaccagacttcaagaggcccagaacacattatgtgatggtttgctggtctagaagcaaaagagagcatctatgttggcagaaagagtgaacagggttgtcctatctggggcatcagcctttactcatgcctcttctgcctcctccgtagttccacagaagcaacaatgagctacctgtgaactggagaaaactgacaatctagattctttccattctgcagcctactttctataaccttattagttcataacacaataatctcattttagaatttcatttatctctcattagtcactgctttcagaaaatagcaatttacctgtctataaaaataatgcatttttatcattgactatgtagacataatgggaaggataacatcagcaagatggccaagtaggaagccctggactctccttctcccagtggacacagctcaacaacggtgcatggacaaattcccttttcgaggaattcagaaactcattgagaagctcctgcgccctgcatgaacatgaaaccagccgcattgaagccagtaggaaaattcaaaacacactctcattgtaatccctaccccaacacatcaccataccatcagaaggaaaccatctgttcccagcttctccctaggagaagagttgaagcaggtacccagccttccaacttttccaggggctgctcaagggatagatttctgtctcttctgtcttagagcactgatgagacctagtaaaatcaagatgctttgggggcctctaagaacaaagcacaaaggtttgagaggcccccaaaatctctgggcagactgactgatgaggatttcctcctgcataagttcagtcgtgaaggtagggaaaggtggctgcattttctaatgcatagatactgacacaaaaactcaaggaaaatgaagaaacagggaaatatattcggaacaaagcaacaggataaatctccggaaacagtctcaatacgatggagattcaagcacgcctcattttattgcactttattgcattttgcagacactgtgtgtgttttttgtttgttcgtttgtttacaaattgaaaaaaaaaaaaagactctgcattaagcaagtctagcaatgccattttcccaacagcatgtgctcacataatgtctctgtgtcacattttggtaattcttacactatttcaaacattgtcattattcttatgtttttcatggtgatctgtgagtgataatctttgatgttactgttgtaattgttttggggtaccacaaaccatacccacataagatggcaagtttaattgataaatattgtgtgtgttctgactgctccactgaccagccattctcccatctatctccctctactggggcgtccctactccctgagacacaacaatattgaaattaggccaattaataatcctacaatggcctctaaatgtccaagtgaaaggaagagtcccacatttctcactttaagtcaaaatctagaaatgatcaagcttagtgaggaaaggatgacaaaaaccaagacaggctgaaagctaggcctcttgtgccaaacagtcagccaagttgtgaatgtacaggaaaagttcttaaagcatattaaaagtgctactccggtaaatatataaatgataataaagcaaagcagccttattgctgatatggtgaacgtttgagtggtccagatagaagatcaaagcaggaaaaacattcccttaagccacagcctaatctagagcaaaatccaaactctcttgaattctttgcaggttcagagaggtaaggaagttgcagaagaaaagttggaagctaacagaggttggttaatgaggtttaagtaggaaaactgtctctgtaacataaaagtgcaaggtgaaacagtaagtgttgatgtagaagctgcctcaagttatccagaagataattaagataattgatgaagatggctacactaaacaacagattttcaatgtagatgaaaaagctttctattggaagaagataccatctaggactttaacagctaaagaggagaaagccaatgcctggcttcaaagtttcaaaggatgggctggactcttgttatggactaatgcagctagcgactataagttgaaagcaatgcttatttactattctgaaactcctagagcccttaagaattatgccaaatctactctgcctgtgctctaaaaatggaacagcaaagactggatgacagcacgtctgtttacagcatggtttactgaatatttaagcccacagttgagacgtactattcagaaaaagagattgttttaagtattactcctcagtggcaatgttcctggtcaaccaagagctctgatacagatgtacaaagaaagtaatgttgttttcatcctgctaacacaacattcattcttcagcccatggatcaaggagcaatttcaactttcaagacttattatttaagaaacatattttgtaagactatagctgccatagatattgattcctctaatggatctgtgcgaactaaatagaaaatcttctggaaagaattcaccattctagatgccattaagaagatttgtgatttatgggagaaaatcaaaatagcaacattaactggagtttggtaggatttgattccaaccctcatggatgactttgagtgtatatctgtcctttcccacattgctgtaaagaaatacctgagactgggtagtttataaagagatttaattggcttatgattctaaaggctgtacaggaagcatagtggcttctgcttcttcaggaggactcaggaagcttccaatcatggtggaaggcaaagggggagtgaggcagttcatatggctggagtaggaggaagagagaaagtggggaggtgccacatgcttttaaacaaccagatctcatgagaactctatcatgaggacagtactagggggatggtgctaaaccattagaaaccatccccatgattcaatcacctcccatgagtccccacctcccatcaggcctcacctccagcatttggggattatatttcaatatgaaatttgggtggggacacagattcaaactgtatcattctgcccctggcccctcccaagtctcatgtccttttcacatttcaaaacacaatcatctcttctcaacagtcccctaaagtcttaactcattccagcattaactcaaaagtccatagtccaaagtctcatctgagacaaggctagcctcttccacctataagcctgtaaaataaaaacaagttagttacttccaagatacagtggtgatataggcactgggtaaatactccattccaaaagacttgcccccatgattcaattacctcccaccaggtccctcccacaacatgtgggaattcaagatgagatttgggttgggacacagccaaaccatattgttcactcctgacccctcccaaatctcatgccctcacatttcaaaactaatcatgccttcccaacagtccccccaaatcttaactcatttcagcattaactcaaaagtccacagtccaaagtctcatccgagacaaggcaactcccttctgcctatgagcttgtaaaatcgaagcaagttagttacttcctagatgcaatgaggttacaggcattgggtgaatacagccattccaaataaaagaaaatggcccaaagcccccatacaagcccaaaacccagcagggcagtcataaaatcttaaagctccaaaataatctccttttactccatgtctcatgtccagagcactctgatgcaaggggtgggttctcaaggccttgggaagctccacccctctggatttctaggggtcagctcctgcgactgctctcatgggctggcgttgcatgcctgtggctttttcaggttcagggtgtaagctaagattggatctaccattctggggtctagaggatagtggccctcttctcacagctccactaggcagtgccccagtggggactttgtgtggaagctccaaccccacatttcccctctgcactgccctagcagatgttatccatgagggctccacccctgcagcaggcttctgcttggacatccaggtttttccatacatcctctgaagtctaggtggaggctcccaagcctcaactcttgcactctgagcacccacaggcttaacaccacatggaaggtgccaagacttatggcttgcactctctgaagcagcagcccaagctgtacctgggccactttaagccatggttagaggtggggcaattgggacacagggagcagtgtcccaaggctgcaaggggtggcagggcccaggcttggctcacaaaaccatttttcccttctagacctctgggcctgtgatgggagcagctgcacaaagttctctgaaatgccttggaggacttttttaaattgtcttggatattagcacttggatcctctttacttatgcaaatttctgcagcctgcttgaattccttccctgaaaaaaatgggcttttcttttctaccacacggccaggctgcaaattttccaaatttttatgctctggtttcccttttaaatacacacgtggttgtgcatgcctgtaatcccagctatgcaggagcctgaggcgggagaatcacgtgaacccaggaggtggtggttgcagtgaaccgagatcatgccactgcactccagcctggcaacagaatgagaccccatctcaaaaaaagaaaaaaaaaaaaaagaagaagtgtagcctgaaaatgtgactaaattgctgcaacctcatgatcaaacttgaatagatgaggagttacttcttacagataagcaaagaaagcagtcaatccacactaagacatattctatagatgctcattgagttatgatggggttacatcctgataaatccatcagaagttgaaaatatcaccagtcaaaaatgcatttattgctggaaacactgcagacagtctttgattatgatggctcaacttatgattttttgatgagccagagcaattacttagtcaagaaaaagaaacaaaaggcacccaaaactatctctgaaaataatatgacttttttttttcttcagatagagtcttgctctgtcatccaggctggagtgcagtggtgtaatctcggctcattgcaacgtctgcctcccaggttcaagcggttctgctgcctcagcctcctgagtagctgggattacaggtgcatgccacgaagctcagataatttttgtatttctagtagagacagggtttggccgagttggccagtctggtcttgaactcctgacttcagatgattcgcccaccttggcctcccaaagtgctgggattacaggcatgagccaccacacctggcaacatgatcttatatatagaaaactctaatgcgtccatgaaaaaaactcttagaataaaccaattcagtaaagttgcagggtataaaatcaacatgtaaaaatcaattgtatttctgtacactaacaataaactacctgaaaaggaaaccaaaaaaaatcccatttatagtagcatcaaaaagataaattacttatgaataaccttaacaaaagaggtgaaagacttgtacactgactattgcaatacactgatgaaataaattaatgaagacacaaatagatgaaaagacattctgtgtttataaagtgaaagaattagtattgttgagattcccacagtacacaaatgatctacagattcaatgcaatttctttcaaaatcccaatggcattttttatagttgaagaaaaaaaaatcctgaaattggtatggaaccacaaagaaccccaaatagccagtacaatcttgagcaaaaagaaaagagctagagacatcacaacctcctggtttcaaaatacattgcaaagctacagtaattaaaacagtatggtactggcataaagacagacatatagatcaataaaacagaatagagaacccagaaataaatgcaggcatatatggtcaactgatctttgacagggtgccaagaatacacagtagagaaagaatagtcagttcaacaaatggtattgtgaaaaccagatatccttgtgcaaaaaaaaaaagaaactggacccttatcttacaccacacacaaaatcagctaaaatgaattaaatacctgaaattttaaaatttctagaataaaacatatagaaaaagctttatgatatagttctggcaatgatttattggttatgacatcaaaggtgcaggcaacaaaagcaaaaatagataattgggactatatcaaactaaaaagcttttgcaaagcaaaggaaataactgggtgaaaagacaacctatgggataagaaaaaatatttgcaaaccatatctgataaggagtttaaaactataatacaattgacccttgaaaaatatggctttgaactgtgtgggtccacttatacgcagatttttttcaaccaaatgtggataaaaaatacaatatttgggggaagcaaaacctgtgtatacagagggatgacttttcatatacatgagttccacagggccaaatgcagaacttgagtatgcatgaattttagtatacacaggggatcctagagccaactccctgcacataccaatgacaaccatacataaggaatttctacaactcaatagcaaaaaaaaaaaaaaaaaaaaaaaaaagacgtgatttaaaaatgggcaaaggacttgaatagacatttctccaaagaagacatagaaatggcaggtatatgaaaagatgctcaacattactttagggaatctttaggaaaatgcaaatcaaaaccacaatgaggtatcacctcacacctgttagaatggctacgatcaaaaagtcaaaagatcgcaagtgttggtgaggatgtagagaaattggaacccttgtactctgttgacaggaatgtaaactggtacagtcattatggaaaacagtttggagattcttcaaaaaattaaaaatagaactgcttctaagtatatatccaatcaattgaaaaccagattgcaaagagatatctgcactcccatgtattattcataatagccaagaaagagaaacaatgtaagtatccattagcagatgaatggataaagaaaatgtgatatatacagtacctacaatggaatattattcagcctttaaaaaggaagaaattgggcctggagcagtggctcatgcctgtaatcccagcactttgggaggccaaggtgggtggatcacttgaggtcaggagtttgagaccagcctggccaacacggtgaaaccccatctctactaaaaatccaaaaaaaaaaaaattagctgtgcctggcggtgggcgcctgtaatcccagctactcaggggtaatgtggtgttgctattcaatgggtataaagttcagttatgcaagatgaataagttttagagatctgctgtacaacattgtgcatatagttaacaatactgtattgtacgctaagaatctgttaagagggtagacctcatgttaaacattctaaccacaataaaaagaaaaaagaatttagaaattcaaaaaagtaatctaagttccacaaagtagaaggtaaccaaagttaacatttagataccttttctcttaagactttttcaaatgcacaaatctgtatgtgtacttttttcattgtatatttcttactagttatcacagtatattttattgatgttttgttgttgttgctactgttgctactatttgcatatgtggtttttgtttctgtttttgttttttgagacaagatctcactctgtcacccaggctgaagtgcagtggtgccatctcagctcactgcagcctcgagctcctgggctcaagtggttctcctgtttcaaccctctgagtagctgggactacaggcacacactaccatgctcagctaatttttgtggagacagggtctcactatgttgcccaggctggtctcaaactcctgggctcaagtgatccacttgccttggcctcccaaagtgttgggattggaggcatgagccactgtgcccggctgcgaatgtgtttcttaatagccacctgtcaatgcctatcagttaaagacctccaaggagttgaacaaattgggtttgctgctcattgtaatcaagaaaaatacacacctcagggaactctagggtgtcttagtaggaggatgttataaaagaattagaggattggggcttgtattagctgattttgagaagggttccagggagcaaggctgtgctctgaattggctactgtctggaaacaggggcagctctatgattgggtatctgaatcgctggtatttagaattagaaggcaggaagaataaagtgaagtaaagaagcagaatcacaactcagcctggacaaggcacgtttggtcacttttaatgtcttcttttgggttcagacatgattacagagaaatttgggttttgtcctgatccatcagtgagataaagtggccttgattgatgtttgtgttctgcttaagtgtttatgttcaacaggagatgacagcagcccggtggtaatgcctgttctcagctgtcaggggccacttctcatgccttactgaactctcttagtttgtaattgattctcttggacttctagttatgattttttaaaaatatgtcacaaattttatataatttctctcttttctctattcctcttattcttctataattttatactggaatttctagaacactatcaaagtataaaaatggtagaaggccttgatcctatttcttactttaattggaatgcctgtagtatttttatcattaaatatcagattggctgtttgggacgataatgatgtctgaagaggcttttcttcagtatactaaataaagatccttcctgttagtgtattcagaaatgactgttcaatttttttcaaatgttgttttgtatctatgaagataatcatatgcttttctccttttctattctgatgtgatgaaccatactaatggatttcctattattcaaatatccttgcactttcggaatgccaatttgaatttttcctgaatgagcatctgagtctgaagtactgcatttattcacaagtgagacttgtttctaaattttgtgatgtcaacttggctgtgttttagcatcagtgcacctctagtttcacaaaacaaattgggagattcacagcatttttatgcacctggaaacaagttacacagaataagaactgcctatccctttaaagcaacactgacccatagaactttctgaagtgacagaaatgctctatatctctcttctccaatatggcaaccactagccatatgtggttactgagcacttcaaaagtggctagtgaaactgaagaagagaattttccattttatttaattttaattaatgcaataacctatgaaaccatgtgtccaacatctttcttgatgtaatttcctaacaactgtttccatttcttctatggttattattctgactttctttttttttcttttctttttcagacaaggtcttgctctgttgcccaggctggagtgcagtggcacgatcttggatcactgcaacctccacctcccaggctcaagcaatcctcccacctcagcctccagcgtagctgggactacaggtgggcaccacgcctggctactttttgtatttttagtaaaatgaggtttcaccatgttgcccaggctggtctcaaactcctgggctcaagtgatctgctcaccttggcctcccaaagtgctgatattacagatgtgaaccaccatgaccagcctctgtttcttttgaaacaattttggcaattgataattgtcttagggaaaaaatttcctctgaattttcaaattcttaagcttagagttgtgtatcatttttcttacatggttttaatctcattctccataatatcctctttcttatgaatgttacataattgcattttctcaagtaagcttatcagaggcttgtctctcttgagggatctcaaacttaaatgcctacattgccaggcaactaagcatttgattttgagaccctcaaaaagttcccgtgctccttctgaaggcctatccctatacctacctacccctggataccacccctacccaccttctcaggagcctcatgtgattacatagccccttccccttgttgtacctccaacctttctctttgtctattgaattcttccactagcatttaaacatgccctaatctctagatttcccctgtttttccagctactccctaatctcccttctagttccttctacttcatgactgtattagttatctattgctccataacaaattacctcaaaattcagcactttaaagcaacaaatactgaggatctctctaggaatccaggagtggcttagctgaataggtctggctcagggcatctcactatgtcagctgaggctagagtcatatgaaggcttgccatggtgggaggtcagagggctcagttcctccccacatggacctctccaaagagctactcatgacatggtgacttcattcctccagaaaaagtaatccaagagaaagaaccaccaagacagagctacagcgtctttacaacctaatctcaaaagtgatagactattgcttctgccatatgctattagtcacacagacctaccctaatccaatgtgaatacctgcaagtggggaccttgggagccatcttggagggtgggcacattttaaaaattatttttccctggtgctaggtttttcttcaggtcaagaaaagtttcttctattttaccccctgatttctctgaatgttgcatcccatcgctatcaccatttatctgatgttgggcctccttcctctcttctcaatgtttactactttttcctgtcttgcatttcatcctgtacctttctcgctctattctgggaagctttctcaagttttctctccacatcactaatctaattttaaataggttttattcagcttcattattttttgaagatttaaattctataacaaaactctgcctattttttaacccccatttaagatagctcatcagccacctaccttgtcacttctgctgtattatcattcaccattagtctcatttcaagatcatatcttaagaatattgagaacacttcacaggcattttctaaaacttactccttcttttaaaaaaattttttaatatcaatagctttaggggtataagtggttttggttacaaggatgaattgtatataacagtgaagtctagaattttagtgcgcttgtcatccgagtagtgtacagtgtacccaataggtagtttttcatccctcacccccttgaccctccccacttctgagtctccattatccattatactattctgcatgcctttgcatacccatagcttagcttccacttataagtgagaacatgcagtatttggtttttgattcctgagttacttcatttagaataatggcttccagttccatccaagttgctgcaaaagacattattttcttcctttttaaggctgaattgtattccatggtgcatatatatacacacacacaaatatatatataacattttctttatccactcatcagttgatgggcacttagattgattccatatctttacaattgtgaattgtgctgccataaacacatatgcagatatctttttgacataaggacttattttccttgggtagatacccagtggtgggatggctggatcaaatggtagatctacttttagttgtttgagaaatatctgtactgttttccacagaggttgtattcatctgcattcccaccagcagcgtataagttttcttttttccctacatccacaccaacatcttttttttttttaactttttaataatgaccattctggctgggataaggtagtatctcatcgtggttttaatttgcatttccaacatgattagtgatgtggggcattttttcttacattttttggccatttttatattttcttttgagaaatatctattcatgtcctttgcccaccttttaatgggattatctggtgaggtttttgctgatttgtttgattccttgtaggcttcggatattggtcctttgtcagatgcataatttgcaaatgttgtctctcattctataggttgtctgtttactctgatgattatttcttttgctgtgcagaagctttttagtttaattaggtcccatttatttatttttgtttttgttgtatttgcttttggggtcttagccataaattctttacctaggctaatctccttcttgaataaattttttttccaaataattctccccttctatatctcaattctccatctcttaactataaattattttcttagctgtcatattagtattttctttttactaatttttgaacaaagaaaagtcaatccaatccaggtgtttaggatgtggataagtaaaacgtttttcctcactgtgagcctctctgttattagtatcttcctcttacttcttaggctggagggccagttgatataaacttgcaattctagttgtacaatccaacaacctgccaagggagaagagggaagaagattcatgcactcccctgcaagggagctttatttttgctcttctctgttgggcaaaaccactatcccatgaattaactctgtttctaacttactgtgtagctgtgtagtgaagagtttggtcctgccccaattgacgtctggcctttgccttaggcttctaggaggtaagctatgccatatctaataggagtgcctttgtttaaggatggggctggccgcactgggttaaaggcttaggatagaagctggccatgacagaaagcctaatcatgtgacttaggatgggggctttggagcatgaagtatcaattgacctgaagactaagttcaacaacaaggcaatcaattgatcaatcatgagcacataacaaagccccaaataagaattctagataccgaaactttggtgagcgtctctgattagcaatactttgtgagtattgtcacatatcaataccagaagggtgacatgtcctgattccatggggaaggaacagaagcctcacgtttggagcactcccagactctgccctatgtatctcttcctttggctgattttattattttattagttacttagtttagttaattagttgaacagcctccctctgtcacccaagctggagtgcagtagcacaatcacagctcactgtagcctcaaattcctgggctcaagtgatcctcctgcctcagcctcccaaaacaatgggattacaggtaacagtcactgtacctagtcttttggctgattttaatctgtatcgtttcccttaataaaccataacagtgagtataatagctttcagtgagtcctatgaggtttctagtgaattatcaaaactaaaagcgttttgggggagccctcaaacttatagttggcatcagaacagagggtgttcttgtgtggaaactgtgtcctcaaagtttgcagtttggctaatgccaggtactgaactatgccaaggtccagccaagaccatacactacctcttacctaaggctgctgttttatgttggctgaagccaaccctgtaaatgctgggcaaaaggcagtccaagtattgaaagtctcccacgtgtccctagctcccttacctctgtacctcatcacttaagttagagggtcccatctgggtcccatctacttactgagagagagagagaccagaaagcctactgtcaacctcttcttcagtgttgtcctgtatatgccacattcagtacacactccttgaaatccctgacatggattatttttctccacttatcatattcagttggtcttttttttttttttttttttttttttttgagacgaagtctcattctattgcccaggctggagtgcaatggcacaatcttggcttgctgcaacctccgcctcgtgggttcaagcgattctcctgcctcagcctcccaagtagctgggattacaggtgcgctcccacgcccagctaatttttgtatttttagtagagatggggttttgccatgttggctaggctgttcttgaactcctgacctcgggtgatgatccaccagcctcagcctcccaaagtgctgggattataggcgtgagcccccgtgccagtggtgagttggtcattttaagagataccgtggattgtgaggtggtgagaagggagtcagttggtggagtgagttatattgctctcttaacaggaaaagatgaaatagacctaaaacaagatttgagctaacttaacatgtaatattttgttggggagggaaaccattggaaaagtacgtatttattttaatctttaccccatctatctctccttgccatacctgcatgatatggtttgagtatatccctcaaaaagttcatgtgttgggaccttaattcctaaatgtagcagtgttgggagggggtgcctaatgggaagtgtttgggtcatggggctccagcctcatgaagggattaatgcagttctttatgtgtgtgtgtgtgtgtgtgtgtgtgtgtgtgtgtgtgtgtgtatatatatatatatatatatttgttttatttatatatatatttatatttatatatttatattatatatattatatatatttatatatttatattatatatattatatatatatttatgtatatatatatttgttttattatactttaagttctagggtacatgtgcacaacgtgcaggtttgttacatacgtatacatgtgccatgttggtgtgctgcacccattaactcgtcattaggtatatctcctaatgctatccctccccgctccccctacctcacaacaggccccagtgtgtgatgttccccttcctgtgtccaagtgttctcattgttcaattcccagtgcagttcttaagaaactgggttagttctccagagagtaggttgttataaagtgggtcagcccacttcatttctcttcttctcacaggcactggcttcaccttccacttttccaccatgctgtgacacaccatgaggttctcaccatatgtggccatctgatcttggacttcctagcctccagaattgtaaacgaaataaatctctcttctttataaattacgcagtcttgagtattctgttctagaagcagaaaaccaactaagacagtgccctccaccttcattgaaatattaagtaagccactgccagtcttgtttcttgcctttataaagttctagctttaattgtgagctcaccatagataccagagttatgaacaatagaaaatatcatatccatgacaaccaggaagcccaaggcagtggctgatttcaaccatctggttctaacctccttctttatgtatctcttttcctcgtgggcttcccttacttacataaagggcaggcactgctacacagacaggcaggaaaatgtccacagtgtctgctggaggaggtgatccaagtatctgcatatggtagataccatgtgaacaattgagaagagaggaaacaactactgctaaagatattagaaaggcttcctggtttcctcatttgagctcagccttcaggatggcaagtgagttttgctggaggaggtcatacaagtaagcattctaggaagaacattaccagcatgcaaaaggtgcagagaagggaaaaaggaaaacgatgctcataaaatgatgatggactcacagtggatttgtttaggggagtagggagataagaacaaaaaatggcttagcaacacattgtggaaatttttgaatggtcagctgaagatactagactcttttcagaatcttttgctttttagtatagtacttggaatactttgtctccttgaattgcatgcttacctctcctgaatggcacagatggtctttttttgtgctacatcatttaacacagtgccttgcctagtgatggtcccaaaacagttgttgatttctattgaaagtgctgactaggtaataagaagtcattactacctaactatataaaagaaaccagaacctacaacagttcctattgccttttcaccatccctcctttctctacttttcaggcttaaattttatgattcacgtgtataatcactcacttaacacacaccctcaactctctggtcctcactcacctggctaaaccccaaccctggtttaatgcaactctaacctgctgattaacatttcattgcttacatgagaggaggcagaagacagagcctttgcctaaaaaaataggttagggcttgggcactaactcgttcaccacccactggggttcaacctgaggagcagacacacagatttctctagtcttacggtaaagagttattcatccattcaagcacctttaaaaaaaacacacaaacaagctcctagacgtaaagagctgctaagtcatcatacctatgtataccagaaaaagctggacaaattgaagataatagactcttcttggaaccatcagagactgaggtcacagggcaaaccactaccctgagctctggagagacagatgcatccacagagctattgctcctgagatctacttacctagaataaaagccattagaatcagtaagctggtgggaacacttaaattattactttgctgaattgcaggaggctgagtgcagacttgtatgagagtgagaaactctggtgagggcctgcagccataagaggggcttgacacttacatggactgtcactccagaagccccactaggttcccatggggataatctgagaaagagccccttcgggtcaagatgggagaagagaagagtaggcatctgaaaacctgcccagactatcattcctagcaaaggcttagtccccaggtagaaagaacacctggcctgcagaggaataggattacagtgaacttctcatcagaaaccatgcaagcaagaagaaagtgcagcaaaacccttaaagtgttaaaagaaattgccaatctaaaattttatatccagagaaattatccttcagaaaaggaggagaaataaacactttctcagacaaaaactgagggaattcattatcagcatggaatgttaaagttcttcaggcagaaagaaaattatttaggtcagaaaccttgatctacgtaaagaaaggaacaccatcaaaggctaaacaaagataatacacaattgtttaaaattcttaattgttctaaaagaaaacttgaaaatggtaattaacagtgtattgtatgcttggacttcccagcctccagaactgcaagctattagatatttaaaaatatctaatatggataagtgaaataaatgatagtaatgtcacaagggatgggaaaaagaggttgggaatgctgtattatgaggtacctatactagatatgaagtggtatagtattatttgaatgcgggcttaggttatttttaagtgcagattgtaaaaactctaaaacaaccactaaaaaggttttaatagtataaatgatactccaggataaaagataaaacggaatcatataacataattaaaacaagagaatgcagaaggaaggagtgaaaagaaacaaaaaacaaatgaaaacaaaaatagttatgaagatggtgaagatggtagtttttcattcaactatatccataatcactttaaatatgatgtaaatactccagttaaaagacagagataatcaagttgaatgaaatttaaaaaagaaaaaagcaagacctaaccatattatagaaaccactttagatatagaggcccaggtagaaagtgaggaaatgtactgctaacataaggataaatacataggtcaatggaatagaattgagagtccagaaataaaccctcatatttatggtcaatcggttttcaaaaagagcgtaagacaattcagtggggaaaattggctttttaataagtggtacgtacttgggcaactggatatacacatgctaaagaatgatttggacccctacttcaaattatacacacacaaaaaaactgaaaatggatcatagacctaacttcaagagctaaattgcataaaatttctagaagaacatactggagaaatctttgtgacatcaggttaggcattggttgtctggatacaacacaaaatacgcacacacagaaaaaataggtaagttgactgcatcaaaatgtaaaacttttgtgctttaaaggacatcatcaaaaaagtaaaaagacaacccacagagtgtgagaaaatatttgaaaatcatatatctgataaggggctggtattcagaatatataaataaatcttacaactcaacaacaaaaagataaataactcaatcaaaagtgggcaaagcctttgaatagacacttctccaaagaagaaatacaaatggccgacaaacaaaggaaaagacgttcaacgtcataagtcactagggaaatacagatgaaaactacaatgattgctgtcaggcctctgagcccaagccaagccatcgcatcccctgtgacctgcacgtatacatccagatggcctgaagtaactgaagatccacaaaagaagtaaaaatagccttaactgatgacattccaccattgtgatttgtttctgccccaccctaactgatcaatgtactttgtaatctcccccacccttaagaaggttctttgtagttctcctcacccttgagaatgtactttgtgagatccacccctgccggcaaaacgttgctcttaacttcaccgcctatcccaaaacctataagaactaatgacaatccaccacccttcgctgactcttttttcggactcagcccgcctgcacccaggtgaaataaacagccatgttgctcacacaaagcctgtttggcggtctcttcacacggacgcacatgaaaattgccacttcacattcactaagagggctgaaattaaaaagacagacaataacaagtgcttgtgaggccatggataaattagaatcctcatacattgctgatcctaatgtaaaatggtacaatcactttggaaaacagtcctgcagttcctcaaaatgttaaacatggagtcatcatatgatccagcaatcgcacttttaaatataatgaaagagaaataaaaacacatgcctacacaaaaacttgtacatgaatattcataacagcattattaatattagccaaaaagtgaaaacatgtccatgagctggtgaagaaataagatgtgggtatccacacaatggaatattatccagcaataataaagaacgaagtgggccaggcacagtggttcatgcctgtaatcacagcactttgggaggccgacgggggcagattggttgagcccaggagtttgagaccagctgggcaatatggcgaaaccttgtctctacaaaaatacacaggttagctgggcatggtgacgcatgcctgtggtcccagctactcaggaggctgaggctggagggtcacctgagcctgagaggcagaggctgcagtgagcccagatcatgccactgcactccaagctaggcgacagaacaagatcctgtctcaaaaaaaaaaaaagtgctgagacataccaaccgtggatgaaccttgacttattatgctaagtgaaagaagctagtgtcaacgaagagtcaaactctgtaaaatatttgaaggaatttattctgagccaaatatgagtgaccgtggtctgtgacaaagccctcaggaggtcctgagcacatgtgcacaaggtggttggggtgcagatttgttttatacattttagggaggcatgagacatcaatcaaatacatttaagaaatacattggtttggtccagaaaggtgagacaactcagggggactggggagggagggagggagggcgggggagggggttgcttccagctgaaagtttctctcccgggcctgcaagcttaagggaatgaataactcctccttcctcaggcccagtcccaaggtgcaaggccacctgcaccagcaacctgcatcggtgagatagcagaggcaggaagagagctggccggaagacacgtactccctgaagaccgagagaggccaccggggtaccgcgtagccgttacatcagactgagacacttcctgtttacaggagactataaaacccctgccccgtcctcatctggtgctgacaccattttaggtctcagcccacctgcacccaggtgctcattgaaacaacgtgttgctccaaaccaccttgtggtgtttgtcggcgcgctctcgggtttggaaccaatacaagagccttgcacctgcaggctgtaggtaatataggtaaatttatacattttctggttgacaattggttgagtttaagacctgggatctctagaaaggaaaatgttcaggttagataacagactgtggagatcaagtttcttttttgttgttgttgtttttttttttttgagacggagtctcgctctgtcgcccaggctggagtgcagtggcccgatctcggctcactgcaagctccgccttccgggttcacgccattctcctgcctcagcctcccgagtagctgggactacaggcgcccaccaccaggcccagctaattttttgtatcagataattttttgtatttttagtagagacggggtttcaccatggtcttgatctcctgacctcttgatccgcccacctcccaaagtgctgggattaaaggcgtgagctaccgcgcctggcccaagtttcttttgaagtcttatagtgactacccttggagacaatagatgagaaatgtttcctattcagatctttaaaaggcactagactcttaattaatctctttgggattgggagggcctggaagaaaaagatctagctatgcaaatagagattctttacaggtgcacattttcccccacaaaggacagctttgcagggccgtttccagaaacatgttttgggataaaatatttttattttctttcttgcctcataatgttttccaacttgccagagtcaggttggaaagtaagtcacgatatatagggctaaataaaacccatctgatgaaaatttatggtttgtagggcatgactccccagaccccttagataggaatttgggcaagataaaaaatcaaagcttagtcctcaccagtcacaaaagactacacactggatgatttgatttatattaaatgtctataaaaggcaaatccacagagacagaaggcaggttagcggttgcctggggatggggtggagcaagggatagcatgaataaggaatggctgctcatgtgcaaggggtttcttcctggcgtggtcaagagttctcaaattaaatgtggtgattgcttcacaactccatgaatatactaaaaccactgagacagacactgtaaaggggtaaatcttacagtgcatgaaatatacctcagtaaaactatgtttaaaagtgaggggtaactatattaataaaaccatgggtgtccaatcttctggcttccctgggccacattggaagaagaagaattgccttgagccacacataaaatacactaacactaacaatagctgatgagctaaaagaaaactacacacgaaaaaagtttcataatgttttaagaaagtttatgaatttgtgttgagcctcattcaaagccatcctgggctggtctcaaactcttgagctcaagcaatcctccagcctcgtcctcccaaggtgctgggatgacaggtgtgagccactgcgtctggccacctggacttctatggagtgcagaagtccatggtaatgacctgaacttagcatttcatcagacttggtgatgaagccaggaaacaggacaagcactgggccctgacagacagcttcccatggtgagggcagaggaggaatatactcagcaggacggtgcatgctgcagggagcagtggctcctgtcactgtgagactgtgctgggaaagcctctgtaaatcagccccatggggcatcacacaccctgggagagagatccatgtcgtaaaaccaaagggttgtatccccaaggcccaaacctcacagtgctccaggaaggctggctagtacaaccaaaataatggaatcattagaggcccaggtggctctgatgggagcccaactttggtgacaaaaagaaaataacattttaaaaaatatttataaatgtagtgcatttttgttacatgaatatgttgcatagcgatgaagcctggacttttagtgtaaccatcacccgaataatgtaaatggtatccaacaggtactttttcatccctcaacccccttccaccctcccaccttgtggagtctccagtgtctattattccactctgtatgtccatgtgtacacattgtttagctcccacttataagtgagaatgtggtatttgactctctgtttctgaattattttaggtaggatcatggcctccagttccatccatattggtgcaaaagacattctttctttcttttttatggttgagtagtattccatggtgtatgtataccacattttctttaccccatcatctgctgatggacacttaggttaattccatgactttgttattgtaaataatgctgcaataaacgtacgagtgcaggtatctttgtcatataacgattcatttccctttgggtagatacccagtagtgggagtgctaggtcaaatggtagctctagttttagttctttcagaaatctccatactgttttccatggaggttgtaccaatttacattcccaccaatagcgtatgtgttcccttttctctgcatcctcaccaacatctgttgccttttgactttttaataatacattgacctagggaaagaatttatgacaaagacctcaaaagccatgcaacagacagggtgcagtagctcatgcctgtattcccagcactttgggaggcagaggcgggtggatcgcttaaggccaggagttcgagaccagcctggtcaatgtggtgaaatcttgtctctactaaaaatacaaaaattagccgggcgtggtggcacacatctgtagtcccagctactcaggaggctgaggcactgaggtgaaatttttcccttgacccccttcatgggcaggaactggagtcgctcatctcattcaccctgcagttcatggatggctaagtgttaacaacttggtgaagggtcagggtgacagcctcctgcacctgccctttttgacacccaagttcttgtttggtgtccaggaagaatcaggtcatatgaactatttgaagggtagtatgtgaaggattttactgggcagtaaaagtggctctcagcaggacagggaattggaagggagatggtgcgggaaggtgatctttccctgaagccacaccatctgaagttaactatgtctatccgtagtcgccgacgctcagccgcatgtatccctgatactcagcagcttgcagccctgaccacttgcatcagccgcttgtgttgttctttcagctgaagtctttttatgggcacagcataggggcgtggcaggccaaaaaggcaatcatttgggcagaaaaatggggtcagctgttttcacgcagggccgaggttccaggcttgagggtggagtttagctgggaacccagacctgcagggtcagctgctttcacttagggccaaggttccaggcttgagggtagggtttagctggaacccagccattctgtatcagcaggagaatcacttgaacctaggaggtggaggttgcagtaagccaagatgaagccactgcactccagcctgggcaacagaacaagactctttctcaaaaaagagctcctcctggagggaggagctgtggtgctggaactctggaaacaactctttctgtgtgtattagcatctgtgcatcagggctggtcccagcagatccgtcctgtgactctctttcccctgtggcctcccctccctaggagggagatggggttcccagctggctcctgggccctcgtgttggcctgtcctgccacgctatcctaactggtcaggcccatggtttgagttcaagcagcaatcccagacacatgctcccagggttcttggatgtcactaacaaccctcacttcttttacatcattcaattgggctgcattcacagactgtttctcaatttctcctctaaacaggtatgagtttcttataatcccatttccaggatgagggaggctgtcctttgggcactgatgtggaggataaacttgcaaagctctcccagataaagagaaaaatgataaagtgatgaaaaatgagagagaagatgatagatataaaagtatagaaaccagagatcaacccaagaacagagggtgttcctgagtaagaagcaacaaccattagactagaacaaataatcaaaggcataattaagaaaaaccgaaactgccattgcaaaattataactgaaacagtgacagagttctgagctaacccactccatcttgcttctaacctccaagctgcccttgttcattcctgggtgtaggctgagctaactttaggaggaatttagtttatagtttattgtttgaaacaaagatagcatccctttcaaaacaaacccccttcttgcctggggactagactgcctttgtattataggactaacaaattagtcaaaaaattagaaattatggtttaagagtcatgcagctggagacagattctgaccctccccaaattgctcctggggataatatcactattgtaaaacctaagatcagtgcttaggatatttcgcagttcctgcatttggtgaatcagctggcaccacccagattggtaactggctcgtctgatcttgtggtccccactcaggaactgactcagcgcaagaagacatcttcgacttcctatgattttatctctgacccaaccaatgagcactcctaactcattgccccccaccaccaaattatccttaaaaactctgaccccagaatacttgaggagactgatttgagaaatgataaaactcgggtctcccgtacagccagttctgcgtgaattactctttctctattgcaattcccctatcttgatgaatcatctctgtctaggcagtgggcaaggtgaaccctattgggcagttacaaaactgtcccaagaatgaaaagattaaatctgaatatttaaattcaaagaactctttacattgcaggaaacatctgtgaaaagaagagctctgtacccaggacatcctggcagaattcgatttactttattaaaaagaaaattaacttttccattatgaaaagaataaagaatatacaaatatattctaagaaaatacagattagcaaaaggaaggaataaaaatcatccattgcactaccacccagaaaaatactctgttaatgttttggcacatctcttttagtcctattaatatacatattattttttacataattgcaatttacacaatatcaaaaatttaaattttctatcatttaaaaacacttttaaaattataaaattaatacatgctaatgaaaaggtttaaaattggagggaaaatacgaagaaaaaggttgcccagaatccacttacccagaattaaccacagttaatactggggtgcatttcttcatagccttatctgcacttttgtacataatctaatctaattcttttttttttttttttttttttttgagacagagtttcactcttgttgcataggctggagtgcagttgcacaatctcggctcactgcaacctctgcctccctggttcaagcaattctcctgcctcagcctgcccactagctgggattacaggcgtgcgccagcacgcctggctaatttttgtatttttagtagagacagggttttaccatgttggccaggctggtctcgaactcctgacctcaggtgatccactgcctcggcctcccaaagtgctggtattacaggcgtgggccagcgcgcccggctaatctaatctaattcttaaacattgttaatatggagcatttcagagactccagacagtaaatgatgtaaaggcttatggaggggataaaaggttagccacaaggtgatttaatagtctttcattttaaataaagcctaaatactcaagataattcaaaatgagtttcaaacatgcaaaaacccatacaaaacatgtagtaactcttctattaatacctgaggtttaagtggcttagccacgataagcagcattggaacgtgacagcacacacttgtttaagttccgtgaagtagtgaggctttcatgacaagcctgttttctggttctaggagagccatacaagtaggaaaggaggaagcagaagggccaggcctcattactaccacagaccccacatcatcccattagaatttggactttggggcccaagctgaataaattcttttgtactgcaacagtttcatgggggaagagaggcaagagctgtgctcaaagggaaacacatcgccttaaatgctctcattgtgacatgaggagaaatggaaaaattaacccagcactcaacacagtaacataaagaagactgaaagaagaatgtaataaaaataacaactaagtgtgagggagaaaatgaaaaatctgtaaattgatcaatccacccaagagccagtttctgggctgtgggtcaattcaccagaaaacaatttgctgacagtcaaatgctccctctccctctgcctttgcacactagggccatcttctcattgtgtcctcacatggcctttcctgggtgcacacatgtggaaagagagtcctctgtcttcctgctcttttttttttttttgagatggagtttccctcttgttgcccaggctggagtgcagtggcgccatctcagctcactgcgacctccgcctcctgggttcaagcgattctccagcctcagcctcccgagtagctgggattacaggcacctgccaccacactcgaccaatttttgtatttttagtagagacgggctttcgccctcttggccaggctggtctcgaattcctgagctcgtgatctgcccacctcagcctcccaaagtgctgtgattacagccataagccaccacacccggcctgtcttcctcttcttacaagggcactagtcccatcaggggttctagttacttcccaaagtccccacctccaaataccatcatattgggggttagggcctcaacatatgaaggggcggcagtcaggggcagtggagggagaacacaaacattcagtccatagaagatacaattctaaaagactgaatttatcatctgatgaattgactgggcctgcatgggtacatttttaaaataagctaggaagggggaaagccttcttaagcatgaacatgaaacctggaagccacaaaggacatgataaatgaatgtgactaacaatattaaatttattaatttttttttatttgagacagtctcactctgtcacccaggctggtgtgtagtggcacaatcttggctcactgcaacctctccctctggggttcaagcgattatcccgcctcagcctcctgagtagctggtactatgggcatgtaccaccacaccttcctaattttttaaatttttagtagagaggggttttgccatgttgcccaggctggtctgaaactcctgacctcaagtgactgcccacctcggcctcccaaagtgctgggatttataggcataagcgcctggccacaattttacatttctacactgtaaaggtatgtttgtgcttgtgtgtgtgtgtgtgtgtgtgtgtgtgtgtgtgtgtgtgtgtcttaaatgaaatcaaaagaaaatatctgtaatgaaaaagaccaaaattaatttcccacttatcaaaaagtttgcataaatcagtagtgagaaaaaccaccttattaaaaaaattagagaagtatgtgaacagacttattacagggcaaaaaatacaaatgatcaatacacatgaaaagatgtccaaccttccaataacataaatttgaatcactaaatataactttttaatgtatccaagtaccaaaatgtaaaagattgataataagttatgttggcaacagcgtggagaacacatgtgttctgataccaggaatgcaaatgggtgtccttttttgttgagaaatctggcaatatctatgaaaattttaagcatgcccacttatggaatgtgtcttacagaaatcacttgcacaaggaggcaaagataatgtacaaagatattgtatatagaagcataaattcttggtgttggaaaggaacctgtggggtacccagtccaagctttgaggtccactccagtgccaggatgccctgggctacatccctgactctctctgcctgggtgtcccttagatcttatatggttggtgactgtataatctagtaacatataggcctttcaaaccatgagcagaatatcttcaggaacttgtgtgagcatcagacacctactctcctccgagtgcccaatggtccttcactgggagcacttaaggcagcgtttctcaaacttcaatgtacaaacaaattatctgaggctcttgccaaaatgcaaatactgatttggtctgggatgggcctgagattctgcctttctaaccagctcccaggttagatgatgcggatgctgctggtccagggaccacagtctgagtagcaaggtcatgagacgtactctattttctacctttggtcttcttgttttcacacctgggttttccatcaagtatgtaggcatcagtcccgtgactctcatgtcctacagataggccccatgacttggtcatgcccttagcattgacctcgtacactcatgctccactccactattttcaccatctgttctcctgtagagcagggtagtaggtgatggctgtggccaccacagactcctaactcagacaccagaccgtatgtccttcctgctcaaggtcatcccagctgctcctcaatatgccaggcagaccgcatctctggcaccagcacttgttgccccctgtgcccagaattccactctcccagacatccacggagcttgactctcatttccttctagtatctactcaaataggagaaagcagggctagagatgcaaatttgggtgtcaccagcaaacagatattgtttaaaaccatgagaccagaggagatcactcggagagtatagacagaggcaaatgggagccttggctgaagtcctgtggcagcacccacgtacaggatgaggaggaggaagagggggaggcagcaacaagaggagtgccagtgggagacaagggaaccaggtatggggcactcaagaagccaagagaagagcatggctggagaaggatggcgtgatcagcactcctgtgtaaaagcagcagcttgaacactcatgaaaataccgtgggcggtgagcacagggagaatgggggaggagatgcagcaagggcactttggagaggtcactaaggtcgctgatccctggagtcgaatgctgggttggcagtgaggaagccaaaggcctgccctatttttaccattgaatccccaaaaggctgattaattggtgacacctggcccctctggacatgaagatggaggaaaaggctgaagtaatgagaactggaaaaaagctgtttaaggaattgtcagatccccagatctccccaactctgtttagccagatcactgactttctgccctcccctgcagaaagccagagattcatttcaagagggtgaatacaggatctggttaggagacactgaactcagtggaaagcaaggagtcacactgagaacaggagaactacatgagtgtgggcactgcggatgctggggcagccctatcccatcccccagcctcattcctcatgcggttcccagaacgccagccaccatcccaacaggaagcagagaggtttccagtcaaagggcccagacagttgaagctgccaagccccacctgtgcactcggagcatccaatcagctgtgaagggctcacccttccacacgagcagattgccagatggctgaggaagaaaggtacaggaaagataaatcccaaaccaatacaaaataatcaactggaagacactggaactatacaaggagaagaacacttcaaaaaaaatcatgagggccgggcgcggtggctcacgcctgtaatcccagcactttgggaggccgaggcgggcggatcacgaggtcaggagatcgagaccatcctggctaacacagtgaaaccccgtctctactaaaaaatacaaaaaattagccgggcgtggtggcgggcgcctgtagtcccagctacgcgggaggctgaggcaggagaatggcgtgaacccgggaggcggagcttgcagtgagccgagatcgcgccgctgcactccagcctgggcgacagagcgagactccgtctcaaaaaaaaaaaaaaaaaaaaaaaaaaaaaaaaaaaaaaatcatgaacacttttacagccaagaaatactatccaggaaatgagataatggagcagtgcctactaactctgagttacattgtatgacacttagttgatgtctaccagagaattggggttttttttggtgggaagaaatcccacatgtcagtgaccagaggtgaagtattgtatagtgagtgtgagtagaaaatttgtttaaagtttgggtgctttttaaaaaatatttcttacaactatatttagatggtagaagaaaacaaatccagaaagattgcacagcagatgtgatatttgaatgtggagctggaagtataccaaggatttcacccaggtggacaaagatagggagaatattcaaagcagagacaacaattgatacaaaaaaaaaagatgaaaggggccaggcgtggtggcctgtaatcccagcactttgggaggctgaggtgggcagatcacctgaggtcaggagtttgagaccagcctggccaatgtggtgaaactccatctctactaaaaatacaaaaattagccaggtgtggtggcgggcacctgtagccctagctactcctcaggaggctgaggcatgagaattgtttgaacctgggaggtgaaggttgcagttagctgagattgcgccactgcactccatcctgggccacagagcgagactctgtctcaaaaaaaaaagatgaaagggtaagcgtggtatgagatagcacatcaacccaaaatggattggcattcaacaccaaataattgattttcactcatgcatcctcaggttgcctgggattgggccaacatagactgagtttggcaggcttggatctcaattgcaggttggatccaggagtatttcatcctctttggaccaacagctgtctaaggcaggctcttttcatgatggaggcagaagaacaagaaaacaagcacatttcaagcctctggacccaccgcgtccactaacatgccattggccagcataatttacatggacaagctcaacactaatgggttggataagtatattcctcactcacaaaagcttaaactttattcctgaacaataaactctagccaggtggggtggggagcacctgtagttccagctactcaggaaactgaggcagaaggattgctggaccccaggagtttgagaccagctgggcaacacagtgagactatatctcaataaagaaataaataaataaaacaataataaaagccaactctttaaagtgtgtttggggaataacatgaacatatgtaacttctgtttttcagttaactttctgtatgcatttcccttatttccatccttccttccttcctccctctctctccctctttctctttctccctttctctctttctctttctctctttctctttctccccttccttccttctctttctttctttcgttctttctttctttcttgagatggagtctcactctgttgcccaggctggagcgcaatggtgcgatcttggctcactgcaacttccgcctctcgggttcaagcaattctcccatctcagcctccccagtagctgggattacaggcactcaccaccatgcccagctaatttttgtatttttagtagagactgggtttcaccacactggccaggctggtcttgaattcctcccaaagtgctgggattacaagcatgagccaccatgtctggcccccttgattcttttatgagatgagcatgtgcagctacaaaaggaaacacaggagaggctcaggaaaaaacaaagtctcttgtactcacaggtcccagagaccggaggcatggcaagccatgaagggccacatgggagagacaccagagtggtcaggaagcaaaagacaggaggagaaagccgaggctagagccttcattggggtttcagtgggaaaagcagaacagggcagggtaaacagtttaggactggttcgtttgcataatttggttgatctttggcctatagtagtgatctctagttgcctagtacctggccctgggatgattaaggcagaggaatattgcttcctgagctgcatgggccagatagggaaggtctggtttaggactggtttgttttcatatcaaaggcacgttcctggctgggtccttcgttatctctaagaattggctggcccaggggggaacagtctctctccagctaaaaaggtttttcaggatcaaagtatacagacaacttaaaaaaaaacaagagtaaaagttatttgaccaacatcagccatgtgtggctaatgaacacttaaaatgtgacaggtgtgattgaggaattaaattttagttttatttaaatgttttaatgtaaatttaaagagcacatgtggcttatagctatggaacatgcagctgtgaacactatagttaaaactgacattttgatctgaggattccttttatttaatcagttctgaaactatagttttctacatttatatatttgttctattgtgaattttaggatttattttgatgatgtactttttctttgtgaagtttagaaatgaccatgggggtcatgtgggccaaattaactcaattcctggacaaaaactatttccccgaccaccccaagcttcttgccaatgtgcgcccttgggacaagaaaggctaggagaagctgtggacaaattaagataaacctggcaatatcattagacaaataacccaaagtgaatccctcttctgatggtcaacatcagatggtcacacagaaatgttattttcctatgagtaattttgcattattgttacatatgatttccacttacaaatgccacaaatattatgcaagtacctctctactgggaaggaatataacaattctaacaaataaacataaaagcagtgtgtacataagaatgcctctatacaattttttgagcatcaaaatcttagaaagttgaaaaataccaatgaaatatagcattcttattctttctcatttcttttatctgttctttagagaaaaaaagatggagcagaaagcaagaaaattgtccaacagaattattgcaactgacttagtttcttataaacaaagaatgcattgaaagagaaaaccttgcctcagcaaagtatattacacaataagaaagaagaatttcaaagataatagagataatttctcacagatgtctgaccagaaagaaattctcaactttctaaacttttctatcataatttcacatatttctctggttcatttataaagggaaaataacttgagaatattccaagatgaatacatcagcactcacataggtaaccagaaacatggggtgttaaatcaattacaggagcagctgggttccttatccagataagacagcgaaaaaagaccaagaagccagtagccggtgactttaaaaattgttcgaatatgcttcctcctcactttgtctcttgaggttctttgtaaaagccagggtttcacaattaactttacagcaatcaaaaagctttaatcagtcactaaaacaaatgctattttcacttatcaaattggtaataattaggaaaaaagtgataatatcatgctgggatattcagagcacgcttttgtgggaatctaaattggtgcaaccactttggctgcatgcctcaaaagcttaaaaatatgcccatcttttctgcaccttctactcctgacaacttatttaactacagggatgttcttcccagctatgtgatatacagccattaaatggctgaatactatgcagccattaaaatattgttgcagaatatattgtgatatggggtggaggtggagcctagctcaaaaattatgattgtatttgggtaaggaaaaattatatgtatacataaaagtaatatgaaggggatagacttatgaatattttataaatattttagatattttcttcattttcttttattcttttctttagtcttatctatattttctaatatgtctatttgatatgtattgcttttacaagaaaaaataacttcaatgatcctataaaaggaggagagagtggggagcaagtgttttaaatactgcgacatgaggctgtgaaagctctcagaatcaaaatgaagtcacctatgttaaaaatcccaacaaacagagccagacgagaccttgaagagagggttgtcatgtacaaaaactattgcaagactgcaaaaatcacaaccttgcacaaagtccatctcaaccttacgcaaaaaaatacctctacaaggacatctgcccagcaactgcctgtccaacctcagactggtgctaccctcgttattgaaccttgtagtcaaggataattaacccaaaacagttatgtaaccctccttatttttcctctaaaaacccttgtcttcctttacctccctgaataggtacatagtgtattatagtacatgcatttccatcgcaatgcctattcccaaataaatatcattttcttttcaaaatgtttgttatttaggttgacaaggcctggctgcccactccgtggtggttgccatctgttgctttattataacaaacttcatttaactcaagccaggctgagtggctttctttatcttgctatcgatgctccctaatactctaaccccaactttgtatcatctggaatccggagatattttttagccaaacaagaaacccacatgttgatttgtaacatttcagcagcaccacctgcatcaccaaagactttgagacttatggaaataaattcaaatcctcaacatctggaatggttgagacacatgtataaagaacagaaatttatttctcacagtcctggaggctgggaagtccaaaatcaagactctggcatgtttggtgtctggtgagggctgctctttgcttccaagatggcaccttgatgctgcatcgtctagcggggaggaacagtgtgtcctcacatggcacgaggcagaagggcaagagggccagacgctgctgtgtgaagcctcttttaaaagggcctgaatcccattcacaaggaaagaatccttgtgactgaatcacctcttaaagcctccacttcctaatactgtcccatgggccattaagtttcaatgcctgggccgggtgtggtggctcacacctgtaatcccaacactttgggaggctgaggcgggcagatcacctgaggtcaggagtttgaaaccagcctggccaacatggcaaaaacactgtctctactaaaaaatacaaaaattagccgggtgtgttggcacgtgcctataatcccagctacttggggggctgaggcaggagagtcacttgaacccgggaggcagaggttgcagtgagacaagatcatgccactgcactccagcctggggaacagagcgaaactccgtctaaaaaaaaaaagtttcaatgcctggatcttggaggggacacattcaaaccgtagcaccattttatattatttgtggattagggttaatactttgtcatctcagacaaaccatttctaagaaggtagaggtttgcgtgtgaggcttgagccacaggtatgacactccattgtcatgcacaaattgttacttccttaagatatgatccaacagacctggagacctgaatgcatttaacacaaatgaaagtttctgcctcctccctcagcccatttgagcttccatttccctctgacccagtgcgcattctaccctttgcagtctcaagatgcttctccctggcagaaaaatcaaaagcaaaatatgaacaagtataagccagaattttcagagtaactttccagattgcttcaaatggcagcatttccaatcctggtttgtctcatttgctttattcaataaaagaacaagaacaagaacaagaaaaaaagaacactactgtgtatgagctttgacatcacttctgaccatttttactttcatgttgttaattttgccatttgattttgtttccattacatgctattaacttctgttcagatgtcactcatttaaaaatgtgggggtatttcccattgttgtcccagtcaggcaattataacttaacctaaagacagccctgctctcaggtcagccttgccataaagtccgattcaaagaaataacagtccatcagaaaaatgaaaaccattaaaatctttgtgtgtctctcaagaaaataccacaggatgagtaaacaaagctgaaaacaagatagagaatagagtctctcaagaaaataccacaggatgagtaaacaaagctgaaaacaagatagaggatagaagttgatagagagttagaattttaacatgtgacacgccattagtaagtgttttgaacaccaagggtttggagggaaagaactgtgtggtcaggacagcaagcctggaagctgaccctggctggcaacactcaaagtaacaagacaaagatctagctgagggaggaggctcagagggcctcaggatgctgccatcctaatgaagaacaatcacacggagggtgaaggcagtgttcaccctctgtgtgaacacatcctcctaagaggatgcactgccctcctcctagaacactgtgtgagggatcccagctacccaaggtccaggagccacatgaaagctgcttgaagatgtcccttgcaaacctagcatctgagaatatggacccacaaaatacattcattaaggagaggcccattttatataatgtacatttacaaagttaatacacttttgacatattttcacacttttatttcaaaaacatcttgaattacctgcaaactttcaggaactcatcaccaacaaggtccattcatgatgtagtgggaaataaccactgtgtaatgatagcataagcaaattcagttttaatgagaggaaataggggaagaaagttgaagataaaacatgcttcctttataaatccttctttattttattgtccccactcccaaccaacccccaaggccaagtaaagagctgggagtaaaaagttagggcactgaagatagattcgggagacgtctgggttcctcacctgctaatgcaggacccagtttcctacaaaacagcgtctgcctgtccaaggattgtggaaatacaggtgtatgttcctgcatgtgtatccaggaagaacaagtccctttctcaggctcgagcccctggagccaggccctcttcataggccaccccacagtcaccaccgtggaggttctggaagcctcaggatgccccagggacttcccacccccaagccaggtagtgccccaagcataagtgaaaacacccttttcactcctttgtttccctagaaatccagcagcttctaaggttcatgtgctacaactctttccatttttaatatccacacatgtgcaggtgtggtaatggatcaactactgtgagcaactggggcttcaccccccacagaacattctacgagatagagggtggtagcacacttcaggtcatccagctgcaagagtgaggagttggagcatttatccacagactcccatctcccactggggagaactgccctgggacccctgacaccacacactttgggggtgcttctagggggagtagggcaagttcagatgatgccagaaaaagtcctcaggcagagaagagagaggcaggcatcagggtgggaaggcatcagcattctggaagccttagttacaggtgaactcagatgggccaaggggacacaggacaaggtatcgacagcatctgccacaactctcttgggaggtacacaaaaccaactgagtaaacatttgtattatttcctggatataggagcaatacattttacataaagatgatgattcttcacaaatttattcttaagtgcaatgccatttcaataaaaaaacccaaccataggtatcatggaatttgacaagattacaaaattaatctggaaagagaaataagcaagaatatcgggctgggcacagtggctcatgcctgtaatcccagcactttgggaggctgaggcgggcagatcacttgaggtcaggagttcgagaccagcctgggcaatacggtgaaacccagtctctactaaaaacacaaaaattagctaggcatagtggtgcatgactgtaatcccagctagttaggaggctgaggcaggagaatcgcttgaacccaggaggtggaggttgcagtgagattgtgccactgcactccagcctgggtgacagagcgagactccatctaagaaaaaaaaaatcagaaaatattctgaaacaaagagaaagtaatgggtgatatgagtcctaccaggcattgaagtgcattataaagcctttacctacctcatggatctaataaagcaagaaaggaaaagcctctcctcacgtggcatcccctcccttggttgtgtcaatttgaatcacactgatatgccttatgcggaatctacataaaaagaaaccttttaggcacacaccgaggaaggggctgaatgagggtagctgcggatcattcactggtatcagggacaagaaaattaccatggcctcaggaactgccagtaaagacacaggaaggttctggttcccagaaaaataaagtcagaagccaagcccagggtgggaacaaagaagatcagaaaaaatcagaccatttcataaaagctgtgatgcagaagaagtccagtggaggagggcccaagtgccacacaggttccaggtgatgctgaaattgtctcgggtaactgagatacctcagacccgcctagacagttagaaatggctagaaagagaaaaggaaatttttttctagacaccaaggagaaaataggaagaaaagcaatatgagtggatgggagaggttgccccatattcaggataccatttaactgattttcccgggcaaagcactaggagtcatctcccaaggaatttatagtccagttaaagaccaaaagggctttaaataataattttttttttttgagatggagtcttgctctgtcacccaggctggagtgcagtggcacaatcttggctcactgcaacctccgcctcctgggttcaagcgattctcctgcctcagcctccttagtagctgggactacaggcatgcaccaccacgcccagctaatttttgtatttttagtagagacagggtttcaccatgttggccaggctgttcttgaactcttgaccttaggtgatccacccgcctcggcctcccaaagtgctgggactataggcgtgagccacttcaccaggccaataataaatttttaaataataaagcagtttaaaatgggactggatgatacaagccagttgctgctggagctagaaggaaggaggctgacttctgatgggaagatatggaaggatttcagagaaaaggatgcatcagagccagaactccacagaagagaagcagggtcaagaaattcagggctgagagaactactcaagcagaccttcagcaaggcaattaaaggaggacaagtggtcctgcagggcttcgcccagggaaatgcaaagagaaagagagagagagagaaagaggcatcactggaaatgtttcacagataccttgactgtaaacattaactgcaggcactgaaatctagccattaaggaagcattgaatgcttttaaagggtggggagacaggaaccattctgcagcaactgtgcaatagtttctccttaaattcatgattcacatctttagagaaaatgttcctaacgcctaagagaagaccatacaaacagattagctgttttcttcctctgtctgaagtgctatgccatgtgatgcctcaaattgctacagctgtcaacaccagcttgggtagggcagagtggaaacagggaagaaacgaggtctgtgaagatataaatataccattgaatgtaccctgacccgaagaggatcctccagtattcaaaacaccctttccagcgcccaccctctcctccagctcctgcccactcctctgctccccgcagggtaaaactcagaaatgttgtcgctactccctcaccttccattccctcttcaatttgcttctgcccccattaatccattgaaactgctctcctcaagtccccaaaaacctccacgtcaccaaatccagtgagcactatcctgtcttcacatgacttggcctctcagtagctggctctgccttcttgaaacaccctcctctcagcttccagaaccctcttatttcactggctgtcccttttcagtctcttcctctggttcaaagtgtggtctctggcccagcagcatcagcatcacctaggcacttgttagaaatgcaggttcctggaccccatcccagacctgctgaatcaaatctctggtccgggaggggcgaggcagcaatctgtgttttagccaagtcttccaggtgatgcacactagagactgagaaggactaatccgaaactgtgggcattcctcattacgaaatcctgattcctttctcttccctggctacattttctcccatgatgatgtcatctaagcccgtgactggaaatcatctatactctgacagcttctaaatgtgtatcttcagcacccatctggggattacacagccatctcaaattcaacatgtccaaatggaaggaaggaactccagatgttccctctaaaatctggtcgccatccatttttttccatttaagaaaatagctccaccattcccccagctgtttattaaaaaaacttaagtcatccacgagtcctccttttccccaactccttaccctattagcaatagtatatctagagggtctatctctaaattgtcatgaatctgtcctctattaccactataggccaagccacaattttctctccccagcccactgcaaaagcctccagccaggtactgctcatgcccacaaaacaaccagagtggacttttaagaaggtaaatcaggctaagcatggtggctcacacctgtgatcccagcaatttgagaggccgagataagcagattgcttgagctcaagagttcaaaaccaacctggacaacatagtgagacccccgtctctaaaacaaatacaaaaatcagccaggcatggtggctcacgcctgtggtcccagctactcagaagactgaggtaagaggatagcttaagcccaggaggcagaggttgtagtgagccgagatcaccccacggcactccagcctgggcaacagagtgagaccctatctaaaaaaaaagaagaaggtaaatcatgtcgcatcattccccttcttaaatcttcaagggcttcctatcatatttaattattaaaacccaaacatctgtcatgggctgtcaggccctatggtcactgtctgtatggcttcctgtatcctctttgaggtctgaagtcagagactgtaactatttaattcacactaagtgctcaataaagtggaggaaataattctccttttgtgagaagatgaatttagagtctaacttctttagtttctccttacttgctgaggaggatctatatgatgtggtcaaatcactttcagccaggacacaggagatgggaagggagacttccaaagaatgacttgatgatgctgtgaacctcagcacaatagggctctgtgggcaaacacagtagggtttgacctccaaggacaaaccctacaccccactccccacccagtccggaaaacgactttcactgtttatagtgagatatgggtggttgtggtcatgggagaggcaatgggagtgagtttggaatgaggaattatgcagggccatttgaatagccacttcctgtgggttgcccacccttggagtggttcataaggtcaataaaaacctctaagaatccataggccagaccatcaaccccattgtggcagcttttaaaactggcaacaaggtctttgatactcttcccattgaggagtgggctccatgtcctctgtccttgaatctgggggctatatgactttttttttttcttttctgagacagagtctcgctctgtcgcccaggctgaagtgcaatggtgccatcttggctcactgcaacctctgcctcccgggttcaagcgattctcctgcctcaccctcctgagtagctgagattacaggtgcgcatcaccatgcctggctaatttttgtatttttaatggagacggggtttcaccatgttgcccaggctggtcttgaactcctgacctcaagtaatccatgggcctcggcctcccaaagtgctgggattacaggcatgagccaccgcgcccggcaatggggctatataactgttacgtcaacagcatacagtggaagtgatgctacctgactactgagcccaggcaggaagtggcattgcagcttcttgtttgctgaaactctcacacttggagtcctgagccaacatgtaagaagttcatccaagccgagaccaccagaccatgaggaaaccaggccacacagagaagccgcagctaggcaccgcaatcagcacatctgatcttcaagtcctcctagcccaggtgccactcaggcaagtgcataggcttcagatgactgcaacccccggctatcaaggtacccctagacttagagtcttctcaactgacaccccaaacataatggggcagaatcaagtccccgctgtgcctgtccagctccctggcttaaacaatccattggcataataaaatggtagttgttttaaaccacctaagttgtggggtatttgcagcacatcagtaataaccagaataggtcataagtcaatcccctttggttccctagttctttccctccaagaaatcccaggccatttgagccctttcctgatgggaggaaagcagtcgaccagaaaatacaattcttttgaggaaaagatgggttttagcgtcttggaaccaagcttcacagagcgccttctgccagtgggcagccagccccttgcctaggctgatctggtcacctacttccagccccaccccagctctgtcctcccacccagctctgtcctccctgcaggccctgagcctctaggagactcaaagagacactgtgctgcccgctgaattcatctcccagtgagccatctctgaggaaaggaggtaaggctctgaatgcgatgtcaacctaagcattacataacactgataggttgtaaaatggcctcgctgcctagtgctcattctaactggccacaatccagtcctccctgttgcactgagtcagctccctccaaaggcggcgctttccaggcctcctggttgccctttcccagcagacctttcaagtgctcacccacactcacataaacatggcccaggcactgtttacagcagctctcctctgtgcattctcctggcttctcctgtctctcgccatttgtacccctcccctgcaacttgagtgacagtgattggtcctgagatgcaaatatttgatgcacatatgtttacaatgcagcctcagcttttttttttttttttgtaaagagacaaagagtgagacagggtcttggcctatagccctgtggcccaggctggagtgcagtggcacaattaaagctcactgcagcctctacctcctgggctcaagcaatcctcccatctcagcctccccagtagctgggactacaggactgtgccaccgttcccagcaattttttttattttttgtagaaatggggtctcactatgttgctcactctggtctcaaactcctgagctcaagcaatcttcctgccttggcctctgaaagtgctgggattacaggcctgagccactgcacctggctgtcaacattcttaaatctctttccttacatgcttcctaaacctctcacccaaaactaggagactagatgtcctattttccccagggcatgcctggtttacgcccatttcactttaaaagtgcccaatttgggtaataatttataagatccccctccctctaaatcctgtccttctatcacttcatccttcgctctcctttaaaatgagacagttgtcagcaggaatcctgcgcaagaacacaccaccctgtttcatagaagatatctcaggtaatgtgcaaacacgggtttttaaacggagcgcatttttctcatttgttaatatcaccacctaaatcatctcttgcctaaaacaaggagtagaaagtgaatgaaggaaggaacaggtgatggtcagtgtcctttctacgcctcaaaatttaagagtttatgtgaaaattcataaatattaatctcaatccaggttaagcaaaattttttgctctcctctttagaaatttctggttgccaaagttccagaaattgcttcctcattcctgagcctttcattttctcgatttctccattatgtaacggggagctggagctttgggccgaatttccaattaaagatgatttttacagtcaatgagccacgtcagggagcgatggcacccgcaggcggtatcaactgatgcaagtgttcaagcgaatctcaactcgttttttccggtgactcattcccggccctgcttggcagcgctgcaccctttaacttaaacctcggccggccgcccgccgggggcacagagtgtgcgccgggccgcgcggcaattggtccccgcgccgacctccgcccgcgagcgccgccgcttcccttccccgccccgcgtccctccccctcggccccgcgcgtcgcctgtcctccgagccagtcgctgacagccgcggcgccgcgagcttctcctctcctcacgaccgaggcaggtaaacgcccggggtgggaggaacgcgggcgggggcaggggagccgcgggggccgagtgaggaccccgggcctcgggtcccaggcgcaagggtgcccggccgggcggggtcgggaccccagtgaggaggggccgggggctgccccgcgggcgcgtgacgcgtctcgggcctgcccggctgcgctggtctccgctcgggtgaggcggcttggcttcgcttttcaggttaggaaagctccctttactgcgcgttggggggctgggggagctggcggagccccgttagggaggtcggtggcgccggggtgtctcagcgccccctgcaccccgcgcgggtccggcccagcgggcgatcgctggcgcccagggaactccgggagggccgccagcgggctccgcagggcgcggggcggggaggggcgcctgggggccgcggggctcgcgctccccgcccgttggccgcccctcggaggccgagatcggggcccagaacgccccttggcaaggcctggcgcttccgcgatgcccagagggtgcttggggggatggagagaggggcgcccgccgggggagttccgggagcctcggtgcctcccgccgcagctgcagcgttcctcccgggaggcggcccagcccttcatcctcgccgcctgagcttctccgaggggggctgcagccttgcggccgttgccaccgcctggagaagcggcccacgcggactgacgggcgggggcggggcctcgggcctcggcgggggcggggtccggggaggccccaccctctgttctccaggggcggggagagaggagctgcaggtctgcggcctggccccaggtgcgatggcggaccccagcttggccagtcacattcctcccagtccccctggagggagaacgctggccatggggggctccaaggaacaaccagcctcggatgacgacccttgggtcaccggtctccccacctgtgcggcaggcgccttcacgtttcattattaaacaatggggagaaatccatgtttactgtcctttttaaggaattttttgctcttctctttgaggtggctgtaggaaatagattttttttttaacctcgcaattccaccacggtcacatccatcctcgccatcgcagagccacagctctccgtttttgtttcctagcctccagattctcacacaacacagtgcagtttcactgctgtaatgatgaggatcttcatggccgcgttattttcttgttctgagagcatcacggtttaattagcagttccccatatgatttgaagtgtttcccgtttccttagggaaaactcctggtagaataggattaaggatttttacaaatataattatcaaaaacataggaacagggaattggataaatatgttaaacttctggaaaaatcaacaacgctcttagatttgtagaagaaaggaaaaaatcaccagtggaaaggagcaattttacttacacaaacacagagaaggtcttacagtgaaaaaaagctaaccagtaaggggaaaagcaggcagaggggtaggatgtgatttgtatgttatttatatctaacacaagtcttccacaccgaaaggaaaatattaagattataatagataaatggcaaaatgatgagtcatttacacaataaaatgcaaattagagcatgtttgggttatcattttacatctattaaaataaccaaaataattaatagtaacagcaacccttgctggaaggttgcccaaaacttggcattttcaagtgtctggggaggtggcagggctttggggtcacaaagatggttctgcagtcaattttgtgaccttggacaggctacctaatttcctgatcctccttttgtccattcatagaatggaggaaatgatagctactttctgcgtctgtatgtatgagttattgggggcatttcgaaccagtgacaaacattttgttaagcaatctggtgatgcattaagaagctggaagctgtgacccagaaaccccactcctgagaacttacctgcaatggaagaaacaaacaaacaaaaacaggcatgtattcctagcagaatgatctaaaattagaacacctggaaaagagcctaaatgtataacaccagggcagtagctaagaaaattatgacacattaactgaaatgaacattatgtaaccactaaaaatcatgattttggagcctgtgatatgtggggaaaaactgacaagtaaaaaagtgggttattaactgcacctgcttactctaacgtgaacgcatatgtgaaaaatctgaaaggaaaagcacagaaaatggacgttttcattgaaattgtcggtgatcttaattttcctttggtgaatatattgctctcactaagggcgtttaaaaaatagttcacaggttttaattttttagatgaaatggacccacagttttctgtaagagaaaggagagattgttatatttgctacttagaataaaagatttttagccaacgttgtttcctttttcaaatatttttccatttttttagttgattaatgatttagtaatttgtgtattgggtttttttaagaatcagttcttagattcatttatcaattctagttttttgttgttgtttttaaggactcctgaatatttttcaaaactgaacaatttcagccatgtctgagctttccgtcttcctggaggcacaaatctagtttagctgaaccacaacagattgtacatatcctgcagaacctctgtggtcttaggaaggttgaaagtcaccaaatgtcacagaaaatgagggtcaggaaaggctgtgatcacaagctcttgatccagaggccactcgggtgcatctgtgtgactgacacctcattgcatcatcatttcttgtaaaatcagcttaattttgcagagaaatggccacagatttttagaattatgctgaattatgtaagggagcagccattttaaaaataatgtaatcaaataacaataataacataacagaagtttctgcaccacactgacactgaacatggctgtcaaccaactagccaaaccaaggtgaaagattctctgaacttcagttttaacttacttcgtccattctcccttttcagatcttatttcttcttccaaggcaactatatccactgtgaactgctgcatattaaacattcaaaacatgtctgtatctaacccagtgatggctacagcattataaaataactcctaagtgaatagtgtgtgcagcaattctcacagctaggagaattttttttgtcgatgtgttaaccattcctttttctccaactgcattctacttaaactgttacagtattgtgtgatcactttaagggaggtaatccttcagtgaaaagcattataaatgttgaagattagacccctgaggacctagcactgaagcctgatcacgggtgccaattccctgagaagcttttatagattcccaaatcccatcgctaggcactctctgactggcttgtgatgggttccagcaatgttgttttttaaaagctcctcaggtaattctgatcatggaccaggttggggaccctttgctctgttcagtttgtggtttctaggtgccagtgagaaacccctacccccaatttttgtgcaaaatttttttcagcttacatcaagttctttatgaacctcagaaaattaaaatataacaagggaatttacttagctcagaagagacaagggacattatggggtgaaggtcgggggttgtttgacatttgccccttcccgatgtaactaattaagcttcaagttgtaatgtgttttatgggctagaaggctttagtgcctatatttggatctcagctccaacaccttggactcttacaaccttgggataagttcttactagctctgactctcactccccatctataaatgggaataagatgaacggggtaatttatagattttttagtaccctctctctagttccgctgttttgccattctgctcatgcaccaatgccatgtgatcttattgtagctttgcactctgacacctggcaggtcaagtgcacccttgattatcttctcattaaaaattttcttcagtcttttaagttttgagtataatttcataatgtcttttaaaatctcttttgaattctttttcaaatttatttattttttctttgacagataagattatatgtattgtgtacaaaattagaaagagatcttttcctctaagatctgaaacaagacaagaatgctcacacgcactagttctattcaacatatggtactgcaagtcctagccaggacagttagacaagagaaagaaataaaaagcatccaaatttgaaaggaaaaagttaaattgttcctatttggagacgacatgattttacacttataaaaccctaaagactccaccagaaaaccattagaactaataaattcagtaaagttgcaggatacaaaattaacatacaaaaatcagtagtgtttctatatgccaacagtgaactatcaggaaagaaataaaaagaaagtgccatttacaatagctacaaaataaatatttcagaataaatttagccaagaaggtgaaagatctctacactgaaaactataaaacactgatgaaagaaattcaaggagacacaaatagaaagatagcctgtgctcatggggggataattaatgttgttaaaatgtccatactacccaaagtgacctacagattccatagaatccctatcaaaataccaatgacattcttcacagaaatagaaaaaacaatcctaaaattgggtgaaggtggcatctttgtctcgtttcagatctaagaggaaaagctctcaatttttcaccattaagtatgatgttagctgtgaccttgtcatatgtggcctttattgtgttgaggtacaatgcttctacacctaattcattgagagtttttatcatgaaagaatgttgaattttgtcaaacgctttttctgcatctattgaaatgatcgtatggttattgtctcactctgttactgtgatgtatcacacttattgatttgtgtatgttgaaccatccttgcagccctgggatgaatcccactgtatcatagtaaatgatctttttaatgagctgttgaatttgcttcgctagaattttgttaagaatttttgcacctatgttcatcagggatattggcctatactgccattttcttgtgtgtttttgtgggactttgacatcaggataatgctggtttctcctgttattaatttctagttttataccatcatgcttagaaaaaaaacttgatacgatttcagtctaattaagtttgttaagacttgttttatggcctaacatatgatctgtcttggagcatgctccatgtgctgttgagaagaatgtgtattctgcagctgttggatggaatgtcctgtatttgtctgtttggatccatttggtctaagtgaagtgtaagtctgatgcctccttatttattttctttctaaatctcccgtccaaaaatctaagagatccaaagcaaacagggggttataaaattacctttgaattctgactgaaattgtgtttactttgtagattatttgctggtgacttggtatctttcaatattggtttcccaaacaaaaaacattgtatgtctttctctttttccagtcttcttttatgtctcagtaaaattttgtagcttgcctactacttattttcaggttaaatcctagatattttcaattcttactgccattatgaatgaatgtttttccccatgaaatgtttaactacagctgatttagggactcactgagttttgatttgttgatttgaaaaactaccaccctgttgagctcatgtatttattctaagacattttttgagattttccaggtaaaaaaattatacctagatgaatttatagaacaacctaatagcataaaagcaatagattattgttcaccacattaatgggaatgcctttcctcttaaaattatgatatcttgggctttgtgtttgtgacagcatttctttatgatggaaagagactatccttccagttctatagaaacgttttaaaaatagcttacatttttaaaaatttaggaatgatattgattttcattgaaaacttttcaacatctgaagaaaatcttttcttcctaacctattaatagagctcctgattttcaaccattcttgtattcctaaaataatccatattggtcataatgtattcttcttttactaaactgttaaaataagttgggtgctgtttttttagattttggcacctgtgtgagaggagggtgccatggcagggtggctaagtgtgcccacctgtgtactagcattgaattttgaccctttatcccattggctctaaacactacatctcaggtgaagacgcccaaatgtttatctctactgagttacagattcctataacaattgcttaaattgatactcccacttgaatgtctcataggtgtggcaaagtttacatgtctatactgaaactcttggttttctctcccaggcatgaccctccaccagtttgtcctatttcagtagatggcatcaccgccatctccctggttatggaagtcccagacccgggcaactctcactcctccatccactcaaccagcaggtcttattggctctttctgtaaaatatgtctcatttattcacagcctgctagctgcatggactccatcccaggccacgccaccatcttcctgcagcagtttcttaactggcctctccattccctttcttgtcccactaaattttcttctatttaagaaaaaatgttttgtagacatggggtttcaccatgttgcccaggctggtctcaaactcctgggctcaagcaatcctcctgcctgagcttcccaaagtgctgggattataggcttgagctgagcttttgaaaaaacattctatgatgttactgtcctactaagaccctttaatggctccccactgctttcagaggaaaatagaaatttctctctgtggaccatgaggccctcatgatctgaccctcaccacctccctagtcttagcagtccacctgccactgtctcatggggctccacagatttgatctcctttttggtccttaagcccaccaagctaagtatcttattcaaaactgtgtcctcagcccctagcacaattcttgacccttagaattctgacacttgaaatgtgtgttaagctaatcaataaattattgtgccaggcttggtggcacaataatgtgttgtgggtcacctatatatagctgtggctcacacctataatcccagcactttgggaggctgaggcctgcagattggttgagcccaggaatttgagaccagcctgggcaacatggcaagaccccatcactattaaaaatacaaaaaaaaaaaaaaccaggcgtggtgttgcatacctgtggtcccagctactcaggaggatcacttgagcccactgggtggaggttgcagagagctgagatcatgccactacactttggcctgggtaagaccctgtctcaagaaaaaaaaaaaaaggttatggtactgtaaatattatattacagtgtataatttttgacagctttttttctccatttcttctatggttattggtcagttctagccttctatttttttttttaagctgacacatactggctgggcatggtggctcacacctgtaatctcagcactttgggaggccaagacaggaagatctcttgagcccagaagtttgaggcgagcctgggcaacatagcaagaccccatctctaccagaaaagaaacaacaacaaaaagaaactggcacatactagttattccataaatatttcttaaatgaattaattctaaagttgatttttataatttacatcttaatagaaagacaatccatctcagagatatttttattcattaaggaaagttgcataaagtaatttattaaccttttaaagcattctctaagcctatttccccttatagagatatgttttctagtgatgtgtgtatgttacattttcaaataactcttaattttatttagaaattccacatttttgtgggttttatttattaaattcgattttcatctctattattaatttatgacagtttattttgaagttttctgttttcttccttttgagttgaataatcatttactttattttacttcttctattcagttgtattatccatgttcctctgatagccatgcaggttccaaatcctcacatttttcaacttctttaaaagattttttttgtgctatcctgataagcgttaagtgttatatcattttttttcatttttattatattcttaatgattttgattctctttttctatccttttggttttctttcttaggtaaatgatcagttatatcttttggccatttttttctgttggaattactgtctcttactgctctgtaagaattccttgcaagttctagaaatgaatcctctgttgattttaagtactaaagtcccctttaccattgtgtactctttctattaactttgtccagagtcagctttatcgtgctgaacaagaatctttacattttaatttttttttttaatttttaagttcaagggtacaagtgcaggtttgttccataggtaaactcgtgtcatgggggtttgtcatacagattatttcatcactcaggtactaagcctagtacccattagttatttttcctgatcctctccctcccttagccctccgataggccctagtatgtgttgttcctctgcatgcgtccatgtgttcttatcatttaggtcccacttataaatgagaacatgtagaattgggttttctgttcctgtgtcagtttgcatatccctgcaaagaacatgatctcgttcttttctggggctgcatagtattcgatagcatatatgtaccacactttcattatcccagctatcactgatgggcatttaggttgattccatgtctttgctattgtggatagttttgcaatgaacatacacgtgcatgtgtctttgtaataggatgatttatattcctttgggtatatacctagtaatgggattgctgagtcgaatgatatttccgtctttaggtttttgaggatgtaatcaaattcatcaattatttgccttatggtttgtgctttttgtttaaaaagttcttcccccattcctcctccaggtcacaaagacatttcccaatattttcctcttctagcgccaaacttgtacctttcacatgtaagtcttggatccatctagagttcacttttgtatgtagttagggatctagttttctttttcttgtttcccagaagcatgaaaccttcctcctttattggttcgtggtgcccatgtcagcacacatcaagtccctgttaaagtgtatctacgtgggtttctctctcaacttgcttttctgtttcctttggtctctccgtctattcctgagctttaccgtccagtcttcgtcactgtggttttgtagtgatttcatgtctgctttggcagattccctcctctttacactttttttttaaggttgaccttattattcatggacattttcttccccatagaagtttactgaacttctcaaaaaattgagattacctggaattttaactggcattttattgcaactaccagttcatttaggataatggacatctttataatactgagttatcgccatcaagaccatggaatgcctctccatttttttcagaccatcttctgtgttctctgtataatgtgtcacccatcagaagtcttttcttagttaagtcaattcctagacgctttacagtttggttgttactttgaatatctgtattttcttctggtcagttattgctactgtagaggaatgccgttggttttcgtaggctgaccttcagtcccacaaccttgcactctagcgttggttctcatgttatccctgttattctgttggattttctatgtgcatgatcacactaattgcaaatagtgtcagctagagcactttccttgccattcttacacctgttacttctttgcatatggccttggacagcaccttgagtcccatgacaatggatgtccctgttgtatttctgagtgtattcttagcattcttcttagtaataaacaggtattgaccattaccatatacttaataggatatcttgaaatatgccagaggactaggccactacttgactggtgacagagagtatcttagatgtataggcccccagacatgccagtgtcctctctcaccacccatctccactccaaagttgtctggcctcacccaccttctgtgcctggttcttctcctctgtgcttctctcactatgccatgtcctcgcctgttcaggtgtctctaagagctcatagatccttaactcttacagctttaaatgaggcacattcaaagcccgactcagtgtcattccctgcagtctcctcttcctcccatcttacccatttcaggtaatatctccagccagccagagtctactgcagtagctggcacatgaaataaatgtttatttaactgaattgaaaatgttagctggccattgtcaaaaatactattttgtaaatttataaatatggttctctttgtatatccattataaatatttagtatttagtttgattattccttatgctttataacatgtgttttcccattcattcatttatccagcatttattttgcatgtctatgggtcaagcgctctgtctaggaacactgctgtgaacaaaaccaaactcccgccctaaaggagcctgcactcccgtggagaacatgaataataagcacagaggaaataacataatatctcaagtagctgtaactgctccagagaataatgaagccaggaaagggggtgggctagggggtgctgttttaggtagagtgatgggaacagccccactgagcaaactttagccacatgagtagctggaagaaaagccttctaggaccagggaacagcaagtgcaacagccctgagacaggatgggcttgtcagtttgaggagcagtgggaggcctgaaccaggttacatggggcccagccagtatggccacgactttgtgttttatccagagtacaaaggagcctcactgagggacaagggaagtggcatgatgtgacccgcatattaagaggagagcgctcaatggcagccaggggaggagcagggaggctggttgggaggctgttgaagaaatcaggtgagaagtgatggaagcaccgaataagatggtcatgttggaaaaattgagaagctgaggtgcttagcattgattttcaaggtagagctactgagatttgctgatagatccaatgtatgctgggagagaaaattcagtcactctagagcattggctggatttgtcacccattgcagcgaatggagaaggtgctgacataaaagccctttagactgaaagctactgactgaggggatggtgccctagtttgatttcctggggtgtatgagtagcagggaggccaagagctgggcctcacgagattgtggggactacatcagggaagcaggcctgcaaagaacctgcaccacagacccccacctaaaagagcctccaaaaaccctaactggcatgacctgagtactttaactctgcttgtaactttcaaatatattttgatttgcttatgaccaccaaggcaaaacttcccatttcaataatgttagtagaaacataaacaggatgttaatttatttatttggtaattctttttatgaatattatccagtttaatcattagctctgaaggagatgaaaaataattttctaatttttagaaaaatttgcagctaattgggtgataaaggtaaggggtttctgagttcacaaaaatgttctaaaattggcaacagtttcggttgcacgtttcattaaatgtactaaaaaccattgaactgtacatggtatatggtgaattatatggtatgtgaattatatctcaacaagctgggtattgtttttttaaaaaataaaaataaaaaaggagaaagagagagagaaaaacaattgcagatcatcccagcactgaggacaagactaacttcagtgttccagtatatgccattataggttttacggcacacagtgatgatttggagcctatgatttgacctagggtacagcaggtactgtttagcaatcattttactattgtcataggtctctgctcttggagctaagtgcccagggtaaatgagatctttaatttgaaaagagatttttgatttgatgaatgtacattctccaaagggtcataaattgtcattctggatgtttgatctgtttgttgttttggtacaaaaattagaagaaaataattcactcataaaatgttaaataatgaactaaaagtcattcatcaagtccataacttagggtcacatttgtccttggagcaggagaaagagttgtgttcacccttttcttacttttgcttttgtcctaagtgcttcagagaagtacagggtggcaacagtgtttctactgagcagctgataccattgctatgcactcattcattatgcaggaaacatttagtaatttcaacataaatatgggactctgacgttctcctcttcattttgcagagcagtcattatggcgaaccttggctgctggatgctggttctctttgtggccacatggagtgacctgggcctctgcaagaagcgcccgaagcctggaggatggaacactgggggcagccgatacccggggcagggcagccctggaggcaaccgctacccacctcagggcggtggtggctgggggcagcctcatggtggtggctgggggcagcctcatggtggtggctgggggcagccccatggtggtggctggggacagcctcatggtggtggctggggtcaaggaggtggcacccacagtcagtggaacaagccgagtaagccaaaaaccaacatgaagcacatggctggtgctgcagcagctggggcagtggtggggggccttggcggctacatgctgggaagtgccatgagcaggcccatcatacatttcggcagtgactatgaggaccgttactatcgtgaaaacatgcaccgttaccccaaccaagtgtactacaggcccatggatgagtacagcaaccagaacaactttgtgcacgactgcgtcaatatcacaatcaagcagcacacggtcaccacaaccaccaagggggagaacttcaccgagaccgacgttaagatgatggagcgcgtggttgagcagatgtgtatcacccagtacgagagggaatctcaggcctattaccagagaggatcgagcatggtcctcttctcctctccacctgtgatcctcctgatctctttcctcatcttcctgatagtgggatgaggaaggtcttcctgttttcaccatctttctaatctttttccagcttgagggaggcggtatccacctgcagcccttttagtggtggtgtctcactctttcttctctctttgtcccggataggctaatcaatacccttggcactgatgggcactggaaaacatagagtagacctgagatgctggtcaagccccctttgattgagttcatcatgagccgttgctaatgccaggccagtaaaagtataacagcaaataaccattggttaatctggacttatttttggacttagtgcaacaggttgaggctaaaacaaatctcagaacagtctgaaatacctttgcctggatacctctggctccttcagcagctagagctcagtatactaatgccctatcttagtagagatttcatagctatttagagatattttccattttaagaaaacccgacaacatttctgccaggtttgttaggaggccacatgatacttattcaaaaaaatcctagagattcttagctcttgggatgcaggctcagcccgctggagcatgagctctgtgtgtaccgagaactggggtgatgttttacttttcacagtatgggctacacagcagctgttcaacaagagtaaatattgtcacaacactgaacctctggctagaggacatattcacagtgaacataactgtaacatatatgaaaggcttctgggacttgaaatcaaatgtttgggaatggtgcccttggaggcaacctcccattttagatgtttaaaggaccctatatgtggcattcctttctttaaactataggtaattaaggcagctgaaaagtaaattgccttctagacactgaaggcaaatctcctttgtccatttacctggaaaccagaatgattttgacatacaggagagctgcagttgtgaaagcaccatcatcatagaggatgatgtaattaaaaaatggtcagtgtgcaaagaaaagaactgcttgcatttctttatttctgtctcataattgtcaaaaaccagaattaggtcaagttcatagtttctgtaattggcttttgaatcaaagaatagggagacaatctaaaaaatatcttaggttggagatgacagaaatatgattgatttgaagtggaaaaagaaattctgttaatgttaattaaagtaaaattattccctgaattgtttgatattgtcacctagcagatatgtattacttttctgcaatgttattattggcttgcactttgtgagtattctatgtaaaaatatatatgtatataaaatatatattgcataggacagacttaggagttttgtttagagcagttaacatctgaagtgtctaatgcattaacttttgtaaggtactgaatacttaatatgtgggaaacccttttgcgtggtccttaggcttacaatgtgcactgaatcgtttcatgtaagaatccaaagtggacaccattaacaggtctttgaaatatgcatgtactttatattttctatatttgtaactttgcatgttcttgttttgttatataaaaaaattgtaaatgtttaatatctgactgaaattaaacgagcgaagatgagcaccacctcccgtgtctgcagttgtatttcctggtgcttgccctgtgttggggactgttttgggggttaatctgagccaagtggcgctttctgtcctcccttctcaagtgatggccgatggttcacgcacttccccctgttcctgcccttgtcctcacttcccagtcacccactagttcatctctgcggcttttgcattttctccacaagcatctaagtgggcttagcactggtaaactgcaaaggcactattgcagcaggaggaacagtctgggagcttttttcagtcctggatttagaaatagattttcttgattaaaatgaaaattaacaagctctaaagaactgttgacccttgaactacacagggattagaggcactgacctgccgcacagtcgaaaatctgcagagaagttttttttgttttgttttgttttttttgagacggagtctcgctctgtcgcccaggctggagtgcagtggcgggatctcggctcactgcaacctccgcctcccgggttcaggcgattctcctgcctcagcctcctgagtagctgggactacaggcatatgccaccatgcccggctaatttttgtatttttagtagagatggagtttcaccatattggccaggctgttctcaaactcggcctcaagtgatctgctcgcctcagccacccaaagtgctaggattacaagcatgagccaccgcgcccggcctgcatagaacttttaactcccccaaaacttaattgctaatagattaattgcctgctgttggctggaagccttaccaataacgtaaacagttggttagcacatatttcacatgtcatatatactatatactgtattcttaccataaagtaagttagagaaaatgttgttaaaacaatgaggaaggaaaagtatatttactattcactgactggaagtggatcatcataaagatcttcatctcatcttcctcacattgaggaaggctgaggaggaaggggaggggttggtcttgctgtctcctgggtggcagaggcagaagaaaatctgtgtctcgtggactcagttccaacccgtggtgttcaagggtcacctgtgcctgctttatgcaccccaaatcaggctctaaaatagtctcaggtcctgtgagccttagtgacacactcttctcagattcaatacctttgatctgaaaggtgactttgatttgtcataatcttccaactcattctctacatgtttcgacgcaccagcactgtgatgttcttggttatccttggcagaagttttctcctgcaactaatttgctaaaggcagggggtaatcagaagtgacagtggttgaaatcacaggccaatatcttagcaaacgtctgtgttgtaaatggggaagtgcctctggtggggtcttcaaggatcactccagcctggctagggaaactctaggggagaggcacttgaaattattgtactcataggtcctagagagggaggcatgtcatgccaagcagggggctggattggaggcgtgcccagggattgggtgcaactcagcgtgtatgagacagaaagagagagaactcctgggcaagtgcctttactgggagccaggatggaggacacaagcacaaggtgtaaggggatctcactggtgtgtttgaatgtcactaagtcacagtcaggggaagacaagaagtggaacttgtggcagggaccagccttattacactggcacctggttacctggacagggtgcccactgcctatttgtaggatgtcaaggtatcaggaaaatatgaagtttttaaaaatttacaatataatgccaacctcctacggtgatcagaggatcagctttgtattaaagatggaaagataccaatcatcacccacaaaactactaaaacagaaagaatgacaaatacaattctcggccaggcacagttgctcacgcctgtaatccctgcactttgggaggccgaggcaggcagatcacttgaggtcaggagttcaagaccagcctggccaacatggtgaaacccccattccctactaaaattacaaaaaattagctgggtgtggtcgcacgtgcctgtaatcccagctactcaggaggctgaggcaggagaatcgcttataaccgggaggcagaggctgcagtgagccgagatcccgccattgcactccagcctggcggtaagagcgaaactccgtctcaaaaaaataaaataaaataaacttttcattacctgcctataataatttctcaaaaagagtcaactgaggagacttaaagtgttcgaagcatagctacttgtaggaccagagtgaataatatccacctgtatctttcccaggcctcatgtttcctttgttatttcaaacgtgtgagtcatgcaaaaggaatttttactaaaaaggaaaagaaaaaaatttaaaatgaccagcataaacataattgagttcaatcccccagaaagggttattcggagaacagccaggcgctgcccttgtttttccccctccccatctggggctaagaccaaaaggggtctgtctttggagggaaatctgggtctgtacagcttcccactctaaggggagccttaatcccagccggaacctgagcttctccaggcaaggcctgaccttgccgactgatctaagcattctgcgcttcattttcaccccagaaaggtgacttcctcctggctggggggctcctcccctaggactcagctcatcctgaactaataaccgcgttatgtccatcctttgttccgttctttgagtcccacccatgttcttcaggaaagctgcagctggtccacgtgccttgcctgtgcttctgtagaactacccctcccttctctgcctgcagcagggctcctggaacttgaatgtgcacttgaatctgcaggtcctgactgtaggtctgtgtttctaacatgctgctgggtgacgctgtgcccgtcctgtggtcggcattgtaacaaggctccgcgggttcccacgccggagtctgcgtcagaaacctctggagggcttgttatacacagatggctgaaccccatccccagagtttctgattccctagtaccagggtggggtctgagaatttgcatttctaacaaattcccaggtgatactgatgctgctggtgcggagaggtcacatggaaaccactgctcggcagatgcaaaagaagcagaagccgccccaaccctgaaatactcacaaagctgctgtggagaccagacacctgccgggggaatgagagcctggggatcctgcctgggaggaagagagagctgggagctctatgggtgaatgccaatggaggtgcaaggaggtgactaactcctgccgtctgaaaatagtgaagcacagccgaggcctgaagcccacccttagtgagagatatagttaaacttggaaatggtgcccagtcacttgaaaacagcacttctcagattcagatgtacacatgaaccacctgaggatcttattaaaatgtgggttctgaggctgtagctctgaggtgagctcagagattctgcagttctagaagcttccaggtgatgcaatgctgctggtgcaaggaccgctctctgagaaacaaggacctagaggtccaggtcatcttggagagctgttctaaccctggccaagagcttcgggaggcactggggctcaggcacccggcaggggagtcttcactttccttgtctgaactctaagtgctgcctctcacacacaattcccttgtctggacccagacaacagaatcagtgcagcggcttatctcagaactaaagacagttgactgcccctggggaagggagggctctctctgaggaagtctcaaacaccctgctgcaaaattttcaccctcaggatccccaatttccctgaaccttaacagacttgcttgttctgtagaaattgcctgtaatttccaagataaaaggactagaaaggtggccttttcacctatgtggcttctcttttttttttttcttttgagataggatcttgctatattgcccaggctggtctcaaattcctgggctcaagcaatcctcccatctcagcctcccaagtggctgagatgacaggcacgtgccactatgtctggccctatgtggcttctccaaggtgaatatgggccttgtggggctccaggtggcacatgtaaggtgtgtatagtagttttgtgttcagacttaaatgagactcaaaattatactggggaattctcaggggcagacccctccaaaatcaaagacctgtggggcaaagccccagcatcctgccccaatgagctggggctgactccgacagctgctgcttctgggtctatcatctcctgatgctttgacaggccaaagcattagcctcaggttagcctctgaggcctgtcctgtcctatgcagtcccaggcagtactgctccctgtgcctgagacactggcttctccacatagacctcagacacagaactggggccactgccctcactgtgcactttaaagggtcctcctccaggcctccactcagagcctactgtcccgctcttcctaaaccacattccaggtgcccagggtgttggaattatctgcctcagggcccctgttgtcctcctatctgtcctcctacgagtggaccacaccaccagtatacacagctcaatgtccaagaggcagccacgacatcactgtttgggtctggtggctaagaagaaacttggacatgtaggctgggagtccacatccatgaactcaaggcccccaggaggcacacgatgaattcgagtgggaagagaagggggtaggccacgggacagaggcctccctctggagtcttcctctaaccgctgcaaatgttagaggcagttctacccccaaagcttctaggggaaaggagtgaaggatttggcaataaagtccttagtttttgcaaatgtctgcaagtcataaaagtgcttttaagttctccacaggtcaggactggtcatgttaggttcttacacctctcccatagtccctccacccctagacattgggagactcccagtcaattcaccacccaggatggctgcccctcaccttcttcccagggccccacatccaattaatccaaatacacccatgtattcaagcacctttctgatgaacctctagaaagtagccagtgctgcagaaatttcttgtagcatgtgctgaaatttctaggatcctaccagtcaaagaacaacagtctccttgcttccaccagggaatttgctaacacttgcttctaagatctgacctctcagagccactgtggtccatcaatcaattcaaaaattatagtggcctggggttgtgtgggtgaggtggctgcttgggaggctgaggtgggaggatggcttaagcccagtagtgcaaggctgttgcaagctgtgaccgcaccactgcactcctgcctgtgcaacagagcaagacaccatctttataaaaacaaaccagcagccagacgcggtggctgacacctgtaatcccaacactttgggaggccgaggtgggcggatcacgaggtgaggagtttgagaccagcctggccaatatggtgaaaccctgtctctcccaaaaacacaaaaactatctgggtgtggtggtgtgtgcctgtagtcccagccactcgggaggctgaggcagaagaatcgcttgaacccaggaggcggaggctgcagtgagccgagatcgcgccactgcactccagcctgggtgacagagtgagactctgtctcaaaacaaaacaaaacaaaacaaaacaaaacaccagcaaacaaacattgtgaactacaattaaatttatttaatcacagtactaaatgctacacagcaactgtgtagaatactgcatagcaatgaaaagccatgctttaaaagagttgtgccttacatgaggaagtgtgcataatataattttaattgaaaatcagattggcaggataatcattttttataaaacaacaacaacaaaaaaacaatgtccgggcgcggtggctcacacctgtaatcccagcactttgggaggccgaggcgggcagatcaggaggtcaggagctcgagaccatcctggctaacacggtgaaaccccgtctctactaaaaatacaaaaaattagccgggcgtggtggcgggcgcctgtagtcccagctactcgggaggctgaggcaggagaatggcgtgaacccgggaggcggagcttgcagtgagccgagattgtgccactgcactccaacctgggtgacagagcgagactccgtctcaaaaataaagtatatatatatatactgtacaaatacacaggaaaaaaaataacagaaatcttcaggccttactgttaacagtggttattgctgggtggtggataacaggtgatttttttatttccttctgtgttgtttttatattttccaaaaaatttacagtgtatcaagttgactggatcaaggggtatgtgtttgcgtgtgagtgtgtctattctgagtgtgtctatgagggtgtttctggataaggttagcatttgaatcagtaacctgagtgatgaaaattgttctcacccatgtgggtgggcaccacccgatcttctgaggtctgaatagaacaaaaaggcagaggaaggaggagttcaccccttgttgcctcctgcctgcctgcttcagctgatgcatccgtctcctcatgcccttggactgggatttacactgccactaccctggttctcaggcctttggacttaggatggaaacacaaccccagctttcctgagtctccagcttgaagacagcagcaggtcatggtacttcagagcctccataattgcatgagtgagttcttcctgtatacatgtccttctggttctgtttctccgagaggtctggctgatacatacctgaccaaatattgcttttacaatgagaaaaagattggtaactattatttttaatcagtaaatggtatgcaccaaacctggccggtctgccttcaggggggcctctctgtagcattttctcagacataagtacaacttttgagagtgtaacatgccaggctctgtgcccaacatttggcacatatagccttacctgatcttcacaacgctgtccattttaggaagctcacattcagaaacgtttattctctcacttacccagggtacacagtatgctccccaaaagtatattatggaaacacatggccattgatttgtgatgatatttaagagtttggtatagaggtcctgagcccggagtgctatgggcacaactcatgacctatgtgaatggtgcctcctggacttgtgcagggcaccagcttcaagggactctgctgactcccagcagtacctgggggaattgtcagcaatcctaaaagcaagctcagcctgcaaggctgcctaccccggacagatgatgccccctccaattgagccatgatcccatagagccgtagaaaatgggtcacctcctgcaggaagccaccagggtgcttgcatggctgggaactcttttttctctaactgtcccagaccatctgctgctttcctccctgcttccaaaaaaaaaaaaaaaaaaaaaaaaaaaaaaaaagtcattctctaaatttttatggtgggcaaagttatcagttttcagtaagcccattccttagctcccctatttgatccatcctcttctggaaaccttccaggaccccatcttcattgccttccttgctggttacaccatctggatcagttttctagggctgccataaccaagtaccacagattgggtggtacaacagaattctatttcttcacagttctggaggctggaagtccaacatcaaagtgtcagcaggtgtactttcttctgaggcctctctcctgagcatgtagatggctctcgcctctttatatcttctcatggtcttccctctgggtgtgtctgtgccctaagcccctcttcttacaaggacaccagtcatattggattagggcccaccccaataacttcacttagtgtaactacctttttaaaaaccctatctccaaatatagtcataaggtgttagggcttcaatatacacatggtggggggtgggaagatgcaatgcagcctatgacatcatctttctagaagtgtcataagagtatgtctgtcactctcaacacagttcaaaggcactctcaggactgtgagggccttgtggggaccccacattcacacactccccatgcttctcacaatgaagatgccaccgtcggagtcgccgtattcctctgcacagactgggtcaggacccaccgctcaccttaggatcaccaagggtgcctacctcatagcgcccatggcagagcaaatcgccgtgtttccattctggatatagctcctaaaatccagccaccacacccccaagtctggcacaaagtgaagagtttcatgatcaaccaacgtggtttagtttggctcagacctaggaagatctaaaactttacgccggatcatgttcctcccacacacaaatacactgcaaacacacctggcttggagttatgctgattagaagttaattaacataaagcagggagtgttggctgtaattcagtggctgctgcagcaaggctggcaaggtccccttcctgcatgttgcccaattccaaatgctgagcgtgcccaccaccctgcgtaccgcggctacccacacatgcaatgtgtccactcaggtttcttcatggccaaggctcaccttcctgaggcccccaagtctaaggtcaggggaagcaccacagagaggatcagaggatctcaaaggcccaagtccttccaaatgggtgaccactagccctgcccactgtccagactcacagactgcagaatccaatgagaagcctgtaattttgattttcttcttttccctgaatgactctgaatctccttttaccccaacccctggaggaggccttttctcaccagccaatctgaaaacccctttctctacaccgcctttcagtggaggaatgacaggtgctggggttgctatttctgccacacagatagtagggcatttattgtggaccagacttgtcccaaaggagggtttccagtctccaattggggtcatccaagcatggctgtttcctgaagaaatagctctggacctttgatgaacagaaaaaagaatgaaggaatgattccatgtgcaatcaagctcagattccccacataaagtctgtcaaaggccattcttagcttgagaattttaagagtaagatttttctctgccccccaaggaaaaggtccattgtggttctgctacacatttgatttcttttttttttttttttttttgaggctgggtctcactctgtcactccagccggagtgcagtggttcgatcatagctcactgcagccttgacctctctggctcaagcgatcttaccacatcagccttcctagtagctgggaccacaagcatgtgtctccatgccaggctattttttaaaaattttttgtagagatggggtctcaccatgtttcccaggtctcgaactcctgggctcaagtagttctcccaccttggcctcccaaaatgctgggattacaggtataagccaccacacccagcccacatttgattttgaccagccacattcgagttgccacattcccccaggctgccaggacatggagatgaatccaacaaacaaaccaggatgggctgtttggttctgtcccaccaattgtggaaaatgcgagcaaaaaaaccaccatcttgctcctgacataatcaccccgaagagtaagtaattggacaaaaaaaacattgttaaattaggcttctcccagttcccaaaagtaaaaccacaatataaaatggcagagtatttgtgtcctccaaggtgaggggcaaccttcattataaaaccacaccgaccagacaatattattcagtaataaaaaggtataaaggaccgttacatgctacaacatggatgaaccctgaaaacattatgctgagtgaaagaaaccagtcacaaaagaccacataggatgtggtttcatttatgtaaaatgtccagaaagggcaaatctgtagaagcaaactgtggattagtggttgccgggggttggagggaggtggaggatgggaactgcctactagtgggtacagggtttctgtctggtgtgataaaatgtgctggaattaaatggtagcaaatcaatgaataactttctgactattccaaatatccctgagtgtacaccttgaaatggcgaatctcatgttacgggaattaccccaatggtgctatttttttcagttttatttttgtttctatttgtttatttatttattttgagacagagtttcactctgttgcccaggctggagtgccgtggcacgatctcggctcactgcaacctctgcctcccgggttcaagcgattctcctgtctaagcctcctgagtagttgggagtacaggcttgtgccactacgcccagctaatttttgtattttagtagagacagggtttcaccatgttggccaggctggtctcaaactcctgatctctggtggtccacccgcctcggcctcccaaagtgttgggattacaggtgtgagcctctgcacctggccgatgatgctcttttttttttttaaagcacagaattgcctacctaagcacagaggtgatgagagggtagggggaggtttaggtagttgattaaggtttaatctgttgtaagaacatttctgcccacttgtttttctcacgagtgttccagaaaacagtctatagagaagcactaatagctttaggtctagcacatttctagacacttggtcctaagccttttctggttacaaaatcaaaggctaaatcaatgaaagctgaaaaatgaaatacaacattctcgacctttaagaaggtaagaaaagtgaaaaggaacacagtaatgtttaattatggagcagctgagtttaaaacctgcttgcccctgctgtgatatgtaatttacaaggcctgctggtatcaagagctgatgggattgttaccaggcgaataggccctttgcccatacgcggcagaaatgtggtcccctttattctacctaaagtactaaagtttcctcaagaaaaacctctggacctttggtgaactaataaatgctcagggtctgggaagtggcttcatgcacccgtttttgtgacaagtttagtgactgccttttctactaggttataaattacttctcatatagactatttcttttttttattttttgttattttactttaagttctgggatacatgtgcagaatgtgcaggtttgttacataggtatacatgccccatggtggtttgccgcacccatcaacccgtcatctaggtcttaagccccacataccttatgtatttgtcctaatgctctccctccccttgcctcccacccccaaacaggcccctgtgtgtgatgttcccctccctgtgtccgtgggttctcattgttcaactcccacttgtgagtgagaacatgcggtgtttggttttctgttcccgtgttagtttggtgaggatgatgccttccagcttcattcgtgtccctgcaaaggacatgatctcattcttcatggctgcatagtattccatggtgtatatgtgccacattttctttgtccagtctacttctcatacagactatttctacgcctttcattcacctggtggaaactctatcctttttcctgaagttggcatttctcctgacatctcaatctgcccagttgctccttctctacctcacaggaaagttatgctgatgagtaaggacacacccttctcacacactgagctgttttggcaagactaggtggtgtgaatatcaggccttgtgacggggcgggggaccttgctggagcctcagcttcttcactgcccacattgcgtctctgtcttactcacttgacctgttggctctgttcagaggtcttgcttgatcctttaagacccagatgtcccttctgagtcatcgtgtggcatttggccttgtcttccccggcctgcatttacacccaatcctccttccctgtgtgtcatcacacacctgcgtagcacttgcagttggagtcgggagagcagagaagatggaagagaggcattggttcatgtccagttggaaaatcagtaatgtttccatgtggcagctgaagtggaggggagagaacactcagtcaacccttcaaatcaaggacctccatggtggaggtgggtgtggtctacaaagaagcatgcccctgtgctgaagggatcactcccctcctgccccgcagtaattaccattatccagggatggaaaggagaacgtgtggttgaggaaatgttagctcttttcctccttttcctggaccacaaagctaagctggatagaaaagcttgcagggcagaaacagttgtaaaagacatccatggggacaccctagatgtcagctgttcccattctgttccttcctccccaccccactctctttggcaagccagtcctccactggggcacctgtaatgagttactccctgctgcacggcctcacttctctccaagaactagcctcatcattcggactcatcatgaatccataccttagagcctcttgagccacctctagggtgcttaacaatcctctgtttatgttgttccctccacctagaacatctttcctgctccctatctccaagtggcaaactcttaatgtatacatcaagacccagcaggggccaggcatggtggctcatgtctgtaatcccagcactttgggaggccgaggctggtggatcacctgaggtcaggagttcgagaccagcctggccaacatggtgaaaccctgtctctactaaaaatagaaaaattagccaggtgtggtggcacatgcctgtaatcccagctacttgggaggttgagacaggagaatggctggaaccagggagacggaggtagcagtgagccaagatcgtgccactgcactccagcctaggcgacagagagagattccatctcaaaaaaaaaagaaaaaaagacccaactgaaatctgaaatgtcagtctgatgaagcctatgaatcctgctcagtataatgttttaaatgcataaaataagatacatgggttataaaataaactgattaaactaaaatatagttatcaaaatatgttaatactcattaaacttaaatatctaaaaactcactgaataagatctagtggtgagcctaataacaaacataatttaacagtgatatgtgtaaaggacattttgagatttgttacacctggaattaggttgaccaacttgtcctggcttgtaccatactttcccagtttagcactgaaaatcctgtgtcctggaaattccctctgtccctggcaaactggcacttgagaaccctgtgtcctggagaacccctcagtccctggcgaactggggcagttggtcaccctacctgtaatgtggcatgaaagcatctgtgattgttagtggtgttataatcacaggtacagctaatgctactgtgagttgctacctgcattcttcatggaggaaaagctctatttcaggtagaggtgagtgaaaataaagatgtgttggtttttcccatccaagttcatgtattttccaatttctctccgtggacagcccccttccagttaagaacccctgcaattggtaggacagagttaggtctactctcccctaatattcatactttgttcttagctctacaataatttaccaaacgctgtaattgtttgtttaaacaacacaacaaaaattctccattaagcacctttcttacagggttgtgggagaattaaaagaaatgtatacaggagagctggcatgaagcaggtcattgtgatacaaccagagccctcttgcatggttgaatctaaattggttgaaaaattttggaaaactggcaggttctactaaagctgaacatgcccctatcctatcacccagcattttgactactgagtatttccccaacaaaaatgagagcttatagtcatcaagagacatgcctaagaattttcctagcaactgtattccaatagccccaaacaaaggataaccccagtgtccatgagagaagaacagatcaagaagttgtgatctatttaaacaaccatataccatacaggaatgagaattcacaaataatatctcagccaggtttggtggcacacacttgtaatctagcactttgggaggctgaggctggaggatcccttgaggctagaagttcaagactagcctaggcagcatgacaagatctcgcttctaccaaatgaaaaaaaaattagccaccatggtggtgtgtgcctgtagtcatagctatttgggaggccgaggcaggaggatcacttgagcccaggaatttgaggctgcagtgagccatgatggcaccactgcactccagtctgggtaagagaacgagaccctgtctctaaaaattaaaaagcaatttaaaaaacaataataacatatctagggaacaatattaataaatctcacaagcataattttgaacaaaattacagttacaaaacaatgcatattgcatgattccatttgtataaaagaagggtgaaacaccagcctggaagctagaagtcaaggtagtggttactgctgaagggggtgggaatattctgctggttacctaagggtattgagttcgtgaaatctactgaatggtgtacttatggcacgtgcatttttctatattatgttatacttcaacaaaagcattcaatatgttgggtcctcattcccacctcttgccagatcccacctgcagccaccaccaccaagaagtgacctctccctgcattttccacttgggttggctctgcgacttggcaaagacttttccctgctgaatccatccctctctccacagtgctttgaacttcctcctggacaagggcaaccacagcctctggcactaacctcttaagttgccttcacaaccatcaatgcttcattagtatttctggcaggctggtaattaacatgttagcacatacctgtgtattcaaagcagcttttgggcccgagcttactatcctttacactatttcagggaaggatttgtattgaattctgtggtttcaactgtgccaagcagcaattgataatctttcatccgcagcagctgtaacaatgatgggagcagcaggcatgatacccctgcacagatgagaaaactcatcctcagtgtgaacttatgtcaccccaaagatgcccagcaaatataccatttattgtctgaggtggaaatcaccctccatgagagagaaggccaaagctcccctgtaatcgatgatgactaagccctgcaaagccgagaatggcaggctggggattagaactcatgtctttggctcatgtccactctctgtgcagcgccctgccctcacccccctcccccgagaacgaacaccacccctgggcaacccaggtgtccccactctgacacagtaaaagctggaccgtcatctggtccaggtagcctcgtcctgggggaggcctttctccatttggacattttcctgtgtatttagggagagtgacaaactgcagaccaacttatcaggttaattatgcttttaaaaacatcgcagacgaggagcaaagtgatggggaggctaaatgaggaactcggtggtggctgagtctggcattctttgcccttctttgggtctgcaggtgggagtttctgccctttcctgggcctctcctttctggacaacccgagagacagatcaccttaaaacacagccttcatcctgtacctgccctaagccttcagtggctccccatcttctaccttctcacctacaaacatcctgtcccacatacactgggtgattcccgcacgagaggaagaactgcttcagtggtcccggctgagccagaaggaccactgctcttcctcatctcccacccttcctcacctccctcccatcctccccatactccaccccaatccctgccctgagtcaattgctcacagccaagttccaaacactaactgcactctgaccgggaagggcagagaactgcaggggaaatgatccatggattagcacagcatttgcttctccaagctgtggccaccctctgggctcattttctgcttctaaacaactctataccacagaatctcaactaccaccatgacgggtcttcaacatgctgcccttgatttaaaagacaaccgcaacaactgtaaaactgtctcccttatccctgtaaaatttgctcttgctgcttttgtgtattccaaccaactgcgatgtggaccgtcaccgatcaacaagggataaagggaatctagatgcatctagattccaggcactgtgctaggtgccaggcaaacacatgtgaatgaaacacagtccttcaacttctatgagctcagcagaatgtgtgaatgggaggctccggtgactacagtaataggctctgtgccaagtggcaaaggaaccacatggagactcgcggctgggtttgggagcagaagagtgggcaaaccgtaaaggagggtgaatttaagattttaaaaaagccatagtccaaattctaaaatagtaaaagctgaaaaataggcatattctatgacccagcaaatctactcctgagtatatattcaacagaaatatgggcaccaagaagaacatgcaggaatattcatgacaacactattcataagatcccaaatgagaaaccgcccaaatgtccatcaacagggaaatggataagtaggttgtggaatattcttacaatggaatgaatgatctataactacacacaatgtgggtgaacctcaaatacgtaattcgagcaaaacacagacacagaagattatattctatataattctatgtatatgaaatacaaaaccaggcaaaactaatctatggcatgggactcagaaaagtggtcagcataggggagggaattgtggcgtgaagaggccatgaggagcttggagtgtgctgtcatgctcagtttcctaatctaggtgcaggttacaatggtgtatttggtttgtaaaaatacataatgctgggccgggtgtggtggctcatgcctgtaatcccagcactttgggaggccgaggcgggtggatcacgagatcaggagatccagaccatcctggctaacacggtgaaaccccatctctactaaaaatacaaaaaattggccgagtgtggtagcccatgcctgtggtctcagctactcgggaggctgaggcaggagaatcgcttgaacctggaagccgggggttgcagtgagccgagatggcgccaccgcactccagcctgggtgacagagtgagactccatctaaaaaaaaaaaaaaaccataatgctggacattgcaaatatgtgcacctttgtgtggatctcagacttgaataaaaagaaaaaattaagtatgtctattgtcttagtccattcaggttgctataataaaatatcataaactgggtggcttataaacaccacacatttatttctcactgttctggaggctggcaagtccaagatcaaggtgccagcagattgggtgtctggtgagaacccactttgtggttcatagatggccatctttcactgtgtgcccacatggcagaagggacaagggagtactctcaggcctctattataagggcactaatcccaatcataagggcttcacccatatgacctaatcacctcccaaagatccacctccattaccattacctcgggggtgagaatttcaacatatgagttgttgagggacacaagcattcagactgtaacagctgtttaggtagctacacagctaaataagtattattttccaaatcacatttcagcgatttctctaccattaggccatgggccagcaatggaacctggcttatccttcttgtgttcttcttttcctggcacaaatatggttggtaatcttgccaaacagtaatctccctggtatagttaatttggcctgctaggttatatccaaacgatcactgtattcacctataaatgctctcaaactggtccaaggtctaatcaaagctggaaattgatcaaataatgacccattcatgcattctagaattcagccattccctgttgcgtttttagaaactggcataattttctattatttacgcgatctagagaactatgtcatagacccctgcatcatagaacacccagatctgtggtctccatctcattcttcctgctttctcaaagatgatctacacacagttctatttcccagactatataatataatccactttatgtaacatagtgtaattcacttggccctggtctctcagttcttttgaagaaatgaatgttctcacactaattccttggtctgtttgtcgatctttacaggcagggagggaggatgcgaggcagcattgggtcggctccacattctccacatctgcttattgttttcttgccttgtttgcagcttccagagctcctccctgcttctgtagcaatttcagtcttccccattcctctgtgcctttgtaaacagccttttgttcactaacaagaggaatctgctgccacgtcagctctaaaccaacctcccaccattctctgggtaaagtcctgcttagaaagggaataggaagaagaggggtggagggggttggagatgattgtgtctagtgggaacaggcagggggatagtgcacagagttcacaatgggacaacgagcctgccgaggctgcactgccggcctggctgggtgaccttgagcctatctgggcctgtgagctcaccatgcaaaggagctggaccacagaattctgagtcctttctagctctaaacactgtggccctaagtatctatatgtgaaacaaaattgtcctgacatttgtctctgggtactgaactattaggagattttgattttttcatctccattttgcaaacagtctgtactaagattacactactgtgtttctgttttgtgtgtattcagaagcacaaaaagtctgtggttctagaaaggaaatagaaaagttcttaaaaaaaaaaaagtggggaagtgaaacaaatgttaaagtcagaggagaaagaaaggcccaaccggaggccccaaatccacccagagcccagaagcccgggtttcccaccgaccggctgcggtctttgtcagctctctggcgctatctgctgtccttctcgataacaaccgtttaatttggtttgcaaaattgctctgacgcaaatccaccgtgaacactgacggggtcacattcagcataaaaatcgcattctgtttacaggaaaatctggccccatacttgctcccatattcacttttgactttgccttgcagtactaactgtaacagggacacctgagcaagtcccttctgtataaggcccaaaatggtcacccaataccaatgagtctcttgctttggaaagcccaggaatgcacctccagccccttctgcgcagcgctcggacaccatgtagaggagaaggcactctgcagaactcgccctcagcccgcaccacctgtccaggggactggctgcgtgtcaatgtgtctctgctcccggggttcccgcagatctttaacttattggcctttgggctaattcagtccttcaagcattcctcgcccaacatgccaggaagtcttctcacgtgtcttccaccccatacctaccagttctgttttcccactacccgatgaaagtgtaaccgccccccggcgccccccccccccaccaccacacacacaccctgttggtcccatcctcagggcgtggtggtccaggtgaacgcttgccctctttttgagctgaacctccccacagaggctgtcagcaaagactgctttgctgtccaaggccggcctttaggtacaggacactatgcatgtccagcgaggcttgttgaagccacatctgtcatagatattgatgggaaaagcattttccttctaacacatctcattccaattctaaaaggcacctctgaagccttgctgaacttcatcaagattttcacgtggtttccttagtaaagtgtgatgagaaggtccatccttctcaggatgaaggagtggtccaggaagccctgattggtctgccggggagggaagggctgccttatttggagacctgcaggaatgccacctcccccggcagctcctatatagctgggcggacctggctgccaagagggtgtgctgggggactgtgcagctcgaggctccagaggcacactccagagagagccaaggtacgtggggggccacttctgtggtcaggactgctggtttcttatcaaggctcgatcccagattgaaaatcatgcaatgatttctttactcccacacctggggatgggtcccaagttcagggtagacttgcgaggatacccagtcatcactgggcttgcctttctctaagttggtgctataataaaatgctactttagggtttgtgggttgggattttgttttgcctttaagcttctgcctatgaaaactaatctctttctcaagaatgctgtgcttttattttttttatttgactcacctgaaatgatctattatgccattaatcttatttaagatttctccttaaaaaaggaatgatgtggagtatggccctatttaggagactaatgaatatttgcttcatgcttggatctctttggagaaagtcagtctgagttcactgtgctcaggaggcagagagagtggggtgagggggtccagatgctcatagccaccctgggacaaagacgaggcgatgtctacaagcaaggaaaggtcagtgaggcctctttgcaggcttctagagatgactggatgtgcttctagagatcacttcagctgtgttttgccttttttttttaatataaggagcaatgtggcatcagagttgaacattttatcagaggaacattagccacttttagggaagctgcagcagggtggtggagggtgtgtgaggggcgaaacaagctccctgtcagcctcctccagctctggggccccatggcctcacagtaagtctttgcctaggagacagcttaggcaagctccggtatgggaactccttccatttccctaatccacacaggcaaagacccaggtgctagaatgccctgacagtcggccttgggaagtggatttccttgatggctattgtagattcaggagccgaatgtgacaggcaaccttaaggtgtggggtgaggggcttttccatgacatcagtggcagcccttcggatgtcccagggccaccttgacccgggaccctcctggtgttcccccaggccctcctgtcttccctttcatctcgttttctccgaaattcctcaagggccctgccctttgccctttgcccagctcagggggcatcatacccagtgagtgaaaagcacagtgtgtgagcactgtcttctcctgaaacccagatgggcagtggggcatggctagtggacacatgcagtgcagcattagacagagcccagtgcaggtctgccacctccccgctgtgcagccttgggcaaattacttaacttctctgaatcccaggacaacatttataacatggggataataatgtacctactctatgtgagaattaagttaggcaatgtcagagaagagcttaacacggtggcaggcatgaagaaagtatgcaataaaaagccagtaggataagcagatggtcacactgtcccccaggggtgagattggaaaggatgcctggagcacacttgacccctggacataggggaggcaggggtccctttgctacgtttccatctttcccttccttcctcctcctctctctctcattactgcaaagccctttaggatcagcagccagtgaattcctcagaatggatggcagaatgcccccaagacagtgccagctcagagcaataaagaacaaagaggggagattgaaagtacaatctaaagtcggcacagtggctcgtgcctgtaatctcagcactttgggaggctgaggtgggaggatcacttgagcctgggcaacatagtgagaccccgtttctacaacatgtatttaaaaattagctgggtgtggtagtgtgtgcctgtagtcccagctactccggaggctgaggcaagaggattgcttgagcccaggagttcagggctgcaatgagctatgatcatgccactgcactccagcctgggcaacagagtgagatcctgtctctaaaatatgtgtgtgtgtgtgtgtgtgtgtgtgtgtgtgtgtgtatgtgtgtgtgtctgtacatatacgtatatatatatgtgtgtatatatacatatatgtgtgtatatatgtatatatgtgtgtgtatatacgtgtatatatacatatatatgtgtatatatatacgtgtatacacacacacacacacacacacatatagtccatgcccaccagcatttgattccaactcttctattgtattttcctcccagggatttcttgatttgaaagacttgggagtatcaaagaaaacctacatgtattaagtcaccactcctttattttcccatgcgtattcaaagccactataattgccctttgccattcttacctgtctcggaaaccgggaccagagccctgagtgaatgtaatcctagcaatagcaaaggagctcggtgtttgagttaaccctgcacaacccaaacatggggaaacaattatgcttttgagaccacataaatagcacaaggatgcgattccttccttaaaatctcctgcacttgggagggggcaggggagcccaggcaggcctggtggggagctgacccaccgccgtttctctggcaggttctgacgcgatgaggaagcacctgagctggtggtggctggccactgtctgcatgctgctcttcagccacctctctgcggtccagacgaggggcatcaagcacagaatcaagtggaaccggaaggccctgcccagcactgcccagatcactgaggcccaggtggctgagaaccgcccgggagccttcatcaagcaaggccgcaagctcgacattgacttcggagccgagggcaacaggtactacgaggccaactactggcagttccccgatggcatccactacaacggctgctctgaggctaatgtgaccaaggaggcatttgtcaccggctgcatcaatgccacccaggcggcgaaccagggggagttccagaagccagacaacaagctccaccagcaggtgctctggcggctggtccaggagctctgctccctcaagcattgcgagttttggttggagaggggcgcaggacttcgggtcaccatgcaccagccagtgctcctctgccttctggctttgatctggctcacggtgaaataagcttgccaggaggctggcagtacagagtgcagcagcgagcaaatcctggcaagtgacccagctcttctcccccaaacccacgcgtgttctgaaggtgcccaggagcggcgatgcactcgcactgcaaatgccgctctcacgtatgcgccctggtatgtgcctgcgttctgatagatgggggactgtggcttctccgtcactccattctcagcccctagcagagcgtctggcacactagattagtagtaaatgcttgatgagaagaacacatcaggcactgcgccacctgcttcacagtacttcccaacaactcttagaggtaggtgtattcccgttttacagataaggaaactgaggcccagagagctgaagtactgcacccagcatcaccagctagaaagtggcagagccaggattcaaccctggcttgtctaaccccaggttttctgctctgtccaattccagagctgtctggtgatcactttatgtctcacagggacccacatccaaacatgtatctctaatgaaattgtgaaagctccatgtttagaaataaatgaaaacacctgagctggtggctgtgtactttgactggtacatggaggctattttaatccttctaactaaactaaaatagattaaaggaattaaactaaaatacaagtaaagctagacaaaggcccagaaatcatactgtaaggaaatgttattggaagctgattcccagagcagaccacatatacagcaggatgtgcctgtggcatgaagattttctttctcttttttttttttttttagatggagttttactcttgttgcccaggctggagtgcaacggcatgattttggctcactgcagcctctgcctcccaggctcaagcacttttcctgtctcagccttccgagtagctgggattacaggtgtgtgccatcatgcctgactaattttgtatttttagtagagacagggtttcaccatgttggccaggctggtcttgaactcctgacctcaggtgatccacccacctgggcctcccatagtgctgggattcaattttttttttttttttttcaaaagaagggtaagtgcttgctgttcccatccctgaaacattgcatgtatttaagaaaaacaaaatgttagtggcatatttgcttctaatgttcccctaaccctacatgcatgttttatgtgcactcatatgagtatctttaaatataatccctttacatctgtgttctatgcaaagtctctcatttctttcaagacagcctaatgaaggccatcatctctgtaaaccacttgtcactacaaaaatacaattactcaccaaaaagctttaaaaaataaagctgtgtctttagggagacccaataaagaatgcaatccatgccataagcaggagttgatacaccaccttattagctaaaaatatatataacacaatatgagtaatgtttaagatctgttttaaatttaaaacaatgaattgaatgctctaagaggctcctacaggcgctccaggccactctcagagactcccaggagttgttgaactatatttggagaaaacagccactgaatattatcatttctcctttaaagagagtttgtaaggggggaacatgcattttatcagacaatttatccaaagcattgcagaacatgagtgctgatgagggcacctcttgtgctgagtcccctcagctatcagtgttcttctcaaggacacatttggaaggttttaacattgaaagtgagcggaggacttgggggcagagcagcacaaagaaacagccttacactgggcacatggaggagacgtccaccctgcagccaggactggggttcacgtcactgccagagctacactcgccttctgcttccacggtcctgttaattctagatcagagagcaagaaaaaagtacagaacatatcctctacggttatttcctgctttctaattaaaaaaataataaccatggcaagagagaaagaaagagaaagtactcagaggctgacactgacatttcacttcctcgctctcctaagtttaattacaacagcacgtgcagccacgtcagccaaatgacttcatttctgatgtgaaaacgcttaggccatgatgtcgttcattttctgtaattgctgccttttctcattctgttaatagtcccggcaaccagatttcagtggggcatgacgtgaatgtgtatatggtgattcaaatgcaaaatttgtttatggggcttttaatcgaacgcgtgtgtgcctgaacattcttgctcaagttgatgaatcatggggtggaataaaggctgagtttagtttttcactttagcaaaggggcaatggggtgcctactatgtgcgagacattgggaggggcttctgaattattctggatatcgtcattttgcagtgtgcataattttgccaaccgttgctttcgtagcccctgctaagtgttgactttttaaaatataagtttattgtaaaagtgacatgaaaattacaacagatattccagaccaaaataatacaacaatcccagcatctgattgagtcagtgtttgctgtttcccctgcactttcctagttcttaagcatttgcgtatgtaaacattcatatttgcaataaaaaagtgagcttttatattctaaatttttacttaacttaattcaatgctttctactcatttttctatacttttttttttgaggcagagtctcattctgttgcccaggctggagtgcagtggcgtgatcttggctcactacaacctccaccttccaggcttaagcgattctcatgcctcatcctcccaagtaggtgggattacaggtgcccaccaccaagccctgcaaatttttttgtatttttagtagagacagtgttttgccatgttggccaggctggtctcgaactcctgacatcaggtgatccacctgcctcggcctcccaaagtgctgggattacaggtgtgagccaccacgccctgcctactctttgttttctttcctccccacccattttcccccgtcctgtcccctccttccagcctgagatgtaggctccaccttaactgtgctcagatacacaagtgagggctttttaacttgattatgccttttaaaaatactatgtatgtaaaatatttattcatctgcaatttggcttccctaacttaacattgcatcatgaaactctttggaacaacagctatctagatagctgactcattcttttggattgctacgtaatctcacttaatacagatgtatcatgattgattgaatcattgccttgttgatgggccttcagattatttccagttttttgccactgcaaacaataaacatccttgtacatactacattgcagtctggtacttctgtttctgtggaatagattcacacgtgcaaaatttctggaacaaagcctgtgtgtaatttaaattttaccagccatgaccgggctatgctcgcacatagctggagcaaatcctattcccaccagctgtttacggcattaatttggaagagtttctgtcatttaactatgagaagccaccttttctacaaatgttgcctacacatcttctctcttttgcaaacggcacacctaaagctctctaaaactttcggccatgaggaccatttgaaaatcctcctaaaactgttagcaattctcattctaaacctggtccttggcccaaaacatctgcatgagaagcctggaaaacaggcagtgagtgtgtaggcttccaactcagagggtggtgtgtctgcacagctccacacaccccagcaactgggaaggcttgaggtgaggttatgccctggcctttttactgacttttactaaaattacacatgcaagtatttgcattccagccagaataccctctagatccaaaagctcaaaaggagcagagaattgagaacactattaaagtagcccatgctgttcctcccctccaggctctggcagacaaccagcatttccctggtgcccctcacaccctaccttgcttaggatatgcctgacaatgtctagaaacttcaccctctggtcctaatagggtgtcccaggcagtgaccttaagtttgtcttgagccgcccacacgctctacctcaagttttctgacaacaagtgactggattggggtggtggctgattgggtcaaggaccccaggccctacatcgtacctatggtgtggtcacatctttttcctgcacccaagacttttttgtcatggctgtagatggatggacacgtgcaccctaagctgtctctgtgttgctgcatgacacatcctgagtctaccagagtctctactgaaatgtgacagcagggcccatgtgccttcatgtaaccagcactgtcacagaccacacctgccaggcgagtgatcaagacttacacagacatggcatcatgaccagtttcagtttttctggctcagacaccactctgttgaggaacagacttcttggtgagcctggctcaggccagaggctaagagtttgctgtctccccagaggccacgagtcagagaagagcgagggcttcctcttcccttatcctcagtgctggcagaagaccccatttcagtgggcacccagcttccccagtggaagaaaaaggagcccaaccctcatgcctctgggaatgcatccctacaaaatgggaataactcagatattccctgcaaaatgagactaaaatactatgactttgagaaatctcaaagcacattccagatcatccaaagactgccccggaaaaacagactcagctttggcaaatgggagccttcccctgggcccgtggctttagggagcctcactttggagcaggagcatgcacggggaagcgaccgagattccacccccagagcactaaagccccgaggcctccctcccacagtgagccccagaccccaaacagagggtggagaatgtgctcctctggcattggatgagaggccttagactgaaatgagccccatgcactgaccatgccccttctaaagggatcttcctggtcagcacaaagctgaccccccaaaagagctcatcctccaatactcaagtgtcatccctgttccctggactgaactgtaatgggcacacaaattccctggaatcttggtgaaatgtaccttctgcttcagcaggtttggggtggaccagattgtacgttccttttcttttcttttttctttttttttttttttgagtcagagtttcagtcttgttgcccaggctggagtgcaatggtgtcatctcggctcaccacaacctctgcctcccagattcaagcgattctactgccccagcctcctgagtagctgggattataggcatgcaccaccacgccaggctaattttgtatttttagtagagacaggggtctgtccatgttggtcagcctagtctcgaactccggacctcaggtgacccgcctgcctcggcctcccaaaggctgggatcacaggcgtgagccaccccgctgagtcccagattctacatttctagcaagtgtcactgcctcctccaagatgccctgtaccctaaactgaacttcatccctccatccgcccctcccgccctcccatccgtcctggggattcccagatcttgttttaatgcaaacccttttgtgagaaagcattgctttcttaaacaatgcaaattgttttgactccaacaggtttggctataatctgtcgaaggaaattggcagaaggccagagaggaactagaggaagctggaagcaggcagttcaaggccacatgaactcacacagctgccctcccttgatggtgggaggtgggtggtggggagggagaggggaggtactggttgcggggaggagaccttccatacaccccgtgtccaagggagaattacatgcacaggcttatcagaggtgacaccagcatccagcagggaagggtgttttgcaaccaggggctccatgctcaaaaaaataacattcagcaccaaggagagggattttcaagaacgaagcagagggtaaggtgcaggcagggtcccggctaggtgcaagccatgtcggttgtggtgtgctggaatttcgaaatctgtaattaagattctaatttttttaattggctgttttggttcggggctacttagcaatcaagaacaaaatggaggcgcttatgacgtctcttaaatatcgtttattcctgtcgtgcccaagccaaatcatgtcatcacctctgatttcctggggcaaacaaatagaggaagcaggaagcaaagggctggtgggttttccttagctttgggcccacttgggatagccaaacagtggaagcctccacccaaagttaacgggctttctaggctcatttgcacaagagcagactccaagaagtttcttctggaatttcaaatgtgatgtggtctgcaaatctgctccctgtcagctaagaagatgttgacctgtgcagatggctgtttccagaagtcgagctgtcagactctttccaagggcaggacccaggcctcccccatctgtctgtggagccctcataagcagcatcctgccttagagatgggttttacttagaattacagaacatttttcctctgggcattatctcagctcctaacttatgtttaacatttgagccaatgtccttctttgcctcatcttgggcattttgtggatttgttcatgcttccactcgacaaacatgcattcaattcctgccatgagtctgtctgctccgtgcgggagctgtaatggtgggcaacagaggcaacgtgcctgctgttaggtgttttgttctggtggcacacgcatgcatgtataaccagaggtgtgctagtgtaccagctctatgcccgagtaggggtgagggagccctaatttgtactatttgccaatttctatgatgtaaatggtgacccagccaatttcaagttacccacactcactgaatgtggagttaatagagatgtgtatgttcatctctcagaagcctgtttgacctgctccagcacaattaatttaatttaactgtttactttgtaacctttacacatattaattcactcctataaacaatatcatagctcttccaaatcagagctgaagtcatctcaaccgggaggctattgatggattggcgatggtcctccaggtcgctctcccttccatgcagacacctaggtgaaagccaagccccaggtaggcacaggaagagccgaggccagagcggaagagaaatggcacatggagctgccactggagttgaggattatttagcagtaaatcttttttgattttctattgcatgcctggcagtccactggaatctgcagatgccacaatgaatgagtcactgccactgccttcaaggtgctcacagtctgatgcagaaaggataatggccatgcagtatggggaagtgttgtgttagacatgggaattagcaagaaaggtttgctagagaagggaagtctgaaaggatggatggaggcatccaggtggagaagatgggaaagatgtagaatcactgcaaaaaagaaaacaagactatgctgcattcaaggagctgcaagcggtccagtacagtggggatgtgggcacggatggaggagagcgacaagatgaggccagagaatgaaaggagcaagatctgcaaagatccctctggcttgccgtatgttctcttgggaagcacttcgcaaaccataacgggcacacaaattccctgggatcttggcaaaatgcagcttctgcttcgtcaggtttgggatggaccagattctacatttctaacaagctccctggttatgttgatgctgctggtccatggactatcgtttgtatagtaagggtgtaacgaagaggagggcactgaagggtgttaggaaggtggattccacgatcaggcttgcatttctaaagatgactctaggtgctgggggcaggatgggctgcaggcagccacagctgcaggagcaatggaagagaaaaagaaggttaagagttaagtctaggttaggtgcggtggctcatgcctcttatccaaacactttgggaggctaagacggaaggaccactttacccagcagttcgagaccagcctgggcaacatggcgagaccctgtctctacaagaaataaaaactcagccaggcgtggtgatatgcacctgtagtcccagctacttggaaagctgaaatgggaggatcgcttgagcccaggaggtcaaggctgcagtgagccatgatcctgctgttgcactccagcctgggcaacagagcaagacccttctcaaaaaaaaaagaatgagttaaatctggcatgttgatgagcttgagggatcccatttgggttccgctttttgtcaggcttcttgtcctcaccacctgtctcacttgtttctcctcccaaggtggatgtggagcccccaggattcttcctactccaggacatcttctcaggcctctgtgtgccagcttgtgcagcatgacttggctttacagaattgggcaaagtcatgcttaatgtcactcagtcctgttccagagtgaagtcatttattttaggggaagatctatttcagtagctttatttttttatgtagtaatttttattgtttttccttttcaataaaataaatacttgctatgcagtttctcctgaaattataaattaactgttcagggttagcaaagcatgagttattctattgaatctataaaacattcagctttaaaagaaacagatatatatttttttctcattacacattattatataacctttaaggataataaagctgtgttcagatttaaaatttgagaaatctagctataccaagtttttaaaagtgcattaatcaaggctaaattttaaatattgatatatacatatttcataatctgaatctgtttaacatgaacactagcctttctttctgttattttttttttttccctacaagatggcttgactttgcagaacagtggttctcaactactggtgactttgcctccctgggaatatttggaaatatctgatgtaatttttgttgtcatcggggcggaggagataatggcattcactgagtagaacctaaggatgctgctaaacatcctacaatgcatagaatggaaccccataacaaaggaatatgcagcccaaatgtcaaccatgccaaggttaagaaaccctgttgtaaagtgcaactcaattcccattttatgaatagcctctctgttcaatgtaattctgaaaacacagacttgactaatttgcatatactgcttaaaagaatgtttaacctaaccaatgtcattaccaaaagcaatggttgactttaagtatcaagtgatacttccagaatgattaaaccacaaagtcagcttagaaagatagaaattgggacatattatttatataccatttaattgttcttgaatctgctctaccagtctaatctattaatatggaaagttaattagaactgttttgagttagctaagcacatagtttcctttgaacacttttctgaactatgacaaaaattaaattatatataaagcacctgggaaatagaaaagcactctacaaatgttctcaaaatgtttgttgcaacatgtgaaaagtgaagagctttacctacttgtccaaacttgtcatgaacatgtgtttggacagttaaattagtttttatttgttctctcttttttacaatgatctcttatacatgacttttacaaatatcagtgcatatatatagtatgtgtgatacaagagaaagcaaatgtgtttttcacacatgtaaagtatcaagatggcatatgagtattctaattgggagccaactttttttcaaattattctaagttttgggggttttatggttttttgtttgtttgttttttattttttgagacggagtctcactctgtcgcccaggctggagttgcagtggcatgaccttggctcatagcaacctccgtctctcgggttcaagcaattctcctgcctcagcctcccaagtagctgggattacaggcacccgccaccatgcctggctaattttttgtatttttagagagacagggtttcaccatgttggccaggttggtctcgatctcctgacctcaggtgatccacccacctcggcctcccaaagtgctgggattatagtcatgagccgccatggccagtctttttttttttgacaggatctcattctatcatccaggctggagtgcagtggcatgatcatggttcaatgtagcctcgacctcccaggatcaagcgatcttcccgcgtcagcctcctgactaactgggaccacagacatgcaccaccatgcccagataattttttgtatttttagtaaagacagggtttcaccatgttgcccaggttggtctcgacctcctgggctcaagcgatccgcctgccccagccttccaaattactgggattacaaggcgtgagccactgtgcccagcctattctaaggttaagtagagaaagttttcagtactttattaatcatttatctccacatccacatcctatatatttttcatggtcaataaactgattcaaatgacttaagttatcccaccatttaaagagaaaagtctctataataacttgaaatcatggtgttattttaatttcaccaatgactacttttctcagaagttctagctcttcctttgacacacagaaaatagctttttatctcactgggatctgaattcgaagttatgttcttcctcacaaacaaaatataatcagttttatgttctccccagatgccatcagattggacttcgctgcaagttgatattagataataggtttcttctggaggagcctcttccatgggaattcctaattcagcttttagatgcctctgtgctactcaacttatgtcaatgacatcatttctctcaagcttgtctggattacttaatggatgactacaaccaagtattggtgaaactggctcgaaaggtaatttcagcatctgatctctgctgtcactgtagctcattttggtgttgagtaagaagacactaagagcttgatgcaataatccattcccaatgttttcattctcgtgacaattcttcttggtctcagttccaatattactgtcattttcatcaataagaatacacttctctgtggtgcacaatggttcacacctgtcatcccaacattttgagaggccaaagtgggaggatcgtttgaggccaggagtttgtgaccagcctgggcaacatagcgagatcctgtctctgcaaaaattttaaaaattcattgagtgtggtggtgcatgcctgtaatctcagctaatcaggaaactgaggcagaaggatcacttgagcccaggaggtcaaggctgcagtgaaccatgatcacaccactgcactctggcctgggtcacagggcaagaccctgactctaaaaaataaataaataatgaatttgtaaaaagaatacactggtctatgaggagttgaacttgttgctcttggagatgtccaatgcctgtctgaggcatggtcacaggatgtctgatctgccctaaaagacaggcctggcacaagggtggcatcagtgctgggctcaggtgtgccttgggagctttataaatggctgcccctggagtatatggtcaagacctaaagagtggccatgtgtgttttctaatcaagctttactgaattttagaggggaatcatgtataatgagattggcaaggggaattatgtataatgagatttgcaaaaatcctagaacgtcctgctctggaaagtccacagtctacagtgatagggaaacatcagaggtgcaaaaggaacttggggatttgctatggggactcaaaggcagacacatagctggtcctaggacattagaaatgagacttgggcagagtccaggaaaaagtgagagaatggagcagaaaaaggttccctgataaacctgcactgggctgtgtggcatgggaagaacttgttatctctttctagctctgtaagcccaaggctttctatgagcttttaggccttgatatttgtatcattttatgagtctattaggctcaaaaacgtctttgttaagcatttacaaaacatttgtttgaaaactattctgcgtgaaaacatgttgaattcggcgaaagaaaacagtacgtcatcaagtgttttggcacaaaccttacttttagcttttagggctggatatttgtatctttctgtgagtgcccactgggcccaaaaatgtcttttctgagcttctatgaaacgtgtgtttgaaactgttctacgtgaaaacatgttgaattcggtgaaagaaaacagaacatcatcaaggtttttggcagaaaccaggattttatcttttagggctggatatttgggcaacatagtgggacctcatctctacaaaaaataaaaatacattagctgggtgtggtggcatatgcctgtagtcccagctaatcagaaggctgaggcaggaggattgcttgagcccaggaatttgaggctgcagtgaactatgattgcaccactgcagtccacactgggttacagagcagaagaaaataagtgaagtctaacatcgagattgtaggccgggcgtggtggctcacatctgtaatcccagcactttgggaggccaaggttggtggatcacttgagggcaggagttcgagacaagcctgtccaacatggtgaaaccccataaaaatacaaaaatacaaaaaattagctgggtgtagtggcacacacctgtaatttcagctactccggaggctgaggcaggagaatcacttgaatctgggaggtggaggttgcagtgagccgagatcacaccactgcactccagcctgggcaacagagcaagtctcagtctcaattaaataaataaataaataagtaaataaataaataaataaataataaaaataaaatgaagattgtaaataaacttgatcaggtccaaagaaaatagagtcttccttcatcttcgcttatacttagatagcaggccgtctctatgtgagttactcattgcctgaggctggattcaccaagaactagatgccaagtcaaggattcatgtacaagtggtttattcgggaggtgatccctgcaaatgctgcaagtggggaatggaaaaagggaagggaaggtagcccaaaaaggctgtgttagcatgtttattgcatgggcaaccggagcttcactctgcttgggaggcccctggatgccagagtagaacatattcctcagggttatgctgcctgcagggcgagggagctggggaatttatacaccaagatctgtccatcattggttaaggacagctcccaaaggctatacttccctaatagttccaacctgctgagtgcataggctgagtgggcttccgagcatgctggtcccatctcctaatgatgagaggtggaggcacaggagaaggtaaacaaatggcaaagacacttaaatacatgagaaaatgagtccaacctgaactttgacttttctgggtggcccactcatcccactaactaccataacttcatttcgtctgctttttgcaaagaacagacaattccaaacagccaagcctaacaagtagctcatcttagcttgtggattcagagcactggtggcctctccacctccaattgacaccagaaaacatataaatacctctaaacatgccttgggtatttgtttttctaattgcaaatattataccataacttagtttgaaggctttgtaaagaatatgccagaaacatctaatattagccctaaaaactagggcaatcttttttttaacagaagagtgttcatataaacatcaaaagatgtgatgagagtagtttcaacttctaatcatagaaattatagggctatttcatgaaagaggtgctttatcagctcatcttgagtgaatgttaaagatgaagatatggctagtatctccagagtctactgtctcagagaggtagcccaaagttgtaagactgagtgccttgaggtagggaacaggaagcaacagggtctccaggttcactgaggagtactgacctgcaatgcgattcctacatcagcaaaggtcttccttccatcgttagaggactcctggatttgctatgcctatcctgatggcttcctacatgagaccatccattcacacttggcccttacccaggcctgaaattctccccagttgcactccacccacttatgtctatcacttagctcaaagccagtaaagctcatctctgaactagcaaagattccctttatcccatcaaaatgtccttaacatctatcttgaggtcatgcagcatgatcttactttgctggcattctttccttcttctgtggattcccaagcagagtacagatgtacagattccttgggggataagagctggaatttcagcttcttttttttttttttttttttgagacggagtctcgtctgttgccaggctggagtgcggtggtgcaatctctgctcactgcaacctccgactccctggttcaagctattctcctgcctcagcctcccaggcagctgaattacaggcacacaccaccacgcccagctaatttttgtatttttagtagagacagggtttcaccatgttggccaggacggtctcgatctcctgacctcatgatttacctgccttggcctcccaaagtgctgggattacaggcatgagccaccgcacccggcctcaccttcttttatatcccacacagcacccagcacagagcacaaagctaagcgcatcgatccagcgactgactgactgaataaatgaatacatgctatcttgcttgtagaagcccagattcctccttcttacgactcccacacccacttaggagattctattatgtcttaaaagaagttacatctccattagtgtcaaagcaacattatataagtggctcaacatgatcaggcatgaatttctttgttttcccactcacctgaaagcccaaaaacaatccaggtggtggtaaacacttctgatccttcaaagaaaacggaagaaagcgatccctaccgtctattttgaatctaccgttttttgtttttgagtgtcttttaaatctattcaaaatcctttaagggcatttcaccatgcatgggagaaggtcatggatcctcaacaaattgcaagaggcctttcacaggctagactctgccttgttctccaagctcaccttccataatcctgatgtgctccatattgccagactctttcaagtccttccccgccctgcggagaatccctactcacacctcaggaccagctcagacatggtctccaggagaccttttctaagatcctatgtgaggtaactagcccccttggcaccttgtgacataattattcacttccatgtacatgtcccgtagtgaactatgagcacctccagaccttaccctgcgtttggtcgccttgctctcctctctgcagctggcacccaatctttccaggctgtctctagggactcgagcccttgggatggggtcctcaatgcttttccacctgcctggcttctaaattccactaagatcctgtcccattctcttggaaacactagaacttactctgacatgccctatggaagttatttctccactgctgttcaaacccactcccagacctggccttccctgaggagagcgtctcagccaaatccaactgcctctagctcaagtttccttgcggggggcccgctggcctcatcctgttaggtcgtcttagagccacaggagaatcaatgttccagtgtcagcaggaagaatcaatgttccagtgtcagccagcagggggcagtgtgaaaatacacacaccaggcccttttttcaaagggtctcggcttccctgagggtgtctatctgtgcctctatgaagcatggcttgggtcattcctccagtcccatggccaggtggatccttcgtttacctttcatttctattaaatgagaacattctcaattcactaactggattgttggaaaggcagcaagctctgctagatagttctaaatatttgcatcaaatatggaccagaaattgtgaatctgtctttcaacgccctcggatctgagtcagcaaggctgccacgtgcaaaagtaggaacgttaaatacttgaagctgggagagaataagtgggtttctaatcctctctggtgcattcagttctagaaagtggttctttgtattctactggaacatttctatgtatggtttttttgttgtttgtttgtttgttttttgagacagagtctccctctgttgctcaggctggagcacagtggcacaatttcagctcaccacaacctctgtctcccgggttcaaggaattctcctgcctgagcctcccgagtagctgagattacaggcacgtgccaccacgcccagctaatttttgtatttttggtagaggcagggtttcactatgttggccaggctggtgtatgtatgttttaaacatgctttaaaacaaaatttctttttagagatgggatcttgctatgttgcccaggctggagtgcagtggctattcacaggtgtgatcatggcgcactgaagcctagaactactaggctcaagcaatcctcccaccctagcctcccacgtaattgagactacaggtatacaccaccatgcccggccttaaacatgcttttaaatgtgtcataaatcacatttctctgatgaataaaaagaattatctaatgttgagaaagagtcagtgtttaatcatttacctcacagtgcagatttcttaataaattctgttattgaatctacagaatttaacattatgttatttttggccctgaaggcataacttcaagccattctggatactgaatgtgttgctgacatacacattagcaaatcactcagaagcatatacactttattgcattatcagtaacatgaagaaatatttctatatcatgagaaagagcactttcttcttgatatgtgtgtaatcccttggtcttgggaagctaaggcacagcttacagagggattttgtataccccactcattacgtagcttaaatcaggctgggtaaacatgtaaaccaaatgcaaatcatcaatctacatatgtttaagaaataatatagacatactgctgaagcatgcctcccagggagttctggactttaaacagcatcttataaatcaccagcaagaacaatcaattaatattttggctgagggtctttaccagactcccaaataccactggagttaagcactgaaccaacacaggccagctgcaaataagattcattgctatggtttggatatttggcctcccctccaaagacaatatcatgttgaaatttcatccccaatgtcagaggtagggcccactgggaggtttgggtcatgggagtatatctctcatgaatggcttgctgccatcctcatgggagtgagttctcactcttagttccctcaagagctagttgttgaagagtgtagaacctcctcctccctcctcttgcctcctctctccccatgtgatctgcccacagtggttcacctttcccttccaccatgagtagaagcagccggaggccctcatcagaagcaggtattggtcctatgctttttgtacagtctgcagaaccatgaaccaagtaaacctattttctttatacattaccaagccttaagtattcttttataacaacacaagcaggctaagataaccccatctatggtcagtcaccaaggcctcttctctcatatgagttttgtaccttactctatttaataaagtttgttctcatggggatatgcattaacaattctgatacgtgcatactgaaatcgaaaattaattaaacaaatggcggatggtagaagccaggttgctcactgttggaatgcaagtttacagataagccaggggaggaggctagaatgatccacttggtaacagagcggagttggaggcatcagtatgaactcatgtctagcttaatacaggggcagaagattccatatagaaatatgtatagatatgtgatattcacaggttagtatacacatgaatatttccttgctctgtcatctgagaaggactaaaagaaacagcaccccagtagcaaaaagcatacctagcacccagaccttggtttctaataacactctccagtgaaaggtaccagggctccttggagaaatggccaattctatgcctctgacagaaatatgcaagaggagcctggagtattttgtagtgccagaaaataaggaggcactcaaaaacaatcaaaaaacaaatgcatattaatggagctacatcaaagaaacacaggagccaactgagagtgctcccaacggccaaagctggaacaatttgagcaacaaaataaagcagtgctggattatcattcaaagtataaaataaatacccctgagtcctcactattgcaaataaatgattgaataaattaataaatgggggaggagagacaagtcccttggactgataaatttcaaataatttatgcagatactctgcctcaagggggtgaggcataactcctgactcattaaatgtggagtaagcatagtgacttccttcctaagaggacagtatggaatgggggagaagagtaaccttagagtggaggaccctgacacatacgacctcagccaggtgatgaaggtcaacatcagtggtgatcaatcatgttgatcatatgtacttctgatgtgatgtgaggaaagcagcactttacttctgtggacttcctctcaaaaactcataaccccagtcaagtcaagagaaaaacattagacaaatttaataaataggcatttgggaaaatatctgagcggtacttctcaaaactatcaaggtcaccaaaaacaaggaaagtctaagaaactgtcacagctagaggagcccaaggagacacgatgatcatgtatcagtgctggttcattccttctaacaaatgtgccctactcgtgcaagatgttaacaaagggaacattggccatgggtatatgggaacaccctgtactatcttctcaatttttctgtaagtttgaaacagttctaaacaaaaaaaagtcttttaaaaatacaatcaaggccaggtgcagtgactcaggcctgtaatcccaacactgtgggaggaccacttgagcccaaggagttttaggccagcctgggcaatggggggagaccctgtctctacaaaaaattttaaaaattaatcaggtattgtggtgtatatctgtggtcccaactactcaggaggctgaggtgggaggattgctggggtccaggaggccaaggctgcagtgagccatgatcgtaccactgcactccagcctgggtaacagagcaagaccctgtctcaaaaacaaaaacaaagaatctataaataaatgaaaagattaatatccacaaaaggacaaatattgtatgattccatttatatgaggtagctcgaataggcaaattcttaaagacagtaaatagaatagaagttacaaggggctgggagggggaggaattagagcttattgtttaatgcactgcactccagcctgagccaaaaagtgagaccctatgtgaaaaaaataaataaatacataaaaatacaatcaacagaagaaaagaaagtatttacaatatataacagataacagattcctatatagactgtataaaaaacttccagaatcaatgaggaagagaaataacctgattttaaaaattggcaaaggatgtgaaaaggcaatacatggaagaaatacaagtgtccaaaaaacataagaaaaaatacttaatctcactaataattggagaaatgcacattccattaaaataccagtaagactgatttctcttctcactttaaaggtctggtgatatccaatgttagcaagggtgtgaagaaacaatgaaaatgtatccatacaatacttgtgtaattaagtataaattgacaagggtgaatttttaaggaaactaagagaaaaagaaaggcgtgatccctttgccccattgtaaaggaaactatgactcaaaagtaacgggtggctatctaaatgccaataagcacataagaaggtgcctaatctcactcatcatcagttaaatgcaaattaaaactatacccagatgctactatgtaccaggatgactgacaccaacattgatgaggatgtagcacaactacagctcccatgcactattggtgggattggcacagctcactttggaaaacaactgggcagtatctattcaaactaaacatgctcattttatggcccaccaattctacttctcagtaaatactcaacagacgtgagagcttatggctcccaaatgatacatgcaaaaatgttcatatccaccttattcacaatagctacaagtaactcaaatgtccatggatagaagagtagctaaatggtggcatagccatacaatggactactacacagcaaccaaaaagaagagactattaccacacacggcatgagtgaatctcatgggttgattgctaagcaaaaatgtcatgcaaaaaatgatatattgtacagctccatgtctatgaggtttaagggtaggcagagctaatctaaggtgatagaaactagaatagtggtttccttgggaaggaggtacaggcagatgatatggccttggaggaggcttgagagcccagtgggaagatgaaatattctatgtctgcatctggctggtggtcattcaggtatagacatgtgtcaaaacttagcaaccttctcacttgagatgtgtgcactttatatctgctctgtatcagttaacacatacgttaaaaagaggaaataggtgagtttttgaagatggaataattactacaaaatgagagtcattgattgtacctgctgcacgtgtggagaccagatttcaaaggggaacattaaaacaggaggatgataaacaaaatgtggtctatctatacaatggaatgttattcaggcataaagggaaatgaaaaatgggtaaatcttgaaagcattaagacaagtgaaaaaaaacagacacaaagaaccatatactggatgattccatttatataaaatgtccagaataagcaaatccatagagacagaaagtagcttagtggtttccaatctacttcccagagggaagagaggaattggagagggactgttaatagatatgggatttatttccagggtgatgaaaaaggtctggaatcagagagtgatgattgtacaactctgtgaatataccaaaaaccactgaattgcacactttatgagggtgaattttatagcatttgcattttattttattttattttattttattttattttattttattttattttattttattgagagaaggccccactctgtcacccagactggagtctgcaatcatgttttctacttattggtcaagacgccagtcccgctgactgctcagtccccaagttgttctatttaccacatccttttaggaagagaacatctagggcaccttctcctctcagtgaggcactgcaggttcccataagacctcagccacgcctggctaaggagagggcccagttgcccctgctgaaaagggctcactgcagctctgggagaggctccttctctgggcgtcttcctcagatgctgaacgatcaagtgggatctggagctgcccggagtcccctcccctgaccttcaccagtcaggagtctgggaggaacagctcattcaaatatgcacccaacgtggattctccctccacccactgacagaaatggctaatggagccccaaaatcctgcagagtttaattaccaacctgcaaagacaggctgtcagctccagtcctaggtaaagacctatgggaaagggtgttaggtcaacccaaagacagacaacaatgtccacagcaggtctgtcatcatagccgcgttttggaaacaaggtgaagtccatcaacagcaggctaaatgcataatttgtggcatagacactcaatggaacactccacaggaagaaaaggagtgaacagctgccccgtgcaatagcatggatgagcccacacatgatgccaaagaagccagacacaagggcatgcgctgtatgatttccatagggtgttgaatagcatctccccaaaactcacatccacctagaatctcagattgggactgtacttggaagtggggtctttgcagatgtaactaaattaagatgaggccaccctgaattaggatgtgtcctgaatctaatgaatggggttcttataacaagaggagaggacacagagaatgaggccatgtgataatggagacagatattggagaatgatttcactacaagtcaaggtacacccaggactgccaggagccaccaggagctaggaagaggcaggaaaggatcctcccctagacccttcaggggaagcacagccctgctgaccccttgatttcagacttccaaactccagaattctgaaagcatcagtttcggttgttttaagccacatgctttgtggttatgtgttacagtggccccagaaaaccaaaatttcattgaatgaaattcaagagaaggcaaagctaatccatagagatggaagctcaaatactggtagaggatggtcctcatctcggaagagaaacaaggaagacttcaagggtgttcaaaatgcatcctgttccaggtggtagctacctagtcatagacacatggaaaatttcactgaattatacagttaaaatgtgtgcgcttccttgcatggaagtgatacttcaataaaaatttaaaaagcaagaagcaggctgttccactggagctacaaactactttgctcttttttctttctttccttgtcttttgtagaaatggggtctcactatgttgcccagggtggtctcaaactcctgggttcaagggactcgcccgcctcagcctcccagtcagtgctgggattataggcatgagccactgtccccagccacgctttgttcattcttgaaggaaatctctatgatgttcaacttgttcttgtcactcaaaatgaccatcccctgccctctataactaccagtagaaacaagatctctagcagcacttttccaagattgggttttccccagaagcacagcctgagacaaggatttgaatgcaagtgctttgcatgggagcacatggggaagggagaagggagatgggaagtgtggggaggagcactgtgccacccaccctggggacccactgagacaccacaggacacacctcagaatctgcccaccaagtagcaagggagctggagcctttattgaccaacagccctgcctcacagggtaagggtggctccaagcacaccagagaaagaactcaggcagagagaggcaggagcctctgcactggcctccagcctgggctgaggccatatgggccgggaccttcgtctctaggtacaggccagggaaaggcaagacctggctggccttgagctctgccctcttgtttgggggatcgaagaaccagggatgcagtatactgagaatttcaagttcacgaactttcctcccctttcttagcacacaaggtccctctccatatggacacagggaaacctcaccccccaaggcacaactgccaacacctttccatgagagcaaagtgacttcagcaaaaacatcaggtgaggatgaagattgtccagaggaagccggccccaggctctccagggctccattgttctctgcatgtctcagagctgtccagggcatggtgcgggccagctgaaggaagctttggctccgggttttgtcctctcttcctgctggtgggaagaatgggagctggcaggaaaggaaactgactgaacaaagagaaggaggaaaatcagaggacccctggagagatgttacagctggcctgagagctcattgtgttggagtgggggaagaaagccattcccgggaatatgcctaaaaaatgcaagagactcccatgcccgtcaccatcaaaccaggcactagcccgagaatttgacttcccagatctcaaaggggacttaaaactttgggtccaaaagacaagattttttttccatttgctttaaaactcttgttgaaaagcagatgttaagtctggggaatcatgtgttaaccaagaaagaggtttcttaagtgcatcagccaccatccatagctgggagcaaagctaagcttgcaagttggggccaggaatatgtagacaaggactccgaaaggtttatgccatgagcctacacacgagagggactcaggggccttgagcatccaggtatccaagctctggtgccacagtactgggggccattgctcagaactgaaagccttgcaacggcaaactgcaacaccattcagatacctgaggcactcctctggggcatggccatgacagagactgtgccaggccccagaacactttgcttctcttaccagctgtgtgtgactttgagaaagtcacttatcctcgtggtctctctgtttcctgatctgtaaggtagagatcttgacctgcttcatggagttggtatgagaatgccaagtgtttaatgcagtgcttagaacatagtgagtgctccacaatatgagttactgcactgatgcagtatgtgtgctcacagtcaaatgccacatgcccaacccaccatctaccttcctttctctccattagatttccagggatggctttttgggggaaaggaattggtaactgacatagttttccatcacgctccaagccagaaatcttgagatcctatgatacccactcaaaaatgcattattaatccagttctcagcaacttctactcactaccatcatctttcatctggatgtctacgacagcctcctaactgatgttcctgcttccattcacaggaacagaaataatctattaaaagtctaaaatctgactcaccctctctccttaaaacttttcaaaaacttcccattgtacctaaatagaatccaaactcttgcactggcttcaaaagccctgtgcctttctacaaggtcactagacccctatttccctgacaaactctgtttcagccatgcagtttctctgtcagttcctgaaacacaacaagttccttctagcctcaggacctttgtctgtttccactcccttccctgcattacgtgacaagctccttctcaaacttcagatctcagcctaaatgtcagctcctcaccaggcttctccaggccattctctctaaagtaggctccttctgctactgcatcattatctgtttccagttcgccattctcttcttgtatcagtcagctatcgctgtgtaacaagccacctcaaaactccatggttaaaaacaacaggcattcattatcactcacaactgcaggttggctggggttcagctgggcacctgtgctcctcatggaagggctgtgggtcaggggaggccgttctgttccacatgtctctcaacctcctgctgggatgagactgggcccgtttttctcatggtaataacagaggaacaatagagcaagcagaaagatgtgaactctctcaaggcctaggctctctcaaggcctaggctcaaaacagacacaacatcctttctaccacattttatgggccaaagcatatccttgtgatcaagcccaaactcaaagagtggggaaatgccctccatccatagtgaggccaggcaggcctgtgtccacagggaggatggataaaaaaatgtgggcagtcattcaactgccacgatttgtgattcatgatgaatatttttgtttctccactctccactagaatgagcaagcaggaacctggtatccacagcacctagaacagtacctgacatgtgacagatgctcaacaagtcccttattatacttttgttttgttgtgttttttttagagacagagtctcactcttttactcaggctggagtgcactgccgcaaacacggcttactgaaaccttgaacttctgggctcaagcaatcctcctacctccacctctcaaactgctggcattacaggcatgagccaacatggttggggccctttattatacattgaatgaactcctagactggaagcccatgtgttacctctagatgacaattgtcctataaaaccatcatgacagcaattggcttttcagatatggctttttaatttttttattattattattttttagctctgttgcccaagctggagtgcagtggtgtgatctcggctcactgcaacatctgcctcctgagctcaagtgattcccctgcctcagcctcccaagtagctgggattacaggcgcccaccaccacacacagctgatttttgtatttttagtagagatggggtttcaccatgttggccaggctggtctcaaatttctgaacttaggtgatccgcccacttcggcctcccaaagcactgggattacaggcatgaaccactgcacctggactcagatatggcttttgttgaatatggactcagatatagacaaacttttgcttaacgatggagtcttttattaatcaatgggcaacttcacacctacttgttagcaattgcttggacatggtcctaaggactacaacagccacttcccaatccagggcagaagaaaaagcccatgaacatggccctgactgggacaaggaccatgtgaggcattctctactatggacacaacagaactgatgaaattcagagcaggacccagctccaaattccccttgtccaaaacctgcttattctttaagggggtgggggctgcagaaggtaaccagtggacaaggtgcaaaggttgttggggtccctcttcatacctccaagaagaatggggcagacaggaaagcagctgggagctgcctttggagtgaagagtcctggcttggccaatgagcaccagtgtaactttggacaaggctgttgacctctgaggtccttaccaacccaaagggcagtagagtaaatcaaaggagaggagcaaaaggaagcccacacctgtgctgaggctcgctggtcctcatccaggttcagaagcagtgttctccaaacttttcaggttggacacccactcagtgagcattctcaatatgtgctgatgcttatgtataacattacatacatgtacttttaaatatcattcattttaatggttcatcttctcaccctcttgcacttgtgtaacaggactatcttcatctttttttttttttttttttttttttgcactcacgcttaagcctcttaggatttttgtgacagttttagtctaagtaaaactgaaaaaaatactgaaaaaaataatcatttctgccacttgcatggtccccaccaaggcacttctctaaattattttagatgcatttagatcaggggcaatggctcacacctgaaatcccagcactttgggacactgaggcaggaggatcacctgatcccaggagttcaaggctgagcctaggagttcaaggctgagcccaggagttcaaggctgagcctaggagtccaaggctgcagtaaactatgatcactccactgcactccatcttgagtgacagagagagaccatgtctctcaaaataaaaataaaaataaaaatacacgcattttttaaattttcatttttccataagttattggggtattggggtacaggtggtgtttggttacacgaggaagtttttttttttgtttttttttttttgagacggagtctcactgtgtcacccaggctggagtgcagtggtgcgatctcggctcactgcaacctccgcctcccgggttcatgccattctcctgcctcagcctcctgagtagctgggactacaggtgcctgccaccacgcccagctaatttttgtatctttagtagagatggggtttcaccatgttggtcaggttggtctcgaaccctgacctcatgatccaccctccttgatttcccaaagtgctgggattacaggtgtgagccaccacacccggccattacatgattaagttttttagtggtgatttgtgagtggtgcaaccatcacgtgagcagtatacactgcaccatatttgtagccttttatccctcacccacctcccactcttccacccaagtcctcaaagtccattatattattcttttgccttttcgtcctcacagcttagctcccacatatcaatgagaacatacgatgtttgattttccattcctgagttacatcacttagaataatagtctccaatctcatccaggtcactgcaaatgctgttaattcattccttcttatggctgtgtagtattccatcatatatatgtactacggtttctttatccactcattgattaataggcatttgggttggttccacgattttgcaattgtgaattgtgctgctttaaaaatacgtgtacaagtatctgtttcgaagaatgacttcttttcctctgggtagatacccagtagtgggattgctggatcaaatggtagttctacttttagctctttaaggaatctccacactgttttccatagtggctgtactagtttacattcccaccagcagtgtagaagtgtttcctgatcgctgcattcacaccaacactactgtttttttgatttttttattatggccattcttgcaggagtaaggtggtattgctctgtggtttttatttgcatttccctgatcattagtgatattgagcatttttttacatgtttgctggccagttgtatatcttcttttgagaattgtctattcatgtccttggccatgtttttttcttactgatttgtttgagttcattgtagattctggatattagtcctttgtcagatgtatagattgttttttcccactctgtgggttgtctgtttactctgctgactgttccttttgctgtgcaaacgctctttagtttagttaggtcccagctatttatctctgtttttattgcatttgcttttgggttcttggtcatgaaatacttgcctaagccagtgtctagaagggtttttccaatgttatcttctagaatttttatagtttcagatcttaggtttaagtccttaatccatcttgagttgatttttgtataaagtgagagatagggatccagtttcattctcctacaaatggcttgccaattatcccaacaccatttgttgaaaagggtgtcctttccccactgcatgtttttgtttgctttgtcgacaaccagttggtgtaagtatttgggtttatttctgggttctttattctattctattggtctatgtgcctatttttatgccagtaccacgctgttttggtgactatggccttagagtatagtttgaaatcaggtagtgtgatgcctccagatttgttctttttgcttagtcttactttggctatgtgtgctcttttttggttccatatgaattttagaattgttttttctaattctgtgaagaatgatggtgctatttgatgccgattgagttgaatttgtagattacttctggtagtatggtcattttcacaatattgattctacccatctatgagcatggaatgtgtttccatttgtttgtgtcatctatgatttctctcagcagtgttttgtagttttccttgcagaggtcttttgagtcctatgttaggtatattcctaagtattttttttttttgcagctattgtaaaaggggtcaagttcttgatttgattatctgcttggtccctgttgatgtatagaagggctactgatttgtatacattaatcttgtatctggaaacgttgctaaattattttatcagttctaagagctttctagaggagtccttagggttttcaagataaacaatcatataattggcaaatagtgacagtttgacttcctctttaccagtctggatgccctttctttcttttctttctttctttctttctttctttctttctttctttctttctttctttctttctttctttctttttttcctctgagatggagttttcactcttgttgcccaggctggagtgcagtgacataatcttggctcactgcaacctccacctcctgggttcaagtgattctcctgcctcaggcccccaagtagctgcgattacaggggcctgccaccatgcccagctaatttttctatttttagtagagatggggtttcgctatgttggccaggctggtctcaaacttctgacctcaggtgaattgcccacctcagcctcccaaagtgttgggattacaggcgtgagacaccacgcccggcctggatgccctttgtttctttctcttgtccgattgctctggctaggatttccagtactcttgaagaggagtggcgagagtgggcatccttgtcttgttccagttctcaaagggaatgctttcaacttctccccattcagtattatgttggttgtgggtttgtcatagatggctttattacattaaggtatgtcccttgtatgccaattttcctgagagttttaatcataaagggatgctggattttgtagaatgctttgtctgcatctatcgagatgatcatgtgatttttgttcttaattctgtttatgtggttatcacatgtattgacttgcatatgttaaaccatttctgcatccctggtatgaaacccacttgattagggtggattatctttttgatatgttgttggattcgactagctagtactttgttaaggattttagcatctatgttcatcaaggatatcggtctgtagttttcttttttggttatgtcctttcctggttttggtattgggtgatgctggcctcatagaatgaattagggagggttccttctttctctatcttgtggaatcctttgaatgtctggtagaattctgccataaatctgtctggtcctggacttttctgttgtcggtaatttttaaattaacatttcaatctcactgcgtgttattcgtctattcagggtatctaactcttcctgatttaagctaggagggttgtattcttccaggaatttatccatcttttctaggttttctagtttatgtgcataaaggtgttcatagtaggcttgaatgttcttttgtatttcagtggtgtcagttgtaacatctcctgttttgtttcttagtgaacttgtttggattttctctcttcttttcttggttaatcttgttaatggtctatcagttttatttatcttttcaaagaaccagctttttgtttcatttatcttttgtattttttgtttgtttgtttcaatttcatttagttctgctctgatcttggttattttctttcttctgctgggtgtgggtttggtttgttcttgtctctctagttccttgaggtgtgaccttagattatctgtgctctttcagactttttgatttaggcatttaggactatgaatgttcctcttagtaccatctttgctgtatcccagaggttttgataggttgtgtcgttagtcattcagtttgatgaatttttaaatttccatcttgattttgcttttgatccaatgctcactcaggagcaggttatttaatttccatgtatttgcatggttttgaaggttccttttggagttgatttccagttttattccactgtggtctgacagagtgcttgatataatttcaattttcttaaatgtattgaggctcattttatggcctatcatatggtctatcttggagaaagttccatgcactgttgaatagaatgtgtattctgtgattgttggatgaaatgttctgtatatatctgttaagtccatttgttccaaggtatagtttaaatccattgtttatttgttgactttctgtcttgacctgtctagtgctgtcagtggagtattgaagtccctcactgctattgtgttgctgtctatctcatttcttaggtctattagtaattgttttataaatttgggacctccagtgttaggtgcatatatgtttaggactgtgatattttcctgttgaacaaggccttttactattatatactgttcctctttgtctcttttaatcactgtttctttaaagtttgttttgtctgacataagaatagctacccctgcttgcttttggtgtccatttgcaggaaatgtctttttccacccctttactttaagtttatgtaagtccttacgtgttaggtaagtctcctgaaagcagcagatggttggtgatttcttttttttttttttttttttttttgagacagagtcacactctgttgcccaggctggagtgcagtggtgcaatctcggctcactgcaacctccacctcctgggttcaagcagttcttgtgtctcagcctcccaagaagctgggactacaggtgcatgccaccatgcctggctaatttttttttttttttgtatttttagtagaaatagggttacatcatattggtcagactggtcttgaactcctaacctcaggtgatccaccctcctcggcctcccaaagtgctgtgattacaggcgtgggccaccgcgcccagccggttggtgagctcttatccattctgcggttctgtatcttttaagtggagcatttaggccgtttacattaaatgttagtattgaaatgtgagggaccattgctttcattgtgctctttgttgcctgtgtactttggtttttgtttttgctttttaacttgtatttttgttttataggtcctatgtgatttatgctttaaacaggttctgttttgatgtgtttccagaatttttttcaagatttagagctccttttagcagttcttgtagtggtggtttggtaatggcgaattctctcagcatttgtttgtctgaaaacaactgtatctttccttcatatatgatgcttagtttcgctggatacaaaattcttggctgataattgttttgtttgaggaggctgaagatagggccccaatccctactagcttgtagggtttctgctgagaaatctgctgttaatctgataggttttcctttataagttacctggtgcttctgtctcacagctcttaagattctttccttcctcttgactttggataacctgatgacaatgtgcctaggcaaagatctttttgcgatgaatttcccaggtgttctttgcgcttcttgtattgggatatctaggtccctcacaaggctggggaattgttcctcgattattcccccaaatatgttttccaggcttttagaattctcttcttaggtacaccgattattcttaggtttgattgtttaacataatcccagacttcttggaggctttgttcatattttcttgttcttttttctttgtctttgttagattggattaattcaaagacttgtccttgagctctgaatttctttcttctatttgttcaattctattgttgagaatttacagagcatttcacatttctaaaagtgtgtccaaagtttgctaaatttttattgtttttttcttttagctatctatttccatgaatatgtctcccttcacttcttgtatcattttttggatttccttgcattgggtctcgcctttctctggtccctccctgattagcttgataactaacctcctgaattattttgcaggtaaatcaggggtttcttcttggtttggatctattgctggtgaactagtgtgattttcgggaggtgttaaagagacttgttttgtcacattaccagagttggttttctggttccgtctcgtttgggtaggctctgtcatagggaaggtctagggctgaagactgttgttccgattctttcatcccactggctgtttctttaatgtagttctctatcccttttcctatggatgtggcttcctgtgagccgaactgcagtgatttttgtctcttttctgggcctagccacccagcgagtctacccagctctgggctggcactgggggttgtctgcacagagtcctgtgatgtgaactgtctatgggtctctcagccgtggataccagcacctgttccggtggaggtggcggagggtgcactggaagtcgtgagggtccttagctttggtggcttaatgctctatgtttgtgctggttggcctcctgccaggaggtggcgctttccagaaagcatcagctgtagtagcgtggagaggtaccggtgttgggtgagtccctagaactcccaagattatatgccctttgtcttccacccagggtagatagggaaggaccatctggtgggggtggggctaggcgtgtctgagctcagactctcctagggcgggtcttgctgtggctgctgtgggggatggaggtgagattcccaggtcactggagttgtgtacctaggaggattatggctgcctctgctgaatcctgcaggttgtcagggaagtgggggaaagccagcagtcacaggcctcacccagctcccacgcaaactaaagggcccgtctcactcccactgtgcccccaccaacagcccagtctgttttcaggctgcaggtgacaggcttgaaaacttgcccgaggctatccgcctcccagctgggagagaaaagggcttcagttcttcccctgcttgtgaagtctgcccgctggattcgcaccctccccaaagttctggccaggaggtttcttgccccattcaaattgttacaaaattcagctggggaattccttctccctgtggagttttatcccctgctcctctagccacccttctgatggatccctgttatgccaggcaggaatgggatgcttggggacccagcgagctcccagggcctttctgctacttcctgtacccctgtctttcggtcggctctctaacttgactcagctccaggtaaagtcagaaacttcccccacaaacagaacttcagcttctccactgggggtgtgtgttcacttcctcagttggggcactgacagtatttggggtgtctccccggccctgcaggagcgctctgcttccttcagaggatctgtgcgtcctcttgggagtgctggtttgttcttgtagtggatctggagctaaaattcacagtgtaagcccccacatgctgctctgtccagagctgcaatctagtcctgcctccagtccgccatgatcccttctaatctgcacttaaatattttaaagatgtttaatccctgaagcagtcccatgagatggatactaatattacgtccattaagcagatgaagaaatggaggcaggcagacagtatccaaggtctcactgcaggggagacaggatttgaacctggaagtctggttcagaaggcatcaaaacacaccaggtgtgtcaaaagctttaggtcccaaactactgagcccagggaaggtgtctcgtgatgcggggctgacacacaaaccaagtaaagacaccaagaccaaatgtcactatttttgagatttaaaaatgttaattatatcaagatagaagttatagtctttttcctcctcactttggcgccactgctaggaagagcgggggagcgggcgttgcaccgcgtccgggccacgagggggcgcgcggacaccacccaccccgccgggcaaggccaccctcccagacgcctggcagccggaagaaccgcacgaacgccttccgcagagctggtcctcgggagccctccagcccacccaggtctttcctagccccaaatccttcccagggacgtcctcgggacaggcaaacctgctgtaacattcagctgatataggaggtggaaccctcctacagtcacagagacagaaagtgccccgagggcgtcgctctggtcctggcggagatggtctctgatggtctgccttgatgacttatggggacacctgtcgggggttctgctagaaagaaagatgcagagcgcccctcacgcacgcaaactctagctctcacacccagacgtgctccaaacattccaaaggggccaaaaacgacgtctggcttttccgcggcgcctcctggccctggcggtgactccgaggtggcgctttcagggtgggcgcgagggagaggaaagcctctggcatcctcacccccggggccagagggacagcgggtgccctccgccccgagtcacctgcgtcttgaattctgtccctccaaggagagggcaatgcctgagcccacggaagttgggtcaggggcagcattggaagtcagagcctgcaatgctcacgtaaatgcaaaagatggttccttcagtgccagtaagaaggctgtcttgaacatgaggaatacagcagcaagcaagacagagaggtgcctgctttctggggagacaacaaacagataaataagcacaacactgtcctgccaagctaagtgacatcaatgaaacaaggcaaggtaataagaagaggctgggaaaaggcttagctgtgattttgctttctgcagtttgagttgcctatgttcaacagaggttcaaaaatattaaatggaacatttcagaaataaacaatcctaagtttaaattgcatgccattctgagcagcgtgatgatatcttgcgccatctctcccagtcctgccccggagatgaatcatccctttgtccagcgtgtccacacggtacatgctccaggcccgttagttacttagtagccatctcagtttttcggatgacgtcgaggtatggcagggtttgtgttcaaagtcacccttgttttacttaacaatagcttcaaagcacaagcatagtgatgctggcaatttggatatgccaaagagaagctacaaggtgctttaaggggaaaagtgaaagttgtggacttaatcagcaaccttagctgaggttgctaagatctgtgataacaaggaagctttgattcatgaaattctggagatggaaaaaagaaatatatgctagttttgctgtcacacctcggactgcaaagtaatggccatggtgcatgataagagcttagttaagatggaaaaggcattaactctgtggataaaaacatgaagagacatgtgttctgattgatggcaataaggatcagtattatccgtggtcccaggcatgcactggaggtgttggaatgtatcccccatggataaggggagactatcgtatccttgattggggcattgctacatggatgtatacgtttggccaaactctccaaactgaacacttaagataggtgtgtttcattgtacgcacatttttcaacaaaaatcttttctatataagaagaagaatagctgggaaaggaagacattaactagggtgatcaggatggtctctttgcaaaggggacatttgagctgagacctgaaaagtgagaatgaactagaaggagttagccatgccaggatcttgtctcttcctgccaagatgctgcaggcagaggaaacgctgcattggaagggcccccggtgagaatgcaatgagggcatggggagaccgttgtgagcaaagggagcaggagggcaggtacgcaagaggaggttgaggctgtagccaggggctgctgatgaggtacttgaagtctgtctaggtctaagttcattctaagtgcaattggaagtcactgggggaccacatggaggaaagatacaggtccccaacccgatcagccttgggaccacctccaggcagagtctaaagaaggatagccaggcacggtggatcacgcctataatcccagcattttgggaggctgaggcaggcagattgcttgagctcaggaattcgagaccagcctgggcaacatggtgaagccccatatctacaaaaaatacaaaaattagctgggcatagatatgcctgtagtcccaactactcaggtggctgaggcaggaggatagcctgagcccaggaggttaagtctgcagtgaaccgacattctgccactccactccagcctatatgacagagcaagaccctgtctcaaaaaggagaaaaaataaataaataaataaataaataaataaataaataaaatatagcctaaattccaaataccaaataccagagaccaaaattattggccttgttaagggaacatctcaatgtttgaaatgtcattgcatttttctttgtttgtagagacggggtctcgctatgttgcccaagctggcctcgaattcccaggctcaagcaatactcccaccccagcctcttgagtagctgatactacaggcaggctccaccgctcccagcttactagactgtgtaacgggtcattttctgtactagcttgttgtggttacaaaccagccaaatggcttacgtttgtatttattttctattccatacgtctccgcccaatgtttttcctctcaaaatcccttcctttaaaaaataaatctgttgcagatgtggggaaaaaaaaaaaaagagccagaagaaaagggacaaagccgagtgctatcagcaggaagggcattgcccagccactggcctgaattctgtgaatacccccacctcggggtccacaggatgggcctaaggaggtctggcattccagggaacagacacctggttggtccacacagggaaaactaggggtttctgtaatgtcagcaggtggctgaaaactccagagtgcctgcaaaatgctttccctcatactttctatctggcaggtaccttggagttgacagccatgtgctcagaggagaatgaagcaaaccaaccaaaagccaaccccaaacacccaatggcctgagctcctcagagcaagaaaagtcaagttgaatatctcagatggggccgtcagagaatggagatgacctcatccacagtgggacaagttggagcaaatcacttggatggaaagcaaggaaatagaggggcaatttcagcatgtccctcaggcttccacagaggaaggtttggccttccaaattcccaaagggcttctctcctgggacgcactgtctctgcagaggtgaaaacactctttcttgtctctctctgcctgggatcttaattgtttccagtgtcaaatgaaggactgaggaaagaaccaaagcttccccagttcactaactgctctgggatttacccagaattttgacagcattgagatttggagttggcttagaagaagagaagaagggaagtggaggtgctgagagctggtctggagttagccctgcttcagccacattcacttccctttgtctctcatgaccgggcaatgcagtaggcttcccatgttgtgtatcttcttgtctattaaacagggttatccagctgattgagggcatttcttttttttttttttttttccaacctcactttttccaaactagtttagatcttccagagtgtggtaggctgaaaaatgtcccccaaaaatatcaggtcctaatccctgaaacctatgaatattgtcttatatgggaaaagggtctttgcaaattgggttaagtcaaggatcttgagagagggaggttattttggattattaatatttaggtggaccttaaataaattccaagaatgtcatctggagtggaggaaaaaggtatttctttttaggatgtccaggaaattaaaagatgatgaaatgccaaaacaagttcacaaaagtgcagaatagtttaaatattgacatctaatatccactcaccatgtctgtgcacatatgcctctaatggccatcaactgtgtcccttggccttcaggcttttttggtcaccagagcctgctctgcttgtgtacactgcagatgtctcagggaattaatgcctctctggcccccaagagcagccttcaaccaatgcctaacggaagttggtatataaataccccaactccctcacccctaggtggagaaactctggggtaccttctacactggctcctagaggtctccactgggactgaactccagttgcccaccatcagaacttatttaatgacacacccaaataagcttccttcccctcctattagacttccccactccacttccactgttttctagaatcaagtcccaaataaactactagccctcaaatcctatttttgtttgtttgttgtgttttttgttttttgaaatggagtcttgctctcttgcccaggctggagtgcaatggcaccatctcagctcactgcaacctccgcctcccaggttcaagcgattctcctgcctcagcctcctgagtagctgggactacaggcgcgcaccaccactcccggctaatctttatatttttagtagagatggtgtttcatcatattggccaggctggtgtcaaactcctgaccttgtgatccgcccgcctcagcctcccaaagttttgggattacaggcgtgagccaccgcgcctggcccaattcctggccttaatgtctgcttctgaaggagcccaagctaagaccctattgcatctcatttagtgagaatgtcaaaagcatgtattaaaggcccttcatgaatttgatcctgagtcaaatggccctcctggccctctcatatcaggaggcaactggggcagagttggaaagctgacccaagccatggtgtagtttcagtggcttgaaggtgatggaatgcatagccatgtgtgcgaaaatgaccacatgggcctgtgggacaattgtgcagccaaatgcctgccagaccttgaggcaggtgtgctcccctgctgggacttcaggagagaggccctgctgcctccgcaccttccaggccccggggacatccagggtgttctgctgaggtggaagggttgtgccctatcagccaagggcatgcacctcacctgcagtggctggaatgatggagatgcaggagtaatgaactttatctcagggagggggcaaacctaggttccacaactagtatctgccccaaatgtcaagccccaagccaaacccctgtgactaaagaaaccttcaacaaatcttgtaaggccagcagctcccctccatttgtttttgggtggggaaacacatgtgttttcttctgtaatcttctaaacatatagacttctaaagtcttaataattttttttttttttttttgcgacagagtctcactctgttgcccaggctggagtgcagtggcacggtcttggctcactgcaacctctgcctcctgggttcaagcgattcccctgcctcagcctcctgagtagctgggactacaggcatgtgccaccgtgcctggctaatttttgtatttttagtaaagacggggttttgctgtgttggccaggctggtcgcaaactcctaacctcaagggatccgcctgcctcagcctcccaaactgctgggattacaggcatgagccaccgcgcctggcctaaagtcttaataatctcaaactatagagcaaaaggatataggcatggcctgggggaccagtttaactttagttagactgagttaactagagtagagataaccaagtggtggcctacaagccaatacaagtgacaatcttttcctgtctaccacagtttttaaaaaccagagattctgataataatctgggtttctgggtttctggattttcttgaaaaatcaggaattcctgaatcccatggaactttcacttctacagggcagcattgcctgagaagtcagaatttgcaatcctgctagtagcagaaagtcagtccaaaagaggaaggtgtggtttgcaggaaagaggaaataaagatggagagagtgtgtgtgtgtgctacatgaaccccaggagatgacgaagacagacccctgctgacaaccagcaccaggctgagagtcaccccggagacaggtcctcaaggagatacaatggatagaatgctgggggagactgaacatatgaaaggtttagagaatttgggacaaatatgggctgaattcatgaaaaatacattgaaaacctaagcaaacagaaggacaatttttaacttcaaggaaaacaaaaagttgtgctaaaaatggaaaaataagccaaatacagtatacattcagctttagagagcatgtttatacaattatacaacataaaggcagatgtgcgctaaccaaaaattatgattggcaggacggagacccaagaattggggagggaggtagagaaagataaggccccagatgagcaaatcaggaagagaaacaccaacatgctacttacagataagatggcaagtaccaaagaatcagctagaagaattgaaggccgtgggaaggaaggggaggtagagcatggtaggagcaaaagagagctggttttgtttgactttcttaaccatgtgcatgtctatcattgaagaaaagacaaactgtgttttgaaaaaagttaattgatcacaagtaaagccgccacccccagcccccatccttgcctcacgataacccttaacaattatatccttccaacggtttatatatatatatataaagaccgttggggtttagagtcatttaaagcaaatctgaagttttaagggtccttaaggaggtataaggcttaagatctggccgggtgcagtggtttacgcctgtaatcccagcactttgggaggccaaggtgggtggatcacctgaggtcaggagttcaagaccagcctggccaacatggtgaaaccccatctgtactaaaaacacaaaaaattagccaagcatggtggcagacaactgtaatcccagctactcaggaggctgaggcaggagaatcatttgaacctgggaggcagacattgcagtaagccgagatcacagcattgtactccagcctgggcaataagagcgaaactccatcttaaaaaaaaaaaaaaaaaaaaaaggcttaagatctcttagagtctattgagatctatgtatctattaatatatgtaaggattttatatatatacaaagatcaacttttgtgtgtgtatgatacataaatagtatcatcatgtatgtatctttcaccaactattttcacttaacattacgtcttggcatctactttcagctagtagaattggtggggtgacaggtctgtaggctttaatatccttcctctacaaattctgaatgaagaaattattacacagacccatctttattaccaggacttgaatctcatttatatagtccattgaaactaaaatgttatctttcaatatgtccccccaaaaaagacagtattctggatcttgaattttctgggagatgcatttttggagcatccttcttgaggggataaagcagtttaagtcattgtccctgagcataattcatttataatatcccacatgaattcttgtcctttaagtagctactcctgggactttgcccccctctttttcaacatgcttaatgtcacactggcctgaagagcaactttactgctgcaggggtaacttatatttcatctcataaagcaccaaatctgcattattttttacctcaattccggatgaattttggtgattaaaatgagaaaaacatggctcgtggtcctcaagtggatttttggatcccggttcaaaagtggaataaatctattttagaaatgtgagttcatattactttataataacatcctcaggtgatgggcatgcacgtgggcccagggtagggagtgccgtggtgaagagtctgatgatgtccatcaggagtttcagagttagcctcacagttcagtatctttttttttttttttgagatggagtcttgctctgtcgcccaggctggagtgcagtggcacaatctcagctcactgcaagctccgcctcccgggttcacgccattctcctgcctcagcctcccaagtagctgggactacaggcacccaccaccatgcccggctaattttttgtatttttagtagagacggggtttcactgtgttagtcaggatggtcttgatctcctgaccttgtgatccgcccacttcagcctcccaaagtgctaggattacaggcatgagccaccgcgcccagccacagttgagtatcttaataatgttttatcattatttagggtttagggtttaagattggagttattagagtttagagcccttgggatcatagtcaaagttacatttgggaacaagaaagtctcagcgtagtctctgtcactcttcttgtatcattgggattattagggtgaaggtatctgatcattaagaagagagatgtagggttcggattctggtcacgatgtatgtggatctgctccaacttcttcacagagtttagagctcaggatcatttgtttgtggtaattaggcctttagggttgtcattgtcaaggggttcagggtcaaacatccattaatttatcatcatttggaatttggggtcttctgttgcaacaccaacaggatccctaaatcaaggttaaagtccaagtatacaaacagagctctggtctttgggtaacagatgagtcattgaggtatggaataatgagggtcaggacaggtcactgacgaggtgtctgctccattgcctgttagggtttaggattgttgagtccttaatgtccagggcgttggagttagcattaatgttgttgaggctgagaaggttgggttcattagacttgggttcctttgcaactatttaaggccactttgggtttaggataattttggatcaattagaatagtttagaataatttgggtattttaggtgcaattatgatttcttggatcttttagagtcttttggactgttggggtgtagagtcatttccagcaagtttaaatttttaagggcccttagggaggtataaggcttaagatctcttagagtctatcgagatacttagggtcatttagagttgtttgggttagtttagggtcatgtgagataatctggggcttaaggttttaagcatcatttaagaaactttagcatgtttagagttgtttaggatttaggattgtctgggatctctgagggtgttttagaatttagggtagttttaattgacttaggatcctttgggtttatatagcttctagctttgctattccaagtgtggcctgtggatcagcagcatccacatcccctgggagttggtaggaaggcagtgtctcaaaccgcaccctaggtctgctaaatctgagtcaatgttctaacaagatcctctccagaatcacaaaacttgcatattcaagttctgtggtagtttacaggcatctgaggccacttctaggtattaggtctctaaggttgttagatacattaccatagggtcatttaaatgattggattctttagtgtgcttagactctaaagaatatcctgaaattattcattcaggatattttatgcatttagagttaggattgtttagggttcaaatgtcttgaaagtcttacagagatttttaaggtttaggttctattttgattgcttagagctttttaggggtggtttatgtcacttggcaccatttatagtcatggaagattatttagcatttaaagttgttttgagtaatttatacctcttcagaatctctaagagcgtctgaagtcttataccactttgggtagtttaggatcacaaaggatttaggaccatttgaggtgatttcgatagcatgggatcatgtaagttcattttaagaaggattacacttgttagtgagtttgggtcaggacttagaggctgttagcattggcacacttggtgtttgaggtcttcatgtttatggtacatttggatatttattcgttcactacacaaatattatcaaggtgttgtaaatcaaagaaaatgaccgagatgggtctcaatcattttaagaggtttatttgtcaaggttaaggacacaaccaggaaaagaacacagaagctcaggaaaaatctgtggtcctttgctttttccaaagggcatctggagacctcaatatttaaaggggaaaaaagcaactattgcgggaaaaaggaaggaactttacaaaagggtgggcaatgagaaaggcaagcagttgcattcttttgagtcttcttctatcagcgttcactgaatacacattatacatgcaagaaaagggtagaggaatagtcacttatgcattcgtctgatgctcagtgaatcagcatttttacataaggtaaaataaacttagggcagaggaagcagtcaggtggacagagagatgacttttacttctgtcctttgtcctatccgtgtgaaggtcagggtgaaattcaatagaactcttttaaggtaaagatcttgggacccacgaggaatttccttgtgggcacattgtgagggaagtatgtagctctttttatctttgcagctatctttttctgaacaaaatgggaagcaggtttgcatgacccatttcctaacttgacttttccctttgccttagtgagttgggggtcctgaggtttattttcctttcacagtgtctaccaagaatcaggtgctgctctaggtggttgggatgccttcacagagcttaggttctagtggaggagatacataagtcaacgaatacattcagactgaaaaaaagcacttagaagagtgtggaagcagaggatagctggcaggagagcagctgatttgggtgttcggggaaggccttgctaggaaggaagagttgagctgagacctgaatcaaaaaggaggcaagcatgtgatgagcttgggtgaagagtatcccaaaaagaccaagtggcaagtgcaagtcccagaagcaggacaggtctggacatgcttgaagagcagcaaggccagtgtagctgatcccaagaggaggcctgaggaagaccatgtaggtctgaaactgacccagttgtcccatagagctgatgtttatggtttctttgaataaacagagaaattgatcctcccagtcttaaaacctgagaaaatgacacttgtcttatctgagttcctttctcaggaaaccagctatcaggccttctagatagcatcaaggatctgacactcaccagatcattgtatctagacaatgagaggcaaaacccccttacccatcatgattgtctaagcaaccacctgcttcccgttaatcaactcttcttgcttaccccttgctaattcctgttttcccacacatggttacatttatttcctgctatataaactcctaattttagttgctcagggagatggatttgagactgatcttccgtcttcttagctgcagcacctgatgaaagccttcttccttggcaaggctcattgtctcagtgattggttttctgggaggcgagcagtaggacatagactgaacccctggttggttcagtagcaggtccaggtaggctagataaggacttgggattttttttaaaaaaaaggtttacagtcatttaggtcactgaatatcatttgggttctttgattttaaagttggctcattcaaggtttaggaacctctagggatgttaggagccaccaaagatcatttagaatatttttggctatttaggatcttttactattatttatgatttttgaaattcatttgggatgatttagggttattgttgttaaggatttggttttaaagtttttaggtttacagttggtaggaatgtggctggtcatgtagcatttgctgtcatttagacctttttattatatcttgacttcattaaggttatttaggacctttttcaattattacagcatttaaatttttttctagagtttatggtcactaaaagttatttagcttcttttagggtcctctgggatcatctagggttgattaatagcgtttaggaatcttagtgtcattttattgttgtcattttaattgtctatcacctttaaatgttttacaggggattgtgtttcattgttaaggattgtttagattcatttaggatcttttaaggttggtaaagtggtcctcaaattcagtgcatacaggagtcggagaggaggtttgtgtattagtccattttcacgctgctgatgaagacataaccgagactggacaatttacaaaagaaagaggtttaattggacttacagttccatgtagctggggaagcctcacaatcatggtggaaggcaaggtggagcaagccaagtcttacatggatggcagcaggcaaagagagcttgtgcaggggagctcctctttttaaaaccatcagatttcatgagacattcagtatcatgagaatagcttgggaaagacttgcccccatgattcaattacccgcccctccacaccaggtcactctcataacacgttaggattcaagatgagatttggggggggacacagccaaaccatatcagttagtaagaaagaggcaatattaaaaattctgctgccaatgccacagcccagaagaattgaaccacaatctcttggtatggaatatagacatcagtgttctaaaaaaactccccaggtgattgcagtgttccccttaggctcatttagaacagttagtgcaccagaaacatcagcatcacctgagaactttatattagagatgcagattctctgccctactccatctgctgaatcaggaactctggggttggggcccagcagtctgcgttttcacaggaaccctgggtgattctgatgcttcttagaggtcaaccccactagcatgacgtttacagggatcttcaggatccttgaggttttttagggtgggggaattctaagggcattttaagaaccttagagtcatttgggttattttagggttgtttattgtcaacttagtgtgtgtatcctgagaaggtaccagtaggcacctgagtgaactatttttaaattcagtttatttgatagtcatctgagtcagcccagaaatcatgctcactgccagtgtcctggcctctatgggaacgaaaggcagagcagctcctgagctcctggctcaggcctcaggcgcatggggtgggcggggtgggctgggggagcaggagtgtcccatgtgcccaggcgggacaaggcacacatttatccagaagacaccaagcaaagggcttggtttgtgaatcaggcactgcatctggtacccaattcctaatcaagagaacttcagaatataagaaactgaaagtagaactgtctaacagcacattctggctaacttcaggtttccaggatttatggtgtgtatttttctctccttttgaaaacttttgcatgtccagtttctgaaaggagaattgagagtacagattgaaaatgtgtttggtgtccagggtgactgactctaaacacagggaatttcccaattcctcacatgaggtctctaacctcaggctcccgcgtactcgagatggcatggcatggtgactggtttcctcaaaggccttggaactattgacgccatccttccattttgcctgtgtattacatatgtgtgtatttacattacatatatatatgatttttggtatatgggactgcatttccattgcataatgggcctcttattcttctaggaattctgaagtctagtgcttagaaaaactgaccctaccagggacacaaaggcctgactggctttaatcttctggccattgttgttttgttgttgttgttttgttttgttttgtatgtgtttatacgtttttggattctcaatatttttggagttactaagcaggaaattttaattttaaagccagtgtaatagaagcagtaagaaaatctaatagcaccaccccaacataacttttttcataagcctttacatgtaggcctgcaatcatattgaacatactattttatttactttacataacaatattttccatgtttctacataaactattatgtaatttcattctgagtctcactctgtcgcccaggctggagtgcagtggcacaatcttggctcactgcagcctccacctcccagttcaagtgattctcccgcttcagcctcttgagtagctgggattacaggcgcccaccaccacgcctggctaatttttgtatttttggtagagacagggtttcgccaagtcggccaggctggtctcaaactcctgacctcaggtgatctgcccgactcggcctcccaaagtgctaggattacaggtgtgagccaccacgcccagccttctacataaacttgataattacacttccagtagcagaataatattcatgcttacggtttttattttacctataccattatcacaaagaaggaggaaagcaaggaaaaaaatgtacttggctttttattgggattacttgaatgtttagataatttgggggagatctgttaaattttcaatccgtaaatgaggtatatcttcccattttttaattttattttttaatcttttattagattatacacctagaaatacatagaaatacatttttatgtatcttccttgttttagcaaccttgcaaaattcattttatatttctaataatttatctctagattattatgaccaacttgaattcaacttttatttgttggtttcttttagtgggtcatagatgtcatagttcgcttttttgcttagtgatttttgtgacaacttgtgttatagttaatatttggctaaggaactttaacgattgaagttgaacactacattacgaaacgggaacggttcccttttccctctcgcagggcgtgagatagggactgtggctcgcttcttcagtgccctgcggctcaaacctctgagggaccatacagacgggcaggctgtggggctccgaccccacaccagtgtccagagggtgaatgtttgcagctcctaagccccagcgggcatgtgttacagggtgctcttttagtttcgccgtccataagccgcttgtgttaagcagctcaattagaccctctaccttgtcgcaaggacagagggctttctgtatcccggtgttcttgccttgtgtaccggaaaaatcgcatcacgggtgagcttggagaatgagtgcaaggctttattgagtggaagtagctttcagcagatggggggaggggtgccagaagggagatgattttcacctggagtcaggccactcgaccccacgggctctcctccaactgccccagccaaactccatgcccttctgccagttcatggcctgccagcgtgccagtgcccgccgatgtgctcctccccacgtccagcccccaagtgttcctccgctgacgtgctcctctcgactttcagccgcttctgtccctgccttgctagggtctcgggtttttataggcataggatgggagcatgagaggccagggtggtcttgggaaatgcaacatttggacagcaaagcaaaaatgcctgtcctcacctaggtccgtgggggtagagccctagctagggaccacgccctcctctacccagcacttcacttccccacttctgtatcatttaaagggaccatgctcttcccttcccagcacgtctgtatcaattaagatctttccttgggatcattttggaatcaaggctctttgtagtcccagacattcaatatccacaatgtgtgggagttctaagtagtttgttcccaaaattataccctagacatctctgagacataattactttccatcagcaagacatacccatgctgtcatgttccatctgtcccagtgtttggcaccaactaccttctcagaacccctgggttgtcccagggaaggatgttgtaagataccccactctcggtgctgttgaccccatagatggctctgcaggtgagggtaggtggcatcaagggcagcttagaggggcttagtgactagcaggggacattcaaagtcatgaattattgagttgtggaaattccttatgtattttgaacgttaaccccttatcagatacatggtttgcaaatattttcttccattctacaggttgtcttttcatttcattgtttcctttgctgtgcagaagctttttagtttgatgtagtcccacttgtttatttttgcccttttttttctttgagatagtgtatctctctgtcacgcagactggagtgcatgtgattttggcccaccgcaaccgcagccttctgggctcaagcgatcctcctacctcagcctcccgagtaaccgggactacaggtgcatgccaccatgcccagctaattttggggggtatattttgtagagatggggttttgccgtgttgcccaggatggtctcaaactcctgtgctcgagcaatccacccaccttaccctttcaaaatgctaggattacaggcatgagccatcacacctggcctgtttttgcttttgttgcctgtgctttttgtgtcatatcctaaaaatcagagaacaaatgttcagtaacaaggtaagttctagggatctaatatacagtgctgtgactatagttaatagtactgtattgtttacttgtaattcactaagaaagtagatctttgacattttgggctggatgaagaaaaaaacagtagatctgaagtgtcctgacatcacacacacatacacacacacacacacacacacacaatggcaactgtgtgatgatggacgtgttaatgtgatgtggtaatcgtttcacaatgtatatgcgaaatgtgtatgtacaacaatcatcaggttgtacaccttgaatatatgtcatttttatttgccagttatgccacaataaaactgaaaaataaatactttttaaattaaaaaataataatattcatgtttatggcttatgaattagtaagtccaagcttaaaactccaattagaaaaatgtatcttgctctaatgcaagaacaattaaatcggggttaataaaacactgatacacaaaaatccatattatattctgcattatgtcaaaacacatgtttagatttcagtttttcctaaagtttaaacttaacacttaaattccaacttatggctgctgcttaaaaacttctcatcaaaattatgataagctgctctttggccaactcatagggtgatcatatttatcatccatactggatc

SEQ ID NO: 1745 - protein, 253 aa, Homo sapiens
MANLGCWMLVLFVATWSDLGLCKKRPKPGGWNTGGSRYPGQGSPGGNRYPPQGGGGWGQPHGGGWGQPHGGGWGQPHGGGWGQPHGGGWGQGGGTHSQWNKPSKPKTNMKHMAGAAAAGAVVGGLGGYMLGSAMSRPIIHFGSDYEDRYYRENMHRYPNQVYYRPMDEYSNQNNFVHDCVNITIKQHTVTTTTKGENFTETDVKMMERVVEQMCITQYERESQAYYQRGSSMVLFSSPPVILLISFLIFLIVG

SEQ ID NO: 1746 - DNA, 210204 bp, Homo sapiens
gaattcttgttgaatgaatgaatgaatgaaccaatagtggtctattctacactgtagccactgccattcattttcatttcctcaaaacgttatattcagccttccctctaggtctttgccaacacgggtgcctctgcccacgcttgcccattgcacaggactaactcctacacccctttcacatctcagcttggaggtcactttgtcaaaattcaaaacttttacacttcaaaagacaccatcaagacaattaaaagaaaagcaataggccagggggaaactatttgcaaagcagagctctgataaaggacgtgcatttgagcataaagatgaccaaaggggccctgaaggagggtgctgccagcaagggagttcctgggtctgtaagtcttgtggtctctccaccgtgtgtgttcttttgcagcagccccgtagctgggtggagcctccgggcctgacgtggaccttcactggagaagtgactcaggtgggaaaagtctccccgggcctctccacctgcaggatcgccttcctacaccttcccccgcccgcttccttcgcgcgggctcctcccaatgaccaccagcagaactgcagcctcctgccttagctgagctggagcccgaggtagctcagatgccagctccttcctccaagagaccctagaaatgccattggctgctactctgatgctctggcagaaggcatgccgttgaagtgtactgtgttcgatgtaaactattatgagtttgcatctggctaaacgtgctagtgagtgagttaattagccacctggggtagaaacaagaaaactatgggtggcctaggcagagctcgatggagcaggaattaggggaactgagaaagacaggcaagagactcccggatcctgctagatgctaatctagagggtgggagtgggaggagttttgtgcaccccttctgtttccaggactactctcaggccctccatcgcaggttctgggagtgagcacaagcagcccagactcccaggccacctcctgtcccctgcttcaatccctttaccttcattccttctccatccccatctctcagccctccccaactcctgaaacctttccatggtgccccctggatctccattcttcattttgcaaatatttatgtgatgctccttgtgttccaggcattgttctacaagatgaacacatcctaacactcctcttaagagccctgtgaagtgggtactaatggctgttgccatttccactttacagaggaataaagtgaggcatggggactgtaagtgccttgctcaaggtcacccgatgagcgatgagcgagcgttggagctgagattcagtggcacggaacctgtaatccccagaagcatccccagctcctcggtctcctcaccctccgactgggagactccccagtccagcttccctttccaccctctcagagggtggttcctgcttcccctccaacaccactggcctggggatggagacgtgtctttcttgttccccttggcaacattgagactcttcctccctgctttctagagccccctgtcttggacccacaggtgtcaacctagacatcttgctgcccatcgttgttagtcatcaaggagtcccccaggccactctccccttcccccctcactgtctccccagtttttttcctgtcttcattcttgctgatgtcaatgtccacatctccacaaagatgatccttctgatactcagccgctcgctcccacggtcatgtcctagacccgatcaccaccgatagccggaatctctttcatttcagcaccaaacatcccactttcggcatgccactccctctgctctacacttactagccgtccacaattcttctacctccccttggaactccagtagctttccctggtcctcacccatcttgcatcttatttctctcctggctcaaattccacagcaaatcattacaattattcacctgctacaccctcaaccctcttgtgttatgctcatacttgctggggggaagcctctacccctactaagtcttccacacctgcaaccatacaggtgaatccagcacagcaagtctggctgctctcgtcaattcaagatcatgagcctccacaggccccattgttgcctggcaatcctgctccatttccgtaatccatcctctcttattcccctagacttctatttctacctttttttcctgtcaccaaacatccaacatccgcccaccaccaccacctcacactgggctgagacctcattccttcttttactgagaaacctgaagcaaggctgggcatgggggctcgcacctgtaatcccagcactttgggaggccgaggtgggtgggtcacctgaggtcaggagtttgagaccagcctggccaacatggtgaaaccccatttctactaaaaatacaaaatttagccaagtgtagtggtgggcacctgtagtccgagctactcaggaggctgaggtagcagaattgcttgaaccctggaggcagaggttgcagttagccaagatggtgccactgcactccagcctaagcgacagagtgagactctgtctcaaaaaaaaaaaaaaaaaagaaaagaaaagaaaaagaaactagaagcagtaaggacagaacactcactggctgccgccaccactcctgggaccagccagcacctgagcatgtgtgctgccttccctcccactcacccagccaacagcctgactctcagtaaacatctccactgtgcactagttcccaagcctcccgcagtctcactttgctccagcagttcccccctcctcctacttcttctactgaatcattcccaccactatacaatgtgttatttttcccgtcttaaccactttcacctccaattactcttccagagagctgtttttgcccactggctccaattcctctcctgtcattctctctggagcctattccagtctggccacctgcacatggcttaaaccatggctaatttggctgggcgcagtggctcgtgcctcaagtgaaagagagatagagagggagatagagagagaggaaggaaggtagaaaagagagaggaaggaaggaaggaaggagggagggagagagagagagagagagagcaaccatggctcattcacagttgtcatctttcttgaccacatcaacactggttcctccctcctcctggaaacattgtcttcattcaacccaggacaccaccctctcctgcttttcctccttcctcactggctgctacttctcagtctccttctctgtttcctcctcccctgccctgtagatattggcgcaccccgaggctcccaccttggatctctcctctcactacattctcttctgtaattcagggctttgcctcgaagagttgtcgctatgccagtggcttttgtctcacatttatgtctccagtctcttttctgaactgcagactaacctatccaaatccctgctccccgtccccacttagcatgttccaaactcaactcttggtttcacccttgcacgcactccccctccacctctactgtccatttccatcctgcactttctgcctctcccattccataacagcaactctatcttccagtggctcaggccaaaaacctgagagtcatcctcgactcctctcactctttcacatcccctatctaatctgccggcaaatcttgttggctccacattcagaatatttccaaaatctgagcacgtctctcacctccactgcgcccatcccagtccaggctaccattgtctcctgcccggaccctggccgagctctccgcatctacttctccacttgttcacccctcctgctcccccacctagtctccatatgaggatcaaagagatctcattaaagcctgtaatcccagcactttgggagtccgaggcaggagaatcacttgaattcaggagtttgagactagcctgggcaacatagtgagacccttgtttctatcaaaaaattttaagaattagcctggtgtggtggcatgcacctgtagtcccagctactcttgaatattgcttgagcccaggaattggaggctacagtgagctatgattgtgccaccgtgacagagtgaggctctatctctctcttaaaaaaaaaaagtcattttaattcactccatggctcactccccatgccctttgccctgccctgtgcagcccactggtctgcttgcttccccaactctccgggcaagctcgaagcccagggcctctcctccacttaaagtgctctttccccaacagctgcatggttcactccctcaagtccttgctcagatgtcattctctcagtgaggaattccctaatcacccctttacaattctaacctcaccctcatccctccactttgtctccccagtagaatcccacaagggagggatttttatttatcttgttcactggtgcatttgtctagcataaagcagttgcccaccaaatattcaaatgcatcaatgaatggatgaatgagtctacttttctcgaatggaagtgaagggtttccaggtagaggtgaggtctgaaggcaaaatgaatgatcttttgagagaacaaccaccttgcagataagttcaagtagctaccggacacctcccattttcacctgcccttcccactgttatccatgcctgaggaatgtgatgccagggacggcaggctctgcattggtgtctcaccaaaatgttcaggctcacggagttggctcaggtccctgggcaggtcctggtctccctagttcaaatgcctggaagacagagacctttctaagccaggcatagaaataacaaactccacatatttccagctatttgtgggggcaaaaaaattaaaacaattgaactcatggagatagagagtagaaggatggttaccagaggcttagaaggatatgagggtggtggggagtggggatgcttaatatgtacaaaaaacagaatgaataagatctagtatttactagcacaacagggtgactatagtcaaaaataatttaattgtacaccttaaaacaactgaaagagtataattggattgtttgtaacccaaaggataaatgctcgaaaggatggatacctcatttatcctgatgtgcttatatctcattgcatgcctgtatcaaaacatctcaggtactccataaatatatacacctactatgtacccacagaagttaaaaaaaaagaggggggtgtttcttgagtcactgcacatgccaggcactgcattccctaggagctatggcccttaccatggctggatggtgactgcatcagagattgctgaatgcagagatgattgtcattgagccccgtctgcatgggcgttccgtgaacacagcggttttgacttccaacctgaacatttccacactggggtctgacccacatttgtgaaatttgttcatttatatacaacaaaaacttcccaaggtagaactggaaaaatgcacatttggatgtgcattttacaactcttgtttcagggatccagtggtacaaaataagaactctcccaggaaacgagaaccagtctgtcatcccggccttgggtttgaggcagctgttctcttgcaggacagggctgtgtgccgtctcgtgggctggccctcctgtcttgggtctgaagtggcctagcctggccgaggcactcggtgcccatcccacaactccccatcgggcttctgtgttttgcaaaatgcaagggagtctttgcatctgacctggatgccctctgtttcccagggatcctcccaggatgtctgcctcaccagacgacctgagtacagggggaaggttacagaacatgacagtggatgaatgcttccagtctcggaacaccgtcctccaggggcagccctttgggggtgtccccaccgtgctgtgcctcaacatcgccctgtgggtggtgagtcctgggcactgcaggaggcagacagtaaagcctcagacagggtcgaactttcacaggtgatgcagtgggggacccagttgtccaaatggacaacaacaacattgatacaaactgcctgaatgtcagtcctgcccagggtggccccggtaggtgggcctcaaagaggctggaggaacaggcagaattcctgggattcttttctgtgcatcattgtccagaggttcacctggcctccttcctctttctcattgctgaggtcttcaaggcacattctggtcccatagatctgaacatgcctccagctccattcaatgaactctgagcatccactctgtgcccagaagctgctgggcgctggcaacctacagttgaaaggaatggcccctactccaacagagctcaccttctagtggaggagctccctggggacctcagggacagggtctcccccaagggaatgcagggggccagccaaggggaagggatccatgaagtctcccaccccacattgcttttcctggcctgtagctcgtccttgtggtttactccttcctccggaaagctgcgtgggactatgggcgcctggctctgctgatacacaatgacaggtgaggaggggtcgagatgggtgagccgttgcccccttggggaaaacctgttgccatggccaggacgcagctctgcccagcgcccgagctgcagcaggtgtctcgccagcaagtggcctctgcccctgctctgccctccctgcaggaaggggacttggagggcagccatccctgggcacaaggccgtgtttttctctggtcttagactttctggatcacgtggctgaactcccagatgcctggtgtacctggcacaggggcgattgctgtctgtgcccagagctgtgtgctcagcaaaggagctgaggagcgcctgcccgtggcagagcagagggcagccctcagccagggagtggggagggagcagggcaggcagctgagaacttttctctcctttcttacctccctgccccttccctggctggcagcctgacctcgctgatctatggggagcagagcgagaagacatctccctcggagacttccttggagatggaacgcagagacaaggtgagtgctgggagcggtctgggcggtgggagtcccagcactgggcaggcaggcgtggtgtgcacaggaagaaacacggcttagaccttggggctttgtaatcagccagcctcaaccactctggcagtgtgaccttgagcaaattcctcagcctcccccagactcagtttccccacctgaaagatggagttattgaccatacctactactagggtgccaagtaagtgttaacgaattaagatatcttagagagatttttaacattaatttgtcttctctgctcaaatctccaacccttctcacagtcccgtcctgcccacgtccctacctctgactctgaatcaaggcctcacctcccatttcacatagaagattctagtcatgtggtagggattccctcagcctcaggcttcccagccctgtttagtggagcgcagtctgctgtttcctcctcttccctggtgaaggccagccctccacccgactcatgcattccttcagccacttgctgtgtgccagccactggtctgggagctggggaccaagtcctgcctcatggtgctgtcttccccaggcaggggagacgaccagacagaggcatggtggagaacgccacagggggaggtcagagatggtctcgggtagtggtgacatttcggcggggccctgaatactctgagagggagccctgagaacgtcctccctccccacccccacacacagctgaactgacagtggcccatgctgctgtcaccacttcctcacctctcactcacgccccgcctcccactcacgccccgcctcccactcacgccccgcctcccactcacgcctcctctcccacccacgcctcccctcccactctcgcctcccctcccactctcgcctcccctcccacccacgccccctcccactctcgcctcccctcccactctcgcctcccctcccacccacgccccctcacactcacgcctcccctcccactctcgcctcccctcccactcatgccctgcctcccactcacgcctcctctctcacttacaccccacctcccactcacgcctcccctcccactcatgccccacctcccactcacacctcctctctcattcacaccccgcctcccactcacgcctcccctcccactcacgccccacctcccactcacgccccgcctcccactcacgcccccctcccactcacgccttccctccccctctcgcctcccaatcacgcttcacctcccactcacgccccctcccactcacgcctcccctcccactcatgcctcacctcccactcacgcctcccattcatgcctcctctcccactcacgcctcccctccccactcacctcccactcacacctcccctcccactcacgcctcccattcacgcctcccctcctactctcgcctcccctccttctagcgcctcccctccccctctcgcctctcactcatgcctcccctcccactcatgcccccctcccaccaagcctgccccccactcactcgttgcctcccactcctcccactctcacctcccctccctctcacacctcccctcccacccacgcctcctctcccactcatgcctcctctcccactcacgcctcaacctcctcaaatgtgagctcccgtccctcactccacccagacaaccctgaaggtcagcagtggttccccccaccgctaaatccaatggacttttctcagttcacatcttgcctgcgttctctgaaacgtctgaccctgtagactgtctttctctcttgcacaggtgctctccgttgcataggtgatgtcacattctttgggttttccttctgcctctctgtctgctcctcctgtgtctccttagcagacttctcctccacaccgggagtccccccaaccagctgatcccatatccttcccctcaccctgactcctgggcaatgacacccacactgacaacttcctttgccatctctacacataaacttttaaattcctgtctccagctaatcctctcccactgggccccagcctgattattcaatgcctttcaaaatacctccatatggatattgtagtcatttggggttccatttgtccaaaacatttcatgatatcccaccacacacccacctgttcctctgaccttggtctcagacctcccaccattctccccagggtctcctctccctcttacccaggtccccaagcatagccaatgtgtctccacgttgtgttgctttgaccttcccagctttctttctctccatccctcctaccatcccctggtccaggcctccatcagcctcttgcctggacaactgcagtagctctaactgatccctttaggtccacgctctagggcccttatccattttccacctgcatccagagagattcccctgcctggggacatatattctgctgcagagaccttcactgtcttcctagggcctgtggaatcaattgcagatgctgtgccgtggcctggtagtttggtccatcctcccttactcctcccaactcccctatccctgccacatgagtccaccgtttagcttctcaacagggccacctgcttccctccaccagccctttcccaggctcttccctctcccccttccgcagtggcccttctctgagtcactcaccttttgttgagatttcagcttaagcacacttccccagggagccctgaccacccctcctgggtccagatctcttgttatatagccacagaaaatgcattccttttcttcaacatttttaaccctgtctgtaacgatccctcatctgcaagatcagtctagtgtgtctgctttccgcaggccctgaacttggatttgctcaccactgcaccccacatccaatccagcctgccatgtacttagcatctgatgcatatttgtcagttgcgctaagtaagcggagccaaattccttccattgtcatccctcgagaggcggggtccttcacttgctagaatctgccctctccaaagtgcagagcctcagacaagtgacttcatctcttgaaggcttcctggatagaaaaaaggcagcaacatctaccttgcaaggtggctcgcaggtttattcttggaaatatcactttgatttttttttcttgttacaatgacaaaaaaagttttatttttaaaaatctaagaagataaatccttatggcagcagtgagggggacaaactgaagagggcgtaaattaaattaaatggagaacagagagttcagtgaggtggcccccacagtgaggtggccccaggatggggagacttcagccagagccaggtggtgtgggtgaagaaaatgggtctcaccatggttccctgagcaagttgggtcaggtactgttacccccaggtggcgggggctcagataggtgaagtgaactgacagctgtcactctgtcacgtcagctgagctggctcctgggaactgcagccctgtatctgcctctcatgtggctgttcagctgctgagctttctgaatggtttatgccttcagagcgataatgtgtactcaggggagggagtgtgtgtgtgtgtatgtgtgtgcacacacacatgagagagacagagagagagagagagatccacacaggatattcatggccacgcttctactcatgacctctgccctttcctggatgacccatcctctgtctattccagtatacacctgtgcacctgtagtggaaggggcagaaacacattcccaggaagatgtgtccccagtggtacctaatcatgagggaccatcaggaaagctacttgttcccttagtcagttgcaccctgtttgcccagctgagccatggagacagactcttcatgcaggaggggtggctggacctctctcggcccagctctgctttgctagttacccctccctggggatgctccccattgctgctgccaccaccatgctatttcccttccttgctctgactcacacctgaacatttatccttaatttagctccccagggcatagctggaggaatgtcctgctgtgaacaccctcgagtggccattgtcaccatcagccaacccaacacagggaaggggacttagaaggtgggacttatgccgaggggagcaagggacttctatttcttttgtgccttctcaaaaggaagcaacgaggacaggcaaaaaagaaacagatgtcctttgctcccctcggcataaggcccgccttctaagtttccttccctgtgtcgggttggctgatagttgcttccttttgggaagtacctcttccccagtccatgtggttccagaggactatcaatcaagaggtctgcctggttcacagaagtgcacatgacccaaatggggccaatctagagctgtaaccttgtgcaaggttttgctaagtcctctgggatcccagaaggaagcaggcaccagagtaacttcaccagctaccagagctggcagcttttagagctgcaggccccagccccctctcttacacaccgttccaaagatgactctctctctagtcccccaccaatctccccatggctaaggccacctttcccccccacccagaaactccagacagcaagaccccaagagaaaggcctcaacaggacaggaccctcagcacgtggcatcaaagatgccaccaaaccacgccaggtttcatgatgtttactgaggtgcaggaattcagagggaaagagaccttcttccttgcaacacccatatcaatccccttaagggatttttttttttaattttaataagtggggtcttgctgtgttgcccaggctggactcaaactcctgatctcaagtgatccatctgcctcagcctcttgagctgctgaaatgacaagtgtgagccaccatgcctggcttccttaaggaaattttaattggccccacttgggtaaagttcccattggccagtcaatcactggaggcaaactcccactcggacagagtaagagtaggagcccactggaccacacgcatccagtgaaggacatttccagaaggaagcatgaaggacagacagagagcaacagacgttcaccccagaagcagtcacttctccccctccagttcaagggtcaccttctaaaccccatttcctataacaggagggcagagatgtccactcatttccagggaagcatctccctccacagtcaccactggttcccagctgagccttcagactctttttcccaggaagaaggccccggacgctgccgcggctgcctcagatgacctggctgcctgggttcccagagctgggcagggcaggccaggacctgggttttctcacagtttctcccctttccccgcagggattctgttcctggttcttcaacagcataacaatgaagtaagtgcccgggctctgtgagcttgtgaccgtgttgccttgggggtggggggtggaggctcctggaaaagttagcagcccccagcctgggaagacagggcctgagctccgtatcctccccgccacctcggcccattaccagtgaaggatgctttcctggggtacagttggtgacgtgagaactgggcacagcccactgcccctgttatctctgcctcagtccttagggaaggaccacttttaatagctgaatcattactcgcgtgcttatagaaatgcttctgtgaactccataccaggaaaaagaaacccttcctttgtgctatctgcttgatttctgtgaacatcattcaacatatcatgtgttcgcccttctgcccaagcaaacatcgggcagaagggcaggcctcgctcggcctcagtgcctggagagcagaggggcagcccttgcccacctcactttgtgggtttcttgaatgccagaccccactttgcaagcaagcagcccccaagtcacctgttttctcctgcaagccgacctcaagttacctgttttctcctgattccccaacaccagccagacgcttcagcagagcagacacttaccggaactctatgttcccactgcgtaggcatacacacatgcacactcatacatacatgcacacacacgtacacgtgtgcacacagctctgcctccacctcagaccccacacactcatgggctctcccttaatgtgctccacctgtcctgtcctgcccatcctttaaacccctccaccccacccctacccaaagactcctatcacagaggcccctctgtcagggacccagcatctgggaaagcaggaaggcagggcattgcaccgtgcatccagcagcccttgagagcagtgtcatagaagagagcttaatgcgtttactgagcagcaataagtcaagtagcgtccctgtgcacaaacccatgcggtctggttggagaaacaaaggtgaacaagactcccttcgtagcattcagaatgggagggttataattgctgtgcagacggcatgtggggaagagagaaattaattccaactggaaaagtatagttttgagctgggcattggaggacaggaagagtttcgacaggcgcgatgtgggatgtggagggcacatcagaagtaaaggactgtgtgagccagtttgttgcagagatgagtagggtgtgcacagacatggtaaatctggtgtgactagaagcaaggtttcatggtaagtgtggcgggggagggtaaaagattgggctggaaggatcagttgggatttttttttttttttttgagacagaatatctctctgtcaccaggctggagtgcagtggcacaatctcagctcaccgcaacctccgcctcctgggttcaagcaattctcctgcctcagcctcccgagtagctgggattagaggcacgcgccaccatgtccagctaatttttgtatttttagtagagacggggtttcaccatgttggccaggctggcctcaaactcctgacctgaggtgatccacctgcctcagtctcttaaagtgctgggattacaggcatgagcgaccgcactgggcctcagctgggaccttggctggcatactgagaatcttgggctttcatctagagacagtagagagccaattagtatttttaagctggaaactcagaacaatatatgtgtgtaggcagaagtatggagagtgaatggcattagagaaagtccaaagtcaaggtgagcagttaaggaggctattccaatggtcgaggtgggaggtgctagtgacctgaaccggggcagtgactagagaaacaatgggaggggaagatgggagggagatcataaggctacagtcagcaggttgtggcctagttaagaaagagggagaaattgaggtctggtttctggggagggtagtaatgccattaggtgggagaggaaacacaaaatgatgagatgtagtcagggcaagtatgcaagctgacaaaggagctgttgaaaaaacaagattgaagcctaggagaaaggtcagagttagagatttcaacttgggagatggtgcatggaggctgtagttgaagtcatgggagcagatgggtcatccaaggatgtaagaccagaagcggcccaagggagtgcctcatcgaggcgggaggaagaggcatcctctgggctggactcagtgaagccaggccaggacaaggctcccctctagggtggggcgacccagaaacctctagtgctacagaggtggagtagaatgggggctgaggaaaggacattgactttggtgagttggttctctgttgggagggcaggccgaggataggatgtccaagacacagaggcagagaaggaaggtcacctttttccagaggtgcatggaaggagggaagtgaagctactggaaggaggagggaaaacaggtcagggaacagatcagagagtggatccttgaggagctgttttattacagaggaaccaacaagcacttgagcctggttgtagtttacagggaagaggtgtgggtggacgcaggtggatgcagagagaggaggatgccgaagatgagagagcagaacaatggatccagcacgtcttcagaaagaggtggaaggaagggaagcaatgagagcagagacagagaattaattgtgagtaggaagaagggcgattggctggaaggtcagggtggggcacttacaagaaagatggagaaaggaaacaggcctagtggtggaggcaggaattcctggcccaggaagagaattctagtgctctcagtgccatccagtcctgtccagccctctgctctctccacctgattggaggctcctggacctcaccccgcctcaggcagtgcaagaggaccttcccccgctctccagaagttctcatccattccacttctggcattctggcatttcattctcaagtccatggagggaaacgtttagccgctcaaagttaaaaaatcaagagctctaaataattcctcaaatgagaacattgaaaaccttgaaggtgtgctttttgtagtattgtttaaaaataaatcttttttttttttttaagacggagtctcactctgtcgcccaggctggagggcagtggtacgatctcagctcactgcaacctccgcctcccacgttcaaacaattttcctgcctcagcctcccaagtagctgggattacaggcacgtgccaccatgcctggctaatttttgtatttttagtagagacagggcttcaccacgttggccaggctggtcttgaactcctgatctcaagtgatctgcccatctcggccccccaaagtgctgggattacaggcataagccactgcacccggccttaaaaataaatctgaatcccagactggatgctagttttgcatacaacctacaatcctgacaagggggcaggggtgggtaaaccatggtgtgtccaccagtggagtggggaggcctgcatggtgctgagcatgaaccagtgctccatcaacagaggccactgtcaccattacgtaaaaccatcagaaaatgcttgagattaaatgccaagcaaaagagcagtgcatcaaatgctttttataactataatcaccaagtaaaatgagcacaacaagaaaataaaggaggttgggcatggtggctcacacctgtaatcccagcactttgggaggccaaagcgggcagatcatttgagatcaggagtttgagaccaacctggccaacatggtgaaactccgtctctactaaaaatacaaaaatttggctgagtacacacctgtaatcccagctatttgggaggctgaggcaggagaatcacttgaatctgggagacagaggttgcagtgagccaagatcatgtcacgcactccagccggagctatagagtgagactctgtctcaaaacaaacaaacaaacaaaaattaagtccaaatgcttattattatcattattattattttgagacagggtcttgctctgttccccaggtcacccaggctggagtgcagtggcatgatattggctcactgtagcctcaacctcccaggctcaagcgatcctcctacctcagcctccagagtagctgggactacaggcacatgctaccacacccagctaatatatatatatatatatatatatatatatatatatatatatatatatatatatagtagagatggggtttcaccatgttgcccaggctggtctcgaactgctgggctcaagcaatccacctgtctccgcctcccaaagtaccgggattacaggcgcaatccaccatgcccagccgcaaatgctttttaatcattgtcttaggttcaatgagattgtagatgaattatttacttctctttcatattttccaaagtttctatgagcacttgttgcttttaaattgtttaaattgaagtatagcatgcacatggaaaagtgcacaccaaaaaatgtacagctcggcccggcatggtggctcacgcctgtaatccaagcactttgggaggccgaggcaggcggatcccctgagctcaagagatcaagatcatcctggtcaacatggtgaaaccccgtctctactaaaaaatacaaaaaattagctgggcgtggtggcgcacacctatagtcccagctgctcgggaggctgaggcaggagaatcacttgaacccgggaggaggaggttgcagtgagccaagatcgtgccactgccctccagcctgggcaacagagcaagactctgtctcaaaaaaaaaaaaaaaaatgtacagctcagtcatcacaaagctaaggctgtgccaccatcatcctgatccacaactagaacattgccaatacccagcagctctcttcctgccccccaaccttcatccccatcccattctaactctatagctcagtattgcctatagctgaactttatgtttgaaaccacacagtatgtgttgtttgtgcctggtaacttttactcagcattgtgtttgtgaggttcagctatgggtcattcatttttattgctgtgtaacaggggtccccaacctccaggccacagatcgatacctgttaggaacctggccgcgcagcaggaggtgagcgagcgttacacctgagctctgcctcctgtcagatcagcggcggcatgagcttctcataggagcacaaatcctattgtgaactgcacatatgagggatctaggctgcctgctccttatgagactctaactaatgcttgatgatctgaggtagaacagttgcatcccaaaattatctgccccccccaccaccccacacccaggtccatggaaaaaattgtcttccacaaaactggtccctggtgccaaaaaggttagggaccactgctgtctagtatttcatgatttatatatcacagttcttgtgtccatttcaccttgatagacatgtaagttgtttccagtttgaggacgttacaagtaatgcatctgtgaaatttttatacatgtctctaggtacacatgtcatgcatttctgttgggtataaacctaggagtgaattgctgggtcatagaatgtgcatgtattccatttcagtagataacaccaactgttctccagtgtaactgggccagcatatacacccatgagagcaggagaactcccagcgccccacactctcaccagcacttagtgttgtccaactttccaactttggcaaatctggcagtgtggagcgatagctcattatctcgtcatgggtttcaggtgttccttttttcctaatagagtgcctctcagtaccacgagtgctttatctggtgcctgcaccatagcaaccactcaaaatgtttgaagaagtaataaaaggacgaatgcatgctctatttcaagagtgtttctggattcctgagtgtgtatctgtaacagagcccctatctttgatatgtctgtgaaattcagttaaagtatacttcaaggataaccgaggctttgagatatagggcaatttcgaagttgccttatatatgagatatagagatagtaaaaaaaaaaaaacttggggagggggtgatcatttcctgcccttccctctacctccccgcaacaagtggtggccacgctggctcctgaggcacgtccttgtctgtgtgtctcttccagggacgaggatctgattaacaagtgtggggacgacgcgcgcatctacatcgtgttccagtaccacctcatcatctttgtgctcatcatctgtatcccctccctgggcatcattttgcccatcaactatactggatctgttctgggtaggcaaagctcagctggccctggggcagcagctggacctgagaggcagccaggcaagccagtcagggctggggttgagggtctagacatctattttaatcctgcctctgggagtttgttgttgtgtgaacttgaataagccatgcttcgcttctctcatgtggagactggagacgattcctcctttgtcacaggtttggcccagagcctgacacacagcaggcacatagtattaattcagtttggaactgagtgttcattcgtggccccactctggctgggcgttcctggagacccttttgtgacatgtgacccactgcaaagatccctgaacccactctgttggacataacaccataggtgcagaatttgtcttgtaggacctctactcccactcattggaacagggtgagccctttggagggaacagcattgtggatgagaccttggcttccaaaacagaaaaatcatggctccacagtgtttacccacacctgctccccagaaaatacctttgcctagctaatatgttattttatattttatttatttatttatttaatttattgagacagagttttgctattgttgcccaggctggagtgcaatgacgcaatctcagctcactgcaacctctgcctcctgggttcaagtgattctcctgcctcagcctcctgagtagctgggattacaggcacccgcccccacgcccggctaatttttgtatttttagtagagacgggttttcaccatgttggccaggctggtctcaaactccttacctccagtgatccacccgccttggcctcctaaaatgctgagattacaggcatgagccaccgcacctggccactaacatgtgatttaaccttgtatatggcaaatcagtcttccgagcttcactttcctcaactgtcttagggattgggagatcgcacgccacatacctatacagtgtttgatatacatagtaggtgctcaatgaatagcagctagtatttcatttagaatcatgaagctgaatggagctgtatgaagactgtacaactgggtggtgcagaatagcaccgtaaatgccccaggggcaaccagctttcccctgattcctcaggtttctacctgttcatccttggccagaggtagaccttaattaattcagtttagcacactgagtgtccatgccaccaaatgccactactagagtaatatctgagtcttgtctcatcctaagagctggtatgttggcagtgataatatcatgcaggatttttagacacattttataagggggtgtctgaaccgtcaaactaatgcacatagccagaaggatttcctctgaatgaggcagtgttgccttttctggacgttgccagtggtaatagtgttgctaatttcatcattcttctcgtggctggaaggctggtgcctccaacaagcattcactgggtgtccattatgtgccaattatgccctggagataccacacaaagaagtgttctcgctttcctcccgagagccccagtcagcagtgccagggaaaagaggcctctgatgtctttgttaaaagttggggagaagctctggggaaccagaaggaagaggaggtcaaaggcaagcatctccagaccccacgcatttgtccaggaaccttgaattctggcgcccccagcaactgaggagccaggctcgaggtcagcaacttctttctctttcagactggagcagtcactttgctcggaccaccattgtcaatgtctccacagagtaggtacctgatcttaacctcccattccattggctgggggtgttggtgtggagaggaggtctaacatgtcagtttgcaacatgggcagcgttttgctgataagaaaggcctggtttccctgggaatcgggtcctgagtgagatgccagaagttgcatcctctcggtggggcaggactcttggtgtgagatgaggccctgtgtcctcatctgtcatgagtggagctgcccaaactggccactcatgaagacgtggagaaatggtcctatttgcttagtgtacccagatcccaagaggcagagaccatgtgctgaaagagattgaagattgttttcctgccaccaataggttccagtcagccgtcatatacccgagtgaatcatgtgcctgacagtccccctcagagtcccacagcagactcgtgccccaactctgccattaactggccctaggtctgaagcagtgcacccccaacactgagcttcagtccttattcatgtccatcattggggaagagctggtggacatgctctctaagctccttcccctcacaggccaagaacctgtgggtttcaacttcagccgacctgactggaggccatatcaatttgccccaagccaaatgtggccccgttggtccatgccatggcccaggtgtctaggccagcttggctgattcctgacaaagctgcagaagcagttccagcaagtgtgagtggggttcacacacccctgccccacctcgcctcccccaacccctatccctctgcccctgctctcctgcaatacaccttggagcagactggcttaacccaaattctgaaatgagcggaaaggggctatggcatcctctcacctctgctttgaccatatcctcccctgaggatgccaaccagagcagggatatcggctccttcccgaggcccattgctggcccgacgtacctacatcttcccaacaaaaagtgaattctagtagaacagcaaaaagccatcaatctccatgaatctatcctggcagagagctggaacattctgtagagaccatgtagccttgcccttctgtggaaactgagggtggagcagcatggtggatccaccatcatagcagatggcaatggcgtgtgaggtgccaggcaccaggggtattttgaaacaaggtgacctttctcccctctaaccatgtagaataaagtgggccctatttctgagtagcaatcctagccaggtgctttgggatggcatcatgtgggttgaaagcagggatggcaaacatggtccaagtgccacgactctcctaccccaggggtggtgctgcaaaccgtctggtcctcctcccccgaggcctgcaggtaacgcaggttcttcctcacttggtctgctgtgcaaccatgggggcctgagccacagcagttggcaggatggcgtagcagtgatgaatctaagtacttcagcagctctgggctcacctcccagcgcaccattgctacagtgaccttgagaggggcaccgaccctctctcaccctcctttccctatgagtgaagtgaagataaccacatgcatggctatgtgtgtggttgagtctagtgagaaaatgcacaccatgcactaagtcccacctggatctggctcagagtaaacactcaataaacgttccccccatgagctggagcaagaccccttctcaccactgatgccccttccaaggcacctgagtgtctggactccaagaaggtgttcctggaaagactgcatgtgggctgggagaggggggtccagggagattgtgttcggtgggaggggagggtctgagaagactgcaatggatggggagatatttggggagactgtgataggtgagaggggaggatccagggatactgtgatgggtgggagggagacctgggagactgtgacgggtggaagggaggtgttcagggagcctgagatgggtgggggtgtcctaggagactgtgactggtgggacagatccaaggagactgtgaccgtgaccggttgggggatccatggagactgcaatgggtgggaggatctggggagactgtgatgggtgggagggagcagggagccctaggagactgtgatgggtggggaaggtgtccagggggactgcagtgggtgggggtctggggagactgtggtgggtggggggtctggggagactgtggtgggtggcgggtatggggagactgtgatgggtgggggtatggggagactgtgatggctgggggtatggggagactgtgatgggtgggggtatggggagactgtgatgggtgggcggtatgggaagactggtgggtggggggtatgaggagactgtggtgggtggggggtatggggagactgtggtgggtggggggtatggggagactgtgatgggtgggagggagcagggagccctaggagactgtgatgggtgggggaggtgtccagggggactgcggtgggtggtggcctggggagatggtgatgggtgggggggtctggggagactgtgatgggtggggagtctagggagactgtgatgggtgggggtctggggagactgtggtgggtggggggtatggggagactgcgatgggtgggggcatggggagactgtgatggtagggggagtctagggagactgtgatgggtgggggtctggggagactgtggtgggtggggggtatggggagtctgtaatggatgggggtatggggagactgtgatgggtgggggtatggggagactgtggtgggtggggggtatggggagactggtgggtggggggtatagggagactgtgatgggtgggggtatgggaagactgtgatgggtgggggtatgggcagactgtggtgggtggggggtatgggtagactggtgggggggtatggggagactgtgatgggtgggggtatggggagactgtgatggtagggggagtctagggagactgtgatgggtgggggtggggggatactgtaatgggttggggtctggggagacttggatggttgtgtgggtctgaggagactgtgatgggctggggggccccaggagactgagggtaggaggaggcccaggggtctctgtgcagtgggctctggggagctcacaggctgacctcactgctgctgcctccctccctgcaggagcaagctcctgtggctgcatagcctgctgtccttcttctacttcatcaccaacttcatgttcatggctcatcactgcctggggtttgcgcccaggaatagccaaaaggtaagtagcctacaaagctgcttcccactgtgggaagctggggtccctccccactgggctgaccactcccaaccctcagagaagccctcagagggtccagggagactgtgatagatgggagggggcagtttcacctgagcaggggccaagcttcctcccttcagtcctagtaacaatcacctggcccccacctctcacccttctccaccctctcaccctcctccacgctgctccaccctctcacgctcctccaccctctcaccctcctccacgctgctccaccctctcacgctcctccaccctctcaccctctcaccctccatcctctcacccctaatgaaactttcagactggttggtaaatagctgctgcccaggtacctcctatccctgcccctctgctgccccgcccctccccagggactcttggacttcccaccatctgaaaactaaaggattaacaaggcccagtggaccagcgggggcctccatgctaagtggtctgggccctgctgagctgctgctacttagtgtacctggccctgcccacccctgctaggcccgtgcctcgcccttctgcagtctctcggagatcagagacccccgtgtatccccaccgtctcagtttgggtgaccccatccaagcagaccctgagacttggaatgagtagcgcttgtttatgggaggtgatcccaggaaaggccagtaagggagtgaggatgcaaaggcaaccaaaaaaagggagcatggaggggcaacttacccctgtgggcaagtggagcttcatgaccagggaactctgggagctggtgtagagcacatgccccagaattttcctggaggtgagcaatcgtgggtattttccaccagctccctgtccaccgttcattgagggttgcgcttgggggctttaactcctcccctacttggccctgcacaaaagctgaacatgccccaaggccgggaaagagcagtcgcagtatttgaagcatgctgcaggtgttggtgtgcagagatgactgacggggggccacgggcaggcaccagcagtgccacccatctggaccagcacccatgctctgctggggatgggcaagagtgaggagcatccttagttcccgtcctcagcctttcaaaggttcagtggtgtggaatcagctccttccaggccgtccattcaaaaggactgattcacttgaacccaccccagagtgcaaatccacattccctgaaaagtgaacccaaatgcttcagcctgccaggcatggaggcttggtcacccttgaccagtctggtgtctgctacttcagctttccttcttgtcaccagaagcctctttcaagacccctgattcttgcagcacaattaccagactgtcatcttaaaggtgacgacccaggaagatatttcccattcacagaataaagtgtgaagtttagggaagcttccctaccctctccccagagtcttgtttacttcccaactccccggcccagtctcacgtgagggatttccctagagatgtgaggctttacgctggaacagtggaagctacagggagagcagaaatcactgtggggtcgctccggcagctctttccaatcatggagctctgatcctccaccccagcctgatggcagctttccagtccttcctcccttcaccacagcagtccggagcagggcacccacagctgggcacagaggagaacggaagcacagttgaccaacctcagagctgcctggctcagctgggacgctgtgggctaaggcagctggcacttccttggcccacagtgtcccagcttggctctggctttcttggctctctcagcaaggaggcactggcatcagcagcctgctgtgagcagaaggcctgctctgagccaccaaaagactgaggtgtctggaattcctatgcaagcacagtcttctttctccatttttatttttcccacccaggtcacaaggacactaatgatcacctatgtgcccaaggacattgaagacccagaactcatcattaagcattttcagtaagtgggttggggtaggccaaggcgtggattgcttcctccccataaccccgcctgggtcctcaagtgggtagtgagttggtgcaggatggtgggactgggacaccccggggtggctctccctggactcagctcaggatcagctttttagaatggggagggccgctggagctggagcagggtgtctgaagtcagggacttcctgcatggcatggctgtgatatgggtgatgggaatttttctttctcctgttgcttcaactactgagcacagggaaccttggatcacagctatttagagaagatcatctggagacatcctttgtgaccccaagttcccagccccaaggacactgttcactgagctaattatctcttcgtgaacagctgtctcctgggttccccagtgggtggagctccgcccttttgccctgttctgagttgtgtaggaaggatttggcagctctcagattgccaaggttcaaaccctgaggttcagctttaggagcagagatggagtatcccatccaggaacaccaggcagctgagccacccagccctcagggccgacatgctgggcagggggtaggggcagcacatccccaaccccacaggccgactcagcacccatgtttgtggctgcagcgaggcctatccaggcagtgtcgtgacaagagtccacttctgctacgacgtcaggaacctgatcgacttggacgatcagaggtgaggctgcagcggggccttttggggcccggggtgggggtaaaaggggaggatggggctctgctggcccctgacctgcaggtccttctcctgttgcccaccgctggcaggcgccatgccatgcggggccggcttttctatacagccaaggccaagaagactgggaaggtgatgatcaggatccacccctgtgcccgcctgtgcttctgcaagtgctggacctgcttcaaggaggtaactggcttgagcgttgggagcacagcaagggagcggtggggtcctggggctctaggctctgtgcctttgcccgcactgttgggccccaggcctcactcaggtctgctctagtgctccccacccagctccttcctccccatccaccatgtcctgcctccctgttgagatgggagcctttctggaggccaccttcagaacaatccagggaagcttgctgctgtctcctttctggtcttggatgggagaatgagagagaaggaccagagaaaacacagcaggctacacgaggctgccaggcctcaggctcccaaagagataggacagaaacatttgaaggcaacagcttgtcttatcacctgaccactgtggctcaaagagggcgtcgagactcagacacctgcttcaggaccatgccgaacttctgccagcccagagattcaccctctctcgtggaaatgcggcaaacacattctctcacctctctggggtccaccccaagcctgaaagcccccgggtacccctagctatgcctcactttccccagatctaagggcaggggtgaatggcagtcatcgcctcttcttgttctagaggtgggactttggaggccagccagggtcctgggctccttgaggtgcttcaaggccaccacaatccagggaggcttgagtggggaggaacctcgtgaccagggaggccttcctggggctctggccccagccctgaaggctgcctgccaccccaggtggatgcagagcagtattacagcgagctagaggagcagctaacggacgagttcaacgccgagctcaaccgcgtgccgctcaagcggctggacctgatctttgtcaccttccaggactccaggatggccaagcggtgagcaccaggcaggcgccccacccagccccaagcatactcctgcttctcggcactctcctccctctccacctccagtttccccttctgcctcccctgggccctccatgctcgtcacaggcagctgccatctggctctccagtggatgagatggccatacctgcttcccccagctgctggggcccagctgctctcaaggggtgcccaggccggggctcctcactccctgtccttgctttagcacagaggtggtcagagaagcctttgacctcatggtccctcttctgcccttgacaagaatgacatcccttttccctttttctttttttttctttttctttttcttttttttttctttttttgagagagtctcgctctgtcacccaggctggagtgcaatggcacaatctcagctcactacgacctctgcctcccaggttcaagcgattctcctgcctcagcctcccaagtagctgggattacaggtgcctgccaccatgcccggctaatgtttgtatttttagtagagacggggtttcaccatgttggccaggctggtctcgaactcctgacctcaggtgatctgcccacctcagtctcccaaagtgctgggattacaggtgtgagccactgcgcccagctgacacacacatcactccctcctcaccataagagagcgtcagcatagagcagctctgtttgcccttctcctgccgcaggcctcccctaattcatagctctacagtcccctctcttctctgccccagcctctggcagcccatgcgttgacaaggagtgaattcagtccactctggaatgttccagaaggatccttaggactgggccaaagtcctaaaggagctccagaatttatctcttaagaactgtggggggcaggggggctcttctttctgggggaggctgatcctgtacagcacattgttcccacctaccccaaccctacaaaggaagagcagaactacctagattttgctcacaaacaatggtacacaattttgcaagttccttacactctcaactttttatctggcaaatttggttactgatatctgtcctgttcacctcccggagggttgacaagtgatatgccttctattcagtttctgtgttgtttaaagcaatacacctacctaaggttatattgttcattctttgagacattgccatttggtagagaggatccggggcttaattacagcagaatatgagctagcaagccagaggtggggctccagcacctgctcctctttggtcacatctctaggcacctcgatttagtcatctgtgcaatggaaatgatactggtcatcaattagcacagtgtcaagcacacagaaagaactcaataattagtagctattgatattaagatgaggctaaaagtagtacctcccttatcaaatctcaaagaaagagtgtgtttatgtgctgtcactgctgttaaggggaaaggcagaaacagaaccacgtggcacctctgccctgcctgggcagtctaggcaccctcaaatgccctttcctccagatactgggccttaggaactgtccacctctaaggtcctgaagacatatccaaggcttcaagaatccccaggaaggggatgagcccccatctgtaggaccaccatagtggccctgagctcctggcatgagaccctcctaagcccatccccccacccccagacccacatttcttcctcttctcccctctctgcagtgtccgtaaggattacaagtatgtccagtgtggtgtgcaaccccagcagtcctcagtgaccaccatcgtcaaatcatattactggagggtcactatggccccacaccccaaagacattatttggtaagcctcctccatccctcccctctcctctgagctcctctgagactgaagaaggcagcaggacagggccttctctccccatgtcattgcccaacagagactccaaggggactaagttccatgctctcctaagcaccacaacctgtgtgtatgcccagactcattcccacaagtgtgggtggcatccaacccttagcaaaaaggcttttcctgcagagggaactcaggtccatttttttttggctctatgctctggatcctttataaatggtgtgacaggggacggtccagggtcctgttgcatgcaagtctgggcccaggaggctggattagaccagggcaggctgggtccacagctggcctgcagcaaacagcacgtgggctctaagaactgatgtctctaaatgtgcctccttcttccatccttccccaggaaacacctgtctgtccgccgcttcttttggtgggcccgctttatcgcaatcaacaccttcctcttcttcctcttcttctttctcaccacgcctgccatcatcatgaacactatcgacatgtacaacgtcacccgccccatcgagaagctgcaggtgcctcctctgctcaggccaggcctggggaccccagggagatcaaggaagaattcaggcgaggatgggatggggggggccccctgggagggggctgtggagcccatacagtgcgaacattgtggaggtggccatggtgcaaatggcggggtagggcttgctttgttctaaagggatgaaggtgggtgactgccagtcttagggaccagggctagagtgggaagggagagtggggagtccacaggcaggtcctggggtgagttggagggggtgtcgtcctgtcaacatgggctcagaggtcttcatgaacggggtcatcccaggccagcttggggtccagagggtgtggcaagtgtgagtggctctgctctctgcaagttgtccgaggcagcaggctcctggtttgtgtagtagggttaaaggtgaggaagagtgaggtaagccccaacgcagccctctcagagaagtgggagctcaagatctgcctccacctccctcatctccagacacctgcactccaggctgggagccctcagccctggaggaaccatctctgaagttaggggatgcctcctgctgatggtgcaggtcagagggatcctaacccatttccaaattctttagcctcaagactgttactaggagcctagaaggtctcttcttccatattctcgccatcctcatttccaacaacacacatgtgcatgcacacatgcacacactcacacaaagtcaacacacacgcatgcacacacacgcacacatgcacagtcaacagacgtgtgcatgcacgcacacacatacagtcaacatgtgtgcatgcacacacgtacacacacacacaagtcaagccacaccacttctgctgctgatttttgttcccctttgtcaactttgtaataggccccagaccccacgcatcctgggagggccacagctctccctggggactcctccatcctcccctcctcccccgctcacatgtcatcacagcaaaggcaatttgctggggttgcactcctggctagctctggccttaggaggaagtcactcaagaaagctcaggctgccgctccagtgacctcagcatagaaggcctagctgcttggggactccacttgaccttgggtgtcagcctctgcctggccaggaaagccagtgagaagggccaggccccttgcagcctccaggagagcaagccagccctgggagtgagtgggaggagaagaagcaaggggaagaggatgcttgcattgacgtctctcctgccgtcctcccctctccccctgcagaacccaattgtgacccagttcttcccctctgtgatgctctggggcttcacagtgatactgcctctgattgtctacttctccgccttcctcgaggcccactggaccaggtgacctgggggcctcctctcgtagccctgtggtttctccagcctcttcccctgccctggcttccccgccagcctggcacttgggcctcccctctagcctaagaaggagaattgataagggatggttttgatacctgaaaccatccccaaagaccaacaggtgttctgtctttggaaggagggtctgggttgactctgggcccctgggttgctgagatagagccactgtctaagagtgtggggccaaagccaagccctccttgagcttctccctcagctcccagccatatcctgaaggcatggagctgtaggcatgagctaggcagtcccaggcattccatgcagaaggcacaggaggaaagacttgtgtgggaatgtcaatagaatgctttggccacacagaggggcccacaaactcactatgactgtcatcacatatggcccacaccatgccaaccttttacccaatcaggagcgttcccatttgttagccttgatggttctatggtggctgctcactgggtagaaagtatttgccataccctgggcaggtggcagtactttggcttgaaagctgcatgcatctcaaaagttattttccgcaccaaaagttcctactattccaccaggcagcagccaaaaggtttgtcctaacggaaatccttcctggccttttcctctggccaagaacaagacttgtattgatgactgaaactgcagggatttttagtattcttggtaatgtctctttaacacagagacatcaactatatggcacatctgtgccttcccatcccttcccatgcccagcacagacatcactagtggatcatgctgttctttcctgctgctcccagatgcagcacagctcacagtggtgtatggagatggcatcggtatgcacaattaaaccaatttcccagcccagacctctactctgcatatgtctgtattagccagttttcacactgctgataaagacatacccgagactggacaatttataaaagaaagaggtttcattggactcgctattagtccatttgcactctgctgataaagacatactcaagactgggtaattaacataggaaaaagggtttattggacttgcagttccatgtggctggggaagcctcacaatcatggtggcaggcaaggaggagcaagtcacatgttacgtggatggcagcaggcaaagagagcttgtgcagggaaactcccccttgtaataccatcagatctcacgagacttattcgctatcatgagaacggcatgggaaagacccaccccccataattcaatcatctcccactgggtccctcccacaacatgtgggaattatgagagctacaagatgagatttgggtggggacacagagccaaaccatatcagtgtctctcttcctctctattacatagttaggcctttggttcttattaggccacgtccattgatgaatatctctctgtttccttctagatcaagtcagaatctggtcatggtgcacaagtgctacatctttctggtgttcatggtagtcattctgccctctatgggactgaccaggtacctcacttccaattatcccttccttcttagccaggctctcttagagttaagacctcctctttcagatactgtagacctgcctgtgattgctgcaaacccactcctcaaagacagccccatgcctgtcatgggtgtagcatgagccgggcttcctgcagacactaacgtgtcagccgtgagttcagcccacatagagcttatcatctggctggggacacaaggcgtgcttaccagttgcctgacagccccacatgggaacaacacagccaaaaagcagtggaaattcagaagagggagagagtactgtgagagaaatgagtgaatattgtgagagaaatgtctgcttacagttttgcaaactggcccaggtttgctggaggaggtggccttgagctgaaaggccaaagggctcggggccaggacagcccagcactaagaaggaagaggggaagtgtggactggccagctggaataaagcaagggtctttctttggagattgggcaagggaggatggttgaaccctcagccttagctcataggtttgctaactaacagacctgccttgtttttgcttctagtttggatgtctttctccgctggctctttgacatctactatctagagcaagcatccatcaggttccagtgagtactcccatgtgtccaccagggctgctgtgtgtgcacacaggagtggttatatgtgctcttccctgagtccagcacctgaatttgctcacagaagtgtagacaaatgcttgtgaacaccctcactgggcagacttgttacctttcctgtgctgggatccctttggcaatctagttaagcccagggaccccttctcagaatgatatctttgaaataattgtatagtcacaggaagttgcccccaaactgtatgcagggtgggtgttccatgagccctttatccagtttcccccaatggaagcactgtgcataactatagtgtaatatcaaaaccaggaaattgacactggtccatccacagagcttattctgattctgccagttttacgtgtactctgaatgatgtctttatgtgcacaaaatacatggattacaaagaaaaccaattatacaattatactgaattacagttatcaagatattttaaaaatcaaatttttgacatagtctttataaacacaagatattgcttttttttttgagaccaagtctcattctgtcgcccaggctggagtgcagtggcgcaatctcggctcactacaacctctgcctcccaagttcaagcgattctcccacctcagcctgccgagtagctgagattacaagcacatgccaccatgcctggctaatttttgtatttttaatagaggtggggtttcaccatgttggccaggctggtctcgaactcctggcctcaagtgatctgcccacctcagcctcctaaaatgctgggattacaggcttgagccaccacacccaaccaatattgcattttttatataagcaagctaaagttacattttactgtcttaaaaacatcagtataaaaactgatattacttattggaataagaatattaaactaggggggatcattgacaaagcaacatgcagaccacgtgggacattctgccaatttcgatttttttgttttagtgataacaagtgttgagaatcccaattttcaaagatatgttgcaaatgacatgcaaacttccataacttgctctataaggcaaggaccagaatccttcaaggtattttttagtagagatggggtttcaccatgttggctgggctggtctcaaactcctgacctcaggtgatctgctcacctcggcctcccaaagtgctgggactacaggtgtgagccaccatgccctgccatattgcccacattcttaatgcaagaaaatgctaaatttcagttagagattagtgaaaataaagatgttattttttcccatcctagtttacagaccccccagaaacccactcatggattctcccgagtctttggacctggctcagacacccttgctttggatcaagccaatgcatgtatcccctaacacacccatgctttatgtggtccctgcccctccctgctcaggggactgcttgttaacttcattgggttggggacatatatattataggagagagacagagaaaaagaaagagaggaaatgttattctccttgtctgtatctgtatctccactccgattcccattccctctgctgctctcctctctctcctcccttttaacatctctccctctccctgtggcttctgttgccaccttccctctccctcactgcccaggtgtgtgttcctgccagacaacggcgccttctttgtcaactacgtgatcacggcagctttacttggcacaggcatggagctgctgcgtctggggtcactcttctgctacagcacccgcctcttcttctctagatcagagccagagagagtcaacatcagaaaggtacagactggctctccgctgagcacagccctcagtttcctttgggagggtgtcagggatagagcctgctagaagcaccaagggggttgaggtgggagggacggtgtggatgggtgttggtggggcaccttggtctacagggttggaaaggaggctgcctccaggcctgagctgccaggaggctgatgaggagccacagaagtagtcaagccaaggggactgggccacctcagggtgacacctgccttctgccccagaaccaggccatagacttccagtttgggcgtgagtatgcgtggatgatgaacgtgttcagcgtggtgatggcgtacagcatcacttgccccatcattgtgccttttggtgagtcatctccaaggcatgcccaagggctgcacatccgcagatggggaggaggaattgagcctcacaacatcagtccacctcctggagcatggggagacctgtggtagggaggggtcagggccagggccaagctgggggtacagggcagctgaggttggatggctgccgatgggggatgtttgttgaatgaacgcatgagagaatgactcttcaccaagctgaaacagtcagttctcggggctcaagggaagctgctggctccggaggtcagtaccacggagctcccccaacccatccttggttgttgtgactctgacagccgtggatctggcttctcaggcctgtggagacactggagccacaaaggtccagacttgaaggggccactgagtaagtttccacctttgtcccccagggttgctctacctgtgcatgaagcacttgacggatcgctataacatgtactactcctttgcacccaccaaactgaacgagcagatccacatggctgccgtctcccaggccatctttgcgccactcttgggtctgttctggatgctgttcttctccatcctgcggttgggtaggtaccaagccagcctggagaccccacctccacctgccccactgttctgtgagtcccttaacactgaccctgttagaggagaaaagcccaggcagggcaagacgctgctcaccagacctggccacacccagtgacttctctgggcctaaagggcctacattagagtctcagctgagcttcaaggctaagaggaggccctggaccaacatggtccccaggtgtggatttgggtttccagcgctcagggaaggaaacctcatattccttctttctaagtctagacgggtggaaaatagagtatcagctattgggaggctcagttcccatgacatttcctctgggatcccataagatgcctggttttttgttttgttttttaattttattttttgaatcagaatcttgctctgtcgtctagactgaagtacagtggcgcgatcacggctcactacagctttgacctcctgggctcaagcaattctgccacttccccctccccagtagctgggactacaggcgtgagctgtcatgactggctaattgtttttaattttgtagagatgaggtctcactatgttgcccagtctggtctggaatttctgggctaaagcgatcccctggcctaggcctcccaaagtgctgggattataagcgtaagccgccggtgcctagtggtagatgcctggctttatgggttgccaaaaaacctggaagaggaaacagagcctgcagtaggggccagctttttcctcactctttagctacacacagctactgctcctgcccaggggagctcagagacaccctcccagaagcagtccctgcaggccacagattagaaatctctcagctttctccccgttggaggcaccttaacccccagcaacccccaaccccactgcccttccctcagacacctgaccttaaccttctcagtggtgggagaagggagacgcggtgttttctttctttttttttttttttcttttgtttttagagacggagtctcgctctgtcgcccaggctggagtgcagtggcctgatctcgacccactgcaacctccgcctcccgggttaaagctattctcctgcctcagccccctgagttgctgggactacaggcgggtgccaccacgccccgctaattttttgtattttagtagagacagggtttcaccatgttgcccaggctggtctcgaactcctgagctcaggcaatccgaggcagtgttttcttttctctccctgccatggtggcatccatacggtcgactctcagtcatttatgtggcttacccatttgccatcacccccaattgcttatcccgctagcctttccctgccaccccagagacttcattttttccataatgctttttttctaagaataaaggactgcatgtttatcatcaaaaatagaaaaaatataaagaccaacatgtaaatgacccatcatcttacccagaacctgatgtcttttgttcccagccccctttccaggcatgcgctttggggctttgggcatgggaacattgagagggagcagttggtctattgttactttgcaaaactgcgatagtccatattgtaacattcagtcctgtaccctgaggttttgtactgaacacaatgttctgagcaatttcctaggttgttaaaagactgaacacgtaggtgcctttcagcggttgcatgaaagtctaccagttttagtcagttctccgtgattggatattgaggtttgccactttttgctactataaaaacactgcagtaagcatcattaagcagtgatttttggctgtaaagcataatttaaacaacatttacctagttagaaaactgctgccgtaaaaaagggatcaaatattcccaaatgtaatgtaggtgacttttaccttctagattccctctctgtgccatcggtgcagataactgagcatgctcacttcaaaagggcttgcagggaaaggtgtaggtcagagatggcgttgggggcactggcagaaatagtcactcaaagatacttcccagggacgatggtgttggaggtgaccagcaggtcaggaaggacacatttaatgggcactgcagtgggtactgaagtcaattaaaacattttttcatggactccacagatgccaaattctaacagagcaaagggatgatgttattttgtcagactcctagatgccagttgttatcagaggaggactggcaaggtcaaagcccttgcagtggtgctgtgacggtccctggcatctgccagttggggtggcatctcggctggcagactcctgcccatgactttttctcctcctcggcaggttctctccacgccatcaccatcttttccctgtccaccctcctcattgccatggtgattgcctttgttggcatttttctggggaagcttcggatggttgccgactacgaggtgagttgccagcctgcccctcctcctggttctcttggtccctgggggacacagctgtaggatactctccaggtctgggctcccatagcaccacaggatgaaagggtctcgcctttgtctctgactgtagagcgtggagcccagtgtgcatgcgtgcatgcatgcgtgcatgccttgcgtgcatgcgtgcatgccttgcactagcttaggctctggcccccatccagaagacagctatcctctccttttctgccctctgacacctcctccaaactgcaggctgctgcgatgtgagtccagtgcagccactgaactgtgagcctccaaggactggaggccaagagagaggatggagcaaaggaggttggggggggagttgctgatgattcaaaaagaggggggattgtcattttctctcctttaagaccccaggctattgaacttgaggtggccatgtttggaggtggcccctgccccacatgactcctttggttgttggcagtgggcccagcctaatcattaggagaggggagccaatccatgcccttttagagccatgccaacaactgtgtgttctagctcagcatttcccagaatggatgtctatcctggggcactggaatgatttccagtggatcacaacataatttttcatttttcatggttacgtatttaacattaactttctgcctatggcaactgaaatacagttttctgtttataatagtgaattgtttcctttttaaatgaatgtatataaagaaaagaaagctgattttaaggactgacacactactgagcctgaggagggactcggaggaggatctctttgcttctggtgtctctgtctgtgtccagggctctgggcacaggtgcccactgccctctccgcccagccttccttctccacgcctggctggaacaccacactagtgaagggtctcgtgaaggaccccgctgactctgtctaatacagcagcattatgtgattgggttggccaggtgtccactctagagaaggagaatggccaggaacctaggctgtgttggtgtaggacactttccaaattagaggggaagccacaggaggaaagacgacagtgctgaagtcaaggcttctcctggagtcaaagcaggctcatctttgaacttcaattccagctctgcttacttcccccagtgatggcccttgggaatagaacattccagaagggactcccttgcatcccagccttctctctgtccccctgggtctcagtcttgccaggctgaaggtctggaaagacagaagatgagttgagttccaaggtggtgagaagcccaggtgtggagttgaggctcctctggatgaatggggaggggcaaagagcaggcctcctgtaacccaccacctctccctgctgcagcccgaggaggaggagatccagacagtgtttgacatggagccaagcagcacctcctccacgcccacctccctcgtgagtcctgagtcccagggacaggttgggagggtggtgcttgcagggatggtctactctagtggcattgtgggggatgccagctttgctgcccactctgggtatggggaaggagatgggggacccctgggctccctcctctaatggagcaggacttggcccaggtccaaatgctgccgtggtcctggatgaagagtgagaaaaagagaagagccaccgtgtactcggcattgtctggaaggcacctagagaggaagtacttggtcagggaggccgagaccacagcgacctcggtcatgtagacgcaggggggcctgctgaggattggcctcgggaccaaaggctgcccctgaggcacaggtgcaggcagagcgacacagacagagcttcagggaactattagaagtctgcactgatggtaaggcagggacgccgaaatgagcgagcctgtctgcgtgcagagaggctggctcagagtgcagagtgcagggcctgcaggctgggtgctgtctctcacacagtggctcggcctgaaggggaatgggcacaagcacccacccgcatccctgccacaaatgcagcttcagagccaccaatgcacacactgaggtgggtactgggtcagcctgtgccccaaggccagggctcctgggaggagctctgaagaagggtgccaggctggcactcggtgaaagcatcccagaggagggagcattgaatctgaccccaggaatgggcatacggggtgccaggtgaagtagggtgtggggcaagagttttcaaggaagaggagcagcctgtgcgaaggcctggagacagaccggagcttgggggactcaagacagttttcggcacggtggaaatgcggagtgggcggcagggccctatgggagacaaggctttctttagttgtgggcagagctgggagtgagtgcacggtgacagaagcacagacaaaacaccagcaagtggacagaagtcaccggagtgccaggtttgcctcactttgaaaaaccctacacacaggcacagattatctctgagaggggacaggagtaggtgcttccataatgaagagaccacaaggatttcaaagcaagaaagtctctcttttcttgggacccttccaaaaggacccctcttggaatattgttagcaataagtttttgaaatcttcttatgagcctggcgctttgctgttttcgctcttaatcttttgataaacccacacagtagggattttcatccccaaatggaggctcagaagttccgtcaatatagagtccagggcaccaagcaagggagtgtcaggacaaaggtcgaaccaggtccatctgactctaaagcctatgcttttaaaaaacacgactaggatttattttttaaatcttgccttattaccacagggctatatgaacatcgcacatcattatagggggaaaggataagcagaaataagaaaataaaaagtccatattcccaccacccagagatgaccactgatagtgtattttcttgcagatatttatatactatgtatctcttccagataattatgtatgatttacatagttttgctaaaatgaaatagtactgcacatactgttttataacctttttttgtggggtggggaaacagaatcttgctctgttgctcaggctggagtgaagtggcaccatcttggctcactgcaacctccatctcctgggttaaagcaattctcctgtctcagcctcccgagtagctgggattacaggcacatgccatcacacctggctaatttttgtatttttagtacagatggggttttaccatgttggccaggctggtctcgaacttctgacctcagctgatccacccgcctcggcctcccaaagtgctgggattacaggcgtgagccaccacgccaggcctataacctgcatttttagttaacaatctttttccatatatataaattttttatctctttgaacacccagccggtattcaaattgccttaattgttccagaagtatcttttagagcttgtccaacccaatatcaaatctagcacatgtgcctcaggttttcatgtcccttttattttagcacagtgccttttaaatgacttggagagaccaagccagcagtcctgcagaatgttccacctggatttttctggctgttcatgatgtcttatgacaggttccatgatctcctgaatgctggaagttagatctgatggcttgatagatgcaagttcaacatggggctagaacacattacaggtagtgctgcaatttacactcagagagatgtaacatcctgttaattcccattcattaatgatgccgtcatgaccttctaattaggggaatgacaggtggatttttccatggttcagttgacatttacccctttatgaccaaaaggtcatctagatggcttactttggcaccacgcaaatgtctagattcttttgtaggaaaaccgttccttcaaccagggctgtttggtttcactgaaataaactcctatgggaaaggtttcattccattccctaataacctattttctaagtaaggagatggtttaagagccacttcagaggatgacaattgctcttcttcctagtacatcctgtgtttttctatctgctgccgtcccaggcatggggaccattcctgggtgtgacaggtcatgtgaccaaagtctccgctagcagttccacatcttgaggacaggccaaaccagtgacagatcccgagggagttctgaatgtgctgctgaagctgtattagaaggtgcactagctcaggaaagagggtctctccagacctcagctgaggggagcctcatgtcacctcccctggatgcagcttgacttggaactgagagtgaatgggacatgttctaaaggagcagtggactaggagtggggagtcctgccactgaaccagccctgggagcacctagatgctcatcaaatgatcaagaacaattaggtgggtgggacagacaggacccaggctgctggggaagaaggcaggctccaaggtctggaggagacagaggcgatgggggtggggcatgaggggagagggtgtgcccagggccttgcccccaacgtgaccttgctcctgtcccctgtctctatcccaagcagctgtatgtggccaccgtgctgcaagaaccggagttgaatctgacccccgcctcctccccagccaggcacacctatggcaccatgaacaaccagccggaagagggagaagaagagagtggtctgaggggctttgcgagggagctagactcggcccagttccaggaagggctggaactggagggccagaaccagtaccactgaccgggacctgaggcctccactggcgacttgttgaggggtcaggggagggcctggcaaggggaggcaggagggtggcctggacctccccactacctcctgcagactttgagaagcctacagtggagacatccaccaccccagccatgggccatacgggggtcctgacctgctgcccggctggaactggggctgctcggcagtgctgaaggagcctgggaagggatgggaggatacaggcaagcacatgtcttgagagaggtggctggagccccggcacagagactgaacgctggggtcccttcctgggaccaagatggagaaggtgttcctaagggaggagacagaaggaggctgccgaaggctctgtggggtcatcaccactctgcatcagctgcccttaaaaggagcttctgctgctgctcctcctcccagccccggcccattcctcccctgcagtctgaggaggcaaaggtatgtgcacggggcacattgacaggacacggaggaccacctcatcacagggttccctgcatggggatctgtaaagagaaagtttctgcacccaccagagcaagagccaactgaaagcgtagacctgagaagaggtaactcagccccttcctgctcctctgccctcatcagatgtccccaggagcagcagggcagaggcccttctttctattcttacaagggtagctagagcgtgatcactcagggctcatcaaatgagactcgtgtgcatttttcagaaggaaaccttggttagtccttgctgggtaacacaaagtggggtgagacgacagaagccgaattcatggaaggggggtcttctccccaaaactctgtgtggtgggaaaccagctatacctccccaagccccagggcctaaagagaagacccccgaagccaaagatgtggccacttaaaagcgtctcctgcctcctacccaactgagtgcctgggcccccagcttggccaagatgggcagtacgttagggtaagaaccccatgcttcaaacttaaggactgaccatcacctgcgtcccaagtaggacccttcctcccttctcggggctgcccctgcaccctgccttgaagaccacccaagcggcctccagtgtgggcctggtccagacattgcagatgcttcaaccgtgatgtcgccccaggcctgccaggggtgtggtggaggggaaggccacgtgctccagggagaagccctttctggagaagcaaggctgtcctcccagggctgccactaccagagacctgggggagctgaattccgaacagtgatggtgacactcagcacctttgccacagccggggggaaccggcttctgcctctgggatgggctctcatcaggaccaccgtgcagcccagccagggaggacatgagaagggccagtgggggcctcaatgaaccagaacaagccaagctgaatggggtctgtgtgctccagggccctcttcagccccctcccccaaaggtctgggtccctgccaccaacctactgaaggccggcccccggctcacctcacctgagcacctgcaccaggccccaggcacatggctgccctgaactcagatcacctagaccttgtccctgccccacctttgccccatcctagccccagaagctccaagcttcaccgcaggtgagaaattgtgctcaatgggcagaaactgctatacccccagggcatggcccacattttggcatgagggtgtctttccagagagcttgggttggctggagagaggctgtctttcccattccttgtccagctaggaataaaggggaaatggtcctagcctggcccctacacacccaggtcccacaggccccctccccactggaatttcaccaaccaacaaggggaaagtacgctgttacagcatagcggtcaggcccagcaggagcttggcacatgatggggaggtggccagctccaggccctgcccgaccccatcatgtgtatttggtgtatggggtgtgggggtcacaccagaagctggcctggggtctcttctttgctggacacagctccctggcccctgcccccagcccctgcagcccctgccggactgtggaagccacatatgggaaaagtcctggcagacaatgtggcgggatgactgggggcttctccctctgaacctgggtccagtgtagcctggctctgagagaaggtggtgagcatgtggagaaggttccatagtccactcttaggggaaccagcaaagcctcatggcagttggctccatctggacctcccatggtcactacaggatggtggagcagggggcatcttttagcctccccccgccaccacatccaggccctctcaggcacctcctgcctcagcccacacctgcctcacccattgcccccctccccccacctactgccatcccactcctctgccagccacttcccagccgccccaccccactccatccaccaaatcacctcctgacttaatcctttctggaaggagctgccgcccaggaaccggtattgcctagagcctccaggaggggccctcctcaggcctccagtggccccatgcccacctgcctgaccctccactgcccctggaagcaaagtgcctatcagcagcgttgcgtcctctggggcccccggtcgggggggagggggtgtgggctaaccttggccaccaccacaaaaggaatgtgccagaatgctgaaccttcttgttaatgctatgaccgtgccttgaataaacaagtcctcccaacctctcctggcccctgcctctctgcctgtgcatctgggccagcctggccttgctccgctgtgcagtggagagaactttctggtccttgagctacccaggaagccagcagggcagccccgaggagcagcagaagtctctggtgagtgctgagccccatgagcaggccactgggctaggctagtggccagacttcaaaacacacagatttcaggtgaggccccaggaagagcggcagacagggctcaggtctgcaagaggatgagggtgggggacttgggggatgggggaggtggaggagaggttgggtggaggagaggttggcacgagggaagtgtgtggggcagccaggtgggataagaaacacccgttagcaaaggctgttataactgtggcaaggagacaacagttccctgccctggcggacacatctcagggtcaggagactggttctgtcccttcctccagcagctgcatgacccaggctggtcacctcatccagacagtagggctgggaggacatgaggcggactgttctgcttcgtgactgagcagagcagatttgagggcagaagatgggaatcttgtgggtgtgttgagtagggggagacttcctcccgcagtgctccctatggggacagaggatgacagtctcagggtggctgcctaaggactctttcctgcgtcatcctcgctgggtcctctccgcaaacttctacggtccatccgtggccactgactcaaagtctaccaaggtgtgggcctgggcgtgggatcaagacccgtccacttgtcccctctccccctcaaaacaattattttccaagtcaagtcagcccttaaaatccacaagggctgcttcgcaggagagaagccatgaagactccctgactggacgggacggggctgcgccctgctgctgcctctcatggtcccctcccaggggccggcagctccagggtccccagatggcaggcctgggacactctgtggttcagcagacctttcgagggccttttatcaggcagagactgagaaagagacagaaaaacaagccgaagagggagggcggtctccccaaggatggaatgtcctccagggaggttagtgttggtcaatcctctctccactcagcaggccaggatggaccggaggcctgaaggtggatttacctgggctggggacgggactggggcagggcaagagggagccccaggaggctggctccactgggctgtgcccaagaaaggattggagcacgtgaccgagtgctgcgcagggaggaagcagcggggcctgagagtgccccatgcctctgcccagaaaccaagcctggggctgcacggggccccgccagggaagcctgaggcagctcacttctgtcctgaggaacctccttgctggccagattccaggtttctaggtctgctctgtggaaggccttgcagaggcgaggagagcctggtctatggggagacaggttcccaggctttctgaacagaggctgctttcagaacatctgacagtccctcggcctggacaagcggcagcccggcagctctcagcctcaattcccaaggttctccagcccagctgcaaaggagagtcactctcaatgtccaggccccatccctgaaaaaccaaaatttctcaggtggggcccagtaccctgtattttacaaaagtcccccaggtgattccagtgtgcagggaggggtgagtggataaggaaaacagtcccaacctcaggcactgcatgccctgggtggcctcagcatctcaccatcgccagcttagaaatgacaactccctagctcaggcacgcttctgccatctttatcttcttttgcaataagtatgagtaccatgtgggcccgagggccacacaccaggtgtcaggggcacttctggctaccttgtcatcttcagcaagggttcaaagactgtccctcttccctcccctccaaacacagagcccagtggcttccatgaccgcctgcccatttccgtgcaatagaacgtgacaagtgcagtaaacaaataggcctacataatggggtgtcagggagagacaaagccggataggggcaaggggtgcctgtaggtggggagaggatgctttgcactagagaggccagcacaagctctgtgggggtgagacatgagagccagcaaagggtctgtgggcacacatgcggagcccaaagaaccaggcagagtgagcgaggggaggagagggtggggcgaggtctgagtgggcaacaggctgtgcaggccacgctgggactccaagtttcactcatcatctgagaaactatgggaggattctgggtaggagtatgatccccttatgtgtttgttttccaggtttttttgttgtggtggtggtggtaaagtacacataatcatattcaccatcttaaccatttatgggttttttgtttgtttgttttgttgttgttgttgagacagagtcttgctctgtcacccaggctggagtgcaatggcgtgatctgggtgcagtgcaacctccgcctcccaggttcaagcaattctccttcttcagcctcccaagtagctgggattacaggcatatgccatcatcatttttgtattttttagtagagatggggtttcaccatattggccaggctggtctcgaactcctgacctcaagcaatccgcccaccttggcctcccaaagtgctaggattataggcgtgagccaccgcgcccggccaccatcttaaccatttgtaactgtcctgttcagtggcatgaaatacattcgtaatgtgcaaccattaccaccagccatcctccacaactctttatcttgcaaaactgagactgtatacccataatcaataattcctcattccctcctccccttagcccctggcaaccacccatgtaactcttatgtgctgaaatggtcactgtcaccagggtaggacaagtagaagcagaaagcccagctggggccaggtgtggtggtgcacacctgtaatcccagcattttgggaggctgaggtgagaggattacttggggccaggggcttgagaccagcctgggcaacaaagcaagaccctatctccacaaaaattttaaaaattagctgggcatggtggcatgcacctggagtcccaactactcgggagactgaggcaggaggattccttgaacccaggatttcaaggctgcagtgagcaatgatcatgccaccacacttcagcctgggcaacagagtgagatcctgtctaaaaaaaaaaaaaaaaaaagcccagttgggactgtgtcagaggcattcaggagagagaatatggtagcttgcaccaggatagggagtgaataaagaagcagttaaacttggaacagaggttgaggattcatggatgattagatgtggggtctgagggaaagcaggaacgcaaggatgactcccagatcttcagcatgaacaactcagcacactctggtttgaggtggagaaagctgggaagaaaaaggccaagggaaaccccaagagttccatcttgagtgtgttctggttaagatgctatgtggggatgtcaagaaggtggctagatacaggagtcgggctggagatgtcatcagcacctgggtggtgattaaagcatgggactggctgagactttgatgggagcaggtgcaggtgaggaggtctgagggctgagccagcacaaagagatgggaggagaaccggcaaggaaaaccaggagggactcaaaaaggaaggagggtgtccccagctctaaccacgcttggcagtaaatgcggtgcatagaggaataagtcaaaagatgccacgaagcagcttcagccaagtggagaatgctgaacaggccattagacaaatgacccacttctcccacacagcaatggtgaggggaaatggcaagaggggccaggccaaagtgaaagagtgaagagacacaatcaaatgcgaagtgtgcatcctgagttgaacaaaccaactgcagagagacgtctgggaaatctacacgtggatgaatgtgggccatcagggaatttgaattaggtgatgatgagaagataccgttcatcttgttagatgtattgatggcgtggcttcatatgtgaaataaagtgccagctagaaattcatatggaagaatttacaggtaaaagaacatgaagtcttggatttgctttaaaactctccagcaaaaacaaagaaacaaaaacaaaaatgggaggggggtgtggttgggggaagaggtgcatggagattccctcatctcttgattcttgtgtatgttaacatttttccataataaaaagtgtaaaaataaaggcatgaccaactttttcgagtgctgctgagcaggagaggaagataaggactaagatgtgactctacatctggcaagatgagggtggttggtgaccttgactgtagtagattgaaagtgggggcaaagcctggttgaagcaggttcccatcctcccataagaagtgaggagatgaaaacagcaaggaaagactgctctttcgaagggttttgctatcaaaggaagaaaagaaccaaaggggtagctggagaggaaaggaagtgaggggttgttctttgtataggaggggagatgtgggctgatagaggagggatgcaggagagagggctgagcccttgagcagaggaggaggtaagggatactctcccctgatacagacgtgcgtgcatacacgcacacgtgcacacacacatgcatacacacgcgtgcacacacaccagtgcatgcccatgcacacacgcactcacacctaagtagaagagtggctttcaaaaaaggtgaaagcatccatgcttaggatgactcagacacaggtcagaggagggcattagacctttccaaagccaggccacctagagagctgtgggccagacatggacacctgagcctgacccattaataggtcacacagcagatgaggccctcactcactgcagcctgtagggctccagaaaatgctctgggcaccacagcggccaaggcgttcctaacatgctgcagacccagtgcctgcagtcacatagcctggcaggcctggcatctgagcttaaagaaaatgaggccccatctgggagctggcaaggccccgtgggcatctgctacattcagtcttggctgagaaactggaagcccagggcgaggacagccagcccaggcacaggccttgcagccatgcgtgggcttcgggcccgccgccgaggctggaacacatggaggtaaccccaaacctgctccaatcatgcctactcaacacagcttctcttccccacgtccctggctggctttctagcccacagcctgtggggtcccaagcccccgaccaatgacctgcttcagaccatggatcagtgcgggtatgggtttaactaaccccaaaatgtgtaatggcataaacacaagagaagtttgtctctttcatataaaattcaaaatgggtgattctgattaataggcaccttcctccaagcagcgattcagggtcaggactcctttcacctgtggctctgccatgttcaacacgtggccctcatggtctctgtgaggtctgtatcacaccagcagaaggatgacagagcatggaggagcatgcaggagttttgggggaccaggcctcggagtggcacacacatctgcacggtccagcggccagagcccagtcacatgccccacctaattgcaagggtggctgcatgacatccagctgtgtgcccaggaggaagaagagctggtttgtggtctgccagccagtttgggccacagaccccacagatgtctgccactggcttcccagagcttcctcccaggcccctccctcctgttccacccactccagccttggcctccctgactccatcctcccatcctgtcctgagatccactgccctgcagcttcatctggcacaggccaagacccaagaaaagatcaggcccgagggtcagagaggcacacagaaccagtttatttctcatgaatttataggaccacagtcagcacagagcaaatggtacaagtgcagatggctggggtgagggcgggggcctctgctgctgccttctcttctctccagctgcctgagtactggcacacagcgggcagtgaatctgaggagctgtggcctcacagtcgctgcaggctgagccagaaaggagggccaggggaggtaagactcactcctgcaggagcgggttggtgatgaagggctgggggaactcgggtctctctgggatgaagtcacccctccttcctggccggtccccagcccctccccacctggccagctagctgggttcctgcagcagcggaatagtcagggagttcccagcagaagtgctgaatgagggaaagggaatgccgccaaaggaaaccgactctgtcagggcatctgcacagcccgcgagactcaaatgagacccattgagacccaggtcccccttcccttccctggcagttctgattctgctcccactgcctgggattccaccaagaaggctaaagctgctctttctctttatttgtgaaaagcaagccatcttggggcaggaaagcagtgaagggactgggcaggcaggacagaaggcgctggaagctcagccatctcacccccgccttggcctgcactcacctgaagaagcaggacagacagaagagccccatcctctcccacctccatacctttccagctcatcccacctctgccaccaaaacactcatcgcggggtcagagggagtgccaaaaaaggtaaaaagaaacgcaagaaagaggctactggggatgaggggacacccagaagccccttcctggaggaaaagccactccttctgcagctggactctaggatactgagacccagccctgccccatcacctctccagtgtggccaaggggacaaggaccaagatgcagggaagcttggggagcctgggctacaacagatacaggccaacagacagacacagatggatgggggctgccgggcggggtcgcctcttactcgccatcccagcctcgactcatggcctgcactacggccccgtagagttggctccaggcagcccgtgtggctggtgtgaaggcagggcccagacacttctccagcatgtagagcagagactcacccactgtctgcagaggcaaggggcaccttgtcacttccaaaggcagaaaggcactgctccattccacaggtgagaaaactgaggcctaggactgattagggctcctgggccttttttcctctcctgcattgagtccatgcttcctgagcagggtcctacccaaatccttgggtatcacattgtgtctacctttccctctaaatgtgaggctttatatcctcacatttttcacccctgtcttggtcttgcaaccaccccatgagtggggccaagacattgcctgggacctcccagcttagaccaaaccaagtcattgctcccagacttgagtttcctcatctgcaaggcagcaatgatggggttaagagcctgggctctggagccagatagacctgagtacagattctgactccacccttcatcagctgggtgaccttgggtaagttatgtaacctctctgagcctcagctgcttcatcagtgatacagggaaagtagaagctccaactcctgggcctgttgggatgattaaatgggataatccagaaaaagctcttagcacagcatctgtatacaggaaacctacaatgataataggccaggtgcagtagctcacgcctataatcccagcactttaggaggctgaggtgggcagaccacttgagcccaggagtttgagaccagcctggtaaacatgggaaaactccatctctaccaaaaatacaaaaattagctgggcatggtggtgcatgcctgtagtcccagctatgagggaggctgaggtgggaggatcacttgagcctgggaggttgaggctgcagtgagctgtgatcacatcactgtactccagcctaggcgacagagcaagattctgtccccagaataaataagtaagtaaataaataaataaagataatggctctcatttgccattattactcataataaaataaggtttatttatctcacaaatattaactgaatatccactgtagccctggtagatcaggcactatgctggtgctggggatggagaggaggacaagaccaacacagctccttcctcaaggtgctcaccatctggcaaggtgactggactgtgtggtgtactgtcatatcagtcgcccccagtgggctacacctcaaggattcatgcccttgagtagggtcctcccacattgacactgggcttatccatgtgagtggctttggccaatgggacattagcaaaagtgatgcaagcagaggctttataggcactttcacactggggcttgtcctctaaaaactcccccttggaactcagctgctattctataaagaagctcagctagactagtgaatgacaacaaatcacagggacagagctcaaaggctgacaggccttggacattctagcctcagttgagctcccagctaaacataacacacaagtaactccagctacaccatgtggagcagaagagctgcccagctgagcccagccatgagaaatcggaaagcattgtcatagttctagggttgtttgatacatagcaatagaaaattgagcagaccagctgatcccaaaagcttgttaatttttatggttttaaaagaagccatatcagaaaagagaacttggaagctcagagaggtcaagcccatgtcagggccacacagcaggtaacagatgcaggcccgcagccctggttatctaaggatatgggaatgggagagagaacaggtggcaaggggaggtctgggagagagaagtggccccaggccaggagctctggagagagtcagagctcctttacccaccgagaaggagctgagcttcacacccactgcccggtgcttcctgcccaggctggcaaggtactcctccagtgaggacaggtcttccacattggtcactgcagcatcaatcacgagcatcacctgccaaggccaaggcagcagtgaaacagagaggccagagcagccccatctgctcacaatcacagcccaaggcatgagggtcccaaagcaagagaggccagtaggaccctcagttctccaagatcaggggtcaaaggcagcctgtgtctactacatgtagggggcacccgatacgtggtggccaaactactaatgttatacccatgaaggaagcctctctcctctgagaaattcacatctctaaacacacctactggagagtgttgtctgctgggacaaggagaaactgaggccctttgagaatcatgagattctaagaaaatctcagcctgattttcataggcagatagttcccaattaccaggatctgtgctaacacaacctatgggagccagaggacaaaggcaatgacacaggctgggaccagctctctgaacgcagggtaggggaagaggctgattctgatgtcccagaccaatccagcccagagggaaaggagctgtaccctgcttgggggaactggaagggagtaagactagacctggggcagaaagtcattttctccattctccaccagggaggtgctctgctggatcccagaggtcacagcagctctgcctccctctcaccttcctgatgtggtccaggaactcaggcgaggagagacagtcctctgggctggagaactggcggcagttgtactggaagaggggcagcaggtcaggctccagggcaaacagcctgtgggagtgaggcccaggtgttagccctggggtgtgagctcctgcaagccccagcaagcctggctgtcctgcagtcagcgggcgggggtgccaagccaggtctcagctgcaaaccacagctgactctcccacctggcactgctcccccgccagcttcggtagtgccctcctcctcatgccttctactggctctgggcagcatcctagaaagggcaaatgtgtcccagggcctctggtaagcaggggtccctcggtgaatagctgaggggtgtgatttgggacaggaagaggtccccaaacaggaaacctggagttacgttgtgtggagaggaaagccctttctctctctctctctctctctctctctctctctctctctctctctccctctccctctccccccccccccccccccctgcgctgagtactttccgtgtggttaacttttaactgtattcctcactgtcctaagcagtgggtacaactgttatcccagttttatagaggagaaaacagaagcccggggaggctagaactcgcctaaggtcacacagcttggatgtagtgcagccacagcgggtgcctgagaaaaaagtgagctggggggagtccggaggcagaagcagaggccctcctcggcatttgggaggtctcaccgggtaactgaatgttttccccttttgtcttgggggtggttttgcggaagcctgggtagaagttctggactgtccaagggtgccaaggataggtaacaccacggtgagggaagcagtgcccggttggtgatagcggaagggttaccaaaactgcgagctgaggttggagactggccttcccttcccacccggcctgcacaccccccacccctctcccctgcggtgaggctcccgcatctgtcaccccttccccggctgctctctggctctttcctcggaaaggtttgtcttgttggttgtcagggatccacacacctggagccagaccgctcacacgcgggcgcaggagctcgccccacacatctcccttccccggctctcggggcaccccagtaccctgataccggcagcggggtgcacccctgcagtcgctacctaaggaagacgcaggaggcacaaggcggggtggaggcgccgcgcagggacggaggtccacccgcccagatgtggggagatccgcgggaggggatcccgcccggcccggtgagccccgctgggagagtggtgtgcggcgctggttggcaacaggcgcccacggtcgagagagaggcagaggggctgtgccacccgtcgccgcgccccgctcctctggcgcacatctggcaggcgccccagcgccccggcagcggccagttttccctccttcggggccggtcctgccgcgtgacccctttcccgccgaggcagcctccacccgcatccccgggcgctcgtgtagccctcacctggcaaacaggacggtgccgtgctccagcgggctgcggctcactgcccgccagctctgccggatcagctcgggctccgggcgctccatgctgtcccggggacgcggagcgcggggctgggaccctcagggctcgggtgccgtcaccgcacgtgccgcgccatctcctccgcgacgcggtcccctccgcccctcgtacgccccccgtgcctccgcccggcgggggccgcagccgctccttccctggcgcgggagagaaaaggcgcgcggccagtcgtaggtggagacaccccagctgtgcttccggggaccccgcttggccgctgcgccctgcgccccgcagccgccagagccgccccaccccgcgacgcctgggctgggcgctttaaagccgccacggcccccgccccctccaggccagcaaggcgcgcgctccctccgccagccgctatggtggcctgggaaaggcccggcctgcagaacgtaactgacatcgcggaggctctctgggcctcagtttctcctcccgagccccgagggcactgtgttgaatttggtcgcctcaggtaggcgctgcatgcgccccctctccacaggcccctcaactcacgcattgccagaggcatttgagtttgccacccacctggcctgcaggtcaggcctggggaggcggcctaggggcctagttctcggtctgactagggcaccagcacacgttgggggccaccagggctttcagccgtagggacagggccaagaccacagccattcccagccaggcctgggtttttttgagactccatctttagaaagccgtgagatccagttctaatcccagctctgcttggccagggtggaatcttgagggagttcagctctaacattctaccgttccatgatttaattttaattttaattttaatttttcacctcttccctccctgggccttccccacttccatgatttttcatctttttgtttgtttgtttgagacggagtctcactctgtcgcccaggctggagtgcaatagcgtgatctcggctcactgcaagctccgcctcccgggttcacgccattctcctgcctcagcctcccgagtagctgggactacaggcgcccgccaccacgccaggctgattttttgtattttgagtagagacggggtttcaccgtgttagacaggatggtctcgatctcctgacctcatgatccgcccacctcggcctcccaaagtgctggggattacaggcgtgaaccactgcgcccggccttttttttttttttttaacggaagtactgtttaattttttcaatagaagttcagataatagaatccatgctccccactcagggtgtgcaattggccacctgccaattacaactaaacttttctctttcaagcagaaagttcctcaagccccagcccagtgctggtggcccaggtttgggagagcaagcccgttttcacctttatttctctctcattattccctcaggggtctccgagcctatctcctctgtctgtccacgcctctctggccctgtttcctcagttgtgcagcaaaggggttgggtggtgaggtctctgggaccttttagtccacctcctttagttccatgggtagaaggtgggtgttcttgagcccctggttatgaacagctggggctccatgcccagccctgtgctagacatggagtggcgagtcctggtctttaaaatttctccttctggccctgaatcagaactgagtgcctcagcagaacttttctttcctactcctagccatgccccaggaaatcatctagctgttctccctcttccaaggactcaggagtttgtggtaacccctattctatttcccatttcctcacaaatctctgggctggagcaggagagcaaggctataaggcagcctggaaaagctggtgtcctagggtccaagaggtctccaagcaagaacacaaagtgattggggctgaaggaacaagacgtgactaaacttccagcttggggtcccgtggacctgcagccaggtgcagcaggtcacagggcaaggacacgtgtcattggtgaccttcactattcagtgcccagatgctcagtgctctgtgcaggccacctggctggtctcaggtaccccactctacccagctcacgcttcttgccagcaatctatacttaggacccatcttgcttcctctctcctctggccagggtctggagtctgatgaggtagtgggagttaacggccctagctagtaagtagagtcagtactcaaaccatggcttcactctttgtcttcctagagccaggagatatgtgctaagataagccaaggtaagtgcactctatccctgctcccttcaagaaaggcctgagaatctggatgggcctaagcgatgagagtgatgtattcccatcagtagaccaagggtccaagcccacatttgaggggctcagtaaaagtcacaggagtctcctccctgtgggtcatccgcccaggaggtaagaacctagaggagaattcaagtactgtcccagagccagtgctggtcattgaggttcatgtatcattaataatacagagctggcatttatgtctagacagtgttccgggcaccttacttcatttcctcttttcatcctcacaataactacgaagtaggtgctatttatcataccctcgttttacagctgaggaaatggaggcaaagaggttaagtaactagcccaagctcacataggtaataagcggtggggccaggatttgacctcaggtctctctggcccatcctgtaggcctccatgcctcccttgctttaatgggctgtggccaagagccccagccataattcagaccaagccatggtcactgggtctggttcagcggtgtgctggagccagctttcatatggctttcaagaaccaactgtatgcatctctttccaacttctcattcagtgacatcaagttggtagcttaaaaaagaacatgttgggaatatttacaccatggaaattggcaaatgctatacacaccagtttttcctcccagaacacctgttgttaaacatctaccagcacacactgatctgggtgcacctgggggagccaggaaaacctgggccctagatgagcggctgctgatgcattaagcagaaggcccacgggaaggtgctgcgtcagggacctcgggctgagtgctcaggccttctccccagggtatctagggctgcagctgttctgggaaggtgcctctagtcccaggacaagactagagaggcagaaaaacccaaacttggcactgagtcctggctctactatttacttgttgtgggaccttaagacaagtcatttaatctctcatgggtagaatgggaacaaaaacatcattgacttcactgggcctttatgaggattaaatgtcagagatgtgttgagactttgtaaactaagctgtgccactcaaggaagagtgacttggccccttcctaaactgcctgtcgtaggcatgttccacctcctgaagatccacatgcccctctctccccaccagcccctaccagagggtggctaggcagcccagaagccccccagttccacagcacagtgctactcccctcccccatcctctgtccaacactcaggtcagctcctgctgccttcagctcctaagcatcactcctgataacaggagacacctgtcaagatggggacctctgttaggcagaatggcaagttgctacagcactgggatactcggctgtctgggaaggggacaacttcttcttgcactcctttctatgccatgtgaacaggttaaaagaggacaaatcagaggtccagcttcctacttattttggaatcagtttaaatataccaaaatgacgaccaacattactcaagtaactgtacacatggggagatccaaatgcctcctggagtaatcaggctcacctgcccagcccaggtcttctgctggaattagatcagcctcagacatgacacacggggtggttcctgcactcaaaacattcttctcagggaggcctttctgggagcagagggcaagtcggattcaattaagtacaaggacaacaaggcattcaaaacaagtgttatttattataaaatcagtggcttctgattagaagactttttttttttaaaccaaataggctcaagaagctggctggaggttgaattggctgacgaacatcttcttcctccaccagcagtttgtgggacacatcacgtttctgccaagtgctacagctgaagcccatattcatagaagcaccctgacagcccttctccagcaacttccagaaaacagaacctgagcactcaaagctgcatcagcccatgtggccttgctcccagagaagcatctgccagtttgggcatggaggaacagaaagtgggcagggaattctccttggctccttagaaggcagtgggagcccagggaagcgttcggccccagtgcagcctaattgggagggagggatgggtagaggctggctgggcttctccttcctcaccctcatgcaaggtggctgcccctctggctccttcagagctcttcccttccaagttcctactgagaaataagaaggcacaaaggaaaatcagccacctcctggaggtcactgtgggccacctgctttgctaagagccaagcacagacccctgcattctccctgcaggagagcccacccggctcagaagaaagcaattccgcctgtggggaggagaggaagggaggggaggggaggacacacggtgaggtggaagcagcgagcagagcttctccatccctcctctccttccctgccagaaatgcaattaagcaagtggcccagactcagccgcacagacagcgcttcctgctgggggaagtcaaaagggctgtagcagtgggaaagggaggtcatcgggccccagatctaattaaccaacctgccttgcttttgacgttgctgcatttcctctattaacattaatgatggttggtctgaatgcccaagcatggccagaagcttccctccccaccacccagtaggtagcacagcctgtccctgggaccaatatccagtctccgtggcaaccgcctcctgaagatgctttaaagagatctgaccctgtcagagttgttgggagcttcagaggagggaaaatggagtgtggcggattcatcattaaatattgaagcatcaaagtcctctgagacaaaagaaatattttgtcatgcaccaggaaggtggaggcaggcttaagggctggccttgggtggtttggttctaccacagggttttcttcatcccttttggggaggaagtggaaggggcagctctgagcttcttgtttgagctgcagagtggtagacgcaggaagctggcatgcatttctaggtgccatgggtcttcactgctgaagcagtgacagagagaaagggaattgcccacggagtgagggaggggtgagcagaggaggactgcagaagtgacactgggaaagctcagcaggtgacaggaacattagtctggagaggccagagtccccacatcccagcaccacgcagattccctgccctgtctctcatctaccttgggcgctaagcaaggttcccatgggctctcccagcagccaggagaatgcatctgccttgccctccaggccaggctagatgcacttggagagacctggcctctggcacacagggcctgggaacactgagcagcccaggataggacatcgttcctcccgagtgtcacagtgtgacaatcccaaaaaacgaggaaccaagggctaaggcaggctgacgctccggagtccgctgctctctgtgcgtcacaggcaggaagtccagctacctgcagccactggggggcatggtgggagccaggccctccagctcggggcggcgcgccttcctccacgctggattcatttgtttgtgggagggagggcagcacaactttgacagtcccatctgctctgcctttggtgacatcccaaggtgaggtcagtattctctgccctcaaggccctctcagaggtctgagaatttttgatggatcttacaaaccaaaaccaaagaaatccaacagaaaaaaataccagaaaatattactatagcctggactattttagagtttatgacactcagctgtccagttacacggtctgtattccacagggatatggacaacatgccctcacatacacacacgcgcacccactcccaccctctggcacccatcctcccctgcgctgtgcacgagggagcagcccaagaggcgctgtcctctccgtggtgctgtggacggagctgcggctctctcccggctctctccaatgctgggttccattccagctgcactcccagagctgggtcctggtgagcagcagaattcttcgggctccttaggcagcttcctcatggccggatggtccagtactgcttcccagctggctctcctgggaagttcctggacccaggctggaatctttgcagtggcctcaaaagtcccatgagtccagccaccttagtcctgccattggactttgggggtcctgggccaggggaccaaccatcccgtaagccagagggtggaagaggtagaagctgtgagagagaaccagtaggaggcagttggcacccccagtgcctcagctgaggggctttgaattccattcctcctgctggagctccagagaaattccccatcgccaagcccggttctctttcacggccttgtctgtctgagtcccactggggcacactgtagctggagagcttagtagatgctgactcaatgacaatcatggaaagggctcttcccaagaggcccaggagggcaacccttctaggggtcttgtcatgggctatttggccaggggtgtttgtcaacatgtgaatgtaaccctcttaggcaggcatgtgctcacaggccacaggcccagcaccaaggccagggactggggaagcggggagccttccaaacaactctccctttcagccactcagccacacacttcccattcccacccttcccaccccacccgtcgagagctcttccggcagggggccacagtgactaaagaggggtgccctgtcccccattgccccccggttcccccctccctcacccggagagctgttctgacagggggccatggtgactaaagaggggttccctgccccccattcccacactccccctctgagagctgttctggcacagagtcactgtcactagaggggtacccttccaggtgcgctgggatggcacaaaagctgaaccaccggcagaaggggaaaaggcagagttaagccctgcttctcctacctggctgcacattaggatcacctgggggactctggaaaccacggccccacctgggcttgggtgacgcagaacctccaggcatgggcactggtggtgttaaaagcaccgcaggggattctcgaatgcatcagggctgaggcactgctgagcccacactgggagggcatgtgaggtgcagagatgctcacctgtaggcagttcccaggagcaggctcaggattcccgccacatgtatgcccctcgccaggggccatgaggccaagccccaggcacagagccgcaggagggtgtcccacagaatgcctagaggagaggagagaaacctggagtcagccaggcagggggtgacttctgggctacagaagaaggaggcactccaagtcaaggagcagagagtcactcccagcactgctgccccacagtggcctcccgtcaaggagcagagtcactcccagcactgctgcccaacagtggcccgccctccacctgctctgtctcccaagtccaggtgggtggcactgacctgtcaacatgcttgagaagagcatggctgggaagtagtggtggaagtagaggacccggcccatcaggaaaaacgggaagtaatggagtgtccagccgagcaggacctggccgcctcctcgaagcaggacctgggacaaccctgggcccaagcagcacagcccagtcagaagacaaggagcgggcagagattccaggctctggtccagctctgccccttccttgctgtgtgaccttgaatatgtcatatcacctcattggaccaacccaaaccacgctacagaaactggagaggagcagctggggctcgagagctctggtcagggcccagcctagtgaggcctgggcaccaatggcaggtgcaccaagcaccagcaggaggcagcccagcctctaaagaaacccttctgcgcctgcagacagcttcactccctacttccacctcccacatctttgctgccacacagatctttgcagcggcagacaggcgctaaggtgaggttacaggtgaggatggagtgaggaggtgtctgggactatgactgttcagacagagagctgcagaggcaaaagggcctgtgtgactgtctcaggtgctgtggcccatggtctggcagccaaagttaccaagaacagcactgggatgggaactcaataaccctggaggctcctctctagcccatgagaggacagggccatggaacaaggaggtggcagaaaagatgggcagctctgtacacagcatggggctaaaagtgagggctgtggagtcagattgcacgggtttgagcctcagctctatcacttactagctgtatgtcctggggcaagtttcttaatctcatggttccttggtttcctaatccataaaatgggggtcataatagccaacgctctagtgttgttgggaggaagtaaagtgtttaacacagcactgggtacttgggggttgttacctttcaaaagcaaaggataagggaaggtgtggggtggtaaacgcaaaggatggcccatcagcaggcagccggccctccccaggggtgcaggtgccctgctgccgccaggtcaggggagggagagcccagaggacctgacctgcaacctccgctggcagccgtgcccctctctgcatggctacagcaatgatgctccctgagaggaggtagagggcgatgctcaacagattcagccaccaaaccacctgtgcagaaatgggaatgggcagatgagaacgcagccactctccacgggcaagtgctccagggcctgagccgggaatgtttaggcactcaccgggttgccaagcagatagactcggaaatctgtgtcattgacccctgagaagcgtaggccctgtggaatagagaccaccctgctgacccaggcccagcccatcctcggccacacccattagggggaggaagatggtcaccttccacagacagggagcctggacacgaacctcaggctggcaaattctacacgagctctctgggaagcagggtcagaattagggcagaaaacagatactcccacctctggccaacccatcccaggaggcccctcgccctgccgccctagtacacccacccccgcctccaccggtctccctgctcttgttcttggctccatttcctgggaggagccccagccttggatcctacctgatagttgataggccagtgccagggtttggacgtgaactcattgtccttgggtttgaggccactgttcccctgcatgaaggtagcaaagaaagctagtcaagacagagatctagagggctgacagaaatgtggggcccaggtttttctgatatagggccaagcgccgagcagaaccttctctccttcccttcccttgcagggaagaatcaggcagctgctgtctgcctacctacgacacttgctttacttctcccagacaagcctccatctcccataaggggtccattccaaccttctagggaaaaagaagggaaagaggaaattgttccaatgggcacaaaatatatacccatctgccaagctaaggacaaggtgtgaaaatggtgggagagaggggatataaaatgaggcttacagccgggtgcagtggctcatgcctgtaaccccagcactttgggaggccgaggcgggtggatcacctgaggtcaggagttcaagaccagcctggccaacatggtaaaaccccgtctttactaaaaaatacaaaaaattagctgagcgtagcggtgggtgcctgtaatcccagccacttgggaggctgaggcaggagaaccacttgaacccaagaggcggaggttgcagtgagctgagatcatgccattgcactccaacctaggcaaaaagaccaagactcagtctcaaaataaataaataaataaataaataaataaataaataataaggcttacttatttgttcccttcaggggccaatttcaaacagaaaagcagaaactctcatgcgtgcctagacttggaagaggttgctttagcttagtgcttctccaccttttttttccactactgcccctctaccaggagcctttgtagacaagtttctccctaaacacactccatgacattttaatactttatactgtacatcttacttgtgctttatacataaaaaattagatattttgccctccaagaacacatttcatctattgggagagaaatcaaccctaatgcatgctttggtttgaaggacccagactcagcctccctaatccagcagccaagaacatctgctaacctttctctacagggcaaaccaggtctttgctaaaacaggaaggagtagggtcaggatccaggatattaaccactaggactgggttctgccttatcactgggacagactgaaaaggcatttccccagaaggggagtcagctgccatgacttaggccggagcttctccacctcagcactcccaacatttcgggctggatgagtctttgctgtgaggactgtcccgtgcattgcagagtgtttagcattcctggcctccactcactgaatgcccgtagcactcctaccctcaacccctcagtttcccagccaaaaatttctccacagatggccaaaagtcccgagaggcaaaatcaccctcaattaagaaccactggtatagcctaagaaagacccagaaagttcagtggactgccacccagtgccttatgaatccagttcagcaaggggctgggaatagtttacaggcctctacatggtggagaggttgtgcctccaaggtcaaaagtgcatccagggcatcagacacaaaggggacagctgcacggccccagcgtcactgcggccctttgaaggacctgggaatgaggaatgaatcattctggacccctgcggcagttgctgagggaaaccaattccttcaaattgtacagtttggtcccaaacccaaggactccagccagaactgtaccaagccaagggaatcttattcactacattaaactctgagaaatcctgctctgttgctaaactaaaagaggaaagaaaaatctgcaaccatcacaggcatatgtacttgtaagttgttctctatggctgaaatctggatgggctcattcctgtaactgcaccaggcaaggcagccttctcctccaggtcccgggccactactcagccagcggaagagccctgcccctgcagtttctatagtctggactcactgttttcatctctctcccctccctgactctttgttggctgaataagaaagctctcattacttcccttttcttctctgactctacttcttagataatgaaagacaaaatgaaactcgtagatttagtcttaaaatttgacccaggcccagaatgatattctgactgacaggcacatgttcaaaagagctatgtcatcaggccacagtgacagctacaagcagagagtcagaaaggaagtgacccagagatgcttaatgtcaacttatcacctcccaatgcgcaaaaatgacaaaatttgaatttttaaaatttaatctggtgaaataagtcaactatatgtactgagtactgcttacataatcacttccagggaagtccacttgacaatggcttaccaggggaaaaataacaagtgctacacctccctgcaatgctgtgggtagagtgataatcacatatctggcttgagatagtgattcttaaacattattcctgcagaacacaggttttccataagccagaataagggggtcttccactaaacagcaggactacagcaggggaaaatttaagctagtgagtagaattttctcaatttaaagatttcttctctgaatttttcttaaacctttgatgctacaactgctgtcagctactaatgatagagagtgcaaacaatgtcttagaaaaccttaaaaagaatcaatcatgccctgcctaagcagtttctgtccaggaatatgagtgggctcgtggctgggatttcatgctgcatataaacaacacactcaaattagctatccatcctaactgatcctgatttcatatgatggaatgaactatcagtatctcatgatcttcaaccaagagcactatgattttcaggggctctgccacttgggcagattcacaaatcacttagaggtgaaggagtgtagtggtaactagcagtaactctaaaagcctaccagcctggctctgagggctggatctacctcttacacttagctgtgtgaccctgggcaagttccctgacctctttgtatgtcagttccctctcctgtaactgggaatgatggcaacctccatatgattgtaataagtatcagatgagtatagtgcttagcgtagtgcctggcacatgagctgtacaagcagtcactggtatcaccatcatcaccaccatcctcattctgtggtgagggaaatgcctttgaggatcacagaaaaccgtagtaaagatgctttcaaattcctccacaagggggaatggatctgtagcatggcattgacttgtgatccaaattcatggctgcccaaaagctcttagagacgccatgaaatgagaaggggacacatacccggatcatgaccatgtgggattccagcaagatctcaggaaaactgggctgtagcacatccaggctgatgtttggcactaggggaaaaaaatgcaggagaaaagcctttgtcatacattctttcctcagtctgtccatggtgtccacattcccaccagaatccaaatgcagccttgctgacaagttcacaactgttgaggagacagaagaaagcttggcccaattcttgatcatttacttagctgtatgaagaactcatcaggcattctaagaaatgcaaaggaaatagacaacaaggtttcacctgcttggtgctccaacagctcccagcaccattgcttttcactgtggtactggctcaaatgctgctctcctattaggcataagggacagctgcacagcccccgagtcactgtggccctttgaagggcctgggaatgaggaataaatcattctggacgcctggagcagctgctgtcgggatggggaccaagtctgtctcctcgccaatatgtccacagggccccatgtggttcctggcatacttgataaagagttgttgaattagttgattagtgggtttggctagattaggtgggaagaagaacaaaatgaaggcacacataagcttgaggtgggtagtttaggaaaacagatgatgaatccaaatacttattgagttgaagctgacaacgcagtggaaatatcaaattggagcttgggtgtagagatgtggggcacagatcagggctgtggcagtcactttctataaaagcattggctggatatgtgggggggcgggggagcgactctacactgaggcataaagggaaagtagcagcttgctccaagcctggaggctggggaggtgcccatggtgcaggggagagaggagcccagaggaagacgagacagatggatctgcagatggccactggccactttagggagaggagtttacggagggagtggatgagaaggaaaaggagtatgctatgtaggtacagacaactcatagaaagagagtgttaacaaggaacaaacagcagcaagttgaagggatagcacagtttacaaacgcttacttttctaagataagggtttcttataaatgcttccctccagagccagcccagaaagtgacctcactcacacttgggattgatatggtcctccacattccagatggagttgagggtttctttcaggtatggggtgcaagtaacttccaactgctcccagcccctgtgaaaagcagaagtcacagatgtctctcagaagacgtgaaatccaccagagagtgacactgtcttctgctcttaaatccacaggctccttctcttttccacatggtggccattatttcttcatgttccatgttggacaactatcctaggatagtctagcatacagtattcccattttagaaaaagacatagacccagagagttattagcaccagccagatgtgaaaatgttgaactatcagaacacataaaacaccgaagctcccccggagttctgtgctccataatacacctgatatctactctccctccatctgccactaagaacaagcagacagcaggtgaacacaggaaaacaaaagcttctggcatactccttgtagagtgaaaggaaaatcaggaccctcgattgggacagcaaaaccctagagacttaccacttgggcagaacctttcccgaggagcccaggacacaacctgtgaccaaatggatgaagcgaattcgacttctcagcactttgatccggtttccaaatttcctgtttacgacctcaatccgccagaaatcatttgagtcccctgttccattctgccataaaagccaagaaaaaaatacaaagaaagtgaggggactttagagaaaacgtgtcagaaagggaaatggccacccagatgccaccatgttatgaaggtcaaagaccaaattaggctcaatgatagagatgggcaaggttacaagaaggccaaagaaatatcccaggtgattggcattgtcccaaaactcactattacaaccaaaaaacagtagtatgactcctggaaccagaagtccaggagtccaactcttcacttcatagaactagagttcaagttctaaatacctgtctttgcccttcaaccaaactcaagacatcactctgagccaacagaaacagatctgggccatttgcatccattaccttggctatctaggtattcactcatctaagccagaaaggtctggcctggctattgcactttggaaattaagacatgtatgtctaattcttctcagaagatgcccacaaagaagattagaatgttcacagtcttgacctagcacaatgtggaatgagcaaacagaaagagggctgggaaatccacctgaaggccagaatctgtatacagttttccactagtagtttttgtcttcagttactcccaaagccataagtactcatagagcttttatttattagctgcatctccttgaggtagtaaaatacaaaagctatggataatatccctctgcagaacagggaaatgatacttaaaaataaagctaatgagaatttgggatctggcaaaagataaacatacatgttgttcatctggggtcatattgtgggtccttggcttctatgtccaatgtgattttaaaagagatccaaatagtattcatatttgacatttattaagtatcagagcatgtaaatggcatggttattatgtgaggagagagatggagacaaacagacttcataggctgcttttcccagagcaggcctagccaaaaagtgcccaaatgttaagagagtccctgtgcagcctcttatcctcaggaacattccagaattctggggaggagatatcccaccacacagccctgagccaaggcccataacttttacgtcctactcacatccccgttgcttacttactatgccatagccggtgacctgatagtgcttccgggtcatgggggcctcatgatagtgactgtgcaagttccgggaagttctagaagttagaaaagagaagtgtcattatcctatagaaagatgatgtgcaacatttcttcttttaccaaggatgttcagagtcaactgtcaggataagaaaaattagaatctgaactattaaatccaacatatcaggaactggtttcctatttactcacaagaaatatcctgagaactggagaagagatgagcccaaaccaggagagacagatggtaggagcactggacggcatgccaagaaaggggctaactttaggtgctggcagggaggtggggggcgactttcacacatttagtagctttgaagcacttagcttgcctgacttaggaggcaggtttgaggagaggaaaaattaaaacttgtaatctgcatggcctgagctaggtaacctcctcactgccacttactctttctgctcccatcgccagatttttttaagtggacatctgtggaggatgagaggggtttaatttagcttttatttagttttatataacaactctcacttttatctggaacaaataataaatgttcattataaaatttctgaaaatttgcaaaagtaaaatttaattacaataaatttttattaatgacaaatgaaatttatttaataaaataaaaattttaagtattcaaaatccagctgactcaaaaaaaaaccatagctaattgcttctctctctgtctctgtctctctctctctctctctctctctctatatatatatatatatacccacacacatacacacctctgatttttaaaaatttgtatccgataattccagtctatgaaatgtttacggggctgctcctgctgtctgtcgtttcagcttgttcttgcacacagtgccctatttccttgtgtgctttgttacttttgggtgtgtactattgtcactaaaaaactatgggaacaaatgacaacgactttccccaaagagggcttacatttgcttttagccatgcacctaggagacacgaccaatctaggatcatgttcatttaaattcatgtcttggagattctgagatcacccaggcaacatgaatttgagctccaagttcatgtgaggatcaaatggtagttccaacttctcaggaactaaggacagttcaccacccaacccccaacacttagctgggtcctaaagtggacctgggcataagtggatagggcagatttacccttaccccaagcctttgggggttccaaatatggggaaggataacttaataaatttaccactttgggtgagcctaggtttgactttaaaacctcttctctcaagagacagccaaaagtcaagattgtgggatcaaagcaaaagtggcttcagtgtctcacttatttctctggattcctcatttcacttaggctttggcctggtaactctttaatatcttgtcagcctttttatgctcttaagaagtctttatattattccagcatttttagtcattttcagtgagaacactggttaaataagctagcttgccatattctcagaaacagactcctacgtctttctaaaggcagccacttaagaagaagctttgggagctgggtgtgatggctcatgcctgtaatagcaaccatttgggaggctgaagcgggaggatcgcttgagcccaggactctgaggccagcctgggtaacatagtgagactctgtctcaaaaaaaaacagcagcagcagctttcagcaactcaaattttcctctaggaaatgggaaattgaaaggtccccagaaggcaggcaaaggctggcctgcaatttcatcaccttcataaaatgcttctcccattctcgcactgtggccttgctccattgaccagagcctcatcaaaatctaacttctgtttacttcttaaaataactccctccccttggtgcccgtaccatttatttatccaaactgcaaattgacttactctttgtgttctagtcgaataatgtctccatgtcttacaaactccactgggaaggaagggtctaggggatctgccaaaaagaaacaagcattgatatccaaaatcactcaccaggctagtattaatcaagggcctactggtaaacagttatagtaccatgtggtatctgctagaggtactaaccaggtactctgagaccaaagaggaaagacccctaaattgcttcagggtattagagaagggtgtcccagagataatgctcgaaaagactcttaagggaaagggagaattttgtcaggtgaacaagcaggagaaaggcactagaagtgtgaaagaagaaaacttctggccgggcacagtggctcacgcctgtaatcctagccctttgggagaccgaggcgggcagaacacctgaggccaggaattcgagacaagcctggccaacatggtgaaaccccatctctactaaaaatacaaataatagccgggcgtggtggtgcacgcctgtagtcccagctactcgagaggctgaggcaggagaatcgcttgaacccgggaggcggaggttgcagtaagccgagattgcgccactgcattccagcctgggtgacagagcaagactctgtctccaaaaaaaaagaagaagaaaaactccttcgatgaatagcaaatgggtttcatactgtaagggtgggtggggtgggggagagtgggaacagatgaggctatgaacgagtgtggccagactgcatattccaggctggaatgtggcctttacccgatgaggcactgaagcccccactggagcttaagctgggaagctaaatagtaagactttagtagtaataacagccttctaaaaagtaattccatacaaatgaccacttgcccaactctcctcaaaatcaaataaaccctgacaatcttgccagcgagtatcttgtctctggcaataaacttgctaaatgtgaggtgaataatgatgaaatgattaaaggactacttctgtatcatctcaaaatcaagaccaatcaggatctagaaaggtgatgacatggaaaaggagctggcagtaatcatagcaacacagaatggatccttgcaaatttctgtcccaaacagtgagataccaacacactataaattgatcaaggtcaggaaagataaatttgccagtgcaaatcactggctctcaagagaatcagagaactcaaccgcagagacacccatttccatgctgcctgttagggtctcttaaaagcattaattagcaagatgacaaatcaactaagtcaatagggagggaggttttatttcatatgcatttggtggggaggggcatttatagccttcaagaacacaaagaccctagtctataaagctcccacaaaatccttaatcacttcgatgaaatgcaaccatcttaactcagaagtcacaatggaataacagactaggaatgttcaaagacttggttcatgaccacatgacggaagtaaaactggtcttccctcgtaactcctcactgtgatagaacactcacgtttggcctgctgaatcaatcaatatccattataaaagtatagaaacagactctgcccaatggtgtcgtaatttatcccactaaggagcaggatgtagaaagtggttgtatacgccacgtttctagcctacacagcaataagaggaggtggatttaggtgagcagctgcccatttctctacaaaggcctaggagcagctgagctgggataggctaagccaggtgggatttgctgaggagtcacagagatacctgtggcacaggactgtcagcagagatgacaggctcggaaggtgagtggaagatgccctctgttctcttagctgcagcagaggcacagcctgcaggtagctagctgtctgaccaaagaaaggaagatctggctctagctcttgctctgtcataaagccctgagagcctgataggtgtgcttcagagcgccttcacccaggccagttagaagcagatcagcaggcatcgagtcacatctcaggaattagcctagacaaattccagtcacaggactagtagcccctcagatcaactgactgactcaggccagggctgagcagtgggcaggattctatcttatcaagacgacttaagctgcaccacatgctagagtgtgcaatgtttggtgtgctctatgtaagaaatgagagcagcagccaggtgccctcagctggggccactcaccagcccctagtggcatgctcaagtaacctctacttagattaaatctgggctccgctatctgtcttcaaaatgacagctctaagagcaagttcttacctgttttgctcaatgcttatcccctatgccaacaacagtgcttggaacacagtaggtgcttaataaataataattgaaaggataattgagataagtaaaggtgtcaaagatgctcagcaaagcccatctcaggatcattcttttgcaggcatgagaaatcttaaggagggctcagagggagtaacagcacaagaagcatcagtctctgaccacattacctgagtttgtgttatgtttcttgataatccacaggttgttgtagtccttgtgcaaataggtggtgacctgggtggggggtgggggcggagggaagaggaagcaggagggagaataccatcactatcagcacagctggccaaggacaatcaacctcaaaccaatgttgcttaagccaatttcagaatccccagccaccaacctgaggggccatgtttcccaatggggctcatatgtagcactggtgagtgagattctctccttccttctgcatttagaagctttgtcccacaagagcctttttgtttctttgtatctttctgcatcttgtcctaaaagttccatccagccttctagagggaggaaccatgaggccttatataactgactccaacacaaaaacagaatgaggatttaagtgcattttcaaagtaattaaggccgggtgtggtggctcatgcctgtaatcccagcactttgggaagccagagtgggcggatcacctgaggtcaggagtttgagatcagcctggccaacacggtgaaaccccgtctttactaaaaatacaaaaattagccgggcatggtacgcgcctgtaatcccaactactcaggaggctaaggcaggagaatcgcttgaacctaggaggcagaggttgcagtgagctgagatcgcgccactgcactacagcctgggcaacagagcaagactctatcttgggaaaaaaaaaagtaattaagatcatgcctcaaactttctaaatgaaaaattcatgctattatattttctataatgtggccaaatgaaacgaaaaagctccacagatatcctgtcctagaatttaactcacgttttatacaaaaaatctggaaacagtatgactgtctagtaatagaaaaatagttaacatgatagtatgtcctgggatagaatattatacagccataaaaaatgtttcagagcatttttttagcaacatgggaaaaggctcatgaaatgctgatgctgaaaatggctaccatttattaccaggcactgttctaagcattgggcaagtcttatctcatttaaccattattacagctctatgccataggtactatggttatccccacattacttacaaggaaactgaagttaagtaatttgctcaaggtcacacagcttatgcgttggggagacagaattcaaaccagggccgcaaaataaatgctcccaggatagagactatatacgtccaattatgccaattatgtagacaagtagagaactctcacaaatgagtttttataaccccaattggataaaatatgaccaatttatagtcatatgccacataaagacattttggtcaacaacaaactgcatatataatggttgccccataagattataataccatatttttactataccatttccatgtttagatatgtttaagttaatacaaatacttaccattgtgttccactgtgttccaactgcctgcagtattcagtacagtaacatgctatacaggtttgtagtctaggagcaatcagctataccatgtagcttaggtgtgtggtaggctggaccacctaggtttgtgtaagtacatactatgatgttcacccaacgatcaaatcacctaatgacctgtttctcagaaggtatccccccgatgcatgactgtacttacaaagagatttagaattagcatttaggggaaaaattattttgcttgcattatggctgcttcttttgagtggtatttgctttgttcctcaggaaaaaaaaattagggataatgttattaagaatatacaagaagctaaaaagttttggtgctcataaagaaattaaaatgaagtctacattcctgagaaaaagctcgatatcgtccatccagcctggatttgctcaaggaagttaaggttctatgatgctcgtgtgtgtactctgtgtagatgtgtggtaggagagcagtctttgtgtgtctgttttacaagagcaattatgattaaaattcctacaagaaaaattatttatttatcatgagtacagtccatggccccttttcccactgaaatgtttgttttgacaatggagatttttataccatgagatttcctaagaacacaagtatccaattatagcagaatgttgtacattaaaacattcagataaacacttaatcttctgggattacatgtagcttttgttttcttttttatacttttctacattttccaattttataaatgctatgctttaaaaacattctaaaatagagacctagacatgttaacaagacattaaactgcatggcaggaagggccactggagattatttagtccaatcccctcaatttacagatgaggaaacaggatgaaaggctaaaagatctggtcaatgacaaagccagacactttcgtcccttggcgcaatgcactttccctataccaccatcacgtttcacacctccacacatgggctctacgtacataacactagcttaacagagcctttcagagtttggcctttctctccctttgcacagtgtagatgttctggtcaccaggtctgtaactgtagtgtcttctacatgacacctgcagcaatttatcaacacatgagaacacagaacatctagttttctctgccctgggtgtacatgacttagaataatttggacagcttaaaaccaaaccaaaaatgcataatgcatgggcctcatcctagatcaattaaatcataatctctgcagtggagtccaggcatcagaatttttaaaaatctctccgttgattctaagtgcagccagggctgaaaaccactgggccagacatgaatggagaattaaggataagaaactgatactaaaatccaataccctgtaatatggtttggctttatgtccccacccaattctcatcttgtggctcctctaattcccacgtgttgtgggagggacccggtgggagatgattgagtcacgagtgaatgggtctcacaagatctgatggttttatttttttattttttgagatggagtctcactcttttgcctgggctggagtacagtggcgcaatctcagttcactgcaacctccacctccccggttcaagtgattctcctgcctcagtctcctgagtggctgggattactggcacgtgccatcaagcccgagtaatttttttgtatttttagtagagatggggtttcaccatgttggccaggctggtctcaaactcctgacctaaagtgatccgcccacctcggcataagccaccgcacctggccagagatctgatggtttttaaaaccatttttaaaatgggattttctctgcacaagctctctctttgcctgccgccatccacataaaatgtgacttgctcctccttgccttccaccggggttgtgaggcctccccagccatgtggaactttaagtccaattaaatctctttcttttgtaaattgcccagtctcaggtatgtctttatcagcagcatgaaattgcactaatacatactgagtcactttctagcaactaaaagggaaataaaaataaagcatttggagagagacaactttttgcaaagaacaaatctttgcaaagtaaagattccatgctttttgcctctgttcactgtcctttgtcataattattgcctccaaactggttccttgtgagctatcacatttccactaaagttacctttctaaactagagatctaatcataatcataataattttgattgcctccctaatgtctatggagcaaagtcaaatctactataacacaggcctctccccaatatggccccaccaacctcttcagcatcctgcttctccctctcaggcaccatccactgcagccacacaaacactccttaacatggacacagcatcgttcactcattcagatgatactcacatggctaatctttcataagcacttcacattgttatctcatttaatcctcacaactgccctttgatggagagaggtactactcattttccccaacttaaagaggaggatacaggctgggcgcggtggctcatgcctgtaatcccagcactttgggaggccgaggcaggtggatcatgaggtcaggagatcgagactatcctggctaacacggtgaaaccctgtctctactaaaaatacgaaaaattagccaggcgtggtggcgggtgcctgtagtcccagctactcgggaggctgaggcaggagaatggcgtgaacccgggaggcggagtttgcagtaagctgagatcacgccactgcactccagcctgggtgacagagcaagactccatctcaaaaaaaaaaaaaaaaaaaagaagaggatactgaagcacaagaagatgaacttgtccaaagtgacactctatatgaaagcaggcttcacaccccgatcatctagtctggttcccaggtctgtgttcataaataccacactttattcatcacccatcccatagcaggcaccgtgctaggcaattgagccttccaggagctagcaatcaagtaccaaagagacggcgggaagtaagcatgcacagttcaatatgagaaggtttaccacgtaggcatgtggaaggtgccaccaagcctctcatcagaggggcaccccacccagcaccatggagaggtgggacatggttgtcactaaagaacacctatgctgatgcctagagaagctggggttagccagagaaaacagaagggtgcagggctaggaagaatgtttcaagcagggcgaacaggatgagcaaaggataggaggcaagagagtgaactgtcatggcgaacagcattgctgccgtacaagtgcacaaaaggctcactgacctgctgctgacgggcaccaatgccctcggggtagaggtgcctgtgggagtgcagatagccgatggccatccggaggttcttcacagtgatcacagagccgtaggccaggtctgggaggaagggagacagcagaggggtgagctggcacagtgccagaggctgtccgtgcctgcgaggagcctcggaagccacagggctcactaaccctctgcgagactcccctgggccctggactgaagcccagctaccttctcactcccatggagccgactcaagacagagttcaccacagggcccacttactcccccgcctcctgagggcttcagaagaagcttgtgttaacactgtcattatcaaagcactacgtgtaacagcaaaagacgaaaaacaacttgtccttctcaaggtctccacatggattcaatggaataaagaaggaagtatcttctgtcttcgcctggaatgttctccaagatacagcattttgacaaaccatttttttcactctatatcctttcgtgccttttgaatctagtaccatatgaaataactgttcaatggtgttttgttttactctgaattaaaaaacaaaaaacacagaaaaccacttctcaagagcatcccctgctcctataggccctgagttattgagaaaccttttttccttaatactgtccttcttccaatccgctggaatgacctgctcctgtttttctttgttcattcagtggaccagaagaattacacactggatccaaaggtggaggaggcctgcctgtggccctggaagagccctgtctacaaggaagatggcttcacacactgacaagtataggacagtgggcaagtgccccacaaaggcgtgacaatgtgtgacatggtgggaatggtgggaactcggaacaggccaaattctctcccaaggattaaagagaggacgacttgatcgaagaggtgacagctgaactaggcctttaaataatgagcaggaatttgctaaactccacagctgtgttcttctgagttctcaggcaggccaacctcggcagccctgcacatggctgaccacctttatttcttgaaatgctctctgttcccacttctcgaccgcacactctctcaagggctgctcctccgcagtctcctctcctaattcctcctcctcttgcattccccagtgatctgacctcagctctattcttttcctctttctacagtttccttacaaatcacagctactgccacagcatcaattaccgttttacttgtctgattcctcctttgaaagcatcagccccaaatcccactggccccatggcaacaatttccccaagcagctcactatcaacccctctcgcgtggaattcagtatctgcccttccaacccaacttcttctcctgcttccctatttctcattcttcccagtctgggagagtccgctgtattttaggcactgtgcaaagtcctggaaagactaaaatgagtaagatgcagtctctgcctccaggaagcaatcacctgcactcaagtccttagtgacatctttcttcctctcttgctgtgtccagatctcccttgtatatgcccatttgccttaccctgtggctgccccaccatacccagctcaggttcctgcaatagcttcccagagggtttctcttgcctacaatcctgtcccctccccagccagcctcgactctcccacccatgtcatctccctatagcacagccttcctggcctcctggctgctcaaagacctccactaggtctccacggcctgttttaggaagtcaaatacctcatccagacacctcaaaccctcatagtctgggcccaacctaacttttcacatttatcttccagtagttttctgcatatacctgtgcctcaagttttactctgtcctcagctttgatcatgtcatccctcctgcctgagatgccctctcctctgttgaaagccacacattcttccagggcctgactccaaggcaacccacatcacgaacctctgatgcccttaaccgcccagcagccatgctccttcacgcctgtcaatccccagagctgtgctccctctttacgtacttaacgcttccagccacaccgtgtggagctcctctacaccaggctccatctctggagggtgagcacgcgctccactaccatctgtcatagatgaacgaatgcaacactcagaaagcggtgcgggaaaccaaaaactggctctgaagggcctggtgctgtcaccatattctctctgagtgaccttcccacagagctggcttggagagccaccaaggagaagtcattctttagggtcagagagcttgctgctcaggatgtcttcctctcctctgtcctgattcactctcgagtattttcaccagatctatctgggtctttctcccaccgtgccatcacaggctaaaataacccaaagccatcatatttgtcttttccaattcaactcccaggacacccctctgccttctacctttgtaatggcccagagacactcacgttcagggatggaagcattgtgcaggttgttccctgaaagccgggcctggaaggcagaactgaagaaaccgtcaccagggccactgtggggagaggaagagcagaagagagtcaagttaaaggagtgaaagtgtgatttcccaggagcgctgggaagagctctgctcagatagtttaaggaaagtagaatcagatcatgggacagaggtgggtgatggagttggagaaactggggtccaaatcccaactcagccacttactagctgtgcgaccttgggcaagataaccttgtttagccttagttcctcatttataaactagagatttaaagaaaccaagagaagtcacaagtgattctgattaaatgagataatgtgtacaaaatgcggaacacagttcctgattctcagtagctactcattaagtgggagctgttgccgccggagttactgttattgttacactcactcctactgcacatcttattgtggcctatccttgctaagtacaggggactctgtttagagataagggacaatttggctataacgaaaatagcttcttccttcaggttagggtgctggcctttctgagcccttagcatatacccaaaggatagaacatagcaggaaagaaacaggaaaaagcccctggggtccctcacctatcattttaaccacagacccagaaaatcatccgacccctccacaggcttaggagcaaaaggaaaaccagaagcaagatgctgcaaaggctctgtctgtaccttttactcagcaccatgaagtgaacagcaaaggtggctgtatagagagccaggggcagcactatgaggcacaggacacgagcagtcaggtgttttcccacagtcacctgcaaacagaggccagcgtggggtgctaggcatgtgagacctcattattccttaggcactatgcatgcattatatatagcttttaatatatcagtcataatcataaaaaatggccaagaggagagagaagaatatgtggaaaccctaagcctttctgtaacacccaccacccaagcactacacaagataaacatgggccagccctctgctacctctccaggctctacacccaaaaccccaggatgttactgtgccaaggacaaggcacctgcatctgcaacacagttgctcaccagtccgctccatgttccaggtacactaacctccttgaactttcccagtgcttcctctactgtcccagcccaacccatcacatggctaatggctccttatcttaacttcgcggcttccttccagaggccttcctggattgcctgggactggccgagtgcccttttctgtgctctcccagcactcctggctgactgtaactgcctgcttccttatttctctctctccattgaccacagagggtggggaccatattatattcatctgtatattccagcacctcacacacagtggctggatgatctttacacattttctgaataaatgaatgaatgaatgaataaacttgttaggagctggtttggaggtgatggagcagcaccacagcagagtgatggcctggggccaacctaacctggttgtgactcctagatacacctctcactccccgatggcctcggggaagtcattacctctgtaggttttgatttcctcatttgaaaatcagggtaataactccctacctcataggactattatgaggggtaaatgagataatgaaggtaaagcgtttcgcatagtgcctggcatagaatcagcccttaataaataataaactgtaaaggcccttactggcctccaaatatggagaccgtgggtcaggaaatgaaaattgtgagttcagaccgggctcggtggctcatgcctgtaatccccgcactttgggaggccaaggcgggcggatcacttgaggtcaggggtttgagaacaatctggccaacatggtagaaccgcatctctactaaaactacaaaaattagctgggcatggtggtatgtgcctgtaatcccagctacttgggaggctgaggcaaaagaatcactcgtacccaggaggcggaagttgcagtgagccaagatcggcccactgcactccagcctgggtaacagagtgaaactctatctcaaaaaaaaaaaaaagacagacattataaaacaaatgcaaaaagagacttccaagaatgttaatctatcctctcccttgaaccctatccagtcctcagccgggcccactccctgatgtcctgctgtctgcggaggttggggggtccagcccacctgggacccagaacacagccactctgccacctgcagtagagacagagaaggccaccagctcctactcagcaacatcagggagcaaaaacatttccacagcaaacccttgggtgctcaccaatgaaagactgaggtctccgaacaggtaccaaaggtctgcaatggtgttcagccccacttgaaggatgataaagaggccaacaaacttgacccctaaagcaccagcaagactaacgccagtcaggctgagccagaaccaccagggggcagagaagggcctgaaaatcaacaagacggagttcaatttggcagctggaaccaaagccaaacgcaagcgcagcaggggacagggcagttctcagacttggagcggctgtgctgtgccctgtcttgggggctcttagcctcaagggaccatggcgtggctccatggaggaggcggcctgtgaaacccctggaacggcaggaaaagcactgtctgagggcgcagggtattcttcaggggagagtgtccatagtgctcctggctaagtacagggctcagggtaagtgggggctccttcttcacaagtgaccagtcaggcaggagtaaaaggagaatccttaggtgcccctggactcaggcagccctctcctttgtgtcacctctgcccttgtcgaaggcagcatttaccgagtgcttactatgtatgcgtcacgcatcattccaagtacgatgcatatattaactcttctagccgtcactacagcacacagaggatcctgtcactaggtcctctttttgcacaggaggaaatcaagatacagagaggtggagtaatacagctagcaggcagtggggcacagttttaacccaggcaattgggtcaatgttagtgctcttaaccattttgctattcgtatagcacctagtactctacactatgattctctggctctctggctgcctcctctgccagagtgaatattccttaacagccaagcccaacagagctcagtacctccagctccccgcatagtacctggtacacagtatgtactcaagaaatggtagatggaagtggatgtggcataagcacaacaaccaaagccagagtgggctgagagtcactgatcaggtttgattagcacaatggagcttaatgagcctggctgtgcaaagttaacttccagaaaagcctacgaggggccaactcttctggtttgaatagaatgaatgacttattctactttctcagaagtagaaggatgatctggaaaagactattctgcaagtagaccggaccctccaagtcagctttagaactgaccaggacctggaaggatcctcttggctggtatggaccattcaagccaacctttacatatgctattcccatcattaggtcaggactggatgcaaccactgacgaaagggagatagtttccaggcagcatctaccctggtgccctcccttctaggacagagtatgtgaaggacagccctgtcccgggatttcctaaccagcactggttacaagaggtgggtggggaaagtattaggaccccccatgatatcccaaaacccctacccaattgtactccattgtaaacatgataataataatacgcttgaaaaagacaactgacattttctcggtcttgaatatggcaaaaataaaatcacctgtagaaaactttttaaaatctatttttatgatctaaaatggacaatctaagttaaaaaaacaaacaaaaagtatgcttgccttaaaatcagcttcaagacaagtctctgggcacccgccctggccctggccattacagaaattttggagttgccacagcttccaaccctcccctcccggggatggagtttctgacctgtcggcgcaagagttgtacttgaccatgctcagcatggcagccatgatgaagaacatcaggatggggtcaaggaggatgtactgggacagagtgaggcatcccgtgtctgaaaaacatgagctcgctggtgaaaaagcgaggtaagagaagggccccctgaaaaccaagcaccccagtagtaggaaacagtccctcttgccacttaattgagtgtaagcacttgtgcagtcaggactagagtcaacactgagtcatcagggaggtagaaggccacagctctgggagacatcaaagcccaatgacaagaagcagtaactcacactgcctctaggccctcaacccaagagaggatcatgtcattcgctccctcagaccagccctgagacaaggtgtcatcctcatttccaccatcaaaaagggagtcctaccactctgctcatgtaaccgcaaactatctacacctatgatagaatcttatcattttacatgaagtctctcttgggggtcgattctccagacagatggcagagtgatgttttttaatttaaatccttaaatctcattatgtcatgcccctgcttaaaccctccaatgtcttccaacctcactcaaagtaaaaagttctcatgacaactgccagagtctgtgcggtctccctacccatctaacctcatctcccaacaccctctgcctcactcactctgccctttccacgccagccttcttactgtgatttgaacccacagaggtccacaccagaactacagtacatgcacttccctctgcctgaatgctcttccctcagatccctgcagggcctgatcctttgtctcactcaggtctctgctcaaagctcccctctcagaagctctttcctgactatcctgtctaaaatagtactgatctccattattccatcccttacactgctttattttctacactgcacttgtggcttaggacatcacatgacagacttattcatttacttgtttatttactgtctgccccacgatgaggtaagctcaatgagaccagagtgactcatcagtgtatcctctcagactaagaaaagtggccgggagctgggtaggtgcttgagaaataactattgaatgaaaagtacataaatgactaaatgaatgaataactgaagatggaaattcaagatacaaggaaaaagccaccagtcctctatagagaaagccaataatcttgcaatctatctgtcaaaacaaagcaacatatctgtcaaagcaaacccctaaagtaccccatttaaattggtctagacttctttaaatgttaagctccacaaggtcatgaattcactttcataggaacaaagctagcaacaggatcaacttctacgatgaactctcatttatccatgtgaagattattatccaagttcccattttgctatctcttgccacccagctacttctgcatttacctttatattcagttgaaattagttaaggaatgcaaactaatcttaacttaagagaagcaaaattagaattataagcttccttcaaaaacacacatactcacatacaaatctatcttattacccattccaaactcaaccgtgaataacgtggaggtaaatctattccttgggattacccacgccgattctcccctccaataatataaaggcttgttatatataactattgatatacattaagtattactagtgaatgagatttgtagtacattttacccaatcctaaaattaattgaactggacccacatatagggcccttgaatgtactgattttcagctacattcacggagtggcagcccatttcccaaaagccatggtatggctaagacaacttaccaaaggtgaggagggcagctgtgagcagtgctgccgagagggacttggacagatccagtacagtgaggtaggcaaaggggaccagccaggagccaaggaatgcacagaactgtgggaggaatagagaagctgtcaaataacaagctgagctaggtcagcgacctactggactcagtacaacctaacatttaagacaggggacctgatgaaggcatgactttggtgacctaaagtcacctaggatatctataactaagaaaagagtattgtaatagtgaagagccaaatcaagcaatatatatgttcccattaagcagcaacttgtgcactgacatgaaatcagcaagttcagccaggaaggtgtgggtaggagacagggagaaaagcaaccaagtagctacacaccaggaatagagagaagggaagaaaatgagtgttattaacacacagatagtaattgatagccattagcttctattacacaactgtaggtacaagttgagaaagacccctctgaaggtatttcagagaattttaaggaacccctagttcttttcttcatttacaccagaaaccagtctttaatctacacaatgtatgtattttgattttgggaaaagggattgcttgatacttcagtagctggatacctgtttggttttttgtttttttaagctgctggccctcttccatcccctacctgtccatcaaaataaacagacaagccagaagaatgggaaattctcacgtttggttgtcacatccaattatgtatggtatgtggtgttcaaaagttattaggaagacacagaatcacttaagaacaagaacttgagggtaggatatactccttgtttaatataccacgatatagccatgcaaatcatctaacgatgaggccaaataagcacacagccatttatttaaatgctgtgaaatcctcaaggaaaggggcttgtaaatgcaaacttctctgagaggtccacactggaggtcagcttctgctggcttcattcagccacacgttcaaggttcccaaagagttgggtgttaaggccctgccatgttccatcaaggctggtgctgtaaatcaggacacagagggactgcagcagacatttggcctcccttcaaataaggctggaaaactctttctgtgtgcctgaaaccttcatggggaaagacacaggaacatggtgacagggtgtggggatgccaaaatcttcagaaaaggctctgagatgtaggcaacactccagcagctgtggctgtgaggggaggagcaggcagcgtgccagtgcatggaggcactgctggggctgcaggagactcctgattgcccgggttccaggctgttctccaacctgaggtctgacagtataccggggcagggcagcaggtgacaatgcgtgcctgcttctatctatgtcatctctgtattatttgcagcctcctcttcccttcttcctcacctcagttctgagtatctacaccacaggggagggtctgatcatcctcccctctcctcaccacccaaagtccctttatttgcacctgccaccacgccagggctgctaactataacatttctggtttagtgtggccccagggttcagtcagtccatttcaagtcaggaagccttactcctctcattcccatgtagctgtgatgctcatatttatccccaggcttctggaacaaaaaggtaccatcatatccactcaggtagccagcaagacctatcagcatctgaggagagaagaacaaacaaaaagatgagaagcctttgggagaagattcctctgtcctctgaacttccctccagctgcacccacagactttgggttcccttgacaactgtccatagaaaatgttgccaatgcaacattttctcctgcagctgccacagagcaaagaatcttttgtctacagagctcactgcttgaaacaaatcctctcttgtattatggccgaggtctaggaacagcacaacctaaacactcaggaaggaaaaagagccccacaatttgaagggtagagtcagtaaggggctctctgattccgctttccttcagatggtataaaataaaacacggcagctcttggacagaggctgattcctggggaattggccttttgaaaggaaagtgagattccaagtcacagtgagagagaaaagagaccaaggagctacataccaggaatagagacaagagaagaaaatcagacagaggaatgcaaagacagatgctttgcccagaggggaagagaaaaactgccaaaggccagaggctggtttctcccattcctaatattccaaaggagggcatccttggtacctcccaagccagaacaaatcaattagaaactgagactgtgagtcatgaatccttcaaaacctttgacaagatcggccgtgtcttttgtatatttccttggccatcaacattataaaattctatttttcacacaagcaatcagaagcagctgaagtataaaaactgctggcaaatgccaaccatctgggacagccccaggctgctccagcctgacccccgagctctggcaggctgtgttgggggagggaatacactggctgtgtggggaaagtccctcccagccacacttgtgggacatggatttagactactaaccaacccacttttttctctaagtagttctaaacagagccagtctctatagctccaggtcaaggtatagaagccaaagtctggcagtaaaagacaacaaagacttgtttttaaaaaggaaggcagggaccccagggttcagacagggtcatccaaatagctagatgaactaaagctgccaagtggcaatcaaatggatccctcttcccacctgggatctcgcaggacaagctcgcctggtattggtcatacatttccagactgcttggctggtctagagagaagaaatgtacagatgctttggatctcagtaccctatattctagttctctgatcacggacaatatttagtatctctgagctataggtaataaaaacttcctcacagggggcatgaggattagaggtgctattaagtaaacacctaacactataccaagcacttggaagacactcaaaattcaattctctctcagttcccttaaggttaaaagtagccccaagttaatttcttcttttttttttttttttttttttgagacagagtctcgctctgtcacccaggctggagtgcggtggcacaatctcagctcactgcaacctctgcctcccaggttcaagcaattctctgcctcagcctcccgcatagctgggattacaggcatctgccaccacgcccggctaatttttgtatttttagtagaggcggggtttcaccatcttggccaggctggtcttgaactcctgacctcatgatccacccgcctcagcctcccaaagtgctgggattataggcatgagccaccacgcctggccccaagttaatttcttaactaaacaactctttcaaatcaatagaaaaaaaatgaattactagaaaaaaatgacaaattcatagaaaacaaaatacaaatggctaacatatgaaaaaatgttcaacctaactcatacagtcatgcaaatgaaaacagtgatatgtcattttttactctccaattgacaaagtttttttgttttttttttttttttgagatgaagtgttgctcttgtcacccaggctagagtgcaatggtgcgatcccagctcactgcaacctccgcctcctgggttcgtgtgattctcctgcctcagcctcccaagtagctaggattacaggcacctgccaccacgcccggctaatttttgtttttttagtagagacggggtttcaccatgttggccaggctggtctcgaactcctgacctcaggtgatccgcccgcctcggcttcccaatgtgctgggattacaggcgtgagccaccgcgcccggccaacaaagtttttaaagtatgatcgtaccagtgctggcaatgatgtggggaagaaagcactgtcatacactgttggtgggagtatatatgattacaacatctttgcaggaaaacttagcaatatctaactcaattttaaatgtgcatattcttcgattttttagcttggctgctgggaatttttcatatatacctgcgcaactatacaacgatatatgtacaaggatgttcactgcaatatcttttgtaatgactaaaaactggaaataacatacatgctgcccaccaactgaagagggataaatacttacggcacatctacataatagaatgacacacggccattaaacagaatgaagcgcatcttcatgtgctaatgtggaaagaagatatatcatgtttcaaacacaagctgctgaacaactgtagacttatcccatttgagtttttaaaaagaattgtgtgtatatataatgtgttgttcatgtgtacatatataaaaacatacacgcttgtatttgtataaaagaattcctagaggaatgtaagaaactattgacaaagatgaccgtggttacctctgcggactagaaatgtggtggatgaggcttctgaccctgtacttccttctgtctactacgtgcaggcttttttatgttttaagttcctgtcttatgttttaagttcctgtttaagttccaggtgcccagggttggtaggcaatgtgaagtggcaggtcttggcctcagtagcaaaggagaaaacttcctgcttgctacttggaggggttttgattccttgactggcttggcctcagaacctgcagaagctactgcaccctctcacaggtttccagtttgctcatcactctctttcaaccagacagaacacagaaccatcaggagctaaattaggggtgcagatgggccgcattccctgagggcagccttagaagcctcacacttctcccttcacacgggcaaccagatgtgaggaaggcaaggctttgatataatattattatatttatttatttatttatttttgagatggagtcttgctcagtcgcccaggctggagtgcagtggcacgatctcagctcactgcaacctctacctcccaggttcaagctgttctcctgtctcagcctcccaaatagctgagactacagacgtgtgccaccatgcccagctaatttttgtatttttacgtggagtttcaccacgttggccaggctgggctcgaactcctgacctcaggtgatctgcccacctcagcctcccaaagtgctgggattacaggcatgagccaccacgcctggcctaaggcttaggtaaattaaacaaatcagccagtcctgtgcacatgtccacagtgcgctgagaaccaggaaaactccaaaaaagaacgggcagtccccacagaaagactgggctgggtttcctatgaaaaatcttcatcagaaatctggttcccaggcgagctccatgcaaatactcaacatgttctgttgtttaattctatggtagtaacagatgtagtctgaggagtgagccaaggcaagcttgtgaggcactgtggtgtcatgattaagagagaaggctctatgccagcctgacccttgaatctgccacttactagcttggttccctatgacgaactacttatcttccttcagttccccatctgtgtaatggggatgaaacaatacctactttataaggttgttctgaggcttacatgagataatgcctctaaggtgactagaacagaataaatgtttttaattgttcttgttattgttgttatagtataaaagagataggaagaggcataatatgttctacacttttcttgggctcagagccaattttgaaataggctacctgttctacctcgcttcccatccctccacgctgtagggccccctgctctcatgcttccttaagcccaaccataggtgatctttgtgatctttgataaaagattacactccctgcctcctcctgccttccctgctcctgcctttatcccccaagtactacctgctccaagatccctccccacttaatcacaggaaaattcctgtccccttggtgcccaagatctaagtctccagttaggaagaaagccttgagtgaattccagggctaatccgagagccttctcagaggtttttgtttttaaaagactaaaatgggccaggtgcggtggcttgcctgtaatcccaacactttgggaggccaaggcgggtggaccacctgaggttgggagttcaagaccagcctggccaacatggtgaaaccccgtctctactgaaaatacaaaaattagccagcgtggtggcgggcgcctgtaatcccagctacttgggaggctgaagcaagagaatcacttaaacttgggaagcagaagttgcagtgagccaagattgtaccattgcagtccagcctgggtggcaagagtgaaactctgtctcaaaaacaaacaaacaaaaaaagagtaaagtgaattctaattggttgaatttctaatggtaaaacatgtgagagaaacagatcaaaccatgtgtatgctgggcatgggaagggagaaagaagtcagccccatatggatatcagcctcgtaagctatttctgcttcatgcaatgtattcctatttcttttttcttttttaaaattcagacaaattcacataacataacatccaccattttaaagtgtgcaatgggtggttttaagtatattcacaagattgtgcaatcatcaccactacctaattctgtaacatgtcatcaccccataaagaatccccacacccatttgcagtcactgcctaatcctccctgccctgagatcctggcaaccactaatctactttgtgtctctgcggatttgtcagttctagatatttcatataagtggaatcacagggtatgtaaccttttgtgtctggcttcttccatttagcatgttttccaggttcatccatgttgtagcatgtatcagaacctcatccctttttatgaccaaatattattccaccatatggctgtgccacactttgttcatccctccctcagctgatgggccctctttccatttctgagcccagaggacccttaaaaaacaccagagattttccatgaaagtagctggtctgaaatgtcagaaaattctttctacaagtcccaaattctttctagaagccccaaatccaaaatcaagatgtggctccagcccttaggaacaatcctctgggaccagagagctgctattcaccacactgctcacctttcccaggggcgggtgcacatcaaagaaaaatgtacggttgatatagtaacttcccatttttccaaagtgagtctcatcccaactaaaggaaacacagaaagagaaacaagaattttaaaattatcataaaatccaaatggccttcataaagcatggttaaaattaaaggctatgcatttcaaacaattaatgcaaaagtctggatttaaaaaaaaaatattttgacacaagtgattttaggaagaaagacatcaagctggccactggtcttcatttagatagatgagaaaggcgagcaaatattcactagccagttaccaattgagttaaatatacatatacttactctgtatcttgagtttctatttattttaaaaggacaagatgttttctcataatatggaaaggtttgtagtaagagttttcttctggccgggtacggtggctcacacctgtaatcccagcactttgggaggccgaggcaggcggatcacgaagtcaggagatggagaccatcctggctaacatggtaaaaccctgtctctactaaaaatacaaaaaattagccaggcatggtggcacgtgcctgtaatcccagctactagggaggctgaggcgtgaacccgggaggcagagcttgcagtgagccgagatcgcgccactgcactccagcctaggcgacagagtgagactccgtctcaaaaaaaaaaaaagttttcttcctatcttcaagtagctagtgtaaacaaaaatttaaattaaaaaaagtttcttccaagtctgctaacttctgagacaacatttgctattagaaggtccattacgacgctgttgggctgctggtcagagttgagtctataaaccatgagtgtcacaggagtctcattttgctcagccaccctgtgacaagtaagctgctaactgtgatctggctgatcttatactaactagtatataaaagttgaaggctttcttactaaattaagaccacatctaaaacctatcctcattgcttaagttattttgcaagtaaataagtgatttgaataaacaggctttcaaacacaatgcaaagtcctcttttatacaaccacatacacctttctacaccatacatgagggctttgggaacgcagccaagtcatccagcagagcctggccttttctatttgtaattttctccctgtagctcaaaagaagggttactttctagtagtcatcaatccccaggtcatgagcagtcattattgacctactacataaggggaaaacatgctttacctaagaatctaaggttctttttatatcttacttggtgggtccaagataggcaaaagaataggtctatttcagcatctgctaaacaccttgacaggcagtgaggacattggcatggtgaggtcgaagacagaaataacttcaaagcagggtaatgaaactgatttgcagaaagagagatccagtcccagctccaccactaattaatggcacaacccgccaaaatcacttattctctctagtcctcttatctcatctacaaaatgaagacaataatattatctgccctgcccacctcccagggaggccttagggctcaactcagataacacatgtgaaagaattctgtagattataaagtaccatccctgctgggccctccttaaactgtcctgacatttgtggttagtttttaaatctgtttgggaacatactaacaaaaggattccagtttttttgttttgttttgttttgttttgtttttgcttgttttttgagacagagtttcactcttgttgcccaggctggagtacatggacacaatcttggctcactgcacttttcacctcccgggttcaagcgattctcctgcctcagccttccaagtagctaggactacaggcggccgccaccacacctggctaatttttgtatttttagtagagatggggtttcaccatgttggccaggctggtctcgaaactccaaacctcaggtgatccacctgcctcagccccccaaagtgctggggttataggtgtgaaccaccgcacccagcctgggctccagatttttacttcaaaagtttcccaagtaaaaccagttgtaacattcatatttcctcctggcttttattgcttgtgttaggagagacagtcctccgtggctctcttgtgctcctccaggccttgcaaggtatgccaagaatgctgtttgcagtaaacaaccttgagggaagttagtgtctccctctgagacagagggctgtcttgtttattgcttgccataaaacagcagattccctaagcttaatattactcagctgtgatgcaagctactgcatgtgcaagcattcatccagtccctcagcaccacgtgggacttaggggcaaaggaaactgatgccaacatgctgatgcacatcccacttgctgtgccatgagaaataaagtcctctgtctctgacccaagactttgtcttctgtcagcatgcaaaaaacagtgacaggctaacttattagctaataagtaggctaagataaaatcacagcccctgacagtgtggagacaagcataggatgaggagagacatagtctttggtaagagaaagaatgagggcctccatgggcaggcaatggggtagtgagagtcccccactgtcccactattagagaggctgatggaaagaggtaggattgaaacaagccactgaatgtcaccctggttactgccctgtcctctgggcaaaaggaggaagaggagtgatcatgacaatggcagcaagcccagcagcccctgccaaaaggcaatatggatatggctgctcaatcaacaagtctccaacggtgcggcaataggaccctgctatataagatagaactttgagtaaaatgaaacactgaaagatccttgggggagctgtgtactcaagccaaaagtaaatataaatatgacttgctttgtggctcggagccactctctccctttatgtcccaggatccctcccactctaccacaacctcagctgcattaaagactgagatgattaaaggttgggctgaggtttccatgtccctaaaggggactgaaggtcatacacacccatcctagtatgctggagagccccagggaggagaggggcaaactcagggctctgctggatatgaggtcccacatctccaccctaccatgtctcatggggggaaggatgtactacacacagaggttactgcagacactcaggactgcagggacagccatagcagtgcgcacaaggactaaagggaaaagggcccctaaccctgagggagcgacactggggaggtcgtgatgcaagcctagtgaagagctaaaggagcagaaaaagcttctccccactccctgcagccagcaccgccacactctccgactgggaaatggcaaaatctctggctggctgtcaccatagcccctgatgcaggccttctagacgcattagttcgaggggaaaaagtgtccagattaaactggtaatgtttgagccacgctccctgtagggaagggaagttaaagtgacattccaggcagagctctttgggcctcttcaatgtactattcctgtggcttccagtgctgaatgtatagctgatactgatcccataagtgtcgaagaggattatcctgggcaagggctgctgtgtgtagacaggtgatcctgtcctctcctggtggtccagaagaaaaaaatctacatccctggaagggaaaggaaataaatcacaggcttaaaaacttcgtggcggctgggtgcagtggctcatgcctgtaatcccaaccctttgggaggccgaggcgggcggatcacctgaggtcaggagtttgagaccagcctggccaacatggtgaaaccctgtctctactaaaaatacaaaaaggtagccaggcgtgataggggcgcctgtaatcccagctactcgggaggctaaggcagagaattgcttgaagccaggaggcagaggttgcagtgagctgaaattgcgccactgcactccagcctgggcgacagagcgagaatctcaaaaaacaaaaacaaacaaacaaaaaacaactttgtggctgctggagtactgagagccatgcaccagaatcacagtgccacctgctggacataggtaccaagcacaccctttttaaaaggacagctattaactccttagttaactactcaacactttgaaattgattgccagacccataaaggcctcaggactccctggcctagtattcccactttggggtgggtcaatgggaatctactgataacaagggaagggtttaacaagcctcactgatcctatggaaatagtacattcaagagtacagctggtaatcccagctattcaggaggctgaggcaggaggatggcttgaggtcaggagttcaagaccagccttggcaggatagtgagaactcagctcttaaaaaatctgttttaattagctggacatggtggcacgtgcctgtagtgccagctactcaggaggctgagacaggaggagcccaggagtttgaggatgcagtgagctatgattgtaccactccactccagactgggcaacagagtcagatctcatctctaaaaaaaaaaaaaaaaaaaaaaaagagtatagctagcctggccctagaggcatcttggttttacgtgaagaagtggcagctcccactctgggagaaacaaccttctctgctacctgaagccgagctgctgttcagtagggcccttgattcacaggggttcctgtaaatgcttaggcctggctcaccaatgattaggctgagttaaaagctgatgttgcccaccaagcagcagcaggcacttagccccaatgataactctggatggctgatggcagtaaggattgaagcatttggtatgccacttggaagactaaatactgagagatgaaagctgagaagtgtggaaacacatcatggctgcctgccaataggacagactggatcactcacgtaggtgcccacactaagggcaggtactctcgtaagactgactggaatcaaactgctgatccagcctgcaccaccaagactgctgccatagccacctggattcatgcaaccggtgtggaaacatctaccatcatgggctaggcacaacgtaagggactacatgtttctgaggcagaagccaccactgcgtgccagacttgtgactcctgccaaaagttggcctgcttgtcttgcagtaaaggaagccacattgcaaggggcactgaccacacctgctcctgggagattgacattaggactttgttcccttctctaggctctcatcagtaccttgctactgctgatactttttcagtttacagtgctgatgttgcttttccagtccaattatctgactctgtgtataccactgtggcccttgaaactaaactgccaggttttctgctttccaaaccatctacagtctgacactggcatatctttttgtcgcaatggccacccaacagtgtcaacagtcaatagccaaggtattcgatggacctcccacactccctaccatccacaggcatgacattgtcaagtactgaacagttccctcaaagatcaactcaaaaagatttttgattctatgtttttaacctcctcctggtctgcaaaccttactgaagcagtttggtcacctaaggcagccattctcagaaatgggtcatctccttttgcctaccaactgggtaatgatcaggaaaaaggggtggagggttatataaacctattttgaaaatgtgagattctcccctgaccatttctggccatgattcatctttcttcccccttacagaaagcccagatcagctgggaggaggaggctatctatgtaattcagacttaattctagttcagtcactagattgtcttgttggaatggcctggtgccagaacataaagttaatgatcatttggttgggtatagtgcttttaaagtccccctacagtggcccacatgtgtcaaggtagaagacataatgggcctctgtcaattttctaacaattggatattagaaggcctgcgtattggtaggggataaatggagaaaaggtgaagttatagttactagggtaggacacactcattatgtagcaatggaaggaaagaaacaatcctggcatctggggaaggaacaccacaggaccctggagatgtaaagagaagggaaacaatgttctctttgtccctatccagcaccaaagcctggcaaacattcacatggtccatctaggtcaagcagcaactgtggctggcaatctgacctgtggctgagtttgtcatctcactatgaaaacataaaaactttatctagcaggtcagtataaaaaagaaaataaaaaaagaaaacaaaaactcacatggacacggccagtcttgaactattcccacgtgcctgatgacatcaacaccaactcccaaacgcagacctccctcataggtgtgcaaacacacagatcagcaccaccttctatcaatgcggctgatacaaatcacatgcttctcctgagatcctaagggccttacttaggttatgccttgtctagtgattgaggctgcaactgttcagtgacactgcccatgtggtttaaaccactgtaatggtaatcaaatttgatggtgatccaaataaaaatctaacaaaaatcctggagtggcctgcactcctccaagtaatatgttagtgtaaggaagaatgggtcacaaaatatctttccattaatcatggtagttaattttttttttttttttttgagacagagtctggctttgtcgcctaggctggaatgcaatggtgcgatcttagctcactgcaacctctgcttcccaggttcaagtgattctcccacctcagcctcccgagtagctgggattacaggcacccgccatcatgcccggctaagtcttgtattttcagttgagacggagtttcaccatgttggccaggttggtctcgaactcctgacctcaggtgatctgcccgcctcggcctcccaaactgccgggattacaggtgtgagccactgcgcccagcctggtaattactttcttaaaaaaatttttacaagggtagtgggctattgtaattactggtaatgacaccaaagatcagagatcaatctgaacccctgtgcacaggtcacagtggttaatagactggtcttagactgcagcccagatgtctgaaataagattcctcggtgcccccaggacttattcacaagtggctgaatccaggaccctggagggcatggttgaggtaaatactgtaagctggccttattctgctgcttagagtcccattgacaacaaccttaattaaatgctgtaagggacaaactgaaaagatgtgagtagccaggggagttgtatattcatgtgaaaatctgctagaagccaagaccatagaatcgaggagtgagagaggctgtcagattgctcgtgcctctacacatcattctgggtataccaagaatgcaaggccctgactgcatctcacctgggccatttctcatggttgtgtttgcagcaagcaactttgagagaagaggcagtgtctccctccaggacaaagaggaggtctgcgtactgccttctataaaacagcagattttccaagcttgtcgttccttcacttggatgcaacccactgcctgtgcagtcatccatttaaacccatagcgtcaccctgtgggacttggatggcaagggaaactgcttctaacatgcatcctatttcctgtaataaagtcctttgtctctaacccaggagtctcatcttctgccagcagtcacgacacaataacaagctaatttattaatttctaaataaagcaaccctgacagtctgttttcttgcctgctttttgcttaaagaattccatttctgacacccagtatctggatagtacaagctaaaacctttaagaaaataaatctcttctcacaagaagagttctgcctcataaaatcctttggtcaccatacctgaacacccaaactgtccttgccctataggataaaggtacacagttaggtattttctcctctgttgatgcctgaaaatcctgcagacataggaactcaggccttagaaaattctgtacccaaaaatttgcaattctctttggaaagttgaaagcacctttaaaagccacaatttgcaagccaggtgatgcactgtagcataacctggaagacatgagggctgcttcctcagatactaagaatcccactgccccaccaccagagcaaaacgatccccctcccagagaatgcacctcgccagaggccaacccacccgatacctcaagttcccctccaccgtggccctcctcctatagatcccgccccctccgtaccctcgggccaatcagagggcggcgtcccgtcgcggttgccatggtgcccgccgagtccctcccatcactcaccagatgtgcggcggctcgtccaagcggtggaagcgggtggcgaaggacagcagcgtcaccaaggccagcagggcccaccagccgaccgcctcgaagcgccgtgagccccaagcaggccgtttggggcttcgcgccacagcctcagcggccacgtcccggcctgcggccctagcagcctgggggccacagcggcccctccggggacgcagctcggactctgccaggcctccgcccgtggccggcggcatcttccccctcctctgggtcgccctccggcccggaggcacactttgtctgaccagccgccccgccaaggagtcacaagagggcagctcggggtaccccgggaaatgcaacgcccttcactgcagcggagcgcggggccccgggctcggggcggggcgggcagcgtggtcgcggcccgggccgctaggaggcggcaggaggcgcagagcatgtcgggaccgggagggccggccggcccggggcgggggggactgggcaggaggggtcgggctcagggaactgcaactcccagcagcccccaggtacggggcgtggcgggagagctgggcgagccagaggcgaccggaaggatctttctagtccagcccctcgctttacccggacgaaagacacgggcctgattcgtcgagtctcactgagccttagtcgtcggcaggtcccaggcgcgaagtttctcggcctggaggagggggtcgcgcgaagtgccagatgcaggcggggaaggtctgtgacgcgcacccgggtggagggaagctggttagacacctggagaccctggggggcggggtcagaagtgagctgcaccgcccgcccaggccgacaacgactcccggcatgcagtgctttgcgccgggcacgctctgcgcctgcgtgctgcgcgctgcccgctggggctcgaagttccgggagggttgggccagaggaggcggtcctggtagggagtgcgtagcagggtggagtcgctgtccggtcgcgcttcacttctgctccgccctccctgctccccataacagacccctccctccactaaggcttccaaacgtcgccccaagcctcccaatttctcgcagcccttcatgctcttctcttggccctagcaggaggtgaccttccagtaatgtttgtattttaagagtccccgggccgggcgcggtggctcacgcctgtaatcccagcactttgggaggccgaggcgggcggatcacaaggtcaggagatagagaccatcctggctaacacgatgaaaccctgtctctattaaaatacaaaaaaattagccaggcgtggtagcgggcgcctgtagtcccagctactcgggaggctgaggcaggagaatagcgtgaacccaggaggcggagcttgcagtgagccgagatcgcgccactgcactccagcctgggcgaaagagcgggactccggctcaaaaaaaaaaaaaaaaggccccgagcgaggagaggcagtcatgacaatcacctggggagcttcacggctttcacatgttcttcccggggcctgctccagagccactctgttcatctctggtggaacgggctcgagaatctgcatgtttttataagcggtctagatggttcttaacgtgccatgaagtttgagaaccacttttgtggcactaaggaaggtggcacgttagatgggactttgcgtcacgttaataatgtatagtcctccctcttccaaatgggattttaggagtctttttctcaaatcatgtgtaagacatggtttaaaaataaaatctgctaaagtaatcagaatgcatatttgaattggaaacacaggtcttctaggagtgctgatgagatggatacttgggcttaaagtttagttctacaagtgcagaaaggaacggggcatggtttacatagttatcactggtaagagaaggcagaaattgcctaagagatttcaggtttcctgcttgtgggtcgtgacggagggcagcagcatttaccatgcttctggtcactcgtagtacagatccaaaggtgtaatccaaaggcatttagccattaggtaaggcatttcttcagggattctaagctaattaatgtctgccacactctagtggtcaccagcagtccctgtcccttggcaccaggagtccctgtagcctggctaggtaaggaaagggagttgcatctccaaataaggaagatccagttgtggccacccaattcctcctcttcgaaagacactttctgcccatcacctgctttctgtgccaggaccatctttactttctccacaaaaggtaccttcaggacaggctgggactgctgggcttgggaaccatcttggaagggcctaggttcccacttacacccttgccatctagcagactgagttggtagtacagggatggcaatagcaagttcagagagcagcttaatatgctaggggtggcagaggggagagggagctttggtgaaatgtctatagtcagaggggtagtaaacagggcatctgagaagttctttcaagttctcccctatccatagggatacacatgttttggtgggaagattcatgagtgctaatcactggcgagtctttcctgggttccactttgaaatgctggctcccgaagaagtaccagagaaattaactttgagccccttaaaccttggagtagagatcgcacacccagctgcccccaagggcccaaaggtaacaaaaatgagaaaagtgggccagatatgggccatggcagacctgagagcgcatacgctggttgatgggggccattagtctgttcccatcaattgctgctatttaggaacccaaatctgtctccagatttttttaaagaaaaaaaacaaacaggtgttgtatataaaatatcatgatttttatttttattttattttattatttatttattttgagatggagtcttgctctgtcccccaggctggagggcagtgacacgatcttggctcactgtatcctccgcctcctgggttcaagcaattctcatacctcagcctcccaagtaggtgtgattacagatgcacaccaccacacctggctaatttttgtttagccatgttgtttcgccatgttggccaggctggtctcgaactcctgacctcaggtgatctgctggcctcagcctcccaaagtgctgggattacaggcatgacccaccatactagaatgaaatgtcctgatttttaaacattggcaactacttgaaacattttaaactactgtgttgagcaaacagaaattctgagggccagatagggccccagtgagctgccagcttttgacctcacctttggggtgagtgagcatatctgccagctgtttttatggggacagccgagagcccggaggactgctgggaggtggggttgaaggagatatgtaccaaagcgtcaaaaaattagaattccttgtcttgctgcattgctagaggatgccctgccatcattttagggcaacctttgttttacaaatgagggagccgaagatttaaaaaggcagaggtttgtccaaggtcatgcagagctggttcctgcaccaggtccagactccagatgccagctcccagcccgctccaccactcaaaatactgcatcaaaaccaggccacgctctgttggggggacaccaaacctggccccagcaggagcgtaagaaacttcctgcgagttggaaaaaaatgccttttttttttttttttttttgagacgcagtctcgctctggagtgcagtggtgcgatctcggcccactgtgacctccacctctcaggttcaagctattctcttacctcaacctcctgagtagctgagattacaggcacccactaccacacctggctgatttttttttgtattttcagtagagacagggtttcaccatgttggccaggctggtctcaaactcctcacctcaaatgatccacccaccttggctcccgaagtgctgggattacaggcgtgagccactgtgcctggccagaaatgccctttctgaccagagtcaaagttcccccaatgcctgggtagcccagcttccccattggctcctgaaatccacccctttaggtttcctttccctgctcagaagctgtgccagaggggacatttcctgggaggctgagggtcaccacgataccatgacagagtctggcaaggtatggaaggcactctcaggctagctgcccctttgggggcctcttggacctcaggagctcaaaccagcataattttggagccaagggacctcatgagcctctcagagagcttggagtctgccctgatttgcacagatgcaggcctgagagaggaggcctggcaggacaggaagaaatggttgactcctcccaagctggagcccacccagcatgggttaacacgcgccttcatcctctctctcctcagcccatcctctattcctatttccgaagctcctgctcatggagagttcgaattggtaagagatgtgcctcctccaggatgagtgctggagtggggtggactggggcggataagcccgggtgcaaagctggcctgggatggaagggttgctctgtcagagaggacctcacccccagcaaccagcatcccccggctcctagaacccccatccctgcatggcatctccaccccggaaacacagggtgagggtgggaggaagggggttgttttttcccttgggactgacacttctcccaacactgctctccaaagccccttggcaaccatgtttaaagcagggtcacaaaatccacatgcccctggtaactggcaggggaacagctggcccttctcagttcttattttatttgaactggcaaagcaaacagaacgggccagcatcagcctcggaggcttcagaaaagcagaaacaagggccctgtggctagtccttgtttgacccttccctcccttggcttaacacagcctttggcaaaggtcataaccaaagcagcctgtactgaggaaaagctctgtgctgagtgcttttgtgtgcctgattccatttaaacctcagcaaccctaggagggaggtactattattactgtccccattgtatagaggaggaagctgaggcacaaaaaacaggcaacattcagtaacttgcccaagatctttcagttactaagaggcagaactggaatttgaaccaggtagtctggctccagaggcccattaagttacttgcccagggccacacagttagcaaatgactgtgatgaaatttgaacccaagaagcttgcctccagagtgtggaggcaaagccatcctccgtgacccctcctccatcccatagtcacttggtatttgctgggatcagtaagcaagagcactgggtgccaggagaaactttcctccaagaagatgaacccatccctgggcgccagtacctctgccctggctgagccagaagccggagcaatataggtgctgtctgtacggcctgtgtgctttggccttccctcctccaggtgtctcctccagccccaaacactgtcactccccagactggagctgaccaacactaggaggagcctggtattgcccaggctctccacaccatgacatgtctggtcctcctcccctcattcctttgcccttccctgagattggccatcaccatacttgaatgcccaagtgtgtgtaatacacacatgcatgcacacgcacgcagtcttctccactagtgttgacccacccaagttttttttaccctcagcttgccaggggaaattatcaaaagggatggagaggaaatctggtgactggagtcacggcaaatgctctgaggccaccaaagagcctgatgcctgtctagaatctctagtaaacagccctgagaacagagagaatagattggaagagattcttctccaacagaacaagagtgccatctgtctgtgtgtgctgtgtgtggccacctgagctccttcccttggcccttagttgccttcttgagggagtaattgcatgtcttcaaccaagacactggtcaccactgtttaaggccctgggggggcagagttaaacacaacacagccttgctgaactccaggagcccacagagtgccagggcatacacctttatcaccatccagggggcatgagggccccattgggggggtccagatcttgaggtctctaagagttcaggggtgagtgaggcagagcatcgtgcatctggggtagggagcacgtggtgacaaggaaagctgagagaaggggatagtgccacggtgagccttgaccacccagaagtgttagagaagcctccccctctttggccttaatgtcaccttagaagggctctttcctttaagagtacggcgagaggctgttctttgactccgctatgtgcggtctctcctagctctggccttgaaaggcatcgactacgagacggtgcccatcaatctcataaaggatgggggccaacaggtaagaaggctgtgcccagaccacaatgtgggaattggaggccttgaacaggcaccaggcaggggaaaaaggggaggctctgccccagagaagtgaacctgtgtcttgtggactatcactgcaggaggctgctggctctcccttgtgggacaaggtggcaaggtgtgcagtagcaggaggcctgggaagggcccaggtccagactgtgtaccctagcctgggctctccagtgcctgaccctgggagggtgggtggctagtgggtccccaccccatactgggccctctggatggctgactagggtaggagctgccttggtggccacggtgtgagatgcagggaaagcccatagccaggctgttaggatgaagcctatggctcagcagcagctgggctttgggagactgcatggatcccccagggattaccctgggcctaggatttagggccttcccagggaagggagatgggggtgggtggcaggcctggggttctcctgcttgcttggctttcctctggccaactcaggccaggccacccagcccaccagggccttgtctccacagttttctaaggacttccaggcactgaatcctatgaagcaggtgccaaccctgaagattgatggaatcaccattcaccagtcagtgagtgcagggcctgggggagggccctcatgagagcagtgccctgaatgagagcgcctgacatctcttcctcgcctgtgtacagtcaaggtgcctagcacataggagaggctcaatacaagactcgtggggagggtgcgaggttatttaggaaaataagggaagattcaagcacatggagaaccaagttctgcatgataaggtccaaaaaggcttatagggcttgagctgagcagaagcaggggggaagaggtgtagtgatggtgctggaagaggagaaggaggagtttgctggccctgtcccctctggtccaggggtcctgggccctctccctgcctcactgctcccctctggacagctggccatcattgagtatctagaggagatgcgtcccactccgcgacttctgcctcaggacccaaagaagagggccagcgtgcgtatgatttctgacctcatcgctggtggcatccagcccctgcaggtgtggcacttgtacacttgcacccttgcacacctgacacactcttacactcacacattggctgtgagctgcccagtgtgggggcgggggtgtcaagggagggagggggattctcagggcctctgacctggaccatgtgaaagaagggggtgaagatcgcaatctcagaattcagccccccagcgggtcccccgctgcgttccgagaagctctagtttccaaggacgcatgtacaggtgcttggggtggggaaagggccagaatggcaggggagagactgagcaggccccagtccaggcctcctgcctttaaccagagcagcttccgtttcatctgtgctatctcagtcatatactgggatacttgtaggattttattttttaagtgtcactgttaaaacagacaactaagtattaaaaacagttcatctgtgccagcttctactctgaatgaggaaatagccccagaaaggtggagtgacttaggagtcccacaggtaggtcataacaaagtggggactaagtcagaatccctgcatgcctatgccctctacccgcatgtcgctttaacaaaggatgttggagcagacagacatctccattttataatgaggaaacagagggaaaatggctccaggggtgccaagatggagccaggctggaaatctctggaagccggtcttgtggacctccctcatcccagccccaccctctttcacactccctctcctcacaagggaccatgcaagggagaagtgagggagacaggcctcgagttgtgggcacacctgccacagccatggccgcgtcctgtgtcacatgaatagggattcttgcacatctctgacagaatcacgtggctttttgaggccactggggcagcctgcaaaggtggctgctgggatggctacctccctccaacctcagggcccttggttgaaggaaggggctcatggagcctgggggagaagggatagacatccagccaggggcagatgggaagtgaacttccctgagggggtttggcgaaggggtagcccccacccagctgtcagcgcaatcacagattttctttgggctgcacagaacctgtctgtcctgaagcaagtgggagaggagatgcagctgacctgggcccagaacgccatcacttgtggctttaacggtgagtcctcacctctgtgagctgccccacagtggcctcttagaggtatggccctcgcacacaggggcctgggtatctgaaccagcctcccaggctgctttgggcctgacagttgcatggatgagggcaggactggggaggcaatgggctgggtgggcatccagaccttagctccagcacttctgggaacctcggtccctgagcccacagcccttcatagctggatggcccaacttcagcttcactgcctactccagctgggaaaccaaggccagcacagcgccagccatcagagtgagagctgtcaccgtggccagtggcagggcttgtccactcgagtggggaaatggtgattgtctgtgcggagcctcaggaaacagcagctcatccctaacagctctctcgagacctggctgccacattctcaccagcagccatgcccagtctgtcactcagttgggcgcccatttcataactatggaggccaaggcccagaaagctttgtgtcccctccctgcgcccagaataagatgtttatgtggcctccccacagccctggagcagatcctacagagcacagcgggcatatactgtgtaggagacgaggtaagctgtccccagacctccccaggcccagccacagtggctgcctccctcatgctgacctccctcaagctcagagcttcctgagaaggcgtctgcagggggatctctgtgccatggggcactcctcagctcactcccactaaaccgtcttaagagggagttactcaaggtagaagactggctgtgagaggatgaggcgggccagcatcagttgagggattgtgctagatgatgtctgcgcagtcaaggcaatccatcttctctggccctctcaacccacagagttggttgtcagggcaactggagcatggcctgggagggcacttcagctccgggggacagactcatgcaggcctagggcagacaagaattggaggtgggatgggtgaaagagccgaagcagattgttggtacccccagtagagtcgcagtggacacacccagtccagccactgactctggggtatgcaccctgatgggaacccaccgggacctctttcaggtgaccatggctgatctgtgcttggtgcctcaggtggcaaatgctgaaaggtaagagagagccccgccaccctcccttctcgtggctctgcccacagtcaggccccactcagctggcgagatagcatctcatgcagacgcttcgccaaccagccaaggagcccaccatgccaggccacatagccacttctgcctggaagagggcagaagaaattggggcagtgctcctactacgcccaccacagcccagatgaacctgtatagatagccccagctcctaagaggaggtggctcacctggtggacccccaagagcacctgcctgatgtcctcaaatgtggtgtgtctgtgagcagtagtgagctctacctctgcatccttccgtgaaccctttggtagggcacaaatgagcacctctctggaaggcatcatgctaggcgttagggatatggaaacgtatggcacattccctgcccccaagaagcttacaacatgggggaagagagtctgtatatataaatgcctagcactgggccttacacatagcaggttcacaaagaaataggaacagtaggtaacagatgccaaatgatactgcacaagacctacccatcccctgtgaataagggctgccccatcgtccttccctggacagctccctcgacctcatccagccctgcctctctgctccccctgctgcatcagggcagtctccctgtgtccctgaaaaccttagcttagcaggtgtttctctactacagattcaaggtggatctcaccccctaccctaccatcagctccatcaacaagaggctgctggtcttggaggccttccaggtgtctcacccctgccggcagccagatacacccactgagctgagggcctagctcccaaatcctgccccgttggcacagggccacaggagcagaagctgggtgggctgaagaggcctggaaacgagagtcttaattgaggagatgggagactcgaactctagccctggatctgccttcctgctgaaacttgttccacctcagtcccctcatctgtcacacgcatgtggggtggagtagggagatgcggggagcagggtgggcaggaatactgttatctatgtgacggggcagtcgtgaggctgagatgagaatgcggattaaaatgcctggcgtgctcaccgtaacaccacggggaaggctgtgtgccttttctcatccgcttttgttgtgtgtgactccaaagaatgcccgcgctgaaatttggcgtgaattaaactgaagcccaggcctctaccttgtttgtctaagactgagctaggttccagaagatgaacactgtccctagctggaatcccctgtgcctggaccagtagaggaagtcagtcagccacttgcctaccctgtggcaggcctggcccatgggacctaagggcaatgatgagaaatatacccaaaagcctgcctgaaagaatcagacaagatccagggagataacagatagaagcaggaaagcatctagtgactggctgagttctcagggctaggaatggtaccgttgttaaatgttccactccaggctgggcgcagtggctcatgcctataatccctgcactttgggaggccgaggcaggtggatcacttgaggtcaggagttcaagaccagcctggccaacatggtgaaaccccgactctactaaaaatacaaaaattagccgggtgtagtggcaggtgcctgtagtcccagctgaggtgggagaatggcttgaacctgggaggtggaggttgcagtgagccgagattgcaccagtgcactccagcttgggagatagagtgagactccatctaaaaaaaaaaaacatattccactccagcactgagaggccatttggccctctcaaccagtccctcgtcttcagggccagcattctccagaccagtcccaggattaggcactcggggtaaatccagtcacagatggtgctgggaatgggaggcaggctcccccgtgggcagtgtgagcagctactgaccaggccagcttaggagaccaagcaggtagcagtgtaccacaggctgccctggagggagcaagttcccatgcttggcagtgttcaggcagaaccaggaccacctctgggcagagatgccgtacagagattggggtagcttctggggatgaaatgagatgactttttaggagctttacctcttgaaggccccacctctgaatactgttgtattggagattaagtttcaacatgaattttagaggggacataaacatttaaatcgtagcaaagaccatcacctttttacaggacattttccagtaggggcttctctcaaacggatgagtggtaagtcaagtccttcctttccatatcacactcagcagacacctgatcctgatatgctagaggcacagggagactagatatgtacgtggtcttcccagagtgggagtggccacagtgaaggaagaacaatgatggaggggcctgatactggtaattccaactctatggaagtaacaagtccccagaaatacttcaggaggaggaaagcagtagggaggtgctatcaggaaatacctgagaacaaagcaaaaattataggctgtgttcctcagaaattttacatatccattaaggaaagtggcaaacttactggataaacaggtgatacacatactcatactatttttttttatttttatttatttattttttttttgtgatggagtcttgctctgtcatgcccaggctggagtgcagtggtaagagctcaggttcattgcaactttccacctcctgggttcaagtgattctcctgcctcagcctcccgagtactgggattacaggcgcgttggttaagctggtctcgaactcctgacctcaggtgatctgcccacttcggcctcccaaagtgctgggattacaggcgtgagccaccacgcctggccaagatacggctcctcctaacttttagtgttttgtttttgtttttttttttttttttggagacagagtctcactctctcgccaggctggagtgcagtggagcgatctcggttcactgcaacctccgcctcccaggttcaagggattctcctgcctcagcctcccaagtagctgggactgcaggcccacgccaccacacccagctaatttttgtatttttagtagagacagggtttcaccatgttggccagaatggtcttgatctcttgaccttgtgatccacctgcctcggtctcccaaagtgctgggattacaggtgtgagccaccacgcccggcctagatattttatttaaaaaaaatttttttagagatggagtctcactgtgttgcccaggctgatcttgatcctcccgcctcagcctcccaagtagctgggccagctcttacttctaaacataacttatttagctcttgcttccaaggtcacagcaattctactttcagagaatactttgaactaaggatagctgctgagtttaagccagaagtgcacaggttaaagaacatcaaggctgaatgtcaagagctgtaatgtgtgagctgccttttgtaatcctgagctatgtcaaggtcaatgatatgacacatatgaatgcttttaaaagttaaaaaataatcttaaggccaggtgcggtggctcacacctgtaatcctagcactttgggaggctgaggcgggtggattgcctgagctcaggagttcaagaccagcctgggtaacatggtgaaaccctgtctctactaaaatacaaaaaattagctgggcgtggtggcatgtgcctgtaattccagctactcaggaggctgagacaggagaattgcttgaaccagggaggcggaggttgcagtaagccgagatcatgccactgcactccagcctggcgacaaagtgagactccatctcaaaaaataataataatcttaaatatattatgtgttcacagtgacatattacatccagcatacccaaacatgaatcattaatgatctccagctacatggaatctgcctgggctttttgttacttgtagggtagtttggtgattacattcaactgaattgtttcagatcccttctctttcatgcttcaacctctaaaatatgttgcaacagaaagcagagaatgatctaacaggttcattttagcatcacagatatcactgaaggaaatatttaaatgccacccttccctgctcagatgtgagtccttattctgcaacagacactagggatgtggagaggcagtgttttaaaagacagcaaagatatattatggtgtcactttttgtaaatgaaaataggctgaattcatatcacccagattacgttaatgattggcctggtatccgaagtcgaggttccaaatttgaacagaatatcttcatggggaaacaggcctcactgggaccaaatgctgacataaaactcagaacttattaatcatcactataaacccagtttttccattcccagttcccaggtcatgatactctgccatgaatttaaatgcagatgaaagatctattattaatcttattctcaattttttttctttttagttcttcttaactttcacaatcttaatagattatgaaataattcatatgggcttatagaatacctttcttaaggaagatacatgaaagacaaagaatttaaaatgtaaatcaggttcattaaaatataactcagatgttaccaggtgcatagtgaaaaagtttatttatgacagattcgaaaactcagaagagatgacaaagaatgcacaaaagcatcacaaaactgttacctaatataaaacgcaagaactgagctacttgaagaagcacagctcagaatcatcagtgtaatcgcagtaacacacccagtgccacagggtgataaaaatggtattttaaaagaaaaaccactcagcaggacacaagaattaaagtaacaatttggtaagactcttagaaatcacagatgttgatagcatttctcatgataggggacatgtaaaacaagctgaccataataaatgattagttgggatacttttgtattttaaagaaaaaagataaaacagtgacacggtttcccttccagaccctttttgtaatgtcagcaacagtacatgatatagaacagtaagaaaataatgtctttgtagttgccaattgcttaaatctttacgaagaaaacatgatcatctttcagtcaactgactgatctgagtacatggcaccaaagaaagcccttcagaaaatagaagctaaatgacataaagtagtttggaaaatcttcaagcacctccctttattccaattatccttttccaaagtctggctttcttataatccatcactttgattacaaaacagctctcttctgggaatttcaaaacacttcccgttacgttaagggaaaatgggtacaccagattcatgggttacaggattgctttctctagacttggcttctctttaacatggctaaatggaaataatttagcttggttaaatgaaagctacttcacttacaggataatctcaggagacatgagtggagtttttcatatggaatttcttagtaaaatgtactgtttaggatatgagagacggaattaagataatgttttccagatgattcttggcctgatcctaagaatcaacaataacaatcaatagcaaggaacattacacattcaaccctgagtgatgaagagagttcaggaagagagccccttaaactctgaattaagggctctttggtaatatcatatactataatatttcaaaccaaaacttcagaagggttcatgatcctatttcaggactttagaaaatatactttgtcctctggaagcaatttcacatatattattttgcccccagataagccacaactacctgcttaaatttttttttaaactatggaattaaataaacatgcatctctagatttctagggcaacttttcatcatatctttgaagagtcatgacattaactctggtccacatacctggggcctaaaaaaatcaggtacatataataggaatcacatcatgagcctaatttcaaagccagtgtcttgcctttggactgtgtgtgtgaggcatgcctatttgtaaatgagctccactatcattggttttaggcaatagtgttttcttagcttagaaatttcttaccttaagaattcaaacaggaggggctttgtttagccttcttggtttaggcagggacaatgcaacacttgagaggcagcagtgatttctgagcaaaattctaagatatattcgataggtttgctctcccctccccccatactcctaccctttgccccctaattttattttgttttccctcgttgtgatcaattttaaaagacagttctcaagcagcacaaaacggtgtaacttatgcccctcccttatgctccactaaaacaagtctcttatgtaaatattagggtcactcaattccacaccttagaaccactggggttaaaaggcaaccttctgcagataagtggtcttaacaaacaaatataaaagcagactttagagtctgggtttcaactaattctctcaaagagggactgagcaggactcataaacataaactcatattccctacagattaagactttttatgataatacctaattctactgcttaatataagacagcgttcagatttcactcttccatatacatattataatgggacaatatacacttttttaaaagtctgagtttttcttcccaaaataacaaaaatattttttaaagtgcatgtatcaattcattaagaaaaaaataactaagaatggtctaattccaaattgctacctacttccatgataaagctacctgttatctaaggattgagttttaatatcagagtcctgaggacatgtcatcaagcaacagaggttagcataaagcccttccggagcagcttcacaatcactcttgtactgacatgccagttagtaaggaaaacagcagagatcatggcctgagggaaggggaaaatacagcacagatgtattttcttgaaagatggagaccaagaaacaatttttttttttttgagacggaatcttgctctgttgcccagtctggagtgcagtggcatgatctcggctcgctgcaacctctgcctcctgggctcaagaaattctccctgcttctgcctccagagtagctgggattacagatgcccgccaccacgcccagctaattttttgtatttttagtagcgacggagtttcactatgttggccaggctggtctcgaactcctggcctaaggtggtctgcccaccttggcctcccaaagtgctgggattacaggcgtgggccacggcgcctggcctccaagaaacatttttatgaagaccacctcctgggtaacccatgttgaatgaaacaggtctgctaaaaatcaggggctctccaacagagccgatatgcaggggacattctcagcattctctaattggacacttgtcaaaaggaacagaatgttagaatcatctttgcctaggaattggtagtttaaaatttttacatttatgcggggagtgtgtgtatacatatatatacagcaaaccaaaaataaattctaaatcccccaaccggctgaatggacccctgtcttggcccaggggatctcaaaggaacctgaaaaactagtccatgatgggaagacagggtgcctcatattatggtcagattacagggtgcctcatattaccctcttccctttggaatttaaatacaactgaccagcattaacattaaaacagagatcttaagactaaccaaacagaccctttgtggcaataaaataccaaatcccaacctgactctggtatagcatcacatgacagcaggccccaaaggaaatttaccccccaatatatttatttgacgtattttgaaatggccctacaaagctgtctcttgtgggggaaactgcattctgtagagaatctccttctcttattaggtcttttctggagagtctgacaccttttaaggcctaaaaagaaaaattcatcatctgttctctctgaagcctgctacctggaggcttcatctacatgacttaagccaagcctcccttactttaacttaagctgacttcatcttttcaggtaaagtttaactctctcaaccaactgccagtcaggaactctttgatctacctctgacctggaaacccccatcttcaagatgtcctgcctttccaggccaaaccagtgtataccttacatgtattgatttatggctttgcctggaccttctgtctccctcaaatgtataaaactgtaacccgactacctcgggcacatgttctaagaacctcctgaggccccatcatgggctctgaaccttggcaaaataaacctctaaatgtattgagacctgtctcagatactttttggtttacaatatatttatatttcttttaagctgtttgctgaaattttttcacaataaaacactgggggaaaagaaatcaatactttaaatatgtcttcctttctaaaaggcccatctctcaacaaagtggcaaaactaaaactaaagaaatttaagaactcagtcactatagagaattccaatctctctcctactatgaagcactttctttcaattgtttgttactatttgtttgtgctctagagaacagggtgaggatcaaagcaaacggttttcatttcattgtttgggtctataaatttggactgggaggggctgaggaaatgactgtctcttagaatttgctgggctgtgggttctcagtaattacctgtgcttcagtaagtagtatcttgcccctaaagttcaattatttcagaaatgtaacatgaaaatagtgaattagacagtgaaaatatcttcttttagctattttgtgctaatggaacacagaaaccctgacagttggtgaaaaaccagtatgaatgaaatgtaaccatgcccaggacttcaaaagtgaccagaccctaagaggcacacagaggtgaggggaacaagtcccttaggcttccctgatgcaacagaactaggattccaaagaaaataagcagagaatctcatggtgaaaataaataataacaagtgttatccttgggagcttgctgtgtatggcctgactgtttcaatttgagagaaaggcagaagttaataataaacaggaaaaataagcaaggctttagctgactagaaaacagctcagtagaaaattattttacaaagattatattcagttagctaaggcatgattcaacttcaatgatgcaagagcggtcactcagctatccaatgggatgacacacagcaaatcagctcttcactgcctcaacagacagtcactaaaataatttctttaaaggtatataaatgttggccagtgtaatcctctacaaaacacatttgcaaatataaaataatggaggtatgatgctgctcagagaatgggaatgctctggcagtccccaacatcctatcccacttggggctttgctccgaggggaagagcaggtgcaggatatattgccctttgatgtgatgtagatgctactagggacccactgggaagagtcccgttccttgagttatgctactgtagggatagacccttggtgtgaggaatctaacaatgagtcaaaggaaacatcacaaagaaggtgacacctcagaggagacaaaggactctgaaatcctggaatcacgggatatctctgattggttagggaattcctctgcactcaatctccagcaaatgggcagattccctcacaacttagaatttttcatggggagtgctggactgtaccccaaacatggagtaaggtggcatcatccatctctgaagggccatactcctcgcaaagccgtcacaggactgacctacagaaataaaacatcatcgcttcccaaattctcctaaaaatatcatctttaactccataaaagagggggcttcagtggctcagaacagatgggaagccttctgagaaacagatggaaactgtttcaaaggcaaaatgaaatgtgctaaaaaaataaatacagtaataaataaatctaattattcttcagaattcgtaggcagtaacagacataacacgaggagtaagagacagggaggtacaaacacagagactgctgaggtcccatctcacctccgtctcctcctccgcctgggggcccagcagctggtgctctggtgaccactggctgcagcactacctgcactctgtggcactcctgagcctcaggggtgacacagtaggaaatgctgtcaccagggaaatgcaagctttggtcaggtaaagaacaaatacaatcagcagcaatagtgaagcttcattatcacctaaactaagggactttgaacaccaaaagctttaagccctcaatgcaagaaagctaaatgcagaaactttggaaacctgattgggtttcactgcatttgattccaaagcaacatttctaaacagcactcctactctaaagacaaaaaaaagcggtggggactctggagtgttttttgtttttcatcttctctgtcagatgataccattccttctttgattataccaaaaaaaaaaaaaaaagtaacacgactttcaaatatgtgggttctgacatcaattcagtacctaatttccactctctccactttgactgccagtgcccatagtaagggaaaccagctcttggaataggaaataatgggggcagtttttcttcccacaagatcttaggttacattgatcatcacttgagattgcatgaatgttcttgctgtaatggcaaaaacatagacttaggaaagagaaaggagggggtgtctaccatcaggaatagtaatagccctccaaaggcagtgtggtctcccagctatgcagagaccaagaataaccagcaggcaggaatatggcagtggtgacaggctggatagagctttctccaaccaaaagatggggctccttcatgggcaatgtgcttttccctcttctggcacctcaacaactgaagagagtgggtgccactaaatgcactggcaataagggctgtgggagaggagagggcagcaatctgaatgataaacctgtgccaagatgaatctatttttaaaaaacatcgccctgcttccttttaggcttgtgccccataggtgccttcaagagggaatttgctggagtctgaagcaagaagggtatgagtcagggactacagaacaggggcactacaccaccacctgcagaagccaagaaggggaaaaagctacgtgggccaacagtcaggcatgccagacagggtgtgaggctcagcagccccccatgaacctttggctcttgcctatcccaaacaagaggcaccagctggcagcctgcttcagccagcaaatacagcctgcccctgtcccagcagtccttcagctggtgtagtagatgtggaagtagagagtcttgttgcgcagcagggagtaggagttgtcgaacttgagcaggtagatgccctcaccagggtagtcatggctgccagcctgcacgtctcggtggctgtcccgccggtacacaggcatgacctccccatagcgaccccgcaaggagctcctggagcctctctccacatctccagctggaacgggttctgcgtgagcaaaatggcaaagtgttcagagactgcgtaagtcctgcctgaaggtgagcggaaggaccaggtgacccagtggctttcacagagcggggagattattgccctcctacagacatttggaaatgtctggtgatcttttggtcatcacagtgactattaggtgatatctgcatttagtacccaagggtccaggagtgctaaaatcaggatagtacctacacaacaaacaatgtcccatcccaaatgccaataatgtctccactgagaaaatgatttagcctgagaggagccttcctagcttcagaagtgtctggacatttctgagagggagaaagagatatttagaagaaaagatcccgatattctatcatttagtaggtgaaaggactagctaacgaagataggaattgcagataaacgtgctataaagtgaccctaggattcctgaaaagcagcaaataagatacaaggttctccgctttcccagatacctgtaggtttccctgcccgcttgctgttctatgaagaagcacgttaaaggactgactttaagattatataagaaaatcaaggaataagaggaataagactaatgcttaggacctactcttacgttatctgaaaaatgcctctgggccatcctttgtgtagtgtgtagacactacaaataacagccggaatggagcccggagacccttttaaaacttgtctgggcatgaagtaaagaagtaaccaatagccagctatgagagtttgggataaggagagaatggatacctttagcaaactgtaatcactcactttggttccaggccaagaataaatatctacaaactaagagagagatgtaaaataatctctggcttacatgcgacctgaatgaccatccctctaaactgccgcatgactcaccctctctctgctcctgccccatccctgcccccaggaaggtgttgggaaaacaatgaggtaccgataaggaaaaagaggctttctttcaattaaggcagcagtatcaaccccaccagaatgttctctttggcctgtaccactcagcttagcttgtaatgctgagtttctcaactgcattcaaaggaagaggaggactggtacaacccacaaaatggtcaccagaaatcagattaagccagaaaactgcaaattaggttaaaattaaatttaccttcaatctcttcctcctcttcctcttcttcatcctcatcgtcactggaatcactgacctgcacagttatgtcagtgctagttacaggggtccagtcaaaataaactccaaagccaatgtcatagtcatcggtcgcaaactcccagcagacacgcttcccctctggatgagtaggtacccggatggtcaccacctcaccacgcttcaccaccagacggctgttcttctctttgcccagcttgcttttgaattccttcaccttggcaaaggtccagatgcatggaggagccatcagaggtggggagactgaaaggacaagcagcttagcactgagaaaccatgaggaaacatgagtaccccgggcattttgctaagagaggctggcacagtcagacattctttctactggcttgacttcctttcacaagtcattttctttccttccatttgtctgtctgcctgcctttctttgagtatctactggaaacaaaccacctcctttactcccaaaggtctcacctttcctgtggtcccccagaagatctgcagattccaaatcagctgaaagaacatctatagctcctgtatgttcagactggatcataacgatgtccccagacctctgtggaacttgatacttagccatctgcacaacagaactctggttaaaggagtattcgagtggcagattctaattaatctctttttgcatgaaggctgccccacccctgctctattatctccactatccccactcaaagcttaatgtactagtcaatgttccttctctttcttccaaatagaagttgctaataaattctactaattttttaaagccatcaaaatattccattgtttaaagactgtttcctaccttttgcaactttcctgctccaaaccctttataaggtccttgtccgccaacaccctcgcaggttgttaacagtatttgcattgactgtgattctgggccatgccttggtcttacctcacctgcacagtacctccctgtggctcctctcattaatagctcttgctcctagggtttagtttgactcccactctgccacacatcctcctgctacaattcccactcaagggttacttctacattactgtcaatcagctctccaaagcactgcagagacagaatctggtttatagtctttctctctcatccacagcccacctcgggctacagattgtctcagtcttgaagtcactaacagtgttctatcaatagttacaatttcaccttagaccagccccaggacttgcatttaaacagtacatttgctgccagacgtctgacttacatggaagaatgcaaatggcatttgatactcaaagccctcactaacccatgcgggagcttacaatgtctccctggtgagtttcccttcaaatcactcagattagtgttcctggtttcatgctattataccttaatttctgccccttctccaaacagttggcaggcaactcaacaagaaaactatacctattgcccacaggggagagcacatcagtgagtcagcaatccagttaagaggctggaattgtatttgtgagaaataaataaatcaagtttgtaatcctcccaggctgtattctcataatatctgtttctggagaataagccctccagttctcatctcctttgctaactgaaatgaatcagactttggctagcgtgcttaaataaatccttccttttctaaaatgctaaataaaggattaggttgcaacatattagctacatagccttagtaaagtctctaacagccctcagcctcagtttcctcatttctttctttcattccttttgagacagagttttgctcttgttgcccaggctggagtgcaatggcacgatctcagctcactgcaacctccacctcccaggttcaagcaattctcctgcctcagcctcccgagtagctgggattacagacacctgccaacacgcccagctaattttgtatttttagtagagatggggtttttccatgttggtcaggctggtctcgaacccctgacctcaagtgatctgcctgcctcggcctcccaaagtgctgggattacaggcatgagccaccgggcccagccagtttcctcatttcttaaatggagacacaatggcacctatctgacaaggttgttctcaggagtaaatgaagtgttacagatacaaatgcttgtaaactgtaaagtattatacaaatctaattataacgcctggtggtgtcttcattgacactaataccaaccattattctaacacatatgctaataaatgatagaaacaaccccatcccgcccccatccctccatggcaggggcaccactacaccatcacttccatacagctacttggaaggctgaggcaggaggatcactcgagcccaggattttgaggctgcagtgagccatgactgcaccatcgcactgaagccgggtgacagagtgagacctttgtctcaaaaaaaaaaaaaaaaaaaaaaaatcaaggccaggcacagtggctcacatctgtaatcatagcactttgggaggtcaaggcgggtggatcacctgaggtcaggagttcgagattagcctgaccaatatggtgaagccctgcctctactaaaaatacaaaaattagccgggtgtggtggcatgtgcctgtaatcccagctactcgggaggcgaggtgggacaatcacttgaacccaggaggtggaggttgcagtgagccaagatcgtgccactgcactccagcctgggcgacagagggagaccctgtctcaaaaaaaaaaaaaaaaaaaagcttctgtggaatctttatcataaatactaaatagatctaccacaagaaaagtaagagcaaaatagtccaatgacttcaggctcctcaatgaagaggattttagagaacacatgaacattcactctaacacttcgttttctgaatcggtgcctactgggtgccagtacaatgatgggccctgtggaagatacaaataatcattctccaaaaaataatgaagaccaagatgccctaaattagagggcaaagagagaattccgggagccaccctcgcagtgctttctaattccaacccaaccactatgtgtccacattctggtgcctcctttcataagaaagagccagaatctgccccctacctcattgaggacctgggcctggtctgcaggcagcaaatcctgtttcaccaaggcctgagcctccaaaggaccagttgctttccgcagatcttccgtggcatccttactcactggagataccatctgtggcctctcagaggaagagagcatgttaattcaaggactctttgaaaagactcaatcatcctggagaaactttgaaataaaacaacattcgagataccccctgccccacctgcccctggcatttatttagctctactgtcaccttagccgaccactgcccagggctgaattggtccacagtaaagtgttgacagtgtgaaaacaaagactaacaaggccaggtcaaaggctaggagaaccatggaaaacacacagctccatcatctgagatggactgctggtctggttttttttttttttttttttttttgtcattgttgtttcttttatttatttattttagttgacaaagtgtatatatttatggtgtacaatgtgctgttttgatatatgtacacattgtaaaatgattaaattgagctaattaacatatccatcccctcacatactcctttttgtggtgagaacatttaaaatctactgtcttagcaattttcaagtatacattgttattaactattgtcaccatgttgtacaaagatctccagaacttgttcctccttctaacaccttataccacttgaccaacatctccccatcccaccccctggccccaacacctattaaccaccatcctgccctcggcttctgtgagttccaatgttattcctcactctgcggcccacagggcccacagaattttaaccgaggaattggtagaatctcagttcagttctacacacaaagccactggctagaagcaaaaggaggaggtctgcctaagggagactgggcaccaaaacaaagtacaaaatgatgatcaaggcaaccctctctgcagttatccctgaggcagtctttcagcagatccgtttcataccctgtccccgttcagtgctaggggtcatcactttctctcctttttaaagcacattaatcaacaatcccaatggcttcaaacacagctatgtgaatagttgtttgttttttggcagagtgcaccagtgatgcatctcaccacaacctcaagcaattctcctgcctcagcctcccgagtagctgggatcacaggcatgtgccacgacacccggctaattttgtatttttagtagagacagtgtttctccatgttgttggtcaggctggtcttgaactcccgacctcaggtgatctgcctgcctcggcctcccaaagtactaggattacaggcgtgagccaccgtgctcagccatgaatagttgattataaagatgcaagggaatgatttatgctctcttccatttcccctggcctcacaaaaactagaaaattagtgccacggttgtagcaaaataacccaggccttttgggaatctgttgctgataaaaggtgacatggatttttttgaatggcagttatccaagtatggtctaggggcccttcgggggagtctatgaagttcaaactgtttcataataacactaaaatgttatttcccttttttcattctcattttctcaagagtgtgcagtggaattttccagagactatatgacatgtgataccgcaatagaatgaactcagaagcagagctgagaatccaactgccttttattaagccaaacattaaagagatttatgtctctctttgtactacattctttgctttgaaaattagttgtttttaagtaaaaacatgttttatatatagcatgtcatgagttattatttttaaatgaacaaataaccatattctaatttttcagttttaatttctttttttttttgagacggagtctcactctgtcgcccaggctggagtgcagtggcgcgatctcagctcactcaagctccgcctcccgggttcactccgttctcctgcctcaccctcccgagtagctgggactacaggcgccggccaccacacccagctaatttttttgtatttttagtagagacgtggtttcaccatgttagccaggatggtctcgatctcctgacctcgtgatccacccaccttggcctcccaaagtgctgggattacaggcatgagccaccgcgcccggctgttttaatttctaatatagtaaatattgatagatataacccacacaaacaaaaattctttgggtccttaataatttttaagagtataaaggtctgagaatccctgcttgagggcatcatttcctcaaagaggttgagtaaatgactggaaaatggtagtatacacctcatgggggaaacggaggcttcattttagagtttattagtttgtttcttttcttttttaacataaacaagaagaatcactccttcagataaaacagagccatcttttggaatatccaaaattactccaacctacctcaggacagacaagaggaggtcactccaagaatcagagctgtgggattctgttgatctttataggttcacttgggtaattcagtgtaagctgtaaactggcctaggctgtgggtctattttaatgctcttcaacccagaaattatagtccatttctgtttcttgacactgtgtatcatctgcctcctctactagaaagtaagcttggtggcaggcactgggtctcactgcctctgtatgcacagcactgggaaccaagcctgccacctggaactctaaggccctttttttttttttttttttttggagacagagtcttgctctgtcgcccaagctggggtgtagtggcatgatctcggatctcggctcactgcaactctgcctccctggttcaagcaattctcttgcctcagcctcctgagtagctgggactacaggtgtgcaccaccatgcctggctaattttttgtatttttaatagagacggggtttcaccatgttggccagggtggtctcaaacttctgacctcagatgatccacccgcctctgcctcccaaagtgctgggattacaggcgtgagccacctcgcccagccctaaggccctttgcactctgacctcacctctcagaatcctcactctgccctggtccctccagccacaacagcctcttcaatccttgatagtcctcaaacaccccaagtactctcccacttgagagcttttgcatttgctgtaatctctgcctagaatactcttctaggacattaactcttctttagttaactgaagacttccttcctgcaggttttctgctgagaggtttctcagaggtctgtatataaaatgtgtgccccttcctggccttgtcactgtttctgcccttacccagcttcatttttcttcactgcacctattactgcctgacatgatatggagcatattttgttgattgcaagatgcacactggcttttagattttaacacaactgaaagataggatgtcttaaaaattgatgatatcttaaaagtgccgtgggcctggattgacatcaactctttccacgagagatttgcatttgcttctgccagtacttaggaatgctaccaatctgagacttcttgaaattaagttctctgtttagggttttgtttaatcctcctggcagagtgaatttagacaagacactggctaataccaactggtggttcctattctcaggggagatattttttcctcctatgacacagtgtcaagtttgagacaatcaagcttccttgctgtccttttctgtgtgggggatttttgtctttatattttcactgaaggtgcaggtttttggtatcccagttgcatatggggggtctattagatgatccatcttaagcatttcttcctctcttggtgggacgtgaaagcacaacttacagttgacggcaacttaagagtctgtgaagtatgatgtgtaattgttttctgtccacttcccccactagaacataagctccctgagagcagtgatggactattttgttcatttgtggtttctttagtacctagaacagtatcaggtacatggtaggctcccaacaaacatctgttgaataaatattagccccaaaatatttgttgaataaaaaatgaataagttaatttttgcctgggaataaaagagaaattctggatcagactatcatttataatattggaaaggtgagactacaacaggctatctgaatcattagcttgacttactgtgtgtgacatctaaaattgtctctttgtctttgtgcatgctactctgaaaaaacatggttctgcttatttaaaaaacatattttaaggctcggtgtggtggctcatgcctgtggtcctagctactcacaaggctgagatgggagggttgcatggtccaggagcttgaggctgcagtgagttatgactgcctaccgtgctccagcctgggcaacaaagcaagactctgtctcaagaaataattaaataataaaattatgttaaacaggatatgtgccacccacataaatttaatattcacaattagcattttatgctctggagaattagaaaagggcatttggggaaagattaatttcaaattatttgatgctggtgataagccacataaaggaaaagcctccgctttaagcttctggtttgtactgacctggagcagggaggccatctcaaaggaaggggagagcctggccggcaagccagcctcactagaaaagatagaaagttgtgccgtttccatttccaatagacacataagcataagaagtaagcctcaggcatcacattcactggatttttatcttcactcagcaaatgttagaaacaaaagttaaaaattaaatccctggcccggcgcggtggctcacgcctgtaatcccagcactttgggaggccgaggtgggcggatcacaaggtcaggagttcgagaccagcctgtccaatatgatgaaaccccgtctctactaaaaaatacaaaaattagccaggcgtggtggtgcgcgcctgtagtcccagctactacaggcgtgtagtctggccaccacgccccgctaatttttttttttttttttttttttggatttttagtagagacggggtttcactgtgctagccaggatggtctcgatctcctgacctcgtgatccacccgccttggcctcccaaagtgctgggattacaggcgtgagccactgcgcccggcccacattctttactttaacttgcctccccgcttaaagtcactacctatttctttcaccagttcctcatctcagaagataaaacctgtgaaagcattctatccaaagtggttacctgtggggtgaggagcagggttctggatcggtggcagaagccaataaagaggtatccttgttttctagatcttcattctctagaaaaccatagaaagaaagaattcaatatctgagagggaatacaatcataattatcttgtacctttaaaaaaatctagcaatttcaaccaaattcttcccaaaaatattctggtatgaactttatactctcagaggcccaacacataaattattcaagtcatcacatccaagtattctcagacagtcatatctcattcataaaaaataaatcatttctaaaacaaggctccaaaaattaatcctaatttaagaatcatatttctgccaggtgaagtggctcacacctataatcccaacactttgggaggccaaggcaggaggattgcttgagaccaggagttcaaaaccagcctgggcaacagagcaagaccctgtctctaaaaaaaattaaggccagatgcagtggttcatgcctgtaatcccagcactttgggaggctgaggtgagtcaggagttcaagaccagcctgatcaacacagtgaaaccccatctctactaaaaatacaaaattagccaggcatgatggtgcacacctgtaatcctagctacttggtaggctgaggcagaagaatcacttgaacccgggaggcggaggttgcagtgagcagagatcacaccattgcactccagcctgggcaacaacagcaaaactccgtctcaaaaataataataataaattttaaaaattaaaaaaaaaatagggccaggcacggtggctcacacttgtaatcccagcactttgggaggccgaggtgggcggatcacttgaggtcaggagttcgagaccagcctggccaacatggcgaaaccatgtctctactaaaaatataaaaattagccgggcatggtggcacgcagctgtaatcccagctactcaggaggctgaggcaggagagtcacttgaacccaggaggtggaggttgcagtgagctgagatcacaccactgcactccagcctgggcgacagagcgagactccaactcaattaaaaaaaattaataaaaagaaagaaatcatattcctcagaaagcagatggttaaattaggcagaacatagagggcagagtgggatgtaagataaactgaatttagcatcaaagtataaagtgtcacttctacattcaataagctcagatcaatgtacccaaggtcaggtaaaggacttttgtattttcatttatttattcaatcactcatttaccaatgatttactgaataactaggtgccctcaaggagtatataggtgaaatgcataatgaaggccatgttctcaagctcaaaagaagcctatgtatggctggtcttatcacagccatttttgcagtaaggaacttaaggcatagagacaggattcaaacccaggcagttgtgcccttaaccatcagatgctacttagttttgtgggttattcatttagcctttccttgaacacccagatagcatatggtttagtgcatttagacagcccctcattaaactccctctgtgtaagacaacaagacactgaagactgaagtttacttctcaatacaaaatgcaacttaagtaaacttcaaacattgaaagtttcagagtttggtagcaaactcaaagtgaaaatgacaggcaaaatttttaatccaagcttaatttagtctcatgttttatatgtgaacaagatctatttttcttttcttttctttgttttttttttttttttggagggggacagggtctccctctatcacccaggctggagtgcagtgacacaattatgactctcggcctcttggcaacctcaaccttccaggttcaagcgatcctctcacctcagcctcctgagtagctgggaccacaggcacaccccaccatgccagactgatttttttctttttttttttgtagagatgggggtctcactatgttgcccaggaaggcttgtcttgaattcctgggctcaagtgatcctcccacctcagcctcccaaagtgctgagattacaggcgtgagccactgtgcccatccaagatctatttttctttgggtcaattcagtctcacaggcagaaagaccttagagctcctgccatctaatttttctcccaacaaagaaacactgttccccagtctctgccactctgtaaagaggcccattcactgagggaaaatgcaaagagaaagttctcccctctgttgacctaagtgaagtgtgctttctaataaattctactctttgaccactactcccgacaatatcctttcccatattgacagctggctgtcacatttccacaagttccttctcctcaggctggtcatcttcacactatatagcctgtgaccatgctggctccctttagccgctccacttagtttgttccatttaaagaaaggagccaaaatgaacaacttttccaggtgtgttccaatccgtgcagactacactgacaataacctcttaaaaaggacacaatatttcttgacataataccttaaccaggcactagatttcttaactgcaaacttactgttggcctaaataagtcaatcaagatctccagggcttataaaaataaactttttctaagcccactctctcctatgctctatttttaaaatagacttttggaaaataattgattttttaacttaaaaccaggactttatataccctattacttatttcaaattaactttttgaaattatactaataatgctttgttcattgtagaaaaaagtacagataagaaaacattttgcatctacccttccagactttatttcctttaaaataatttttaatatacagataatccattgttcactgtaaaaaaaataaatcaggaaatacagataagcaaaacaacaacaaactaaccgtaaccccactaaccaaagattaccactgttaactttttaaaaaaagacacaaggttggctgggtgcagtggctcatgcctgtaatcccagcactttgggaggccgaggaaggtggatcacctgaggtcaggagttcaagaccagcccggccaacacggcaaaaccctgtcctactagaaaataccaaaattaggtaggtgtggtggcgagcacctgtaatcccagctacttgggaggctgaggcaggagaatcacttgaaccctggaggaagaggttgcagtgaggtaagattgcaccactgtactccagcctgggtgacgaaggaagaactctgtctcaaaaaaaaaaaaaagacaagaggtttctttatgttgcccaagctagtcttgatctcttgggctcaagcggtcctcccacctccccttcccaaagtgctggggttacagcacagcatctggccaactgttaacattttgatgtatatcccttgagaaatacatttatacatatatgcatacaaatacaaatgtatatgtattgtgtgtgtgtgtgtgtgtttctgaaaggacatgcactaaacactttttttttttttttgagacatagtcttgctctgttgcccaggctggagtgcaatggcatgatctcagctcactgcaacctctgtctccgtgttcaagcgattctcctgcctcagcctcctgagtagctggaattacaggcacacaccaccacacccggctaattttttgtatttttagtagagatgggttttcaccatgttgtccaagctggtctcaaactcctgacctcaggtgatccacccgcctcggcctcccaaagtgctgggattacaggcgtgacccaccatggccaataaacacttttaatgaacatttttcagagtcaataaagatagggctatatcataattttaaacggctacatattatcccatacgttgtcccaccaattcttaaccttctactggtagagctagtgcttattccaaatctttcattgttacaggcaatgatgctgtctataacaattacagattgttatagactgttagagataatgatgttctattggcattatctacaacattttcttaagaacctcccccctcaacagccttggaagtggcagttcctatgatcaaggtacattgtgttggccatagttcattggtttccggtgagcacctgcccaaaagtcagtccgattctcttccgtaaaatctggagttggtatccaagacggaaacagactgtggagaactttgtcagtttaggagctgagcctgccttttgggagaagccttcacaggccacataaaagcagatgactaagcagagaagataattttcagaaagtacaatgatgcattcaagtaaagggaaagaaaaacaaggggacctctgagtctaggagagaaacagaccagagaggctactttgtaacaccatgaggttcaagtgtgctcctccaactggagtctgtaagaggccttacatagtaacaatgagctctttttttctttttattgtgaaataaaccacacatatgaaagattgcatgaaaagaagatacagagctaaaatattaataatacaaatacctgcatacctactaactaggtgaattattagtactttagaattcccctacccaatgccctttcctatcctatattccctgttccaaattctgagtaaattattccttgctattctttatatattttaactaattactgctgtttaaaaacctttattgtagaaaatgttaaacatatacaaaatcacaaaattagatcacagtagaatgaagactcatgcaccctacctatgttttcaacaagattttacttggcctggtttcctccatgccctaccttcttgccccactcaccaacagattatttcaaacaaagcccagacatcattgtatctaccattacattcatttagaacaaatctctaaagaagaagactttcaacacaggtacaacaacattatcactcctacaaaattggcaattcctcaatatcatctcatacccagcccatgttcaaatttctccaagttgtctcccagaatttcttcttaggagctggtttgtttgaatcagaatccaaataaagttcacacactaaatttaccttataatctcttaatctacatcaatcctcaccaccatgggtctgtatacaatatatttgttgacattttaaaaaactgatctgcagacttttcaaacattctgaatttggctgactgccttttcacggtatcacttaacagattattttatgcactatatttcctataaaccggtcatagatgtagagcttcactgtccagtatagtaattactagtacacgtagctaaatttaaatttaaaagaatttaaaattcggtccacccatctcaactagccacatttcaagtactcaatagccatgagttgctaatggctactgttgccagggagcacattttcaccatcaaagcaattctattggactgtgttgatctagaggcttgactcaattcaggttcagttttgttcttgcaagaatattccagaagtaacatatgtaattcctattgtattacattaagaggcacataatctatggttattacaagtttaatgataaaaagattaggttcatgttttcagcctaatccaccatcaagctcctcattaaccctgcacctagtggctttagcaggcattcatgatcattgtctaaaatagatacaggatttcattaaaaactagaaaatgacttttccaattctagcactttctacagttgttcttagttggaattctactaaaaacaaaatttcccctcatcaactatttggctactctgacacagtcataagagaaaagcaggataaagacttgatccttcaccaactgacttagaatcataacaacctccaaaggtaaccaatgatttgttctttgaagtatcgttagaaacacatgaattttagcatattttatgtgcttcaagttttcctaattttggcctgtgggagctcctcaaagttggctcttgtgtccttttaagatgacaccactggtcttgcttatagcataagttctgagctttaaaatcttataaatgcctgtcccacacttggaatcaactatttctctaaggagtcctggttctttttcattagaaattgtctttaaaggctgggcatggtagctcacacctgtaatcccaacactttgggaggctgaggcaggtggatcacctgaggtcaggagatggagaccagcctggccaacatggtgaaaccccatctctactgaaaatacaaaaattagctgggcatggtggcacacatctgtaatcctaggtacttgggaagctgaggcatgagaatcgctggaacctaggaggcggaggttgcagtgagctgagatcgtgccaaggcactccagcctgggtgatggagtgaggctctgtctccaaaaaaaaaaaaaaaaaaaagaaattgtatttaaagaccacaatcaatgtaatatatcacacacacacacacacacacacgaatatatatatatcctaaatgtcatatattaatatcacatataaaaatatacatgtaaaatgaattcatgcaaatacttctaattcagattacaggatttttctttttttttttgagacggagtcttgctctgtcgcccaggctagagtgcagtggcgcaatctctgctcactgcaacctccacctcctgggttcaagtaattctgccttagcctcctgagtagctaggattacaggcacatgccaccacgcccagctaatttttgtatttttagtagagacagggtttcaccatgttggtcaggctggtctcaaactcctgacctcgtgatctgcccgcctcagcctcccaaagtcctgggattacaggcgtgagccaccacgcctagcccagattacaagatttttaacctaactttaattctatatttgtatttttcggtcttgttgtggaaaatcctggatcttaataatattcacatatatacatatttgctttcttctacaatgtaaatataatagttttaaacgaataacagtataactaaggatatggatattataacattcttctccttagcttttaaccttccattatttgtttttgaaaacataaggaaatacatatacatatagttgtatgttgcccccatcttagaaaaaaatacacattcttcttctgcaacttttttttgtttgtttgtttgtttgtttgtttttgagacagggtcttgctgtgtgacccaggctggagtacagtggtgcgatcacagctcaatgcagtctcaacctccctggcttaagcgattctcctgcctcaggctcccaagtagctggaaccacagtcccatgccaccacacctggctaattttttaaattttctgtagagatggggttttgccatgtagcccaggctgatctcaaaactcctgagctcaagcaatatgcccaccccggactcccaaagtgctaggattacaggcatgagccactgcgcccagctacaacttgtttttatcacttaacaacacagcctagaagagctttcaagttggtgaatttatccacattcagtggtgcaacccaactccatgcagacggaagctcctgcactcaggacccttccaggcctcgccctatttacctcttcatctggctgtttatcctttataataaacactggtttattatataaaaacaggcagaaattctccagatgtctcccagtaatgtccaagtttttatcccagtgtcacaaagaaataccaatgatgaaacaacatgacctacccaggacaacctacaacgacctgaagacatttactggggagctgtgttgttttcataatatctgctatcgagtaaaactgaagagtggctttctacttgatcaaaaaacagtttaaaaagaaatattaatgaatatcaaaggagtaatgaaacctggcctcaacgccattctggtacacacaggtggaggcaaaccatggttgttagatgtctgagctgcaaagaaaagatccacatgattatctggagatgttttgataaatggagtacctcaatctgccaatttcaaatgtaattcacattctgtggtacaggatgatatcatcatgggcactctgacagtgagaaaaaatttacagttctcagcagctctttggctttcaacaactatgacaaataatagaaaaaaaaattgaatgaattaacatggtcattcaagagttaggtccagaaaaagtggcattccaagattggaactccattcatggtgtgtctggaaaagattacacagatcttcctcattactttaaatttttaaattgtatatgtttaaggtgtacaacataatgttttgatatacatatagatggtgaaatggttaccatatcaagcaaatcaacaaatccatcatcccacagctatcctctctttttgtgatgttgaacatctttttatatacctgttggccattgtatgtggcaaaagcacctaaaatttccttttagtaaaattcccaagcaaaatattattaaccatagttctcatattgtacattagatctctagacttgttcatcctatgtatctctactttgtatcctttgacctacacctccccctttcctctaccatcaccaccaccaccaccacctctagtaaccactattttatcctgtttctgtgtacttgacttttttttttttagattacatatataagagagatcgagcagtatttttctttttgtgtctggcttattttacttaatataatgtcatccaggctcatccatgtgtggtaaatggcaagatctccttcttttataaggctaaataatattcctctgtgtgtatgtatgcacaccacagcttctttattcatttgtctgtcaacggacacatagattgttttcatatcttggctattgtgaataatgcgacaatgaacaggtatctgaggcggtgatttcacttcctttgggtatatattcagaatgggggttactgggtcatgtggtagttctacttttatttaggaatttccatactatttttcacaatggctgcatcatctacatttgtaccaacagttgttatctcttaccaaagagaagtcatcctaacaggcatgaggtgatatatctcattgtggttttaatttgcatttcccttgtgactactgatgttgaacatcttttcatgtacctgttggccatttttacgtcttctttggaaaaacacccattcagatcctttgcctttttttttttttttttttttcagacagagtctcactctgtcacccaggctggagtgcagtgacacaatctcggctcactgcaacaacctctgtctcccaggttcaagtgattctcctgcctcaggctcccaggtagctgggattacaggtgcatgccaccatgcccagctaatttttttgtattttcagtagagacagggtttcaccatgttgaccaggctggtctcaaacttctgacttcaagtgatctgcccaccttggcctcccaaagtgctgggattacaggcatgagccaccacgcccggcccatttccattcttttgcatgtggaaatccagttttcccagaaccatttattgaagagactatcttttccccactgtgtcctcttagtgcctttgtcaaaaattagttggtcatatatgcttgggtttgtttctaggctctcaattctgatctgctgtttttatactagcaccatactgttttaattactatagcttttaatagaatttgaaatcagaaagtgtgatgcctcaatgttttctttcttaggattgcttgtatattcagggtatttgtggttacatacaaattttagaattgttttttctacttctgtgaagaatgtcattagaatttggattgggattgtgttaaatctgcatattgttttgggtagtatgaacatttgaacaatattaatttttccaaatcatgaacacaggatagatcttcccatatgtttgtgtcttcttaatttctttcatcagtgttttatagtcttaagtgtccagatctttctggttaagtttattcataagtattttttttcttgagacagggtctctgtaagccatgctggagtgcagtggcacaatcacagctcactgcagcctcgacctccatggctcaagcaatcctcccacctcagcctcccgagtagctgacacaacaggcatgggctaccacgctaggctaatttattaagtattctttatgctactgtaaattgggattattttcttgattttttggataggttgttactgtgtacagaaatgcaactgatttttgtgcactgattttttatcctgcaactttattgatatcatttattaattctaagttttttttgtagagtttttggggttatttacatataagatcatgtcatctgcaaatggacataacttctaccattcagctaattgtatgccttttttttttcttgtctgcttgctcttgctagcacttccattactatgttgaatagaagtgatgagagtggtcatccttgccttgtgccagatcatagagaaaaagttttcatttttccacactgattatgacactggctttgggtttttcataagcagtctttattacgttgagtaaatttctttctacatctaaagttgttgccagtttaaaataagctattctaactacaatttattctacataagcctcatggtaaccacaaagcaaaaaaccaccccagataaacaaataataaagagaaaggaatcaaagctcagcattatagaaaatcaccaaatcacaaaggaaaacaagagtaagaaaggaacaagggctctacaaaacaaccagaaaacaattaacaaaatagcagaagtaagtccttccctatcaataataagcttgaatgtaaatggattaagttctccaattagaagacaccgagtgggtgaatggattaaaaaaaactaagatccaacctatatgctgcccacaagagactcattttagctttaagaacacatacaggctgaaagtggaagaattgaaaaagatattccatgtaaacagtaaccaagaaagagcagaggtggctgtacttagacaaaataaagtctaaaaactgtcacacgaaacaaagaaggccattatttgatgataaatgggtcaagccatcaagaggacataacaattataaatacatatgcactcaacatcagagcacctaaaggtataaaccaaattttaatagacatgaagggggaaaatagatagcaatataagaatagtaggggacctcaatatcccattttcaacaatggatacatcaactagacagaaaagtaataaggaaatactaggcttgaactacacttaggaccaaatgggcccaattttccatacaacagtagcagaatacacattcttctccattgcatatgtaacattctccagaatagatcagatgttaggccacaaaacaagtcttaacaaatttataactgaaatcataacaagtattatttccaaccacaatggtaaaaaaactagaaatcagtaacagagggaattcagggaaaaatcacaaagatgtggaaattaaacaacctgctcctgaacaaccaatagattggttgagaagaaatcaaaagagaaacgtatcttgagacaaaagagaatggaaatataacatactaaaacctaggggatgcaacgaaagcaaaagcagttctaagaagaatgttgatagcaataaattcttacattaaaaaagaagaggccaggcatggtggctcaggcctgtaatcccagtactttgggaagctgagacaggaggatcacttgagttccaggctgcagtgagccataatcatgccactgcactccagcctgggtgacagagtcagacccagtctctaaaataataatcataataatagtatctcaaataaatagcctaacattattcctcttttttttttttaatgttgcctaggctgtactcaaactcctgggctcaagcattcctcctgcctcagtctcctgagttgctaggatttaggtgcatgccaccacagctggctcattactttttaaactggcatacttgactgtgtggatgtacaccatactcatgtccctaccaatagacatcagggttatttccagtctattaatattgcaaactgtgctacaatgccttgtgcatatttcatatttttgctagtgtatctttgggatagattcctgagagtggaatttctgaaccaaattctccacaaggatcatctattttacattcactgcatcaatatatgagtgcccgtttccccacacctggcacatcagagtacattgtcaaactgttagaaaattggcagaacttgatatgtgaagaatagtatattaattttaatttgcacttctcttatcttttaatgcattagaccactttcttttttttcttcttcttcttctttttgagacaggatcttgctctatcacccaggctggagtgtagtgttgtgatcacagctcactgcagccttgacctctagggctcaagtgtagttttgcaatcacagctcactgcagccttaacctctcgagtagctcctagctactcaggaggctgaggctaggaccacaggtatgcatcaccacatctggctaatttttaaatttttctgtagagatggggtttccctatgacgcccaggctggtctcaaactcctaggctcaagcaatcctcccacacgggccatccatagtgttaggattacaggcatgagccatgatattttttttaagatggagtctcactgtgttgcccaggctggagtctggtggcataatcagagctcactgcagcctcaaactcttgggctcaagtgatcctcctgcctcagcctcccaagtagctgagaatacaggcaccctcaccacccccagcttgcattttgttatttaagcctttttttacttcatttctataggacaagtccccagaactgaaaaaccttgtcaaggtctacacattaacacttttatacacattgcccaatttctctccaaaattcacttctactaggagtggatatccgagtgtaaccatttccccacattctcactaacactagatataatcattccttataactgctgccattctatagatagaacacgatgaaacactactgttttaatttgtcatcctttaagagctcatatggctgaaacaagctcttttatgcataaaaatcagttgccttttttgttgtttaataagggaattctgaccacacatactacttaacctacctcttccactcaacaatgatatttatccatttaaagcagcccactgaatctccttcagatatcactcagccaaatattttgccaaaatcaaaatatactgtatatacagcaaccacatgaaaaagggaaatttgagttaatgactttgcctaaattcaacagaactttactggacccctgctatatgtcaggcagtatattccatgtagggaatatacagttaaattagacatgatttgtgccctcaaggaactcagcctagtgaggaagataaactcataaacagacagttgtaatataagtgtggtatcctttaggatagaattatgcactagatgtcacagatacacatatagttaactaatttagggaataaaagtatcaaaggtttcctgaaagagatgacaattgcactgaattcaaaaatgaccaggacttggccaagtcaagtggaaaagggcactgcaggcaaaggaggctgaatgaacaaaaccaagaacacaaaaaaataccaccgtggcagctcagtgtggctggaggccactgcaccaatgcagagagatgagctgagagccacaggtcccagtgatttaacttgatacttaaccaaattcctagtaagtgcctggccacatcctaggtactggagagaatatccaaagcagacacagttctggctctcatgatgctttcaatctagcaggaaaaagtgtgtgaaggtcctttgtcccaaaggtgatgaataattttaagctagtaaatgacatggtcaaacctgtatttttttggtacaattctatggcagccataggtaggatggattttacgagatcagataggaggcctctgcagaagtccatgagagagagaaaggacctaactagtaatgaaagactagaaaggctataattagaaaataattagatagtcaaatgtgtttttagttcgcccatgctggctcctagcaacacttattttctttacattcaaatgacatattctactgaaaatctggatcaagtttaatggtctccaaattctggattatactctttcccttcaggataactaggtatgtccatttctagtccccgacatccctcaaagatggtgcacaagtatatttgcaagttatttcaggaccccagacgtagaagtcatctgtcaatcttctggctttcaaaaatactcaaccttttcctccttggggagaactgtcactgacaatagtactcagtggaagtcaaaatggaagatccttctcttcgcagtaccaggaagtcagggaacaagcacataatctaaaatattcccacctggaaaaggtgaaacaggagtgggacaaatgagagacagaattcatctagtggcagccaaacagccaagttgttcttgctgcttagcctctggagtcctccagccttctaacaatttagtgagcctcctttttccttctaataaatcctctttctgcttaagacagccagaattaacttatatggcttgtaaaaagaactctgacaaaaattcctggatagaatttcactgggtccagaaatctgaacttaattaaagtacctagctattctacctttattctgatcatctttgttattataaccaagactcagtggtcacttactatatgtcaattattttctaagttttttgtaggcatcaccatattgaatagtcactgaattgcactgaattatagaaccactgaagttgatgctatcattactccctttctatagtttaagaaattgaagctcggagaaatcatgatgcccaagatgaccagcaaatacgaatagaagtgatatgcactcaggcaatccaagatcaaagtcagcattcttactaactacattatacactgactcttttaaaaaccttttctaggctgggcgcagtggcttatacctgtaactccagcactttgggagcccgaggcaggcagatggcttgaggtcaggagttccagagcagcctggccaacatggtaaaaccccgcctctactaaaaatacaaaattagccaggcatggtggtgtgtgtctaatcccagctacttgggaggctggggcaggagaatcgcttgaacctgggaggcagaggttgcagtgagccgagatcacaccactgcactccagcctgggtgacagagcaagactctgtctaaaaaaaaaaaaaaaaaaaaaaaaaaactttttaaatcttttctattgtgaaatataacgcaaatgtagaagagtacacaaaagtgtatacctcaataaattatcacaaacaccacccaggccaagaaatagaacacttctaacactccagaagcaccactcatgaccttcccaatcattacctgatcctttcctccttaaggtaagaaaaccactatcccaactatggacattatttccttgctttctttatagctgggccacctaagtaagcattcctaaacactgttgcttcactgggcctgttttctgaattccatataaaggaaaatgaaaaagaatgttttcttttgggtcttgcttatttcagtcattattttgattgatgcatccatcaaaatctgcatcaaaaaatgcacccatgtaattgtaggtaggtttgttaactttctttctttttttttttttctgagacagaatctcactcttgttgcccaggctggagtgcaatggtgcaatctcggctcactgcaacctccacctcctcgcttcaagcgattctcctgcctcagcctcctgagcagctgggactacaggcgcccaccaccacgcccaactaatttttgtatttttagtagagacggggtttcaccatgttggccaggttggtctcaaaatcctgagctcaggtgatccgccttcctcagcctcccagagtactgggattacaggcatgggccaccgcacccagccagtttgttcactgtcattgctgtacgttattccatgaatccaccatgagctatctatctattgttgatgatacttaggttaactccagtttggggctattatgaataatgctgctatgaatattcttgtgtcttggctacagtgcatacatttatgttggatataaatgtcagaatggaaacggttaagtcatagaaatttgaatgttaaatttcagtagataatgccgaactattttctaaaggggttgtaccaaatataatgctaccagcattgtagcatcatttcattactctggaccttctctgacacttggtcatgttaaaatttttttggggggccattctggtagatgtatgctaatttagtttgtatttcaccaatgactcgtatttcttggccatttaaaaatcttcttttgtgaagtgcctctccaagtctcttgccaattttattactggattgtcctttttattatttatttatttatttatttatttttgagacggagtctcactctgtcacccaagttggagtgcagtggcatggtctcggctcactgcaacctccgcctcctgggttcaagagattcttcggcctcagcctccctagtagctgggactacaggcacgtgccaccacacccagctaatttttgtattttagtagagacagggtttcaccatattggccaggctgttctcgaactcctgacctcatgatccgcccaccttggcctcccaaagtgctgggattacaggcatgagccaccaagcccagtccctttttattatttataggagttttagatacaaaccttttgtcaggtatatgtattataattacctgcttccactctgtgacatgacttttcccatttaatggtggcctttgatgaaccaaagtacttttgtgtactcaaaatttatcaaatttgccttccttagtctttgtatgtcctgtctaagatgtctttcactatattgagatccgaaaatattctcccatatcctataggtaggtgcttatgtactacctttcacatactgttctataatctaccgagttgattttttgtgtatgatgtgtgaggtaaagattacgtttctttactttcctttctcttagaatattcaattgtcccagaaacatttaccttaccttacccactgctctatgttaacaatctttgttgcaaagcaagtgtccgtataaacatgtttctaagcttttgattctattcctagagcctgactactctttaaaaactttaaaataagtcttgatgttggatggaacaaatctttccctgttgtcttattcaagagtgtctttgctatttgtggccttctatttctatatgtattttagaaccagcttgtcaaagccacccaaaaatcccaattcatgaacttagctgtttctgaagctgagttgcactccctgcaatgacctacttttagggcatggcctttcatggccctaacccaaaggaaatggagttcaccaggctcccccttgacgggtcctgaacactaatccatttcctgttactttagttcaaagaggcacttttcatgaccttgtcactcagcttccccactcaggaatccagcatgtaccctcaggagacaaaagagccccaaaatagactcttgtccttggatctctatagctctcacatggatcacagctaggtaattcttcatgatctttctatctctccagtatcttccagcagatgtttatatttcacccatattttctaattgtccctgatgagagataattacctagtctgctattactgaaaacagaaatccatattgcctatttacccatatcaatctgaatataccttagtgaataaaatagaaacaaaaatagttctgccctctgccaggcacggtggctcatgcctgtaagggaggcggaggcgggagggccgaggcgggcagatcacaaggtcaggagttcgagaccaacctggccagcatggtgaaaccccatctctactaaaaatacaaaaattagccgggcgtggtggcacatgcctgtaatcccagctactcgggaggctgaggcaggagaatcgcttgaacccagaaggcggaggttgcagtgagccgagatcacaccactgcactccagtcaaggcgacagagcgagactccgtttcaaaaaaaaaaaaaaaaaaaaaattctgccctctctctgtcattgattaataatatcagtttatctactatgtctatccccctttggcttatcctgtcctttggatcgtaatgaagacttcaaaaaggttaaatttttagacagaaatgaaactagcacaaaaataatgaaagacagtagtggatttaaagaataacaaaattaatctctaaggagacttataaccttttataaaaaaattcactgagagaaaaaggtctagaaaatgtcagttcctgatgagcagaaacagaatacagacctatagaaaggctcttatttaggatatagacatagtgaagtctcatgccaagtttgtgtgtgtgtctatctatgtacacatatatttatatattttaaagactatttttattaactatttctgaataatttatccacattattcaaaattcaaaaagcatataagtatacagtgaaaaatttcctcccatgtcagtccctacctccaaaagcaatcaatgttatttggttttgtgtagtcttccaaagatgttttatgcatataaaaaaaagtgtgtgtgtgtgtgtgtgtgtgtatactttttcacttttttacacaaaaaatgggcatgcttaggcgtggtggtgcgtgcctgtaatcccagctacttgagaggctgatgcaggagaatcgcttgaacccgggaggcggaggttgcagtgagctaagatcacgccattgcactccagcctgggcaacagtgcgagactctgtctcagaaaaaaaaaaaggtcggggggagcatgctggacatactactgtgtactttgttctttccacttatatctcaaagacctttccataactgcacatgaaaagcttcttcattcttttctacagctgattagtatttcattgggtgaatattccataatgtattaccattacaaacaatgccataataaccttgtatctatgtcattaaacaggagaataaataaatctataattcctggaaagaatgagtcaaaggggcatatattgtaattctgatggatattgacaagttgccctccacagaatctgtaccaatttacaatctcattagcaaagcatgagagtgtctgcttctgcacaccgaccaacaaagtgagttagcaaactaccaagtgtagttaggatttccaattcccttattatgatttaggttgagcatttttcacatggtaagcaccacttctcatagcattttaacaacttaatgtatactggaaaaaaatatgcttttgattttttttctttccatcccataaggagttgagcttttgatttttaactttaaaggaatgccctaaattatttttaattttaaagaatgccctaaattacataagaactactggtaaaacaacttataattggattcagagaggcaggaagtaagaaaaggagaaagaaaaacataactttatttccagaagtataaagtgtgggagatgcagcgctgtttcagtgagagagaattatgagcacagccttttaggtttcctgaagttcttcagtgaaatttaagccactatgcagaagaaaaagccaattttcctatagtatagcttttattatattagccaaatataagccaattctgaaagtattcctagaagagatcagagaaatcaggccagactttgcaaatttagatggtatgtggggaaatgttttttatttttaaaaatatgtattctagtatatattaagaaaaatggatatatcaaactagtaatatcgtaggtattatttagaatgaaacttttaagtgtcaatcaaaatgtcaattaaatgtcaatgtcaagaaaaaatagtaaataactaatactgtaacggtattctccagtgtggcaaagtcattaccatggttcctcagtggccgaaatctcggaaacaatgaacggaggaggaaaaatggaagcttaacaataacttaatttatcattgatggccactaaagcaaaggtgagagagaaaaaaggaacttccttaaaataacttattttatatttgacaactttttaaatgtgcattttctttctacattaccaaagggtctggtttcagacattctgatcatgctagggattcaaacttactgtgtacttcgtactttccctacaaggagaaccaaaaagcaggtttttttcaaaagcatttgaatatcaggtcagggttctttagaacaggcctcagaggatttccccctcagtaaacaggctgcaaagagataattagcctgtcattttagattccagtgcagaagaactaaaagcaggctatgtggttacagactcaagaggcttaaacgaaaacaaattaagtgagtttatgttccaaccaaatctagtgaccatgtgatccaatttctcttcagcccttgagtgggacatgctcctgagaggtcactcagattgtgcacctttggttatactgtttagactgaatcacgacatgaataatcaactatctgactaatcgactatctggacactaaaaacacaaccactgtaagaaaaagaaagccacaggcagacaaaatgttaacattttgacataaaaccacaatagaaaactaaaaaacatcaaggctgtttgtcattgactccctattattcttaccattcaacatggtagccaccaaattttgaattttaattcatgcacattgaaatagccacagatattatatatatatatatatatatatatatatatatatatatatatatatttttttttttttttttttttttttttttttgagacagcgtctccctctgtcgcccaggctggagtgcagtggtgcaatctcggctcactgcaacctctgcctcctgggttcaagtgattctcctgcctcagcctcctgagtagctgggacagatatgaaatattttcatcactgcaaaaagacttattgtaatattctaacttctaccttagaaccatgaacaagtttacctgacctgtttccatcctcaacatctaaatgtattgatagctctgggggacatacacaccaaactaagttctactgctgacttcaggatcacaatagagttttattttcctttaaacttaaaaaaaaaacaaaaacaaaaacaaaaaaacctgcctttaagtgatgcaacaagtatgcctcagatagtttcataattaaagaatgatttatctctcctctggggaactgaagaacccaggtgcctcaaataaaagactattaaaaacaattacaatgcataaaacaataagaacaccatgaccactggagagcttagttcataagaacataaatcctttccttccttttcaccaaaacctcagctaacaaacatgaagacactcaataggtattctctgcagagaacacttttaaaaaacaagttatggttattctggataatgacacattcctgctttgaaggaataagatacaccaaaaaaccaaaacccttaactcaacaatacctgatatggcttggatgtttgttccctccaaatctcacgctgaaatgtgatttccaatgttagaggtgaggtctggtgggaggtgactggatcgtggagatgaatccctcatgaatgatttggcatcatcctcttgatgataagtgagttctcactcagttagttcacctgagatatggttgtttaaaagagtctgggacctcctcccgtctctctctctctcactcccaactctcgccatgtgacatacctgctccccctttcagtatgattctaagcttcttgaggccctcaccagaaacagataccaacaccacacttcctgtacaccctgcaataccatgagccaattaaaactcttttcttataaattactcagtctcaggtattccaaatggactaacagaacacctgaatatccaattccatttcttactgctgttttctctctgaaagggtgagagaaatctcattaaatttcattctttcttagagctctattgcttactcattgtatcattttctagaggaagatggcagaaggatccaatcaaacgaattccaagtttaaagcagttttttggggtttacgcccaagcctctggtccaggccaaatatagtatttccacactgctttggaagcccagcttaactctaacacagcgttcccaaaagcagcaccactgacatctggagccagatacctccttgttatggggattgccctgtgccttgcaggatgtttagcaaacatccctagcctatcctcactagatgtcagcaatagctgccaccagttgtgacgagcaaaaatgtttccaaacattgccatgccctggggatacaaaatcgtacctggttgaaaaccattgctctaacccaaggaacattcttggttatctcaaccctaattcttcacattcattagatgctcatccagatctctgcattcagactttctctcaccatcaaactcagcaaatatttgcgaaacctctaaaacacaacatcaagggctctagataaataaacaagcaagagagattccgttcctaactccaagcaggtttcttagtagataaagaattgtaataaaagacgcccaattatataatgttttgaattgttaattgtttctccctgaaatggatctctcatctcatcaaactgaaaacaccttgaggacagagaccataacctgtctgcgagtaccaatacttgattcatggccaataaaaacaaacaattatagacttcatcataacaagatgacaatttcatccagacagtaaaaacttgcgctaacttgaacaggtaagttaacctttctcagctgtagtttgttcctctgtaaaatgggaagaaaatgattgttgacatgactaaatcagaaaatataaatttttttccacctctggcacagaataagcattcaatatctgtaggttatcattactattattttattagcaacaaatcctacctcaagaggaagagcttgctctgggctactataataaacccctacatgacattaaaaaaaaaaattatcaccctgcattctgagggtaagaggaaggaaagtaagcatctctaccaatgtcctgggaggaagtgaatgcaggaatgaattagatgtcagggggaaaaaaaaacacactcatctatctaaaacgcgtgggtacgtttgccataaacacatgagaacctaaaggggaagtaaaaacatgcttaatttgtaaatactggcgcatgcaagggacaagtgttataagacttacctttctgtgtttacttgcttagtcttttagacattatgcttagaatttctactgctatgttaaatatatgccaacgatttttaatttaatacaaagcagagttcgtaagaaaaaaaggcaaaatttgtcaggtgttttaaagtaaaagaatataaaatcatgggaaagagctgggtgagttgtgtgtgtgtttgaataaggcagcattatgagagggaagatacttgggatcagagtagaagacagaaaaaggcaccatgttggaagccatacatccaagaacacctctggcggcacaggaagttcaactgaacaaaaagagaccttactgtcacaatggttgagacgagtatagtgtgtaccatggactataccccaaatgccttagacaaagcagctcaagtaatcctcacaataatcctatgaggcagatatttttagtaatcacattttacagatgaggaaactgacgtttcagactccaatccaggcaccctggctccacagtagtgcctcaaccattatactttatggtgtctattttaatttcagacctagaaaattaatttatatttgctacttaaataagacaagttctctcccctctaccctttcgtatttcaaaagagcatcctttcagttgcatcgtgtgtggtgttcaggaggctgaaagaagaaagtgtgatggatggactcttttgtctttggacactgaaataatacacacggaggaactcgcgttagtagaaatggagacgtcgtcctggacaagaagaggatgagggtcttgagaatgagggaggtaggccaaatttttaattcctgctcttgctttggctactgtgttcaagcaaaagaccccagacactacctatttcaactctgcttttcatttttcccactctaagcgatggagaggatggcagcaaggccagggggcctatgtgcaggaaggctagggcgcagtgggcttctggcagaggaaggcaaggctgccaacccgggtgggggccgagaggcgcgtggtaaggctggggcaggggactgagatggggatagggtggggagccagaagcagggggcggcgaggccagtagggttcgggtcggcagtctagatgtgattagcagacggaggtgggacccgaaccccggctgaagctgaaactgaagctgaagaggcgccaggggcagagccaccctgtcactaccatttgggcagatctcagaaaggaagcggggcaggaatcaaggcatttcgaaacaggagtgagtagaaaataacctcgagcccagggcccgggtggtggcagcggcggggaaggggccccgcgcgcgaaggggctgccgaggtgggtccgctccgcggggaagcccaggacagagcgcggcggaggctcgcgccgtggtgcggggccctgaggccgggcggcacccacccgccagcgccccggccttgcgtacctgaggcggccgcctggctcccctccactccctggcagtccccgacgccgccagccgaccctgggcgggctgtggggctccaggagcccggcccctcagccgcctgcaggtcagacatctgcagcccgcgcacggagctctccgctgccagccgcgagtggctccggaaacagccgaaggccgagcgagcgccgagcacagccgagcgcagcctgcaggccggaagaagcggcgcggcggccgcttgaaaagctagctgacccaggggcggccacaggagctctggcccgctgaggctggcgatgaggccgcagggagggttactgcgtgcttgtgacagacgatttttaaagtcagggcttgaaagaacaaacaaaacctggggaagagtcaggaagacactgccggaaatcgtggtatccatagagacgctatcggaagttggggttgctaggaagccgcggcgcgtctgctaagctgcaaatggctgaagtcccggaggattatgattccggcccagatgaagatggagagctggagcctgagaggcctgaactgcctggacttcataaattgtatgaaaatgccgaaccagacaccatggcaaaggcagactcgaagctaccagcagagatttaccaagagccacagccagagaccgaggaagaggacttcaaagagggggagccagacagtgctaagaacgtgcagctgaaacctggcgggacgtcccaggaaggaattgccaaggagtccaagagagacgtaccaagcgaaactgaaccagggatacaccaagaggtaaagtcggaaacatccagagagatgggagagtttttcaaagatttggaggcccctatggatgaaacgcataaagagtcagacctagagccaccagaggaggctaaaccaaatgttacagaggatgtgttcctagagtcagctatggaaacagatccagatccagtgccaccaacggaaaccatgtctgaggtttcgggggccacagtcagagagagaaatttagaattactagaggaggagactgaaccgggggttccagaggaatcacttagagtgcaacatgaagagacaggtctagagcctccagagcagaccaaacaagattttccaagtgagaaactaggagaatcacttgaagagacagatcttcagccaccaaagatgaccaaaccagagactccagaggagacacaaagagagtcaactgagaagaaaaggacagagccacccgagcaggctagactggaatttctggagaaggaaccaagaaagtctagtgaggaggcaggtctagagcctccagaagagactcaaccagaggttccagaggagatgcaaagaaaggcaactgaggagaaagggacagaactacctgagcggactaaaccagactttccagaccacaagccaagaaagtctactgatgagaacgttcctgagccactagaagagatcaaattagagtttcctgaggaagaatcaagaaaaacaaatgaggaaacaattctagaacaatcagaaatgatgaaaccagaaagtccagaagagataagaaagtcaaatgagaaaaaaaatccacagccaccagaggagactggtccagtgctaccacaggagatcaacccacaagttgaagagaaaacacaaacaaagccaactgagaaaattctagagttaccagatgaaaccaaaccaagggagacacatgtagaattttccaaggaagacaggccagaaccaataaagtctaagtattctgtaggaaacgatgagctagagcaccgtgagcctaaaagaggaaagttgtcactaagtgacaaatttagaaaagaatattacgcattaggatctctcagagaaagtgaagaatcaattggtacacattatgagtttttgcaaccactccaaaaattgcttaatgtcagtgaagaatgctcatactcagatccctcagagtctcagacagaattaagtgagttcgttcatgaaaaggaagttgtagatttgtcccaagagttgaaggaacgggtctctgaagatgacgaaacccagccagaaaaagggactgagttacaatttgagcatcttaattgggatccagaggaagttgcagagtggattagccagctaggcttccctcaatacaaggtatacaaaaataagatgttttgaaatcacatgctgtcatccgtctacttcttattccttctaacttggcctgagctcttacctctttaccggaaggagtatcaaaaagtcctagactgtggtagaggtaacttggattttaattttggccttgccactgatgtatatttgtattttgggagaggaagggagggtcacatcggtttgtttttcctcttccagtgattacacttctctgcaatccttgaataaaagaccaagaagagtatatagacctcctttctttttttttttttgagacacaatctcgctcttgccaaggttggagtgcagtggcacgatctcggctcactgcaagctccaccttccccaggttcacgccattctcctgcctcaacctcctgagtagctgggactgggactacaggcgcccgccaccatgcgcggctaattttttgtatttttagtagagacggggtttcactgtgttagccaggatggtctccatctcctgacctcgtgatccgccagcctcagcctcccaaagtgctgggattacaggcgtgagccaccgtgcccggccttagacctcctttcatagaaaactgtatttttaagtagactttgttcaaggtaggctttttggtactttgtcaagttattttagtggcagctcccttgctttgaacttgtgctattactttttaaagtgtctgccccaaatatgtcacctgtatcatgagcacttaagtgtattaattcaagttagccagttaaccaaaactagttttagtaaaaagtcagtgtaaacctcttgtttcactgatgccaactaggtttaaggctaccacaaaacaatacaagatctgaaaccttttgtacctactatacttacaaatgtaattgagacatgaagaagcactggttgtaccatgcccaaaaaaacagttaaagagcagtgtaaaatttaataaagagcttacatggaaaaattgtgccgttattgggatagaaagtaaatttaagctactcaggaggctggggcaggaggactgcttgagtccaggagttcgaggctgcagtgatctatgactgcagcactgcactcccgcctggatgacagagtgagaccctgtctctaaaaaagaaaaaacaaaataatatttttttctcagggtagaacaaacacgacttcttcccttcctcccccttccctccctttcttccttctatttgcagtacattttttaagtgatgtccttgttgtattgacaggagtgttttatcacaaacttcatcagtggccgaaaactcattcacgtcaactgctcaaacctccctcagatggggataacaaactttgaggacatgaaggtgagttgtgtccaaagtttccctacagagcactgttaacagtgccaccatctgtctcaaaccaacctttttttcctccagcctggcctcccacttctgtcaatggtgtcatcataattccagttcctcaggctcacggtggttgcctcctctttctcctttgatccccataaatattccaagaactgtccattgctcctgtggcacttacaccgtctggctttcttcattcccacttttcagaccttatggcctcatgcctagaacaccacagtggcctcccgcttttagcctgtctcaatggaccctttggattcaagggccctgcttttatgctctcactttccacctacttatgtactattcaaaaaccttctttggatcccttctgcttaccaagatagtctccactccctagtttagaatttagggccctccacaagttctctcccctaccactcctccacatgaattttgtgctccagcctaccaccaggtctaacaccttcgcaaacctgcctggtgcgttcttctctctatgtcttcgctcagttcccccatcctctgtattactaatatgaatcttaatcatccttcaagaccagttcctcatttgcatctccccaagaagtcttttgtaacattcccagcccacagtagcccccatcccaagttctcatgacattttgtgtctctgacacccatttggcacttatataacaccatatgtattttgcctgctttgctgcctaactttgaaacaagctacattaaccactctgagcatcaattttctaaaatctccagcaccaacagttcatgattattctcctttgcataacagtaccctccatttgtagtgctttgcaatttacaaagcatcacaaacaatctcacgtgtaacctctcctttagtaccccaccccaataaccctccaagaatggacagttcttggcataaccatggttttgctcagcacacccatgcccagaaatgtaccacctcagtggtttccaaacttgggtcgtcttcagaatcaaatgagattttttgaaaaagatacattcctaggcttcatcctccagagattttgattcattagggctgggtaggccctggaatctcttccctagatgactcttcaacaggccttataaccctaaaattccataagtcatatggtttagaaataagaaaactatgcttgttaatacctgagtccttttactagcaagaagatataacgaaactttttaaattattaaacatacagtcctaactgagcgtttactttcttaaattctgctaatagctatgctttgctgagagcttactgtgtttggggcctcttatatgtattatttcactaattcccattttatagaaaactggggcccagaaaggtgaaacaacttaacaagctattcagataatacgttttttctgttttttgtctttgtttttgttttttttgagacagggtctcgctctgtcacccaggctggagtgcagtggtgtaaccttggctcacttcaacctccatctcctggtttaagcgattctcctgcctcagccccccaagtagctgggactacaggtgtgcgcaaccatgcccagctaattttttcttcttgttgtttttttggggttttttttttttgagaccgagtctcactccgttgcccaggctggagtgcagtggtgcgatctcagctcattgcaacctccacctcccgggttcaagcgattttcctgcctcagcctcccgagtagctgggactacaggcgcgtggcaccacgcccagctaatttttgtatttttagtagagatggggtttcaccgtgttagccaggatggtcttgatttcttgacctcgtgctctgcctgcctcggcctctcaaaatgctgggactacaggcgtgagccaccgcacctagcctaatttttgtatttttaatagagacagggtttcatgatattggccaggctggtctcaaactcctgaccttaagtgatctgccggccttggcctcccagaagtgctgggattataggcatgagccaccacgcccgacttatattcagataacaagtttaagagccaggatttaagtccatcttgtgtgacttcccaatccatgttctatttaactgtattgcctaagtgaacatttttgttaccataaacttccatgtactataaacattatgatgtggaaatgatcctttatttattttatttatttttttgagacagagtcttgctctgtcacccaggctggagtgcagtggctcgatttcagctcacggcaacctccgcctcccaggttcaaataatcctcctgcctcagcctcccaagtagctgggattacaggcacgtgccaccatgtctggctaatttttgtatttttagtggagccggggtttcaccatgttggccatgctggtctcgacctcctgacctcagatccacccgcctcagcctcccaaagtgctgggattataggcatgaaccatgcccagcctggatcatttattatatacttgtatttccaaccatgccctcacttaactaccaagtactgccagataaatatcttgttctttttatgttcaaagataatacagctgtttttatgaactctaatttctacttaaggtataatgaattttctagataaaaataaggaacaggctgctctgcctacggagcagccatagtccttgactttcttaataaacttgctttcgcttaaaaaaataataataataaggaacagaattagcaaaatagtaacctgtcaaattcctggaacatttaagtaccaagaatttcagctttttatcatgagaaggcatttttaagagtcagacaattcattcagctcccttggtattctaattccaaaagtacaatatcaacatgcagtaataaaaattctaattatagtttttcttatcttgcgagacacaagaggttttaaaaatcttctgaaatcctcaagagtaaatgacgaatccagtggtctgtccttttatctaagaaatttgaataagcaaactttgagatactcattatcacagtcacctcagacaaatgtggccttcccttgaggtcactagagtaacataaagaccaagacatccaaaggttacgttagataagctttgcttgacacttagacccacatgaaaaagctgattatggccaggtctggtggctcacgcctgtaatcccagcactttgggaggccaaggcaggtggatcacctgaggttggcagttcgcctggccaacatggtgaaacttcttctctactaaaaatacaaaataaaaaaattagctaggcatgttgcatgcctgtagtcctagctacttgggaggctgaagcaggcgaatagcttgaacctgggaggcggaggttatagtgagccaagattgtgctctccatgaactgcactccagcctgggtgacagagcaagactcagtctcaaaaaaaaaaaaaaaaaaaaaaaaaacctgattatgctctaagacacagggtaacttctaggaggtcatacatgctgtagctgtcttccttactgatatacacagcttttaaaatgtctccattgtacttacagcacctagttcacccacaatttatcccataacaacagttaaatagtatagttatctttttcatgctgagtctcccatatcatcatttatggacttttgggagaatagaaggaaggaagagcgagcagattgcttgagagtgtggaattctggacatgctgctaagaatctgaacagcattgccactgtgcacctcctatacaagccttgcagttaatttatggccattttctgttatcttctcagcccttctatgtttaattggaattcttctgtaaggaattcttctacatttaattgtcccctttctcccattttttaatccattcagtcattgatattagtgtggacttatggatatttatttttggggttataacccagttctattgctatttattttgttgctcaaattgtgccatctttcaccattgggggctcttttaaattggctcttgtggccttttgacatgtcctcccttttttttaaagcatctccttaccttctggcaatataagttgcttcggactcatcttatatttttcctgctgcagccccagaatcagccatgtttctaaggagccctggttgattttatcagaggatggtatttagaaaccaagacgtggacactagttgtgcttgttgctactgagtgtcactgcttctatgcactcttaacagaaagatctaggaaataaatgtatatatactaacccatgtgtacacaaatatctatcttatttcgtatctatctgtgtatatacatatgtattaaaataagcatgggggccgggcgtggtggctcatgcctgtaatgccagcactttgggaggctcaggcgggtggatcacctgaggtcaggagttcaagaccacctgaccaacatggtgaaaccctgtctctactaaaaatacaaaaaattagccgggcctggttgtgcgcacctgtaatcccagctactagggaggcagaggcaggagaatcccttgaacctggaaggcagaggttgcagtgagctgagatcataccactgcactctagcctggatgacagagtgaaactccatctcaaaaaaagattgatctctctgatatctctaatctaacatcacagagttcattctagccttccttcccatccttcctatccccaaccccacttgcctttttttttcttttttctttttttttgagatagagtctcactctgtcactcaggctgcagtgcaatggcgcgatctcggctcactgcaacctctgcctcccaggttcaagcaattcttccgcctcagcctcccgagtagctgggattacaggcgcccaccactgtacctggccaattttttttgtatttttagtagagatggggtttcgccatgttggccaggctggtttcaaactcctgacctcaggtgatccgactgtcttggcctcccaaagtgctgggattatacccccttgcctgtttataactactttttctgacattgagaaacttggctctccttatatgtaaatatgtttccctatgaaagacagatttacccaatagagttcagtgtttgtgtacagctgtttctgtctctcgccttacagtatctagacaaagcactgttttcttaaagttacaggtcagcacctttcttccccacccccttcagtgagattatgtcttactctataatacagttagattcatttgtccacagcctttattccaccccaacatcctggattttttttttttttttttgaggcaaggtcttgctctgtcacccaggatggtgtgcagtggtgcaatctcagctcagtgcaacctccacctcctgggctcaaataatcctcccacttcagcctcccgggtagctgggactacagccacatgccaccacacccgtctaattttttgtacttttttgaggagatagagatggggtttcgccatattgcccaggctggtcttaaactcctgagctcaagcaatccacccaccttggcctctcaaagtgctgggattacaggcatgaaccactgcgcctggcctctcttcctggctttttaaaagtttgcatgcagtaaaaccattctttgttgtgtgtagttctgtgggttttgacaaatgcatgcactcatgtatccaccaccaaagaaccatacagaacaattctgtcactctagaatttccctttgcagtcagcccatccctttaccgtaatccctaatctgtttttgatgtcacataagtggaatcaaataatgcacattctttgggtccggcttcctttccttagcaaaatgcatttaagattaatccatgttgttagatgaatcaacaagcagatgttaaggagactatacatctgctttaataatgctggtataggctggctgcagtggcttggacctgtaatctcagctactccagaggctgaggtgggaggaatgcctgagcccaggagtttgaggctgcagtgagctatggtcatgccactgcactccagcctgggcaacagagggagacctcatctctgaaataataataataatagtggtatagatggttcatattttaaccacaacaattatgtctttgtctttaggtttagatcatataaattatagattccaattatacaaatatgcatagttacatactatgaggtaataaccaatacacaataaattggtgatgaagcaaaaccatcagtagtttacaaataaaagaacagcagcctttgaaaacaatgatcaacacaagttacaatgataatatagtaataattgtcttcttgaaaaccacaggcattgcaggtaactggttgaggccatgtgaagtaggtgttctgccgtgatgccacgcactgagtataagctatcaccttagaatgtagaattatgaatccttagaaaactaatcatcctcacaaatacctatttccaataatccttactaactcaagtaatttgccagtaagttgctctaagtcataggcaaaaataaagtctactgcttgttgtttgttcatcagaactagagaggccgggcacagtagctcacgcctataatcccggcactttgggaggctgaggtaggaggatcgcttgagcctaggaattcgagaccagcctgggcaatatagtgaaaccccagctctataaaaaatattttaaaagttagccaggtgtggtggcacatacttgtagtcccagctactcagcatgctgaggtgggaggatcacttgaacccaggaggtcaaggctgcagtgagctatgatcatgccactgcacaccagcctgattgacagagcgagaccctgtctcaaaaagaataataactaaagaaagaaactgcagttttagttcaatctttcacctgtcagaggacttcttgtttcattgatgaacttcagacacacttttaaaaatcactgaataggaggagagatagtcagattgtatttattgatttcagtgctaagtgtaatgaattgctttttttatgaaattattatttttattaagaaacccctaagcaccaagagccataaaaaaaacccgtatcatttgctgttatagcccacagagggaatatgagtagattatatatatatactcccttcccaaaacaaagaaaaattccaaaaacacatgaatgtggctgagcagctggctcacacctgtaatcttagcattttggaggctgaggtaggaggatcacttgaatccaggagtttgagaccagctggggaacatggcaaaaccccatctctaccaaaaaaaaagcagggtatgttgtcatgcatctgttgtcccagctacttgggaggccgaggcaggaagatggcttgagcctaggagttcaaggctgcagagagctatgatcacaccactgtactccagcctgcatgacagagcaagaccttcctgtcttgataaataaatacacacgaatgtgtagggaacacttttaatttctgcattacaatactgtgcaaaacagtagtgaaccctctcagcccacagtgggcacacagctctttttgttaataatgtgtatatgactgcagtgtacctcctgggaatacaatctgtgaaccttagggaatttgtgaaataaccttttctattcggggcattggaaaggagaatcagggtacttgctttggcagcacatatactaaaagagaatcagggtgagatgcctaccaaacaaggtgcacacgtagaagcatgcatcacaaacaagaagtcttagaagccacctgttcgtgtgtgtgtgtgtgtgtgtgtgtgtgtgtgtgtgtgtgtgtgtgtttgcttttggagacaggtctgttacctaggccgcagtgcagtggcatgatcatggctcctcactgcagtctcaaactcctgggctcaaaagatcctcctacttcagcctcccaagtagctgggactacaggcatgcaacttcacgactggctttttttttttctgtagcaatttgttttttttgtttgtttgttttttgagatggaatctctctgcatcacccaggttggagtgcagtggtgcgatctcagctcactggaacctctgcctcccaggttcaagcgactctcctgcctcaacctcccgagtagctgggactacaggcgtgcaccaccacgtccagctaatttttgtaattttagtagagacaggattttgccatgttggccaggttggtctcgaactcctgacctcaggtgatccacctgcctcggcctcccagagacataagccacctcacctggcctttgtagtaacttggatctcagttcttagaagccccaactgataaagatctcaattagaattctcactggacaactcaggaggctgaggcaggaggatggcttgaacccagttgttcaaggctatagtacactataattgtgcttttgcatatccactgcactccagcctgggtaacacagcaagaccccatctctaaaacaaaacaaaacaaaaaacaaaaacaaacaaacaaaaaaaaacagaatccttactcggaatgccaaggcaactatacccataaatcatctctagagtcaacaaaaccagttcaagtaagatctgagaaacatggcatcttgcctatctaaaaggcattgctaatgggcagttttatatcaggtttagcattgtctgtggcacaaattttacagtcttataactctgaccagtagctttaaattaaaaaaaaaacaacaaaaaagtccattccaaataccctttggctgtgttctagcagcaattccatggactgtcgtctcatccagaggcagaatatgaattcaaacagtggtattataactgacctaggattaaaactagaatttgaaaaggcaatcacaattttttttttttttttttttttgagacagagtctctctctgtcacctaggcgggagtagagtggtgcgatctcggctcactgcagcctccgcctcccaggttcaagtgattctcctgcctcagcctcccaagtagctaggattacaggagcatgccaccacacctggctaatttttgtatttttagtagagatggggtttcaccatgttagcgaggatggtctcgatctcctgacctcgtgatctgcctgccttggcctcccaaagtgctgggattacaggcgtggcgtgagccacggcctggccagcaatcacaatttaagctaggatatcaagtggcatggtgctcaatgaatacaaattttgttttacagatgctgaaaattgtggcaaaagatattttagaatacacaagtataagtactaataaaacagctcgaactttaatgtctgctttttagtgtttgagttttttagttaaataaatgaggtaactatttgttatgattttttttttttgatggagtttcgctcttgttgcccaggctggagtgcaatggcatgatcttggctcactgcaacctccatctcccaggttcaagcgattctccggcctcagtctcctgggtagctgggatcacaggcgtctgccaccactcctggctaatttttgtatttttagtagagacagggtttcaccatgttggccagactgttctcgaactcctgacttccggtgatctgcccgcctctgcctcccaaagtgctgggattacaggcttgagccaccatgctcggccctgagttataattttttttcttagttacacattaactgagccccatatagacaagttatttaataaccttcccagagacagtcatggctcctaatctgaacatattatctgctcttatgcttggtcagattgctcagcaaaaacaaagaaatgaacccatccatggccatctgatgcaagggcctagaaatgtcttaaatggtactttgaaaaggataatcatgacatttaagaaattggttttggtaaggttaggctagtaagcctgtgaatttgtttcattattttatttccccatagaaataaggaattggcagggtgcagtggctcacgcctgcaatcccagcactttgggaggccaaggtgggcggatcacctgaagtcaaaagttcgagaccagcctggccgacatggtgaaaccccatctctactaaaaatacaaaaattagccaggcgtggtggtgtgcgcctgtaatcccagctactcaggaggctgaggcaggagaattgcttgaatccaggaggcagaggtggcagtgagccaagatcgcgccactgcactccagcctgggcgacagagcaagacttcgtctcaaaaaaaagaaagaaataaggagttaatattcaagaggcttagaaaactaaataaaccttctttgatttggttgtgttttcaggttagtctaattaaaaatttatccttgcgtttcaggcaatttctcggcatacgcaggagctcctggaaattgaagagccattattcaaacgctccatcagccttccctatagggatattatcggcttatatttagagcaaaaaggtcatactgggataaaatctgattccttgactttatctgaatttgtcaaagcagcaggattacaggattatgctccagaaataactgcccctgaagagaatgaggaattaccttgcactgaaccataggggaaatccacttcacagagcttgaaagatcaaactaaattacttgagggaagaggtatggtcttttttggttttctttttctccttttttttttttttatttttttgagacagagtcttgctctgtcgcccaggctggagtgcaatggcacagtctcagctcactgcaaccttgcgattctcctgtctcagcctcccgagtagctgggattacaggcatccgccatcatgcccagctaatttttgtatttttagtagatatgatgtttcaccatgttggccaggctggtctgaaactcctaacagttgatctgcccgccgtggcgtcccaaagtgctgggattacaagcgtgacctaccgcacctggccctttttctccttttcattaaggatcagttagaactgctggcttcattcctagttgtgtctctgacttatggtaccctccctttctttttgcaatttaaccccttgttaaaacaaagatagtcacgcttatctttctgggtaattataagaattcctgagccgggcaaggtggctcacacctgtaatcctagctctttgggtggctgaggcgggcagatcacctaaggtcaggatttcaagaccagcctggccaacaaggtgaagccctgtctctactaaaaatacaaaaattagctgggcatggtggcacatgcctgtagtcccagctactcaggaggctgaggcagaagaatcatttgaacccaggaaacagaggttatagtgagctgagatggtgccactggactccagcctgggtgacagagtgagactctgtctaaaacaaacaaacaaaacaaagcaaaacaaaattcctgaaaaattctagtaatgcaccttgtaataggaacatgttggggaaatataattaaaaataaaatctcctgccaactccggagagataattctttccacaaatgcagaagagaaacatttttattcttgaataagcattaaactgtgatgcacatcacaggcaagctgctaaagagattgcaaagacaaatctcacccttgtagatggcagagcagatacaatacacgacatacatgttaattatctgtgtccaaaggaaaaataaaacttctatcttgacaacagacagaagttactacttggagccaggtacctaagctaaactcccacagagacagggagacaaggtaccaacctcctcagtgctcacatttcaaagagatgtctccgtggcctccaaaaaagagactgtcctgaggtataaaatggctagagatattcagctttttaaaagatttacatacatctcaaagacatagtaaaaggatttgcagtgacaagttctttaaaggaaatggtggttttttgtttatttttttgagatggagtctcactctgttgcccaggctggagtgcaatggtgtgatctcagctcactgcaacctccacctcccgggttcaagtgattctcctgcctcagcctcctgaatagctgggattacaggcataagctaccactcccagctaattttttttgtatttttagtagagacggggtttcaccatgttggccaggctggtctcaaactcttggcctcaagagatctgcctgcctcggcctcccaaagtggggagattacaggtgtgagccactgcgcctggcctaaaggaaatgttttgcaaaaaaaaaagtggggaagttctctcttccttttggcatcaggaaaaatttaaaagaaaaaaatttttttagatatgtgtgtatctaaatatgtaaatatctaaacatggcttaccactatgaaataggttctgtggtttgcttacaggcttttttatgtggtactttccaggtctttataatacaaaatttaggctagagtctacccatgactgcacttctcaaaagaaattataggccgggtgcagtggatcatgcctgtaatcccagcactttgggaggccgaggcaggtggatcacttgaggtcaggagtttgaaaccagcctggccaatgtgatgaaactctgtctctactaaaaatacaaaaattagccaggtgtggtggtgtgcgcctgtaatcccagctattcggaaggctgaggcaggataatcacttgaacccgggaggtggaggttgcagtgagccaagattgcgccattgcactccagcctgggcaacagagtgagactccatctcaaaataaataaataaataaaaataaaaaaagaaattataaaatatttctcgttacctgaatggctccagttcccctctagttttacagatttaactgctcattctcttcctggactcatattttaattctgaaaacaaccatgggctaacacagtcctgaaggacagtgatgaagctccagttccctacaccagaatgaatagtaaaagatgtttttctgtttttccactgagaaaagcaagagtgcctcaaatgaatattcatgccaagtgttaatatttgatgatgaacctaatattttcccaaattggactaacaaaattgtatcagaaaccattctaacaccataccattgcatttgcctggctcacgattatgtaaaaaaacaaaaggtaaatgattaacctaagaccatagtgatttacatatatagtgaatggttttgttcaaaagccctttagcatttagcaaacagtagttatgttctatgacagagcatagtgacatccctgttgttttcaactcttataactgacaaaaagtatttgcaaaacataaaggaaatcaacaaatttgcagtatagatctatattttgcaaaattagttttagccattaaataccagttttttaaatggtttaaatgggaacagctgtaaataagatagtaccagaacagtcatatatagtcaaaataagcatgatacaagccataattcaattaagatggtttaccataccttcacttctctgtccaaaattgtgagaaaatcaaactgtatctttttccagctacctactgctggcaaatggattgaaacttgatttattggaaaagaagctgcagtatgtaattgtctaaaacttataacattataacttctttaattttagaagagaaataatttgtattaacaagacttttctgcgggagcagcttacttaagttaggttgtgtagtttcactagttgcttctgagagccagatacatattgatggataggaccacttgttttattctacattttaaagagtcatcagtacagttttataattcctgatgtctatcatgtggcaaacacaatacagccacaagactcccacagtcaattgtgataatcagggcacaactattatagggaaaatctgtgagtgggaaaaaatcctgattcctgagttctcttattgggatggaaagcctgtggaaatgactggctgttctttggttagggagatgccaaatgaagcacagtatagatgggtaaggtggtcttggagaacaggactacttgagagatgctggctaaacggagtttccttgagttgcacagcagtcagatcaaaccaggggaaaggcctgaggtgaaaaaaatattgttacttttttatgtctgttcagtatatctgatttggctgttaaacacatcttttaaagaaagttttcctcattaccttttcataaactagaaacattaataccttttcataaactagaaattcagctagaactagtcaatgtgtagatttaagtgtacttaatggtgatttctcacacttatgtacatttctctaagtgcatttggagaggaattcattgttaaagaattattataatattaacattgacaccctttgcagaaaatttttcttttttttctttcttttttttttttttgagatggagtcttgctctgtcgcccaggctggagtgcagtggcgcgatctcggctcactgcaagctctacctcccaggttcatgccattctcctgcctcagcctcccgagtagctgggactacaggcgcccgccactacgcccagccaatttttttgtatttttagtagatacggggtttcaccgtgttagccaggatggtctcaatctcctgaccttgtgatctgcccgtctcggcctcccaaagtgctgggattacaggcgtgagccactgcgcccggctgcagaatatttttctcgaatttagaaagaacatatataagatcgtggacattaagcaaggaagaagtctaattgcttttaagatatcctctttagctgtatagattaaaaagtaggctgggcacagtgactcatgcctgtaatcctagcactttgggaggccaaggcagcaggatcacttgaagtcaggagtttgagaccagcctggacaacataatgagacctcatctgtacaaattaaaaaaaaaattagctggatgtggagggacacacctgtagtcccagctactcaggaggctgaggtgggaaattgcttgagcccagcaggtcgaggctgcagtgagctatgatcacaccactgcactctagcctgggctacagagtgagacccccatctctaaaaaaacagagaggaaagttaatatgcaaatgaatacctaacggggcaacattaagtattagtctatagtgtaattcaagttaaaaagccttaagacatagggtttcaatatttttcaaaagatcaggagagacaggcatgatggtgcgcacctgtagtcccagctactcaggaggctgagagaagaggattgcttgagcccaggagttcaaggccagcctgggcaacatagtgagaccctgtctgttaaaaaaaaaatcaagagtaaggctaaggcaaagatacctgctctcaccagtcttatacagaatagtactagaagttctaggcaatgcaataaggcaagaaaaggaaattagaaggcatggacattggaaaggaagaaatgaaaccgtctctatttatacatgacattattatctatgtagaaaactccaaggaatcttttttttttttttttttgaaatggagtttcgctcttgttgcccaggctgcagtgcgatggtgtgatctcagctcaccacaacctccgcctcctgggttcaagtgattctcctgcctcagcctcccaagtagctgggattacaggcatgcaccaccatgcctggctaattttgtatttttaatagagatggggtttctccatgttcatcaggctagtctggaactcctgacctcaggtgattcacctgcctcggcctcccaaagtgctgggattacaggcatgagccaccgcacccagcccaaggaatctatttttaaaacctcctagaactaatgaattcagcaaggttgcaggatacaaaataaacatacaaatatcaattgtatttatatacaatagtgataaacatgtggacaccaaaattgaaaatgttttttcatttattgtcactccaaaaaatgatatacttagatgtaaatccaataaaacatgtacaagacttgcataataaaaactataaaatgctgatgaaagcaaagaatatctagagaaacatactatattaatgagtgggaaaactcaacaaaattaagatgtcagttttccaaaaattgatctatagatgtaatcacaaaataaaaattattgccaacaccagttgctggtgaggatgcagagaaactggattatacattgctagtgataatataaactggtactactgtgaaaaacaatttggcagtgtcttaaaaaaataaatatgcaactaccaaatgacaataattacactcctggtcattcattccaggtaagtggacacttatgttcacacaaaagcctgtacatgaatgttcataacacccttattcataatagccaaaaactggaatcaacccagatgtccttcaacaggtgaatggttaaacaaattgtgatacagccatgccgtggaatattattcagcaataaaagccaactattaatacacataacaacttggatgaatctccagagacttgctgaatgaaaaaagccagtttcaaaaggtggcatacatatgattccacttatataacattcttgaaatgacaaaattataggaatgaagaacacattagaagttaccaagtttgcagctgtgaggaggcaacatgaagaattcgttagtgaaagaactgttctatatcttaactgtatcaatgtcagtatcctggctgtgatattgtgctacagttttgcaatatctatttccattgatggaaaatgggtaaatgggtacatgagatttcactattatttcttaacaatttcatgtgactccgtatttatctcaaaataaagaaaaaaattatcttggctgggtgcggtggctcacacctgtaatcccagcactttgggaggccaaggcaggcggatcatttgaggtcaggagttcaagaccaggctggccaacatggtgaaaccctgtctctactaaaaatacaaaaaagtcagccaggcttactggctgtaatcctagctactcaggaggcagaggcaggagaattgtttgaacctgggaagcggaggttgcagttagccgagattgcaccactcactccagcctgggtgacagagctaaaactccatctcaaaaaaaaaaaaaaaaaatacttgaattccagtttctggtctgacatgtaagaagctagaagttgccactctatcctaacaataattaaaaagctgaactaaaaaatcaataactcttttagatgtgtaagagaggtagggtcaagggcaaactactctccctaagactgcagggaccagaacacaaatgctcagaagtagcttgctggaggagaaacccatgagctgaaacctctatgggaacccagtgccaagatagggaacccggaactgtaactgacaaattgctggaggttcagagtggacaagtctgagaataaaaatgtcagacttgggggacccaatcactggggaccctcacacttatgatttttacctctaggagctcaaccaggttctcagtgatatctgagaaaaatccccttgtgcttccatcaaagggagaggaaaataaaccattttgaaatatggcagagcattctgttcttagcaaggtctgcccttgggagaaactatttaaccagagccaaaccttctggggttttatctgagcctaactgacctgggggaagagaaatagccagttccagtcaggtctacccttccacgtggaaggaggaatgggctcctcaactccagcccactttagccatcctgttccactgaagaaggagaaaaatcctgagaaacacttgtgaagttcacagtccagagtacaggctcactcaaagactgagacctacccgtaggactatagaacacttcccctcctcaactccttactacattattaaagacctatttacaggccgggtgcgatggctcatgcctgtaatcccagcattttgggaggctgaggcgggcagatcatggtgtcaggagttcgaaaccagcctggccaacatggtgaaaccccatctctactaaaaatacaaaaattagctgggtgtggtggcgggcacctgtaatcccagctactcaggaggctgaggcaggagaatcgtttgaactcaggaggcggaggttccagtgagccaagatcgcgctattgcactccagcctgggcaacagggcaagactccgtctcaaaaacaaacaaaaaaaagcctatttacagcagttctttttacctggtacatcatatctgactatccagaaaaagttaacaggcatactaaaagccaaaaaacaaaaaaccaccaaaacccacaatttgaaaaggtagaacaagcatcagaaccacatatgagaggaatactggaataatcagactgggaatttaaaataactatgactgaggccaggtgaggtgactcctgtaatcccagcaatctgggaggccgaggtgggaggattgtttgagcccaggaattcaagcttgggcaacaaggtgagaccccagtctctacaaataataaaaaaaactagccaagcatggtggcatgtgcctgtggtccagctactcgggagaggtgggaggatcacttgagctcgggagattgtagctgcagtgagcagtgatcatgccactgcactccggcctgggtaacaaagcaagaccctgtctcaaaaaataaaataactatgactaatatgctaaaggatctaatggataaagtagacggcagactacggaagcagaaagatggaagttccaggaaccaaaaataaatactactcattaaaaacactgtgacagatatgaagaatatctttgaggcccctattagtagactgttcatggccgaggaaataatctctgaatctgaggatatctcaacagaaacctccaaaactgaaaagcaaagaaaacaaagacgaaaaatacagaacaaaatatccaaggactgtgggacaactacaaaagatgtaacatgcgcataatgagactagaaggaggagagaaaggacacaagaaatatttgaaacaataatgactgagaatttcccccaaattaatgtcagacaccaaaccacagatctaggaagctcaagaagacaccaagcaggataaataacaaaaacacacaagaaactatacctaaacatatcattttgagactacagaaaaacaaaaaatcttgagataagccagagggaaaaaaaacaccatacccatagaaaaacaaagataagaaagctgatttttaggatcatgcaagcaaggagagagtgcagtgaaatatttaaagtgcaggaagaaaaaaaatcactaacctagaactctgtgcaaagttatccttctaaagtgaaggagaaataaagactttaccaaacaaaaattgagggaatttgttgccagtagacctgtcttgcaagaaatgttcaaagaagttccttaggaggaaaatgatataggtcagaaacacggatctacataaagaaaagaagagcactgaagaaggaacaagtgaagataactttagtttttcttactcctaactgatctaacagataacactgtaaaccagaaagtatctgagacaagcatcagtcaatttagaaagtttattttgccgaggttgtggctatgtgcccgtgacacagcctcaggaggttctgatgacatgtgcccaaggtagtcggggcacagcatggttttatacattttaggaatacaggagacatcaatcactatatgtaagatgtacattggtttggtctggaaaggtgggacaacttcaagtggggcgggggtttccaggtcataggtagataagagacaaacggttttattcttctgagtttttgatgagcctttcactgaatacacaatttacaggaatagtctcttatgacttagaatggcttagtgaagcaatagggcaaatgtttaaatgtatgttgcaaagttgtaggatacaagattaatatgcaaaagtcagtgtcttttctatataccagcaatgaacaagtggaatttaaaattaaaaacacattaccatttatattagaacccccaaaatgaaatacttaggtataaatcaaatgaaatatgtgcaagatctacataaggaaaactatgaaactgatgagagaagtctaaaaacaacaaaataaatatagagatttcatgttcatggagaagaagactcaatactataaagatgccagttcttcccaactgaactacacattcaacgcaatgccaatcaaaatcccaggaaattattttgtggatattgaaaaattgactctatagtttaaatggggccaggtgcagcagctcatgcctgtaatcccagcactttgggaggccgaggtgggtggatcacgaggtcaggagtttgagaccagcctggccaacatggtgaaaccccatctctactaaaatacaaaaattagctgggcatggtggcgggtgcctgtaatcccagctactggggaggctgaggcaagagaattgcttgaacccaggaagcagaggttgcagtgagccaagatggcgccactgcactccagcatgggcaacagaacaagactccacctcaaaaaaaaaaagtttaaatggaagagcaaaagactcagaacaggctgggtgtgacggctcatgcctgtaattccagcactttgggaggctgaggcaggaggatcacttgaggccaggagcttgagaccagcctgggcaacatagcaagatcccatctctacaaaaaaatataaaaaatcagctgggcacaatggtgtgcacctgtagttctgtagttctagctactcaggaagctgaagtgggaggattgcttgagcccagaaggttgaggatgcagtgagccatgatcgtgccactgcaccccagctggggcagcagagcaagaccttgtctcaacaacaaacaagactcagaatagccaactcagtattgaaatggaagaacaaagtcagaggagtaacactacccaacttcaagacatcctttaaagctacagtaatcatgacagtgcagtattggtgaaagacaaatagagtggaatagaatagaaagcccagaaatagacccgcataaatatagttaactgctctttgacaaaggagcaaaagcaatataatggagaaaagacagtctcttcacaaatggtactgaagcacttggatatctacatgcaaaaaagaaaaaatgaatctagacacaaaccttacacccttcacagaagttaagtcaaaatgtgtcacatgcagaactataaaactcctggaagataacataggagaaaatctagatgatcttggctttggcagtgactttatagttgttaacaccaaaggcatgatccatgaaaaaaacaattgacaaggtggacataattaaagaatttaaataactaaaactaaaagtctctgctttgtgaaagacactgtcaagagaatgaaaacataagccacagactagagaaaatatttgcagaagacagataaaggactgttttccaaaacatacaaagaactcttaaaattcaacaataggagccgggcgccatggctcacgcctgtaatcccagcactttgggaggccaaggtgagcggatcacctgaggtcgggagttcaagaccagcctgactaacatggagaaacctcatctctattaaaaatatataaatacaaaaattagccaggcatggtggtgcatgcctgtaatcccagctactcggggggctgaggcaggagaatcacttgaacccgggaggcagaggttgcggtgagccgagatcgtgccattgcactctagcctgggcaacaagagcaaacctccgtctcaaaaaaattcaacaataggaacacaaaccaatttaaaaatgggccagagaccttaacagacacttcaccaaagacaatatacaaatggtcaataagcatatgaaaagatgctacacatcaggccaggcatggtggttcatgcctgtaatcccagtattttgggaggccaaggtgggcatcacctgaggtcaggagtttgagaccagcctgctaacatggtgaaaccccatttctactaaaaacacaaaaaattagccgggtgtggtggtgcatgcctgtaatcccagctacttgggaggctgaggcaggagaatcgcttgaacccaggaggcagagatcacagtgagccgagatcacaccattgcactccagcttgggcaacagaagtgaaactccgtctcagaaaaaaaaaagaatacaaggaaaatttgacaggaaaactatatagtttacaacattaattaaatattacaatcttaaaggagaggagaaacaaaaatctcattaaatgcttaaaagggaaactgataaaatttgaaatagattttcttaaaacttgagaagaataaaattgggatgagtaaattagggttgacaaactactagaaggaaaccttttgtttttattatggaaattttaaaacaaaatagaatgaaacatagaatagtattaagtaaaaaagaatataacaaaaaatagtataacgaaactccatatgcctatcactcagatttaacaattatcaatttatagctaatcttttctcatacaaaaccccacccctactcctttacccccatctattggattattttgaaggcaatcccagacactatattgcttgatagacttatcactaaaaatacaaaaattagccaggcgtggtggtgtgtgcctgtagtcccagctactcgggaggctgaggtgggaagatcacgtgagcccaggaggtggaggttgcagtgagccaacattacacaccactgcattccagcctgggcagcagagtaagaccctctatcaaaaaaataaaaataaaaacaaaaaagttaatggaaataacaggcccaccaagtgctcaacatttaattaaaatagacctacatcatggcacatcataaaatttcaagatactgaggtcaaaagatctcataagcttccagaaaggaaagaaacaggtttcagacaaaggattaagaattagaatggcactgtaactctcagtagcaactctagaagctgaaagacaatgaagcaatgcctcaaaattctcccatccaagtactaaccaggcccgaccctgcttagcttctgagatcagatgatatcaggcacgttcagggtggtatggctgtagatgcaatccctcaaaattttaagggaaaattatttccaacctgcaattctatacctggctatgttctcaataaaatagaacgctagaataaaaacatctcaaagagtctctgaaaattatttcaatgcaccctttctcaggaaggtactacaggacatgttccccccaaattaagaagtaattcatgagagagaaacaagagatgtttccatgacaggaaacaagagatccaatacaacagaaaagtgaggggaatccctgggataatgaagaagaaaaatctccaaaccaaacgtgaatcacaggcatagagaataaactgtccattgatgattgattggaatacaaaagatgaggaagaagaatctaggattacatctagggttctgacttgaacaacttggtgaagcagcatataattaggtaagaaacatcagaagagcaggtttaagagcaggtatgtttttggacatggtgagtttgagtggagatggtgaatacacagttacctaggcacagcattgacatttaggctagagatacagagttatatgctgtcagtgaaaagatgggaacctaagtccccaaagtggaaaagatcaccgggaacaaagtatagaatgaaaagaagtatagcatgaaaagaaaagggcctaggatagagccctgaaaacacccagatttaagggtgaggcagaggagaagctagccaaggaggggccggggagtcaggaagaaaatgaggagaacgggagggatcatgacagcctagagaagagactgcttcaagaaggatggcatgttcaataattaaggaagaaaaagagtttaaagcatccagtggatctagtgacatggaagtcactagtaataagagcaataatctttgcatattagattatcaaagatcaaaaatatttatttgatagttatcagatattaaagaagtggcaccctcatatgctgttggtagaaatgtaaacaagtaccacattttttataagcaatttgggaacacctatcaaatataaaatatgcataaactttgacccagagcttctttcacatatgccaccgaaatactggtacaagtgcacaaagtacaagaatgttcaaagcaggccaggcgcactggctcacacctgtaatcccagcactttggtaggccaaggcgggcggatcacttgaggtcaagagttggagaccagcctggccaacatggcgaaaccctgtatctactaaaaatacaaaaattagccaggcatggtggcacatgcctgtaatcccagctactcgggaggctgaggcacttgaatcacttaaagccgggaggcagaggttgcagtgagccgagatcgtgccactgcactccagcctgggtgacagagcaagactgtctcacaaaataaaataaaataaaataaagaatgtcaaagcagcccgtaatgcaaaattggggatgagaggaggaactacatctctatcaagtggaaaaggagtgaataaatttaatggaataaatgtgtccggtggacacctaggtagctgctcataaatgaagtagctatgattgtactaacatagaatggtagctgtgatacagtaagtaaaaaagcagaatatatagttcccatgtgtctaacactgtatatataggaatagatatgcatatacattataacaatataaatgtttgtaaatgcatagataaaaatataaaaactgttagaggtgaaatctatgaaatgggatttggaaggcaaaggatggcatttacttttccactagttgaaattctttacaaaaaggtataatttttatcaatgtttaaagagaacatgaaaggataaaagaaaaaaagcattaactaagagaagagtctgggagaaatgagaatggccagctgtccaatgcccttacctttcctgagacaaattcttgccataggctttgctgacaaaatctgttaattgcaactttgggcaagatgctgtgtctttcccacagtcttcaaagtgcacggagagaaagagttcactcagaagctgcagcacttgggagtgggccatgtttcttgctgtgcatatgtttagggccgcatagaacactccctccaaccacttgatattgaggattattccccctacacatcaatgagaaggtaaataccagttagcaccaccaaaaatgagttgcagaaaacctagaataaacccctgacagtgaatagccgccttttttccaagacagattggtaatatgaaccacaagataagcaaacattccttcctgagccacaagtgctacttgtgccctttataacacatcatgtgttgaccatcccaaaagtggacagatacaactaatgtagacattgctaatggcaaaaagtgtctctggaatagtcgttgctaatatggagaaggaactggggaaaactacaagattagaacagggaaaagccattttagtccaacattacatcctcctattgaaataagctatctcctcttttggttttaatttgtccttaagaagtccaaatgatcaagcttctcagctcttcctaagtagctctcctgcagtaccttgtgccttacacacacacacacacacacacacacacacacagagagagagagattgatttaataagatagcaatgggccaacaggaaagtaattttcaaaagaatgccagaaatatgttgagccgtgaccagcaggactgtagggacaggtagcttgaagaatcgtaggatcttggagagcagctatgactcccttattggccccccagacgctgacagaatcttcatcatactgatactgaggccgcaagatattggtgtggttcaacagtagtttcagcctggaagtaaagccaagacagggagtgcaatgccaggactggaataaatgacgacataacccactgtgtttacatccaaccccatcaacagactcccccacacagctcagagataaatgcgggtctgggtctgtgctgagagcactaattaactggactgttcatccacctaacaaatccttacttattgaatgttatgtgctaggcactgggctagaaactaagtgtgcagaaataatatttgacacatactttcagtaacttttcatgttattgaccgatggtttctcttctcattgatgcacaaggagaatacttcagtgttcaagtaatgggaataaatgttctattgcaattttaaacctttgtacagcaacaaaaatggtttgtggttactatttgtgggtaagtagggaagttacgagaaagattggctaactatgttcttctacagataaagctgcttcctccttattactggaaacaaccaactctaagagataggggctacagtggaggtgggaggcagaagtcagagataaggagacagagcagttgtgccagttccattctcaccctaacaagatacctgggtagtgggatggcagctacaaagctgtacacaatgctggccttctcaaggctggtgtaaatttctacgcagatattaggcagctgagacggcaagcagcagaggaatatcacatcggcccaactcaccagatcagcgttatggtaaaagcatttgattcccagcttctggagctcacctgggagggataaaggaagacaggaagagcacagtactaaagagtttgacctgaacatcaactatggggagagggtgatcattattttagctcagtaaatcaacccatcttattgctccataaatcagaagatattccttcctacagaccttctaaaagccacgcagcaatgccctaactctattactaaagcagcagtagtacttgaaattataattcatctttttttttttttttttttgagacggagtctcactctgacgcccaggctgcagtacactagcgtaatctcggctcactgcaacctccgcctcccgggttcaagcgattctcctgcctcagctgctcaagtagctgagattacaggcatgcgccaccatgcccagttagtctttgtatttttagtagagacggggtttcactatgttggccaggctggtctcaaattcccaacctcagatgatccgcccatctcgtccgcccaaagtgcagggattacaggcgtgagccaccacgcctggcctataattcacctttatcttacttttagatcaagtgctggaatttttccaatttttttttaagacagggtcttgctttgtcacctgtggtgtgatcatggcttactatagcctcaacttcctgagctcaagggatcctcccgcctcagcctcccaagtagctgggaccactggtgagtgtgaccatgcccagctaatttttttattttgtgtagagacaaggtctcactatgttgcctaggttggcctcaaaccccaggactcaagtgatcctcccacctccgcctcccaaagtcctgggattacaggcatgagccctatgtgctgcccagactttttttttaggaagaaaaaaaatctcagagaagtcttttactccaatgtactgcaggataaccatgtgtcagataatgtacaaaggactttacagtttctaaggtgtaacccccacaaggaccttatgaagcagaaacgagtagcagtcccattttacagatgagactgaggattcaagaagttatatgacttgtccaaagttacagagctgctggcttgaggtggtggaaaagactaggagagtggaaggtataaatcagaggctgagaagggtttgcaaagatttaacagtttctgtaaagtatatacaaattaattttattaggatatctataaatgaagaaagactgataactcatgtagttgcataaaaacactcactggtagttaattttttttttttttttttttttttttttttggctagcgatgggatctcactgttatccaggctggtttccaactcctggcttcaagtgatccccctgccatagcctcccaaagtgctgggattatgggcatgaggcaatatggattttcaaaagtataaacctaaagtgtacactcacatctggtggtatgtcataaatgtcattggaaaacagaatataacagacattggagagtgacttcttatgttaaccactgagagtacatggcaaatgtaatgctaaggttatctagatactgataaacctggaagaaagacagatgatttggtttggctctgtgcccccacccaaatatcatctcgaattgtactccccacgtgttgagggagggacctggtgtgaggtgattggatcatgggggcagtttcccccatgctgttctcatgatagcgagggagttctcatgagagctgatggtttaaacatggcactttcccctgtgtgctctctcctgccaccttgtgaagaaggtgcctgcttctgcttcaccttccaccatgactgtaagtttcctgaggccttcacagccatgcagaactgtgagtcaattaaacctcttttgtttataaattacccagtctcagacagtatctttatagcagtgtgaaaacagactaatacaacaggacaaagtttagaaaacaggcctatctatcattctctcctgtgttgttctcattcttttcatgtgcatagaagctgatgttgagcattttgaattattgtttccttacacaacacatagtgatattttacaactataattttattctaataaatatattgctttgcaaagaatatatatactttgttgaaatatcacatatattagtcctattgatgggataaagatatataccttgagattttttttttttttttgagacagagtcttgctctgtcatccaggctggagtgcgtggtacaattttggctcactgcaacttctgcctcctgggttcgagcaattctcattcctcccctgtagctgggattcgaaggtatgtgccatcatgcctggctaagttttgtatttttagcagagatggggtttcatcatgttggccaggctggtctcaaactcctggcctcaagtgatgcagctgactcagtctctcagagtgctgggattaccggcatgagccaccatgcccagttggtaagattttttttttagtttccttaggaatataggaaaaaaaaaatggccaggtgtggtgacttactcctgcaatacctgcactttcagagggtgaagtgggaggactggttgagcctagcagtttaagactagcctcggcattagagtgacaccctgtctctatttataaaccaaaagaaaaaaagaaaaaaacattacaaatcaataagaaaaataaacctgggcactgtggctcacacctatatcccagcactttgggaggctaaggcaaatggatcacttgaggccaggagttcgagaccagcctggccaacatggcaaaaccctgtctctactaaaatattatacaaaaattagctgggcatggtggtgtgtgcctgtaatcccaggtatgtgaggggctgaggcatgagaatcacttgagcttgggaggcagggaggttgtagtgagccgagatcatgccactacactccagcctgggtgacaaagtgagactccatctcaaaataaataaatacatatatacataaataaatacataaataaagtaagtaagaaaaatacaggcacaccaacagaaaaaatggtcagaagcacctcagaaaaaatgacatagtaataaacctaagaaaataaaactcttctattgattaatgaaagacatattaaaacaagaaaataatttaaagtatattaaaatggtgatgttaaaaatgatcccagcactgacctgtgtgtagtgaaatgggtgttcttatgcaatgttggtaaaaaagtatacctgaaaaccttttgggaggtcaatttgaaaaaatacattagaagtttctttaaattttaaagatatacctaccacatgacccagccatttcactgccacatatttacccaagaaaaatgaaagtagttgcctacatgaacacttatatacatgtattcatggcagctttatttgtaatagccagaaactgcaaacagcctaagtcaaccaaataaataaactgtggaataatcatgcagggaaatactactcagaaataaaaaaggatattgatacattaaaaacgtggatatatttcagctgggcatggtggctcacgcttgtaatcccagcactttgggaggctgaggtgggaggatcacttgaggtcaggagttggagaccagcctggccaacatgatgaaacaccatctctattaaaaatacaaaaaattagctgggcatggtggtgagcgcatgtaatcccaactacttgggaggctggggcaggagaatcgcttgaacccgggaggctgaggttgccgtgagccgagatcacaccactgtactccagcctgggtgacagagtgagactctgtctcaaaaaaaaaaaaaaaaaaaaaacttggatatatttcaaacaaattatgcagtgtgaaagaagttagactaaaaaaacactacaaactgtatgattccatttagataaaattctagaaaatgcacactaatctatggtgacagaaatcagattgttggtttcatgggtggagagcttcagggaagtggacagaaagggattaccaaagacaagtggcaacttttgggggtgatgggatacgttcattaccttgtgatggtttcacagttgtatacgtgtcaaaacatcaaattgtactcttttaactgtgtgccatttattgtatagaaataatattttaggggcaggtgcagtggctcacgcctgtaatcccggcactttgggaggccgaggcaggcagatcacctgaggtcaggagtacaagaccagcctggctaacatggtgaaaccccgtctctactaaaaatgcaaaaaaatttagctgggtgtggtggcgtatgcctgtaattccagctactcaggaggctgaggcgggagaatcgcttgaacccgggaggcagaggttgcagtgagccgagatcgtgctctccacgatctgcactccagcctaggtgacagagcaagactcagtctaaaaaaaaaaaaaaaaaaaaaaaaaaatttaataaagctgtaccaattctttggcctaataactttatttggaaaattatgtacaaggaagttcaactaaataaggcatagttacataaattatggtacatccatactttgggatattatacaaccttaaaatctatttttttacattaatctcttactaatataattaaaattttaaatcctgagatgaaaacagagaaaggaagaatagtgtagggtgtctagtggtcttagccactgctgggcacaactacatagtctgtgcatccaaacaccaggtacagcaagcacaccctgctagggagatgcaagagactgtgctcaaagcctgctggggtaaccttctactgtgggaaagtggaggggcttaacatcattatttcttattgattgattaattgagacagagtcttactctgttgctgaggctggagtgcaatgatgtgatctcacctcactgcaagctccgcctcctgggttcaagtgatttgcctgcctcagccgcctgagtagctgggactacaggaacccaccactacacctggctaatttttgtatttttagtagagactgggtttcaccatgttggccaggctggtctcaaactcctgacctcaggtgatctgcccacctcggcctcccaaagtactgggattacaggtgtgggcaaatcattatttcaaaaaatgttaaacgatacgagaatatgctcatgatacattatgtaaaaaaaaacagaatacaaacaactgtatacagtgtcgattactgatataattagagaaaaaaaaaacacgggaaggaaataacccgagtagattataggtagttgtatccttccttgtagacaaattttctacaatatgcatattattttacattttttattattgaagtataatttacatataatgcaaaacacagatatgaagtgtacagtttgatcagttttgacaaaagcatacacccatttaacccatacctctctctcaagatataaaacattttcatctccccagaaaaagttgctttgggactttctcagtctatctccccagaagaaatcattgttctgatttctatcaccataaatggaatcattacaaaacttttttttttttttttttgagacggagtcttactctatctccaggctggagtgcagtggtgtgatctcagctcactgcaacctctgcctcctgggttcaagcaattctcctgcgtcagcctcctgagtagctgggactacaggcacgcaccatcatgcccagctaatttttgtatttttaatagagacagggtttcactatgttggccaggatggtctcaatctcttgacctcgtcatctgcccgccttggcctcccaaagtgctgtgattacaggcgtgagccaccgcgcccgaccacaaaacatttttttaaagtcagtaaatgtcatttttaaaaatataaggccaactgcaaatgcctggaactgtttaacacccaaccagaccctaactgattcagttagaagatctgaactctgtatggaaagcttccctgtatcaaagatctggaaagatacttcaccaccaagggcacagggaggagacatggatataaaacacatacatggagaaaaaaagtcgctttaaagaacaggagaaaaggccatgcttctaacctttcttagggctagcaagctgagaactccacacgctgtatgcaaggattcctctttggaggaccctttcaaaatggctttgttgacacctacacagcacaaccaagccccctttctaccacacactgctcctcacccagagtctctggcctccgagtggagatccgcaggctttcagcagggatggggccaagctgcagcagtgtgccagccagctgcttcccaaggtggccacctccaatgatgcccaccttaaactcttcaggagtggctgaattaagggagccaattgagagatgtctggaactttgattcttatttaatgatgctctggagaatgaacacacagacacgtacataaatacatgcacacactagtttttcttttttttttttttttttgagacagagtcttgctttgtcgcccaggttagagtgcaatggggtgatcttgactcaccgcaagctccgcctcccaggttcacgccattctcctgcctgtctcccgagtagctgggactacaggtgcctgccaccactcccggctaattttttgtatttttagtagaaacagggtttcactgtattagccaggatggtctccatctcctgacctcgtgatccacccgtgttggcctcccaaagtgctgggattacaggcgagagccaccgcacccggcctagttcttcttaactgtcattctctgacattttctgctttgtcatttaaggtgcttggtggcaccttaagtacttcggagataagacatttcaactgtgtgtcatttatccagcctcactagggaatgaaatgttcctcctgagttaattttccagaaacaaaagtataacccttttcaagggaccaaaatttaaaatgttttaaatgaacatactttgttacatgtattatgcttgcctggttaaacagtctgaatatttaatcatttcactggctcaggacaccactgtgaacagccactattatacagcatactgtaatgtctataacacattgtgggccagtcccctcatgttttgtttgtttctgtgcagacagctttcaatttttttttttattgtggttaaaaaacacatgctgggtacggtggctcacatctataatcccagcactttgagaggccaaggcaggcagatcacttgagctcaggagtttgagaccagcctgggcaacatgtaagacctcgtctctacaaaaaatacaagaattagccaggtatggtggtgcacacctgtagtcccagctacccaggaggctgaggtgggaggattgcttgagcccaggagtttgaggctgcagtgagctgtgctcgtgccactgtactccagcctgagtgacagagcaagaccctgtctcaggaaaacacacacacacacacacacacacaccatgaacttcaccatcataaccatttttaaagtgcacagtacagttgtgttaattatatgcacattgtggctaggcatggtagctgatgcctgtaatcccagcactttgggaggccaaggcgtgtggatcacttgaggtcaaaagtttaagaccagcctggccaacatggtgaaaccccatctctattaaaaatataaaaattagcccagcatgatggtgtaaacctgtagtctctgctactcaggaggctgaggcaggagaatctcttgaacccgggaggtggaggttgcagtgagccaagatccactactgcactccagcctgggcaatagagcaagacttgatctcaaaaaaagaaaatacatatagatagatagatagatagatagatagatagatagatagatagatagacagacagacagacatatagatatagttgtgcaacagctctttagaacctttccatcttgcaaaactggaactctatatgcttttttttttttttcgagacagtctccctccattgcctgagctggagtgctgcggcacaatctcagctcactgcaacctccacctctcacattcaagcaattctctgcctcagcctactgactagctgggattacaggcgcgtgtcaccacaccccacgcccagctaatttttgtatttttagtagagatgaggttctccatgttggccaggctggtctcgaactccccacttcaagtgatccgcccacctccgcctcccaaagtgctgggattataggcatgagccaccacacccgacctgaaactctatacaatttttctctctccccagcccctggaaactaccattctactttctgttccactactttagatacctcatataagtagaattatgtagtattgtctttttgtacatggctaatttcacttagcataatgtcctcaagcttcatccatatcaatttttggattttttttctatcttcatgaaaaatgtcattgggattttgataaggattgcagtgcatctgtagacagcaatctacagggtcataggacaatagcgtgggaaggtcagcagataaacaagtgaacaaaggtctctggttttcctaggcagaggaccttgcggccttccacagtgtttgtgtccctgggtacttgagattagggagtggtgatgactcttaaggagcatgctgccttcaagcatctgtttaacaaagcacatcttgcaccgcccttaatccattcaaccctgagtggatacagcacatgtttcagagagcacagggttgggggtaaggtcaccgatcaacaggatcccaaggcagaagaatttttcttagtacagaacaaaatgaaaagtctcccatgtctacctctttctacacagacacggcaaccatccgatttctcaatcttttccccacccttcccccctttctattccacaaaaccgccattgtcatcatggcccgttctcaatgagctgttgggtacacctcccagacggggtggtggctgggcagaggggctcctcacttcccagtaggggcggccgggcagaggcgcccctcacctcccggacggggcggctggtcgggcggggggctgacccccccacctccctcctggacggggcggctggccgggcggagggccgacccccccacctcactcccggacggggcggcaggccgggcagaggggctcctcacttcccagtaggggcggccgggcagaggcgcccctcacctcccggacagggcggctggccgggcggggggctgacccccccacctccctcccggacggggcggctggccgggcagaggggctcctcacctcccagtaggggcggccctttcttatttttaacgtaggcatttacccctataaagtttgctcatagtactgcttttgttgcaacccataagttttggtatgttgttttcattttcacttaagatattttcaaattttccttgtgatttcctgtttgattcattggttgttcaagagttgtgttgacttccacatatttgtgaactttctagtttttcttctgctatttctagtatcattctattatggtcaaaaaaaaaaaaaaaagacggttggtatgatttgaatcttcttaaatttgttaggacttattttgtgacctaacgtgatctatcctggaaaatgttccatgtgcacttgaaaagaacgtgtattctgctgctgagtggagtgttatgtacttgtccattaggttctaattggtgtgtcatgttgttcaagtcttctgtttccttactaaccttttgtctggttgttctatccattattgaaagttgggtattaaaatctcctactataattgtataccttcagttatgtcaatatttgcctcatatatgtggatgttctgatgttaagtacatatataattgttgtgtcttcctggtgaattggtctttttatcatcatgtcattctttgtctctcatgacagtttttgacttaaaacctattttgtctgatacaagtatgactactcctgttcttttttggttaccatttacgtggaattatctttctctatggtctgactttcagcctatatgtgtcctaacatctaaagtgagtctcttgaagacaagatatacgttggatcttgtttttgtttttgttttttatccattcagccactcggtatcttttgattgatgggtttaatccacttacatttaaaataattactgatagggaaggacttatcactgccagtttgtttttttctctgtgttgcagttttgttcttcttttcctctcttgctgccttcttttgtatttcactgattttttttttttgtaatgacattattttctttttgttgttggtattttctttgtagttaccgtaggaaattgcataaaaatcataaaaatagttgtaacaacctattttaagatgataatgtcaatcatatacaaaaactctacttcatcttcccctacccctgctttttgttatttatctcatgaattatatcttttggatattttgtatccattagcatggttttatagtaataggtttttttttagtatttttatttttgagacagggtctcaccctgtggcccaggctagagtacagtggcgtgaacacagctcacttcagccttgatctcctgggctcaggtgatcctcccgcctcagcctcccaggtagctgggactacaggcacacaccatcatacttggctaatttttgttatttctagtagagacagggttttaccacattgcctaggttggtctcgaacttctggaatcaagcgatccgcctgccttagcctcccaaagtgctggattacaggcgtaagccaccgtgccaagcctatttttaatttttattatttatatttatacttattgatatttataattttattttatacattttattatttctatatttacatttttatatacattttatttatctatttatgagacagggtctcgctctgtcacccaggttagagtgcagtgacatgatcattgctcactgcagcctctactttccaggctcaagcaatcctcccacatcagactaccacgtacctgagaccacaggtgtgtaccactatgcccagctaattgtttttttttttaagagatgttgtctccctatgttgcccaggctagtctcaaacacctaagcccaagcaattctcctgccttggcctcccaaagtgctgagattacaggtgtgagccatcacacttggccagcttttatctttaaatcctataccacaattaaaaatgatttatgtgccacccatcacagtattatgtatatggctatatattcacctttgccagagagctttttatttttgtatacttttgtgttgttgactagcatgttttcatttcaacttaaggattcccttcagcattagttgtaaggcaggtccaggagtgatgaggttttttgttgttgtttatctgggaagctctttctttctctttttttttttttttcttgagatagagttttgctattgtcacccaggctgaagtgcagtggtgcaatctcagatcactgcaacctctgcctccctgggttcaagcaattctcctgcctcagcctcccaagtatctgggattacaggtacctgccaccatgcccagctaatttttgtatttttagtagagacagggtttcaccacgttggccaggctggtcttgaactcctgacctcaggagatctgcccacctcggcctcccaaagtgctggggtcacagatgtgagccaccatgcccagcttctccttagtttttgaagcacaggtttgcaagagatagtattcttggttgacaggtttttttttttctttttcctttttttttttttttttttgagacagagtctcgctctttcgcccaggctggactgcagtggtgcaatcttggctcactgctacctccgcctcccgggttcacgccattctcctgcctcagcctcccaagtagctgggactataggcgcccgccaccacgcccggctaattttttgtatttttagtagagacggtttttcaccatgttagccaggatggtctcgatgtcctgacatcgtgatccgcccccctcagcctcccaaagtgctgggattacaggcgtgagccaccgcacctgaccaacaggttttttttttctttcccctttcagcactttgaatatatcaagcactcccttctggcctgtaatgtttctgctgagaagccaccaatagtcttctgggaactcccttgcatgtgataagttgctttttctttgcagctttcagtattctttgtctttgacttttgatggtttgattataacgtgtctctgtgtggtcctctttgggttcatccaaattggagtcctctgagcttcttgaatttggatgtccatttccttcctcagatctgggatgtttttggccattatttcttcaaataagctctttgcaccttgctctgcctctcttctccttctgacattcccataaggcatatattgacccacttgatagtatcctgtaagtcctctagattttcttcacttttcttttctttttgctcttctgatttcataatttcaaataactggtcttcaaatttgctgattctttcttctgtgtgatcaagtctaatgttgaaccactctagtgagttgtttcaattcaattattgtgctctccagctccaaattttggttcttagtttctctttatgatattattttattcatgtattgttttcctgatttcatcagtttttttttgttttgttttgttttttcagagacagggtctcactatgttgcccaggctggtctcaaactcctgggctcaaataatcctcccacctcagcatcccaaactgctgggattacaggcctgtaatttgtaatttgtaatttgtaattacaaattacaggcctgtaatctgtaatctgtaaactttgcccagcctagttgtttttctgtgttttgtagctcattgagcctctttaagattattactttgaattctttgttaggtaactcacagatctgtttctttagggctggtttctgcagtagtttgttcttatggttgagcaatattgcctttttaatttttggtggaatttgggcatttgaaaaaacagtcaggcctctcccaatctttacagactggcaccatacaggggaagatctttcccaatcagcccagctagagattctggggcctgtcaaatctttccaggaatgtgtcttctctgggcttgagtttggaatttcccaattaaagagttttgcctgtttctattgcaggggctgataatcttttcctcactttggtatctatctgcagtactgcaggttctctgtactgcaacaagccactgagtgatcctttgttttcatccaaaatatgttggttcctcatcagtgctccaagtcatgtgagacagaaaccaatccctcaggcagcccccaaaaaggcagaacagtggacaaacattccatttttctttttccctccaaaggagaagccacaaattaggcattttctcctgatcacctgaggctggcttgaggaaagggatatcttaggtgaactgcaatggcttttcttacccctgtaaatgcagctgttcttggatttgtacctctccagggcactacaatttcttaagtgcttgctggaggtttcataaaggctttttggaccatatattgttgttaagttagtgtcttgaggttacagagtctggagcttcctatttcttcatcttactgataccaatctgagacagatgtcaatttttattgctattagatgtgagtgcattcctttcctacgatacacccactctttctagtttgctatttcaaatctgcagacttgagaaaccagataacttggctttttaagaaggttatgacttatacacataaatggtttataaaaacaaaacagtgttcattcagggtacaactttaaactacaaaaacaaaacaaaaaagaacagaactgagaaactaaggatgaagatttcagaccactatttccagaggttcacttactgttggtgctggatgtgtttccttggcgcaagattaacaaagtcagacttctgaatacataaggtatactttcgttgctatatgacagccttatatttgttctgtatttctgtaaaaaccagtgtcttaaagctctggattttgcttctaagcaacataagtcacactctatttaagccttctctcctggttgaaagagcattttctcttagtgcctgatccttccaaatataaaatgccacctgcaagtttcatatattgttttctcccagtcatattgagtaccaccaataggtttatgcatccttatcagtaagccagtcagtaaattcactgagaagcctgcctccttggacatgtgctgtatctataaacatgttcaattcaaatttggtcccaccatctaggaattaatctaacttcagagaaaaactaagaagtagagtgaggaggtgacatatgctcccagagtgacctggagttgcagaattcagaagcctaattataggtacctgcttcacacacatttcctatttaagtgtctgaagccatattgtagaaagatatcagaatcaagactggactgacagcttttctgcaaatcaatattcctggtttcaaggaagtcactggcacagggcctgtgaagtcctgggtagcttcctgtaagggagcattccactattacctcagccccaaaagaaagaactgattccatttgcattccttgccaatagataaggaatggctagacattagcaactgtggagggcaagctggtggtcatgatgactgagtgaatggatgaataaatgatcatttaatcaatccatccactaaaaggtaatcactactaatccatgctttattatgtaaccacagccaggggaccctggtatagattttcctgtccttttagaccaggagtcattgactctgggttggaaaagataggatgacaatccaccagccaaacttaccctccaatataaaaaaaatttaagacatttgaattctcagcagtgagattcttgtccatcttcctgaatttggatactcggcttacctcaaattatataatagtttgcagaagaaggttgcatgggcacaagcctcgatcatcagtccccgagaacggccctgcaaatacagccagatacgatcttcctctggaaccccatactcaaactgcagggactcaaggtcctggagcatgtccatttccaagccactatttcctgcagtgatagacactaatcaatttggctccctgtcccggtagaagaggggtctatgtaggaggtgtgtgtatgatggtgtgtgtgcccaggtcacaagcactcatgatgatgggcttcagcacctctctactcccagattctgaatttggaattc

SEQ ID NO: 1747 - protein, 810 aa, Homo sapiens
DPPRMSASPDDLSTGGRLQNMTVDECFQSRNTVLQGQPFGGVPTVLCLNIALWVLVLVVYSFLRKAAWDYGRLALLIHNDSLTSLIYGEQSEKTSPSETSLEMERRDKGFCSWFFNSITMKDEDLINKCGDDARIYIVFQYHLIIFVLIICIPSLGIILPINYTGSVLDWSSHFARTTIVNVSTESKLLWLHSLLSFFYFITNFMFMAHHCLGFAPRNSQKVTRTLMITYVPKDIEDPELIIKHFHEAYPGSVVTRVHFCYDVRNLIDLDDQRRHAMRGRLFYTAKAKKTGKVMIRIHPCARLCFCKCWTCFKEVDAEQYYSELEEQLTDEFNAELNRVPLKRLDLIFVTFQDSRMAKRVRKDYKYVQCGVQPQQSSVTTIVKSYYWRVTMAPHPKDIIWKHLSVRRFFWWARFIAINTFLFFLFFFLTTPAIIMNTIDMYNVTRPIEKLQNPIVTQFFPSVMLWGFTVILPLIVYFSAFLEAHWTRSSQNLVMVHKCYIFLVFMVVILPSMGLTSLDVFLRWLFDIYYLEQASIRFQCVFLPDNGAFFVNYVITAALLGTGMELLRLGSLFCYSTRLFFSRSEPERVNIRKNQAIDFQFGREYAWMMNVFSVVMAYSITCPIIVPFGLLYLCMKHLTDRYNMYYSFAPTKLNEQIHMAAVSQAIFAPLLGLFWMLFFSILRLGSLHAITIFSLSTLLIAMVIAFVGIFLGKLRMVADYEPEEEEIQTVFDMEPSSTSSTPTSLLYVATVLQEPELNLTPASSPARHTYGTMNNQPEEGEEESGLRGFARELDSAQFQEGLELEGQNQYH

SEQ ID NO: 1748 - DNA, 326 bp, Homo sapiens
  misc_feature (2)..(3): n is a, c, g, or t
tnnaacagatctgttgggagattcaccactttccacatctgggccagctcctctgcacggatgatcagtctgccagcaacctgagaatgcaggatctttaacagctcaggtgttagctctgcccagttacacaaagcgactcgctcagaccgctctctcaccggaggcgtctctccacgggacagggcctcaaaataatcggccccccactggatgaggtcctgcggctgcgcccgaatggcggctttggcaaactccttcagcattttcggcagctccggcgggatgcatgttggcttatctgtctgagccattgattggttgac

SEQ ID NO: 1749 - DNA, 545 bp, Homo sapiens
catttaaggcgcagcctggaagtgccaggagcactggaggccacccagtcatgggggacaccttcatccgtcacatcgccctgctgggctttgagaagcgcttcgtacccagccagcactatgtgtacatgttcctggtgaaatggcaggacctgtcggagaaggtggtctaccggcgcttcaccgagatctacgagttccataaaaccttaaaagaaatgttccctattgaggcaggggcgatcaatccagagaacaggatcatcccccacctcccagctcccaagtggtttgacgggcagcgggccgccgagaaccgccagggcacacttaccgagtactgcagcacgctcatgagcctgcccaccaagatctcccgctgtccccacctcctcgacttcttcaaggtgcgccctgatgacctcaagctccccacggacaaccagacaaaaaagccagagacatacttgatgcccaaagatggcaagagtaccgcgacagacatcaccggccccatcatcctgcagacgtaccgcgccattgcc

SEQ ID NO: 1750 - DNA, 332 bp, Homo sapiens
  misc_feature (247)..(247): n is a, c, g, or t
ctactctggactgtaccagtgcacagcaggcaacgaagctgggaaggaaagctgtgtggtgcgagtaactgtacagtatgtacaaagcatcggcatggttgcaggagcagtgacaggcatagtggctggagccctgctgattttcctcttggtgtggctgctaatccgaagaaagacaaagaaagatatgaggaagaagagagacctaatgaaattcgagaagatgctgaagctccaaaagcccgtnttgtgaaacccagctcctcttcctcaggctctcggagctcacgctctggttcttcctccacttcgctccacagcaaatagtgcct

SEQ ID NO: 1751 - DNA, 2439 bp, Homo sapiens
cagcacccagctccccgccaccgccatggtccccgacaccgcctgcgttcttctgctcaccctggctgccctcggcgcgtccggacagggccagagcccgttgggctcagacctgggcccgcagatgcttcgggaactgcaggaaaccaacgcggcgctgcaggacgtgcgggactggctgcggcagcaggtcagggagatcacgttcctgaaaaacacggtgatggagtgtgacgcgtgcgggatgcagcagtcagtacgcaccggcctacccagcgtgcggcccctgctccactgcgcgcccggcttctgcttccccggcgtggcctgcatccagacggagagcggcggccgctgcggcccctgccccgcgggcttcacgggcaacggctcgcactgcaccgacgtcaacgagtgcaacgcccacccctgcttcccccgagtccgctgtatcaacaccagcccggggttccgctgcgaggcttgcccgccggggtacagcggccccacccaccagggcgtggggctggctttcgccaaggccaacaagcaggtttgcacggacatcaacgagtgtgagaccgggcaacataactgcgtccccaactccgtgtgcatcaacacccggggctccttccagtgcggcccgtgccagcccggcttcgtgggcgaccaggcgtccggctgccagcgcggcgcacagcgcttctgccccgacggctcgcccagcgagtgccacgagcatgcagactgcgtcctagagcgcgatggctcgcggtcgtgcgtgtgtcgcgttggctgggccggcaacgggatcctctgtggtcgcgacactgacctagacggcttcccggacgagaagctgcgctgcccggagccgcagtgccgtaaggacaactgcgtgactgtgcccaactcagggcaggaggatgtggaccgcgatggcatcggagacgcctgcgatccggatgccgacggggacggggtccccaatgaaaaggacaactgcccgctggtgcggaacccagaccagcgcaacacggacgaggacaagtggggcgatgcgtgcgacaactgccggtcccagaagaacgacgaccaaaaggacacagaccaggacggccggggcgatgcgtgcgacgacgacatcgacggcgaccggatccgcaaccaggccgacaactgccctagggtacccaactcagaccagaaggacagtgatggcgatggtataggggatgcctgtgacaactgtccccagaagagcaacccggatcaggcggatgtggaccacgactttgtgggagatgcttgtgacagcgatcaagaccaggatggagacggacatcaggactctcgggacaactgtcccacggtgcctaacagtgcccaggaggactcagaccacgatggccagggtgatgcctgcgacgacgacgacgacaatgacggagtccctgacagtcgggacaactgccgcctggtgcctaaccccggccaggaggacgcggacagggacggcgtgggcgacgtgtgccaggacgactttgatgcagacaaggtggtagacaagatcgacgtgtgtccggagaacgctgaagtcacgctcaccgacttcagggccttccagacagtcgtgctggacccggagggtgacgcgcagattgaccccaactgggtggtgctcaaccagggaagggagatcgtgcagacaatgaacagcgacccaggcctggctgtgggttacactgccttcaatggcgtggacttcgagggcacgttccatgtgaacacggtcacggatgacgactatgcgggcttcatctttggctaccaggacagctccagcttctacgtggtcatgtggaagcagatggagcaaacgtattggcaggcgaaccccttccgtgctgtggccgagcctggcatccaactcaaggctgtgaagtcttccacaggccccggggaacagctgcggaacgctctgtggcatacaggagacacagagtcccaggtgcggctgctgtggaaggacccgcgaaacgtgggttggaaggacaagaagtcctatcgttggttcctgcagcaccggccccaagtgggctacatcagggtgcgattctatgagggccctgagctggtggccgacagcaacgtggtcttggacacaaccatgcggggtggccgcctgggggtcttctgcttctcccaggagaacatcatctgggccaacctgcgttaccgctgcaatgacaccatcccagaggactatgagacccatcagctgcggcaagcctagggaccagggtgaggacccgccggatgacagccaccctcaccgcggctggatgggggctctgcacccagcccaaggggtggccgtcctgagggggaagtgagaagggctcagagaggacaaaataaagtgtgtgtgcaggg

SEQ ID NO: 1752 - protein, 757 aa, Homo sapiens
MVPDTACVLLLTLAALGASGQGQSPLGSDLGPQMLRELQETNAALQDVRDWLRQQVREITFLKNTVMECDACGMQQSVRTGLPSVRPLLHCAPGFCFPGVACIQTESGGRCGPCPAGFTGNGSHCTDVNECNAHPCFPRVRCINTSPGFRCEACPPGYSGPTHQGVGLAFAKANKQVCTDINECETGQHNCVPNSVCINTRGSFQCGPCQPGFVGDQASGCQRGAQRFCPDGSPSECHEHADCVLERDGSRSCVCRVGWAGNGILCGRDTDLDGFPDEKLRCPEPQCRKDNCVTVPNSGQEDVDRDGIGDACDPDADGDGVPNEKDNCPLVRNPDQRNTDEDKWGDACDNCRSQKNDDQKDTDQDGRGDACDDDIDGDRIRNQADNCPRVPNSDQKDSDGDGIGDACDNCPQKSNPDQADVDHDFVGDACDSDQDQDGDGHQDSRDNCPTVPNSAQEDSDHDGQGDACDDDDDNDGVPDSRDNCRLVPNPGQEDADRDGVGDVCQDDFDADKVVDKIDVCPENAEVTLTDFRAFQTVVLDPEGDAQIDPNWVVLNQGREIVQTMNSDPGLAVGYTAFNGVDFEGTFHVNTVTDDDYAGFIFGYQDSSSFYVVMWKQMEQTYWQANPFRAVAEPGIQLKAVKSSTGPGEQLRNALWHTGDTESQVRLLWKDPRNVGWKDKKSYRWFLQHRPQVGYIRVRFYEGPELVADSNVVLDTTMRGGRLGVFCFSQENIIWANLRYRCNDTIPEDYETHQLRQA

SEQ ID NO: 1753 - DNA, 175737 bp, Homo sapiens
gatctgcccgcctcagcctcccaaagtgctgggattataggcgtgagccactgcgcctgacctttttttttttaaatcttttgagagagacgtagtcttgctctgtctcccaggttggagtgcagtggcgtgatctcggctcactgcaacctccgcctcccagattcaagcgattctcctgcctcagtctcccaagtagctgggattacaggcacctgccatcatgcccagctaattttgtatttttttgtagagacggggttttactgtgttggccaggctggtcttgaactcctgacctcagatgatctgcccgcctcggcctcccaaagtgttgggattacaggcgtgagccactgcgcctggcccacacatttttaggttataaaattaaacgtaatatggccaggtgcggtggctcacgcctgtaatcccagcactttggaggccaaggcgggtggatcgcctgaggtcaggagtttgagaccagcctggccaacatggcgaaactctgtctctactaaaaattcacaaaattagccgggtgtcgtggcgggggcctgtaattccggcaacttgggaggctgaggcaggagaattgcttgaacctgggaggcaggggttgcagtgagccaagactgtgccattgcactccaacctgggcaacaagagcaaaactccgtctcaaaaacaaacaaacaaacaaaacataatatgagactggacacagtggctcatgcctgtaatcttaacagtttggtaggctgaggtgggcagatcacttgagcccagaagttcgaaacaagccatgtcacccatgacatggcaaaactctgtctctacagaagatagaaaaattagccgggtgtggtggtgcatgcctgtagtcccagctactcaggaggctgaggtgatcctcccacctcagcccaggaggttaaggctgcagtgagctgtgatcatgccactgcactctagcatgggcaacagagtgagacccggtctcagaaaaaaaaaataataataatcaaatatatttgtgtaatacagatctactaatgggaagaactgaatttctctttttgaggttaacattttgcctaattgatgtacaaagttagtgttccagatggtcaaatttgactgtagatattcatgttcatgctgatctgtagagattgcaagtatttcatctttgaaaacatcttttcacacaggtaatgataggtgatatgtgaggtgcttgaaatgctgtgaagcacttacgactgtgtcactgtgacttgtagtgtacaaagcagcagtgcaaatcaggatgctgtagtcgctgtcgtgaccactcggctgtgtgttgtagagcaaaagcagccacagtattaagtaaatagtgtggccccgttccaataaaactttatttgttggatattggaatttgaatttcatacggttttcacagtctcaaaatattcttttgattttttttcaaccacttaaaaatgtaaaaaccattcttggcttgtgggctatacagaactagatgatgggccaggtttggcccatgggcagtagtttaccaagccttggtttaaagccctcatataagctgttgtagacattaagatgagttaaggcatatagtttagcacagcgcttagcaaaatagggagcgctgtgttcatcattgtcattcaagatgatcgttctctccaggtctggctgatgtgaggggtggaggtggtgtctgctttggatttctgctgttcctgagggagtatctgcattttccacagcttttctgtctgatttgtattttcctctgattccttttgtcatcaggtattcactgggcacctgctgtgggcagggctctgcgctgaggttctggagacaaaaggatgaatcgttgagcctgccctggtgtggtgctcccgttatcctttaggtataaaaacttgtggctattttttttttttttttgagacagagtcttgatctgtcacccaggctggagtgcagtggcacaatctcagctcaccacaacctctgccccccggggttcaagcgattctcctgcctcagcctcctgagtagctgggattacaggcgcccacgaaccacgcccagttaattttttaatgtttagtagagatggggtttcaccatcttggccaggctgatcttgaactcctgacatcgtgatccacctgcttcggcctcccaaagtgcaagtgttgggattacaggcgtgagccactgcacccggccatggctatggtttttgagaatgattggccaggtgatgcatttatttattttattactatttttcgagacggagtcttgatctatcacccaggctggagtgcagtggcgcgatctcggttcattacaacctccgcctcctaggctcaagtgattgttctgcctcagcctccaagtagctgggagtacaagtgcatgccactgcatgcgctaatttttgtatttttagtagagatggggttttgccatgttggcttggctggtctcaaactcctgacctcaggtgatccacccacctcggcctcccaaagtgctgggattacaggcatgagccaccacgcctagctcaggtgatgccattagtttctacacagttatcctctgtcatcccagactcaatgtgtccatcactggataggtcaccgcctcctaaagtttctcttgacctgctctcatctcccagaattttcctgtcacccagaatttgactcaggtacacaccaccacacctggataatttttctattttttgtagagatggggtttcaccatgtagcccaggctggtctctgtcttgaactcctgggctcaagcggtcctcctacctcaacctcccaaagtactgggattacagagtaattactgtgagccaccacatccagcttggccaccagcttattcaaagtctccaggatgctgggaccaccccccccaccacccgctccctgtttttgcataattgtatcttttttttttgagacggagtctcactctgtcacccaggctggagtgcaatggtgtggtctcggctcactgcaacctccacctcctgggttcaagcgattctcctgcctcagcctcctgagaagctgggactacaggtgtgtgccaccacacccggctaatttttgtatttgtagtacagatggaatttcaccatgttggccaggctggtcttgaactcctgaccttgtgatccacccgcctgtcctcccaaagtgctgggattataggcgtgagccaccgtgtctggcctttgtaattgtatctttgtgaatgagtgatttggttctgccctttttactccatatttataccagcctggctctaggagagtcagaaggcctgcccaagggtttctgccctctctgggccactgggccaaagctgtagcttgccctccgtgggctacctgggtcagccactcctgtgcttagggcttaatcactagttcgctgaggcctgaagtttaatcaacaccttgaggctaaacagctctggtccttgtgatcttcagcccatccctgcttttctctggtcctcctcaggagcttgtcaggccacgggggctccagtgatgaggctgaccatctttcttaagaggtgttctggtagcttgtattatgattggattgcgttgacttctcaaagccgaactgctgcttactagtagtacagtagactcccatttggcactgggctggtctttacccaggggtcccatagatgggtgtgtggaggggagaagagccagcatgcatccttgagttgttagttcaccaaaggatgtgaccctgtgttccacgagcgctcggtaattcctggtttgcactgatggcctttctctttggtaaagtcagggcgctgattatcttgtcggaagtatccagctggtcctctcttgggctccatcactgtgcaagtctctgctcataagaactcttcagttcccttctcctgggttcacagccaaggcaaaaaagagactccttggcctcttggcaaacatacatcccctacctggctggtcccccttcagcttccctctctaaggaacaacttgaacatagaaactccaacctcacctgtaatcccagcactctgggaggccaaggtgggcaggtcatttgaggccaggagttcaagaccagcgtggtcaacatggcgaaaccctggctctactaaaaattagcggtggtggcgcatgcctgtaatcccagctacttgggaggctgaggcacgagaatcacttgaaccagggaggcagaggctgcagtgagccagggtcatgccactgcactccagcttgggcaacagagagaccctgtctcaaaaaaagaaaaggaactccaacttctgaaagtaaacaacttatgcagtacatgattcctggagaggatttggtcaccaaccttccctccttccttccagggaaagcacacagaggggcagggcaagggcctccagtgcattacttcaccacttccctgagtaggtcttctcaagtccttggagccttcactttgtgatttgtcactgccagagagcaatgttgggatcatgagctgtgggtcctcagtctgactttaaagaaacctcacaaattgtctgctcctgattttcctgaccatgtttcccaccaatcctaacaaacctctgcttccctctcagtctcaacactctggtgttaatgcatttgaacctgctgtgtatctacttcctgtaattttttgagaattatctagaatggctcaaatcccacctttcccatgaagcctttctgaccactgcacatgctccttccccttgctgggctgtgtgctgcatgtgtgtacagggggacatcacatttgggtgcagcctgtcgtgtgggcgttccttttgacgcccgtgtcttgagagggctgtgtggtgttagcaggttagaggcagatgctaaagagacaggcctgaccattcactgacctagctttcctttccctgagcttcagtttcctcacctcttaaagggaaataaaaatagtatgagttgtgtgcagcttaactgagaggatgcctgtggagtgttcagggtgatggcagtggttattactattaatctttttctccccagccagacttgatgcctggacttggccacagcttgcttggtaaacccatttactgacatattaattgatccctcttctctcaccaggtacatggccacctctggcctagaccaccagctgaagatctttgacttgcgagggacgtaccagcctctgagcactcggaccctgccccatggagcagggcacctggccttctcccagaggggactgctggtggcgggaatgggtgacgttgtcaacatctgggcagggcagggcaaggccagcccaccctcccttgaacagccctacctcacccaccggctctcaggccctgtgcatggccttcagttctgcccctttgaagatgtgctgggggtggggcacactgggggcatcaccagcatgctggtccctggtgagtgggccaggggatggggcttgaagtgaatgaactctgggtggaagtttgggccagagacatccaggaactgggggcttagttgggctggagctgttggactgaggttcttccttatggctccatgcttctccctccctcccttcaggggccggtgagcccaacttcgatggcctggagagtaatccatacagaagccggaagcagcgccaggagtgggaggtgaaggccctgctagagaaggtgaggctcccctgctggagagggtgagatcccccccattgctggagagggtcaggttcccccgtcctggagagggtgaggttcctccttcctggagaaggtcaggttcccccctgctggagaaggtcaggttccccactgctggagaaggtcaggttcccccctgctggagaaggtaaggtttcctcttcctggagagggtgagattcccctctcctggacggggtcaggtttccctctgctggagagggtgagattccccctgctggagagggtcaggtttccctctgctggagagggtgaaattccctctcctggagagggtcaggttcccccctgctggagagggtgagattgcccctgttggaggtgaggttcccctgctgcagagagtgaggcccctgctgctggggaaggtgtggtttggggttggaggtagagaaagctctcctgatgtctcatgctgggggtcttgggtagaggggttcagcagcctccctggcttctctttttggtgctaccctcctgtggctccttgctgagtcctgtccctctgtgacacccccaggtacctgcagagcttatttgtctggacccacgagccctggccgaggtggatgtcatctccctggagcagggaaagaaggagcagatagagaggctggtatggagcaggcccctgaatgcccaggcccgtcttctcccccacatcctctccccaccatggcttgtccccagaagtgcggccagcaggtgggtgctgccagttccctgactccgaggctgtaacagatatcactcctgtcccctccctcagggctatgacccgcaggctaaggctcccttccagccaaagccaaagcagaagggccgcagctccacggcaagcctggtgaagaggaagaggaaggtcatggatgaggaacacagggtaaatgagcattggcatgggccgggccttccacaggctgcaccctcctgcttgtgcctctgcccttgtcagcctgccacttctcactctgtgcctgtgtcctccccgtctccggtccccaggacaaggtccggcagagccttcagcagcagcatcataaggaggcgaaggccaagcccacgggggcccggccatctgccctggacagatttgtgcgctgagccagactccagggttgcctgggaacagtctctccccaagatcacctgtagggaaatgagtgttccctggaacaaggaggtgggggcagtgtggccccttccccaactgggggtggacagctgtctcctggggtgggttggtattaaagaggaaagcgattttttggataatgtgtctggatcatcttgtggacctgttcccctcccccttgccaagcatgaggccattctaggatcggaggggtcagtgtcctgcctctacccccaccccataccttgtggctgctgtggccttagctttgccttttaggggccttcctcctcagagaggctgtcctctctcccatgtccctggagatgtccttcccatgcagcagggtctggcagcctctgggctctccaggtttgtggtgttctgggggtcctggtgaagaccacactgcactcgaagaagtggagacaagtttattgaggagcttgacacccctcttctgccctagcttgagagaacaactgcagcatttttttctttttctcttcccgatgaccatcttttgggctggcgggccaggcccctgggtgtctcccatatcgctgtctttagtgagactgaggatctggtataaggaaacagatcagctgcagccagtgagggcccctgcgttgggcctgggagagagaaggtcctgttcctgcctttcctgtggccccaggcactctcagctctgaagccaggctattgctcgacaccgcaggatgcccaggactccctggaaccaggagcaaaagggcgcagtcctttccccgtcagagccacccaccagcttccaggcttcctgcatcttccaggggtccagcctgtgggacgtcagcaggaatttcccatagcagcaccggtctagcgggtagtgggtggcaccagccagcttgacacactgtgttggggcgaggcctcctcgtcgggcacttacccccacaaagacatcctctaatgggagaaggggtgcccggctggccaccttgagaatgagctgcacagcagacgctgacagcacataccccgtgcctgaggcatagggtggaaaggggccccaggtgtgaggccactgctcctctgatacgcggtgcctgccccccggtgtccgagaggggttcacgcgccagtgcacccggcccaagtacagaagaggcacttcctcgctgtgcaaaacctggcctccttcctgctcagcctctctctggggttccgtgcttctctcccattgcccccaacggccccctcgcaagaccagctctgataccagttcagggacgttgacatacacatcatcgtccgtcttgaggacgtatcgggccatggggcagtgtttctcagcccagttcagcccgctgagggtctttagggtgaggttgcggtaggagtcctggaaggcggcctgcaagatatccccctgggctgctgactccgaggccaggtcactcccctgggaaccccacacggggtgctgtgcgttcggctctcccagcaagaatagcgtctgtaccctgagcccccgggcctcgcgcagcccgccccacgaagcccgaatggcgtttctctggttcaggttctccggagccgtgcacaccaggatgagcaggaagggaggggccccgggaccactgcaagcttcctggttggggatcaagaggcggggcagggccaggggcggccccggtgaggcgggggctgggagcagggaggctagtgagaggctcagcagctcctcccccaaccccgaaggcccgaagagggtccagacgatcaccagcagcaaagcggcgagaaggaggcgccggaagagcctgagctgcatggtgcggcgtactccgaggggatccgtaagagcgaagggcggagactagctccccgggcctgggtcacggccggggacttaaccgaccacgcccgggatgcggaggtctgagcgcgcgaccgggaccagcgcaccctggggggcggggagaggcggtgcagctgcggaccgcggtcgaggcatgctgcgggggtggctaccttgtcgccgcggcctcgccgccagcaagctccgctccatggctggccgactgcggcactcacggcccctcccccgcctcgccccggcggccggtctgccgcccgcttccgcgttgcgcgctcccatccccgccggaagcggcgtcggagcagcgcggcagggcgcggaaacccgggcgggtggagtggcaccaaacggagtgagaccggtctgtccagccgctccccatcccaacccaccgacgtactccaccagggagaccacacccttcataaccaacgtccgcgtttttgcctttgttgcttcggtcacagcccgaaggattttcccttatgactagatgaccccttaaaagaaaacaaaaacaaaaacaaaaaaacccagagtgaccaagacctgcaaactcaccttaactgcaactggctaggctcagctaacccactccacaatgatgctgcacaccaaccccagggtgttggtctctaaactggtctgggtcagcccctcaaggctgaactgttttaccctcacatttctctttacagagagggacatcactagctacatatagggagactggggggtctgcagcatcaccactgctaaaactaatagcactgtgtgggcaactgagtagggcagctctaaatggaaaaaggacccagcactttaacattccctattagaatggacagaaaggacaggaagccataggtatataaactatttattaacagacaaggcctacagacttatttcttcttggacacacccacggtgcggccacggcggccagtggtcttggtgtgctggcctcggacacgaaggctgcaggtaaaaagagaagagtcacaggtcatgcacagcagaaacaaaaggttggggaaaaagaagagcgagtaggaggaatgctgagtcgaggtaggcagggagatgagaccccccactcacccccagaagtgacgcagccctctatgggcccgaatcttcttcagtcgctccaggtcttcacggagcttgttgtccagaccattggctaggacctggattcagaggagggggcaagggatgttttatcccctgacctcctatgcccaattctgttaggaccctccacccttcctctaatcctgccctcatttcagtacacacctggctgtattttccatcctttacatccttctgtctgttcaagaaccagtctgggatcttgtactggcgtggattctgcataatggtgatcacacgttccacctggcaggcagaccaaggtcagatctagatggacccctttctgaggctgaccccacccccagcccccttccttgtcctcacctcatcctcagtgagttctcccgccctcttggtgaggtcaatgtctgctttcctcaacaccacatgagcatatcttcggcccacaccctgaatgaagtgaggggtttcggaattagtgttgaatctgatttttaaattcctttatagcctcattcaaaaagctcacaaaggtaggatctgcaataatctattttgcaatcccctaggtcaccctttcctcacccacctttccagatataaaccgttcgacagaaggttaactttgggccggtcgcagtggctcacgcctgtaatcccagcactttgggaggcccaagtgggcagatgacattgagggcaggagttcaaaaccagcctggccaacatggtgaaaccctgtctctactaaaaatacaagaaaagttgctgagcatggtggcaggtgcctgtaatcccagctacttgggaggctgcagcagaatagcttgaacctaggaggtggaggttgcagcaagccaagatcacgcaaccacactctaacctgggcgacagtgagaccccgtctcaaaaaaagaaaaaagtaactttgttcaggggtatgactgaatcatgaacacagaatttagtattacagacaaccctttgaaagcaggcagtatcttttttttcccccattgctcagcatatgtagttgtcactaagtgccttctgattcttgcatttaggagaacaaggggcctgccactccaagctgatgcagtaaaccagggtcttatgagttacaggctttgattaaggtattgggctgtcagttcctcagaatctctaagggtcacaattatttaggcaaatcactgtatccccataatcaaagtattccaagatcacaaactcaattttgtcagtgcccagaactgactgcccaagttattataaaaagaaactaatgcttacattggtagcatcacatcaacaccagcactagcacccatgccatctgaactcatgaaccaaagtgatttggagagtgaaggaggaactgaatactgagccctgcccctcattttgtccaactagaacatcagaatgtggccctatttggaaataaggtcgttacggaaataattaggtaaaatgacgttatatttgattagggtgggctctagatccaatgacaaatcatgagagagacacgaagaggaccatgagatgacagcaacagattggagtaatgcagctacaagccaaggaacactaaggattactgacaaccaccagaagacaggaagaggcaaggtaggattcttaagtgcctccagcgccaagagtaattttctgcttagtttatatgaacttgttacagtaggctccaggaaactaaaacaaatggcagttcctatctgcaagaaagagatcaagggttggcttcaccgtggctcatgcctatatgcctgtaatcccagcactttaggaggctgaggctggaggatcactgagcccaggagttcaagaccagcctggacaacacagcaagatccagattagccagatgtggtggtgcacacctgtagccccaactacttggaaagttgaggtaggaggattgacttgagccctggaggtcgaggctgcagtgaagagtgattccgccactccagcctgggcgacagtctcaaaaaataaatgtggctgggtgcagtggctcacgcctataatcccagcactttgggaggctgaggtgggtggatcacctgaggtcagaagtttaagaccagtttgaccaacatggtgaaaccccatctcttctaaaaatacaaaaattagctgggcgtgtgcctgtaatctcagctacttgggaggctgaggttgcagtgagataagattgcaccattgcactccggcctgggtgacggggtgagactctgtctcgggataaataaataaacatgaccaagggtcaaattattaggttgattcagaagagagcagggtctttcaaatttattaattaaatgacgaggtttcaccatgttgaccaggctggtctcgaactcctgacctcaggggatccgcccacttcagcctccgagtgagccactgcactaagcctcaaatttaattatatgtttacaagtgaaaagatttacttcaaaatgggtgtgggaagagatatagatgaaataagatttctaatttttagttagatacatccatgaaggttattctctattacacttatgaatgctgcacctctacttaagcctcacagccggtctctgaaataagtacagtatttcacactgccttattagtttcacagagcacccaacagaaggaatttccctctacaaattcctcaacagagccaacagtatccctactactatccattccctaacgtcgcctaagtacctaccatgcaacagaagccaagaagacaggcctagccctgcacgcatggacacatactggtaggctatttccacaactaactacacattctgacttaagggaaaaaaaaagaacgttatgtatctagaaagccaagaattcattaggtttgtggagagaaatactcaagtgaaataatattcttgcattcattgattcgattcttaaaagccaaagaaagatggatgtactccttcacacttcgacaggaaaggagtgtcaattatggctcatctgagtaaatgtcccactcagacttcttccaccctccatctacaggcttcttcacactttttatctgttggtatttctacttatccctcaagatgcccaataatcctccaattctcagggaatataaatttcgcaggaagggttgctgttatgatggtgggatgggtaaagaaaccgaatctagaagaaatctcacaagctcgtggttcaggaaaatcttagcgaattcgggtgagcaaccatacctcctccccacttccccaggtgaaatgttttggcttgaccttagaccactatcttggctttaatcacttattttctgtggtaaatgctaaaggggtcagtctctccctaaaccactttcttttcttaatccagcagtcaaggtgatctggatgagactcaagtctccccagccttgcttcatttttgcttatgtcttcacaacccaattctcatttacattccctattccttaccctacttcacttaccttaatggcagtgatggcaaaggctattttccgccgcccatcgatgttggtgttgagtactcgcaaaatatgctggaacttttcagggatcactagagactagttgaaaaagtacgggggaagaaatcagacacagtaaactatcaaacagtaaggccgataaggcaaacgaacttcatacaaaaaggttaagcctgtcacacaagtggcaagacacccgccccccattccttaggttttcacaccacagagcaaactcctcagtcctgcagagtaggcacatgaagcgttcaagcttgggaaaatgcaacctctggagagaggaagcaggtctcctgcccattcccaaaagtgcgtggcaaaagccagagttccccatatacgcccaagccttagacagctttcgtgcgcccgagcagtgacccttcctcgggcccgctctccggaattggaaatctttggtgtccctttccagggacgcgatccaaggctccatacagaaagtcgcaggccctcagggcaggacgtttccagaaccctgacagccggctttccttgcccgagctgcgatgccgctggatcacggcacggattccagtcttaccatggctgcagcacaagcggcggcgtgtaggcctcctgtggaagagagagcggaagtgacgcgatatcattatatagcttccaggaggaagaggcggtgcgatctaggagaagtgcttccggaaactgtttcagcgcgacctggctggatttatgagagtatggcttgggtaccacaacttccggtgcgcctttctttacagttcgtaaggttcataggtaagagaacagcgaaggttccggggctagtttgtgtttcagacttccatatttccatttgcagttgggtgaagtggttagagctgaaaggggacagctggagtcaaacaacttaactcaaatatctgggaacgatttcgcgctgaggaagaccctttgggacttgtagctccactccggggaacggactcgccgggactgacagttgccggaagtgaggctgcggggaatggccgccgctgcgaccatggcggctgcggcccgggaactggtgttgcgggctgggacctcagatatggaggaggaagagggcccgctggtgagagcgcggagctgtttctcctccgtagttccggtgctcctagcttcagaaagacctgagctgggtttaggcacaagggtgggaacttggctgctacccgtgatattacctgtttggctccccgtacccttccctgtgatcagacccgaccctgagcgggaccctagtggctgaaactcatgttctggggcacaaaatttcaacttcactccacattttggggtagagtcacgaagtagtatagtgtaaaggttaagaacatggcctctgaagccagactgcctgagttctatctctgccacttacacgctgtgtgcccttgggcaagttaaccagcttctctgtgccatcatttctcacacctttaaggtgaggaagatagaacctattgtatacatcgtcgttaggattagatgaatatgtgtaagattgcacctggcatgcaggtaaacactatgtgttttgacatttctagaaagcctggggttccccagaggtgtgatagaacacccaagatggcaggagtctgagggtcttaaatttaagtgcaagttctgctctatcctctgcaattcctagctttcctcattcggtcatctccactgcacttttttttttttttttttttttttgagacggagtcttgctctgtcgcccaggctggagtgcagtggcgcgatcttggctcactgcaagctccaccttccgggttcacgccattctcctgcctcaacctcccaagtagctgggactacaggcgcccgccaccgcgcccggctaattttttgtattttttagtagagacggggtttcactgtgttagccaggatggtctcgatctcctgacctcgtgatcttcccacctcggcctcccaaagtgctgggattacaggcgtgagccactgcgtccggcctccactgcactgtcttgtcttttacctttttttgttttctttagacgggtttccctgtgttacccaggttgaccttgaactcctgatctcctcaaacaatcttcccgtctcagcttctaagtagttgggactacaaggagcccaccaccatgctgggctacctccactgtctcactggatcgtctcactccttgtcgtattccttacccatcagcacaaaataggagagtgggtacaacgtgagactcttagaatttttcaaagcagtacctgtggctcccagtaaaagcagctccttctcacttgaaggactggggatatccaattatattttttctttctgtctttcaccgtaccctactcccattaacttatccctttccaggcgggtggtcctgggctccaggaaccactgcaacttggggagttggatatcacttctgatgaattcatcctggatgaagtggatggtaagcgatggcatggggtgggtgcagtacctgtaatctgagaggcatgggggctggaaggaataaggtagggattggtgtgcagatactcaatgtggggagagggagctgtggagctggacccttatgataaacttctatttccagttcacattcaggcaaatctggaggatgagttagtaaaggaagctcttaaaacggtgaggctttcccctgtactaatctgcccttctatctattctaccccaaaaggaaaaacaacagtctcttgcttttgttgtatcagcctggtatctgaccctttagtccttcactgattctgttacagtgtccctttactgagacttccttctgacctgtcatctttatgttctcccagggtgtagatctccgtcactattcaaagcaagttgagctggagctacagcagattgaacagaaatccattcgggattgtatcctccagcagagggaaggggtggtgctattgacatggggattttgtggcgtgtggtacagatgtcccagctggggtcaacatctctgaggtttctatcacttcaaagagaaattggagaggtactacaaatctgaggatctcccatcttcaccatgaggccccttgactttttgtggatcagatattcaagagagtgagaatatagcatctctacacaaccagatcacagcctgtgatgctgtcctggaggttagtaatcatgacctgtgacccctaatagctactctgaaccagatcatggactctggtgccatttttaggtcatcagcctcaagatggggacaggttagggtcattttcaagatgacttcaggagccttttttgttattactgccatatttaatgttatttcctgataatctggggtgtctcatcatctgccaccctcaaggactgataaatactgaagacttcacaaagagtctttggtggcccacttatcccctacaaaccctatagcactccggcaacatctaccctccctacagcgaatggagcagatgttgggagcttttcagagtgacctcagctccatcagctctgagatccggacactgcaggaacagtcaggagccatgaacattcgacttcgaaatcgccaggcagttcgggggaaacttggggagcttgttgatggtctggtggtgccttctgctctggtcacgtgagttaccagtttgaagggttataatgtccatagcaggtggatgggctggggtgacccaccctatttaccatatgggtctcctggctccaggttaagtgctttttagaaattagtagccaggttaaccaccatttctttaggtatgcattaggcatcaaagattaagattaagaatgatgtaagatcaggtgtatagtggggaggtccaggaatagaaaactttgtacatgtgtcctgactatatggtacaatgcaaggtggtagagatgacaggggctggaggtaaggagtgtggtctgggtctggtttagggatgtctgggtctcccttgtaactcatcccacccctccctgctaaccagggcaattctggaggctccagtgacagagcccaggttcttggagcagctacaggagctggatgccaaggcagccgcagtcagagagcaggaagctagaggcacagcagcctgcgcagatgtcagaggcgtgctcgatcggctccgggtcaaggtgggaagtagggatggataccctggaggctactggaagcagccttcccaagatcttcactatggatttccttggcagagctcactgtagcctgtctccagggacttcaccctgccttttctgggcagccccattcttgtctctctgggtttccctgaaaatcttgagaaataccaaagagatattcaccacccttctgcctatgtttaccatttgttgcttcccccagttcctctcatacagcaaaagggttgcagcttcatgccctgtgtttggttccccacatctaggcagtgacgaagatccgagagtttatcctccagaagatttattccttcaggaaacccatgaccaactatcagatcccccagacggccctgctgaagtacaggtcacaaccccaaggaagtgcatgggatggcctttgagtttttgagcggcctagtgtgggcatctggtttcttgggagacaggtagactgacatgttcctgaccccctaggttcttctatcagtttctgctgggcaatgaacgagcaacagcaaaggagatcagggatgaatatgtggagacgctgagcaagatttacctgtcttactaccgctcttacctggggcggctcatgaaggtgcaggtaaggtcaggagggagaggtattcctgggcacatggactgggaggaggggacatccctgggcaaggaatattttattgtgttgtgggaagagacggttatcagttctcttttctctttccttagtatgaggaagtcgctgagaaagatgatctaatgggtgtggaagatacagcaaagaaagatatcctagtactggggaaccctcatgccaggccttgagagtgggaggactttcgactccagccaccaatgcactgctccttaccttttcctatgggactgaaaccttttagaatgtgatgaaagctatagcctccctccccagaaagatgcacacattattttgacacatagttttgcatatgattgcaagggagggagagacaccctgaagcccattcacagatgtcagcacgtggggccctagtactgggaaagagggctggctaggccacgtctgcctgtctggggtccccacagatagtgagtctttgggcccagttatggtctcattgttttccctgactctgacccatcttacgattcttctcaaagccatcgctccgcagcaggaacaccattttcaccctaggaacccgcggctctgtcatctcccccactgaacttgaggcccccatcctggtgcctcacacagcgcagcgcggagagcagagggtatgaggaggaacaagcttcagtcacgaaagaggctctgagcacggtggggagggaaggccagacctcagggcagagcttcccaacctgcaggccctgtcttaatccccttagacttgggagtggccttctccaatcactccagcctgctgtgatgtgaaaagagctgggaaccattgacttaagggcatgcagaggggagagactggatgaggggaatgacagtcagaggcaggtgttgaggtggatgcaggagtagcaacagcaggtgggtgtaggccctttttgtacccctatgttcccccaccttttcagtgcccattcagcttgctcttagacagcccggacctagatagatgcgaagggtctgcctagctcttattactcaggtttactgattttccagccatatccatgggaagtcagtgttggggtccatcccttctgtttttcttctttactcctcctctcccagtatccatttgaggccctcttccgcagccagcactacgccctcctagacaattcctgccgcgaataccttttcatctgtgaattttttgttgtgtctggcccagctgcacacgacctgttccatgctgtcatgggccgtacactcagcatgaccctggtaagactcctgtttcctgtaccattcaacacctttgtccccagtcttcatcagcagcatagtggggtcatgactctggtagaactgaaatcaggatcgcctcattctaaaatgtctaagccttggctgggcgtggtagtgcacacccataatcccagcactttgggagtccaaggcagtaggattgcctgagctcaggagtttgagaccagcctgggcaacaacctcatctctacaaaaaatgaaaaattagccgggtgtgtgttgatgtgtgcctgtggtcacagctactaaagatgctgaggtggaaggattgcttgagcccaggaggtcaaggctgcagtgagccatgcactccagagtgagacctgtctcaaaaaaaaaaaaaaaaaaaaatagccaggtgcagtggcttacgcctgtaatcccagcactttgggaggctgaggcgggaggatcacaaggtcaggagtttgagaccagcctgaccaacatgatgaaaccctgtctctactaacagtacaaaaattagccaggtgtgcgcggcctgtaatcccagctactcgggaggctgaggcaggaggattgcttgaacctgggaggaggagattgcagtgagccaagattgcgccattgcactccagcctgggtgacagagcgagactccatctcaaaaaaaaaacttgttacttagacttgtcacagtgttactcccccatgaaatcctcagtgcgtagggtccctgagactacccctactgctgacccacaatcaggcaatagcacgtgaaaactgagggtcccccaaatcttggtgctcaaacccctgacccaagctcagccctgaactctgctgtgataggcttgtgatcatagatcctggtgtggccaggtgcagtggcttatgcctgcaatcccagtactttgggagaccaaggcaggaaggttgcttgaggccaggagttcgagaccagcctgggcaatgcggcaagaccttgtctctacaaaaaatttaaaaataaacttaaccaggcatggtggtacacacccatggtcccagttgcttggcaggctgaggtgggaacatcacttgagcccagatgtttgaggctgcagtgaactatgattgtaccattacaatccagcctaggtgacaaaacaacctgtctctaaagccgaaaacaccgggtgcagtggctcacacctgtaatcccagcactttaggaggctgaggtgggcggatcgcctgaggtcaggagttcgagaccagcttgaccaacatgatgaaaccccatctctactaaaatacaaaaattagtcgggcgtggtggcaggcgcctataattccagctactcaggaggctgaggcaggagaattgcttgaacctgggaggcaggcggaggttgcagtgagccgagattgtgccactgcattccagcttgggtggcaagagtgaaactctatctcaaaaaacaaaaaaaaagccaaaaacatagatcctggacaggaaagcagggggcagttccattttacgtctctcccttctgtcctgtccagtgcatcatccccaaagaaacaaatgcgtttgttcatagtcactgaggacaacaaactgacattctcttttaatcctctgtttgttccccaatcacacagaaacacctggattcttatctagctgactgctacgatgccattgctgtttttctctgtatccacattgttctccggttccgtaacattgcagcaaagagggatgttcctgccctggacaggtcactgaattctggtccttgatgcccaacaggccacgaactctcttggtcttgcatgactctgccctgaccttagactcctactgacctggtatcatcaacctttattcccattcatttgctccggaggcagtagtgctgctttttgactcacctttctccaaccactgccccccaacccccacaactagctattgaccattaaactgaatgatgccccactccctcccatccccctccaacattccttgctggctgacctctgattctgattaagcccacaggtactgggaacaggtgcttgccttgctatggccacggtttgaactgatcctggagatgaatgttcagagcgtccgaagcactgacccccagcgcctaggggggttggatactcggccccactatgtgagggagggcaagggtaacaaagggttcttgaaaggcagggctctaagcatcattgtgggggttggccaaggtcacagttgtgtcatgggccacgctatgagcaggtgttctgggagggtggtgaaactcatggtgagtggtgcactgtgggtaggagggactgaaggtagagtcacatcacatggaggtgggttggctaaggaagttgggaggttgtgttggttgggccaggaggtgggtgtgattttccttcccactctctcctagatcacacgccgctatgcagagttctcctccgctcttgtcagtatcaaccagacaattcctaatgaacggaccatgcaattgctgggacagctgcaggtgagggtcggacaggagacacttcccagcagcagggctgcttccagtgggtggagtctgaggaggagccagatggggcccagatgaccttgctttctggtgtcacctcttcctctctgccttttcaggtggaggtggagaattttgtcctccgagtggcagctgagttctcctcaaggaaggagcagcttgtgtttctgatcaacaactatgacatgatgctgggtgtgctgatggtaataggtgctccttctccttgccttcctacccagaaaattcggtttcccccactgctgttagctctgtgagggcagagatgatgcctgtcttgttcagtgttttactcttggagtctggcacagtgtccagcttagtacaataagtgtggaatgaaggggacatcctgaagtgaaggactgctttccccaaactagacatttccctttgtcttcccttaggagcgggctgcagatgacagcaaagaggttgagagcttccagcagctgctcaatgctcggacacaggtaggggtgtggggaaaagggaagagacagccttctgtgctgttttcagctctctctctctctctctctgtgtgtgtgtgtgtgtgtgtgtgtgtgtgtagggagtggcataatggatctcaggtatgcggaattactgtaactcttgattcacaacatactgtcattattggtctattttattttattttgtctttggtttttttttttttttttttttgaggcaaagtgtcactctgtcacccaggctggagtgcagtggcatgaacatggctcactgcagcctcaacagcctgggcttaagtgatccttctaccttagccccctgggtagctgggaccacaggtgcgagccaccatgcctagctaattttttatttttagaatgaattttatttttttctttatctatcctctcaagcatttatcctttgtgttataaacaatccgattacactaagttattttaaaatgtacaattaagttataattgactatagtcaccctgttgtgctgtcaaatagtaggtcttatttattcttcctatttttgtttgtacccattaatcatccccaccttctccccagccttccactagccttcccagcctctggtagccatccttctactctcttcgtacatgagtacatgagttcaattgttttgatttttagattccacgaatcagtgagaacacatgacgtttgtctttctgtgcctggcttatttcacttaatataataatttccaattctatgcatgttgttgcaaatgactgagtctcattcttttttatggctgagtagtactccattgtgtatatatcccacattttctttacccattcatctgttgatggacacttaggttgcttccaaatcttagctattgtgaacaatactgcaacaaacatgggagtgcaaatatctcttcaatgtactgatttcctttcttttgggtatatacccagcagtgggattgctgaatcatatggtagctctacttttagttttttgagcaaccttcaaactgttctccaaagtgtttgtactaatctacattcccaccaacagtgtataagggttcccttttctccacatccttgccagcattgctattgcctgtcttttggataaaagccattctgactggagtgagatgagatctcattgtagttttgatttgtatttctctgataatagtgatggtgagccccttttcatatatgtctgtttgccatttgtattcttttgaaaaatatctattcaaatcttttgcccattttttaataggattattagactgtcatgtagagttgtttgagccccttatatattctggttattaatcccttggcagatgggatgtgcaaatattctttgtctcttcactttattgtttctttagctgtgcagaagctttttttttttttttttttttttttgagatggagttttgttcttgttgtccaggctggagtgcgatggtgcgatctcagctcaccgcaacctccgcctcccaggttcaagcaattttcctgcctcagcctcctgagtagctgtgattacaggcatgtgccaccatgcctggctaattttgtatttttagtagagatggggtttcaccatgttggtcaggctggtctcaaactcctgacctcaggtgatctgcccagctctgtctcccaaagtgctgggattacaggcgtgagccaccgtgcccagctgtgcagaagctttgtaacttgacgtgatcccatttggccatttttgctttggttgcctgtgcttgtggggtatggctcaagaaatttttgcccagacccgtgtcttggagattttccccagtgttttcttgtagtagtttcataatttggtcttagatttaagtctttaatccatttgatttggttttcatatgtggcgagagataggggtatagtttcattcttctgtgtaatggatagccagttttcccagcaccattattgaagagactatctctctttttttttttttcagacggagtcttgctctgtcacctaggctggagtgcagtggtgcagtattggctcactgcaacctctgcctccttggttcaagtgattctcctgcctcagcctcctgaatagttgggattactgatgcctgccaccacgccgggctagtttttgtgtttttagtagagacgggatttcaccatgttagccaggcttgtcttgaactcctgacttcaagtgatcctcccacctgggcctcccaagtgctgggattacaggcgtgagctaccgtgcctgaccaagagactatcttttccccagtgtatgttcttggcacttttaccaaaaatgagtttactgtaggtgtgtgccagctaattttttaattttgtaaagacagttgtctttacaaaagacaactgttgcctgggctggtcttgaattactgccctcaagtgaaaaatcttatgattcttttttttttttaaagacggagtctcactctgactcccacactggagtgcagcgatacgatgtcagctcactgcaacgtccgcctcccaggttaagtgattctcctgcctcagcctctgagtagctgggactgcaggcacgtgccaccatgtccagctaatttttgtatttttagtagagatggggtttcaccatgttggcccagctggtcttaaaactcctgacctcaggtgattcacccgcctcagcctcccaaagtgctgggattataggcatgagtcactgcacccggcctagattctgtttttaatgacactggaaaacaacgaatttttgttttggcatatatatagctttacttttaaaagcaagaacacacacaaaaaaagggggaaaaaagcaagaacacaataaatgcaacatttagatcaacgagtacctgtgcacgagaagcacagggatggtttcagtaggatttcatagtttgatggtgacttttgccaagctgctgctacttggattgtgtggtgtgtttgtgagtgtttatatcattaaaaaacaaaacagccactgcactgggttgttttattttttaatgatataaacactgatgagacaaggcaagaaaacagcaaggcaaaaaagaaaaaaaaaaaagccaggcatggtggtatgcacctgtagttctagctatttgggagacaaaggcgagaggaccactttgaaatccaggagttcgagattacagcgagccatgatcatgacattgtagtctacccttggcaacacagcaagaccctgtctcaaacagcaaaacaaaacaaaaaaccccagaatcacaggatttttttcatgcataatttttctaatattgtcatgttattgcatatggctatagctcattccttttcactgccatatatgacttgtgtgattaaacatattctataaatggattgtttccagtttcttgcttctgtgagcattgttttatgaataatcatgtcttttagcacacatagatattgattatcttcatcaaaagtttctcttgggtataaacctaggacagtagtcttgctgctaataagatatgcagtattagtctttatgagacaatgataaattgttttcctaagtagttccttctcaccagcaatatgtaagaattcctactgagccacattttctccaacatgtggtattatcaggtctttgccattttttttctttttttttttagagaccaaggatgctgctaaagatgctcgggatcagaaatgtttcagattttgatttttttcggattttggattccttgcattatttttactggttagcatctgtagtctgaaaatctgaaatctgaaatgctccaaagagcattacctttgagcatcatgttgatactcaaaaacttccggattttggagcattttggatttcagattattggattagggatactcaacctgtatttcagtgggttttatttgtaattttctgattactaataacattgagcatcatttcaaatgtttagtaactatatgtaggggttcagtcaggctggtgggaaaaatattagtgatgatagccacaaaccctcttggaaggcctaagagtttgcataacttcagtaatagatatggttgaaggcgacctgatctttacctttagttaaataaattagagtaataacaaaggaatgtggggaagttatctaggtagcttgtttactcatatggtcttaagactaatctttgatgtaccgcaggtgcttaactgctttctactcaggaagtccacaatgtcagttaccccgtagtggtgttgactcaagtctttgtcaattaatctttactgaataaatgcgagtctcactagctggtcagggccgccattgcaactgtttacagtactcttcagggagtctgtaaacagcctggacacactcagctggactggcaaagcagagtatctgtgtgtcagtgtacctcattcatccgttgccgggtcaggggtctgcaagggacagactccctgaagctggtgctctgtgtgaggagcgtcaccacaactatacaatttttttttttcctgtaaaatggctgtcatagcatttgaccttttaaaaatcggcttgtggctgggcagggtgtacacctgtaatcccagcactttgggaggctgaggcggatggatcagttgaggccagtaattcaagaccagcctggccagcatggcagaaccctgtctctactagaagtacaaaaattaaccaggcatagtggcgcatgcctgtagtcccagctcctcaggggcgctgaacctgggaggcggaggttgcagtgagccaagattatgccactgcactccagcctcagttacagagcgtgactctctcaaaaaataaagaaaaaaataagtctgctagtattttttatttataagagttctttgcatcatctacatactaatcttgttgattatacgtaggttacagattatcttttagtatgtatctttttacttttttttttttttttggtgagatgagggtctttctgtgttgcccaggctcctgggctcaagaaatccttgcacctttttttttttttttttgagatggagtttcactcatgttgccgaggctggagtgcaatggtgtgatctcagctcactgcacctctgcctcccgggttcaagcacttatcctttctcagcctcctgagtagctgggattacaggcgtgtgctaccacgcccggctaatttttgtatatttagtagagatgggttttgccatgttggccaggccagtcttgaacgcctgacctcaggtgatccatccgcctcagcctcccaaaatgctgggattacaggcatgagccaccgcgtccagcctttgtttttttaatgttgctttttgattaaagaaatttgtaattttaatatgattgaatttatctgtccttcatttttatgtctttgtttttagtaacagtcttgctctgtcacccaagctggaatgcagtagtgtgatcatggctcactgtagcctcaacctcctgggctcaggcaaccctcctccctcagcctcccaagtaactaggactacaggtgtgtgccatatgcccagctaatttttgttgttgttgttgttttgtagagacagagtctcactatgttgcccaggctggtctcaaactcctggcctcaagtgatcctcccgcatcagcctcccaaagtgctgggcttacagccaccatctaccacgcctgactatttttgtcctgtttaagaaattcctgggctgggtgtggtggctcacgcctgtaatcccagtactttgggaggctgaggcgggtggattacgaggtcacgggatcgagaccatcctggccaacatggtgaaacctcgtctctactaaaaatacaaaaaaattagctgggcgtggtgatgcgtacctgtagtcctagctactcatgaggctgaggcaggagaatcacttgaaccagggaggtggaggatgcagtgagccaagatcgtgccactgcactccagactggtgatagagtgagactccgtttaaaaaaaaaaaaaatgaaattccttattactccaaggccagaaaaatattatgctacattttcttcttaatattgtagaattttggccaggtgcagtggctaaagcctgtaatcccagcactttgggaggccaaggcaggaagattgcttgaagccaggagtttgagaccagcctaggcagtatagtgagacctcatctctacaaaaaattaaaaaaatatattagccaagcatagtggcacacacctgtagtctctgctactcaggtagctgaggtgggaggatcacttgagcctgggaggtcgaggctgcagtgagccctgtttgtgctgctgcactccagcctgggcaacagagtgagaccctgtctcaaaaaataataataaaattaaagaataaacaaatatatagagagaatttttttgttacctttaagtctcaaatttacttggaattaatttttgtgtgtgatgtgaggtagggatctatttcttttttttatgtggatggttggcccagaaccatttatagaaaatctttttcttttctttttttttcttttctttttttttttttttagacagagtctcactcttgtcacccaggctggagtgcagggccacaatctcagcgcactgcaacctctgcctcctgggttcaagtgattctcctgcctcagcctcctgagtagctaggattacaggcatgtgccaccacacccagctaatttttgtatttttagtagagatggggtttcaccgtgttggctaggctggtctcgaaaagttttcacattttaaaaagtctttaaggattttgattagaattacattgtctatagactaatttggaagaattgatactttatgatattgaaacttcctatccatgatcatgatcatgggctccctatccttttttttttttttttttttttttttttttttttttttttgagacaggttttgctctgtcactcaggttggagtgcagtggcacaatcatagctcactgcagccttgaattcctgggttcaagtgcttctcttgtctcagcctcccgagtagctaggactagaggcacacagcaccacacttggcttttttttttctgtagagaatacaaaatttaaaaatttaattttttgtagtgtctcactaaactgggattacagatgtgagccactccacctggcctcctcctccaatttttaagagagtcttttaatgtcttttgataacctttttaaattttcagcacaaagacactgtaagtcgtttgccatatttttaggtgggtataatacgtatgtttagttctactaggaataaataaatcttttctagttttttgtctttaacatcttatgtttttgatttcttattctactggctaacactcccaggatgatgtttagaagttgaacagaaaggtgatagtgagaacccttttcatattcctgattttgaaagaattgttgctggtgctgtggctcatgcctgtaatcccagcactttgggatgctgagatgggagaatctcttgagcccaggagtttgagagtttgaggggatctgcctgggcaacatagtgagactccatttcttttttttttttttttttttagacagagtctccctctgtctcccaggctggagtggtgcagtggtgcaatctcagctcactgcaagctccgcctcccgggttcatgccattcttcctgcctcagcctcccgagtagctgagactacaggtgcccagcaccatgcccggtattttttttgtattttgtatttttagtagagacggggggtttcaccatgttagccaggatggtcttgatctgacctcgtcatctgcccgccttggcctcccaaagtgctgggattacaggtgttagccaccatgcccggctaagaccccatttctttaaaaaaaaaaaaaaaaaaaaaaaaaagccaggcgtagtggcatgcatttgtagttctagctgcttgggaggctgaggcgggatcattgcaggagattaaggcacccacaaagatgcacttaaaccagttgtttctgctgagagcagctgggatttgtcactggatttgccaggtatagagactcgccagctgccatcaatgcttctggtcctttttggtcagctgctgcttcatactacgtaggaaagattgttaaagcccagtgcactgtttcctctggtcactcctctgctatcaaggtgttctcttttgcgttatagaaagcttaaagttcatctaagtccagaccagtactcctataggaatataatgcatgccacaaatgtgagccacttaaataattttaaattttctagaagctacattaaaaagtaaggagaaacagatgaaataattttttaaaccactacatccaaaatattattatttcaacatataatcaataaaaaatagtactgaggccagcacggtggctcacacctgtaatcccagcacaggccaaggcagggaggatcgcttgagcccaggagtttgagaccagcctggacaacatggtgaaaccccatctctacaaaaaataaaaaaaaaatgagtgggacatgttggcacatgcctgttagtcccagctactcaggaggctgaggtgggataatcactgagccaggaaagttgaggttgtagtgagctgtgattgtgccactgcactccagcgtgggtgatggagcaagaccctgtttccgaaaaaaaaaaagaaaaaaaagatatacttaaaatttattctaagatgaagtcttcaaaatcaggtgtatatatcatgcttacaacacattatataatttatggctcctgcctagcaggggtcatcactgttagttcaacttttctttggcaagtctactccctgtgccccaccgtacactgctacattattgtttgtatatgtgtgtgtgagactgcatttaggcaactgtaataggttgaatttggttatttaatctctgtccaaaatcacatcacaaagatgccttgattatagaaagatccttccttgcagcatattagttatttgacaccctcagtggatataagtgaatattttgagggaagaatagaaaagatacaatttttatttatttatttatttatttatttactgagacaagttgctgctctgtcgcccaggctggagtgcagtgacatgatcttggctcactacaacctctgcctcccggttcaagtgattcttctgcttcagtctccctgagtagctggggttacaggcatgcaccaccacacctggctaattttagtattaataatttatttttaaatggaataataatttcactttcttcttaccagatctttctgtctgggttgtttgcttttatgagtttttttgtttgaatctcccttttacattaaacaaaaattaacattttattatgggaaatttcactatgctattagaaaagcatagtgaacccccaggcatcatcagtgatattcggtgtatagcagttcacggacagttttgtttcatctataccaacacctattgcttatcctccttctgtgtcccccagttactttgaattaaatcttatacatatacagatgaatattatcacttcatctgtatcagaatgttatttttattaagaaaattatttttgagatagggccttgctgtagtgcccaggctggagtgtagtagcatgatataactccctgcagcctcgaactcctgggctcaagtgatcctcccacctcagcctcctaagtaactgggactacaggtgtgtgccaccacacctggtaacagatggttttaaaaactacaatacattatcacacttaaaaaaattatcttatctaaaataactattcagattttcccagttatttcataagtgatttttttttttttttttttgagacacagtttcactcttgttgcctccaggctggagtgcaatggcccgatcttggcacactccaacatctgcctcccgggttcaagcaattctcctgcctcagtctcctgagtagctgggattatagacacccaccaccacgcccagctaatttttgtatttttagtagagacaggatttcaccatgttggccaggctggtctcaaactcctgacctcaggtgatctacccgcctcagcctcccaaaatgctgggattacaggcatgagccactgtgcctggccttcataaatgatttttatggttcaaatcaggatccatataaagtccatatatgtgtctttttttagtctatagatttcccttccatctcctctgcaatttatttttggaagaaactgagttattgagtcatttgtcatctagaatgatgtacagtttagattttgctgactgcattccatggtgtggccaaacttcctctgtctggtgtatttctcataagtgtgtaattagatggaaaggcttggtcagatttaaattagtttttttttttctacagggatatttgagaggtagtggtatgtatttccatcaggaagcacataatgtcttcttggctctctttgtgatgttagtagccatcaatttcagtgcctagatacattaattagatttctgtatctcctactatctcaaaattttccatcttctgtctgtgctacattctgagtcctttcttcagttataaattctaattcattgtataattcttgttaatctgttgactttctaaaactggcttttcatatctaaaaaaatttccttttttcaagtctgttcattcctcatagttcttactaattggtcatttttacatcctttttttttttttttttttttgagacggagtcttgctctgtcatccaggctggagtgcagtggcatgatctctgctcactgcaacctccgcctcccaagttcaagtgattctcttgcctcagtctcccgagtagctgggattataggcatccaccatcatgcccagctaatttttgtatttttagtagagatggggtttcatcatgttggccaggctggtcttgaactcctgacctcaggtgatctgcccacctcagcctcccaaagtgctgggattacaggcgtgagccactgtgcccggcctatccttaactttagacattgcacacagtacaactgctatccgtatcggatagttcttaaggtcagcagctattgcttattgtgtctgctgactctcttggtagctgcccttcttttgtgtctagtgatctttgagttcattgtttgatcttaaccaggggaactgtatgggccaaaattaggattgaggatatttttctccatagaggattttccttaacttttgcagcagctgaaagatgccattcagatggatctacattagtcatgatgccagaattgggcaaatctgctgacaccaggacacctgtgtatatgtgtttgtgtctttccaggaattcattgaagagttgctgtctcccccttttgggggtttagtggcatttgtgaaggaggctgaggctttgattgagcgtggacaggctgagcgacttcgaggggaagaaggtatgaggaaaatatggtaatgatgggatcagtggtaagggaagtggaaaagaaaaatgaaaggatgcagattacatggtgggggaatagagtatgaaagactggattgagagaataccagaaaagagggtttgatgataaggatggctataccttggggagaacttagtggagttgaagatcagccagatccctctctgacactgtttcctcctgctattagcccgggtaactcagctgatccgtggctttggtagttcctggaaatcatcagtggaatctctgagtcaggatgtaatgcggagtttcaccaacttcagaaatggcaccagtatcattcaggtgacctgcaagtcccaggccccactcagatcccccatcattaattattttccccatctttttgctgggctcagcatcatctaagtgacccttggtcttcagttactagctgtgcccaaagttctgtatgagccctaacctgattcttttttttttgtttgttttgttttttttttgagacagagtctagctctgttgtccaggctggagtgcagtggcacagtctcggctcactgcaacctctgcctcccaggttcaagtgattttcctgcctcagcctcccaagtagctgggattacaggtgcctgccaccacaaccagctaattttcgtatttgtagtagagatggggtttcactgtgttggccaggctggtctcgaattcctgacctcgtgatctgcccgccatggcctcccacagtgctgggattacaagtgtgagccactgcgcctggccgcctaacctgattcttaatcatcactattagcaccattttacggtttgatccctcaatgactttctttgaccagggagcgctgacccagctgatccagctctatcatcgcttccaccgggtgctgtcccagccgcagctccgagccctccctgcccgggctgagctcatcaacattcaccaccttatggtggagctcaagaagcataagcccaacttctgatgtgccagaaaccgccctgagatctgccggtcatctccatggacttctgcaccccattccatacccttcttcacctggggtaccccttccagttttccccttgcttcccaggcccttgacatggcttacctgccttcactcccagcaccttgcccaacaggataagctggatccccttggccttctgaatatcccagtgtcttcaggtttcccaagaccacttccctgtgggcttccaaaatggcctttatcatttctccagtctgtcaccctcctttcctgctcccatacacccaaggcttgtttcttcccctgtaaaaaccactgcctcaatctctggttcactcaactagtcaccatgtcctgaggcatgaagcctcctcagctcttggaattgctggcaaggggtgactgcctctgagtcattgtgtttttcaaagtgatttcttttctgtagctttttgacctaagatctcagcaatttgaacactaacctctcccctcctggctcaagaattactccgaagtcagtctgcagaaaataaatatttagtatgacatgacacttatcccatttcctttctccttcctcctgaaggtttttcaggtggccccatctctagaatgacctttcctttctgactacttcctgggcttacatcccttctggtgggtgtaacctctaacctctagctactcccaggccattggaggaaggtggcccctggctaaaatagcagatgctgcaagggatgagaaccaggccgcgcagccccagacactgtcccaagggctcccttgggacaagcccaagctgactctggaatccctcctccgtagcagctccatagctcctctggttgtggctgtgacagccccttgctcgggggctgcagcacccaacccacacccacaccgttggggcagggctagaccaggcgaaattcgtaccatccgtttgtttgacttggagccttcctgctgtcctcgcctatacgcctcgtttgaacttaggctctagactggagagacacggggacccctttaaggcctaagaagagaggcgcagttaaggaaaaatgttacgtttcctgtgtcctccacccctacggcctaaacattccctccccaggtccctggagagtggtggaaagcggttcctccccgcttaggcccttcggatgcaggtctagcccgtcggcaacgggaggtgtcctgagtgggtctgtgactgccgagcacacccgccgcggagcggaggctgctgcttcctgaggctgagagtggatccggctccgggctctcctaattggcggacgctggggggcggcgtggtaaggcagaacggagcggcatctcagctctcgccttttcagggttccgccccatatccgagagccgctctctaattggcttgggaaaccgtatctcagcgctttggcctagcgactttgaacgtgtttgcgcctgagaccgaagtgcagaagagggcgagcgcaggaggagaggcttggtgaatcagcgattcctgattggccaggcgtgccttgagggcggggccagaactgcgtccttaactgacctcgcccttgcccagatcaccgcctccgcgttgctccgggtttaccccgcctgactcgctgcgctatgcgttccctcacgcctgccggatgccaggcggcgatgtgccaggctctgaggggccgcgagctcaccccagacgccggccccgggaatcctctgctcctccactttcccttcccgctactggtttcttgcccacccactcccaggtgtcactcttgggacatccagatgttctgacatttgacctgactccagcctcagcgcgaggacgggagaagggccaagggtatgagattttggacaggagaggcattggctactctgacaaagagcgtggattcccaaagaaagggtccccagataccccgcaggggagactgtcgagacaggcgactttagccaactaatgctcgcacgcgaggagggctgtgcaggcaggcaccacggttcttcacagccttccttctttccttcccctgtccgtcgcagaacccaaatcctcagagctgatcgagaagcgcgtgttgttgcagaagtcactgaggggcagacctggaatgtgagccgtggggcgaagggacagctctggagactcgtgattccggaacccggtgggcattcaagtgatactggagcacgcagttttcggggacattaagctcgccccaggggtccacaggaaccctctgacccaacggtctctctggacaggatgatccagaacagacggtgaagagacaaaacagcgtgaaagggagcggcgatacctaaactgacctccggagggcagcatgatcaagggaaggagctgttctcgctccgctcaaacccccgcgcagcctctgcagcttactcctgcttcggaaggcggcgaggttccacccccaccaccccggtccccgccgccctcttcgcgctgaagctgcggagggtctttttcttcagcccccaaatcctctgctctgtggcttaagattcccaggcttaaacccataactgctagggtcatcactcctcaaacttctccctcacttgttttgctgatgacggacacaggggcctcacagactcagaagcatctggagtcatttcgaaggacagaactgtggcaatatcctctttccccctcctaatctctgagaacagtgtctgtatatggcacgggggtccctagtgtcatatagaaggactcggagatgtcctcatgggctgtaacggcccccggtgctattcagggatctctgttctttaaagaaatatcatttccccttatttctctacctttgtgccctcacctcgccctgaattgtttcttaaactgggctttctgggaaacgtttacttcgtgttcaacagcaaagtctcggcataaggcgagggcggcagggggtggggggcgggcgtttgctcgccttggcattaatttcagagctgctgaacgtggacaaaagagagggaacatcctcctttcttccattcctgtaaatatggacccacccaccctccacttaagatgggtggcttttctgattttaagatatcaagcagcctggcgaggtggctgacacctgggatcccagaactttgggaagccgaggcgggaagatcccttaaggccaggagttctagaccagcctggccaatatggcgaaaacccatctctactaaaaatacaaaaattagcctggcgtggtggtgcctgcctataatcccagctactagggtggctgagtcaggagagtcgcttgaacctgggaggcggaggttgtaatgagccgagatggccactgcactccagcctgggtgacagtgagactctgtctcaaaaataataataataataataataaaaagatataaattggctgggctttaaaataaagtagtcagaggcccagggtggtgactcatgcctgtaatccttttggaaggcagaggccagaggatcttgagcacaggagtttgagactagcctgggcaacatagggagacccatctctaccaaaaaaaaaaaaaaaaaaaagcaaaaagccaagcatggtggcccatgcctgtggtcccagctagttgtgaggctgaggcaggaggattgcttgagaacaggagttagagattgcagtgagctatgattgcactactgcactccagcctgggtgacagagtgagaccctatctctttttaaaaaattaaaaaacaaagtagatttagtgtgaagattcaaggaaagaaagagaaagcaagacaaaactttaaggagaggagaatcgaaattggctgacttcaccctggacataatggacacagctattcatgttacgtactagcgttaacaaagtgttttcagaagcagttgtcattaaaccaacacatttattgaagctcttctctgtgttctgtgataggcactgcggattcagcagagactaaatcaaagtccttgatctcggagagcacatatttcatctaattgaattcacataccagccttatgaggaggtgttcttcctgtttcaggtaatgagcttgaatttcaaataatgagttcaaaaccatataggcactcagtggctgaaccttctgtgcccacattcagcttttgttctatgactccaggctgggagtcatggagctgaggaggcagccggttgtagagaagcaacagattaataagtaatagtaaattattgaaaaaatatttacagaactgaaggaaaagctgaacaggcggtctttggaaaggacagaagccaggatagttccagcatccaggcagcagacaccaatggtcagtgcttctactttggatcaaaaagagagaactccaataggcttagggtgggtcaggtgctcacactcatctgaggaaggggagggtcccttgaggaatagtaccatagactacccaatgttggaggataatggccccaacgcaaaaatgggatcttgccaccagacaaatgggatatagatgccaggctgcaaaatccaacaaatgtacacgtgcccaaatcccgactccatcactaatagccatgcaatcctctgactatcaattagattaattgacactcttttttctctcgctactgtggtacatgcagtagttacctttattcttcactttgttttctcataagactaacaagcagttttttaaaataaagaaataaaagcaaaattgcttattgtcttagtctattcattggcaaactagtaacattaaataaactccagacagagccactggagaagaatcaagtacaacttagtagaaataacaccgtatgtgtgaaggtgagtgtgtgtgtgtgtgtgtgtgtgtgtgtgtgtgtgtgtgtgatggaaaatactttgtcctgcccaaactgtaagtcatgaccatgcccctctcagcagaagtttatcttcatctcatttggaagtttataagaacacagcttaaaaaaaacctgtgattttggagcaaggtcaagcctttgctattgcttccacattttgttttgttttatttatttatttacttttcagttttttggagttttctttatttgtttgtgtttttgagacagggtctcgctctgttgcccaggctggagtgcagaggcaccatctcggctcactgcaacctctgcctcccgggttcaagcgattcccctggcttagcctactgagtagctgggattactggcacgcaccaccacatccagctaatttttgtattttcagtagacactgaaatacatgtttgccatgttggctgggctggtctcaaactcctggcctcatgtgatctgcctgcctcggcctcccaaagtgctgggattacaggcatgagccaccacgcctgcctagtttttagttttttgagacagagtcttgctcagttacccaggctggaatgcagtggcatgatcacagtttactgcagcctcgacctcatggatttaagcaatcctcccacctcagcctctgggatagctgggactacagtcatgtgccaccacacctggctaatttttgtattttttggtaaacgaggtttcaccatgttgcccaggctggtcttgaactcctgagctcaagtgatctcctacctcggcctcccaaagtgttggaattacaggcatgagccactgccccagctgttttattaatttagttaaaaatatatgaaaagaggccctgcgcggtggctcacgcctgtaatcccagcactttgggaggctgaggtgggcggatcacctgcggttttggagttcaagaccagcctgaccaacatggagaaaccccatctctactaaaaatataaaaaatcagctaggcatggtggcacatacctgtaatctcagctactcgagaggctgaggcaggagaattgccctaacccagaggaggttgtggtgagccaagattgcgccattgcactccagcctgggcaacaagagcgaaactctgtctcaaaaaaaaaagtatatatatatatatatatatatgaaaaggctgggtgcggtggctcacgcctgtaatcctaacactttgggaggctgaggcaggtggatcacctgaggtcaggaatttgagaccagcctggccaacatggcaaaaccgtgtctctactaaaaataaaaaaattagccaggcatggtggcaggcgcctgtaatcccaactacttgggaggctgaggcaggtggatcacctgaggtcaggaatttgagaccagcctggccaacatggcaaaaccctgtccctactaaaaatacaaaaattagccaggcatggtggcaggtgcctgtaatcccaactacttgggaggctgaggcaggagaattgcttgaactcagggggcagaagttggcagtgagccaagatcacaccatttcactccagtctgggcaaaagagcaagattctgtctcaaaaaaaaaaaaaaaaaaaaaaaaaaaaatatatatatatatatatatatatatatatatatatatatatatatatatatacatacatacacacacacatacacacatacaggcactagccaggcgtggtggctcatgcctgtaatcccagcactttgggaggccgaggcgggcagatcacaaaacaggcagggcatggtggtccacgcctgtaatcctagcactttgggaggctgaggtgggcagatcacttgagcacaggagttcgagactagcctgagcaacatggcgaaactctgtctctaccaaaaatacaaaaattagctgggtgtggtggtgcatgccagtaatcccagctactccggaggctgagaggcaggaggattgcttggggaggcagaggttgcagtgagccgagatggcaccactagactccagcccaggtgacagagggagaccctgtctcaaaaaaaaaaaaaaaaaagaaagaaaagaagaaaagaaaaacaaatcacctgccttatgaagaaacagtttgtaatagatataagacacagaatgtgcagcccctggtatggaataagtccttagaaaatgttagtttcctctctgtccctgtgtgacatgaagggaattccagggccagtgccacttcctggtggtttccctcacttaagtgctgtgtaccccattgcaaaagcatgtcttccaggttcctgataccacatcccatgtcctctgcctttggggctctcataggattaagtgtcattttccctatgaactagaaaagaatcttctgaacgtctgccttgggactgatgatatagctgagctgaaaggacaattagttttcctccccagaccaacccaaccttcaaggctggggactcatttgatgctcccattcaaacatttggagaaaattgtctctgagtaccaggtctttttagcatattttctccaaatgttacatccttaggggctttgaatagtagaagagccttcaacattggttcagatggaagcatgcaggcatgtggagagttgccactccctgatccctgaaacaaggcttaggatggaaaagagcctcctggggaggttggctctgaatgtaaagctgggagaggcacctcctgtcaacctaagggcttgttggtaggggcaacatgttgacctggcttccttcccactctgagacatcactggctctcatgcagagctattttccttctttctttctttctttctttctttcttctttctttctttctttctttctttctttctttctttctttctttctttctttctttcttttcttttcttttctttctttctttttttttttgagacggagtttcactcttgttgcccaggctagagtgcaacggcacgatctcagctcaccacaactgccacctccctgggccaagcaattctcgtgcctcagcctcccgagtagctgggattacaggcatgtgccaccatgcccagctaattttgtatttttagtagagatggggtttctccttgttggtcaggctcgtctcaaactcccaacctcaggtgatccacctgccttggcctcccaaagtgctgggattacaggagtaagctgccgtgcctggcctttcattcttttctttccttctttccttctttccttccttccttctttccttctttccttccttccttcctccctccttccctccctccctcctttcttctttcttctctttctttctccttccttccttctctctctcttttcttttctttcttctttctgggtttcgctctattgccgaggctggagtgcagtgagtggcacgatcacggctcactgtagcctcaacttcctaggctccagcgatcctcctacctcagcctccttagtagctgggattgcaggcatgagccactgtgcccagtgtaatgcagggctcttcatccaggatcccaaagggcaaacaaaaataggagaaaattacatttcattttcactaatctctaactgaaatttagcattttctccaatgataaatgtaggcaataaacctacaccggtatttgtagtacatgtgactgttgttaatagaatttacacatttgtgtcatcttccagtagttgcagaaatttcaaaatgtcatgtatgctcacggttactttgtagttagtggtagtggttagactcaccactagatcttcttcttacacattttgtttcattttgacaactgtacttcaatatgattgttttcctttgtaatcccatttattttactttatgcagttgaagattattctgacactccacagacttcaccagacttccaaaacctgtcctagacgtaaaaagttaagaaaccttaaatctctaatgatgctgtcatttcctgttttgtattatcttacaaccagggtaattaggaatgccttcttcttcttctttttttttttttttttttgagacggagtcttgccctgtcacccaggctggagtgcagtggcacaatcttggctcactgcaacctctgcctcccgggttcaagtgattctcctgcctcagcctcccaagtaggtgggattgcaggcatccaccaccatgcccagctatttttttgtatatttagtagagatggggtttcaccatgttggccaggctggtcttgaactcctgacatcaggtgatccacccacctcagcctcccaaagtgctgggattacaggcatgagccaccgtgcctggcttgctttcttcttgtttaaactaaaggtcttcttgtaaaattcctgcttatattttcttcattattactcaaattcaattattcatttatttgccaaatatttagaaaacacttctcttgtacaaaaccatgctgcataaaactgttattatgcgaaaaataatccttactcgccatgccctctaccccgaccccccaaccccatttacaatctggtagagctggactgtttacccacataggacacacaggctgcagcttaccatgggcagggagtggggatggttgttccaggtgcaggtaataagaaggtgtattgtctgtggagaatttaaaaataattctaaaaccaactttttttttttttttttttttgagatggagtctgactctttggcccaggctggagtgcagtggcaccatcttggctcactgcagcctctgcctcccgggttccagtgattctcctgcctcagcctcccaggtagctggcattacaggcacacaccaccacgccaggctaatttttgtgtttttagtagagacggggttttaccacgttggccaggctggtcttgaactcctgacctcaggtgatctgcccacctcaccctcccaaagtgctaggattacaggtgtgagccactgcgcccagcctgaagccaactttttattgatactgcgcaccagcaattataaaaaaatgttagtgacaaaataccccttgcagtgtagcctcctccccccactccaccctgcttggtatgccactgcacacaggggagtttaaccatttccagtttacacacacacacacagacacacacacacacacacacacacacacacacacaaacacacagagcctttgagacttccttttctcctcaactcccccagcccagttctcatgtcactctactcagggtaggatctgcagcactgctgggccagtatccccaaaggtgagccctgtaagctccttggcctctggatggtctcattaatagtccaggatgagccctgcaatcttggcatctgtaggcaggtctcagctcttcttcacacccctgggcttgaaccccttggcaactgcgtttgacagtacatgattcccattcttcatctccagattttccatccttcaagaaaacactggatttcctggtcaagccaaggcttaatgaactggcctggcagcttctctggtcctcaagtttccttttcttgccttactttctgaagacttctagtagttttacttggaagtgtcactgtctccatttttattcctgagttttctgcagttcttttttctgtggccccacggactcatccagagcctgcagggagctgacacctcatctgagctgctagaattgaggtgagaaaggaggttcctaagtgcagaaatgtgttttctcctctccagccaccactgaaggctttggatgtgattgagtcagacctctcctgcacagtctccctttggattacctcaagataaaccaatttgtgactttaattacatccgcgaagtcccttcccagctgcacctaagctaaagtgtgattgaatgaatgaaagagggtgtgctggcgatcagctagggaagtgattccaagggtccctagactccacattaccaactgcaaaatgtgacgttcttacgttctgacaagcgaactctcctcccaaattcattgcctgagttgatgcaaatgaattcagccacgccttttgggtttggcatctgagaagtgtctgtgacttgggaagagtggtcagaatggcgataatgggaagagaccacatttcagctggtggagagtgaaaggacagccaacatcttgccctttctgaagcatacacacattggagattgaaagtgtctgttggcctcacaggcactgaggaaagcctcccatccccttagattttcctcctttttcctgaggtcccctgaacctaatagtctgtaaccttattccatgtctgggtcaacaaaccaccttccaaggaggacttgaatataataatccgtttcctctgcattcctccagaacacagagtccacaccatccatgagtctgtcaaacaaaacattcctcattggtctcaatgttgagcactgaaagttctctgagctcatttagcaccaactcatcatccttaaaatccacaggatgggccgggtgcagtgacccatgcctgtgactacaacaccttgggaggccaaggggcagatctcttgagcccaggagttcaagaccagcctgggaaacatggtgagacaccttctctacaaaaaaaaatttttttttttgagacggaatctcactctgtcgcccaggctggagtgcagtggtgcaatctcggctcgctgcaacctccgcctccagggttcaagcgactctctgcctcagctcccgagtagctgggattgcaggcatccaccaccatgcccagctaatttttgtatttttagtagagacagggttttaccacgttggccaggctggtctcgaactcctgacctcgtgatctacccgcctcagcctcccaaagtgctgggattacaggtgtgagccaccatgcccggcctacaaaaatttttttaaaaaaattagccaggaatggtggtgtacacctgtggtcccagctacttgggaagctgagataggaggattccttgagcccaggaggttgaggctgcacagtgagctgtgatcacgccactgtactccagcctgagcaatagtgagaccttatctcagaaaacaaacaaaacaaccaaaaatatccataggatgaaacatatgtttgattatgacaacttgcttatggtaccttctggatggcccagctcccttgcagatccccagaccaacagcttttgttgtagtgacagcttcttcttgtaacctctttttttttttttttgagatggaatttcactcttgttgcccaggctggagtgcaatgacatgatctcggctcactgcagcctctgcctccagggttcaagcgattctgctgcctcagcctcctgagtagctggaactacaggtatgcaccaccatgcccggctaatgtttgtatttttaatagggacggtgttttgccatgttggccaggctggtctcgaactcctggcctcaggtgatccacctgcctcagcttcccaaagtgcttggattacaggcgtgagccactgcacctggcctacagcctctaatttcattttcatccaaaagctttaatggaaggcccacagattccctcttcaagtaacagcaaagcgcatctcctttaagatttctttgatcatcttcataaagcttgactttgaagtcttctgaggatttctcctggaggcaaaccagatatatagacatttgtatttctgtcttcttcaacatgaaattatcctcattccatttttcttttatctcccctgtttttaggatcagtgggtttggggggttttctttgcagaaattctgcattcctagcattgacattttgtacatttgcaggagagctagatgccccaccattagaaaagccacacttggctgggtatgtagcaatgaaaccttcagtggccttgggaaaccacgccttcttgtccagatcccactcattgtgggagtcagttggctgctgccctaaataacccgtttgtcactgagatcttcttgtctgttgcagtccttagtgtctccatataatttatgcattcacaactgctcatcaagtcatcattatcatccacttcatgtttcctacctagccaggggcagggttcaggtaatcaaagaggctgctctgctgggcctgcaaggctccaccaagtgtgtctgaggtgacagcccaagcactgttataaatatttgcgcactgttgtaaacatttgcattagtcccttctcgcactgctataaagaaatacctgaaactgggtaacttataaagaaaagaggttgccgggcgcggtggctcatgcctgtagtcccagcactttgggtggctgaggcaggtggatcacttgaggtcaggagtttgagaccagcctggccaatatggtgaaaccccgtttctactaagaatacaaaaattagccgggcatggtggccagcacctgtaatcccagctacttgggaggctgaagcaggagaatcacttgatccggggaggcagaggttgcagtgagccaagatcatgccactgcactccagcctgggtgacagagcaagactccgtctcggaaaaaaagaaaagaaaagatgtttgctgggcacagtggctcatgcttgtaatcctagcagcactttgggaggctgaggccggagggttaatcacttgagctcaagagtttgagaccagcctgggcaacatggcaaaaacccgtctctataaaaaattcaaaacttagctgggtatggtggcatgtgcttgtggttctagctacttggggagctgaggtgggagaattgcttcagaccagaaggtagaggctacagtgagctgtgattgcgccactgcctgggcgacagagcaagaccctatctcaaaaaaaaaaagaggtttaattggctcatggttctgtgggctctacaggaagcatgatgctggcatctgcttgccttctggggaggtctccagaaacttacaattatggcagaaggcaaaggaggagcgagccttctcacatggcaggagccgagagagagggaggaggtgcggcacacttttaaacaaccagagcttgccagaactctctatcatgagaacagcaccaggaggatggtgctaaaccattcgtgagaatccactcccataatccaaccacctctcaccaggctccacctccaacactgggactacatgagatttggtggggacacagatccaaaccatatcaacatttaacacattgcatctttgaattgtcacagcaaccctgtgaggtgggtactagtgttatccccattttacagagaggaaattgatgcccagagaccttgccaaggttatagacaggacagttagtgcatgacaaagctggaattggaatgcagccagttctgctttagaagccactttcttgcctgcctttctttctttatttctttatcttttctttctttctctctctctccttccttccttccttccttttctttcttttcttttcttttttttttttttttttgagacagggtctggctttgttgctcaggctggagtgtggtggcaccatcttggctcactgcaacctccaccttctgggctcaagtcatcctcctacctaagcttcccaagtagctgggattacaggtgcataccaccacacctggctaatgtttgtattttttttagtagagatggggtttcaccatgtttgctaggctggtcttgtactcctggcctcccaaagtgctgggattagaggcgtgagctattgcaccccgcctgaagctacattctttttttttttttttttttaatgagacgagtcttgctctgtcccccaggctggagtggtgcagtggcgtgatcttggctcactggaacctccgcctcccgggttcaagcaattctcctgcctcagcctctcgagtagctgggattacaggcacctgccaccactcctggctgttttttccatttttaatagagacggggcttcaccatattggccatgctggtctcaaactcctgacctcaagcgatccgcctgccttggccttccaaagtgctgggatacaggcataagccatcgtgcctggccaaggctacattcttaaacgccactttttacagcttccaagaaactaactgggtgaaatccagcctgcctcctgtccttgtttttatcatttcatagtgaaaacataaactcccaagcccacctactctattgcactgtgtctccatgacactctgtaccttctggctctgactcagccctccactttccccctccctaacctgcctgtgccctctaataaactgtagcccccctcatacccttagcttctccttggagcattccctccacttcctggcgttaagtgaaatttaactctcccttgagggcactacctcctttgcaggcttctgaaatgagagctgttgattttcttacagctgagggtgctctcctggcttcagattgctgcctccggactactcctcccccagcccccaactctagtttaaaataacccgcggccttccaggcactgcaattaggctaaactttcctcttcctttctcactgctactgtctgccagacccctccacctcactcaggggaacgctggcccagctgaccgtctgtctttgcattgagtcctccctctgggagacttcattgtccacctggaggatccattccctacttgacctctcaataacctggccacttaatccccaagaatcttctcctctccaactcggccacacattctcattgtcataccctggaccttatcacctgaaagagcccctccttgagaatcagtcaagcagcctgctcttggcccccacctcctaaccgtctgtccatcagtctgtctgccctcctcgcaaccaattttcagtctcctaggacctttggatcaatgatgccttccgtcttccagcttatgagcccctccctattcagctcaactccacaacccttcatttcaacacctctctggacaatgtcgccaactccccttcccctctgtattttcatcctttgtacccaagtggcaaaaccccaaccctggatgagcccagtgatctgttttcttcaggattttactctgatagccaagaactgttggtggtggtgggggaaatcacacaatcaggaaatggttcccactcctcactcatgatcatgaactctaaggaggctcccagaattgtttagtggcccaaccacatcactctggtcaatggctacgttaaacctccctgatccttgaacctctgaggctcttctgtctctcacctcatgctcacttgatgacctccctcttatgtcacagagaaaatgaaagtcatcagaggtgagctccctcaaccatctgtcaccagatccacacccctccaagaggaacacaatgcatgcagcgcatgtaccttgatttgatcctgatttgaaatatatgcataggctggatgcagtggctcacgcctgtaattccagcactttgcttgagctcaggagttcaaggcaggtggattacttaagctcaggagttcaagacccacctgggcaacagagaaaaaccctgtctctacaaaaaaaaaaaaatacaaaaattagtcaggtgtggtgggtcacacctaaatagtagttccagctacttaggaggctgaggtgggaggatcacttgagcctgggaggtggaggttgtagtgagctgtgattgcactgctgcactctagcctgggtgacagtgagacccagtcaaaaaagaaagaaggaaaggaaggaaggaaagggaggagagagagaaaggaaggaaggaaggaaggaaaaacagaagaaaggaaggaaagaaattaaaaagaaagatatatatatatataaatatatatataaaagacattttgaggctaactggggaatatttgagtatattctgctatcagatgaagtgaagaaatgatcgttattttctaattttgtttttttttttgagactgagtcttgctctgtcaccaggctggaggtcagtggcgcaatctcagctcactgcaacctgtccctactgggttcaagcaattctcctgcctcagcctcccaagtagctgggattataggtatgcaccaccacgcccggctaatttttgtatttttagtagagacggggtttcaccatattggccaggatggtctcaatctgttgaccttgtgatcctcctgcctcagcctcccaaaatgctgggattacaggtgtgagccaccgtgcctggccatgatcattattttcttagctgtgattacgtattgtggttatggaatctccttatttttgggagatgcatgctgaggtacttaggtgtgaagcacatgctttcctatattttcatatggtccaagaatgttttagtagtcactcaacaatttctatgtttaaaaaaaaaaaaaagggctgggcacagtggctcatgcccgtaatcaatccgagcactttgggaggctgaggcaggcggatcacctgaggtcggaagttcaagaccagcctgaccaacatggagaaaccccatctatagtaaaaatacaaaattagcttggcgtggtggcgcatgcctgtaatcacagctactcgggagtctgaggcaggagaattgcttgaacccagtaggcggaggttgcgtacagccgagatcgcgccattgcactccagcttgggcaacaagagcgaaattccatctcaaaacaaaaaactaaaaacaagcccacaaagacgtatataggccttggcactgtggctcatgtctgtaatcccagaactttgggaggccaaagcaagaggatcacctgagtccagtttgagaccagctgggcaacaaggcgataccttgtctctacaaaaaatttaaaaattagccgggcatggtgccatgcacctgtggccccagttacttgagaggctgaggtgggaggatcgcttgagcccaaaagtttgaagctgagatgagctatgatcaggtcactgcactccaccctgtgcgatgaagtgagaccctgtcttggaaaaaaaaaaaaagaaccatatatatatgtgtgtgtatatatatatgtttgtatatatataatatataaatatttgtatatatgtataaataacaattgttaaatctaagtaaaatgatcgacatacaaacaatattgtattatattttcaagttttctgtatgtttgaaatttttcataataaaaaaactgggcaaaattctctcacttccactcactgctcgaccctttcaggctggtgtttatctctaccttgctgctactcaaatgtttttttgcaatgaactttatgtcattaagtccattgtttcgttttcttcttacttgaactgccactagtagctgacgttgctggccagttctttcttgaaacactgtcgttttttggcctccaggatttggcctcttctggcttcctcccatccctccatcggctgctcttccacccctcagccggctcactccgcctttgactgaaatcacctggtcatattggagttcatcaagagaggtcggtcctggaccctcctcttcttatgctaccctttccttctaggggatcacacctgtcctgtggcttcagttcccatcagctggttactctcaaatttatctcttgcctcaaatctccagatttgaccaccttcctgcctggcatccctacttggatgtcccaaaggtattactaacttagcttttttttttttttttttgggagacagagtttcgctcttgttggccaggctggggtgcagtggcaagaccttggctcactgcaacctccgcctcctgggttcaagtgattctcctacctcagcctccggagtagctgggattacaggcatccgccacgacacccggcaaactttttgtattttcagtagagatggggtttcaccatgttggccaggctggtctcaaactcctgacctcaggtgatccacctgcctcagcttcccaaagtgctgggattacaggcatgagccacggtgcccagcttaacttagcatatttgaaacagaagtcatgatcttcccacagaagcagtatcatcctcagatctgaaccacaggggccctgccctggcccacatactttagggggattcacctatcacaaacaacttatcacacacatttattacatgacacctgggcacctctgtcactgatctgctgtcagtgctggaacagcacaacctgaaatcttacacatctgctcttgtaatcaacgccgttcaagccctggggaatggtgacttctgtaatctcttgccctgtatcctggaaacaaaagatgactatagccaattctgtgaaaatctgaggttgtgcctctgcctggattctgaagcatgtactgctttggagtgtagggaggatttaagcagtggaaacatgtaagtgaaatcactttaaccagcttgttaaatattacctctcaaatagcatgacaaagtatcatttcccaatagtgttgagtgtggtttttcttgtttctctttgttttagaggtatggatgtatgttgtgctgcatttacaacagttgcaaaggatagctgaggaacatgttgctgtattaaacaatccttattactgttaaatttatatgcatgtggtgggaggggtggtgagggataaaaaactacacatttacagtgtacactcctcctgtgatgggggcaccaaaatctcagaaatcaccactaaataacttattcatgtaactgaacaccacctgttccccaaaagcctattgaaaaaaaaattgaatacatgtaggtctagatataactcttgtgaagtatgatattgattctttatgttgtaatagatggacattgaatacgagattatgaatacaatcatcctcagtattcaccagggattgattccaaaacccccactgatgttcaaaccccttgtataacatggcatagtatttgcatataacctatgcacattcttccacatactttaaatcatccctaggttatctatggtgcctatcgcaatgtaaatgctgtataaatatatgttatactgtattttttatttgtattattttttctttctttccttccttccttcccttcccttccttccttccttccttccttccttccttcctttctttctttctgacagtcttgctgtgtcacccaggctggagtgctatggcaggatatcagctcactgcaaactctgcctcccaggttcacgccattctcctacctcagccttccaagtagctgggattacaggtgcccgccaccatgcccggctaatttttttgcatttttagtagagatggggtttcaccgcgttagccaggatggtcttgatctcctgactttgtgatccacccgccttgacctcccaaagtgctgggattacaggcgtgagccaccgcgcccggactggccatatatattttaaaaatatttttattcttcagttggttgaatccataggtgtggacctacagatacaaaatgccaactgtagtttaatttttataaaactatctgtcttagtccattcagactgctataacaaaataccttacactgagcaatttataaataataaacactgcttacagttctggaggctagaatgtccaagcaggtggtgccagcagatttggtagccagtgagggcacactttgcttcatagatggcgccttcttgctgcatcttcacgggtggaaggggcaaacaagctcctttgggcctcttttttttaagacagggtctcgctgtgtcacctaggctagagtgcagtggcgtgatctcggtttactgcaagctctgcctccagggttcaagtgattctcttgcctcagcctcctgaatagctgggattacaaatgcctgccaccatgactggctaatttttgtgtttttagtagagatggggtttctccatgttgaccaggcttgtcttgaactaccgacctcaaatgattagcccgcctgagcctcccaaagtgctaggattacaggcatgagccaccgcacccagcctgggcttcttttataacggcattaatcccattcatgaggacaggcccctcatgacctaatcaccttctaaaggccccatctcttaatatcaccacattggggattaggtttcaatttatgaattttaggggggcacaaacatttatgccatagcaatacataataaaaattaataaatatgtatatatttttttgagacagggtctcactctgtcaccaggctggagtgcagtggcacaatcatggctcactacagcctcaacctcccaggctcaggcaatccttctacctcagcctccagagtagctgaggccacatatgtgtgccaccatgcccggctaagttttctattttttgtagagatggcatttcaccatgttgcccaggggggtctcaaaacactgggctcaagcagtctgcccaccttgacctcccaaaacactgggatttcaggtgtgagctactgggcccagcccaaaatttcaaaaaaaagcaggcaaaaagtcagctttatctaaatgtgtttgatttaaaatattgatgtgtattcattatcatttatattttgtccagatgccgtgtctcatggctgagattccagcactttgggaggctgaggtgggaggatcactcgagctcagaaatttgagaccagcctggacaacatagtgagaccatctctctacaaaaactaaaaaaattagctgggtgcgatggctcatgcctgtaatcccagcactttgggaggccaaggcgggtggatcacttgaggtcaggagttcgagaccagcctggccaacatggttaaaccccacgtctactaaaaatacaaaaaattagcagaagaatgcttgaacccatatgtatacatgtatatatacatatgtgtatgtgtatgtttatatatatatgtatatgatacaaaattagccaggtgtggcagcacacacctgtagtcccagctatttgggaggctgagatgggaggatcacttggacctgggaggtcaaagctgcagtgaactgggatcatggcactgtactccagcctgggtgacaacgtgagatcctgccaaaaaaaaaaaggaaaaataaaaagagtgattttacagaaaaattgagattttcaatttatcacggcagtgccagctctgaattcctatgcggcaacgctggaccaggagctgctgcccctctaggaggggagggtgccctccagcctgttatagccttcccttggcacttggcacattacttgcctggcccttacaggaatttgaggtgcaaattgatctagatcattgaaggaagagtctgggtcttctcagttttggggcactttcgttgccaagtaaggttcttatgagatttttagaagttgagattaaaaaagagtttatatgcagctggaggtgatacctaacaacaaccataataacagcatcaacaacaaaaacagtagcctagagcagttactctaagccaggtaagtgttctaaagcacttcacacaacttatttactctcacgacaatgctattaggtagcactttgaatacacacattttgtaggtgaggaaattggggcatgtagctgttaagatttatatcagccgggcgtggtcactcatgcctgttcccagcactttgggaggccaaagcgggcggatcacgaggtcaggagtttgagaccagcctgaccaacatggtgaaaccccgtctctactaaaaatacaaaaattagctggacatggtggcggctgcctgtgatcccagctattcaggaggctgaggcaggagaatcgctttaatctgggaggcggaggttgcagtgagctgagatcatgccactgcgctccagcctgagtgacagtgagactctgtctcaaaaaaaaaaaaaaaaaaaagatttataccaatttataccgtccaataggaggcgtgagactcaacacagggtggaggagagaataggtcaggaaatcacatctctccacctgcacagccaccatcattgtacccttctaaagagactggcaacaactttcattcagcactgtcccattgattggctcatttcatgatcacagcaacccagttaagcaaatcctcacctttgcatcgcctgctttgtatcacttttctttaaaattaaaaataaaaaaaatggattacaaattcggttaacgcccatcccatttctctccttccttgtagtaattatcattctaaagttgttgggaattattcccatgcgtactttgcacttttaaaaaatgtttgctttcctaaacatataccactgttttgtgtattttaaaactcacacaaataatatcatacaacatccatttttgcaagtttcttactcattacattgctaaatatgtctataattcatttaactgctgtatagtatcccattataagaacaaaccatactttatttatccattttacttaacaacagttagcttatttccacttcttcttgacaattaactgatactgcaatgaccatttttatcctcgcctttttgtgcatgtgtagaaatgtttttctaaggaatagatctagaagcaagattgctgggtcatagggaatattcattttcagcattaactggtgccaaaattctcttcaaatttgttgtatctgtttacacttcaacacaaaatatatgcattcctattgtcccacatttttgtcaacagtgttagaataattttaattttggtgattttgtgggtgtaaaatggtaactcgcgctgtgatttgcatttctacattactggttaaattgagcatcttttcttatgtttattgaccattaggtttctcttttgtgactcacctattcacagcttttgctcatattctcttgcgttgtccttttcatatggatctgcaacttctttatgaatcctggatataatcctttgttgtttatgtagattgtgaatattctctaagtctgtggcttgtcttttactttacgtgatttcttttttttttttttttgagacggaatcctgctctgtcgcccaggctggagtgcagtggcacaatctcggctcgctgcaagctccgcctcatgggttcacgccattctcctacctaagcctcccgagtagctgggactacaggcacccactaccacgtccagctaatttttttgtatttttggtagagacggggtttcaccatgttggccaggatggtctcaatctcctgaccttgtgatccacccgccttggcctcccaaagtgctgggattacaggcttgagccatcgcgcccggcctatgtgatttcttataaaagcttaaaaatgttttaacgtggtcatatgtatcaatattttcctttattgcttgtgcatttatttatagtcgacaaataaaaattgtatctatggtgtaacaacatgatgtgtgtatatatatgtgtgtgtgtgtgtgtgtaatggctagagtaattactgtatctgttatctcacatactatcattttaaacgtgatatttgaaatgtactctcctagcaattatttttatttttattttttttttgagacaggatcttgctctgtcgcccaggctagagtgcagtggcaagattatagctcactgcagcctggacctcccaggctcaagtgattttctcttctcagcctcccaagtagctgggactactggcacgtgccaccacatcctgctaattttttcaattttttgtagagacagggtctcactatgttacctaggctagtcttgaattcttggggtcaagcaatcaagcaatcggcatcccgaaatgctaggattacaggcatgagccactgcgcccagctaatttttctattttttttagagatggggtctcaccatgttgcccaagctggtgtcgaactggtctcaagcgatccacccacctcagcctcccaaagtgctgggtttacagacataagccactgcagctggccagcaattttcaagtatacaatacattgttattaactctagtcatcatgttatacaatagatctcctgaatttattctacctaactgaaattttgtatcctttgactaaagctctccaatccctgcccacacccgccccccgccccctagcccctgtgcagccaccattctattctctgcttctgcaattttattttatttatttatttttttaaatttattttgagacagggtctcactctgttgtctgggttggagtccagaggtctgatcacagctcactgcagcctcaaactcttggattcaagagatcctcctgcctcagcctcccgagtagttgggactacaggcacgtgccaccatgcctggctgagtttgactctttaggttccacatgtaaatgaaatcatggtatttgtctttctgtgcctggtttatttcatttagcataatatcctctagttttatccatgttgtcacagatgacagaatttccttctttttaaagactgaatagtattccattgtgtatatgttccataatctctctatttattcattgatggacacttaggttgtttccatgtcttggctattgtgaataatggtgcagtgaacttgggaatacagatatctcttcaacatactgagttcatttctttcgaaatatacctgataatggaactactggatcacatggtagttttaattttttgaggaagctccattctgttttccaaaataggtgtacaaatttacattcctaccaacagtttgtgagggttcctttttctccacatccttgccaccacttgtaatctcttggtttatttttattttttttatcagagccatcttagcaggtatgaggtgatatctcactgtggtttaaatgttcatttccttgataattagcaatattgagcatttgtttttcatatacctgttggccatttatgtgtcttcttttgagaaatgttttttcagatcatttgcccattgtaaaatcagatttttggctggatgcagtggcttatgtttgtaattccagcactttgggaggccaaggcaggaggatcacttgagcctaggagttcaagataaatctgggcaacatagggaaaccctgtctctacaaaaaaattttaaaaattagcagggcacggtggggtgtgcctgtggtcccagctacttgggaagctgaggtgggaggattgcttgagcctgggagttgaaggctgcagtgagttattattgcggcactgtattccagcctgagcaacagggtgagaccccaacttaaagaaaaaaaatcagatttttggttttcaacaactcttgctattaagtttcttataaaaatattcaccccttatcagatgtatagtttacaaatattttgtccctttccgtaggttgtctgttgattgtttcctttgctgttcagaagctttcatttgatgcaatctcatttgtccaaaaaaattattgcccagaccaatgtcaagaagccaagatcatgccactgcactccagcccagcaacagagcgagactccatctcaaaaaaaagatctgaaattgtaaaaatactagaagaaaatataggagaaaagcaattctcctgcctcagcctcctgagtggctgggactacaggtgtgcaccaccacacccagctgatttttgtatttttagtagagatggggcttcaccatgttggccaggatggtctcaatctcttgatcttatgatccacctgccttggcctcccaaagtgctgggattataggtgtaagccaccgcaccccgccatttcagatcttatgtttaagtctttaattcattttgagtagtttttttttttttttttttttttggaggcagtctctctctgttcttcaggctggagtgcagtggtgtggtcttggcaacctctgcctcccagattcaagtaattcttgtgccttagcctcctgagtagctgggactataggtgtgtgccaccacccctggctaatttttgtgtttttggtaggtttcaccatgttggccaggctggtttcgaactcctggcctcaagtaacccattggccttagcctcccaaagtgctgggattacagatgtgagccactatgcctggcctgagttgatttttgtatatgaggtgagatatggtcaaattttattcttctacatgtggatatccagtttccccaggactgtttattgaggagactgtcctttccccattgtatgttcttggcatatttgtaaaggatcagttggccataaaatgtgtggatttatttttggcctctattctggtcttatatgtctgtttttgttccagaaccatgctgtttttattactatagctttgtggcagcttctgaaattaggtagtgtgatggctctagctttgttccttttgttcaagattgctttggccattttggtccttgtcttttgtggttccatatgaatcttaggattttttttctatttctgtgaaaatgtcattggaattttgatagaggttggatggaatctacagtttggggtagtgtggacattttaacaatattaatctttccaatccattaacatggaatatctttccatttatttgtgtctttaatttctttcttcaatgctttatggttttcagtgtacagatttctcacctctttgattaaatttattcctaagtatatatttttgatgctattataaatgtgattgctttcttgatttcttttttggttggtgcattattagtatacagtaatgctactgacttttgaatattgattttgtatcctgcaactttactgaatttattagttctaatagtttttttggtggtatctttagggatttctctatataagatcatgtcatctacaaagtgacaatttaacttctttctttccaatttggatgcctagggagcatcagtggctcaagccagctgtcctggtgcacagggaggcgaggctatgagttcgaggccaacctggtcaacattgaccaatttggatgtcttgtatttctttctcttgcctatctgttctgactagaacttctagtactatattgaatagaaatggtgagaatggttatccttgtcttgttcctgatcttagaggaaaatcttttaacttttcatgattatgtatgatgttagctgtgggtttgtcatatatgggctttattgtgttgagatacactttttctatacctaatttgctaagaatttgtatcatgaaaggatgttaaattttgtcaaacgcctttcccccatctattgatataatcatatagtgttcttcattttgttaactgcttgtacttttgtacttttaaaattttgtataagaaatccttctctattctgatatcatcaatatgtgatcttatattttctttgaatagttttcagttttgctttttactctagctacctgaaatttacttctgggtaggatgtaatgtagaatttattttttgtgtgtttgtttggatagccagttaactcaaaaccattgaactttcccactgatttatgtcacttccattatagccaagtctcatatctttgagggtctgtattagtccattcttgcactgctatagataaatacctgaaatcaggtaatttataaagtttaattggctcatagttccacaggctgtataggaagcatggctggggaggcctcaggaaacttacaatcatggtggaaggtgaaagggaagcaggcatgtcttacgtggctggagcaggaggaagagagggaagaggtgccacacgctttttttttttttttttgagacagagtcttgctctgttacccaggctggaatgcagtggcacaatctcagttcactgtaacctccaccctctgggctcaagcgatcctcccacctcagcctcctgagtagctgggaccacaggcatgcatcaccatgctcggctactatttttgtatttttgtagagatgatgtctcagcatgttgtccaggctggtcttgacctcctgagctcaagtgatcctcctgcctcagcctcccaaagtgctgggattataggcaagagccactgcacctggcctccacacacttttaaacaaccgggtctcatgataacttactatcatgagaactgcacccagtgggaaatccatttccatgatccaatcacctcccaccagaccccatctccaacaaaggggattacaattcgacatgagatttggagagggagggacacagatccaaaccctattaggatctgattcaaaaaagttttgttctgtactgtggtctatttatgtgtgcatataccaggactagactgttttaatcactctaagtttcaaccagtaaacttgtgacatatggttaggcaagggatctcatattcttctgcttcaagttttgttttttcttggccatttactcttccataagaattttaaggccgggtgtggtggctcatgcctataatcccagcacttgaggaggccgaggcgggcagatcacgaggtcaggaattcaagaccagcctgaccaacatggtgaaaccccgtctgtactaaaaatacaaaaaaattagccgggcgtggtggtgcgcacctgtagtcccagctactcaggaggctgagccaggagaatcacttgaacctgggaggtggagcttgcagtgagccgagatcgcgccattgcattccagcctcggtaacagagtgagactccgtctcaaaaaaaaaaagaattttaagaacagtctgtcaagttccataaaatatctgattggagttttgcttagaattgtactgaatttttagatttgagaaaaattatcagctttatatcaaacttccgtctttgtgagtaggggatctcttcctattcttttatatcttctttatgttctctaataaaactttataattttctccataaatatcatacacagactttgttatatttattcctaagtatcttatgatttttgttatgacaaatggtattttcttttctttttttttttttttgagacggagtctcgctctgtcgcccaggctggagtgcagtggcgcaatctcggctcactgcaagctccgcctactgagttcacgccattctccttcctcaacctccccagttgctgggactacaggtgcctgccaactcgcccagctaattttttgtatttttagtagagacggggtttcactgtattagccaggacggtctcgatctgctgacctcatgatccgcctgccttggcctccggaagagctgggattacaggcgtgagccacgatgcctggcctaaaatgaaatcttttatctgtttattgctgtggtgtaaggatattgatgtttgtgtattctccttgcccccggcaaggaaattgttatttctaatagttggtaggttcttgtgaattttctttgtatagtaagcaatctatgtatagtaattgtctatgtatagtgatggctttatttcttctttttcttcttgtgtcacttcagacttcttggcagaaaggtgaatagaaacagtaaaaactggtatccttgtcttgactttggaagttactttctattcctagttagctagattaaaaagattaaaaaagaaatagacaggttctcactatacagtggttattcacagcctcaatcatagagcactacagcctcaaactcccaggttcaacgaaccttaccaccttagcctcccaagtagctgggactacaggcacaagccaccacacctggctaatttttaaatattttgtagttcactacagcactattcacaatagcaaagacatggcgtcaacccaaatgcctatcaatgaaagactagataaagaaaatgtagtatgcagccaggcgtggtggctcacacttgtaatcccagcacttaggaagcctgaggcaggtggatcaggagttcgagaccagcctgaccgacatagtgaaaccctgtctctactaaaaatacaaaaaaattagccaggtgtggtggcaaatgcctgtaatcctagctactcaggaggctgaggcaggagaatttcttgaacccgggaggcagaggttgcagtgagctgagattgtgccaatgcgctccagcctgggtgacagagtgagactctatctcaaaaaaaaaaaaaaaaaaaaaaaaatgccgggcacgatggctcatacctgtaatcccagaactttgggaggccgaggtgggcagatcacaaggtcagaagttcacgaccagcctggccaacatggtgaaatcctgtctctactaaaaatacaaaaattaacagggtgtggtggcactcgcctatagtcccagctacttgggaggctgaggcagaagaatcgcttgaacccaggaggcagaggttgcagtgagccgagattgtgccactgctctccagcctgggtgacagagcaagacaccaccttaaaaaaaagaaaaaagaaaatgtagtatgcgtacaccatggaatactatgcagccataaaagggaatgagatcatgtcctttacagggatgtggatggaactggaagccactatcttcagcaaactaacacaggaacagaaaaccaaacaccacatgttctcacttataagtgggagctgaacgatgaaaacacctggacacatgtgggtggggggaacaataacccactgaagtctgtcagaaggggaagtggcaggagggagagcatcaggaagaatagctaatggataccgggtttaatacctaggtgatgggttgacaggtgcagcaaaccatcatagcacatgttcacctatgtaacaaacctgcacatcctgcacttgtactccggaacttaaaataaaagttgaaaaaatattttgtagagacgaagtctcactatgttgcccaggctggtcttgaacttctgagctcaagcaatcctcttgccttggcctcccaaaattctgggattttagcagtgagccactgcacctggcctccagttctggatcctgggtcttgcgacattattccatgctggcttctgaagtcaatgaggcaaaaccagaaaggggaactaaaaagttaaagagggagagggtctcacaggcaagatggaggaagcctgggatgaaggcagggctgtggacctgaatgatgccaggaattaaggaggaagtaacagtgttaggtaatagcacatgggattcttgggctgcagctacaggagggagaatcatggccttaattcatcacctctgaaatcctgaaatatctagcctcctgcccagatcctgccatgaatgcatctattcaaccactatttataaagtatccagtgttaggtccagggagtggcaagagtgagcatctgcagtcatagtccctgccctcagggagcttacattcaatggggcagacagacatcagtctgtacataatcatcaacaaatgtagaactccaacagggccaagtgcctctgaggaaaggtacaccttagtgtgagcgctcataacaggagaatttgaccctgaaaagaaggtcaggaaggcttccctgaggctattgagaaggtgaggcctgaagaatgaagaggagctaagaggagaggaacagaggaaggagccgttccacagagggtccagcctccctggagactctgtgcaggaggaagcacaaggtggacagcaactggagcacacgagtgagggggtgtggtgggagatgaggctggagaggaggggccaccccttgcagggccttagaggtcaggttaaggacttgggtctttaacctaagatcaatggaaaaccactgaataggtttaaggaggctgactgaaacaatcagatttgcatttttaaaggatccctcttaggtgtgtgtcatactgtagagaaggccattcccagcctcttcagctactgcaatgactcagagaaggccacatggtccacatggtggctagcccagggatgtggagggatgaaaacgagtggacagacttgagatatattagagcagataaaatggataggactaggtgctggattcaatattgagatgctcattctaaaccgcccctacatcaaatccttcgaaggcaggggctatgccacatgactatgatacccaggtcccagaacaactcctgacacatggtagactcaatacacatttcccgaaagggtggaaatgattagcagtctctcaagtaatcctttgaccactaagcgtatttaatttcttctagcatgtgtcagtaatcaacctccttggtacatcatagggagaaatattgccgagttccaaagagtatactctggggcaagttaatacaagaataaggtctcacttaccctataacatgaagagtaacagtaaactcgtaagaacaggacctggtgaagcaaggagtaggcacaggaagatggctcatcaaataggggcgccgggtgtagtgtgaacacctgaggcaggaagaacccagtagcctctgggggttgggtgggattagttgggggactaggatttgatggtagggggttgtcctggagatctctggaaattaagttatctattttttttctgtttttatttttataaaagaactcttaagggcatttttttctttgtttgttctgttttgagatagaggttcactctgtcgcccaggctggagtgcagtggcgtgatctcggccactgcaaactccgcctcccaggttcaagtgattctcatgccttaacctcctgagtagctgggattacaggcatgggccaccacgccttgctaatttttgtgttttttgtatagccagggttttgccaggtttggtcaggctggtcttgaactcctggcctcaagtaatccacctaccttggcttcccacagtgttggaattacagccatgagccatcatgcccagcctaagctatcactttaaaatgacccttcaagaaagtcccaaggagtctaatccatccacgacaacagcacgtctgagacagcctagtgaaatttctccgatggaggacaggagatggaaaagtgccccaggacctcttatttatataaaaaacaaaattttttaagaccctgagaagtatggattcttctccagagaaaagttcctggcttgggagctcccttaggacttggcactttggtctagagtgaagtggacctggccattccagctttgagtgggttcaggcgagacactcgagctaccccttatggttgctctgaaggtcaccctggctgggagtgggtggatctctgctctgttatgcctcccacaggtggaggaagtctgtctctgaggctgccctgccaccctcatagagcgctgcagattgggggcggtgatgcagccacaggggctctgattccctgcctccccactgtgttcatctcattcctctccacatatgaggcctggtgtcatggcaggtgggtgttccaagtgaaaccacagccacagaggcaagcagtagagcctgtccctgatgtggccctggtgatgctgcaccagcctggggctgtatcagaaaccatgcctgcagcctttgcttctgcagacttgctggtgctgcaccagccctgagcaatgtccatagcccttgcctcactggtcactgtgatggggacgcccccaggtatggttctgctgctggtgttgcaggttggagtgggggccagcaccctcatctaccacaagaaggcttaggtggcacagacgtaaggctgcttgcctgtgtgtagagtggcaggctgcaacgggctggagccttggggagaggcccttgccacactggtggcagtgattgggttcaggcaggtgtgtgccgcagtgctgggccaggtgtgagctgtggcaagagctgtggccacactttctgcaggagtagggcctatcacctgtgtgaaagtgttcgcacagggtcaggtgggccccttggctgaagtacttcctatattagggggaggagaagggccccttgcccaggctgtgctgagagaggtgagagcagtgggaagagactccacattccaggcaggaaatttgagtggatttgtgggtggagatgggggtcccgggtaggggagttggggaagggttggttgtgacagctggcaggtaaaggagtgccatagtaggtagagggctgggtctgtcctctcttctcctcctcctctccctttgctcccagcctgcagggagaggggagagaggtgagagcagcatgggggaggaggaagcagaggagacagaggtgggagaggagaggctaagccccacacccaactgaagaagtggttggcggtttcagcggcacctccctcctcgctgaggtggactgtgaaggtggagaagcccagagcacagcctcctgtgagcagcttcccagggtgttgagggctgccaggcaaggacagggccctcagagttaggccttgcctgggcaggggtctcctgggggaaccttccctcagggccctgaggctctgggctccagagctcagcttccgcgttcagatacatggtctgctctgctttggagactgagaagcctgagaggtaaaatcgtgctgggtggtaggtagggtaagggagagggagcttccccccatctccctcacccactgcagaaaggcttctctgtttccttccccagcccagtcccacctcctctgtgaggccgctcctcacctccctactggcctgcagtgatcctcctgcttgggagtcacagagcacccctacacgggccctttgccattctttatagtataaggcaaggccgtaacattttgtggggcatcttcttcagtgtcctcagccttgtgtgaacatcagaagcacttgggggcttgggaaaatgcaattgctggccccatctccagtttcttaaacagcagatctggggtggggcccaagaatttgcatttctaacaagttcccaggcgatgctgatgctgctagtctgggatccacactgggagagccactgatctgttaggcgtgtaactttacttgtattatctctcaattctcagggcaacctgttactctcccccattttgcaggtgaagaaacagagggaagacccagtgccttgtgcaaggtggctcagtttgtaagtggcagagccgatttgaacccacgtttgtctgactctaatactgtatcaaccctccttcctctaccctgttcctctgcattgtcaactattccacatgtatcttgttcctcaacaaaatagtaacgttttcttttgcatactttatatctctcaccttgcctgacccagtaacataggcttggttgggagggactgaaggacttggaaaggaaatgccccagtggagccaggatggaaatgggttcctctgtgtctcccacatggtgtcacctaaataaacagccatgtctgtgaggttcagtcatggggagaggagggcaagagagcactcgcaccaagcgatggggttagggggacacgaaaggaaatgtgataaatagagaggggggcgtgtggggcaaaggtgaggactggggacccgggagggggcaggctgtttcagagtgaaggcaggacgggcagcagagacagagaagaggctgccgggtggttagggctggggaggacaaggagggtgaggacagacgatcccggcagcccctggagccagaagagaagtcaggttaactccagacttttggcttccacctctgtatctcacccaactcctccccacctgcttctctaccctgaaactccaggaacaacgcccacctgcctcccactacaacttccccttataccgtacacgtcctggatgcttggggtccgggaggaggggagtcaggatcacgggttccagggaagtgagtgtagaaaggggctcctacgagggtagaagtgggtgttgtctgcttctgcaggaaaggggccagccagcccaactggtccgcagtacttgctggggctggaggatgcccacctgcatctacgggattgagggtaccggagaggaggcgaacaaacgagaaatcccaagggtggagaagggagccatgggatcggcgggcgggccgcgcagctgcggaactgggagggccaagcgggctttagggggaaacacggccggctcctctgccagtgagacagagaactgagcatgggggaggaatttggggccagaggggctgggggtacccagagcagaggaaacaggaagtgaggggcagagaggttacgggtggtggaaggaacagcagtcggttctggagaggcgattcctcttccccgaatacctgcactgccccggaccgggagtgcagtcgtgcgcccctgtccccccagcctcaggcttggtgcccagccccgctcgcggaactcgaggccagtaaggcagccgcggctttccttgatgcccccactcctctgctctcagccgctgcctggacgagcacagaactagtgttcccaggcgaccctccctccgctcagccccgctgcccggcgggcaaaggctgtgcactcacactccgagtctgcagcccagcctgcccttttttgggaggtggcccggggactgggatgtcgaacagggagcttctccgcagtcctctccacctccctccctctttccagctatagaaaccggctgctcgcagtgacttccaaacatcacggtcattcccacatctacacacatccctttctcttttgagccattttcctgctttccctttggtgttgaaaccctggatttcagcctgggcgactcaggttttaggggggaaagtttggggtctaacttggcacctctgttttttatcctctcttccagcttcatagatggttcctattttcatacatatttgctaatttggagtttccgacgacatatctcgaataacccgacattttctccccatttccaaggctgattttacattatttctaggcctccctccccaatctattttcctttctttttcttgtacacccctgataaacagacacacagaactgcaggtttcaaagaggaaaaaagcacgtttgttgttggtaggcgggcgtgaatgggagggttcttcaccttctccaacacctcgtatagatgggacgttgcagggcaatagaaaaggcagcagatgggggcgtgttttgccccactctgtacaatatagaagaatctcatatagatactttgtataaaagccacgtgtcctcatttgtgtcctcttattggctggctgggctgggggtactgggggacaaagaagctggggtgatagaccaggacacagggataccccatggtccccttcctctggctgtcccctggtggggtcactttggatccttggtgggagcatagcacagctccagtggccgggacaccttccagaatttctcattcaccagctccagggtcagcgagccattcaacgtctgaggagggggtaaaagggagagaggggaaaagagagaggaaagttggagaagatggaaaaggaaatgaatgagaggcaaaaggtgaccaagggaggaggaaagaaaaaaggaataataaaagcgataaggcaaaaaaggacatggatgatgggaaaggagaggggacatagaaagagatagaggatgtataggggaagagtgctgatgagttagaccaggctcatggttctatgtggcccagaccaccctccctcctctcccctcttctaccactgccctcagaagctctcaccgtgaacgccccgcctccaggtgcgatgtagatggtgtactgcttttcactgacgccctccaggctgggcaaagcaggctcctcaggaccgtcacctcctccggcacccccaccctccccgccacacccatcaggtcctccggtgtcagaggcgccccctccaggccctcctggctcccctgcttcctgctgttgcctccgctcgagggcaatgcgcagggccaagtacttggagaggtggtccactgtggcattcccagttgtcttcacatacctggaatgggagggaggacaggcttagagccagagcgcctcagatgaggactggaggtaggggctttccaaaatggattctgggttggggtggtattttgggtttgggcaaagcccacttctgatggaaatctaggtgatctttggtttctcagtggctggggaaagacagggctcctcacctcgtctggcagtattctcccttctccacgagcagggggtggggccggaacacgagctcaatttctccacctggctctggggggctgggggccccaggagggcttggggggcccagcgttccccctcccagagtccctccccggtcaccagagtcttccgaaccggcacccccacccaccccaccagtgccgcctccccctgtccctacactgctcccccctgcgccccctccacggggtcgcttgggagcagggcctggggcagagtcaggggcggagtctgagctcacatcttctccatccccttctccctccccgggctctccttcccccccactcatcgttgtggtctgatctgaccctggtatcggccgcctcacacgctgggccctgtagaagcaagtggttaaggttagaaggcatccaggataaagggcttagactttaaacttcagagaattaagagataagaaaaatcctaatgacgatacctaatatttattaaacacaatgtgctaagcactcagtatactaagtgttttgcaccaatccccttacctaatacaatgaatcctatgacacaggtaattatattacctctattttatggctgaggaaactgaggcttagagaggttaagtaacttgttagtgatcataggctgtcacctctcaaagtgcggtagcagcatacacatcccctgtgagcttgtgaaatgcagactctcgggcccaactctagacctactgaatcacagtttgcatctgaagatctacaggtaatctggatacacatgaaagactgagagatgctggcctaggaggtgatttaacttccagcagtatgaatccggggcttattctcaaaatcgctctactgttctaacttctagaaagtcatggggtaaactacatttttcctttttttttttttgtgacagggccttgttctgtcgcccagcaggctggagtgcagtgtgcagtggtgtgatcatggttcactgcaacatccactttcttcccaggctcaagtgatcctattacctcagcctcccaagaaggtaggactacaggcatgtgccaccatgcccagctaaatgtttaatttgttgtagagatgagatttccctatgttattcaaggtggtctcaaactcctgggctcaagtgatcctcccatcctcacctcccaaagtgctgggattacagatgtgagtcactgtgcccagccctatatttttcttaagaagagcagggccagttgtttactaagaaactgcaatttacacccatgatttccagccctaatgatcagtctgtggtcagctcctaggatgctgaggcttagaagctagcaggcaacaaggactgacccacggacccatcccatcagttctgcttctctcctgaccctcacacctgtgcatggcctgcatgcgtagcccctcctcaatgctggagctcaatgcctgctggttgtgcaggcggctcaggcggataagcactcggtcttgatgggcctcgtattcctcccggctaggatagatcttagagatcagggcatcaaagttggggtctggccgtagggatcgcttggacaccagcttctttcggcaggtaggacactccttgttcctggggtaggagaagggaagccctgagtggtcagtcaagggaactgaagcctaggctgaaccaagaccagtgagagggccctaactttgtaccccttcatctcatctcaaacatgtctctcctattacccgctccgtagggctgtgacaatgcagtcagagcagaatctgtggaggcactccttggtggtcatcgtattcttcagcatgtccaggcagatagggcacatgagttctgaatgcagtgaccgaggggaaacagcaatctctgtgccatccattatggcttcctgaaggcatcagtgagtagaaaggtggtgtgggttagagggaaaggggttttagaaacagcagcccataaaataagaattttgagaaatacagtgagaagacccatgttggtctctataggagacaagaattctgagaaagagaaggactgatgacttggagcaaatggagaaaagacagactttagtgtccattaactaagagtaggagctttggaataggaggatctgaggtggctaagtggcctaggagtgaagatggcacaaatctgtggttgggaaaaactattcaacaaaattttttaaagtcctggtgctacctgtattagaaccccatagggtgcctgttaaaaattcagattctgagaacccaattcactactgaatcagaatgttggggggcatgaagctctgcttttaataaactcccaaagtgagtcttatgtgcactgacttatgacactgaatgaggaacagggaaggtaatttttgtgtttgtgatctttcaaatgaagataataatacttgttccacctctctggcagggctgttttgaggattaaatgagctaaatgcgaaagtgctttggaaagattaaggtgattcaaaggtagggccaggcaaggcagaatagagcaaattacggaaaagaagctgtgtgatgcggtctgtggatataagggtttgggggagggggtaagcctgaaagggagaatgcctgtcacctgcggggtccggtgcagctcatacagactcagttcccacgttttgctggcattctgggcattcgccggcgtcgtcatggtgaccgggcgcagaccccccaccagggctccacagccgaggagaaggcgaagaaggctgggggtggggggaaggggaggagggcgtcaggggggccgcccctcgcgtagaccccgcccctccagaagcgcccctctccgcccccgctcccgcccccgcgccggcactgcccctcacccagctccagccgttcgcgctcccgccgccgccgcgcctctccctaggcccgggctcctgggccaagttcgctcggtccgcaaccgctgctcagacagcagctcccgccaccgccgccgccatggcccgggcgctggggccctacgtcacttccgcctgctcctccgctacacccgctccccccgccggcggagacgtcacccaccattcgcggcgcgggtgggacgggacgtggacgccgcggttctcccgcccacgggacgggctcgtcccgcgtgaggatcctgcgtcccgggagttctgcgccacttagggaaccacggtctccgcccccggcccagcaccgtcgcgcggccaacaaccttagcctcggttcccttccagaggcccccacgcggggcctcagctccggggggccggggcctggaatatctgggaccccaggaggggacagagggctcgtgaaaagggctacctcccccactctgcgtaccctggcgactctggggatcaacccccctcacttctccgtaacccccattccaggatcccgggggaaaaggctgcaaaagatctgccgctttagccttctagtcctgagaacacacctaggtcccgatgtgcccgggattccccttaccaccctggggactccctccaccctctgctttggctctccctagaccctccgacccgctctcccgctcgaggtttgggggcggcggctcgggacgtccagactcaactctcggccggagccatagactcgagaattgcgtttggacaatcaggagccgcggcccggggcggggaagggagggaggcgcacgggaggaaagggggaatggagacaccacgcggaaacagggacatacacaagatggagctcccattgggaagggggggtgcgcgtgtgggtggggtacacaggggcagaatgtctggagtgggaagtgggcagaagcctcttcgaggactctagagtaaacgaaggggatggggaggaaagagaagaggaaggggcagagcgatccccattgagtgtagggaatgagagggatacagggcgagggggtggggggcagttagagaccctgatgggcatcttgtccccgcccgagctgaggctcccggacttgggctgcggctgccagggggtggcctgtccctgggacaaggcagcagtgggtgccctcgccccccaccccagttcccccctacttccctgtcctctccttcagtccgtggccagtccttatgtgggcgccagagtcgattagcgcagacccccctccccttcctcctcctcttcccagccccctccctcctgctctctccagcccctttcatcggctggttcattcccctaatcctggccccctcccctaatcccccccatccgaccccaggccggctgcagctattgtaaggtggagagaaaggggagggggggactcagagaaaggagaggggtgggggagggccacctgttccaagaccccctttcaaggccagactggacaccaagatggggccatgaacaaatcacccttggggaccataagaacccagggagttggggggaggggactggtgctgcagaaccagtggaaaggggtgacgcacgaacccctcccttcaaaaagacccggagtgtcacgcatacacagtgacacatactctttcctctcacacccggcggcgggggttgccctgggagaccaggcagagaaagggaacaatccttcgggaaagggaaaggagggggaggtggggaagggtctgagggcttggacacaagaagagccggaggtggcagggaagaggacttggaatttattagggtcacaagcacccctgcttcccatattcagcattcctgaaccatacactgccaccccttttgtatcctgggaacttagagtcctcatcagcaggaggccaggcagagtggtgggggggtgagcagagtccagggtccttgaggcagttacatgaaaagacctcctgggaggggcagaaacatttggacagatgcatgggtggagacacaaatgggctagggggtacccacttctgtccctggccttgggaacctctgcccttcccagtggctccagactccccttacttgctttctcatatagtctgggttctacttctctgccctctccctccccatgctggcctcataccagtgacttccactgaggtccctgtgatgtatccactatcttcagatgccaagaatgcgaccacatctgccacatctatgagaatggtggggagagggcagaattctgctcactcccatagacccaaaacagccataatctcccaccaaagacatccctccccacaaacctctccacagacaccaaccaccagtcccctagaaaatccccaaactttggggatctcttcattcaggcccccttcccagggaccccactacattcagtgctcaccctcagggtcccccaagtgtcccatcgggatcatttcagtaatctgtaaggaaatactcatgtgggtgaaagcttcttttatggatttttttgaagactgagtctgtgacccttttttgtcttcatttctcatacattcattgaatatttaatgtttgccaggaactgtgcccagtattctctctctctctctctctctctctctgtgaagcccagagagattgagtctctgaatgattctgccctccacccacagcctcctaccttgtccaccactttctgtggcactttctgtgtcatgggtgttgcaatgaaccctgggaggacagagttacagcggatcccatgtctgtgggaaggagagtggctgccgattctggagagggctgaatgctggtacctccctcagaccccccaggtgctccccagcaccctcaagcatctgaccaaccgtccaagctcccgggctgcggtctgggtcagcccaatcactccagccttggatgctgcatagtttgtctgccccacgttccccacctataggtgagtcagagatgtggaatgagtcaggagtctcaaggaggggttctcctctctataccacttggctggctgacctcgtccaactcaacctgacctttcctacgatgctactgatgttgatgatggaaccacgacaaccattggacaccagggcttgtgctgcagcctgagtgactaggaaggtgccctggcgggaaagggtaacaagggagaaaagatcagctggggtgacagccctcctccaactccctccccaggctaagggggccaaacgtcgcaggttcagagatcgccaccttgaggttgacagctatgactttgtcccagtcatcctcagacatgtgcagcagaaactcatcctgggtgatgcccgcacaggacacaacgacagatggtgggcgagaaaagcaggcctatgggagggggaggttacgcatcaaaaaccccccacaaaaagccggggcagtggaggcaatatcagagctttagagggggaaagtggcctagcgttcacctgcacttgttccagcaggcacctggcggccctggcctcagacacgtcagcctggaaggcagcatggttccctcggggcggcccctccttgctccctggcccgcccagcagccgcaccgtctcctgtgccgctgcccggtccaggtcgcaggcagctacggtggccccctctccggccaggcgtacactgaccgctcggccgatgccgctccccgcacctgaggtaggacagaacacgccggaccgggcacggggaggagagggcagggatcagaggtcacagggcagaaagtaaaatgtgggtaaggggccagaggtcacagcggccgcgcactccaagggcacgcccctgacctcactccaataccccaaaccgcccggggaaagaaccccctcaacctgtgaccaaggccagtgcggagcggagtcggttctggagctgagacgccatggcgggctgtgggtgggtgggaatcccagcactaagccaatcccagcgcagaggggcgtggcaagggcaaagccggggccaatcaaaggcccgccagccttaggccatctgcggccaccagcgcaggccgacctcccaccgagggggcgtggcccgacactgctgcttaggggccccgggtgtggagaagacaaggggccccattccccccaaaaagacaaagactgcatgtggggcggaagatcggaggtctttatttccggttaccacccctccccctcgattcaaacacagtgatataaaaggaatagaaacaaaaaaaatcaggccatgagaataccaactaaccctctcccaccccatccccccaatcactcccaaatcaggacacacgattgatgtttgatgtttatccccgactcctcctgttaccctctctgtccaggactctggtcttccctgaagcctccaccaactggtgggagaaaggaaactggaccttggagaacttcctgtgtagcaacttggttctccgagaacaggtggggtaggggacaccaggtaggctgccatcaccccctgtcccttccagccttcttcatggccccatttagccttccaaatgcaacatggtcagacagtgcccaacactatggtccctctggcctctcattctcaccgctccagcctctgtaagactgccagcccttgaaggccctaatgccaaagtaaccattctcccaggctacagttccttcctttggcagatgtccctggccagggcccccaacctctacgcacccctgacctggagttaggggtagaggtttggggcaggggtagtttatccacccctcactcaaggtgggcaatcagcaccatcatgataactccccccagcagccccagcacctccagaagtgattgcaatggtgatgcctccctcagcagctcgggcaacacagacactgttgctacgtagataaagccacctgcagtaaatggcaggacccagccaggacctgcaccacctgcaatttcactgcccactgctcctccttcagtgagaagggcacaggctgtgcctgccagtgcccctactgctgtcagtagttgcagacgcatcgcctgatgggcagaaaagagaaaaaggcactcaccaatagctaaagattatcagtggtttagaagtggctggtggggtataggtataggggacatggatttggaaactaaacatcaaaataaaaagagaagagggagcagtctagaatagacaatttctgaaaaatcttaagagatcagaggtcctttccacagactttctgattgagtaggcgtgtgtgtgtaagactccactaaaccattcagatggtttatagaccagtttaagaaatactgagctaaaggacaaagtaaccagaacttcttccccctcatttctagaggacttgtcaatgacagtatgaattgtttggaactaataagaggctgtttgggtttagggtgagtgaggagagataaagggtttgaggcagctgtgtttggcagacatcaccaacctgctttttgctgcagccagactggaccaagatggcaaagtctccgacctcgtggggcacttcatgtagcaggacagtcattgtggtcaggatccctagtccccggccccctcgaaaggaagccccaatggccagaccatcagtgaagttgtgtgccaagtcagcagccagattcaggtaccccgacacacgcaggtcttgtacaggacaagaagagaaaatgatcagaggcttccatcaccacttgttccagtcttggtcagctattctcacacctcccctcagagaccactttacacccagtcctttagtgtttctcagatacctgccattacccacagcacatattccatgtgatttgtgatgatgtcccttgcccaaatttatcaccaactctggcccttacctaagcctcttttttcttcttcagcgttctgaggtctcactggcccatctttgggtactgtgctccctcctcgcctcttctgaacccctcttgtttccttttcttcttcctctgagctctgcttctccttggtagaacgctctgagggaagaaaagagttggtcagagtggagaacagatcttccaacatgtcctctccctcctgagggccataagatgaggagattctgaggcaggcaagtcagctttcaggaaagttgttcctgggctcaccttgtcttccatgtccatgacttccacgtgtatgactgtgagcgtgtccatgtccatgactgtgaccatgtcctcctttcacatgtctcacaaatttctccacgacaagaaaggcaacaattccactgagaacccacagtcccacagacagaatggggccctggcctgggaatggaggcattgagacattaagggagatgtgcattccagactcctcctcctcaagtgcgggaggtgaggaatagggagagacggaccttccccagcaccccaactcccatccccatctgtctcttcctcaccactgtgggagtgtccatgtccgggttgctccagagtgtggtgagaatgaggttctggaagaaggggggaaaaccagatgagggaatatctgacacaatgagtgtgtatttgggggaatatcgaaaggtcagggatcataaaggagaaagaacccttttcctccaaagaacgaaataggttagatttgaggtagaagtcagaggttacttaccaagagcatgaggaatgaggtgcaggaaagcatctcccaggagcccaccggaagcaaaactgagcaagatctgaagtagagagcgatgccggggagagttcgactccacggggataaggaagaggacaaaaaatggagctgctgagatcagcactgtggcccccagtgcctggtgagggagagtcaaggtcaagtactgtggagtttcccaacaatccagaaccagcccttctctctcccatcccctggagactcacataagcccagagagtgacagcatccaggtcctgcttgatgcctggagccccagactccccatagcctccatggctatgctcatggtcatgtccatgtcctctgtggtagaggctctcatgggagtagccatggctatggccatggtgtaaatcctcatgtgaatgtccatggtcgtgatcgtgggtatgtccatgccagatgctctcgtgagtgtggccatggccatgggcatggctgtggccatggtggaaatcttcatgtgagtgcctgtggctgtggccatggaagtcctcttgcagatcgtcgtgcaggtcgtcatgacccccgagtccagccaccagaagccccaaggtcgcccaggtcagcagtcccacggccacccagtggggggcccccaggcctctggccatcacgctgaccagagggacagaggcagtgactccacttgactcaactctatacctacacagggtccgctttactccaatcgcgccctccgtccacctctatgggccgctctcccattcccttaagttcccacctacattgttcccaagactagttctctttatcccgaaccacctcccggatgtagggccctgggacactaatctttcaccagccactttacagactctctgggccctcgtctctacgactcattaggtgaggaaaaggcctggaaaggatggtagagaaaaaacagagaattctcaccggctccgggatcctctcctttcccggtttgcttggacgtggcagtcccgcctttagatcccgcgagaacaggaagttccgttccaccttcgccctaatgcctttaccaatatggcggcactccggtagcgacgaatccatcctgcactgacacgcatgcgcgagtgtggaggtgatttgaggggagggtgggcgaggcgggctaacaggccggaggagaccgcctcctcggtttccaactagacgagggggcgggaactcgcgccgagacttcccgtctgtacaaagatggctgccacattggcgctgtcattttggtactgagcagagcgacgggcttaattcgacccaatccaggccagagtctttctctcaggggcttcctcgtgctcagctaatcctccgatcaatccttgggaatccctgggacctcttcggtatccctactctcagccagggatcatgtcttgggccgctcgcccgcccttcctccctcagcggcatgccgcagggcagtgtgggccggtgggggtgcgaaaagaaatgcattgtggggtcgcgtcccggtggcggcggcgacggccctggctggatcccgcagcggcggcggcggcggcggtggcaggcggagaacaacaaaccccggagccggagccaggggaggctggacgggacgggatgggcgacagcgggcggggtgagtgccccagcagaagggcaggcgagccagtgaccgctttatctgcgacccctcccccacaccctcccccggtgctcttttccttgcgctcccgcccccttgtttgtaaacacgcgtcccctccctcccgagggccttagcaccctcccccccggggcggggcggggaaggggagcttccgccctcctagctgtgaccgcttgaggccttgggcaccggaggtcgcgggcctgggaagggcacgattcctcttaaacctcaggactttgggcgtttacaggcagatcctgcgtcttaggaggggtctctcctgcctgtctctttcccttgcacgctctggctacctggctttacgctgggaatagaggggctcgatggtctaccccacgtgctgccccacccacgagacaggtgtggctttgggatgacctggtattcattcaaatggattggttggaaaattttcctcacctgaactatcctcctctccttgtcaactccctcctctcaccacaatgaggagttacgctgtttttgggtttttttagccagtcaaatatagcagtgggaggttgtataccaattttagtgacacaaatgttaataagttctgataacccactaccatcggaccagccggagttacactgttgtttgacagcagggtgtctctgaacttggggatgggtggagtgggctgggtccggcacggtggggtattagagaattaaagtctctagttggatgtttgaagactcattttctttttttgtctcttctgtctcttgtgtgtctgtgtgcctgtacatacccctccctcagactcccgaagcccagacagctcctccccaaatccccttccccagggagtccctcccccttctcctcctgggccacccctacccccttcaacagctccatcccttggaggctctggggccccacccccacccccgatgccaccacccccactgggctctccctttccagtcatcagttcttccatggggtcccctggtctgccccctccagctcccccaggattctccgggcctgtcagcagcccccaggtgagaggttgtgaccaacttactgcctggccactttcattttcttgttttccttgtaaccccagatccttgtgtgaacttccccatggcccattgaccttccaatcctctaaccttgtcaggcctgtggtctttatgagaccccttgcctttcctgaggtgactgatctttcagtgcatgcttcctcccctaaaagaactctaatattctttgtttttgtgtgtgtgtgtgtgtttttttttttttttttttttgagatggagtcttgctctgttgcccaggctggagtgcagtggcacaatctcagctcactgcaacctctgcctcctgggttcaagcaattctcctgcctcagcctcctgagtagctgggattacaggtgcctaccaccacgcccggctaattctgatattcttgatgtccttttcatctatctgattttctgcccttttgatcccatctgctttcccaagacacctgcccttcagggtcactgtgttgcacaatttcagggggggcctgtttattcactttggggttgtgctccagggatggcctttcacatagactgcagtgtaaatgacagcctctggaatgtgcattgcagggccttgcttagtggtagggaatgatttccatcacttctgtgacattctgcttcccaataagtcttcctgtgacttccctatttcccccatcccagattaactcaacagtgtcactccctgggggtgggtctggcccccctgaagatgtgaagccaccagtcttaggggtccggggcctgcactgtccaccccctccaggtggccctggggctggcaaacggctatgtgcaatctgcggggacagaagctcaggtatgtggctcagaggatgaacagagagggagagtctgggccatgtatcatcacctgtgggattcccagggcttatggagtttggtcagagcaagtgacctgggggaggcctgatgggagtaaagaagctgaagctgagatgtaggacgcgattggggggaaggtcagagggaaaaggaagcagcgtgtagggtttctgaacagtgaggagactgggactggatcatcactcagctcctggttccctatctctgtatttggcaaacagggaggactttaagttttgctagggggagattggaaacagactaaatggtgaaggtgtctccatgcaaccttcttattgctcctcccctttccctgtaggcaaacactacggggtttacagctgtgagggttgcaagggcttcttcaaacgcaccatccgcaaagaccttacatactcttgccgggacaacaaagactgcacagtggacaagcgccagcggaaccgctgtcagtactgccgctatcagaagtgcctggccactggcatgaagagggagggtaaggacccgccctgcccaggcgtcttagaccacatgcccttctcccttatcccactcagactgtgtacctctctggaagggtggactgctctctctcctctagagggcgatatttgatttctctctcccttcgcagctctcctccctgttaccctgttctggcccttgagtttccttcttaatggttaggcctctgtggcctgcacatatgacccctccctagactgatcctaggataggataacttttccttagccatgatgggctgtctccccatttctaacctgagtggttcctcctctgattccatggaccttctctggtctctgtctcctgttatctgtgatctttcctctaactcctgggactgggcactcttaagcttacagactttactgaagacctcagggcttcccttccttcttctgtgtctccatcttatcttcttaagtcagattcctaggattctgagagacactttagagcatatcttggtcaaaacacccactttagagaagatgagcctgaggcttggctttcccaaggtcatgcaacaaaggagtggcaggcaggtttgggatcagaacccacatcttcaaagacctaggccagtgctcctttcactgcctatttgttgagtcagaagagcacaagatttgcactcagacacacttagagtcagttgtatgacctgccatgtattatatgaatttaagcaaactaatctctttgaaccccgagttcttcatcttaaaaatgagaataaatgcttccagcatcattatgataattgagtgaatggtaaaatgtgcttagcatgtttcttggcatattttatttaaaaaaattttttttttcaatcagctttctcaggttgaatcttggcatgttttttttaaccatgtagtaggctctccatttaaattcctccctaattcttttacctacctcacccttcccgactgacttacctgcccttttataacccttccttcagggctgcccccagtccaccctttctagtgacttccccaattcctataaatatctcccaagggccatgagatcctgatgaggccgtaaggatatttgtggaaccccttcatggctggctgctgactttccattttttctctcccccttccccctgcagcggtacaggaggagcgtcagcggggaaaggacaaggatggggatggggagggggctgggggagcccccgaggagatgcctgtggacaggatcctggaggcagagcttgctgtggaacagaagagtgaccagggcgttgagggtcctgggggaaccgggggtagcggcagcagcgtgagtgttggggtcaatccactctccttcgtgatgggggttgggggaggcagtctaggtctgttctacatcccctccccctcctttcccctcataaccttcctaacactacttgggactggaggtgctgccaaacaaggtctttcaaacatctgaggtggatgtgatagctccttctgtctccactccccaaacaacccactggcagaaccataggcatgtcccaaataaataattgtttgcactaatgccagaagagaagactcacttacagggattggtttggatggggctcacaggaagactatatgtaaggagggggtgtcaaaagcctcttacaagggggctcccagcatatctcaaaatcttccataactcttacccccgtcccctgcagccaaatgaccctgtgactaacatctgtcaggcagctgacaaacagctattcacgcttgttgagtgggcgaagaggatcccacacttttcctccttgcctctggatgatcaggtcatattgctgcgggcaggtcagtgaccttggatccctttgacttcttgacatttgacccctctttgacttcccgatctttagtgaccccagtggccttaccttgcgtacccagggagccaaacttgctgacctcgccacctcttttctccttctcttccactgatgtgctttgaatcccttggcctgatttctggctcctgacccttgctgccccacccaggctggaatgaactcctcattgcctccttctcacaccgatccattgatgttcgagatggcatcctccttgccacaggtcttcacgtgcaccgcaactcagcccattcagcaggagtaggagccatctttgatcggtcagtggccctcggctaggctggcatgtagatagagggggtggggctataggctggtccgtgtccaaggctggctgagctgtgacctttgagtgacctgcaggtccctctccagggtgctgacagagctagtgtccaaaatgcgtgacatgaggatggacaagacagagcttggctgcctgagggcaatcattctgtttaatccaggtaagaggaggattacctttgtctctcaaggccaaggcaaccttggagcctcctcttctccgagactcctaagttacccagctatccccctcagtaagaccctcaacctggaaatctcccaactggccgaggaaaaacccacatccacggatccatcccacaaacccagtgggccctgcttcccttgccaggcctctggtaaagggcaagcaagtgcagcccaaaaggggcatcctgtggctcacatctgcatggccatcctgatttggtttgtcttcatttctcttcctcctctcttccctgccatcccagatgccaagggcctctccaaccctagtgaggtggaggtcctgcgggagaaagtgtatgcatcactggagacctactgcaaacagaagtaccctgagcagcagggacggtgagatggggctggggggcactgaggctcccttgggggtggggagtgctatgaggatgtgttcagggcccgtgtgcttccagctctcaatccccttctcccacctccaccccaggtttgccaagctgctgctacgtcttcctgccctccggtccattggccttaagtgtctagagcatctgtttttcttcaagctcattggtgacacccccatcgacaccttcctcatggagatgcttgaggctccccatcaactggcctgagctcagacccagacgtggtgcttctcacactggaggagcacacatccaagagggactccaagccctggggcagggtggggggccatgttcccagaaccttgatggggtgagaagtacagggcagaaccaagaacataaaccctccaagggatctgcttgatatcccaagttggaagggaccccagatacctgtgaggactggttgtctctcttcggtggccttgagtctctgaatttgtcgggttctcccatgatttggggtgatttctcaccctctgtccttcccccagcacaaagcactggccttgcctccaggaccttgcttccttctcatcttgcctcattttgcttcccatctgaagagtggaaatggggaactcccccagaggtggatactggggggcaggcctcccaagctgatggacatgagagtagggccctgacaggccttcctcctctcaaacctggcagatgggggcctctctggaagagggaggggccctgtcactgtccagagtctctttttacacttcacctccttctgcagtcagactgaaatataaaaaaggtggtggtggtggtgaaggggctggtggagatgtaggaaccgatctgctatttttaatttcctgtgaggatagagacttgcagttagactcaaagaagtactgtactttcccaggttgactaagaaatgccagtggtggaggtgggtgtttgggaaaggcagggccctgaaatggcctgtccctagggctctccaagcactagccttcccagcttcccgccgccccccctatctcttcctgtctaacttggggaaggggcctgggctgtgaggacagggcccccacaggggatggtttcacgagtgtagtcccggaggccttccctttacagctctcctccagccctgggcacatagcataggctggggacacaggatcctggcctgagaattgaggggaggtggccagcccgcagaggtggggtgctggggctgcatgatttttgccctgcgtcccttctctttggggctcctttcccctctcatacataaaatcgctttcaaattaaaatcgctgttttctggactgaggtgactgtatgaggatgggcagcgccgtttcgggcttggggggggtatccggttgggagctccggacgcgatccctggacgccgccgccgaggttccgtggggcccaagaggtgcacgcagggtgggggacacaaggcaagctttgtcggggagggggggagagggtgtgccaggctgggggcggggccggccggaggaggaagggggggcggtggattctcaaaggcgccttgttcgctcgtgccctctccgcgccagcgggcggcggcgcctcggctcgctgcggccttccctccgggcgcgctgcgggctccgggcagacccggcgccgtgcccgctcgtgggggcgcactgggcgccgagcgctgcgtgcttctcaggcgttgcccgcccggaggcggcccacgtccccgagtgaccccatttccctggacccttccaaccagagtcgactgctcgctcatcttaccactgctccccctctacctcggctctgggactccctaaccgcgtcccccatttgcatctccttggacctgactatcctgtgtttgtcggtgggtcccagtctctggcctcttgctctccgtagaacaccttcccccacatcccccgccccagttcgtcgctatctatagccttgtctataaatacccccgccccggcccggctctgtaattacacggggcggggtgagggaagtaattatggagacctgattatgggtggggtggggactgcgacccccaggcccgcctctccccctcccactgtgccctaaatcccgcccaggcctctgctgaaagggggctctgggcccccaagagggagggaatgggagggagtgtgtgtgactggacgtttgggtcctagaaaaggaaggggctagggaagatattggggttcccgaaaagagaatcttagggtacaggccgttgagacctacaaggggcaggagagagcgagcgatagagggagggttcccgcctccctccccaggtggagactgagggtggggtttcccttcggtggctgtgggcgggcggctggaggcgggggccgggccgggggcgggggcgaggtgggggctctgggcgccagggtggccggggacacacagaagcggcagccaccgaggagggagcagtgccgggagccccgacggcgccttgctgcatggagctgggccgctgacagctgtcgctgcccgcagcctctgacctccctgggaccccggcgtctgaggctcatagtctgctccctgtcttctgtcagcctcagggcatccagcgtctcaggccgacctgggtccctgggacccggcgtttcggcttctcagccatggagcggtgcagccgctgccatcgcctcctcctcctcctacctctggtgctggggctgagcgcggccccaggctgggcaggtaagaggagtcctgatgcctgggtcctcggagtcaggctggagctctgagtgtctctgggaaggggccagctgatgcctggggcagcagcttctgagtctaacaaggagatttggggcttcaaggctacaggctggagggcaggacacctgtgttccttggcatcagggtaggaatctctttgtccttgaagtgactgggggagggcagatagggctgaaaggtggaggaccactttagagaccctgaatggggatggatgcttgtcttgagtccttgggaagagctgaagatggccagggccagcccggtccagtcattgctggtgtggggatggtagacgccaatgttgatgggtgaggcgtgtgtgtcttatggcctttctgtcgatatctctgggataaggggtgagcacctgtgattcagagcagagcccagtaagcccagaaagaaaggaagccttgactacctgtctcattggcctcctggacagggtccccctccccctccctgtgccctcgatgctgccacgcagctggctctggggagcactggggctggctgccaacaggacggccctccggacaggccaggatcaggtgtctgaggccagagccaactctttgcattcctgcctagcccctcctccctctggccagccaggctcccctgggaccctggtgcccacaaccctgatcttttccttctttttcccaggacccagaattcctggcttctaggaaaggggatttgatgtcaaggagggggctgtgagcaccaggtcctcagcaggctggaaaaagcccatttctggagacactgagggctgatttatatttaacttgactattcaattcttctctgctttagagagaaaatggtcagaatggcagcacaaaagatttagattagattacagaaggaagaacttccaagatgtgaggacagtgaagcccagggccaggaaattgaggcgtatggtgcctgtagactctaggagtctttcttagggggaagagggatcctctggcatggaggcagggggatggctaagatgactgtttcttatttcaggggctgagtgggtagagatgggactttagggaaatgagttactgtagaattcctaaggttagagaataaggcatttggggggccagaggtagagtggtggagggtaatggggctaccagtggagagcctgtggggcagatgaggctggatacaggggggcaagtatgtggcctggtgtgggaagatggtgggcggacctgtgggtaggttgtccatatgatcgaattgtactcccttgggatttggtggagggtggggacctccgaggtctccttggcctggggtctctgtgagtctctgtgtctctgtctcactcacccttcgtctctcaaagcggcccttgtgtgttggtgtttgcggagctgccacacgcgcaggggccaggcttaggtgggggttgggggggaaggccgtggtttcccggctcctggactcaaagggccttttctctgcctgcccgccccacctcacccaccccacccagctccactctcctgattgctctggcctctgccctgccccacacttctatgaaagttttgctggaactctctttgggatttttccaatctggagctgatggtgtgaagagtatgtgtataggggagcaagtgagggcaaggtgatcttttgttttccagggagtttgagccctaggaagctgagttctagttagacagggctggtgggctggatcttgaatctttgggtcccaggtggtggggttggtgggggtggtgagacaggattgaggttccaggtgtggggagcttgcctgggttctgggcaagcactctgatgggatccacagatgtgtggctcagggccctggacctgttccggctcctcgtggcagcttcagcccctgccccccattcctccacccctccccaactcatctcctaaaccaggaggcacagactcctgggagagctttcttgtatctttttcctcagcatgctcagggttgttcccaccccatcccccaaacctgggatctgtagctgcttgaagcccctctcatagagctgcttctctgatctcttcctcgtggcccccctgcacctcctgtgtccaggatgatcgattgcccagatgttgtttgtgctggagacgggacagatgccagagacccagagagtgagagatatggaaagagagtgagagcgagggagagaaaaagatggacagaatgtgagagaaatggaggaagacagaagagacagagacagaaagaccaacataaagagacagagagagtaagagagtgagagagacaggagacagatgaagagttgagagaagtattcagagagtacagagagagacagattcataagctaaaagacaaagagagagcgtaagagaggcagatgctaggagagacaggggcaggagtgtcatggggttgaatgccagctgatgctgccctgcctccaggtacctttgcatttcccatccattcaggtactgttcagaagcaagtgagggtgaggtgacctttcccttgcagggagtttgagccctggaaagctgagttctagatcccaaatgtcccctatttatgccctcctgagggcatgtcccttctcctgataatcatggactctcccaggtgcaccccctgtggatgtgctccgggccctgaggttcccctccctccctgatggtgtccggagagcgaaaggcatctgtccagctgatgtggcctaccgagtggcacgacctgcccagctcagtgcacccactcgccagcttttcccaggtatgggtgacatggtggggtaggcctggggggaggtaatgggatggggcctaggatcagacaccaggaggaaaggggttgtggcggctccctttgcctctcactctgtgtgtatctctctcggttactaggaggatttcccaaagatttctctctgctgactgttgtccggacccgccctggtctccaagctcccctcctgactctctacagtgcccagggtgtccgacagctgggcctggagctgggccgacctgtccgcttcctgtatgaagaccagactgggcggcctcaacctccctctcagccagtcttccgaggcctcagcctagcagatggcaagtaagtttgtttgctcctctggtctgcctggcccacactttcaggaggaagtgcccccaaacccctacactctaaactgtgaaacccttgagaccctttgggccacaccacacctacccactgcccaaacttcagtcacttctagtccagagtttgggctttagagtgtacagccttctctgcatgttgaactagcctgtaccttgggcaagttacttaaaatttttgagcctcagtttctacatctgtaaaatagacattaaatagaattggcacaaataagaaagtgacggcatggtgtctggtgcactgtaaacactcaataaatggtagccattgttattactgctcttatcaccattggcttcaactcttatcactgctctccaaccatgttgactcccctacttcagtcagccaagagttcacttgaacctcttccaccatttccaggtggcaccgtgtggctgtggctgtgaagggccagtctgtcaccctcattgttgactgcaagaagcgagtcacccggcctctcccccgaagtgctcgtccagtattggacacccatggagtgatcatctttggtgcccgtattctggatgaagaagtctttgaggtaaccagagcaatcagaggcaggattgacttctggtcccctatcttgtgcccactacccttctggccccagcatgtcatcttcctattccctaggccttcatttttttttcttatgaattttcatttctattttctatcttcagggctactgttctctgcaggagaactagatgcctacctatatggcaggactgtccacagccacttactctgtccttcagtcttcatcagttccctcatccatccatcctttcaacccctctctctcctcacccacccatcaattcactcactcctcagccaacctatgcacacatccaccacccactcccccatctatttactcatctatgcatcacacgcccacctagtcatgcatgaaggcttatatccacccacctgtcaatcctccccctgcttaaccactctccccttcaaaccacccatctatgcttccacccatctatcctcttcaactcctccatccagctattcactcacccacccaccctccccatctacccatgcacacaaggatgcatgcatccattcagccaccatctatccattatccttccaccaactcaaccactccctccttcaatatactcactcacccatctcctgacccacttacttcccatccgaccagtcattcacccacataagttcacccatctacctattcacccatttgcttccatctactctgtaacccctgttcatctgcccaccagtccaccctcccatacgtacatttattcattcactatttatcaatgctcccattcattaatgcatgtaagcccccagccacccatccactcatctatccattcatccatccctccattcacccatccctccattcaccctccaagccagtcaacattttctgaatacctgctggacaaggagaacaaagaagagaatataaagtctctatcacccccaagagctcccaggtgggctctggaaatgagacaacatccctaaattacggtgcaatggagagtatgctaagcaccatgtgtgggcaaaagtaaatgccattggaactcaggaatgggttctccccactccatttctagaggtccagagaattctcatcatcactgccattggaaggccaaggcatctaaagctgagccctgtctctggaagccactgtggaagggctcatgcattgccacaaagcgcagaggggaggcaaagaattctggaaggcctgggatctggtcctgattctgccactctgggtgaccttggggcagtcattgcctttttgggcttttctgaatggaacgtatctgaaaaatgggtagaaagaaagatccttgttctgccaactttcctggttgttatgaaggtcctatgagatcccttgaaaactgaaaagggctatgcatatggaggactgacagtgaccttctcccatcttagggttttacctaggattggcctcctatactctttctcccggatgataccctctgcctctctctgaatctctccgctccatctctctcatgtctttgcagggtgatgtccaggagctggccattgtcccaggggtccaggcagcctatgaatcatgtgaacagaaggagctggaatgcgaggggggccagagggaaagaccccaaaaccaacagcctcacagagcccagagatctccacagcagcaaccatcaagacttcacaggccacaaaatcaggaaccccagagccaggtgagggagctgggagaacccccaagtgcagcacaccccagagagggaagacacccaggcatctctcctccttagttgtcctccccaccctcatctccctattcccatcaccccctcctcctagtcctcattcatcagcctttttattttcatctaaaaataaaaagagttgttatgaagaatttgtggctgggagctgtgttccctgctctgcgtctcctcttccagtcttcctggaactgtgtccctgggttttcccttccttctttgaattaagagattgggagacagtgggagaggggtgagagctggggaggcaggtaggagaggggactgaagccaggagaaagcagtcgggatggtgagaccaaggaggaggaatgggaaggagtagggatggagggaatatcaaaggaggggtgggtctgcagaagtgtgggagtggggaacccagtctctggcccccacctacctggaggggcaggaaaaggggaggtagtagggggaagggaagggaagggaagggaagggagcctgggttggatggggtctggagagttagaatacagataggctctggggtcagtggtctaaagatcagagggtcaatctcttaatcatgtctgcttctgccccacatgtggaaccccttccctctgttccacctctccccacctccctcctgaccctcaacctctcctttcatcttcaactctctgtttcccaactccacacctcccccgtttcccaactcccacaccatctttatatctccctctcccgcccttcaccccacaccttccaattaccccatccccttcctgtctatgcccaccccccaatcccagcccactgagtctctctactatgactacgagcccccctattatgatgtgatgactacggggacaacccctgattatcaggtaaactcaagggaccccttcatttcttccctttctcccagcacccccagcaatcatctcctaggacaccttcctcccctcccccatgccgtggggagaggcacagtgtgtttagattatggggatttacttagttcctgccccctccctgtctctctgctgcagcgccctgggagcccccaccacaggcctcccccttcccctagggggcatcggacccctccctgaaagcctaccccacctgccaagaggtcaatgacctggcaggcgtccccctcaccaggccggaggccctctccaactgcaggctttgacccagcatgggagcagcctcccctttcccgatgcccagctcggagggcagcttcccccactgcctggccccgccccaggaccagaggcagcagttaccggcaggtagagccggggcatccagatctctgcccccaaacctctatgaccttggaggttcactctccccaaactatccccctccaaaggggctgcaagatctgagatttcccccatcccccagcacagacagaccctgccctcgggggacaggtgctgctttgcctcccttctgctaacctttctccttccttcccaccccgtgctactcttctccttctctccttggggtcaggaccccaccccaggtgaagaggaagaaatcctggagtcgagcctcttgccaccccttgaggaggtaactctatgccccaccctcaccccatctgggggcagtgggcacctgtgactcactcccctcagcccatgacgtcttgatggaccagcccctcctctggccggagggttcttcctcatttccatcgatggcctctgtctttgggtcactctagaactatgggcctgcttgactctctaagtccagcccgttcccttcagtatccaggcctccttccatgattctttgattcctgagtgacttcgtctccatgttggtgtctaatggtcttactttctatgtcctatttctgttcccgggagccactttctgtccagtgttgtcaccttttgtcttccctatctctttggtcattcctggactcctttgtctgtcattgtgtccatggactgtccactctgcatccagtcctctggccacccttcattttatccaccacttcttcccactggacccactttctggacatctctccccatttttggcctttgatggcccttccatttatatacaaccactcccatggctattcttgggagaaaaaatccagttctgattaaccttggaatcctttgggctagaagttgtcacaccctggggtccagggtaagcctcctctcagccctaacatccccatctacccctctccctccccatccctgggaaggagcagacagatctccaggtcccccccacagccgacaggttccaggcagaggaatatggggagggtggcacagacccccctgaagggccctacgattacacctatggctatggggatgattatcgtgaggagacagagcttggccctgccctctctgcggagacagcccactcaggagccgtaagtgaaaggagcttctctttcattcttgactaccagtgggagctacaagaattgcttcttgttggtttcgatccttggctgttggctgtgagctatttcccatctgtgacttgtcattttctgttcacatatgatgtatatgttgcttgaaaagattactacctgccttcctttgccaaatgtcttaccttgtgactcttgtggatacttctgaagctcagggcaattgggaattaaaaaaaaaaaatatgtagccacttcctgtctttcttgatcacttcctgtctaactgaagctggatttcataaagcttttggtcaataaactactaccttgtgtccattttcagtgtttctctatcatttcttcttggtgaaataattttttgttcatgtttctaccaaacgatctaacttcctatgtcacctttttttaacctacaggccacttattatctgtcccttcctgccttctccagctgtggcatccatcttggtaactgtgtcaggttggactgcaaaggatttattatttctgttctggctctagtttttcatgctatcttgtgacaatttcctttgacaataagccacttcctgtatgtctcaggtcatttaaatcataaagtttccattgtgggcctcgatatttctcatggctacttcctgtgtgtcctagccttgatgtttgtgttttctggaagaattacccttcactgtcatgattccctttgcaggagtcacattctacctgttttgtgcctttcttttctctctgggtcacggtagccatgttgttgttgaaggttcacttcctggatcctctttccttcactgcttcctgtctgttcagccacttcctgtttgtccagtttgttttctagccatgttggccatgtttaattttcttcggccctggcatcattcttgcttccaagtgtttgtcattttgttctgtgtcccttagttgttctcatatcttccagtattccctgtcagtgggactgcttcctgtctactccgctccgtcttctgcctgccttgcagttctggctgcctcctctaccctgctgccgcatcccatacctcccctctcttgcctcccttgagcttctactgcctttcctttatgctgctctctgggtatttggggttgatatgggatttcagagaattttgaaacggatcattgctgtttggtcagaatgaaggtggagaggggcattctgaagatctttgttggggggagttggggtggtggtgaatgtctcccattctccatgttcttattttgtttctggccctagagttgggaacaggtatctgagtggaggtgtgcaagggagggaactggtgggcttggaatgtacttgagggccagaggaagggcaatgcattcagtggggactgctctccaattttttttttttttgaggcagggtctcactctgtcacccaggttggagtgcagtggcaggatcttggcttactgcaacctctgcctcctgggttcaagcgatcctcctgcctcagcctcccgagtagctggggttacaggcatgtgccactgcgcccggctattttttgtatttttagtagagacggggtttcacatgttggccaggctggtctcaaactactgacctcaaataagctgcctgtttcggccccacaaagtgctgggattacaggcgtgcgccaccgtgcctggcctccaaatttacttagagtatggatgcttaacctttggggcatatttaaacttgtgaaccctttgaaatcctaaataaaattctgtgcataatagcatatactttttcatttctggagaaagactcacagctttcatcagattcttttttttctttgagatggagttttgctcttgttgcctaggctggagtacgatggcataatcttggttcacttcaacctccacctcctgggttcaagctattctcctgcttcagcctcccaagtagctgggattacaggcatgtgccaccacacccagctaattttgtatttttattagagacggggttgcaccatgttggtcaggctggtctcaaactcctgacctcaggtgatctgcctgcctccgcctcccaaagtgctgggattatgggcgtaagccacctcgcccggcctagcttttatcaggttctcatgtgggtccatgccctcctcttaccccaaataaaaatctacccacaatcttagagagattcttttatgatgtattggggtaaatgtgtggaaggtttcttaaggttctagggagggagtttgggagatgggatagggtcctctagaagagggtttgggaaggtgggtggtttaaaatccctgaaaggggccaggtgtggtggctcacgcctgtaattccagcactttaggaggccaaggcaggcggatcacctgaggtcaggactttgagaccagcctggccaacacggtgaaaccccatctctaataaaaatacaaaaattagccgggcatggtggtgcacatctgtaatcccagtgtaatcccagctacttgggaggctgaggcaggagaatcacttgaacctggaaggcagaggttgtagtgagccgagatcgcgccactatacttcagcctgggtgacagagcaagacttcgtctcaaaaaaaaagaaaaacaaacaaacaaacaaaaacactggaagtttctggggaccttcctgaaagaggctctcagggagatggagaggttgtgtttgctgaggtggggctgggaactgggggggcagggaaccctgaggtctccttggcaggcttgaaaggtttgtgaagagggagttttaggggagggctgtggggctttcgggtagggctgaagtggtctcgagaggatctaagaatcaaggttggagttgagatggagaaaggcctagtgtcctggctgctcacgggccccactgggggctacatgtgtgtctccttcaggctgcccatggaccccgagggctgaagggagagaaaggagagcctgcagtgttggaacctgtaagttatgctggtcacagggctgaggcagtggaaataggagaagcaagtggggttgagtgtgctggtcctgtcgcctctgatttttaacctttgactccacagggtatgctcgtggaggggccccctggcccagaaggccctgcggtaagtctagcagtgacctggtggccattcttttcttagaaaccccttctatgtgctcatctgagccttccccacatatgcccaggcctcctcctcagaactcgggagcatccctccaatcaacgcttcccagattcccagatctgttctgcacagaccactcctcagccacaggctgagtgtccacacctgtctgaatgcccacacctgacccctactcttttgttcctcagggattgattggtccccctggcatccaggggaacccaggcccagttggagaccctggagagagggtaagggggtgtcctccatgtgacgggggagcttcgggggagctagtggtatccaagcggggggctaccatgcccagtaatttcctgttaggtggcttgttaatgaatgaggggatggttgtgcttcccagcaaccagaaaggagggcagactctggttggggagggtgctgatctggtttctcaccctcaattttccccatgggggtgggagactcaggaaagagctagagcaatctacacttattctgttgaagaggatatttcaaaatcatgctaagatcttgatgtccccttatctttcaccccatcttttgcattctcttcccactccagggcccccctggccgagcagggctccctggatcagatggggctcctggtcctcctggcacatctctcatgctcccagtgagttgtctcttgggttttggaacatgctgatggggaagacaaggaattgtgtcatgttaccaagaaccagatgggcaggaaagatatggaggagtctctaaagatcatcaaagatcatcactccaaagggattcgtctttggggttggggagatggggcctcattaggtgacctagaacaaaacaccagtcttctaggactgggcagaacagcctatatttcaggagctctagaaccaaaagagagtctttctggaggcagaggctggacagtggaggagggcaggagttgagtttctggaatcctctaagtgattatctggaagccatgggaaatgctggatgggcagaacctggggcaaggggcagaaacgctggagaaagcctctggctgggagggtcccatggctttcttggaagagaacctggaccttctctccttgccctcagttccggtttggcagtggtgggggtgacaagggccctgtggtggcggcccaggaggctcaggcccaggcgatcctgcagcaggcgagggtgagtggggctgcttccctggaaagggaaggctctggggggcactggaagggttggctggagtgagtgtgcggcaggggaggcctgggttggtttggggttaacagggaggttggggagaatcctgggcagtggatgaggatcaggagaggaagggtgaatttggagagtgctggggctgggggttcccactgcctgtccctcagctctgctgtccccctgctcccctagctggcgctccgtggaccccctggccccatgggatacacagggcgccctggacccttggtgagtgagcagggtgctcgggtggaggatgctttaattgtgtgtggggtgtggatagttctggaaaggggcttcttttggggaacactccgaggccactgttggctgtgtccttccttacggccatcctctcttctctctcccagggccaacctgggagccctggcctgaaaggagagtctggagacttaggacctcaggtgaccactttcctccactgcacccccatatctgttcaccagctcagtctccctcactcccctccctatgcctcctaaccccaccccatctctcctctcaccagggccccagaggacctcagggcctcacaggccctcctggcaaggctgggcgaagggtgagtgccccaggggtggatgggtgttgtggggagacagggcctgcagggtaggggactgcggccctgcttgttctgacacttcccttgttctcccagggccgggcaggtgctgatggagcccgagggatgcctggagatcctggagtgaaggtaacaggcttgggcccctccctgaagcctgtagccttcagcccacgctgggctcagttgtttcttggggatgacctagttctccaggcttccccaggatcagcacccccccagctcagggtgcagtagggaggggtgggcttggacagggtcgtgtcctcactctggctatccttcctcctcctagggtgaccgaggttttgatggactcccagggctccctggagagaagggccatagggtgagtacattagtgggtgtgtgttgtaattggggatagatcttctatgggagtgaggataggtagggaagggaggctggaggcttggcaggagctcagtgaaagtaatggatgggctaagtgcagaggttcggtgtctgcctgtgttgggggctctgaagcccctcttatgagttcccccattttgcagggtgatactggtgcccagggccttcctggtccccctggtgaggatggagagagggtaagtgtagtggcaaatgtaggggctgggtgcaggggaggtctagaaggcacagcagctttaccgtgtcctcctcctccagggagatgacggggagattgggcctcgagggctgcctggagagtcggtgagtgtccaagggctggtgctgggggagggggctctggggaagccaggagggggacatgagcactaaagggacacagttttatccattcatgccgtctcctcccctcaccgtgaatgcagggacctcgaggtctccttggccccaaaggcccacctggtattcctggaccccctgtaagtgactccctgacttctgaccctgaggtgaccccttgacctctccaactctccacctttctagctgccttcctgctccctctcctctctcggcatgcttcccattccctgtgagctccccctgctctggccccacactgccctgcctcagcattcgctccccgtgcacagggagggccatgtggcgtggtgccctgagggctctgggcataggaaataaatcttcaagaaaaacaaaaccaaagcccacaagcccacagatccacagtcccacacactgcaggcctgggccagctgtgtttgcttgggtttgggatggattggaggtctgaccgtcacaccctcgggaatggccgggcctctgaaaaccacaggtccctccgggccaccttcaggctgctcacacccatcttgtgtttcagggcgtccgaggcatggatggtccccagggccccaaagggagcttggtgagtgatggataggagatcccacccccattcttatcccccgaggtccctgccagcatcctgttggccgccattttgacccctgcctgcttcctgctcttgccttcttggctatcgctgctgggactcagctccatgctctaaatgtgttctatctccatctccttctgacctgtgcctggtcacctgtttctagggaccccagggagagccaggacctcctggacaacagggcacccctgggacccaggtgagcggtgcccctactccgttccccaattttcatgacttcccttgggcttccacaatgggtgagaccctggaaggatacaggaaattaagggtttcaggcccttgttgctcatgctttgaatccgggaggctggatagaagagaccctgggaggcccctgtgacttctctttccctgtatgtagggtcttcccgggccccagggtgccatcggccctcatggagagaaggtaagtgactaagtgatttggaggacagggggtttagagtggggatgtagggagaaccctaaatgtctgctgggattttgtctgtgtccagacatgacccctctagtgaccctgagcctctttgtcttcctgcagggtcctcaagggaagccagggctccccggcatgcctggctcagacggacccccggtgagtgggaccccacttccgaatccagttccccttggccttccaccccagtgcatgacctcagagctcctttagtgacccttgcactgaaaggtcactggtggtgcttgtccatggacagttggcttcactaggtcacaggaaatttgggttggaagaagtgtagggaggggtgcagagagggtgacaggggccactggtcacattttctatcccttactcccagggtcacccagggaaggaaggtccccctggaaccaaaggaaaccaggtgagatcttccatgtctttatcccctgagggagtctccactcagactctagagcctcaaagtccttgggattcccttgtctcattattcatatggctctgccacattctcaattcctgtgccccgtaaccctacccagacagcaatgttgttacttccatttcttccacccctggaggcccccacagtgacactctgaggcccctttataaatgcctctcttttatcttccagggtccctctggacctcagggacctctaggatacccaggacctcgaggggtcaaggtaactgaccaccaggctgggagacaaagggctgtggtcaggggagctatatggggtcttaggagcttggtccttccaacccacctccatcccctgatcagtctacttctatcccctctctaattctagggtgtggacggaattcggggtctgaagggtcataagggtgagaaggtgagcaccatgcccccagcttcccagcacctcagtcctgccatctcctctcttcactgccttccctccagcctgccccgcactgccgtccagctcccgagcccctgcttccacctatgttctcagaattcccattagaaccccagccctctgtcatctgtggtgccctctcacctctatctttctcagggtgaggatggctttcctgggttcaaaggtgacataggcgtgaaaggtgacagggtgagtagagaccccacactggccccaattccgtgttctactgagcctccactctggagacgccaagcaccggtttattctcctgagtctccagactccacagttccagtgctgtgttcccttgggagcctgacccctacaggatgatagccccatggtctgtgtcatgcctgccctcccatcactacactatccctaccctgtgggcttcctgtcctgcagtggctcctgggacccctctagccctcctcagcctcactgttgcccatttctcctctgggcccagagcccacctccagtccccagcactcacctgtccttccctctcacacagggcgaagttggagtccctggttccaggggagaggatggtcctgaggggccaaagggacgcactggaccgactggagaccctgggcccccagggctcatgggcgagaaggtgatgggatgagggttctgtgcctgggtcctctgggggtgtgggcactggggtcaggatgggcatgggtgcccgccgctgaagtcagccagtcagttgaagatggccatgcattagtcatacttctgtctgtgtaaatggcatctctcagctgctgatgggcagaggggatatataagaagtcagggaaaagtccctgacacgaagagttggacggagacgaagcttagagagtagctgttgcttcaaggcagagtgaacatgcgttcggactccaagcagcaggagttctgagatgagagagtctaatagcagtgaggtctgtggtctccagagctgactctccccagcacttgccctgtgccaggtgctgtgctgatgcgtcctatctatcctatgaggtaggcatgtgacgtactgttttgctgaggttttacagaggcacagggatgcttgttgattacatggccagtgaagggcagagccaggggttatgcccaggcagtctggcttcagaatctctgcttctaagccctgctctgcagctgcctgggcaggatgagccctggagcctctggggaagggggcatgcacgggagtcggggtgtggtgggcaaagggcctgcagggggattggtcttggtgaagcaggagtgggtgctggggtagatcccacctccctcatggggtagatggagctgaggttgacatgtgggaagcagctagatcacagtgaccctgaaggacctgatacctctgtaggcgcaggggaggtgggatcccagcactagaattggggaaaatccactcacgggaaggagagacaacaaaagtcaggcagctgtggggcaagcaatgaggggctagaggctggggtgtgtggggtgtgttgctgggtgggggctggctgttatatgtgagggttgaggtctccaggggtggagtggcatctgggcctcctctcactcctaactgcttcctgtccctccacagggcaagctgggtgttcctggtctgcctggctatcctggacgtcagggacccaaggtgatgccatgccccatacgtgcccctcctcctcttccctcctcctcttcgcttccctgatccctgattccagaaagcacagatgcagggcagtgggggaccccagagggaatttagctgacccccattttacagatgaccgaaagaggcccagagagcagcaggggtttgtccaaggccacttagttcttggcagagctcgggtctccctggccactgcctttgtggcctctcctgaccccctttgccccttcctgaaccctacctttcataacttctcaatttccccccttctccgttctcaccaggggtccctaggatttcctggctttcctggtgccagtggagagaagggagcccgggtaagctggggggtgggagggcgtgagaagggaagggctggagaggtgtagagggggtctgtggggagtctcaccctgggtaatgttctctctgcttcattcccaccagggcctgtcggggaagtcagggcctcggggagaacggggccccacggtgagtgcaggggagagaaacaggtggctcaaggtccagaggggggcatttgggtttctctgacaactcctcttccctctgtagggtccacggggtcagcggggaccccgaggtgccactgggaagtctggagctaaggtgaatggtctctacaaggctccaactgccccctgcccactcagccccagctctccctcaacatcctgacctcggggacagctggaaagcagctcttcccactccttgactctgtttccccccacagggaacatctggtggtgatggcccccatgggccccctggagagagggtgagtgtggatcgaaagtccccttcccctgaggtccccagggagcctgggtgagccagctccctcctcaccccaggaaggaagctgagttcccccactcagcccctgcccccattctcctgactccccccacctctgtctctagggcctccctggacctcagggtcccaacgggtttcctggaccgaaaggacccccggtaagttgaccccgagctctgacccacctcgcttctctgagtccttcttccctacctgctttccagctgagagttcacctgacaactgaaccccttccagggcccccctgggaaggatgggctgccgggacacccaggccaaagaggagaagtggtgagtgatgctcctggctacccattctcagggggctccatcagaccctttaaccccagagctgtctggaaagcccacagggacgttctcctggcagagtggagcctgccctggtgctgctcagacccagggcccagggcttggtgtgatcctgcctgggatccttcctcctgggaatctgccccacagcgcccacacctgctttcactgcattctcctctcttcctcgcctagggtttccaagggaagaccggcccccctggtcctccaggagtggtgggacctcaggtaggtttgtccctaggagagaatggacccctgaccctagcattagtctgtctgcccctcttctctcggtcacacgcccctgccccggtccacctgacccagactcctggggctggggtcaatggtgggggctgggatttcaggcaggggtcctgaacttcagtctgttttggggcgcattctcatcgtcttgtcccccaggagaggcagttccccaacagagacacaaggtggtgtagttactccacatggggcaggagaaaacccagcagtggcccaggaatgccggggaatttcccaggagctttggggcagggataaaggggttctgaaggagtgttttagggtggccagggtgggctcttctggcagacagcgagatgaagggcctgagagcaggaactctctctgcttttgtctagggagcagcaggagaaaccggccctatgggggagagaggtcacccaggccccccggggccccctggagagcagggactacctgggacagctggaaaagaaggaacaaaggtcagtgaggggccaggcagaggggaagtgggggagctggggattggggtgctgaaaggaacaggtagttggagatttgagggggggctggagagctctctgtttaatttgggagcatggctgtggctcatcacctctcctttccttttagggtgaccctggtccccctggggccccagggaaggatggtcctgctggtctgaggggattcccaggagagagaggcctcccaggcactgctgtgagtgtgactcccagacccctgcctgtcacaagcaccaagcatcctgagtccccaccccgaccctgtccctgaccccctccatgtcactccccacttccatcttttggagcctgtcttccctctccagctctcacccttctcttttcgtgaagtctcatcttccccaaatgtctggttcatagggtggacctggtttgaaggggaatgaaggtccgtctggcccccctggccctgcagtgagtctggggttccggaagtggtaggaaggacccgggaaaggggtgggtgaggaagggtgggagtggcattctgataccaccaggggctgtggggctgggcagaggctgtccagggacagccagaatgcatctgattttgggagcttttgggaattgtggtctgaggttctctggtatgggcgggctggtgtctccttcctgggggtctgaccatctgctttctcagggctcccctggggaacgaggtgcagcaggatcagggggacccattggtccgccagggcgcccaggcccgcagggtccccctggagcagcaggagagaaaggtgtcccagtgagtgtgggggtattggggaggggtactggggaggggtctgtgagcctagggttgatgggctatgacaagtttcctgtggggtgtttgagggtgagggtcacctccaggccatgactccttcctcctgtcccacagggtgagaagggccccattggcccgactggccgagatggagtgcagggtcctgtggggcttcctggtcctgctgggcctccaggtgtggctggagaggatggagacaaggtgaggggaccccacagaccccgaccaatcttctttccagatgagatggctgacctgggcatgacccctggcccctgtcatgtcatccttcccactctacccatcacctttctctaatatcttgtctgccttctcctcccagggtgaggtgggggaccccggacagaagggcaccaaagggaacaagggtgaacatgtaagtgtccatgaccttgacttctgacctcctggcctttaacctcagtcccacctgatctctctccctgttttggtgtctctgactctcttctcttacccagggccctcctggaccccctggacccattggtcctgtggggcagcctggagcagcggtgagtgacccctccacccccaccgaaggcccagcagcctctggtcctccctcagctcccctctgcccttgtggctgggagtgggagcaggggctctgggcctggcacccagctgtgtgtggtatttgtggatagagaacacctgacccatgacccatccctgtgtccttgtctctgctttccctcaaccctgcagggagcagatggggagcccggagctcggggaccccagggacactttggagccaaaggtgatgaaggaacaagaggattcaatgggcccccaggacccattggcctacaggtgtgttgggggataggacaggggctgagaggtggggtcaggatggggtgatgttttgccccagactctgccagcagcctgccgatgcagactggagggcctgcggagtctgaggggaggggactgtggggcctatctgcctagggctgtgctttgggtggggtcgtcacctgggcccatgttttgtatacttgcacagggtttgccaggcccctctggggagaagggagaaacaggagatgtgggtcctatggtgagtgtgacccctactgaccctagccaccatactagtcacccccctccctggccagcccccaccccacaccccactgccaactccctggcctggctgctcctcctcctctctccaccattcatgctcagccatctcacttcccttcctcatctgtggtgtatctgtttcccccagggaccacctggccccccaggacctcgaggtccagctggacccaatggcgctgatgtgagtcatctcagcccctgtcccttgagaccaatgtgtctggtcttctgcctccctttcccagaccataaactctagtatcgtctcaggggccaagagaagcccttactcccgggaggcctccactgcctcactgctgtaaccttgggctgctcatctgggactttgcccctgaaatggcacctccatcctaagcaatgacacctatttctgttcctcttccagggcccacaaggtcccccaggaggtgttgggaacctgggtccccctggagagaaggtaactgggaagggggtgagtggaccagtcatggaagtgggggatgggagttggatttctgccaattttgggtggggagacaaaagagaatgagatgtggggaatatcagaattttttggctggggaaggagaggaggtttttgactctaatctctttgcagggggaaccaggagagtcaggatctccagggatccagggcgagccaggtgtcaaggtgagtgacagctccaaggccttactccccagtccccgtcacccgcctcaaccctgcctccacttttcctgtgacctccttgagctggaactcctctgcagcaagagtctctgctccctgccatcctctatgaggcctgatccctggtctgagtgagcccttcttcccctttcttgaagggaaggggactagggaactccccttgtaggcttgactttctgtgtatgtcccattgtcactgaggggagtaggggatggctgaaggtgtctcggaagcagaggctgcatccctgatcttcaagattccctgggccatctgtgtcctccgcttgttctgcagggtccacgcggggaacgtggagagaaaggagagtcggggcagccaggagagccagggccaccagggcctaaaggccccacaggcgatgatggccccaaagggaaccctgtgagtttggggcagtgggggctgagtcctctcaggccctgtgaatgacagacctgggaatatgggtgtgtgtgagggaggatcttggagtgtggggagcccgggagtttgggggatgctctgggaatggggcatccagagggatgcctggggtctaggatccggagagaaagtgagagatgccctgcagttaataccttgaggaattagacaacacgcagtgcacgtggtagggaaaggggtgcaggagacctcttcctggggggtactggtgggcactgcctctagagaggcagtggcgtgtgcctgtgggcgtctgtgctgggtgggcttagggagctgtgaccctgactcttattctccatctggatcagggtcctgttggttttcctggtgaccctggcccccctggagaaggtggccctcgggtgagtcttactcagagaagggaaggggcaaaaagggtggggcttctatgggggggtcctctgtgtggccgctgggcttgggtattgggaagccgggggtatggcagggtgggcaaggggatggggtattgacagttttggaggtgatgccagccaggttgggggcccacctctgaccttgcttcacttctgcagggccaggatggtgctaagggtgaccgaggcgaggatggtgagccaggacagcctgtgagtgcctggtgaccccaccacccccctgagcccaagcctcatcctctttacccctcttctgtgccccactcctgaggggtcccttggctggaggataaacactcagccaccccaattcctctctccctagggatcccctggtcccaccggggagaatggacccccagggccacttggaaagcgagtaagtgaggtggacccctgagaccttgggaggcagtccctgggctgtgtgggtggaggctgggcaatggcaggtgggatgggtggggaggtgcctggtgtctgcattgccctgggtgtgtgtgtgtgcaggagctggtgggtttaagggcgtgtggtatctcattgcccggggcagggtgtgtgtgcaggagctggtgggtttaagggtatgcggtatctcattgcactgggcgagtgtgtgtgcaggagctggtgggttgatgggtgtgcggtatctcgggcatgtttgttcctgggttctggtgtgtatgttttcaccaggggtagtggtggttactgacaaagcagaatggaaactggaggaggggctggccagcttttctgtgggccaggggtgaacctttttagtttctggggcaggagacgggccaccaggtagggtgtgggcaagtggcccttcaccaaatgtacagactacccagtattttcacaactgtcacagctgtatctgttctgcacatctgtgaatcggccctcggcgcgtgtccctgtgtatgcacgtgtgtgtgtgcatgtgtatgtgtgtgtctaggacaggaagggggaagagttgagcctggctgcccacggcctcatgtgctcttccttcccactccacctgcagggtcctgctggctcgcctggttccgaggggcgacaaggagggaagggagccaaggtgagggacaggctgccctagtgctggagcatcccctccgcctcccacccctcagatgcctccgtctccagatgcccaccccatctccacctctcccatgttgggcccttatggggacaggcgttccctgtacttgttcctgcgctaggggctcctagagtttggcccttcctccctgcctcctgcctcccaccttggaccctctgccccctgcccacaccccactcctctgccattcaggacacattccttgtgtgtgtttcagggagatcctggcgctataggtgccccggggaagacaggcccggtgggtcctgcaggcccagcagggaaacctggccctgatggtctgagggggctcccaggctcagtggtgagtcactgcagggaagggctgggctggggtgggagtgaggggccatgggaggggtgcagtgtggggatgctcctcctgacccctgtggccccctcaaatcttcagggtcagcaaggccgacctggagctacaggccaggctgggcccccaggtcctgtggtgagtgactgggattgggctgagtgaggggtgagggcagtgccctgggacagagctgaagccctggaggaagtggaggctgttggggagaacttggtcccacctctcccttaagagaatgacttcccatctctccacagggacccccagggctgcctggtctccggggcgatgctggagccaagggagagaaggtgagtgacagacagacacgtggccaggtgtctctcccatcaccctcgcccctgaaacctgtgggacccaagtgcccactgctctgcttcaggcctccggcagccagtcccagggagtccctgctcagtgagggccactcacggaccctgtgcccggctccctctccatgtcctcttggcccttctcccccatccacatgactcctctttgcattctcttgactgcctgcacccttctctagggccacccaggtctcattggactgattgggcccccgggtgagcagggagagaagggagatcggggacttcctgggcctcagggctcccctgggcagaagggtgagatggtgagtagagggcatggtcccggaagttgtgggggttgagagtggggtggagaggggtggagttggagttgggactcagctgtgggtaagcgagcaggtgctcaggagggtgtgggaggaggacccagttgaaccagccactacccttcctagggtatcccaggagcatccggccccattggtcctggaggtccccccggcctccccgtgagtactgcctctgttcctccacaaaatcccctaaacccctctgctgcccacccacagcctcccaacgacttccatggaactaccagcctaacaagcatagtcctcagggtcccccatttgtcctgtcaccaccagtacctcctccccatacttccagggctctgaatgtcctagtattcccacaagactgcccctcctgtagtaacccgaggctcctgtggacttgggaccttgcctccccgctcctctgagtcctgtccttcccctgcagtgaccgtctctttcttgttcctcatttcacagggacctgctggccccaaaggagccaaaggagccacagtgagtgacccccttcagctctgacctttgctccaccccctctggacttgatgatgtctctccaggacaaatagactccccccaaggagccccttattccagccaggaggctgatttgatctttctgtgaccttgatccatgcttgacctcttgacccctccatgacctgatttattccttgtcagggcccaggcggacccaagggagagaagggtgtgcagggccctccaggacacccggtgagtgaggagtcagggctgctcccagggccgtacccctctgctccactgctgccacacttcaccctcacaccaaccttgtctcttgccctctccatctgtccctgcacccagggtcccccaggcgaggtgatccagccactgcccattcagatgcccaagaagactcggcgctcggtggatggaagccgtctgatgcaggaagatgaggccataccgaccgggggagcccccggcagtcctggggggctggaggagatctttggctcactcgactccctgcgggaggagatcgagcagatgaggcggccaacagggacccaggacagccctgctcgcacctgccaggacctgaagctgtgccacccagagcttcccgatggtcagtgctagcctcagggtgcacaaacatctccccaacagcatgggtactgaacaagcagaatggatgctgggggagtcttggtgaaggtgttgggttaagggtgagggctgaggggctgggaactgcagctatttactaaccaggtcagaagtatcccaatactttagcaactgatctgggtcagtgtgtaccagttggttatcagcccagtgtctgcaggagcagataaacatacatacgtgcacacacctgtttgcacctgaacagatgaatctgtgtgagcgcctgcaaccacatgttgtcccagtatgaggctgtccatactcggacctcctccagtcagagggcctggggttactgttgggggcagaggtgtcacgtgatgaaagtgggctgcagcagtaggatgctgcagtagaatccagcagtagggctagattctagggctctgggagggaggaggaccaggagactaagagcatgatggggagggctgggagggaagagggaatgtgggggcaaagagcatcttggagcctggacctaggtggccctgacctcccctctccctcacccaacaggagagtactgggtcgaccccaaccagggctgtgctcgggatgccttccgagttttctgcaacttcacagcagggggtgagacctgtgtgacgcctagggatgacgtcacgcaggtgagagctggcccctcgctgcccctcccctgccccatagtgcaccccctcagggcttagtggtttctgggttttggtgacagtcccctggctgttgccccccccggagcctgccaccccttctccacttcttagctctttcttcttttccttttcaccggtcctctgatgctcactttgcctttcgtgtacccccagtctcctggctcccactcagcccctcacttctttcccagcccttgccttccagccattccctgctcatgactctggctcagctgtcctggtgccgtagatgctcctgaggcccgtctctgtctccctctgaggccagccctctctctccccctctgaggccagccctctctctccttccagttctcttacgtggactcagagggctccccagtgggtgtggtccagctcaccttcctgcggctgctcagcgtctcagcccaccaggacgtctcctacccctgctctggagcagcccgtgacggtcccctgagactccgtggggccaatgaggatgagctgagcccggagactagcccctatgtcaaagaattcagagatggctgccaggtgggaacaggaagagctgggttgggggctgatctcagactcaggctggaggaaggaggtgggaagaccccttgggcagggcacccagggggagcagggaggagtccgtcctgctggattgtcagggatgcctgagggagctcaaaagccggtgaggaaggtggaaaggatggaagccatcgggtgaggttcacttgggtacaaacaccagcgtcacacaggttaatgcagacgtgtacacagactggcacatggctgcccagcagaggcacacggtgggggagaagcaaacacacacgcatgggcacatagacactgccagtctgtacatcctgagtcaccctgatggggccaaggtgctcagaggagaggtgagcctgggcctgaggttagagggtggggggtgcctccatcctgctcacactttcttccttgtctccccctgaagacacagcaaggccggacggtgctggaggtgcgaacgcctgtgctggagcagctgccagtgctggatgcctccttctcagacctgggagccccaccgaggcggggaggggtgctgctggggcctgtctgcttcatgggataggaccgtctctgtctgatcctgtccattcggaaccaggcccacctggaatcccacaacatcagctctgtgccacctcccaagagggctcctcactatctagggagccctgggccagggcgtggagagccctcagtcggggcaggccaggggaggggtgaagtggttgcctggacaccccacgggaggagtggcatctggggctcttggccctcccacctggagcctgttacccgttagagagctgagacccttatttaaaactcacctcccaatcaccccaaacaaatggaagagaagagaaaggacatggcgtattttgtatttaaaagtaattgtattaattatttaaagtgtggaaagcaaaataacaaaaaagagaaacgccaacaaaaatcagcagatgttgaagacaggggtctcgggggtgggctccggcacccacatcctggagtcaggactttcctcagtgactgtgtgtaggggggtttcagggctgaaccccacctccctcccaccttcctcccacctcacctgtcgcacccactgtgaaagttggaatatgtggtctccctggcctcagggctctgactctgccagggtggggctctctaacccacaggtgttggctgcctggcccatgtgcccactgtctcttccacttggtctgggtttggcaggcactgcctgctacttgagggccaggatgctcccccagggaagaaacggaatagtgtggggtgtgtgcagggctgcatcccgcagatggctggaatattaaaattcttctatattggctggtaaattgccatggccctgagccactgagtatgttcattgccacccctgtccctcccctgggcacccctcactttccctgatcctgcaattaaagggttaatgtgtggcatatggaagggactcccaggaccctgtgcccagcttccatgctgactgatggttaaataatgtgattgtctcctcccaggtgtctgtgtcactgcttgtgttgttatttcagtctcccccgacacccatctgatgcttcctcttcccagctaagtggttaccagaattgtatggcttaatccagataccctgcaagccctgtccagctggggtgtcagggcccagagtttacaaagcctgggtgactagcataaaattacaaacaatgccccagggacaccaggtaggggtttggggtccctatggctccagtttctgacacgggtgtgcgattgcttctgggtgtgggtgggacggtgctacatagcccagtctaatctctgtaaatggggaggctgaggcccacttccaagacatttactgcatctgtacctctggtcaccttatccctccccatcagccttgtgctgtgctgtcatgaagacagggctgtggccaagccctccacactcacgtgtagtcacgtgcatactcgttgagtctttgtgttgggtggagtcgcacagtccctgcctgtgtccccccactcttgactgtcccccacttccctagcctccctctcctgggcactcagaagctctgctccctccgggttaggtgtccaagaagtcctctcttccaaggctggccgcgcagccgggaccccctagctggtgcccatggggcttcacattcccaagcagtattgcctggctcctgcctgtcagggcgctgcattaaaacgtgttccagggcctcatcccaatttcctcttcctcaaccctcttcctcgcgggcgccagaatcaagagtgcgtgcctttgtgtcccggtttcgcatccgcggcctcggggcgggcctggcagggctgcccttcaccccgagcccgagcccgggtaggctgcgcccccgcccctcctccccgtacttcttcctcccagcgtgtccccgacagcatcggcttggccgtcccggtcccaacccattctcgatcgcaggaagccccacgtgggcgtctagacggccactctggcccgggcgggtgcgcggaaaaacttctcgagggtggaagcctctcctcggcgctggcgcctccgcctctgccgccccctagtgcccgcgctgagaacgcggccccgcaccgggtcagctgaataatcccggtccctcagacgcctctcccttgtcacccgctgaaccccctgaccccgaaggccgaatggaggaagaagcccctgatctcatctgtcaggggtccggtggtggataggttttctgggatcacccatgctctccatctcaatatccaaggcccaggggcttcagacacccccttccctccctctcagggtcacattaagagaagatcagatctaaataggtgccccccatctgtttctcccgcacccactcccagcctagccgggctggagttgagatttctttggcgctctttctgcagctggagccaaacccgcagaggtcgccccccgaacagcaagaggactttcccaaaggtcacgtttggtcagatgctctgagttccgagggcttttctgcatggaaacaatgctgtacagtcactcgaataacatttatatacggcggctaagtccccaggccaatccacaaaagcctatttaattacacagtgctgccaaccaaccccatctaacagtttcacgagggagtctgtgccaagttgctgttgaggaggccaggcccacagccttctcttggcagctaacttcttcctcccctccagaaagctagagccaggctctaaggaagggtgggaggggtttaagggcagggctgtagaggcggggttttggggtggggctgggtgtgaacagggcaagtgcccaggcctctgggcctgtgggtagtggcagtgtctccattggctggtgggcaatggaggcttctgggtggggtgggaggagatagggaagagaaaggcagaggctttagggaactactttgggtttgattggggcagaacataaactcttgttggaggggccaaattctgaaaagtattgactgcttatggaaggagttgaacttgaacccaaaaactaagagtcatagatggtgtttgaaaaggcaagtgatatgatggaattgtgcgctggcatggtggcgaaggagaggagggtttgggatggggcgcacagggagatcatgtttttttttgttttttgagacagagtctcgctctgtcgcccaggctggagtacagtggcgccatctcggctcactgcagcccctgcctcccaggttcaagcaattctcctgcctcagcctcccggatagctgggactacaggtgtgcactgccacgcctggctaatttttgtatttttaatagagacggggtttcctcacgttggccagtatggtcttgatctcttgacctcatgatcctcccgcctcggtctcccaactgctggggttacaggcgtgagccaccgcgtgggagatcatgtatagagggagggctgtggggtgggtcctctggcctgtcacacccttggagctgcttttcagctttgggcttatatttttagcatctgtaacttatggttaaaaaataacttgtgaaataaaataaaaataacttacagaccacttatatcactgtacctgggagcaccacatatcctagaaggccatgggctacacagagctgttcttgccctcccttggctgtcttgcatgctgaggtttgtagttttgaatggaccagggcaggtgggggtggagatgagacagaggagggagtgagtcaaaacaaggctctcagcctgggcaacaaagcaaaactccttctctctctctctttctctctttctttgagacagggtctctgtcactcaggctggagtggagtggcaagatcaaggttcactgcagcctcgacctccgtgggttccagccatcctcccacctcagcctcccgagtagctgggtctccaggcatgtaccactagtttttgtattttttgtagagatgggattttgccctgtttcccaggctggtctagaactcctgggctcaagagatctgcccatctcggcctcccaaagtgctgagattacaggtatgagccatcacgcacggccctttttctctacaaaaaaataatttaaaaattagctgggcatggtggcatgtgcctgtagttgcagctactcaggagactcaggcaggaggttcacttgagcccaggagtttgaggttgcagtgagctatgctcttgccactgcactccagcctgggtgacagagagataccccatcacaaacagacaaacaaacaaacaaagggctccagctgcctcagaaataagtttctgtgtagtagctggtggccaccttgttttgtggttgtttagcccattttcctgcaagtgtggtgtggtcagcagggagcatcagggccacactggagcttctttctgtcgagctgtgcagttcacagactgtacatgtgtaggccatagctatgtttctcaactcaaacctagagtaagcagaagtcaccttaagtgcttataactggccttctgttatcttttctttcatcttcagagtagtttcatgggaactggcactgacagcagactgccatctcagtagggaagacctgtcctgctagtccttgaataaagaccaaggatatctacatgggcttctcctttagggctctccccacacggccaggatggtagaatgaacacagctctcagcttcagcgagagccagcatatcaccctgtctggctttccctcagttggcaggagcaggtcaatccattttgtgtacttcgctctggcctctctttttttgtttgttttttgtttttgagatagggtctcactccccttgcctaggctagcatgcagtggtgcaatcatggctcactataggcttgacttcttatgctcaggtgattcttccccctcagcctcctgagtagctgggactacaggcgagtgccaccatgcccagctaattttttgtatttttagtagagacgtggtttctccatgttgccgaggctggtctcaaactcctgggctcaagagatccccctgcctcagcctcctaaagtgctgggattatctggcctctcttttttttttttgagatggagtctcgctgtgtcgcccaggctggagtgcagtggcacaatctcggctcactgcaacctccgcctcccgggttcaagcgattctcctgcctcagattcctgagaagctgggactacaggtgcccgccaccacgcccggctatttttttttatttttagtagagacggggtttcaccgtgttagccaggatggtttcgatctcctgacctcgtgatccacccgcctcggcctcccaaagtgctgggattacaggcgtaagccaccgcgcctggcctatctggcctctctttctattaaaaacgccttactctaggttgaaggacttttggttcctgaggcatggatgatttcccaaagtacaacagataaaagccacactggctgtacagcagctcatgtaaaggtcatgttccaggtcttggccacttcacctataacaggcttggactccggcagagcctcaggccaaagaatgtgggtcatagagatatcttcctcattgtgttcacatctcccccgggcctgggctatattgttgggtcaggtaatcggcctgctctcctcatgaaataaggcatactggtattactaatgctgggagagatttcttataattccatcccttcccagttgtggttatttgtattaatacctgcaggttttccttacttttagaactgcaaatctatagaaacaaacaaaccccaaacccaacaaacatgtttcagagacattagggttagggagaagatgagaaatagcaccctgtttgattggggccctggggagagagggactcagacaaaagagtttgagtggcaggtggtctagttttgggtgggttgagcagacttagggccaaaggtggcactgattctagctggcagcgggcctctctgtatttccaactgagagttctccttcccttagcttgtcagggatgctttgcttctgagttgcacacttaacctcagcatcagtttcttcacctgcaaagtgggataatacttgctctgtaaaggaataattccccctttactgacagcctttgcaatggaaagtgaggggagggacctgacaagctgtcttggttccatctccatgtcttggttattgctgacacacgggtgtctggggcatgctgctgtcccttttccacttttgattttagtgctgttaaaactctatacttactattattattttcttgttacaaatcgcaaaatctgattcagaatagcttaagctccaaaaggaattgattgtaaaaatattgggtttctcaggatttgaagacagagttgactcaatagggaagactgagagcagttctgggaacctcaggggctcatggactttgtccctggagtgtggatactcaccgctcagcagagctgctcttgacctctgtgtctctgggccccatggttcaaagtcatggagagacaatctgattggcttagcttgggttatctctgtccctgagaaccaattttctgtggctgagggcccagtgtaccaaccaagaggtatgtaggatgccttttggtggaggtggaggggtgttgggggcactgtttccagataatgtgggatcctgaggcccccaggaggtgtccgcttgctttcccttcttcgcttctgtctaaacagactcctttgtatgcatttgaccagcgtgatacaaccagccccttcatgatcacatttgctctccctgccacccaatctcctggatgggcaacccaaagtcacattcagcagctgtggccatgacctctctaacctcagaggccgacatctctgccagttcatattttgccactttgtgattcagcacataaactttcatggccgttatatccagggctgcattgtgacttctgcgggccctatgcacttttctaaacaataaatttgaaatcatacttatgattgtgttgatacacaggcaactatattaatattatatattaaaatattttcttcaaccttaattttttttctattttaaaagaaatgtaaacattgccatgggagtattgtgggccctaggcactgtggctactgtacataatggatccatgggccctccttgtgtctttgttaaagattttactggtttactcttaaaatgtaatcacaattctgttaccacaattttaataatcattcctgttgtcatcaaatatccagtcagtgttcagatttccaagattgttttgtaggttttgtgtgtgtgtgtgtgtgtgtgtgtgtttgactcatgatccaaataaagctgatggtcttctaattctttaaagatctacattttccgtaatttatttaaagtcctttttgtttacttttattatggacaaatttaagcatatacaaaagtggtttattattgctttttttttttttgagatggtcttgctctgtcgcccaggctggagcacagtggcacgatctcaactcactgcagcaacatccgcttcccaggctcaagcgatgctccagcctcagcctcccaagtagctgggactacaggcgccagccaccatgcccggctaatttttgtattttttgtagagacagggttttgccatcttgtccaggctggtctccaactcctgagctcaagcaatctgctcatcttggcctcccaaagtgttggaattacaggtgtgacccactgagccttgcctgttattgctatcttaaaaagaattaatacatgttaaaaatctttttcagttctaattttgaatacagtaaatatcaataacaatattgtaagtaaagcttttcagtgttttcagtaatttaaggggtttatactcttaaaacattgagagatttttttcaaattgagatttaaaaaaattgggaatcactaatctagaagaactgttaaaaatagtcatgcccacctgtgctcacccttagagatctggattcaacccatttggggcgtgagcaaagggacttgtgtaaaatttccccaggcaattccaaagtgcaggctgtgttgagaacctctgctctaaactggagagatcccgtaagaaataagcagccaggtgcagtggctcatgcctgtaatcccagcactttgggggaccaaggcaggtggatcacttgaggtcaggagttcgagatcagcctgttcaacatggtgtaaccttgtctctactaaaaatacaaaaaattcgccaggtgtggtggcacgtgtctgtaatcccagctactggggaggctgaggcaggagaatcacttgaaccagggaagcagaggttgcagtgaaccgagatcatgccactgcactccagtctggtagacagaatgagaccctgtctcaaaaaaaaaagaaaagaaaagaaaagaaaaaaaaggaaataagcaaagatggccgggtgtggtgcctcacacctgtaataccagcactttgagaggctgaggcgggcggatcacctgaggttaggagttcgagaccagcctgaccaacatggagaagccccatctctactaaaaatacaaaattagtcgggcatggtggcacatgcctgtaatcccagctacttaggaggctgaggcaggagaatcgcttgaacttgggaggcagaggttgcggtgagccaagatcacggcattgcactccagcctgggcaacaagagtgaaactctgtcaaaaaaaaaaaaaaaaaaaaaaaaaaaaaagaaataagcaaaggcacagagtgggaaaggcaaccaaatgccctaggtctgaaagggcctcctgggacctgctgcatccagcagaaatgcttgcaagtgcaggcccagacaacccaaaaaacaggggctaaaataaacaggaattcatttttctcataagaaatctgaggatgacagcttccagcattggtttgagcatttaatgatgccatcagggttccagactcttcatatgtttacactccaccctcctacaatgttacccttacatattttctttggctaaactataagcacgtttttcataatagctgttccatttacatcactgtcaaacatgacattcaccaataaagaaaagacgcatgagacgtgttcggcaccccttagctgtagaaatgcctgccaccactttgctgtcatgaaagagccattttatggctattgcaaatgctttgaagatactaagacttgtacctggaagctatagatgcagtgtgggaaactgggaagtataattgccactgaattgttattgatttattactgcaaataaatctatgcaggtcccttctgaaattgagatggtcctgaactgaacaaatgtcttattgacattcataacagtggctggtattccttctttatcctgtttgtcagtttttggaattcactgattagataaataaaaagaatctcacttgctccttactaatgagctccacggaggggcatgatgttggaaaaggcaccatgcaaggcatgattactaagaagacaaagggcttgtcggggagctgttagggagggtcctgagccagggcttgggaaaaacatctcatcattttactgtatctgatgcttggaagtgacatgtgctttgcaaactccagtttatgttttgatgactttgtgcttgttctgcttggttaggattagcttcagctgtgagaaacagaaaaccctggaaacaacagtgtctccaccaagatagaagttcatttctctctcacatgcaaccctagggctggtgtagtgtttaagtgtcagagactcaggttccttctatctatctttttcttccaccagcctcaacatagctcttctctctcaggtccaatatgactgcttgaattccagctttcatgtttgtgttccagtcagctgaaggagaaaggggaaataaggacaacccctcttttttttcgttttttcttttttttttttttttgagagggagtcttgctctgtcacccaggctggagtgcagtagtggatctcagctcactgcaacctccgctccccaggttctagcgattctcctgcctcagcctcctgagtagctgggattacaggcatgtgccaccatgcctggctaatttttgtatttttagtagagatggagtttcaccacgttggtcaggctggtctcaaactcctgacctcaagtgatccacccgccttggccaatacctttaggcaaagcattatagcaggagtctaaaaacaaatgggctgttttgttttgctcggaaatctctccccgagggattgttttgttttttgaagtatttgaaggctaagtatctagagcttgtgctcatggagtagctgccccctttcctcgtgaggccaccattagttacctctgcatatatgtctgcctctgaggtgtctggctgtctgaggaggcctctggctttgttagtacaccactaggatatttgcaacgtggatcaagactttttaatttaatttaattttattttatttttttgagatggagtctttctctgtcgcccaggttggagtgcagtggcacaatctcagctcactgcaacctctgcctcccaggttcaagccattcttctgcctcagcctcccaagtagctaggattacaggtgcctgccaccatgcctgttgcgggaagtcagggaccccaaatggagggaccagctggagccgaggcagaggaacataaattatgaagatttcattttaatatggacatttatcacttccctaataatgctcttataatttcttacgcctgtctttacttcaatctctgaacataaattgtgaagatttcatggacatttatcagttcccaagtaatactcttataatttcttatgcctgtcttactttaatctcttaatcctgttatcttcacaagctgaggatgtacgtcacctcagggccactattgtacaaattgactgtaaaacatgtgtgtttgaacaatatgaaatcagtgcaccttgaaaatgaacagaataacagcgattttagggaacaaggaaagacaaccataaggtctgactgcctgtggggttgggctaaaagagccatatttttcttcttgcagagagcctataaacagacgtgcaagtaggagagatatcgctaaattcttttcctagcaaggaatattgataattaatactctgggagaataattgcattcctgggggggaggtctataaacagccgctctgggagtgtctgtcttatgcggttgagataaggactgaaatacgccctggtctcctgcagtaccctcaggctcactagggtggggaaaaaccccaccctggtgaatttgaggtcagaccggttctctgctctcgaaccctgttttctattgtttaagatgtttatcaagacaatatgtgcacagctgaacatagaccctcatcagtaattctaattttgccctttgccttgtgatctttgctttgccttttgccttgtgatctttattgccctttgaagcatgtgatctttgtgacctactccctgtttgtacaccccctccccttttgaagtccttaataaaaagctgctggttttgtggctcaggtggacatcatggacctactgatatgtgatgtcactcctggcggcccagctgtaaaattcctctctttgtactctttctctttatttctcagactggccgacacttagggaaaatagaaagaacctgcattgaaatattaggggtgggttccccagatacatgcccagctaatttttttgtgtttttagtagagacagggttttgccacgttggccaggctggtctcgaattcctgacctcaggtgatccacccgcctcagcatcccaaaatgctgggattacaggcattagccactgcacctggccatctcaagatggttttaatggttagaaatatcagccaattgaattttcagagacatatgccacctaattttgtattcaatacttaagtcattaaactccagtggtctatatacctgtttggcctctaagacagtttggcctctaagtctgtgagcactttctgtgatgatggaaatgttctacatttatgcaatttaatgtggtggccactattcacatgtggctattgagcacttgaaacatggctagtgcactaagaaactcaatttgaaattcaattttaattttatttaatttaaatggccacaggtagctagctagtgctaccatattagacagcacagctctgaggctcttttaaggacccacataattcaatgaagagacccaagtttaatacagatgtgggatatgcagtcttcataattcaaacacgccaattaatttctgttcctctttttcaagttgggggctttcaagcacaaaggcttttacctggtcttgggcagaatttttctccccaaaattttaccaaaatttgtgctcttttatagtctgtttcttttaactcataaaattaataatggaagacagaggtttttgatgcagttgctttaaaaaaaaccaggttcaggccaggcacagtggctcacacttgtaatcccagcactttgggaggctgaggtgggcggatcttctgaggtcaggagtttgagaccagcctggccagcatggtgaaaccccgtctctactaaaaatacaaaaattagctggatatggtggtgcgcatctataatcccagctacttggggctaaggcaggagaattgcttgaacctgggagggggaggttgcagtgagctaagattgcgccactgcactccagcctgggtaacagagtgagactccatctcaaaaataaataaataaataaataaataaacaaataaataaataaataaaatcaggtttactgagatataatttaaatacagtgaaaccatagctgtacagttgtttatgagtttgacaaacatattcattgtgtaactactactacaatgaagataatatttctattaccccaaaaagtttcctcatggacacagcttttttcaagtcactcctggttaatgtgtcattaggataataaaacaatgttaattcttgaattggatttaggctgtttaaattttgctcaatggattgtacctcggaggtgggagaatttactctggcaacttagtaaaggttggggctgccaagtgaaggcagactgttggtgaatataatttattgggattgaaaaggatacatcagccagattgatgcatgaatgctaatcaagggttgatttagcaagatcttctactaaggaaataatatcatgtacagtgctaatcacatttttttcataattgagttaaatatttaaagtgattagaatagtcactgccacttaatactacttcagaattagctgcttttcttaatatcggtgtaattcacaattcacttccaagctccacctcccttttgactggccaaaatgagttgttaaagagtcctactctttatctcagatttctccaacaatgttatcataattgttattttacatattctcctagggatttgtcactatttcatattacgttgttttgtggggaagtggaattctagaggttcttaagagcttttccagctcccacagttgcaatcgtaagttcagataacatgcccaggggcaggagaaatcaccatagaagctttcttggttctctgtatctcccattaatgtttcataaccttccaccttcatactttcccctccacataccctggtattcaaaatagcccttcttattagattgggttttcctaattaaaagttgccattgatgttatatcccaaagtttctggaattcctaaacattgtcctttgtctaaactgttttaacgtgagtgcagagtgtctccagacacaggttggaacagatctggagggaagaacattggggctgtttgtcccatcgtatgagaggatctggttttagggcaaagctctttaagcttggagaatgaatcgaaggtgtggaagtgccctgtttctgtatgttctaagagaaatgagctcttaacgtttataagctttttgtcttggcattccccttcggtttggtccctagcactgttaaattacatgaattgagggtttgccaaaactactgctaaatttgcagcttctgtatctgctaaaattggactatttttgatacttcctttaacctgttttgtaaccttgttaattttctaatgagcccattgtgctgttgggattccgatatccccaaatctaatgagccatgaccatacacgttagctccattcccactgggttctcaaattctttttcatttttccaattctttagcactttctcttataggcggttctgccttaatttgaaattaaatgagaacttcagccccttcgtctcaccagctgctagcattttaagtgctcaagagccacctgtggctagtggcggctcggttggatagatacagaacatttccctaacagcagaacattgtataggacagcactgctcaagggattgctctccgatgatcacacccactttacagatactaggactgtctaactatgtacactttctttcttgcaaatacgatgtcgaaggctttccctcagtttgtaacttttaacaaatattttagaatctttattgatcaatctctcatacatctgtgcaacaaaaatatatgtattcatttaattctttaattgacaaaaattgaatctgtttatggtatacaatatgatgtttatatatatatatatatatatatatatacacacacacacacattgtttaatggctaaatcaagctaattaatatgtgcattaccttacatattttttgtgttgggtgagaacacttaaaattattcacttagcaatattcaagtacacagtacattgttattaactagagtcaccatgttgtacagtacatatcttgaatttattcctcctgtctaactgaaattttgtattcgctgatgttagtttttacaatcaactcattaaaaacataattaggtcacagaggttaggaggttttgaaaaaaacaaaaaaccaaacaaaaaatgtaattaggtttgtttggcaatctagcaatgcttagtgtgcaatgctttttacagccgctgctaaaagcatagcaaaaccacagaaatctatgtgctgccaaaacctatgtatttggtcgtatttattttgacttgtgttttttgtgtgcttaactttttctctaacttttttttgtaaagaatgctggagtattcccaaattgttgacaaattcccttgtttcctgttctaagcccagatttcagtgttggccactaggtggggataggatcctatttctctatagccttaacatgattttgaatttcgatgctttgcaatggataatctggctttttcctcgaaagctttaaaacatttcttttgtgaattcaaaacaacccacagttttaattctctgtagttatccaataaaaaggaataggaaacaagtgctaaattatttacttacagtgtttctgtatggaaatccttacccccaagacagctggcttcacggcttgactcaatggtgagaaatctgagttgactcacagctttctgacagtattctgatggtaccatgttaggataaattcttggccaaacagaaaatcaagggagacctgcttctccttgtcaaactctaaattaatctactagttcttttcataaagcaaaaggtgaaatgttgaggactctgagttggcgatcaatcgaaatgacttttaaactaagtcccttttaatgatgactgaagacaatattacattaatcactgggtattataaacactggtttctcagtcctctgctgatgagatttgcttgtttgtgtatttctttcttaaaatcccaaatagtgaagtctctcttaagcaatggaggcttattcatagtcaaattccttgcatgtaaaattctctgggtataaagtagattgcctccctcttgtttttctttttcttgagacagggtctcactctgttgtctaggctggagtgcagtggcattatcacggctcactgaagcctttacctcccaggctcaagtgttcctcctgcctcagcttcctcagtacctgggactacatttattttttgtttttttttatttttttgtagagacaggattttgccatgttgcccatgctggtcaagctatctgccctccttggcctcccaaagtgctgggattataggcatgagccaccaggcccagcctgctttcttctgttttaccaagatgcttgacagtggatatataaaatgacaacttccctttctcatatgtggcactgagagatgggcagcctctatttcctacaagaaatatagaatagaaaatgtgtaatttctcatggtgttctgcaaaaattaaaaatttcacagaacactcatctgaatccctggtttgtaactttggctttccaaaacttgcctatatgctaatatgattcataaaacatttgtaataataatttcaaaataaaaattttaaaatgaatttagtcctatatcttctataataaccaatatttccagaaaagtaggatttaagagtatcttctgtaccaatatatgactttctttttcttttttttggagacagagtctcactctgttgcccaggctgaagtgcagtggtgtgatttcagctcactgcatcattcagtcggccgaaggcctggctagaacaaaaaggcagaaaaaaggtgaattcactctctctctgttttggagtagggagtcctatattctcctccccttggacatcagatctccaggttctctggccttcacactcagggacttgcaccagcagccccccaggtttttggtcttggactcagagttactccaccagctcccccggttctcagcccttcagacttggactgagccatgctacaggctcccctgtctcagcagcttgcagaaggcctaacgtggaactcctcagcctccatagttgagggagtgaatccccagcataaatccccactcatctatctacctatatatatccaataaattctgtttctctgaagaagtctgacttcttcagcccccaaaggcccccaaaggcccccaaagcccccaaaggccctagtgctggtctgttacgaacttcctggtagacaatattttacacatggcatcccagctccttgtgggaggaattaagtgtgtcctgtgtggctccagggggacaggatccttggaagcctgagcctggtttctcttaggctttgcccagtgtgcctttccctctgctgagtttgctttgcatccttttactgtaatgaatcagagccctgagtaggaccatatgatgagccctgtgagtcctcctagggcatcatctcacctggggtggctctgaggacccctaacatagctcttcctctggcattggtatctggtaatatataaaatcccccaaaactaacttgtcatcataatttatgaccatatttcatcaaaatttcatgtagtcacatccaagaagttcagttaagaaagaaaaactctttaagcttggttaaggctctgccatttttgaaaattcgtattaatctaataatattgtagcaactataagttttcctgataactttttttttttttttgggagtgggggatggagttttgctcttgttgcccaggctggagtgcaatggtgtggtctcagctcactgcaacctccgcctcctgggttcaagcgattctcctgcctcagcctcccaagtagttgggattacaggcgcccaccaccacacccagctaatttttgtatttttagtagagacaggatttcaccatattggtcaggctggtcttgaactcccgacctcaggtgatctgcctgccttggcctcccaaagtgctgggattacaggcgtgagccactgtgcccagcctcctgattactattatataaaatttggacttagtggcacatcataacatgaaatgactggagacaatatgacttctctctcggtattaaacatcaattaagatgaattacaaaaatcatagtaaactgtattctaaaaccaagcctatgtctgaaaaatctggtatacacacatcttttgaaactaaggatgtgttttcactgtacaacctgcaagaggtgatctggtgaacatagagttatggaataagtgtgtatctataacttagtacaaattatatataaagagaacgataatgtattatgcggctgggcatggtggctcacttctgcaatcccagcattttgggaggctgaggtgggtggattacttgagctcaggagtccaagaccagcctggccaacatggtaaaacctcatctctaccaaaaacaaaaaattagctctcaggtactctagagactgagatgggaggatcgcctgaaccctggaggcagaggttgtagtaagctgagatcatgccattgcatttcagcctgggtgatagagtgagactccatctctaaataaataaaataaaataatatattatgctattatacctattatttaaaattgggatcttatgttgatttctacatttgggaagcatattcctaagaactgacctttatcagtcctgtattgtgttcagtggcaaagccaggcttggtgtctgttccatctgggaacgccaggagtaatggtcccactccttgctgctgagggtacagcatgaatttgggcagcaccatgaaataaagcaaatgtaagaagatcctctatcagttgcactcctatttaataagaagacttgatcatcatcaagaagttaatttctccatgcctgggtaaaaccacactgactcatcctgaggctcttcattggacccagtgatcaccaaatccttcaagcataaaatggccatgtgattatctccttcctctcaggatgaaaggcagacaataacatgtgatttatgttcctcaggaaaggacatgctataaactagagaacttgggaaagaggaagtacatgaattaacatgcaggcacatggtggcatgtgcctgtggtgccagctactgggcaggctgagtggcagcattgtttgagcccaggaggtgcaggctatggtgaactgagatcgtactactgcactccagcctggttaacagaatgagaccctgtctgtctttctctctctctctctctctctcacacacacacacacacacacacacacacacacacacagaaaataaaggagaaaaagaaattgttcttaaacataaaatttaaagtggggttctttgtatcaccacattctttttttttttttttttttgagacggagttttgctcttgttgcccaggctggactgcaatggtgtgatctcggctcactgcaacctccacctcctgggttcaagtaattctcctgcctcagcccctcgagtatctgggattacaggcacgtgccaccatgcccagctaatttttgtatttttagtagagatggggtttcaccatgttggccaggctggtctctaactactgacctcagatgatccacccgcctcagcctcccaaagtgctgggattacaggcatgagccaccatgcccagctgactcttttaaatttcattcagctgtgcgcccagcctcaccacatttttatatgaagaagaaataaaataataattactaattaaataattaaatattatttccttctccttatatgtttgaaaacatcaaagattttctccaaaattatcatagctataaaagagtcaatataatatcaaatggtaacaaattaattcctttatgatgcaaagaatcaatgtaaaattgtgaagaaatatcatccattcacagaagtaactacaaataaaaaatcccaacttgcgtaatgtatttcctcattaagaagaaggcgattatgatgtcctaattttcgttttcttcacttacccctacactctgcagtagtcaggggcttcctgggccatgctggtgcctgacaattctcccacttcctcccagcagctctagcatcttccttccccagccacagaggcgtcccttctgatgtattctggttggttgagccccatcaggctgtttcatctccagcctttctccctggacaggggtagggaaaggagtgctggattcggagctcctccgtccctgcgccgcctcattttctccttggggtctggcgcacagtggccattgcaatacaccctaaagactgaaggagccagcgcagagccaggatcctcctgtgagccatggccctggctgccctgcttagcctctcggaacctgggccatcaggggtgagtgcgcaggtgggcgagggagggtgggggctctgggcgcttctggagcccacagatgctgttttctttcctgttctgttttctctgttctttactgttttgcctgaggctctcttttgctttctctcattctaacaataataaccaccatttactgaacaccccctaagtgccaaacctcatgtccttcctcacaacaccattttcagaaaggcttttattaacacaattttagaaatgaaaagactgagactcaaagagattcataaatgtctcctttcccccacgtcctctcgctgaagagagaagagccagggcttggcaacctcctctggagattctctcgtagattgtagaggtcagcttcctcaaataggagtctgcaatgtgggtttttttccttccttccttccttccttttctccctccccctcctcctcttcttcttctttttcttcttcttcttttctctctctctctcctctctctctctcgacagggtcctgctctgttgcccaggctggagtgcaatcacgtgatcacagttcactgcaaccttgaactcccaggctcaagggatcctcacacctcagcctcctgggtaactgggactacaggtgtctgtcactacacctggataattatatatatatatatatatatatatatatatttttccccttagagatggagtctcactgtatttcctaggctggtctcaaactcctggcctcaagtgatcctcctgttcagcctctcacagcactaagattacaggtgtggggcaccacacccagcccgttagtgactctctctcatttcattcagtcttcaacccactgcattctccctttttcttccccatgtctctgatgctgctctcagggtgacctttatacaacccaaaccagtgatcacttctctgtctctatctcttgtgtgtcatgagtgtgtttgtgatgcgtccgctcctctttcctggatgttttctcctgtctgttgtcttttatgaacccacttcctctttgttttcctcctactttctagtcttctccttttcagcctcttttttcatgtctgtgtttgtctggatgcaggagcacacactcagacccttgctattctgactttatgtacttttcttgagtgacctgatccaaatttagaacttcacttataatgagcttccttccagtctgtgtcactaacctagtgtaccctgggacccaaccatttagctcactatcctcagattaactccatttgttcccacagaaattcaaactaagcatgttccaaacagaacatcttaccttctctcgattatttcatttttcattacctttgcagtcactgatgccccagttctccacgttgggtattctggactccttcatatccctacttctggcacatgatttagtgattcctgtggcttttcgtttcattattgccattcaaacccatccgctgtccgcctcaccccatgttcctgcccctgcctacaccctcatgacttcccatctgatggctgaagagtcctattggtcttgctttcaaaccagcctcctccaacccatcctccctactgctgccccctccaaacacaaatctcatcatgttactgtcctgcttaagatgcttcacaacttcctatgtcctgtgggataaaatgcaaacacctgccatcagcacacaaggcaggttacagtgccgcccggcgcacatctcccctggcttcagtcacactgaagaactgcagttctccttgcaacttcatgcctctctgctcctgagcctgcttctcctgctggacatgtcatttcccctttctctgttttgctaacctcaggtaaacactatccctaggaacctttcctaaatctcatttttcaaaaatgccctctttatgctcctgagtggctccagtgtatatcttatggtactcagtggtgatcaaaataacctatggaaataaaagattaaaaaacacaaaataaaatacacatgtagcaatcttcttttctttgtctctttggattttggatttcaagcagcttgaggacaaggcccaggtcttctgagttacatccttagtgcctaaagagtgaaaattcacaatgagtgtttatttaacagaatgaaaattaacatttgaaggtggaatttgctttaaaatgcacggacctttagttttaggctttgtgaatataataaaaacaaagtaacctaaggtgaacaaacgacatctctgtagcacagcttgtatatcatgtttttcatctgttttttctttgggcttcgtttctgtaggtgagtaattctctagcccataaactcagtggaggaccctcaacatccgtgtgtgacactgaacttgccgtcacttgacgcatccaaggagaggactggttttccccgtgttgggcttggaggggaaatccttgcttaggaccaacaaccatgcagtgtcatttcgcctcacttcctcttccaggctggactccatgctctctcatctttattcttttactgtaatagtaatagacttttttgttgtcaaccttttgctgcgtcttatacatcaggtaaagctaagatactatcccataggtgtttcaaatgcaacaacttttatttccaggtagaactacacttgaaaatatacattcaacaagaacattttgtgaatgttatgtgcatgacaacatttttaaatttactatgacttaaaatgaaagtgttttgataaaattatataaggtaccatttttattctaaaagtaagaacataacttgaagtctataaatagcactaagacttactctggaggtcttttcatgtccttcattatttttttccctgaaagatttttatttcatctccctacttccctgcctttctctgtggctatatcagtattttttatgtctggtcctgtaggggttctgagatcctatgggaatggggtagggggactacgcaattttgtttctaccaggagttgtgtgacttgggtgagttactttacttctgtggtcagttccccaatatgtaaaataatttcctctgttaaatcaagtttagcctaaagttgcctccttacatattttaagtttggcctaaaggtttctctgtacatcatgaactataacaagtggaggtgtaaacagaccatagcctacacttgtgccaatcactgagttttggccaatcatatgtagctaactgtttgaactgtgttcaagttaggcaaacattgagctgtaaccaatctggctgtttctgtacctcacttctgttttctgtatgttacttttctttttctgtccataaactttcttccaccacgcagctgtgctggagactttgagcatactctggcttgggaggctgcccgatttgtgaattgtttattgcgcaattaacctcatttaaaatttattcggctgaagtttttcttttatcaggtggtgtcagaagtggggttggaagtagagcttctaatgacccccagaagtgctgagtgacctagcgaggtaccctccaggcccattgtgtctctttctctctcggagcagctggggatcgtggtaagttctcttgcagattccgaagctccacagatttgtgtgttgagctctctgagtttctttgagtaaatttctgatcctgattgggtttgaaagtcgcgaaagaaattgaactgagtccaggatcggattggctccagtaattaactggcttggatccggttagagacctcttacatctaactggatcagaaagaaaccagtattaaatggcaatattgcaaaggtgtaaaatttggcttttggaaattcacagagatttttatgttctactcctttatttttcttgtgcacttaggtaggaaaaaaaatcattggctaagttgaacaagggacctgagagcaaagccagtatttgaggtaaaaaatgtgatactgaatttctgaagaactgagttccttctggattatacatgcataagtattaggccctggaaggagcaacgccttacagaaattgtccaggcgtggtggctcacacctgtaatcccagcactttgggaggccaaggtgggtagattgcttgaggctaggagtttgagaccaggctggccaacactgtgaaaccctgtctgtactaaaaattaaaaaaaaaaattagccaggcatggtggcatgtgcctgtaattccagctactcgggaggctgaggcacaagaatcacttgaacccaggaggtggaggctgccatgagctgagatcataatactgcactccagcctgggtgacagagactgtgtctcaaataaaatttttttttttttttttactaaagataacttgcagtagaacattccaaaagaacaacactgcactgaagtgcatttgaaaatgagggctcccaaattagtctcatgtacagtctcatgtagggatgcctattgatatgcagaagcttctaaaaaatttcaatatttgcatttaaagactttacaaaaaagaattaaaaagcttaaacaactaattgatttaaaaaattaaatctgccttgcgctttttgctgatggctgtgtgtgacaggattaggcatgtacaggatcatgggacatggggaacttttttctccccaaagcaggaaacttgagagctgatgagatggctggaaaagatccttcatgactgacaagcagctgcctgaactttttttttttttgaaacggagtctcactctgtctcccaggctggagtgcggtggcacaatctcagctcactgcaacctccgcctcctgggttcaagtgattcttctgcttcagcctcccgagtagctgggattacgggcgcccaccaccatgcctggctaattttttgtgtttagtagagacagggtttcaccatgttggtcaggctggtctcgaactcctgacttcaggtgatccgcccaccttggcctcccaaagtgctgtgattaaaggcatgagccaccgcacctggccctgaacttttaatttagtgtcactgcaataggtgggtccttctctgtcctccctgaactctttgccttccccaccctgctgcagacaatgcttttctttctctctttctcttctttcctttttctatctttcttttttttttttttttgaaacggagtcttgctatgtcacccagcctggagtgcagtggtgcgatctcggctcactgcaagctctgcctccgagggtcatgccattctcctgcctcagcctccggagtagctgggaccacaggcgcccgccaccacgcctggctaattttttttttttttgtatttttagtagagacggagtttcaccgtcttagccagaatggtctcgatctcctgacctcgtgatctgcccacctcggcctcccaaagtgctgggattacaggcgtgagccaccacgcccggcctcctttttccagctttctattatatcttgtctagagatcacatgttgaaacttctggctggaggccattccaccccactttgaatagattaaagatagcagagccccaccaggggcaagtttaagccttaccagttcaatattgggcactaagcagagtggctaatgtctatgttttgtcacatgtattttgctgtggctggaagggaaaatgttaattcagttccctcatgcaatctcttgggcagcatcttacaaaattgagaggcttttgcctatggttccctgaaatcagaaaagatgattttcctttgtgttgtggcttggcccccaggctatgtgcagctaacagggtcgctagggccactcagaaagagggaacccagaagcctggcatgctggcaaaagggtaagaatttcttagcagtcaggcttctggcctctctctgtgtggaaacggttgtaggagtagtaaaaatcactgtctcctctgcaaagttttaattaatgataaaaaggatttgtgaggctgggtgcggtggctcacgcctgtaatcccagcactttgggtggccgaggcgggtggatcacgaggtcaggagatcaagaccaacctggctaacacagtgaaacccagtctctactaaaaatacaaaaaattagccgggcgaggtggcgggcgcctgtagtcccagctactcgggaggctgaggcaggagaatggcgtgaacccgggaggtggaacttgcagtgagccgagatcgcgccactgtactccagcctgggcgacagcgagactccgtctcaaaaaaaaaaaaaaaaaaaaaaaggtatttgtgagccaatcttaagctgtagcaaacctggtgtactttgtgctatgaattggtctttctgtgtcatttggtcataaaaggggttaaataggataaaatgtgggcctaggactcccagaagtctgctgttcaagccagcctggcaaactggtcagttacaaactgcgggtccctgaaacaaaaaaacactggataaggtttccctgtcatcttgttttatgtcattgggagcttgaccttataatcacatgatggtactttcttttggtctccaccctctggaggacaggaattttggagttcatgtcatagttagctctaaaaattatcttgagcagttaaaagcctttgcaagctgaaaattggctgctcttaggctcctccttctgggaggaacaatggaaaccaccaacggtgtagcttagtggctaagctttgccatcttatgatggcagccaggcagggttcaattccagctcagggaatgagacctgtttggtttgatatctttctgatctttgctatttgctgattctcttcccctcatgaacaacttctgactctcgtcttgaattttcctttctctgagctacgtttggaaattctagagtttgtaaaaattgcttgctacctttttgaaaatacttcgtacacttgtggttaagtcataaccttgttaaagcttattggtttcacctgggagattacctttggtaaagttcaaaagccagacatattggctgtttggcctggctaaagtcaagtaataagagatttaaaatgattattttaggctgggcgcagtggtccatgcctgcaatcccagcgctttgggaggccaaggaggatggatcacctgaagtcaggagtttgagaccagcctgaccaacatggagaaaccctgtctctactaaaaatacaaaaattagctggatgtggtggctcgcactggtagtcccacctattcaggaggctgaggcaggataatcgctttaacctgggaggcggaggttgcagtgagctgagattgaaccactgaactccagcctgggcaagagagcaagactccgtctctaaaaacaatcaaataatttttttttttttttagaaagagcgctatagttaaaagtcagcttaattaaaagtggatatccaagctataggtatgtttaaagggccttttggttttttctcttcttggatctttgtttttttttaattatttttttctttttagccaactgaattgtttttctccattttgtcttcttgccacttttgttgcacacatgagaggacctaaggtaacttctaacagcctgggactccttgggaaaaacagaggaggcactacgatcctgctttgggatataactcggttttcctcctgaaacaccaggaatcaaaagcagatagatccctctcaaaatctaaggctaaatatccttttggggatggccaacagggtgaaacccagtctctactaaaaatacaaaaattagcctggtgcagtgctgcacacctgcagttccagctactggagagtctgaggcatgagaattgcttgagcctggaaggcggagttgcagtgagccgagattgcaccactgcactccaacatgggtgacagagtgatactctgtctcaaaataaaggaaagaaagaaagagagagagagagtggaaggaaggaaggaaggaaggagggaaggaaggaaggtcatttccacagttaattgcttaatgctggtgcaatttctgaaaacttcacaagtaggcacaattctagaatatggtgtcttttaggaggttcctgaaaggatggaaaggaccccaaaaagtattcttgattacaggtttctgataactttagaatcatatcatttttactgggtaagaattcctggagctttttttttttttttgagacggagtctcactctgtcacccaggctggagtgcagtggcacgatcttggctcactgcaagctccgcctcccaggttcacgccattctcctgcttcctggagcttaaaagactgactggtttataaaactgccatcccaagtagaacacaaattaattgaataccaagaaaatactttgcaagtctttcatgctaaatcacccaatactgaaattgtttagatacacaatttgaagaaactctgtggtctaactcaaattacctatgataacccatcagttatcagtgctatgcacctcaattggagaaacaaccgtgtcaagcatggactcatggagaaccaaggtggctgccttatccttcctgagcttttaaagcttttataatttaaagttctgcattccatgactcatcatggaaaagataaaatgatccaagttaaatgcatattggtgtggtgacttctaaattgctaaaatagtttatgaccaatgtttggtttgccaaacccatattcctgggaagacaatcaaagcttcaggtacattctgctacctcatgagccatttaaacatttatgaagagatttcagtcaattgtcattttcaatgcatgttttctggttgtgtaaaagctttcctatacaagtgaactgatgttataacagtagattattatttcacagtgtattttcaccaggtaaagaaagctttttatggttcactgactgaggacaatcaaccccttcacaatctagaacctgaagattggatcttctgagaacatcagagaaagactgcccttgccatccacactgcagtaaacatcagaaccgtgaactttggcttcatgatctcacaactgagaaggatccctccacattcttggaaatatacacccattggaacccgtaaggtaaagctaaccagggaagtttcttcccagaagaagatggtatccttgatgtgaacagctttcaccaagatcacagatcaagacttctctgctatatggaggctcttatctctgagtattttttcccttgctgatgcctctatgaacagtagaagtgaaaagggggtctgttgtgtgcacttatggggtaggtatacttttattggtgaagggttttgcagccagccttatacatggataacctcacaccttgatagatgaaagatgaaggcccagtgtaggtgagaaattttaatggtacataggttgcctcataatcagtcagaaacagaacattgattcactcccctattccacatcatgggttaaagagaacattgccaggaggccttcagtcttctagaagggcatttttccttaggtcctttttaccatgatttggagtaaaacaggcaatgattagaaatgtatccctcatgataggctctaaacagagtctactgtaagggcgatggttacacaacagattttacattcttttgtgaaagttatgcttaatagtaggattgctgtagattacttactggctaaacagagaagtatctgtgcagctgctggcacttgtggcctatggagaaatacatcacgtcaggtgtacagagattcagttgtaggtaattaatgaagagactgcttaaatgagtaaactctttatttagctcattctttgatctatttaattttgggtggtttggtttatggggaccctgtgtaaggagcatactccaaactcttggtattatcctcctgatagtcataatagtagtctacctggtgcactgtattctctcgaaagttttaaatgtttgcatgcagccatctctagaatgtcaaattgtctctcttcaactagaatgacaagattgaaagaaatgtgtgaccatgatggcattttaacctatgaatgatgtgttgagactggaaacccaaaatgatggtaactgagagtggcgctaaggccctaagctttggtcacattctcacctaagtgagaacctgaccaaaaaggggacatttttaaacaaaatcatgggaggccattgttttggactttaatgaaaggctaaatgcactaagccccaacagaccagaccaaaccaaaatggagtcacttgtgctaaatgtgacatgattaaactaagactttaaggaaacacatagatcctaaaacagaccaggttttgtttttttctcctataaacagaacgttccaacaaaaggaggtaacccttacaaaaataaaattaaaataaaataaaataacctgaaatccttgttcccccttacaaaactcattgttctgctatttcccagggggtttcaagaccaaataagtacatttacaatggtgatagtggcatcgatgactaaagttttggtaaatctctaaaaattgagaagattaccaaaagaggaaaattgttaaatcaagtttagcctaaagctgcctccttacatattttaagtttggcctaaaggtttctctgtacatcgtgaactataacaagtggaggtgtaaacagcctacacttgtgtcaatcaccaagtttcggccaatcatatgtagccaactgttcaaactgtgttcaaataaggatacacccagctgtaaccaattgggtgtttctgtacctcacttctgttttctgtatgtcactttcctttttctgtccataaatcttccaccacatgcctgcaatggagtctctgagcctactctgcctcgggaggctgcctgattcacgaatcgttcattgctcaatttgactcttttatattgaattcagctgaagtttttctttttttcttttttctgtttttttttttcgagacagagtctcactccgtcacccagtctggagtgcagtggcgcaatctcagcccactgtaacctcctcctcccggttcaagtgagtctcctgactcagcctcccaagtagctgggactacagacagcatgcctggctaatttttgtatctttagtagagacaaagaggtttagtagagacaaaggggtttcaccatgttggccaggctgatcttgaattcctgacctcaagtgaaccacctgcctcggcctcccaaagtgctgggattacaggcatgagccaccgtgcctggccagaagtttttctttgaacactttttttttttggggaaggagtctcgctctatctcccagactggagtgcagtggcgcgatctcagctcactgcaagttccacctcccgggttcacgccattctcctgcctcagcctcctgagtagctgggactacaggcacctgccaccatgcccggctgattacaggcgtgagccaccgcgcctggccttctttgaacacttctacgtggaagtgtgaggattcaatgaataagttgagcacatggtacatgttcagtgaatattttctgattgtgttcagtgttatcattattggaatgatgtgagggttgtgtaagtcttcagagaccagggaaacaactgaaatcttctatgagtcatttctatcattgtttatccccattccttttcttttcattcatttttgcatttctcattttctgtgttattcccttgcattcttaaaaactttcccattacctgcttgcttcttgtattctgtgtactttcctatgtgttcctcattctgcagtcttcttccccttcaagcagcagaccatgtgtcaacgtatgcagagtttgtgcagacacacagaccctctggggagtatatgtttgaatctgatgaagatgagcagttatttgtgcacctggacaagaaggagatggtctggcatctgtgagagtttattcacactgtgaggggcagaaaatgaagggaccagggatggaaagggatgggggacaaaacactaagctggcagtcctaaccccagtgtgtttattctactccaggtgtcaaactttctcagtcagaagttgacataaggaagtcaccagcttcggtctcctttaaatctccaggcctaactttcttttgaatctctgctcttcaaccacaatgacttatgtaccccaagacccctctacctcctggctgcctatgatcctcctgcacctagcactcagcaaagggtctgacatttagatagcactcaatcaatatgaagaatttaaagtgtagtgacaaggtggtgcccacactggatggtctgtatgctgtggtctcatcagggacctttctctgcactgcatttttcctgagaaatcccagagttcaataaatacctgtgtatgtcagagctagacacatctgatgcctttctgtgactccttatattctcagtttcctaggaatgcatatcctggacttgtaattgtaggatacaggtgcattatgggtgcagatacctcagttttgcatcctgcaagagttagtctgcagattgttcactccactctgggtacggctgacacctacagcatgcgtccaggggacaaaaatggaaggagatgactctgattggatagtgagaggaacacgggtagctctggtaaactgaccagggataggcgcccaggggcacacaaggcccagaagctgcttgtgagaagtcagggagaaggaagccaacaactggatgtatcagagagccactgagtgctcattatgtgtatcaggagttaagaatccatcctctacacgaaaaggaaagcttagaccaaacatgtcttctaccttgatttacagtaacttaatatgaaatgcaaaacacataaaaattttggattgtaaaaaaaagatcagtgtttgaaagagtgccacacctattgctttgcactttcaacaatggggaggcgtttctcactgtatgaattattagctcaggaggtctaggctggtgaatgaatgcagacttagaggataaatgtcgtctacttgatgcattcaaaaggccaagcaacatttggttaaggagtatttgtgatggcatgcaaagaaagtgttgaaagtgtgttagattatatttatcgttttaaattctgatgcttatttaatttcttaacagtaatgctaaaacatgctcttagtaagttatatgttgaatcagtgctatgttaatatgggccctataacacagatttgcagtctgttcaccactgaatagctaagaatagtggtttcagacctaaatggatgaagacaccaaacatgaggatggggcagctcactgaaatatagtaaatccaggagaggtctatgtccaacaggccaccttatacaatagtttggatggattttcatggttttcttctttcttatgtctaaaccacaatgaacttctttattaactcttactgtttgctaaaaccctcaagaaaaaaaagtgatgagacatgacttggtgtatattcttaacagaaaacaatcatgttgggttttgattactcatggcactaaggagaaaggaacttggttggaggccccatgagagaaatcatgcattgaatccaggaacagaatgatagaaactggcttcagtgcaactactcagcagcagcatcctcttgggaggctgggggtctgtcctcgaagcaggtactgggactaaagaaacagaaaatgcttgttccaaggtacattagtcttttaggcaaggtcagcaaccctgtggaggtaaaaaacagtaatcccaggttgctggcccccttcctttaagtcccaggagagaaaaataacggtgagaggctgaatctcaggctgataaagaatagagttgatctgagcttcctttagcaatggagccatgcaatgctctttccccactcaccccagggctgaggttgaaacaggggttcaggcctgagactctcttcctagaggagcctcagtgtcacaatgtacagaaaggacttatgtcctcctgtaactcccccaacaaggaaatcaaagcaggaatattgcctgtttatgcagatccttgttgaactgaaatgaaaggaagaaagagaatgtattcagctactgaaaccacctcagacaattagagaaacgtttccatcatacttccattgtccatcactcaatggacgctctgcaggagcctgagtaactgggacctcatgcatctggctgcattaagatgccaggctgggattcctctctccttagaagctgtctttgtttcctgactatgtgatttcagcaagctctctggcattgcttttttgtctcagcccctcatcatggaagaagggtgagcaagtcaggagaaaggtgggtatcggtcacctcacaggatttctcacctttcttcctccttctgtgcgtgaagatgtccactccacagatgatgagccccagcatgaagcccctggctcctgtcagcatcttgctctgcacagaatcagactgtgcctctaggaagaacaggctcaggttcagagtcacctccagcagctgcacccctgctcatgtcctgtctgagatcctgcagcctgatgcagaatattggcacgaggagagcgaggggaatacaccttgcatgacaggaaactgagaaacagtcactctctcaattctagaacagagggtgtgacctcaacaacagacaaattcagattcaattagttgcctctcaaaataacttagaataagctaaaaggctgaaggaagacaacagttcccatgtgtaacgtcagttcaggaaggtgtctgcatccctagattcttggacaaggagaggaactatgaatccttaggacctcctaggccgggggcaggcaagtctccattgtccccaggttaaaactacactcagtgtcttctatagaagaaaaatggggtcggacatggtcccagggtatagacacataaaaccagatgagtggaccccagagccagagagtcccctgctcttcagaggtggagtctagagggtcatcagaccctcactccactccacggtgacaggactgtccaggctggggtgctccacttggcaggtgtagatgtttccctgctggggggtcatttccagcatctccaggatctggaaggtccagtctccattacggatcaggttggtggacacgaccccagctgtttcctcctgtccattcaggaagcatcggacttgaatgctgtctgggtagaaatctgtcacgtggtagacaagcaggtcgtggtgctgctggggctccttcttggaggggagatgttcaccctaggctggactaggagtggcgaagtggaaaagtggaatagcatttgagattattatttcttagacatgctcattatggaattgatttctagatgttgaaaataggaatgatggccaggcgcagtggcttacacctgtaatcccagcactttgggaggctgaggcaggtggttcgagaccagcctgactaacatggagaaaccctgtctctactaaaaatacaaaattagctgggtgtggtggtgcatgcctgtaatcccagctactcaggaggctgaggcaggagaatcgcttgaaccccggaggcagaggttgcatgagctaagatcccaccattgcactccagcctggacaacaagagtgaaactccatctcaaaaaaaaaaaaaaaaaaaaaaaaaaaagtaggaatgatgtgattaggtcagcagataaggggagtattgaaactatagaaatagtattgagaagaataggaggcacacaaacttaccagtttgtagcacatttaaaagaaatcttatctatcagccactgattaacagcctttggacaaagaatatttaatcagcagcgacactaccttatcttttgagtgctctatcctgatgcaaaagatgaaaaatttgctcaaatgatttcttgaaattaatatatatataaacaacattctcatggtctattaatccaataactatatttcataaatatatcaagaaaataaagtgagcttgacgtgacttattctgcaagtaacctatggattttttggcctcgcctacaaacactcaaaatcgtcctatttacataatatcctgagcccctacatgcttaaatagtagaaatcccatccttttccctaagttcctcctctgcactgtgttgtcacatccattgaggttctcagataaccaggtgttggctgtgccttggcacctctctatttttgccccctctttttctgccgcttacagatcaatttccacgctaccacctgcagcttttcctttggacctcagccactagtacccttttcctccacagaaggcagaaaagggccaactgcccctagagaacagctcaattacaggaatgttccaaatcagagcttctaggtccttatttactctgttcttgagaacacaaatacactgacatgggcctgggccaggtaaatgaacagtctttaactaacccccaacccttactccctatggcatttttgccttgtgtccaggattattcacattcacagcctcttccctcgatgtgattttatttcagaggcacttggctctcgttctacttcaaccacctccataaactcaacatccatcagactggtcagcccatgtctgaatcccaactgtagattaagtggaacttcttccccataggtgtcctgggaagcatgaaagtcatgggatatatggttgtctgttttaaggtcccagaacattccatgagaagcactttgctccatcttctttgacgggagctggtcagcctggagcacatcagagacctccagggggcgctgcagctaaggcttgatacccagtggcctcatttctgacccagttcaaatatatttcaccaaggcaaggattcctgtttgttctagttgcctttgctcagttaattctagatttgggtgggcatccacactggaatggccagaacttctatcctcctctttcctccgtctcccctacccctgtgtttttctttattctaattcatgcccttattatgatttccctggacaataatagcagtttcttatctcatctccctgcctctggttcctgctctctccaactgacttcacagtcttctgaaaacagatttccagccttgtcattttttttttttttttttttttttttttttgagacggagtctcgctctgtcgcccaggccggactgcggactgcagtggcgcaatctcggctcactgcaagctccgcctcccgggctcacgccattctcctgcctcagcctcccgagtagctgggactacaggcgcccgccaccgcgcccggctaattttttgtatttttagtagagacggggtttcaccttgttagccaggatggtctcgatctcctgacctcatgatccacccgcctcggcctcccaaagtgctgggattacaggcgtgagccaccgcgcccggcctccagccttgtcattttaagatttctgaagattttcaaaaatcttcagtgttctgacacttatctggttacatgggaatcacttgggagctgattaaaaacacagatctccagacctccccacctagggaatctgaatctctaggcagtgagtctgggggaatctttgcttcacagaggatctcaaggagagtcttctgagcagtgaggttggggacctgctggcctagaggagaaatccacactccttagtctggcatcagggggtctctgcaatctggcagctgattaccatgaaagaaaatgctgccatgtcgctgatttgggcctctatgaagtcttagtgacagattttgcaaattgtattacttttatttggacacctctctcaaccaattacgccagcaactttcctaaacccatgtcactctcctcatccttactcaatgtgtgcatcttctccctcttatcagatgaccttcctttcactttcccaggaacagagggatcaatggtgtgacctcctgagcctcctcctcctcccccttcattctttcctctttctctaggacaaaggtccttgtttagtgagaggctcactggtgctttttggtctccttcacgggatttctctcttggccaaattaatacacgagttattaagagattatttttaggcagctaaaaagggtaaaagttctgggtggaattttcctttaataaaaagcagccccaagccattttttctctaacagaaagcagcctgaaaactcaggcatagatatgcaaactagaagcttttatgtaaatgctggcagctgttcctggaagtcaggtaattcaatatggctattctcaccctctttcccttctacgtttacaggtgtcaaggcagcctccaggttaaagcacgtgtacaggtatcatggccgccaccaggtggaggccgcatttgtataataaaatactagggtgggaaggccagtctttttgcaggttatgtaaatgacacacctggtcaaaccaatcccctgagccctatgtaaatcaatcactgcctcctcaagcctctgtacaaaaccaattgctttccaccagaaacaggagaccctctcttgggtgacctgccttatcagcattaggaagcttttcctctcactcctcttttctattaaactttccgctcctaaacccactccttgtgtgtgtccgtgctgtgaattcttttcggctatggtaaagaaccagggtatataccctagacagtggagctgtttcattttgggagctcatccgggatccaaatcagaatggaagatagaaacatcggagtggtgagtatagagcaaacgtcaaatctgttctttaatctcaagaatctcttcataccagtttcctttcatggagaacttcaccatcgcatgaggctgggaaagtcttggggcaactgaaaatttctggccagggcacaccctggtgttattcaaaggcttctggactgaacgcagcctccgacagcctgtccaggtgttggtaatggatctccagctaacccgttgcaaaattttcctttcctttgtatccgtggtcactatgtctcctgtcctctctctctgtgtgtgcaatttgcgggaagttttacagttcagggaaacactcctgttagggaagatcggcaaatgccacaggcagtaactgttactctctatcctctctggcgagcacatggtagtgctaagccaacagcaccacctagtggaaataaaaatcctcttcatcaggcaccttgtcggttttttaccgtaacactgccgcttccaaattctttcgtgccgctagaaaagcctcttctgtgaacgagaaagcactgtcttcaacagtttggagtaaaatgtcctctgtagtgaaattttagttctgatactgtctcatcagcaggaaaaacagccattaggttcctacgttcatttccgtctccaattaggatagtacttaattagcaaggggattttaggttcggaagttaaccagagccattttgctaagggtaaatgtcttagcatgggccgtaatggcaggcaatctagcacactgcctccgttaaaggagcctacccaaagatgacatagtctctctggagatccatttttctgggagccaggcagatcacacaaatttaggacgtcaaaggggatcacataaggtggataagctaaggttgtgtgggtaaagtatggttaatcccatcacttagtttatccagttccacggcttggaggaccacgcctacaaccatgggtggtacatttaacacgttgccaggacccaggaaccaaggagagaaaacagtagggaggacacttccactgtcttctcctccaccctgggtcacaatgaaagaatggggacgaaaggatacttttattctcacttctttttctagatgggtgacagaccagcttcagcttgcacccctctggagtgcactctgaaacactggaactcctttaacctcaggactttgaagagaaaagtgactcattttcttttgcacaagggcatggcttttttactaaacctttgcaagcactgtaagatcagcccagctttttaaataggcatatcaggtaggcctatagaaaataatcccccagaattagaaaggcaatttccaagggaaccatctgagaattccccttatttagggttgccaatatgggggaagtaaagagaaatcagactgttgctgtgtctatgtagaaaaaggaagacataagaaactccattttgatctgtactaaggaaaattcttctgccttgacatgctgttaatctgtaaccctagccccaaccctgtgctcgcagaaaacctgtgctgtattgactcaaggtttaatggatttagggctgtgcagggtgtgctttgttaaaaatgtgtttgtaggcagtatgcttggtgaaagtcattgccattctccagtctcgagtacccagggacacaatgcactgtggaaggccgcagggacctctgcccaagaaagcctgggtattgtccaagggttccccccactgagagagacagcctgagacatggccttgtgggaagggacctgacctgaccgtccccaaggctgattcccataaagggtctgtgctgaggaggattagtgaaagaggaaggcctctttgcagttgagataagaggaaggcatctgtctcctgctcatccctgggaatggaatgtctcggtgtaaaacccgatcatacattctatttactgagataggagaaagccgccttatggctggaggtgagacatgctggtggtaatactgctgtttactgcactgagatgtttgtgtaaagtcaaacataaatctggcctatgtgcacatccaggcacagcacctttccttaaacttatttatgacacagagtcctttgctcacatgttttcctgctgaccctctccccaccattaccctatagtcctgccacatccccctcactgagatgatagagatagtgatcaataaatactgagggaactcagagaccagagccggcacaggtcctctgtatgctgagcactggtcccttgggcccactgttctttctctatactttgtctctgtgtcttatttcttttctcagtctctcgtcccacctgatgagaaatacccacaggtgtggaggggctggcccccttcaacctcaagctcccttttcattacaggaccttaggcaaacaaaggaagacttatgctaattttctgataaccccaataggtatatagaagctgtccagaatttaactcaggtgtttcacctcacatggaaggatgttatgctgctcctaaaccaaactctaaccgcagttgaaaagcaggcagctctgcaggcagcagataattttggagatgagcaacatatctcctataatacaccaaaagggaagaaaagagatagggaaagtgaaaaaaataacagaaacaccattcccagtaggaagggaagcagttcctctcgacaaccccaactgggaccccagtagctctgcaaatgaatagaaatggaagcatttttaaaatatgcatattagagggtctatgaagaactaaggcctgacctcttaattcctctcaactgtctatgatagaccaaaagccagatgggaatcctgcagcttttatggaaaggctgagagaggcactaatagagcacacttccttagcccctaattcagtcaagggatggctcattgtaaagacaagtttattacacaggcagctcttgatattagaaggaaactgtagaagcacgctataggaccagatagcaccttggggaacctcctgagggtggccacttataatagggaccaggaggaggccccccagaaagagagaaagctcaggagaaagacagaggctctagtagcagctttgcaagcttgcaaagtccaagatttctgaggtgcatccgctagttgctatcagtgtggcaagccagggcattttaaaaaggagtgcccaaacagcaagaggaagccacctcaaccctatccagcctgtggtggagaccactggaaatcaaactgcccccggagacggaggtcactggagtcagaaccagtctcacagatggtccagcaggactgatgggtcctggggctcaaaccccagctccagtggctcaaactgccattacagcacgggagccaccaggtgattctggaaattgaaggaaggaaactagacctccttctaaacactcgagccagtctctctctcttttctcctctttaatccaggcctctcttcttcccatagcgtgagtgtaaggggtgtctcaggaaaaactctattccaatatttttctcaacctcctaattgcagttaggaggacctattgtttacacatgcttccaagccattgccacggtggctctactagtcaaaaaagcctccaaattaaccctaggaaataatttaactgtttacaccccacataatgtagcaggattactgtcctctaggggagactttagctaacaaacagcaggtaaagcaagaaatacataaggcaggacaagcaatagtcactctaatgtctctccccagacacaagcactcaattagctgaactaatagttcttgcaagtgcacttaaattaagcaggggaaagatagctaacatttccactgactccaagtatgctttcttagttctccatgctcatgctgctatttaaaaggaaagacattcttttaccactaaagcatctcctataaaatatcaccaggaaattaacaggttattatcctcagttttcctttcacgaaaaatagcagtaatgtattatagggaacatcaaagaggaacagatgaagtagccaaaggaaataggttagctgagcagggagctaagcaggcggcagggaagcctcaaggcattaacacacttcaagcccttttaatctcggaagcctccataaaagaaattaaacctcagtattcccctgcagaaataaaataagccacttcttaagggtattccagccctgaggatgacaaactccatttactggcctccagtcaatggaaagtccttaaaatccttcaccaagctttttcacataggaaaggataaaacttatcatcagtgtgctcagagattgttttcaggcagaaaacctctaagttgtttaaaaatgtaacctctctagctcacttccaacagaaattgacacaactagccaaaggccaaccccaggaaattggaccaccagaaaatttggtattggtgaaaactcatctctctctccttccctaagccaggctgggaagggccctacacaattcttctttcaacccccccagcagtaaaagttacaagtatcaacctctgaatatatcacactcaagtcaaagcctgaaaagctgagggagcaacctttgacagcccagaggaacatcctgaatatcaatgtggagatatagaagatcttaagctgaaaatcataaaaggtaagtaaatgagtgagggctactcgccttagcgccaatcctacctcaccaggtactctttatcatttctacctttcctctcaaaattcactgctcagtattagaacttttttttaatgcatatttgcagagagattttaattatacatgggactgcatttgttactttgtaaatccccaaagggaaacattatatcttggcaagtaaagttttaaatggaaattatttactacgtcacttttgtgggaattgttatcatcatgctgttatttgcaatagaactgtatactgtggcacccacaatgtggaattctggttgtaaaattctaattcctgtaatattttgcctaattatcatctttatgacagaattaataattgcaggaaggatttggtcaagtttgttttgcttatagcaggagtaatagttacagacaagaagtaagcatgaaaattttactatcactaagtttgataggacttttttattgaagattggtaaatggtgcactctaagctatggaaagaaggttacaaataaagggattttatataagaaaggatcttgtatagtaaattcttgtcctaaaaggaaatgactggttgtttaagacaagtcagaaagttgagtacattgtaagagggtctgtgaaagtcatgaaagaatttaataattaagaaatttaataattaaaggaaaggaattgccaagattaacaccaaagttattttagccacccaataacgtttttctcccaatcatatcataagttataaagaatggcctaaaccaaaaattatgccctaatagcaagtcaagggggaaacatgttttctcaaaggaaatgatgcttttatattaacgtttctggtaatgtacagcgacatctagtggagacaaaccagtattacaatccattggtgtaacaggtatcaaactctactgccatagttacagtctataggtggtaatcttaatactcatatggtaaccctatattttaaaccttcttgtaaaatttatctctttttgcctagaagcaatcaaacttcaaatggtgctgcaaacaaagccacacatggacatgccattcttccaagaagccttagatcaacctcaggaggagccccaactgcagccccccgacacgacgccccttttcagcaggaagtagccagaaagaatcgtcgtccaacaccccctaacagcagttatggttacgtctcctgagggaggaaataatacaggagttattaagaaattatttttaggcagctagaaagggtaaaaattctcagtggaattttcctttaataaaaagcagccccaaaccatttcttctctaacaggaagcagcctgaaaactcaggcatagatatgcaaactagaagcttttatatgtaaatgctggcagctgtacctggaagtcaggtacatccaatatggcggttcccactctcttttccttgtcaccacgtttacaggtgtcatggcagcctccaggtaaaaccacatgtacaggtatcctgtccaccaccagttggagaccgtatttgaataataaaagactagggtgggagagtcagtcttttcgtgggctatgtaaatgacacaactggtcaaaccaattccctgagcgctgtgtaaatcaatcaccgcctcctcaacctctgtacaaaaccgactgcattccaccacaaaccgcagaccctcttttgggcaacccactttctcagcatgaggaaggattttttctctcttttcttttctattaaactttccactcccaaacccactcctcacgtgtgtctgtgtcgtgaattttctcggccatgacaaagaaccagggtatataccccagacaatggagccgttacaaaatcacaatgtccagttcccaggatccagtcctatgctcctcccgatgggtcccctctccctgggtggtctcatgtaggccaggcccctcccccgctgcaaactcttctctcacctgcccatcagaccacccatctggcccctcaagcacctcaaacccggccatctccctgcaggtttcttctctgcgtggcctgctgtgccatctccaccttcatctccacaccgcacccctgcacgatgtcctgtggcctcgtttcccctcaccccacatgcagtcagctgccaggcctgatgaagtcccaggggtctctctccctccatcctcctcactccatgctcagcccaatctccgtgctcaccctcctgacaagctccggttgggctcctcccatcaatccccagctcaaagtccccttccctcctggcactaaggtcccttaggccggcccggctgcccctactccctgggcccggcccccacggctgccccaggagccctggttcacagccctcacctcggcgctgccggatgagtggctccatcagctcgtacttgtgtctgcacaccttgtccacctcggctcgcttccgttccataaagtccttctggctattgaagtactcgcctatgggccgccccagctccatcactgctaggaactcccccactgcgctgtcaaaatgcacgtattcctcccggttgtagatgagcccgtccacaacgcgctgagtcccattgaacgcatagcattcctgccgttcctggtagacggaattctctgtgaagagcagggagagatgggggtggtgccactcccaacaacacccccctcctcaatattagctatttcctcaaatcttcccactcaggactggatttaaaaatacgatttttcctactaccgagttctgtggtcctaggcaggtcacagactccaggcatcagttttctcaccacgcagcgagaggatttactgaaaagaatgagactcactgctcagggtggctgagtgatcattagggaggggcgcacgctgaagggaaagcagccctttctgctggcggctggaggaggagggggagacatttcacgtctcagggaggagcagaatctcatcagggggagggtccctcaggcagagaaacagtagggataggaggagttggggacctggagggcagagctgctccccctacccaactccctgcctgacatttccatcctgatgtcagtcctggctcaaatgccacctcctccaggaagccctccattccttctttccctttctacagctaggttctctctcttctctgccagtttcttgagaatacctcaagttgctcttgctgttctgcatgctggacatctctgcatgctggaaatgcagaaatgcatttccatgcattcctccctccctccctcccttccttccttccttctttcttctttcaatggagtatccttccctccctcccttccttccttcctttcttcctttctttctacagagtatcactctgtcgcccaggctggagtccagtggtgcaatctcagctcactgcaacctccgcctccagggttcaagcagttttcctgcctcagcctcctgagtagctgggattacaggtgtgcgccaccacgcccagataatttttgtatgtttagtagagatggggtttcaccatgttggccaggctggtctcgaactcctgacctcgagatctgccctcctcggccacccaaagtgctgagattacaggcgtgagccaccgcacttggccagaaatgcatttcttaaaacttcttgaagtttgccataagaaagactatatagcctgaaagttaattttcactttcaaacatggctgtagaaagacttgatctcaaaacacctggaaaatatcttaatcaatgaaaatcaccagaacaaccagaaagctaagtgactggactcctttaggtttagaggcattgatggtgtcatttttacataaagaaatgtggcagccttttccacctgcagttcttcctagggagcaccatgggcagtgtccggcaggtgcatgtgtatacagaagtagcaatgacccagcacatgtctgagcctcttcagacctgatctgttcctggtcacagtggggaaattaaggtgctgtgatttgcacacagcaaattaaggtttgttttggacacctgtttcatgttctacaaattagcaactcacgtttattaacctcacccctcatagaagatgcacagctggtggcagaggacagtagagaaggggtggggctgggcacagcggcaccgtagactcggcctgtagtttccagtgtcatctctaaggcaagatcccaggactttagatatcttaacccgcctcttctcctagtgccttgggctccagccccctaaacacccaggcccatcgcccccagcccctttagtctgcccctccctattcaagtgccccactctgagtgtgtatcctctcattttaatttgttagtctttgttcctcttcctcattcaccaataagagaacatgttttagtcaagagtaagaatttcaaaactttcttttgcaacatttaactttttaaagggaattttacctgcaaagcagatataagtgatgagtatatggtggaatttgaaacttcattttttttttgtatatggaaaactttatcctgtttgcggaatctttgacaattgagttacccagagcacaatttgaaaaccaatgatctgagtgaattcatctctcactcagaataggttatattaaaatataattgcagaaagatataatggagtccatatgggtaagaaaaggaacatgtcacaggtagggattccagttcttgcactacgactgattactaagttatcttggacaagaaacaaccttctaactctccatttcttgaaaggcaaaatagtaataatactatttaccttgcaaaactgctgtgagaaccaaatgagctcacatatgtcaaatacatagtattgtatctgttactgctcaatctatcttagttcccttcctcttttcactgtgtgacctgtttgaataggagcaaaattctaaataaatgcatatgaaagaggaactggatcagcttatgagctactggaaaacctcaagaagactttccatgggcaccagatcttaatggttgaaaagtgtttgttggctgtttgctgactggatcttcccccctctcttttgtgctagggattttatttgaggagttagattaacagaagagtgagtacccaaagactcaaatgcacaatgagcttctgcaagtgcccagctggtgtgacaggaggactcgggagtgtggccctaatgcttggggtagtgggtggggtgaggtaagaaactcagctgtaaaaagcccattttaaagcttgtcagagacaaaagggtgttgcctccaggagtctggttttttcacctgccgtgtcatctcctgctccctaggtgttgtctcagccaagcttttctccaccctcccctctctcactttaagccacagcctggctccttgtgcctttcctcttgtgctctgaggatggagatgtgtgtggagttggaagagcatgcagggaattgtggaattggccctgcccactctacccactcccctatggctccagctctccctccagcaggttttgattggacattcattctacacggggagctctggtaacccaccctcggttcctgtcacatggctccactgcctcatctcatttcccctaccaacctcaacccagtctttgcccgtccacctgttcactgcccaccatcatcacgctccctcctgtgctttctgctaccccgcaccttgagggtttccatggcgtttcccaacaccacccctcatcctacaaacaactctgcctatggacactgttgctatggacctcctgctggacactgttcagtgtcaccagcgctgctccagcctcctctctccccaacctcacccctctccagttcccagggctgagccattctgctggttagttctcagcacccctgtgactacaagtgcagtttgtccaccctttcccggacaatgaacctgaggtaataggtgaggggctttggggtttgaggggctgtcctcaggagattcgaatactgttaccctggaaaatgaggaggtgacatgagaacagcactttctaggggtgtcctaggtggatgtggaagggtctcagagggagggtctatgcagaaaggtggaagtcagtggaaaactaagacacctactctgcagtccttcctctcagggtgttggtgtaaatttggaccagaaaagtaagaacatcctgagagaaaaacaatgggtcatagaagccataatattacaccagccacaaggagacagcaggagacagaggtttttcccttggttactgctttcttggctgtctgataacctacactcaatctctttcacgtactcacacatccttatctcattcttctgacaggtttcaacccatcctaatactctaaccaagttctggggaggctgggagaaataccttcaacaagagtgcctttaggggctcgaacctgtccccctccctcccatcttgccttcattgtccagggagcattggctcctgctccaccctggagaatgagaggcattctctgtgagcactgaatcctcagtgatacttgtagtctggacacaccagctaagggctctctgcctgagtcccctcaaggttggatgcagatgtgagcacacccaggagtctgcacttgccaacctctctctctgaaaccttgtctgtccaaggttatcctgaacctcttggccccatttccccatagacaagcaacttgacccctgagcacctccccttatttactgtgtccatgttcctggagagagaatagacctggtggatagcaacctatcctataggaggtgagtttgattctccagctgtgatagaaggacactaggccgtggcaggagccccacatgctgtctcagagtctggttccataaagagaaagtcccctaggaattgttccctgagccagaccctccaggaatagcagctctgctcttacctggagtggccctgctctggaccacagatatgagcagcaccatcagtaatgctgtcagagccactgtccaggggccccctgaaacctgcaggatcatcatggagttggaaaaggttggcagaatgaagagagctgcagtcaggaaaacaagaactcattaaagggagctcctgtctgaaatattagagaccatgaacccaagcagtcttctgtgaccctaggattggacagactctgagaaaagaaccaatgggcactgagctttgtatgagtcattgctcactgggcagaaagttagtattaaagatctgacaatatagagccagtgatgctgttacgaggacagatggagaacactgacactcattttaaccagtcagagtcatgagttttggggagatgatgtgttttctttgctctgaaggtgatctcagatattctgctggcccacctacagggattatcatttccccaattctgccacacctcacacacccacaggacatggcctggtgtggaagaaatgctatctcaatgtgtaaaaggtcattcagtggcatgatttagagagattagagtatccatcccagaactgaaaatgaggcctggagtctgttttgcctttgttcaaggccgtgcttcagattagtgcacattcatattttcttcctcccacatgtctgtgagtcctgagatgtgcgggggatactggctccttccataggactgtcatcagggtcagcagggctcagtctaggggccttacacctgggagcatggacacaccacctacactaccatggaagtatgcagcttgaaggacactgcctgtcttggacttcagttctttgtcttcagtatggggatgatatgacctgcctttacagcagggctcttaaggtcaaattagatcaacggatctgtaattgctttggaaaaatgagactaaaaattatacagtgaatgaggaagaaatgaaaaaatgtcataaaagaccctacattttccaaaacatctgattctgtggtgtttatactgaatagtttcataaactttcaaagaatattactccttaatttaaagacctataaatgtgatcctgtacgacctcctaatctaataaagaaaatgtaaaagtggcatcatttgtttatataaatgttaaaatgtaaatagaagactagcatgtaaaattcaagagaagaaaataattatgcagtagaaggggccagtataggattgcggggaaaaagctcacgttccctgccatagtcaccaagacagcatggtactggtataaaaataggcacatagacaaagggaacagaatagagaacccagggataaacccaaatacttacagccaactgatcttcgacaaagcgaacaaaaacatatggtggggaaagacacccttttcaacaaatggtgctgggataattggctatccacatgtaggagaatgaaaccgggtcctcatctctcaccttatacaaaaatcaactcaagatggattaaggacttaaacctgagacctgagactataaaagctctagaagatcacattggaaaaacccttctagacattggcttaggcagggatttcatggccaagaacccaaaagcaaattcaataaaaacaaagataaatagttgagacttaattaaactaaagagcttttgcacggcaaaaggaaccatcagcagaataaacagacaacccacagagtagtcacaatctatacatctgacaaaggactaatatccagaatctacaatgaacacaggcaaatcagtaagaaaaaacaaacaaccccatcaaaaagtgggctaaggacatgcatagacaattctcaaaagaagatatacaaatggccaagaaacataagaaaatgctcaacatcactaatgatcagggaaatgcaaatcaaaaccacaatgtgataccaccttactcctgcaagaatggccatgataaaaaaataaaaaaacagtagatattggtgtggatgtggtgatcagggaactcttctaccctgctggtgggaatgtaaactagtacagccactgtggaaaacagtgaggagattccttaaagaactaaaagtggaactataatttgatc

SEQ ID NO: 1754 - protein, 336 aa, Homo sapiens
YMATSGLDHQLKIFDLRGTYQPLSTRTLPHGAGHLAFSQRGLLVAGMGDVVNIWAGQGKASPPSLEQPYLTHRLSGPVHGLQFCPFEDVLGVGHTGGITSMLVPGAGEPNFDGLESNPYRSRKQRQEWEVKALLEKVPAELICLDPRALAEVDVISLEQGKKEQIERLGYDPQAKAPFQPKPKQKGRSSTASLVKRKRKVMDEEHRVNEHWHGPGLPQAAPSCLCLCPCQPATSHSVPVSSPSPVPRTRSGRAFSSSIIRRRRPSPRGPGHLPWTDLCAEPDSRVAWEQSLPKITCREMSVPWNKEVGAVWPLPQLGVDSCLLGWVGIKEESDFLD

SEQ ID NO: 1755 - DNA, 365 bp, Homo sapiens
ggcacgagctcaatctgtgccactcactgccttgagcctgcttcctcactccaggactgccagaggaagcaatcaccaaaatgaagactgctttaattttgctcagcattttgggaatggcctgtgctttctcaatgaaaaatttgcatcgaagagtcaaaatagaggattctgaagaaaatggggtctttaagtacaggccacgatattatctttacaagcatgcctacttttatcctcatttaaaacgatttccagttcagggcagtagtgactcatccgaagaaaatggagatgacagttcagaagaggaggaggaagaagaggagacttcaaatgaaggagaaaacaatgaagaatcgaat

SEQ ID NO: 1756 - DNA, 331 bp, Homo sapiens
  misc_feature (181)..(181): n is a, c, g, or t
gcatcctgaatgcccaggagacgtttaagttatttatgaaaagatgtgtgtacagagaggaagagggagcaaatgccgttcggattatgtttcgattataaatgaattatcacctcgaagtcactttagaacacatgttgagatggtgacatttcccagcctgcctgcccctctgcccacnccggtcacattgccctgagcttctttccatgacagcagcttcgacgagccggcaggaaactcaatgcccctgctggctccatttccatgtaaatggcgccgttcatatttcacagggacgccgtgcatctccgccgtgcgtccccggcac

SEQ ID NO: 1757 - DNA, 482 bp, Homo sapiens
  misc_feature (30)..(30): n is a, c, g, or t
  misc_feature (460)..(460): n is a, c, g, or t
  misc_feature (476)..(476): n is a, c, g, or t
aattcggcatgaggcagtccttatcctcantctatcttcactcccatcatcatctattttcacactatccagctaagcaaagattcctggaggctgacttgtatcttcagactcacagagtgaattcagctcttctgaatcaagacccacccagtctctttcattcagacctgttgctaacaaatttatatttgccaaggatattaggcaaaagaggctacttgattggtggccaacctcgtgcccacatggaaggtatctttaatagggtcttttcaaaccttagtggaggagggtcagctcaatttgggcaatgcatttgttcccagtttcattttcttcctggggaattaactcgtcatttcattccttcagtcatcttctgtgtaggtgaccggagcactgaggaggcagctctgatgcactattgtgtgttcagcagttcaaaggccctaaaacnctgaagggtctgcatngaagtt

SEQ ID NO: 1758 - DNA, 568 bp, Homo sapiens
  misc_feature (568)..(568): n is a, c, g, or t
atggttcttataaatttatgttttgaagacagcatagcactcaagaggaattcgactgttaaggtcggtgaaaccttgttaagtgtctactcaattcatgaacttccatctcagtgcttttgaattcattgagctcctttcggatggcagctttgtctgcagcggtgaggcgggtccacggcttatctgccctgcggtcatagtcctgagcgtcagccacctccacgtagtcactgaagcggatgaggatctttctttcccgaagctcttccaccgtgggcctttgactgagctttcgggttagcctcctcttgatctctctcttctcctcctgttcctcttgttcattccgaggtttcaaaatgttcctctgttccagttcctctacagttggcctctggctcagccgcctacggaaaaaatccaggaaaagtttttggaccatatcatagcctccttgggtcattaatttcctcggcccttgcagatacatgagacagtcagtggctgggagtcttgtgcatcctgtgctctggaagactgaccctcgtgccgaaatcttgggctn

SEQ ID NO: 1759 - DNA, 1389 bp, Homo sapiens
cgcggacttctgccaagcaccggctcatgtgaggctcgcggcacagcgttctctgggctccccagaagccagcctttcgctcccggacccggcagcccgagcaggagccgtgggaccgggcgccagcaccctctgcggcgtgtcatgggcccgcgccgccggagccgaaagcccgaggccccgaggaggcgcagcccgagcccgaccccgacccccggcccctcccggcggggcccctccttaggcgcttcctcccatcaacacagtcggcggagacaaggttggctaaaggagatccgaaagcttcagaagagcacacacctcttgataaggaagctgcccttcagccgcctggcaagagaaatatgtgttaaattcactcgtggtgtggacttcaattggcaagcccaggccctattggccctacaagaggcagcagaagcatttctagttcatctctttgaggacgcctatctcctcaccttacatgcaggccgagttactctcttcccaaaggatgtgcaactggcccggaggatccggggccttgaggagggactcggctgagctcctgcacccagtgtttctgtcagtctttcctgctcagccaggggggatgataccggggactctccagagccatgactagatccaatggattctgcgatgctgtctggactttgctgtctctgaacagtatgtgtgtgttgctttaaatatttttcttttttttgagaaggagaagactgcatgactttcctctgtaacagaggtaatatatgagacaatcaacaccgttccaaaggcctgaaaataattttcagataaagagactccaaggttgactttagtttgtgagttactcatgtgactatttgaggattttgaaaacatcagatttgctgtggtatgggagaaaaggttatgtacttattattttagctctttctgtaatatttacattttttaccatatgtacatttgtacttttattttacacataagggaaaaaataagaccactttgagcagttgcctggaaggctgggcatttccatcatatagacctctgcccttcagagtagcctcaccattagtggcagcatcatgtaactgagtggactgtgcttgtcaacggatgtgtagcttttcagaaacttaattggggatgaatagaaaacctgtaagctttgatgttctggttacttctagtaaattcctgtcaaaatcaattcagaaattctaacttggagaatttaacattttactcttgtaaatcatagaagatgtatcataacagttcagaattttaaagtacattttcgatgcttttatgggtatttttgtagtttctttgtagagagataataaaaatcaaaatatttaatga

SEQ ID NO: 1760 - protein, 140 aa, Homo sapiens
MGPRRRSRKPEAPRRRSPSPTPTPGPSRRGPSLGASSHQHSRRRQGWLKEIRKLQKSTHLLIRKLPFSRLAREICVKFTRGVDFNWQAQALLALQEAAEAFLVHLFEDAYLLTLHAGRVTLFPKDVQLARRIRGLEEGLG

SEQ ID NO: 1761 - DNA, 280 bp, Homo sapiens
  misc_feature (38)..(38): n is a, c, g, or t
  misc_feature (41)..(41): n is a, c, g, or t
  misc_feature (48)..(48): n is a, c, g, or t
  misc_feature (210)..(210): n is a, c, g, or t
  misc_feature (228)..(228): n is a, c, g, or t
ggaaaaaatgaaaataggaaaaaaggaagtgaaagagntantaaatanttagatcaaataagttgatgaaaggggactggtttagcacaagccatccacattaattcaaacctgtggctctgaagtttgttttttaaatgaccacaagtgtaagactgaatgaaagaataaatgcgtgcattccataggatgcaagaaaaggagtgaggnatgggaaaattggaagancgagagggggagagatgtaagaaaagaaaggaaaagtgaagtaggcatatga

SEQ ID NO: 1762 - DNA, 463 bp, Homo sapiens
gcgagtcggtacccctcacgctatccatggtggtgggaagtccctggagaagatcatggaaacacagtcataggctgcaagtctattagataattccattggggaaggagcccatttgtcatgcatggctgcaaggggcagatacaagtgtggagtaagcttgcaagagctgatcctggtcccagagagggaaaaatatgccttggtgggtaatgaaccttttgttcccagaggcagaaggactgggactaggccaacatagagattggcgatggttgtgagattctaagagtgtgtgtgcatcttgacaatattagaggaggctgagcccaagcaggcacattctcttcgacccctccctcattcagtctgctttggagtctactgaacatcaagcttgctatgagcaggatcttagagctgaggaattggcctcccaatccgaacaggtgttataatcctt

SEQ ID NO: 1763 - DNA, 6267 bp, Homo sapiens
cttccatgtgtgaaagctacttggcatgaatgcctgggccgtaccaagtgtcaccgcagcaagagggggagtcagaagaaaaacagatcagaccaagcagacaataggcccctaaagtgttccccctaagttgctttgatgttgtcctggtgtcttgataccaggaggccagggattgcgggaaaagggtcttttttgtcttcattcactttcccccctcagtttctgaaatgattctccagaatttctcctcataaaaaaggactgaatgtgggcccagttggcgtcattctgctttgacctaaacattcccatctgattgggtggcagagatcatttttggaaagttcttccgtgtcccgatgtagaagaaatagcaaattggacatattgaaagacaagggtcatctttgagaagggggttcctggactcctcacctccaggatgagcactgcagtgtcgtgacccttggggttttgtatgccctggagatgcgagattttcctctggcagcaggaggcacgcacccagagaatgctggagctgcaaggggaaaggacccacttccacagcagagaaaaacaaagaggaaaaaggcatacaggcagcgagcgctaagggacgcacccagcaagcagtgggccagtgccactgcccccagcagctgtttctgctgcaacccgagaggaactcggtgagcctgtcccgtttgtgactgcaagctcaggatttcaatcaatgcattccagtaaccctaaagtgaggagctctccatcaggaaacacacagagtagccctaagtcaaagcaggaggtgatggtccgtccccctacagtgatgtccccatctggaaacccccagctggattccaaattctccaatcagggtaaacaggggggctcagccagccaatcccagccatccccctgtgactccaagagtgggggccatacccctaaagcactccctggcccaggtgggagcatggggctgaagaatggggctggaaatggtgccaagggcaaggggaaaagggagcgaagtatttccgccgactcctttgatcagagagatcctgggactccaaacgatgactctgacattaaagaatgtaattctgctgaccacataaagtcccaggattcccagcacacaccacactcgatgaccccatcaaatgctacagcccccaggtcttctaccccctcccatggccaaactactgccacagagcccacacctgctcagaagactccagccaaagtggtgtacgtgttttctactgagatggccaataaagctgcagaagctgttttgaagggccaggttgaaactatcgtctctttccacatccagaacatttctaacaacaagacagagagaagcacagcgcctctgaacacacagatatctgcccttcggaatgatccgaaacctctcccacaacagcccccagttccggccaaccaggaccagaattcttcccagaataccagactgcagccaactccacccattccggcaccagcacccaagcctgccgcacccccacgtcccctggaccgggagagtcctggggtagaaaacaaactgattccttctgtaggaagtcctgccagctccactccactgcccccagatggtactgggcccaactcaactcccaacaatagggcagtgacccctgtctcccaggggagcaatagctcttcagcagatcccaaagcccctccgcctccaccagtgtccagtggcgagccccccacactgggagagaatcccgatggcttatctcaggagcagctggagcaccgggagcgctccttacaaactctcagagatatccagcgcatgctttttcctgatgagaaagaattcacaggagcacaaagtgggggaccgcagcagaatcctggggtattagatgggcctcagaaaaaaccagaagggccaatacaggccatgatggcccaatcccaaagcctaggtaagggacctgggccccggacagacgtgggagctccatttggccctcaaggacatagagatgtacccttttctccagatgaaatggttccaccttctatgaactcccagtctgggaccataggacccgaccaccttgaccatatgactcccgagcagatagcgtggctgaaactgcagcaggagttttatgaagagaagaggaggaagccggaacaagtggttgtccagcagtgttccctccaggacatgatggtccatcagcacgggcctcggggagtggtccgaggacccccccctccataccagatgacccctagtgaaggctgggcacctgggggtacagagccattttctgatggtatcaacatgccacattctctgcccccgaggggcatggctccccaccccaacatgccagggagccagatgcgcctccctggatttgcaggcatgataaactctgaaatggaagggccgaatgtccccaaccctgcatctagaccaggtctttctggagtcagttggccagatgatgtgccaaaaatcccagatggtcgaaattttcctcctggccggggcattttcagcggccctggccgaggggaacgcttcccaaacccccaaggattgtctgaagagatgtttcagcagcagctggcagagaaacagctgggtctccccccagggatggccatggaaggcatcaggcccagcatggagatgaacaggatgattccaggctcccagcgccacatggagcctgggaataaccccattttccctcgaataccagttgagggccctctgagtccttctaggggtgactttccaaaaggaattcccccacagatgggccctggtcgggaacttgagtttgggatggttcctagtgggatgaagggagatgtcaatctaaatgtcaacatgggatccaactctcagatgatacctcagaagatgagagaggctggggcgggccctgaggagatgctgaaattacgcccaggtggctcagacatgctgcctgctcagcagaagatggtgccactgccatttggtgagcacccccagcaggagtatggcatgggccccagaccattccttcccatgtctcagggtccaggcagcaacagtggcttgcggaatctcagagaaccaattgggcccgaccagaggactaacagccggctcagtcatatgccaccactacctctcaacccttccagtaaccccaccagcctcaacacagctcctccagttcagcgcggcctggggcggaagcccttggatatatctgtggcaggcagccaggtgcattccccaggcattaaccctctgaagtctcccacgatgcaccaagtccagtcaccaatgctgggctcgccctcggggaacctcaagtccccccagactccatcgcagctggcaggcatgctggcgggcccagctgctgctgcttccattaagtccccccctgttttggggtctgctgctgcttcacctgtccacctcaagtctccatcacttcctgccccgtcacctggatggacctcttctccaaaacctccccttcagagtcctgggatccctccaaaccataaagcacccctcaccatggcctccccagccatgctgggaaatgtagagtcaggtggccccccacctcctacagccagccagcctgcctctgtgaatatccctggaagtcttccctctagtacaccttataccatgcctccagagccaaccctttcccagaacccactctctattatgatgtctcgaatgtccaagtttgcaatgcccagttccaccccgttataccatgatgctatcaagactgtggccagctcagatgacgactcccctccagctcgttctcccaacttgccatcaatgaataatatgccaggaatgggcattaatacacagaatcctcgaatttcaggtccaaaccccgtggttccgatgccaaccctcagcccaatgggaatgacccagccactttctcactccaatcagatgccctctccaaatgccgtgggacccaacatacctcctcatggggtcccaatggggcctggcttgatgtcacacaatcctatcatggggcatgggtcccaagagccaccgatggtacctcaaggacggatgggcttcccccagggcttccctccagtacagtctcccccacagcaggttccattccctcacaatggccccagtggggggcagggcagcttcccaggagggatgggtttcccaggagaaggcccccttggccgccccagcaacctgccccaaagttcagcagatgcagcactttgcaagcctggaggccccgggggtcctgactccttcactgtcctggggaacagcatgccttcggtgtttacagacccagatctgcaggaggtcatccgacctggagccaccggaatacctgagtttgatctatcccgcattattccatctgagaagcccagccagacgctgcaatatttccctcgaggggaagttccaggccgtaaacagccccagggtcctggacctgggttttcacacatgcaggggatgatgggcgaacaagcccccagaatgggactagcattacctggcatgggaggtccagggccagtgggaactccggacatccctcttggtacagctccatccatgccaggccacaaccccatgagaccaccagcctttctccaacaaggcatgatgggacctcaccatcggatgatgtcaccagcacaatctacaatgcccggccagcccaccctgatgagcaatccagctgctgccgtgggcatgattcctggcaaggatcgggggcctgccgggctctacacccaccctgggcctgtgggctctccaggcatgatgatgtccatgcagggcatgatgggacccaacagaacatcatgatccccccacagatgaggccccggggcatggctgctgacgtgggcatgggtggatttagccaaggacctggcaacccaggaaacatgatgttttaagctgctaagatgggatgtgccgatccttgtcaaaatgagattccaggtcctgagagctgctttgagggagttccaggagtacttactattggtcatgcaataggagaacagagacccgagggctgctttgggggaggggggaactcgagaatgtatggatttacctgaaaacaaattattcatttaatcaacaggtgtgttttttttaagatttattttttaaaaattatttttgtggacttgggtatcaatgatggcacctacttttgggaatctgtagctgtgctttgagaattgccatcggtcatgtgttgcaccgttctctgtatgtttacgtcctttggactggcttctcccaggattcttttctgtttttgtttttttgatttgggctttatttttttctgtgtactgtactatattgtaaaagggattttagcagagactttagtctttggggcaagaggagaacaggaatgctgggctgtttactttaggtggagaatccatcttcagacctttggactattttctttcaactgcagtgtatagaaaaaccaaactacgacctcagagcagagtattaatgaaaagcacaaaaaaaggaactaagttcagcgaggggtggggggaggggggagatttttcttttgaaaaataatgactcttaggacatttgtttttaagttcaagtgctcttcagcactgtcttgtctcccaatataccaacccactggcacattttctctgtttctctctccgattttgctctgtctcctcagttaagtgtttccttcctttgtgccccccgctggtgaccctctgcttccctctctctttccctttggcagctgcaatacacagtgttattttggggaaataaatctagcaaagcctcgccttccatgccgagcgtcctcttggctctgagagggaaagtctgtcctgggatgcttctctgtcttttttccccctaagtctttctctttcccatcatacccttccctgccccaccttgttttctgttccccttttattaggaattcccaagtgaattttattaatgtgggagtggaacagatgctaaaagctatccaggattttgtttctgtttgttttaaattttgtggttccttccctttcctccccctcccatgcgtaagacgttctgtgtaacctccattaaatttggtacaaaaccactcgccagagctgtggtgtcagaaaaataaaatatattgtttctta

SEQ ID NO: 1764 - protein, 1394 aa, Homo sapiens
MHSSNPKVRSSPSGNTQSSPKSKQEVMVRPPTVMSPSGNPQLDSKFSNQGKQGGSASQSQPSPCDSKSGGHTPKALPGPGGSMGLKNGAGNGAKGKGKRERSISADSFDQRDPGTPNDDSDIKECNSADHIKSQDSQHTPHSMTPSNATAPRSSTPSHGQTTATEPTPAQKTPAKVVYVFSTEMANKAAEAVLKGQVETIVSFHIQNISNNKTERSTAPLNTQISALRNDPKPLPQQPPVPANQDQNSSQNTRLQPTPPIPAPAPKPAAPPRPLDRESPGVENKLIPSVGSPASSTPLPPDGTGPNSTPNNRAVTPVSQGSNSSSADPKAPPPPPVSSGEPPTLGENPDGLSQEQLEHRERSLQTLRDIQRMLFPDEKEFTGAQSGGPQQNPGVLDGPQKKPEGPIQAMMAQSQSLGKGPGPRTDVGAPFGPQGHRDVPFSPDEMVPPSMNSQSGTIGPDHLDHMTPEQIAWLKLQQEFYEEKRRKPEQVVVQQCSLQDMMVHQHGPRGVVRGPPPPYQMTPSEGWAPGGTEPFSDGINMPHSLPPRGMAPHPNMPGSQMRLPGFAGMINSEMEGPNVPNPASRPGLSGVSWPDDVPKIPDGRNFPPGRGIFSGPGRGERFPNPQGLSEEMFQQQLAEKQLGLPPGMAMEGIRPSMEMNRMIPGSQRHMEPGNNPIFPRIPVEGPLSPSRGDFPKGIPPQMGPGRELEFGMVPSGMKGDVNLNVNMGSNSQMIPQKMREAGAGPEEMLKLRPGGSDMLPAQQKMVPLPFGEHPQQEYGMGPRPFLPMSQGPGSNSGLRNLREPIGPDQRTNSRLSHMPPLPLNPSSNPTSLNTAPPVQRGLGRKPLDISVAGSQVHSPGINPLKSPTMHQVQSPMLGSPSGNLKSPQTPSQLAGMLAGPAAAASIKSPPVLGSAAASPVHLKSPSLPAPSPGWTSSPKPPLQSPGIPPNHKAPLTMASPAMLGNVESGGPPPPTASQPASVNIPGSLPSSTPYTMPPEPTLSQNPLSIMMSRMSKFAMPSSTPLYHDAIKTVASSDDDSPPARSPNLPSMNNMPGMGINTQNPRISGPNPVVPMPTLSPMGMTQPLSHSNQMPSPNAVGPNIPPHGVPMGPGLMSHNPIMGHGSQEPPMVPQGRMGFPQGFPPVQSPPQQVPFPHNGPSGGQGSFPGGMGFPGEGPLGRPSNLPQSSADAALCKPGGPGGPDSFTVLGNSMPSVFTDPDLQEVIRPGATGIPEFDLSRIIPSEKPSQTLQYFPRGEVPGRKQPQGPGPGFSHMQGMMGEQAPRMGLALPGMGGPGPVGTPDIPLGTAPSMPGHNPMRPPAFLQQGMMGPHHRMMSPAQSTMPGQPTLMSNPAAAVGMIPGKDRGPAGLYTHPGPVGSPGMMMSMQGMMGPNRTS

SEQ ID NO: 1765 - DNA, 305 bp, Homo sapiens
  misc_feature (115)..(115): n is a, c, g, or t
ctgcagtgagctctgatcacaccactgcattccagcctaggtgatagagtgagaccctgtcttaaaaaaacaaacaaacaaacaaaaaacaaaaacagctctaaacgaatgtggnctagaaaagtagctcaagttgttcctgtctggtgaaatacaaacataaatgaattatttatgtgccagtggcttcctgatgctgagagcaaagccagttgttctggcaggttctggaaaaatttatcacctcatggggttcaatgccaatgtcaaatcataaatataataatcaaatctgaagtgaaccc

SEQ ID NO: 1766 - DNA, 449 bp, Homo sapiens
acgcgtccgcgcgcactccgccgccatggagcagcgccgcgtcaccgacttcttcgcgcgccgccgccccgggcccccccgcatcgcgccgcccaagctggcctgccgcacccccagccccgccaggcccgcactccgcgccccggcctccgctaccagtggcagccgcaagcgcgcccgcccgcccgccgcccccggacgcgaccaggccaggccaccggcccgcaggagactgcggctgtcggtggacgaggtttccagccccagtacccccgaggccccagacatcccagcctgcccttctccgggccagaagataaagaaatccaccccggcagcaggtcagccgccccacctgacatccgcgcaggaccaggacaccatctctgagcttgcgtcatgcctgcaacgggcccgggagctgggggcaagagtccgggcgctgaagg

SEQ ID NO: 1767 - DNA, 2826 bp, Homo sapiens
ctgcaggcggccctggagggggcgccctcgccgagcgcgcgccccgcgccgccgccccggactcctccccggcgccgcgcgggcaggttcgaccaggcggccgcgggctccggttcccggccagctccccagggcccgcggcgccccgccccgcgcgcccgccccgctgcgctaactcgacccaagttggaagccgatcgcaggcggccgcactcgcgcccagcgagggcggcggcggcggcggcggcgcagctccggcgagcgaggcggcggccgcacggcaagcgtggaccgcggggggcgcccgcgccgggagcagccggaggactcgcggcggcgccggcgccccgcccgggaaagtaaagttggagacggagggagcgcgcggggcgggcccggaggagcggcggccggcgccccggcgcgcgcagccctagccgccggatgggaggcggacggcccgggccgccgccgccttgtcgcctgcgccccggctgggctccgggaccgcggggccgctacggcaccgccgctcggcccgcgtcgcgtgggctcgccgccggggcgctcccgtgagccgggccgaggcggggcgcgcgaggaccccgggacctgcccccctccccccgcagccgcgtcgccgctcgctccgggcgcctcctgctctgcacttacacgctcggcagctgcggggagcccggcagccacgctctccggcgcgccgcccgcggagccaccacggccgagggccggctgctgggcgccgcggtccccggcgggcgcgcccgagcagcaggcggcgatgcgggcgccgaccccggctggggggcgcccgagctgccgcggctgcgccccggctccaggaggggcggcgtagcccgcgggaggaccatggcgtccccggcgctggcggcggcgctggcggtggcggcagcggcgggccccaatgcgagcggcgcgggcgagaggggcagcggcggggttgccaatgcctcgggggcttcctgggggccgccgcgcggccagtactcggcgggcgcggtggcagggctggctgccgtggtgggcttcctcatcgtcttcaccgtggtgggcaacgtgctggtggtgatcgccgtgctgaccagccgggcgctgcgcgcgccacagaacctcttcctggtgtcgctggcctcggccgacatcctggtggccacgctggtcatgcccttctcgttggccaacgagctcatggcctactggtacttcgggcaggtgtggtgcggcgtgtacctggcgctcgatgtgctgttttgcacctcgtcgatcgtgcatctgtgtgccatcagcctggaccgctactggtcggtgacgcaggccgtcgagtacaacctgaagcgcacaccacgccgcgtcaaggccaccatcgtcgccgtgtggctcatctcggccgtcatctccttcccgccgctggtctcgctctaccgccagcccgacggcgccgcctacccgcagtgcggcctcaacgacgagacctggtacatcctgtcctcctgcatcggctccttcttcgcgccctgcctcatcatgggcctggtctacgcgcgcatctaccgagtggccaagcgtcgcacgcgcacgctcagcgagaagcgcgcccccgtgggccccgacggtgcgtccccgactaccgaaaacgggctgggcgcggcggcaggcgaggcgagaacgggcactgcgcgcccccgcccgccgacgtggagccggacgagagcagcgcagcggccgagaggcggcgcgccggggccgttgcggcggggcgggcggcggcgagcgggcgcggaggggggcgcgggcggtgcggacgggcagggggcggggccgggggcggctcagtcgggggcgctgaccgcctccaggtccccggggcccggtggccgcctctcgcgcgccagctcgcgctccgtcgagttcttcctgtcgcgccggcgccgggcgcgcagcagcgtgtgccgccgcaaggtggcccaggcgcgcgagaagcgcttcacctttgtgctggctgtggtcatgggcgtgttcgtgctctgctggttccccttcttcttcatctacagcctgtacggcatctgccgcgaggcctgccaggtgcccggcccgctcttcaagttcttcttctggatcggctactgcaacagctcgctcaacccggtcatctacacggtcttcaaccaggatttccggccatccttcaagcacatcctcttccgacggaggagaaggggcttcaggcagtgactcgcacccgtctgggaatcctggacagctccgcgctcggggctgggcagaaggggcggcccggacgcgggggagctttcccagagacccggggagctttcccagagacccggggatggattggcctccagggcgcaggggagggtgcggcagggcaggagcttggcagagagatagccgggctccagggagtggggaggagagagggggagacccctttgccttcccccctcagcaaggggctgcttctggggctccctgcctggatccagctctgggagccctgccgaggtgtggctgtgaggtcagggttttagagagcagtggcagaggtagccccctaaatgggcaagcaaggagccccccaaagacactaccactccccatccccgtctgaccaagggctgacttctccaggacctagtcggggggtggctgccagggggcaaggagaaagcaccgacaatctttgattactgaaagtatttaaatgtttgccaaaaacaacagccaaaacaaccaaactattttctaaataaacctttgtaa

SEQ ID NO: 1768 - protein, 461 aa, Homo sapiens
MASPALAAALAVAAAAGPNASGAGERGSGGVANASGASWGPPRGQYSAGAVAGLAAVVGFLIVFTVVGNVLVVIAVLTSRALRAPQNLFLVSLASADILVATLVMPFSLANELMAYWYFGQVWCGVYLALDVLFCTSSIVHLCAISLDRYWSVTQAVEYNLKRTPRRVKATIVAVWLISAVISFPPLVSLYRQPDGAAYPQCGLNDETWYILSSCIGSFFAPCLIMGLVYARIYRVAKRRTRTLSEKRAPVGPDGASPTTENGLGAAAGEARTGTARPRPPTWSRTRAAQRPRGGAPGPLRRGGRRRAGAEGGAGGADGQGAGPGAAQSGALTASRSPGPGGRLSRASSRSVEFFLSRRRRARSSVCRRKVAQAREKRFTFVLAVVMGVFVLCWFPFFFIYSLYGICREACQVPGPLFKFFFWIGYCNSSLNPVIYTVFNQDFRPSFKHILFRRRRRGFRQ

SEQ ID NO: 1769 - DNA, 396 bp, Homo sapiens
caggaaaacagctaacgtgtcaggtgtgtggccgaaaggaagtatgcccagagagcaagcccggaaggagtttcagcaagtgttcattcctgagtgcaatgacgacggcacctacagtcaggtccagtgtcacagctacacgggatactgctggtgcgtcacgcccaacgggaggcccatcagcggcactgccgtggcccacaagacgccccggtgcccgggttccgtaaatgaaaagttaccccaacgcgaaggcacaggaaaaacagatgatgccgcagctccagcgttggagactcagcctcaaggagatgaagaagatattgcatcacgttaccctaccctttggactgaacaggttaaaagtcggcagaacaaaaccaataagaattcagt

SEQ ID NO: 1770 - DNA, 275 bp, Homo sapiens
ttttttttttttaaattttttttctaataacaaaagtttttattttcacaaatattttaaaatgcagctacctttgagccacaaaaggaaaaagcagtattccttttatgtatttgatacaaatattaaacataactcagttttagttcattagctcagctcagtgaaaatagctcaggaaaaaaaaagtcataggtaatgctattggtatatgcaggaaaccagaagcgacgacattgagttcaaaatccatttagaattgtagacaggccaca

SEQ ID NO: 1771 - DNA, 768 bp, Homo sapiens
  misc_feature (522)..(522): n is a, c, g, or t
  misc_feature (721)..(721): n is a, c, g, or t
  misc_feature (738)..(738): n is a, c, g, or t
  misc_feature (741)..(742): n is a, c, g, or t
agaaagaataaaacatctgttttaattggccagtaaaatacattgcaaatcattagtattttataaacagaaacattaagttataaatccatgttaaaaattgcagctcagtgcagccccaacagctgtgtgtccaaaagtctatttttacaacattttcctccagtatttttgtgacaagaaagttcctatctgccatctagatcaagagcctgaactacagtattttcaaacaagaaccgggagaagtcggtacaaggatacgtcgtgctgtgtatttaaacggcgcttcccacacacctgccgtctgcatcccgggaggacgccctttgggaaaggcctcctcggcagtgtgaggtctggaggggtctgcctggaccccatttttaggatgctcccctccccaataaaacagcagcccccgcccctgccctgcacagcatctgggggttcataacacaggtgcaatactgaccatgggccctggagggacgtctgcaccccgaagcccctgtacctcanactcagagtttcttctcgatggcgggcttcagggtgacatgcaggtaatgcatccccgccagcttcatggtctcgtcgatgcacttgtacgccagtgagtttcctcggaagatggttgtggggtctgggtccgcttcaccttcgcgcttgcgatggcactgatgaatgcaccaccctgccatagtgtaggaagagccgnaccagcgggactggcgnctnnctgctctccgggcaacctttgcccag

SEQ ID NO: 1772 - DNA, 306 bp, Homo sapiens
  misc_feature (39)..(39): n is a, c, g, or t
  misc_feature (60)..(60): n is a, c, g, or t
  misc_feature (132)..(132): n is a, c, g, or t
  misc_feature (140)..(140): n is a, c, g, or t
  misc_feature (287)..(287): n is a, c, g, or t
aatgtgtctgtgtatattgaatattaaatactgtatttncgtatgtacacaatgcaagtntgattattttaatctgtattttaaaaatacatttgtaccttatatttatgtgtaatttaacaaacaaatttnattttttnactcccatgacagacatgtttttcctagtcgtgtagaaactagccactgttcaaatctgatacactattcaaccacaaagtgtaaaggcactgcttagattagttttgttggggaagaattattatgttgtatggacaaccccactntaagcatttatacaatttc

SEQ ID NO: 1773 - DNA, 400 bp, Homo sapiens
cactgtgcccagctgacatattctcacttaatagaattatagagaaatttttcatgtttttctttttctctcccactttttcatattcctctttttcatttttgcctttccgtttctgtctatgatgtaggcttctgaggagaaccaagaagcttggctttagtggtagaatgacagaacttagggatcccttgcaggctagaacaaagttctgacccttagaccaaatctttatgttaagagttttccagaattcaaaaaaaaaaaaaaaaaactcgagggggggcccggtacccaattcgccctatagtgagtcgtattacaattcactggccgtcgttttacaacgtcgtgactgggaaaaccctggcgttacccaacttaatcgccttgcagcaca

SEQ ID NO: 1774 - DNA, 1867 bp, Homo sapiens
gggcgagcgcgacgcgggagccggggcggcgcgggcagcgcgggccggccgggctgtgcggggcgagcggcggcgcggcgggggccttcggccggggcggcagctgggcgccggcgggagctagcagcgtctgcagccgcgcccggccagccccctccggctcggcatggagctgccagctgttggcgagcacgtcttcgcggtggagagcatcgagaagaagcggatccgcaagggcagagtggagtatctggtgaaatggagaggctggtcgcccaaatataacacgtgggaaccggaggagaacatcctggaccccaggctgctgatcgccttccagaacagggaacggcaggagcagctgatgggatatcggaagagagggccgaagcccaaaccgctagtggtgcaggtgcctacctttgcccgtcgttccaatgtcctgaccggcctccaggactcctccactgacaaccgtgccaagctggatttgggcgcgcaggggaagggccaggggcatcagtacgagctcaacagcaagaagcaccaccagtaccagccgcacagcaaggaggggaagccccggccgccgggcaagagcggcaagtactactaccagctcaacagcaagaagcaccacccctaccagcccgaccccaaaatgtacgacctgcagtaccagggcggccacaaggaggcgcccagccccacctgcccggacctgggggccaagagccacccgcccgacaagtgggcgcaaggtgcgggggccaaaggctacctgggggcggtgaagcccctggccggtgcggcgggtgctccaggcaaaggctccgagaagggcccccccaacggaatgatgccggcccccaaagaggctgtgacgggcaacgggattgggggcaagatgaagatagtcaagaacaagaacaagaacggacgcatcgtgatcgtgatgagcaaatacatggagaacggcatgcaggcggtgaagatcaagtccggcgaggtggcagagggggaggctcgctcccccagccacaagaagcgggcagccgacgagcgccaccctcctgccgacaggacttttaaaaaggcggcgggcgcagaggagaagaaggtggaggcgccgcccaagaggagggaggaggaggtgtccggggttagcgatccgcagccccaggatgccggctcccgcaagctgtccccgaccaaggaggcctttggagagcagcccctgcagctcaccaccaagcccgacctgcttgcctgggacccggcccggaacacgcacccgccctcacaccacccgcacccgcacccccatcaccaccaccaccaccaccaccaccaccaccacgccgtcggcctgaatctctcccacgtgcgcaagcgctgcctctccgagacccacggcgagcgcgagccctgcaagaagcggctgactgcgcgcagcatcagcacccccacctgcctggggggcagcccagccgctgagcgcccggccgacctgccaccagccgccgccctccggcagcccgaggtcatcctgctagactcagacctggatgaacccatagacttgcgctcggtcaagagccgcagcgaggccggggagccgcccagctccctccaggtgaagcccgagacaccggcgtcggcggcggtggcggtggcggcggcagcggcacccaccacgacggcggagaagcctccagccgaggcccaggacgaacctgcagagtcgctgagcgagttcaagcccttctttgggaatataattatcaccgacgtcaccgcgaactgcctcaccgttactttcaaggagtacgtgacggtgtagccggagggcgtcggaaggggcgcc

SEQ ID NO: 1775 - protein, 558 aa, Homo sapiens
MELPAVGEHVFAVESIEKKRIRKGRVEYLVKWRGWSPKYNTWEPEENILDPRLLIAFQNRERQEQLMGYRKRGPKPKPLVVQVPTFARRSNVLTGLQDSSTDNRAKLDLGAQGKGQGHQYELNSKKHHQYQPHSKEGKPRPPGKSGKYYYQLNSKKHHPYQPDPKMYDLQYQGGHKEAPSPTCPDLGAKSHPPDKWAQGAGAKGYLGAVKPLAGAAGAPGKGSEKGPPNGMMPAPKEAVTGNGIGGKMKIVKNKNKNGRIVIVMSKYMENGMQAVKIKSGEVAEGEARSPSHKKRAADERHPPADRTFKKAAGAEEKKVEAPPKRREEEVSGVSDPQPQDAGSRKLSPTKEAFGEQPLQLTTKPDLLAWDPARNTHPPSHHPHPHPHHHHHHHHHHHHAVGLNLSHVRKRCLSETHGEREPCKKRLTARSISTPTCLGGSPAAERPADLPPAAALRQPEVILLDSDLDEPIDLRSVKSRSEAGEPPSSLQVKPETPASAAVAVAAAAAPTTTAEKPPAEAQDEPAESLSEFKPFFGNIIITDVTANCLTVTFKEYVTV

SEQ ID NO: 1776 - DNA, 630 bp, Homo sapiens
gaagaaggctccttggtgctttgaagaacatcctgaagattatatcggagacaatatatcaagaatctatttattgaatcatctagaacaaaagccaggagctccctaatggaagcacattagtgtttattttgatgaagaaatatatagattttttaaaacaaccacaaagtagatagctcagtaaaaaatcaattttggaagatgtcactgaacaactcttccaatgtatttctggattcagtgcccagtaataccaatcgctttcaagttagtgtcataaatgagaaccatgagagcagtgcagctgcagatgacaatactgacccaccacattatgaagaaacctcttttggggatgaagctcagaaaagactcagaatcagctttaggcctgggaatcaggagtgctatgacaatttcctccaaagtggagaaactgctaaaacagatgccagttttcacgcttatgattctcacacaaacacatactatctacaaacttttggccacaacaccatggatgccgttcccaagatagagtactatcgtaacaccggcagcatcagtgggcccaaggtcaaccgacccagcctgcttgagattcacgagcaaactcgcaagaatgtg

SEQ ID NO: 1777 - DNA, 564 bp, Homo sapiens
gaaaagtgggcagagaaggcagtggactctctagtgaagaagttaaagaagaagaagggagccatggacgagctggagagggctctcagctgcccggggcagcccagcaaatgcgtcacgattccccgctccctggacgggcggctgcaggtgtcccaccgcaagggcctgccccatgtgatttactgtcgcgtgtggcgctggccggatctgcagtcccaccacgagctgaagccgctggagtgctgtgagttcccatttggctccaagcagaaagaagtgtgcattaacccttaccactaccgccgggtggagactccagtactgcctcctgtgctcgtgccaagacacagtgaatataacccccagctcagcctcctggccaagttccgcagcgcctccctgcacagtgagccactcatgccacacaacgccacctatcctgactctttccagcagcctccgtgctctgcactccctccctcacccagccacgcgttctcccagtccccgtgcacggccagctaccctcactccccaggaagtccttctgagccagagagt

SEQ ID NO: 1778 - DNA, 412 bp, Homo sapiens
tttttttttttttttttagagaaacaagagtttattccaatggaaaagcagctgagccgagggcttgccattgggcctggggtctgcagttacagaagcagcaggaggcaaacaaggaaaggcacagcacaagacccaggaaagtggaccttgtggagcaaggcagtgagggcgaggaaagcttttaggattttgagaccaggtgctatggcacaagtgataagtgagccctcccctttccttctgagggcaggggaggaagctgaaaaagggcagggggaggcagctgaaaaagggaaggccaggtgtcacaggcagctccttgcatcccggttcttctctaacccagtcaaccccaggctcaagactgtttcagcccaacggccccagttcccttgttcaggttagctgt

SEQ ID NO: 1779 - DNA, 466 bp, Homo sapiens
  misc_feature (416)..(416): n is a, c, g, or t
  misc_feature (439)..(439): n is a, c, g, or t
  misc_feature (447)..(447): n is a, c, g, or t
ggctccttgaccctaaaaggtagctggcaggggcaagatgggggccagctacctaatggatgaaagccacaagtgaatacagttcttgtcaccagggttgccctgccctcactcggcagggagttctgacaccccagggcccgtgagctacctgcttgagcccctgtttctggggcaccttcgaggaggcgttgtggagggcatcgccccctgtttattcacaacaccctcaggggcaaacaggcctgggacccgctgacaccattttgggtagctggatgcacccgacagcagtggggtccacacacttgagcttccagctgggcactgcccactcaagggctgagtgggaggggcccctccggccagttttgttccaccagccctgcaagttgatgcagggcgggggaagggtnggtgttgcaatattgttgcgtgncttaaggntttgtcctctggtggtgca

SEQ ID NO: 1780 - DNA, 2419 bp, Homo sapiens
cgaaaggccggccttggctgcgacagcctgggtaagaggtgtaggtcggcttggttttctgctacccggagctgggcaagcgggttgggagaacagcgaagacagcgtgagcctgggccgttgcctcgaggctctcgcccggcttctcttgccgacccgccacgtttgtttggatttaatcttacagctggttgccggcgcccgcccgcccgctggcctcgcggtgtgagagggaagcacccgtgcctgtggctggtggctggcgcctggagggtccgcacacccgcccggccgcgccgctttgcccgcggcagccgcgtccctgaaccgcggagtcgtgtttgtgtttgacccgcgggcgccggtggcgcgcggccgaggccggtgtcggcggggcggggcggtcgcggcggaggcagaggaagagggagcgggagctctgcgaggccgggcgccgccatggaactgggcccgagccccgcaccgcgccgcctgctcttcgcctgcagcccccctcccgcgtcgcagcccgtcgtgaaggcgctatttggcgcttcagccgccgggggactgtcgcctgtcaccaacctgaccgtcactatggaccagctgcagggtctgggcagtgattatgagcaaccactggaggtgaagaacaacagtaatctgcagagaatgggctcctccgagtcaacagattcaggtttctgtctagattctcctgggccattggacagtaaagaaaaccttgaaaatcctatgagaagaatacattccctacctcaaaagctgttgggatgtagtccagctctgaagaggagccattctgattctcttgaccatgacatctttcagctcatcgacccagatgagaacaaggaaaatgaagcctttgagtttaagaagccagtaagacctgtatctcgtggctgcctgcactctcatggactccaggagggtaaagatctcttcacacagaggcagaactctgcccagctcggaatgctttcctcaaatgaaagagatagcagtgaaccagggaatttcattcctctttttacaccccagtcacctgtgacagccactttgtctgatgaggatgatggcttcgtggaccttctcgatggagagaatctgaagaatgaggaggagaccccctcgtgcatggcaagcctctggacagctcctctcgtcatgagaactacaaaccttgacaaccgatgcaagctgtttgactccccttccctgtgtagctccagcactcggtcagtgttgaagagaccagaacgttctcaagaggagtctccacctggaagtacaaagaggaggaagagcatgtctggggccagccccaaagagtcaactaatccagagaaggcccatgagactcttcatcagtctttatccctggcatcttcccccaaaggaaccattgagaacattttggacaatgacccaagggaccttataggagacttctccaagggttatctctttcatacagttgctgggaaacatcaggatttaaaatacatctctccagaaattatggcatctgttttgaatggcaagtttgccaacctcattaaagagtttgttatcatcgactgtcgatacccatatgaatacgagggaggccacatcaagggtgcagtgaacttgcacatggaagaagaggttgaagacttcttattgaagaagcccattgtacctactgatggcaagcgtgtcattgttgtgtttcactgcgagttttcttctgagagaggtccccgcatgtgccggtatgtgagagagagagatcgcctgggtaatgaataccccaaactccactaccctgagctgtatgtcctgaaggggggatacaaggagttctttatgaaatgccagtcttactgtgagccccctagctaccggcccatgcaccacgaggactttaaagaagacctgaagaagttccgcaccaagagccggacctgggcaggggagaagagcaagagggagatgtacagtcgtctgaagaagctctgagggcggcaggaccagccagcagcagcccaagcttccctccatccccctttaccctctttcctgcagagaaacttaagcaaaggggacagctgtgtgacatttggagagggggcctgggacttccatgccttaaacctacctcccacactcccaaggttggagcccagggcatcttgctggctacgcctcttctgtccctgttagacgtcctccgtccatatcagaactgtgccacaatgcagttctgagcaccgtgtcaagctgctctgagccacagtgggatgaaccagccggggccttatcgggctccagcatctcatgaggggagaggagacggaggggagtagagaagtttacacagaaatgctgctggccaaatagcaaagag

SEQ ID NO: 1781 - protein, 523 aa, Homo sapiens
MELGPSPAPRRLLFACSPPPASQPVVKALFGASAAGGLSPVTNLTVTMDQLQGLGSDYEQPLEVKNNSNLQRMGSSESTDSGFCLDSPGPLDSKENLENPMRRIHSLPQKLLGCSPALKRSHSDSLDHDIFQLIDPDENKENEAFEFKKPVRPVSRGCLHSHGLQEGKDLFTQRQNSAQLGMLSSNERDSSEPGNFIPLFTPQSPVTATLSDEDDGFVDLLDGENLKNEEETPSCMASLWTAPLVMRTTNLDNRCKLFDSPSLCSSSTRSVLKRPERSQEESPPGSTKRRKSMSGASPKESTNPEKAHETLHQSLSLASSPKGTIENILDNDPRDLIGDFSKGYLFHTVAGKHQDLKYISPEIMASVLNGKFANLIKEFVIIDCRYPYEYEGGHIKGAVNLHMEEEVEDFLLKKPIVPTDGKRVIVVFHCEFSSERGPRMCRYVRERDRLGNEYPKLHYPELYVLKGGYKEFFMKCQSYCEPPSYRPMHHEDFKEDLKKFRTKSRTWAGEKSKREMYSRLKKL

SEQ ID NO: 1782 - DNA, 4414 bp, Homo sapiens
ccgcgctctctgatcagaggcgaagctcggaggtcctacaggtatggatctctggcagctgctgttgaccttggcactggcaggatcaagtgatgctttttctggaagtgaggccacagcagctatccttagcagagcaccctggagtctgcaaagtgttaatccaggcctaaagacaaattcttctaaggagcctaaattcaccaagtgccgttcacctgagcgagagactttttcatgccactggacagatgaggttcatcatggtacaaagaacctaggacccatacagctgttctataccagaaggaacactcaagaatggactcaagaatggaaagaatgccctgattatgtttctgctggggaaaacagctgttactttaattcatcgtttacctccatctggataccttattgtatcaagctaactagcaatggtggtacagtggatgaaaagtgtttctctgttgatgaaatagtgcaaccagatccacccattgccctcaactggactttactgaacgtcagtttaactgggattcatgcagatatccaagtgagatgggaagcaccacgcaatgcagatattcagaaaggatggatggttctggagtatgaacttcaatacaaagaagtaaatgaaactaaatggaaaatgatggaccctatattgacaacatcagttccagtgtactcattgaaagtggataaggaatatgaagtgcgtgtgagatccaaacaacgaaactctggaaattatggcgagttcagtgaggtgctctatgtaacacttcctcagatgagccaatttacatgtgaagaagatttctactttccatggctcttaattattatctttggaatatttgggctaacagtgatgctatttgtattcttattttctaaacagcaaaggattaaaatgctgattctgcccccagttccagttccaaagattaaaggaatcgatccagatctcctcaaggaaggaaaattagaggaggtgaacacaatcttagccattcatgatagctataaacccgaattccacagtgatgactcttgggttgaatttattgagctagatattgatgagccagatgaaaagactgaggaatcagacacagacagacttctaagcagtgaccatgagaaatcacatagtaacctaggggtgaaggatggcgactctggacgtaccagctgttgtgaacctgacattctggagactgatttcaatgccaatgacatacatgagggtacctcagaggttgctcagccacagaggttaaaaggggaagcagatctcttatgccttgaccagaagaatcaaaataactcaccttatcatgatgcttgccctgctactcagcagcccagtgttatccaagcagagaaaaacaaaccacaaccacttcctactgaaggagctgagtcaactcaccaagctgcccatattcagctaagcaatccaagttcactgtcaaacatcgacttttatgcccaggtgagcgacattacaccagcaggtagtgtggtcctttccccgggccaaaagaataaggcagggatgtcccaatgtgacatgcacccggaaatggtctcactctgccaagaaaacttccttatggacaatgcctacttctgtgaggcagatgccaaaaagtgcatccctgtggctcctcacatcaaggttgaatcacacatacagccaagcttaaaccaagaggacatttacatcaccacagaaagccttaccactgctgctgggaggcctgggacaggagaacatgttccaggttctgagatgcctgtcccagactatacctccattcatatagtacagtccccacagggcctcatactcaatgcgactgccttgcccttgcctgacaaagagtttctctcatcatgtggctatgtgagcacagaccaactgaacaaaatcatgccttagcctttctttggtttcccaagagctacgtatttaatagcaaagaattgactggggcaataacgtttaagccaaaacaatgtttaaaccttttttgggggagtgacaggatggggtatggattctaaaatgccttttcccaaaatgttgaaatatgatgttaaaaaaataagaagaatgcttaatcagatagatattcctattgtgcaatgtaaatattttaaagaattgtgtcagactgtttagtagcagtgattgtcttaatattgtgggtgttaatttttgatactaagcattgaatggctatgtttttaatgtatagtaaatcacgctttttgaaaaagcgaaaaaatcaggtggcttttgcggttcaggaaaattgaatgcaaaccatagcacaggctaattttttgttgtttcttaaataagaaacttttttatttaaaaaactaaaaactagaggtgagaaatttaaactataagcaagaaggcaaaaatagtttggatatgtaaaacatttactttgacataaagttgataaagattttttaataatttagacttcaagcatggctattttatattacactacacactgtgtactgcagttggtatgacccctctaaggagtgtagcaactacagtctaaagctggtttaatgttttggccaatgcacctaaagaaaaacaaactcgttttttacaaagcccttttatacctccccagactccttcaacaattctaaaatgattgtagtaatctgcattattggaatataattgttttatctgaatttttaaacaagtatttgttaatttagaaaactttaaagcgtttgcacagatcaacttaccaggcaccaaaagaagtaaaagcaaaaaagaaaacctttcttcaccaaatcttggttgatgccaaaaaaaaatacatgctaagagaagtagaaatcatagctggttcacactgaccaagatacttaagtgctgcaattgcacgcggagtgagttttttagtgcgtgcagatggtgagagataagatctatagcctctgcagcggaatctgttcacacccaacttggttttgctacataattatccaggaagggaataaggtacaagaagcattttgtaagttgaagcaaatcgaatgaaattaactgggtaatgaaacaaagagttcaagaaataagtttttgtttcacagcctataaccagacacatactcatttttcatgataatgaacagaacatagacagaagaaacaaggttttcagtccccacagataactgaaaattatttaaaccgctaaaagaaactttctttctcactaaatcttttataggatttatttaaaatagcaaaagaagaagtttcatcattttttacttcctctctgagtggactggcctcaaagcaagcattcagaagaaaaagaagcaacctcagtaatttagaaatcattttgcaatcccttaatatcctaaacatcattcatttttgttgttgttgttgttgttgagacagagtctcgctctgtcgccaggctagagtgcggtggcgcgatcttgactcactgcaatctccacctcccacaggttcaggcgattcccgtgcctcagcctcctgagtagctgggactacaggcacgcaccaccatgccaggctaatttttttgtattttagcagagacggggtttcaccatgttggccaggatggtctcgagtctcctgacctcgtgatccacccgactcggcctcccaaagtgctgggattacaggtgtaagccaccgtgcccagccctaaacatcattcttgagagcattgggatatctcctgaaaaggtttatgaaaaagaagaatctcatctcagtgaagaatacttctcattttttaaaaaagcttaaaactttgaagttagctttaacttaaatagtatttcccatttatcgcagaccttttttaggaagcaagcttaatggctgataattttaaattctctctcttgcaggaaggactatgaaaagctagaattgagtgtttaaagttcaacatgttatttgtaatagatgtttgatagattttctgctactttgctgctatggttttctccaagagctacataatttagtttcatataaagtatcatcagtgtagaacctaattcaattcaaagctgtgtgtttggaagactatcttactatttcacaacagcctgacaacatttctatagccaaaaatagctaaatacctcaatcagtctcagaatgtcattttggtactttggtggccacataagccattattcactagtatgactagttgtgtctggcagtttatatttaactctctttatgtctgtggattttttccttcaaagtttaataaatttattttcttggattcctgataatgtgcttctgttatcaaacaccaacataaaaatgatctaaacc

SEQ ID NO: 1783 - protein, 638 aa, Homo sapiens
MDLWQLLLTLALAGSSDAFSGSEATAAILSRAPWSLQSVNPGLKTNSSKEPKFTKCRSPERETFSCHWTDEVHHGTKNLGPIQLFYTRRNTQEWTQEWKECPDYVSAGENSCYFNSSFTSIWIPYCIKLTSNGGTVDEKCFSVDEIVQPDPPIALNWTLLNVSLTGIHADIQVRWEAPRNADIQKGWMVLEYELQYKEVNETKWKMMDPILTTSVPVYSLKVDKEYEVRVRSKQRNSGNYGEFSEVLYVTLPQMSQFTCEEDFYFPWLLIIIFGIFGLTVMLFVFLFSKQQRIKMLILPPVPVPKIKGIDPDLLKEGKLEEVNTILAIHDSYKPEFHSDDSWVEFIELDIDEPDEKTEESDTDRLLSSDHEKSHSNLGVKDGDSGRTSCCEPDILETDFNANDIHEGTSEVAQPQRLKGEADLLCLDQKNQNNSPYHDACPATQQPSVIQAEKNKPQPLPTEGAESTHQAAHIQLSNPSSLSNIDFYAQVSDITPAGSVVLSPGQKNKAGMSQCDMHPEMVSLCQENFLMDNAYFCEADAKKCIPVAPHIKVESHIQPSLNQEDIYITTESLTTAAGRPGTGEHVPGSEMPVPDYTSIHIVQSPQGLILNATALPLPDKEFLSSCGYVSTDQLNKIMP

SEQ ID NO: 1784 - DNA, 9272 bp, Homo sapiens
gggctggaggggcgctgggctcggacctgccaaggccaccgcaggggggagcaagggacagaggcgggggtcctagctgacggcttttactgcctaggatgacgctgcggcttctggtggccgcgctctgcgccgggatcctggcagaggcgccccgagtgcgagcccagcacagggagagagtgacctgcacgcgcctttacgccgctgacattgtgttcttactggatggctcctcatccattggccgcagcaatttccgcgaggtccgcagctttctcgaagggctggtgctgcctttctctggagcagccagtgcacagggtgtgcgctttgccacagtgcagtacagcgatgacccacggacagagttcggcctggatgcacttggctctgggggtgatgtgatccgcgccatccgtgagcttagctacaaggggggcaacactcgcacaggggctgcaattctccatgtggctgaccatgtcttcctgccccagctggcccgacctggtgtccccaaggtctgcatcctgatcacagacgggaagtcccaggacctggtggacacagctgcccaaaggctgaaggggcagggggtcaagctatttgctgtggggatcaagaatgctgaccctgaggagctgaagcgagttgcctcacagccaacctccgacttcttcttcttcgtcaatgacttcagcatcttgaggacactactgcccctcgtttcccggagagtgtgcacgactgctggtggcgtgcctgtgacccgacctccggatgactcgacctctgctccacgagacctggtgctgtctgagccaagcagccaatccttgagagtacagtggacagcggccagtggccctgtgactggctacaaggtccagtacactcctctgacggggctgggacagccactgccgagtgagcggcaggaggtgaacgtcccagctggtgagaccagtgtgcggctgcggggtctccggccactgaccgagtaccaagtgactgtgattgccctctacgccaacagcatcggggaggctgtgagcgggacagctcggaccactgccctagaagggccggaactgaccatccagaataccacagcccacagcctcctggtggcctggcggagtgtgccaggtgccactggctaccgtgtgacatggcgggtcctcagtggtgggcccacacagcagcaggagctgggccctgggcagggttcagtgttgctgcgtgacttggagcctggcacggactatgaggtgaccgtgagcaccctatttggccgcagtgtggggcccgccacttccctgatggctcgcactgacgcttctgttgagcagaccctgcgcccggtcatcctgggccccacatccatcctcctttcctggaacttggtgcctgaggcccgtggctaccggttggaatggcggcgtgagactggcttggagccaccgcagaaggtggtactgccctctgatgtgacccgctaccagttggatgggctgcagccgggcactgagtaccgcctcacactctacactctgctggagggccacgaggtggccacccctgcaaccgtggttcccactggaccagagctgcctgtgagccctgtaacagacctgcaagccaccgagctgcccgggcagcgggtgcgagtgtcctggagcccagtccctggtgccacccagtaccgcatcattgtgcgcagcacccagggggttgagcggaccctggtgcttcctgggagtcagacagcattcgacttggatgacgttcaggctgggcttagctacactgtgcgggtgtctgctcgagtgggtccccgtgagggcagtgccagtgtcctcactgtccgccgggagccggaaactccacttgctgttccagggctgcgggttgtggtgtcagatgcaacgcgagtgagggtggcctggggacccgtccctggagccagtggatttcggattagctggagcacaggcagtggtccggagtccagccagacactgcccccagactctactgccacagacatcacagggctgcagcctggaaccacctaccaggtggctgtgtcggtactgcgaggcagagaggagggccctgctgcagtcatcgtggctcgaacggacccactgggcccagtgaggacggtccatgtgactcaggccagcagctcatctgtcaccattacctggaccagggttcctggcgccacaggatacagggtttcctggcactcagcccacggcccagagaaatcccagttggtttctggggaggccacggtggctgagctggatggactggagccagatactgagtatacggtgcatgtgagggcccatgtggctggcgtggatgggccccctgcctctgtggttgtgaggactgcccctgagcctgtgggtcgtgtgtcgaggctgcagatcctcaatgcttccagcgacgttctacggatcacctgggtaggggtcactggagccacagcttacagactggcctggggccggagtgaaggcggccccatgaggcaccagatactcccaggaaacacagactctgcagagatccggggtctcgaaggtggagtcagctactcagtgcgagtgactgcacttgtcggggaccgcgagggcacacctgtctccattgttgtcactacgccgcctgaggctccgccagccctggggacgcttcacgtggtgcagcgcggggagcactcgctgaggctgcgctgggagccggtgcccagagcgcagggcttccttctgcactggcaacctgagggtggccaggaacagtcccgggtcctggggcccgagctcagcagctatcacctggacgggctggagccagcgacacagtaccgcgtgaggctgagtgtcctagggccggctggagaagggccctctgcagaggtgactgcgcgcactgagtcacctcgtgttccaagcattgaactacgtgtggtggacacctcgatcgactcggtgactttggcctggactccagtgtccagggcatccagctacatcctatcctggcggccactcagaggccctggccaggaagtgcctgggtccccgcagacacttccagggatctcaagctcccagcgggtgacagggctagagcctggcgtctcttacatcttctccctgacgcctgtcctggatggtgtgcggggtcctgaggcatctgtcacacagacgccagtgtgcccccgtggcctggcggatgtggtgttcctaccacatgccactcaagacaatgctcaccgtgcggaggctacgaggagggtcctggagcgtctggtgttggcacttgggcctcttgggccacaggcagttcaggttggcctgctgtcttacagtcatcggccctccccactgttcccactgaatggctcccatgaccttggcattatcttgcaaaggatccgtgacatgccctacatggacccaagtgggaacaacctgggcacagccgtggtcacagctcacagatacatgttggcaccagatgctcctgggcgccgccagcacgtaccaggggtgatggttctgctagtggatgaacccttgagaggtgacatattcagccccatccgtgaggcccaggcttctgggcttaatgtggtgatgttgggaatggctggagcggacccagagcagctgcgtcgcttggcgccgggtatggactctgtccagaccttcttcgccgtggatgatgggccaagcctggaccaggcagtcagtggtctggccacagccctgtgtcaggcatccttcactactcagccccggccagagccctgcccagtgtattgtccaaagggccagaagggggaacctggagagatgggcctgagaggacaagttgggcctcctggcgaccctggcctcccgggcaggaccggtgctcccggcccccaggggccccctggaagtgccactgccaagggcgagaggggcttccctggagcagatgggcgtccaggcagccctggccgcgccgggaatcctgggacccctggagcccctggcctaaagggctctccagggttgcctggccctcgtggggacccgggagagcgaggacctcgaggcccaaagggggagccgggggctcccggacaagtcatcggaggtgaaggacctgggcttcctgggcggaaaggggaccctggaccatcgggcccccctggacctcgtggaccactgggggacccaggaccccgtggccccccagggcttcctggaacagccatgaagggtgacaaaggcgatcgtggggagcggggtccccctggaccaggtgaaggtggcattgctcctggggagcctgggctgccgggtcttcccggaagccctggaccccaaggccccgttggcccccctggaaagaaaggagaaaaaggtgactctgaggatggagctccaggcctcccaggacaacctgggtctccgggtgagcagggcccacggggacctcctggagctattggccccaaaggtgaccggggctttccagggcccctgggtgaggctggagagaagggcgaacgtggacccccaggcccagcgggatcccgggggctgccaggggttgctggacgtcctggagccaagggtcctgaagggccaccaggacccactggccgccaaggagagaagggggagcctggtcgccctggggaccctgcagtggtgggacctgctgttgctggacccaaaggagaaaagggagatgtggggcccgctgggcccagaggagctaccggagtccaaggggaacggggcccacccggcttggttcttcctggagaccctggccccaagggagaccctggagaccggggtcccattggccttactggcagagcaggacccccaggtgactcagggcctcctggagagaagggagaccctgggcggcctggccccccaggacctgttggcccccgaggacgagatggtgaagttggagagaaaggtgacgagggtcctccgggtgacccgggtttgcctggaaaagcaggcgagcgtggccttcggggggcacctggagttcgggggcctgtgggtgaaaagggagaccagggagatcctggagaggatggacgaaatggcagccctggatcatctggacccaagggtgaccgtggggagccgggtcccccaggacccccgggacggctggtagacacaggacctggagccagagagaagggagagcctggggaccgcggacaagagggtcctcgagggcccaagggtgatcctggcctccctggagcccctggggaaaggggcattgaagggtttcggggacccccaggcccacagggggacccaggtgtccgaggcccagcaggagaaaagggtgaccggggtccccctgggctggatggccggagcggactggatgggaaaccaggagccgctgggccctctgggccgaatggtgctgcaggcaaagctggggacccagggagagacgggcttccaggcctccgtggagaacaaggcctccctggcccctctggtccccctggattaccgggaaagccaggcgaggatgggaaacctggcctgaatggaaaaaacggagaacctggggaccctggagaagacgggaggaagggagagaaaggagattcaggcgcctctgggagagaaggtcgtgatggccccaagggtgagcgtggagctcctggtatccttggaccccaggggcctccaggcctcccagggccagtgggccctcctggccagggttttcctggtgtcccaggaggcacgggccccaagggtgaccgtggggagactggatccaaaggggagcagggcctccctggagagcgtggcctgcgaggagagcctggaagtgtgccgaatgtggatcggttgctggaaactgctggcatcaaggcatctgccctgcgggagatcgtggagacctgggatgagagctctggtagcttcctgcctgtgcccgaacggcgtcgaggccccaagggggactcaggcgaacagggccccccaggcaaggagggccccatcggctttcctggagaacgcgggctgaagggcgaccgtggagaccctggccctcaggggccacctggtctggcccttggggagaggggcccccccgggccttccggccttgccggggagcctggaaagcctggtattcccgggctcccaggcagggctgggggtgtgggagaggcaggaaggccaggagagaggggagaacggggagagaaaggagaacgtggagaacagggcagagatggccctcctggactccctggaacccctgggccccccggaccccctggccccaaggtgtctgtggatgagccaggtcctggactctctggagaacagggaccccctggactcaagggtgctaagggggagccgggcagcaatggtgaccaaggtcccaaaggagacaggggtgtgccaggcatcaaaggagaccggggagagcctggaccgaggggtcaggacggcaacccgggtctaccaggagagcgtggtatggctgggcctgaagggaagccgggtctgcagggtccaagaggcccccctggcccagtgggtggtcatggagaccctggaccacctggtgccccgggtcttgctggccctgcaggaccccaaggaccttctggcctgaagggggagcctggagagacaggacctccaggacggggcctgactggacctactggagctgtgggacttcctggaccccccggcccttcaggccttgtgggtccacaggggtctccaggtttgcctggacaagtgggggagacagggaagccgggagccccaggtcgagatggtgccagtggaaaagatggagacagagggagccctggtgtgccagggtcaccaggtctgcctggccctgtcggacctaaaggagaacctggccccacgggggcccctggacaggctgtggtcgggctccctggagcaaagggagagaagggagcccctggaggccttgctggagacctggtgggtgagccgggagccaaaggtgaccgaggactgccagggccgcgaggcgagaagggtgaagctggccgtgcaggggagcccggagaccctggggaagatggtcagaaaggggctccaggacccaaaggtttcaagggtgacccaggagtcggggtcccgggctcccctgggcctcctggccctccaggtgtgaagggagatctgggcctccctggcctgcccggtgctcctggtgttgttgggttcccgggtcagacaggccctcgaggagagatgggtcagccaggccctagtggagagcggggtctggcaggccccccagggagagaaggaatcccaggacccctggggccacctggaccaccggggtcagtgggaccacctggggcctctggactcaaaggagacaagggagaccctggagtagggctgcctgggccccgaggcgagcgtggggagccaggcatccggggtgaagatggccgccccggccaggagggaccccgaggactcacggggccccctggcagcaggggagagcgtggggagaagggtgatgttgggagtgcaggactaaagggtgacaagggagactcagctgtgatcctggggcctccaggcccacggggtgccaagggggacatgggtgaacgagggcctcggggcttggatggtgacaaaggacctcggggagacaatggggaccctggtgacaagggcagcaagggagagcctggtgacaagggctcagccgggttgccaggactgcgtggactcctgggaccccagggtcaacctggtgcagcagggatccctggtgacccgggatccccaggaaaggatggagtgcctggtatccgaggagaaaaaggagatgttggcttcatgggtccccggggcctcaagggtgaacggggagtgaagggagcctgtggccttgatggagagaagggagacaagggagaagctggtcccccaggccgccccgggctggcaggacacaaaggagagatgggggagcctggtgtgccgggccagtcgggggcccctggcaaggagggcctgatcggtcccaagggtgaccgaggctttgacgggcagccaggccccaagggtgaccagggcgagaaaggggagcggggaaccccaggaattgggggcttcccaggccccagtggaaatgatggctctgctggtcccccagggccacctggcagtgttggtcccagaggccccgaaggacttcagggccagaagggtgagcgaggtccccccggagagagagtggtgggggctcctggggtccctggagctcctggcgagagaggggagcaggggcggccagggcctgccggtcctcgaggcgagaagggagaagctgcactgacggaggatgacatccggggctttgtgcgccaagagatgagtcagcactgtgcctgccagggccagttcatcgcatctggatcacgacccctccctagttatgctgcagacactgccggctcccagctccatgctgtgcctgtgctccgcgtctctcatgcagaggaggaagagcgggtaccccctgaggatgatgagtactctgaatactccgagtattctgtggaggagtaccaggaccctgaagctccttgggatagtgatgacccctgttccctgccactggatgagggctcctgcactgcctacaccctgcgctggtaccatcgggctgtgacaggcagcacagaggcctgtcacccttttgtctatggtggctgtggagggaatgccaaccgttttgggacccgtgaggcctgcgagcgccgctgcccaccccgggtggtccagagccaggggacaggtactgcccaggactgaggcccagataatgagctgagattcagcatcccctggaggagtcggggtctcagcagaaccccactgtccctccccttggtgctagaggcttgtgtgcacgtgagcgtgcgagtgcacgtccgttatttcagtgacttggtcccgtgggtctagccttcccccctgtggacaaacccccattgtggctcctgccaccctggcagatgactcactgtgggggggtggctgtgggcagtgagcggatgtgactggcgtctgacccgccccttgacccaagcctgtgatgacatggtgctgattctggggggcattaaagctgctgttttaaaaggcaaaaaa

SEQ ID NO: 1785 - protein, 2944 aa, Homo sapiens
MTLRLLVAALCAGILAEAPRVRAQHRERVTCTRLYAADIVFLLDGSSSIGRSNFREVRSFLEGLVLPFSGAASAQGVRFATVQYSDDPRTEFGLDALGSGGDVIRAIRELSYKGGNTRTGAAILHVADHVFLPQLARPGVPKVCILITDGKSQDLVDTAAQRLKGQGVKLFAVGIKNADPEELKRVASQPTSDFFFFVNDFSILRTLLPLVSRRVCTTAGGVPVTRPPDDSTSAPRDLVLSEPSSQSLRVQWTAASGPVTGYKVQYTPLTGLGQPLPSERQEVNVPAGETSVRLRGLRPLTEYQVTVIALYANSIGEAVSGTARTTALEGPELTIQNTTAHSLLVAWRSVPGATGYRVTWRVLSGGPTQQQELGPGQGSVLLRDLEPGTDYEVTVSTLFGRSVGPATSLMARTDASVEQTLRPVILGPTSILLSWNLVPEARGYRLEWRRETGLEPPQKVVLPSDVTRYQLDGLQPGTEYRLTLYTLLEGHEVATPATVVPTGPELPVSPVTDLQATELPGQRVRVSWSPVPGATQYRIIVRSTQGVERTLVLPGSQTAFDLDDVQAGLSYTVRVSARVGPREGSASVLTVRREPETPLAVPGLRVVVSDATRVRVAWGPVPGASGFRISWSTGSGPESSQTLPPDSTATDITGLQPGTTYQVAVSVLRGREEGPAAVIVARTDPLGPVRTVHVTQASSSSVTITWTRVPGATGYRVSWHSAHGPEKSQLVSGEATVAELDGLEPDTEYTVHVRAHVAGVDGPPASVVVRTAPEPVGRVSRLQILNASSDVLRITWVGVTGATAYRLAWGRSEGGPMRHQILPGNTDSAEIRGLEGGVSYSVRVTALVGDREGTPVSIVVTTPPEAPPALGTLHVVQRGEHSLRLRWEPVPRAQGFLLHWQPEGGQEQSRVLGPELSSYHLDGLEPATQYRVRLSVLGPAGEGPSAEVTARTESPRVPSIELRVVDTSIDSVTLAWTPVSRASSYILSWRPLRGPGQEVPGSPQTLPGISSSQRVTGLEPGVSYIFSLTPVLDGVRGPEASVTQTPVCPRGLADVVFLPHATQDNAHRAEATRRVLERLVLALGPLGPQAVQVGLLSYSHRPSPLFPLNGSHDLGIILQRIRDMPYMDPSGNNLGTAVVTAHRYMLAPDAPGRRQHVPGVMVLLVDEPLRGDIFSPIREAQASGLNVVMLGMAGADPEQLRRLAPGMDSVQTFFAVDDGPSLDQAVSGLATALCQASFTTQPRPEPCPVYCPKGQKGEPGEMGLRGQVGPPGDPGLPGRTGAPGPQGPPGSATAKGERGFPGADGRPGSPGRAGNPGTPGAPGLKGSPGLPGPRGDPGERGPRGPKGEPGAPGQVIGGEGPGLPGRKGDPGPSGPPGPRGPLGDPGPRGPPGLPGTAMKGDKGDRGERGPPGPGEGGIAPGEPGLPGLPGSPGPQGPVGPPGKKGEKGDSEDGAPGLPGQPGSPGEQGPRGPPGAIGPKGDRGFPGPLGEAGEKGERGPPGPAGSRGLPGVAGRPGAKGPEGPPGPTGRQGEKGEPGRPGDPAVVGPAVAGPKGEKGDVGPAGPRGATGVQGERGPPGLVLPGDPGPKGDPGDRGPIGLTGRAGPPGDSGPPGEKGDPGRPGPPGPVGPRGRDGEVGEKGDEGPPGDPGLPGKAGERGLRGAPGVRGPVGEKGDQGDPGEDGRNGSPGSSGPKGDRGEPGPPGPPGRLVDTGPGAREKGEPGDRGQEGPRGPKGDPGLPGAPGERGIEGFRGPPGPQGDPGVRGPAGEKGDRGPPGLDGRSGLDGKPGAAGPSGPNGAAGKAGDPGRDGLPGLRGEQGLPGPSGPPGLPGKPGEDGKPGLNGKNGEPGDPGEDGRKGEKGDSGASGREGRDGPKGERGAPGILGPQGPPGLPGPVGPPGQGFPGVPGGTGPKGDRGETGSKGEQGLPGERGLRGEPGSVPNVDRLLETAGIKASALREIVETWDESSGSFLPVPERRRGPKGDSGEQGPPGKEGPIGFPGERGLKGDRGDPGPQGPPGLALGERGPPGPSGLAGEPGKPGIPGLPGRAGGVGEAGRPGERGERGEKGERGEQGRDGPPGLPGTPGPPGPPGPKVSVDEPGPGLSGEQGPPGLKGAKGEPGSNGDQGPKGDRGVPGIKGDRGEPGPRGQDGNPGLPGERGMAGPEGKPGLQGPRGPPGPVGGHGDPGPPGAPGLAGPAGPQGPSGLKGEPGETGPPGRGLTGPTGAVGLPGPPGPSGLVGPQGSPGLPGQVGETGKPGAPGRDGASGKDGDRGSPGVPGSPGLPGPVGPKGEPGPTGAPGQAVVGLPGAKGEKGAPGGLAGDLVGEPGAKGDRGLPGPRGEKGEAGRAGEPGDPGEDGQKGAPGPKGFKGDPGVGVPGSPGPPGPPGVKGDLGLPGLPGAPGVVGFPGQTGPRGEMGQPGPSGERGLAGPPGREGIPGPLGPPGPPGSVGPPGASGLKGDKGDPGVGLPGPRGERGEPGIRGEDGRPGQEGPRGLTGPPGSRGERGEKGDVGSAGLKGDKGDSAVILGPPGPRGAKGDMGERGPRGLDGDKGPRGDNGDPGDKGSKGEPGDKGSAGLPGLRGLLGPQGQPGAAGIPGDPGSPGKDGVPGIRGEKGDVGFMGPRGLKGERGVKGACGLDGEKGDKGEAGPPGRPGLAGHKGEMGEPGVPGQSGAPGKEGLIGPKGDRGFDGQPGPKGDQGEKGERGTPGIGGFPGPSGNDGSAGPPGPPGSVGPRGPEGLQGQKGERGPPGERVVGAPGVPGAPGERGEQGRPGPAGPRGEKGEAALTEDDIRGFVRQEMSQHCACQGQFIASGSRPLPSYAADTAGSQLHAVPVLRVSHAEEEERVPPEDDEYSEYSEYSVEEYQDPEAPWDSDDPCSLPLDEGSCTAYTLRWYHRAVTGSTEACHPFVYGGCGGNANRFGTREACERRCPPRVVQSQGTGTAQD

SEQ ID NO: 1786 - DNA, 303 bp, Homo sapiens
ggcacgagctgggtgcagcaaccggagcggcggcgcgtctggaggaggctgcagcagcggaagaccccagtccagatccaggactgagatcccagaaccatgaacctggccatcagcatcgctctcctgctaacagtcttgcaggtctcccgagggcagaaggtgaccagcctaacggcctgcctagtggaccagagccttcgtctggactgccgccatgagaataccagcagttcacccatccagtacgagttcagcctgacccgtgagacaaagaagcacgtgctctttggcactgtgggg

SEQ ID NO: 1787 - DNA, 287 bp, Homo sapiens
  misc_feature (82)..(83): n is a, c, g, or t
agtcaggcagcgggagccgccgggagcggatggcggcggccgtagcggctccactcgccgccgggggtgaggaggcggcagnnatgacctccgtgcccgggtctccaggtctgccggggagacgcagtgcagagcgggccctagaggaggccgtggccaccgggaccctgaacctgtctaaccggcgctagaagcacttcccccggggcgcggaccgtagctacgacctgtcagacatcacccaggctgacctgtcccggaaccggattcccgaggtgcccgaggcg

SEQ ID NO: 1788 - DNA, 2526 bp, Homo sapiens
caatttttaagaaatgatcatctagggaaaatgttttaaaatctgttaaaatatctttttgttatactttaaaactgccttcagctgcctattggtaaataaggtctggatatcagtacatgacaacatatactaatgaattgaactgtgaattaggaatgaaaattgcctagaaatttttttatgagttattaggattaaagtaagaatttcctttgctgggctgtgtaggcactaagattccgtggttgttggaggggttaaatttggatctactagtgcatatattttaccgaggattcataaaaacacgacagggagcctgggtcaatccattaccatgtacaagcagtgaccaatagaaaaggaagaagaagatccaagaaggctgaggtaagcagtcttctgaagccctgtcaaagtggaaacaatagatcaaaggtgttcatggtgactgggacgagtaggtttcactgtttcttataggagacttgacagcttaaagtaaaaacaaattattttcgtcaaagtttttttttttttcttaactgatttttagcaaacctcagactgagacacaggactcaacggtgtattcctggaaggcaaggtgctataatggcaggcacaatctgtttcatcatgtgggtgttattcataacagacactgtgtggtctagaagtgtaaggcaggtctatgaagtacatgattcagatgattggactattcatgacttcgagtgtcccatggaatgtttctgcccacccagttttcctactgctttatattgtgaaaatagaggtctcaaagaaattcctgctattccttcaagaatttggtatctttatcttcaaaacaacctgatagaaaccattcctgagaagccattcgagaatgccacccagctaagatggataaatctaaataagaacaaaataaccaactacggaattgaaaaaggagccctaagccagctgaagaagttgctcttcttatttctggaagataatgagctagaggaggtaccttctccattgccaagaagtttagaacaattacaattagctagaaataaggtgtccagaattcctcaagggacctttagcaatctggagaacctgacccttcttgacctacagaacaacaaattagtggacaatgcctttcaaagagacacttttaaaggactcaagaatctcatgcagctaaacatggccaagaatgccctgaggaatatgcctccaagattaccagccaatacaatgcagttgtttttagacaacaattccattgaaggaataccagaaaattattttaatgtgattcctaaagtggcctttttgagactaaatcacaacaaactgtcagatgagggtctcccatcaagaggatttgatgtatcatcaattctagatcttcaactgtcgcacaatcaactcacaaaggttccccgaatcagtgctcatctgcagcaccttcaccttgatcataacaaaattaaaagtgtgaatgtctctgtaatatgtcccagcccatccatgctgcctgcagaacgagattccttcagttatggacctcatcttcgctacctccgtctggatggaaatgaaatcaaaccaccaattccaatggctttaatgacctgcttcagacttctgcaggctgtcattatttaaacacattctcaccaaatctaaaattagtttaatgagctgtttctgacatgaatgtggttaccattaataggtttaggacacaagtcatattcccattgctctcggccaccattttcatttgtgcagtgtatttttctattcaaagatgcttttgccagtcacatgcatcacagcctgcattaatttgcttctctcttaattaataacacagacacagagttaagatagtttatcaactcaaagatagttttattttggtctcttccatagcttattaacactaaagaaaacaattacatccttatacaataaaagggacacatttgtgtatgtttaaaattacttatgcagataccgtaatttacagtataaatgtaataatcaaacaggaggataacgacctgaagaaaatgagaaaataaaatatttcttaattgtaatcataataaaacaattgcagattgctaagtagctgttggtggtacaagtttgatatttagcttgagaatgggtatggaatgaatcaaatacttcatcactaaagaattcttgttatttaatatcaaataatgaaacagcagtcacttctagttcattaccatttcttgtagctgttgtttttagatatagtccactgcattcttataagttctaaattttatgtttattataatgcatttcttgtggaatcttagtgttttaacatttgaaatccacttaaactgcaaattgttctttatatttgattgtgttttttggattttctaaataaaaatattgaatgctttctaacaaaacagaatatttcaaagaaattagcaagcttcattaaagaacatgttttaataa

SEQ ID NO: 1789 - protein, 352 aa, Homo sapiens
MAGTICFIMWVLFITDTVWSRSVRQVYEVHDSDDWTIHDFECPMECFCPPSFPTALYCENRGLKEIPAIPSRIWYLYLQNNLIETIPEKPFENATQLRWINLNKNKITNYGIEKGALSQLKKLLFLFLEDNELEEVPSPLPRSLEQLQLARNKVSRIPQGTFSNLENLTLLDLQNNKLVDNAFQRDTFKGLKNLMQLNMAKNALRNMPPRLPANTMQLFLDNNSIEGIPENYFNVIPKVAFLRLNHNKLSDEGLPSRGFDVSSILDLQLSHNQLTKVPRISAHLQHLHLDHNKIKSVNVSVICPSPSMLPAERDSFSYGPHLRYLRLDGNEIKPPIPMALMTCFRLLQAVII

SEQ ID NO: 1790 - DNA, 437 bp, Homo sapiens
tctccagcccctcctccccacaacccctagtggggaggggcagctgtccatttgcccaaagtattaatgcaactgaagctgtgatatttccaacgactgtaggaggaaaaattaaggggagagaggaaaacaaaaccaaccaacccctaaaatcattttcttattgtacataacgacctcattctcctgtatatgcggaagatataaccttatatttggtaagtgtttcttgtgctattttatcacgtgacctgtttataaaaatatatattaaaaaagttgtaaaaaaaaaaaaaaaaaaaaactcgagggggggcccggtacccaattcgccctatagtgagtcgtattacaattcactggccgtcgttttacaacgtcgtgactgggaaaaccctggcgttacccaacttaatcgccttgcagcacatccccct

SEQ ID NO: 1791 - DNA, 1813 bp, Homo sapiens
ccgtattaccacgtggagaaatagaaaacctccggagagaaaaatgagtcagaacacacaggatggatacacaaggaactggtttaaggtcacaattccttacgggataaagtatgacaaggcatggctaatgaattcaatccagagccattgcagtgaccgcttcactccggttgatttccactacgtccgaaatcgggcatgcttctttgtccaggatgctagcgctgcctccgcattgaaggatgtcagttataagatttatgatgatgagaaccaaaagatatgtatatttgtcaatcattctactgcgccctactctgtgaagaataagttgaagccaggccaaatggagatgctaaagctgaccatgaacaaacggtacaatgtctcccagcaagctcttgatctccagaatctccgctttgacccagacttgatgggccgtgacattgatataatcctgaatcgaagaaactgcatggctgccaccctgaagatcattgaaagaaatttccctgagctgttgtctttgaacttgtgcaacaacaagctgtaccagctggatggcctttctgacattacagagaaggctcccaaagtcaagaccctgaatctctccaaaaataagctggagtcggcgtgggagttgggcaaggtgaaagggctgaagctcgaagagctatggctagaagggaacccgttgtgcagcaccttctcggaccagtccgcctatgtaagtgccatccgggattgtttccccaagttgttacgcctggacggccgagagttatccgcaccagtgattgttgacattgacagctctgagacaatgaaaccctgcaaggaaaactttactggatctgagaccctaaagcatttagtcctgcaattcctgcagcagtattactcgatctatgactctggagatcgacagggtctcctcggtgcttaccacgatgaggcctgcttctccttggctattcccttcgaccccaaggactcagccccgagcagcttgtgcaagtactttgaggatagcaggaatatgaaaacactcaaggacccctacctgaagggggaactgctgaggcgcacaaaacgtgacattgtggactccctcagtgcgttgcccaaaactcagcatgacctcagctccatcctggtggacgtgtggtgccagacggaaaggatgctctgcttttctgtcaatggggttttcaaggaagtggaaggacagtctcagggttctgttctcgccttcacccggaccttcattgctacccctggcagcagttccagtctgtgcatcgtgaatgacgagctgtttgtgagggatgccagcccccaagagactcagagtgccttctccatcccagtgtccacactctcctccagctctgagccctccctctcccaggagcagcaggaaatggtgcaggctttctctgcccagtctgggatgaaactggagtggtctcagaagtgccttcaggacaatgagtggaactacactagagctggccaggccttcactatgctccagaccgagggcaagatccccgcggaggccttcaagcaaatctcctaaaaggagccctccgatgtcttctttgtcttcgttcacatcctctttgtttcctcttttcaccagcctaaggcctggctgaccaggaagccaacgttaacttgcaggccacgtgacataaccacccaaagagccagttgctctgtgtattcgccccactcatgatcaccattttattttcataataaagagtgacgttacacgttgtaaaaaaaaaaaaaaaaa

SEQ ID NO: 1792 - protein, 515 aa, Homo sapiens
MSQNTQDGYTRNWFKVTIPYGIKYDKAWLMNSIQSHCSDRFTPVDFHYVRNRACFFVQDASAASALKDVSYKIYDDENQKICIFVNHSTAPYSVKNKLKPGQMEMLKLTMNKRYNVSQQALDLQNLRFDPDLMGRDIDIILNRRNCMAATLKIIERNFPELLSLNLCNNKLYQLDGLSDITEKAPKVKTLNLSKNKLESAWELGKVKGLKLEELWLEGNPLCSTFSDQSAYVSAIRDCFPKLLRLDGRELSAPVIVDIDSSETMKPCKENFTGSETLKHLVLQFLQQYYSIYDSGDRQGLLGAYHDEACFSLAIPFDPKDSAPSSLCKYFEDSRNMKTLKDPYLKGELLRRTKRDIVDSLSALPKTQHDLSSILVDVWCQTERMLCFSVNGVFKEVEGQSQGSVLAFTRTFIATPGSSSSLCIVNDELFVRDASPQETQSAFSIPVSTLSSSSEPSLSQEQQEMVQAFSAQSGMKLEWSQKCLQDNEWNYTRAGQAFTMLQTEGKIPAEAFKQIS

SEQ ID NO: 1793 - DNA, 463 bp, Homo sapiens
acgctgctccacctgcaccgcttctgcaagaggatgacctggttccacatggactgtcaggacctgatggcccagctcaggctggacaagacctcaagggtcagtcctggggaccagcgccgcctccaccgctacctgcagcgactggcatctgagttccctgctgagaagctcgcagccgtggggctgcaggtggcctccctgagccgggcaggcctgggccaggagctatgggaggaggcccggatcaggcatgaggagatccggatgctcctggagaaggcactgacccacagctcttgcccagaggctccagctgctcactcagcgcgcccagaacgaagaggggtggcagccaagggccagggtgtgagtgtagaggtcacttccaaggggaggtgggatcagcctccactagactcactgggcatggaccatttgccaaagtcctattggcctcctg

SEQ ID NO: 1794 - DNA, 463 bp, Homo sapiens
  misc_feature (224)..(224): n is a, c, g, or t
cattttatccattttaactcatgtaatcctcatgtgagtattcctgtttaacacttgagtaaactgaggcacagagaacataagttgcatgccatagtcacacactgtgaaagtgaaaagagaatgtgtgcaaaacacgtcacagtcctggtttctgagtaaaggcaggctgttatctttagaatcaagctatcacagggagataggcaatgctgtgggtgttngaggaaggtgagagcctgttgctaacaatttcctggttttaaagctaaggctgattttattgggaagatctcacatgtgtgtggcccctgagagttcccagtgccttttatttgcagtccttccatttgggacctcctagctggccctattcaggttcatcttccaggggcttcaggagggggttgaggaccattttcccaaggttcacaggaaccagcttttttagttcaccaccctg

SEQ ID NO: 1795 - DNA, 448 bp, Homo sapiens
gcatcgcaggcgccctcctcgggcctcccggcctggggcgccaacggggagagcccggggggcggcgccccctttccgggcagcagcggctcttccgccctgctgcaggcggaggtgctggatctggacgaggacgaggacgacctggaggtgttcagcaaggatgcctcattgatggacatgaactccttcagccctatgatgccaacatcccctttatcaatgataaaccaaatcaagtttgaggatgaaccagatttaaaggatctcttcatcacagttgatgaacctgaaagtcatgttactacaatagaaactttcattacgtataggattattactaagacatctcgtggggaatttgactccagtgaatttgaagttaggagacgatatcaagatttcctttggttgaagggaaaactggaagaagcacaccccactctga

SEQ ID NO: 1796 - DNA, 3072 bp, Homo sapiens
acttgagagagacagagagaccacgccgattgctgagaggaactggaagaagaaaaattcccagactcagtgggaagagctccctcaccatgagtagcgctatgttggtgacttgcctcccggaccccagcagcagcttccgtgaggatgccccgcggcccccagtgccaggggaagaaggggagaccccaccgtgtcagccaggggtgggcaagggccaggtcaccaaacccatgtctgtctcttccaacaccaggcggaacgaagatgggttgggggagccggaggggcgggcatctccggattcccctctgacccggtggaccaagtccttacactccttattgggcgatcaagacggtgcttacctgttccgaactttcctggagagggagaaatgcgtggataccttagacttctggtttgcctgcaatggattcaggcagatgaacctgaaggataccaaaactttacgagtagccaaagcgatctacaaaaggtacattgagaacaacagcattgtctccaagcagctgaagcctgccaccaagacctacataagagatggcatcaagaagcagcagattgattccatcatgtttgaccaggcgcagaccgagatccagtcggtgatggaggaaaatgcctaccagatgtttttgacttctgatatatacctcgaatatgtgaggagtgggggagaaaacacagcttacatgagtaatgggggactcgggagcctaaaggtcgtgtgtggctatctccccaccttgaatgaagaagaggagtggacttgtgccgacttcaagtgcaaactttcgccaaccgtggttggcttgtccagcaaaactctgagggccacggcgagtgtgaggtccacggaaactgttgacagtggatacaggtccttcaagaggagcgatcctgttaatccttatcacataggttctggctatgtctttgcaccagccaccagcgccaacgacagtgagatatccagtgatgcgctgacggatgattccatgtccatgacggacagcagtgtagatggaattcctccttatcgtgtgggcagtaagaaacagctccagagagaaatgcatcgcagtgtgaaggccaatggccaagtgtctctacctcatttcccgagaacccaccgcctgcccaaggagatgacccccgtggaacccgccacctttgcagctgagctgatctcgaggctggaaaagctgaagctggagttggagagccgccacagcctggaggagcgcctgcagcagatccgagaggatgaagagagagagggctccgagctcacactcaattcgcgggagggggcgcccacgcagcaccccctctccctactgccctccggcagctacgaggaagacccgcagacgatactggacgatcacctgtccagggtcctcaagacccctggctgccagtctccgggcgtaggccgctatagccctcgctcccgctccccggaccaccaccaccaccaccattcgcagtaccactccctgctcccgcccggtggcaagctgcctcccgcggccgcctcgccgggcgcctgccccctcctcgggggcaaaggctttgtgaccaagcagacgacgaagcatgtccaccaccactacatccaccaccatgccgtccccaagaccaaggaggagatcgaggcggaggccacgcagcgggtgcactgcttctgccctgggggcagcgagtattactgctactcgaaatgcaaaagccactccaaggctccggaaaccatgcccagcgagcagtttggcggcagcagaggcagtaccttgcccaaacgcaatgggaaaggcacggagccgggcctggccctgcccgccagggaaggaggggcccccggcggagctggggccctgcagcttccccgggaggaaggagacaggtcgcaggatgtctggcagtggatgctggagagtgagcggcagagcaagcccaagccccatagtgcccaaagcacaaaaaaggcctaccccttggagtctgcccgctcgtctccaggcgaacgagccagccggcaccatctgtgggggggcaacagcgggcacccccgcaccaccccccgtgcccacctgttcacccaggaccctgcgatgcctcccctgaccccacccaacacgctggctcagctggaggaggcctgtcgcaggctagctgaggtgtcgaagcccccaaagcagcggtgctgtgtggccagtcagcagagggacaggaatcattcggccactgttcagacgggagccacacccttctccaatccaagcctggctccagaagatcacaaagagccaaagaaactggcaggtgtccacgcgctccaggccagtgagttggttgtcacttactttttctgtggggaagaaattccataccggaggatgctgaaggctcagagcttgaccctgggccactttaaagagcagctcagcaaaaagggaaattataggtattacttcaaaaaagcaagcgatgagtttgcctgtggagcggtgtttgaggagatctgggaggatgagacggtgctcccgatgtatgaaggccggattctgggcaaagtggagcggatcgattgagccctggggtctggctttggtgaactgttggagcccgaagctcttgtgaactgtcttggctgtgagcaactgcgacaaaacattttgaaggaaaattaaaccaatgaagaagacaaagtctaaggaagaatcggccagtgggcttcgggagggcggggggaggttgattttcatgattcatgagctgggtactgactgagataagaaaagcctgaactatttattaaaaacatgaccactcttggctattgaagatgctgcctgtatttgagagactgccatacataatatatgacttcctagggatctgaaatccataaactaagagaaactgtgtatagcttacctgaacaggaatccttactgatatttatagaacagttgatttcccccatccccagtttatggatatgctgctttaaacttgggaagggggagacaggtaagtttt

SEQ ID NO: 1797 - protein, 843 aa, Homo sapiens
MSSAMLVTCLPDPSSSFREDAPRPPVPGEEGETPPCQPGVGKGQVTKPMSVSSNTRRNEDGLGEPEGRASPDSPLTRWTKSLHSLLGDQDGAYLFRTFLEREKCVDTLDFWFACNGFRQMNLKDTKTLRVAKAIYKRYIENNSIVSKQLKPATKTYIRDGIKKQQIDSIMFDQAQTEIQSVMEENAYQMFLTSDIYLEYVRSGGENTAYMSNGGLGSLKVVCGYLPTLNEEEEWTCADFKCKLSPTVVGLSSKTLRATASVRSTETVDSGYRSFKRSDPVNPYHIGSGYVFAPATSANDSEISSDALTDDSMSMTDSSVDGIPPYRVGSKKQLQREMHRSVKANGQVSLPHFPRTHRLPKEMTPVEPATFAAELISRLEKLKLELESRHSLEERLQQIREDEEREGSELTLNSREGAPTQHPLSLLPSGSYEEDPQTILDDHLSRVLKTPGCQSPGVGRYSPRSRSPDHHHHHHSQYHSLLPPGGKLPPAAASPGACPLLGGKGFVTKQTTKHVHHHYIHHHAVPKTKEEIEAEATQRVHCFCPGGSEYYCYSKCKSHSKAPETMPSEQFGGSRGSTLPKRNGKGTEPGLALPAREGGAPGGAGALQLPREEGDRSQDVWQWMLESERQSKPKPHSAQSTKKAYPLESARSSPGERASRHHLWGGNSGHPRTTPRAHLFTQDPAMPPLTPPNTLAQLEEACRRLAEVSKPPKQRCCVASQQRDRNHSATVQTGATPFSNPSLAPEDHKEPKKLAGVHALQASELVVTYFFCGEEIPYRRMLKAQSLTLGHFKEQLSKKGNYRYYFKKASDEFACGAVFEEIWEDETVLPMYEGRILGKVERID

SEQ ID NO: 1798 - DNA, 5303 bp, Homo sapiens
catggcggtgccggctcggacctgcggcgcctctcggcccggcccagcgcggactgcgcgcccctggcccggctgcggcccccaccctggccccggcacccggcgcccgacgtccgggcccccgcgcccgctgtggctgctgctgccgcttctaccgctgctcgccgcccccggcgcctctgcctacagcttcccccagcagcacacgatgcagcactgggcccggcgtctggagcaggaggtcgacggcgtgatgcggatttttggaggcgtccagcagctccgtgagatttacaaggacaaccggaacctgttcgaggtacaggagaatgagcctcagaagttggtggagaaggtggcaggggacattgagagccttctggacaggaaggtgcaggccctgaagagactggctgatgctgcagagaacttccagaaagcacaccgctggcaggacaacatcaaggaggaagacatcgtgtactatgacgccaaggctgacgctgagctggacgaccctgagagtgaggatgtggaaagggggtctaaggccagcaccctaaggctggacttcatcgaggacccaaacttcaagaacaaggtcaactattcatacgcggctgtacagatccctacggacatctacaaaggctccactgtcatcctcaatgagctcaactggacagaggccctggagaatgtgttcatggaaaaccgcagacaagaccccacactgctgtggcaggtcttcggcagcgccacaggagtcactcgctactacccggccaccccgtggcgagcccccaagaagatcgacctgtacgatgtccgaaggagaccctggtatatccagggggcctcgtcacccaaagacatggtcatcatcgtggatgtgagtggcagtgtgagcggcctgaccctgaagctgatgaagacatctgtctgcgagatgctggacacgctgtctgatgatgactatgtgaatgtggcctcgttcaacgagaaggcacagcctgtgtcatgcttcacacacctggtgcaggccaatgtgcgcaacaagaaggtgttcaaggaagctgtgcagggcatggtggccaagggcaccacaggctacaaggccggctttgagtatgcctttgaccagctgcagaactccaacatcactcgggccaactgcaacaagatgatcatgatgttcacggatggtggtgaggaccgcgtgcaggacgtctttgagaagtacaattggccaaaccggacggtgcgcgtgtttactttctccgtggggcagcataactatgacgtcacaccgctgcagtggatggcctgtgccaacaaaggctactattttgagatcccttccatcggagccatccgcatcaacacacaggaatatctagatgtgttgggcaggcccatggtgctggcaggcaaggaggccaagcaggtgcagtggaccaacgtgtatgaggatgcactgggactggggttggtggtaacagggaccctccctgttttcaacctgacacaggatggccctggggaaaagaagaaccagctgatcctgggcgtgatgggcattgacgtggctctgaatgacatcaagaggctgacccccaactacacgcttggagccaacggctatgtgtttgccattgacctgaacggctacgtgttgctgcaccccaatctcaagccccagaccaccaacttccgggagcctgtgactctggacttcctggatgcggagctagaggatgagaacaaggaagagatccgtcggagcatgattgatggcaacaagggccacaagcagatcagaacgttggtcaagtccctggatgagaggtacatagatgaggtgacacggaactacacctgggtgcctataaggagcactaactacagcctggggctggtgctcccaccctacagcaccttctacctccaagccaatctcagtgaccagatcctgcaggtcaagtattttgagttcctgctccccagcagctttgagtctgaaggacacgttttcattgctcccagagagtactgcaaggacctgaatgcctcagacaacaacaccgagttcctgaaaaactttattgagctcatggagaaagtgactccagactccaagcagtgcaacaacttccttctgcacaacctgatcttggacacgggcatcacgcagcagctggtagagcgtgtgtggagggaccaggatctcaacacgtacagcctactggccgtgttcgctgccacagacggtggcatcacccgagtcttccccaacaaggcagctgaggactggacagagaaccctgagcccttcaatgccagcttctaccgccgcagcctggataaccacggttatgtcttcaagcccccacaccaggatgccctgttaaggccgctggagctggagaatgacactgtgggcatcctcgtcagcacagctgtggagctcagcctaggcaggcgcacactgaggccagcagtggtgggcgtcaagctggacctagaggcttgggctgagaagttcaaggtgctagccagcaaccgtacccaccaagaccagcctcagaagtgcggccccaacagccactgtgagatggactgcgaggttaacaatgaggacttactctgtgtcctcattgatgatggaggattcctggtgctgtcaaaccagaaccatcagtgggaccaggtgggcaggttcttcagtgaggtggatgccaacctgatgctggcactctacaataactccttctacacccgcaaggagtcctatgactatcaggcagcctgtgcccctcagccccctggcaacctgggtgctgcaccccggggtgtctttgtgcccaccgttgcagatttccttaacctggcctggtggacctctgctgccgcctggtccctgttccagcagcttctctacggcctcatctaccacagctggttccaagcagaccccgcggaggccgaggggagccccgagacgcgcgagagcagctgcgtcatgaaacagacccagtactacttcggctcggtaaacgcctcctacaacgccatcatcgactgcggaaactgctccaggctgttccacgcgcagagactgaccaacaccaatcttctctttgtggtggccgagaagccgctgtgcagccagtgcgaggctggccggctgctgcagaaggagacgcactgcccagcggacggcccggagcagtgtgagctagtgcagagaccgcgataccggagaggcccgcacatctgcttcgactacaacgcgacagaagatacctcagactgtggccgcggggcctccttcccgccgtcgctgggcgtcctggtctccctgcaactgctgctcctcctgggcctgccgccccggccgcagcctcaagtcctcgtccacgcctctcgccgcctctgagcaccctgccccaccccacctccactcccacctcacccggcctcttcgcctttcccaccctcctgccccacactccccgccttagagcctcgtccctccctcactgaaggacctgagctggccaggccctgagagtctggtctgcgccttgggatggggagtcccaaagcgggacgccgcaggtgtttggcacccaaatcacatctcacctccgaactgttcaagtgtccccagacccttcttgcctgctgggctccccccagtgggatgggacagggaggccacacgcactggtgccaaaaccaggcctctgctgccgcccttcctggaggctgcctatgttgggggggaccctgcctcagctgacccggcctctctgccccacccaagcccaaacttggtttctgtgagaatagtggaggaaggtgagatggccagtttgaagcctgtgcctcccagcttaaatcctagcaggagagaggctctggggcagcccccatgggctcctgcccctttcaggcctacagccacatccccaagcccaccaggtgtcaggatagtcacagtgataccagttcagacactaccccatatacacctggaacattgaggatggaaactggactcacattcgacataccccactgggcacacgcacaaacacacacactatggggtggggtgggtgtaggggcttacaaagccttacacagggcgaggggttggtgggagggttggcacctgcacactccatctcctgctcaccacctgcctctaatctgagctgcagcctggctggtcctcccatttctaaagctgaatgtcaaacagtgccaaatgctggggcagggggtgaagaaccctctgtcccacccctagccaccagtgtcctccaagtgccccctcacctctccaggtgctcattgtaaccatttctcactagtgtcaggcccccagtgggaccacatgccactgcctgcacctttcggcagaggaacccccaccagacatcaccctttgccttagcaggggtgactttgtctctcctggctgggccatccttccgccaatctggcccttacacactcaggcctgtgcccactccctatctccttcccacccctacacacacactccctgcttgcaggaggccaaactgtccctcccttgctgaacacacacacacacacacacacacaggtggggactgggcacagctcttcacaccattcattctggtcatttcccccaaaggcatcccagcctgggggccagtggggaactgagggcaaggggatatagtgatggggctcagatggactgggaggagggggagggtgatgcattaattaatggcttcgttaattaatgtcatgttgcttgtcgctttctcagtgtgtgtgtgtggtccatgcccactgctggtgccagggtgggtgtccatgtgcacccggcctggatgccagctgtgtccttcgggggcgtgcgtgtaactgtagtgtagtcaggtgctcaatggagaatataaacatatacagaaaaatatatattttaagtttaaaaaacagaaaaacagacaaaacaatccccatcaggtagctgtctaacccccagctgggtctaatccttctcattacccacccgacctggctgcccctcaccttgggctgggggactggggggccatttccttttctctgccctttttttgttgttctattttgtacagacaagttggaaaaacaacagcgacaaaaaagtcaagaaactttgtaaaatatcgtgtgtgtgattccttgtaaaatattttcaaatggtttattacagaagatcagttattaaataatgttcatattttcacttc

SEQ ID NO: 1799 - protein, 1145 aa, Homo sapiens
MAVPARTCGASRPGPARTARPWPGCGPHPGPGTRRPTSGPPRPLWLLLPLLPLLAAPGASAYSFPQQHTMQHWARRLEQEVDGVMRIFGGVQQLREIYKDNRNLFEVQENEPQKLVEKVAGDIESLLDRKVQALKRLADAAENFQKAHRWQDNIKEEDIVYYDAKADAELDDPESEDVERGSKASTLRLDFIEDPNFKNKVNYSYAAVQIPTDIYKGSTVILNELNWTEALENVFMENRRQDPTLLWQVFGSATGVTRYYPATPWRAPKKIDLYDVRRRPWYIQGASSPKDMVIIVDVSGSVSGLTLKLMKTSVCEMLDTLSDDDYVNVASFNEKAQPVSCFTHLVQANVRNKKVFKEAVQGMVAKGTTGYKAGFEYAFDQLQNSNITRANCNKMIMMFTDGGEDRVQDVFEKYNWPNRTVRVFTFSVGQHNYDVTPLQWMACANKGYYFEIPSIGAIRINTQEYLDVLGRPMVLAGKEAKQVQWTNVYEDALGLGLVVTGTLPVFNLTQDGPGEKKNQLILGVMGIDVALNDIKRLTPNYTLGANGYVFAIDLNGYVLLHPNLKPQTTNFREPVTLDFLDAELEDENKEEIRRSMIDGNKGHKQIRTLVKSLDERYIDEVTRNYTWVPIRSTNYSLGLVLPPYSTFYLQANLSDQILQVKYFEFLLPSSFESEGHVFIAPREYCKDLNASDNNTEFLKNFIELMEKVTPDSKQCNNFLLHNLILDTGITQQLVERVWRDQDLNTYSLLAVFAATDGGITRVFPNKAAEDWTENPEPFNASFYRRSLDNHGYVFKPPHQDALLRPLELENDTVGILVSTAVELSLGRRTLRPAVVGVKLDLEAWAEKFKVLASNRTHQDQPQKCGPNSHCEMDCEVNNEDLLCVLIDDGGFLVLSNQNHQWDQVGRFFSEVDANLMLALYNNSFYTRKESYDYQAACAPQPPGNLGAAPRGVFVPTVADFLNLAWWTSAAAWSLFQQLLYGLIYHSWFQADPAEAEGSPETRESSCVMKQTQYYFGSVNASYNAIIDCGNCSRLFHAQRLTNTNLLFVVAEKPLCSQCEAGRLLQKETHCPADGPEQCELVQRPRYRRGPHICFDYNATEDTSDCGRGASFPPSLGVLVSLQLLLLLGLPPRPQPQVLVHASRRL

SEQ ID NO: 1800 - DNA, 11876 bp, Homo sapiens
gggctgggcctcccttccccataacactgagctgctctgctgggccaaccgtgctcctgggccagccagaggacccccatgaggcggcatgcaggcggggagcaggccacagaacgcagggtgaaacccaaggcgctctagaggagatgaattatggatccgccctcccggaatcctggctcggccctccccacgccacccagggccagtcgggtctgctcacagcccgaggaggccgcgtgtccagccgcgggcaagagacagagcaggtccctgtgtctccaagtccctgagcccgtgacaccggccccaggccctgtagagagcaggcagccaccatggcgaaggaggaagatgaggagaagaaagccaagaaagggaagaaggggaagaaggcaccggagccggagaagcccaaacggagcctgaaggggacgtcgcggctgttcatgggcttccgcgaccgtacacccaagatctccaagaagggccagttccgcagcgcctcggccttcttctggggcctccacaccggcccccagaagaccaagcgcaagaggaaggcccgcaccgtgctcaagtccacgtcaaagctcatgacgcagatgcgcatgggcaagaagaagcgggcgatgaagggcaagaagccgtccttcatggtgatccgcttcccaggccgccgtggctacggccgcctgcggccgcgcgcccggtcactcagcaaagcgtccacggccatcaactggctcacaaaaaagttcctcctcaagaaggccgaggagtcgggcagcgaacaggccacagtggacgcctggctgcagcgctcgagctcccgcatgggctcccgcaaactccccttcccgtcgggtgccgagatcctgcggcctgggggccggctccggaggttcccccgcagccgcagcatctacgcgtcaggcgagcccctgggcttcctgcccttcgaggacgaggccccattccatcactcgggctcccgcaagtcgctgtacgggcttgagggcttccaggacctgggcgagtattatgactatcaccgcgacggcgacgactactacgaccggcagtcactccaccgctacgaggagcaggaaccctacctggcgggcctcggcccctacagcccggcctggccaccctacggcgaccactactacgggtacccgcccgaggatccctacgactactaccaccccgactattacggtggcccctttgatccggggtacacctacggctacggctacgacgattacgaacccccatatgcgcccccgtcggggtactcgtctccttacagctaccacgatgggtacgagggcgaggcgcacccttatggctactacctggatccctatgcgccgtacgacgcgccatacccaccctatgacctcccataccacactccctacgatgtaccctactttgatccctacggagtccactacaccgtcccctatgccgaaggcgtctatggcggtggggacgaggccatctacccccccgaggtgccctatttttacccggaggagtcggcttcggcctttgtgtacccctgggtaccaccgcccatcccgtcgccccacaacccgtatgcccacgccatggatgacatcgccgagctggaggaaccagaggacgcgggcgtagagcgtcaggggacctccttccgcctgcccagcgccgccttcttcgagcagcaaggcatggataagcccgccaggtccaagctgtccctcatccgcaagttccgcctcttcccgcgaccccaggtgaagctgtttgggaaggagaagctggaggtgcccctgccaccctctctggacattcctctccccttgggggatgcggacgaagaagaggacgaggaggagctgcccccggtttccgctgtgccctacggccaccctttctggggcttcctcacgccgcgccagcgcaacctccagcgcgcgctgtcggccttcggcgcccaccggggcctgggcttcggccctgagtttggccgccccgtgcctcgccctgccacctcgcttgcgcggttcctcaagaagacgctgtcggagaagaagcccatcgcgcggctcaggggcagccagaaggcccgggcgggcggccctgctgtcagggaggcggcctacaaacgcttcggctacaagctggctggcatggaccccgagaagcccggcacgcccatcgtgctgaggagggcccagccacgcgctcgcagcagcaacgacgcgcgccgcccgcccgcgccacagcccgcgcccaggaccctctcccactggagcgcgctcctgtctccgcccgtgcccccgcggcccccaagctccgggcccccgcccgcgccgccgctctccccggcgctctcgggcctgccccggccggcctcgccctacggctccctccgccgccacccgccgccctgggccgccccagcgcacgtgccaccggcgccgcaggccagctggtgggccttcgtggagccccctgccgtgagcccggaggtgccccccgacctactagccttcccagggccccgaccctcgttcaggggctcccgccggagaggggcggctttcggcttccccggggcctctccacgggcgtcgcggaggcgagcttggtcaccgctggcctcgccccagccctcgctgaggagctcgccgggcctcggctactgctcacccttggcgcccccgtcgcctcagctgtccttgcgcacgggccccttccagccgcccttcctgcccccggcccgccggccccgctcgctgcaggagtccccagccccacgccgagccgctgggcgcctgggcccacccggctcgccgctgccgggctcacccaggccgccctcgccgcccctggggctctgccacagcccgcggcgcagctccctgaatctgccctcgcgcctcccgcacacgtggcggcgcctcagcgagccacccactcgggctgtgaagccgcaagtgcgcctgcccttccaccgaccgcccagggccggggcctggcgggcgcccctggaacaccgggagagcccgcgagaacccgaggactcagagacgccctggactgtgcccccactggcccccagctgggacgtggacatgcctcccacccaacgcccaccctccccctggccaggaggtgcaggcagccgccgaggcttttccaggccaccccctgtgccggaaaacccctttctccagctcctgggccctgtgccatcccccaccctccagcctgaggatccagctgctgatatgaccagggtcttcctgggcagacaccatgagccggggcctggacagctcaccaaatcagctggcccaacccctgagaagcctgaagaagaggccaccctgggggacccccagctgccagcagagaccaagcctccaaccccagcacctcccaaggatgtcactccccccaaggatatcactccccccaaggatgtcctcccagagcaaaagacattaaggcccagcctctcatacccactggctgcgtgtgaccagaccagggccacatggccaccatggcaccgctggggaacactgccccaagccgcagcccccttggcgcccatcagggccccagagcccctgcccaaggggggtgaacggcgccaggcagcccctgggcgttttgctgtggtcatgcctcgtgtgcagaagctgagctctttccagcgagttgggcctgcaaccctgaagcctcaagtccagcccattcaggaccccaagccaagagcctgtagtcttcgctggtcctgcctctggcttcgggcagatgcctatggaccctggccacgagtacacacccatccccagtcctgccacctgggccctggagctgcctgcctgtcccttaggggctcctgggaggaggtcggcccgccaagctggcggaacaagatgcactccatccgcaacctgccatccatgcggttccgtgagcagcacggggaggatggtgtggaggacatgacacagctggaagacctccaggaaaccactgtgctgtccaacctcaagattagatttgaacggaacctcatctacacatacattgggagcatcctggtgtcggtgaacccataccaaatgtttggaatctatgggccggagcaggtgcagcagtacaacggacgggccctgggagagaatcccccgcacctctttgctgttgcaaatctcgccttcgccaaaatgctcgatgccaaacagaaccagtgcataatcattagtggagagagcggctctggcaaaactgaggccaccaagctgattctgcgctacctggccgccatgaaccagaaacgggaggtcatgcagcaggtgaagatcctggaggcaacacccctcttggagtccttcggtaatgccaaaaccgtcaggaacgacaactccagccgctttgggaagtttgtggaaatctttctggaagggggcgtgatctctggtgccataacctcccagtacctgcttgagaaatccaggatcgtgtttcaggccaaaaacgagaggaattaccacatcttctacgagttgctggccgggttgcctgcccagctcaggcaggcctttagcctgcaagaggctgagacctactactatctgaaccagggtgggaactgtgagatagcaggaaagagcgatgcagatgactttcgccggctcctggctgccatggaggtgttgggcttcagcagtgaggaccaggacagcatcttccgcatcctggcctccatcctgcacctgggcaacgtctactttgagaagtatgagacggatgcacaggaggtggcctcagtggtgagtgcccgagagatccaggccgtggcagagctgctgcagatctcccctgagggcctgcagaaggccatcaccttcaaagtgaccgagacaatgcgagagaagatcttcacgcccctaactgtggagagcgctgtggatgccagggacgccatcgccaaggtcttgtatgcactgctgttcagctggctcatcaccagggtcaacgcgctggtgtccccaaggcaggacacactgtccatcgccatcctggacatctatggtttcgaggacctgagcttcaacagctttgagcagctgtgtattaactacgcaaacgagaaccttcagtaccttttcaacaagatcgtcttccaggaggagcaggaggagtacatccgtgagcagatagactggcaggagatcacctttgctgacaaccagccctgcatcaacctcatctcactgaagccttatggcatcctgcggatccttgacgaccagtgttgctttccccaggctacagaccacaccttcctacagaagtgccactaccatcatggcgccaacccgctctattccaaacccaagatgccgctgcctgagttcaccatcaagcactatgcaggcaaggtcacctaccaggtgcacaagttcctggacaagaaccacgaccaagtgcgccaggatgtgctggacctgttcgtacggagccggacacgggtggtggcacacctcttctccagccatgccccacaggctgcccctcagcgcctgggcaagagcagctccgtcactcggctctacaaggcgcacactgtggccgccaagttccagcagtcactcctggatctggtggaaaagatggagaggtgcaaccccttgttcatgcgttgcctgaagcccaaccacaagaaggagccaggtctctttgagccagatgtggtaatggcacaattacgctattcaggggtgctggagaccgtgaggatccgcaaggagggatttccagtgcgcctgcctttccaggggttcatcgacaggtactgctgtctagtggccctcaagcatgacctgccggctaatggggacatgtgtgtgtcagtgctgagtcgcctgtgcaaagtcatgccaaacatgtaccgtgttggggtcagcaagctgttccttaaggaacacctataccagctgctggagagtatgcgagagcatgtcctgaatctggcagccctcactctgcagcgctgcctccgtggcttcttcattaagcggcgattccgctctctgcgccacaagatcatcctgctgcaaagccgggcccgtggctaccttgccaggcaacgctatcagcagatgaggaggagtctggtgaagttccggtccctggtacacgcatacgtgagccgccgacgctatctcaagctgagggcagagtggaggtgccaggtggagggggcgctgctgtgggagcaggaggagctgagcaagcgggaggtagtcgctgtggggcacctggaggtaccggctgagctggctgggctcttgcaagcagtggcaggcctcgggctggcccaggtgcctcaggtggcccctgtgaggactcctcgactccaggctgagccccgtgtcacactgcccctggacatcaacaactatcctatggccaagtttgtccagtgccacttcaaggaacctgcctttgggatgctgacagtgcccctgaggacacccctcacgcagctgccagccgagcaccatgcagaagccgtgagcatcttcaagctgatcctgcgcttcatgggcgacccccacctgcatggtgcccgggagaacatcttcgggaactacatcgtgcagaaggggctggcggtgcctgagctgcgggatgagatcctggcacagctggccaatcaggtgtggcacaatcacaatgcccacaatgctgagcggggctggctgctgctggccgcctgcctcagtggctttgcaccttccccgtgcttcaacaagtaccttctcaagtttgtgtctgattatgggcggaatggcttccaggctgtgtgtcagcaccgcctcatgcaggccatgggccgggcccaacagcagggctcgggggctgcccgcaccttacccccgacccagctcgagtggacagcgacctatgagaaggccagcatggcgctggacgtgggctgcttcaatggtgaccagttctcctgcccggtgcactcctggagtacgggggaagaggtggctggagacattctgaggcacagggggctggcagatggctggcgcggctggaccgtggccatgaagaatggtgtccagtgggcagagctggctggccacgactacgtgttagacctggtgtcggacctggagctgctcagggacttccctcgacagaagtcctacttcattgtgggcacagaggggcctgcagccagcaggggaggccccaaagtggtgtttgggaacagctgggactcggatgaggacatgtccactagaccccagccccaggagcacatgcccaaagtacttgactctgatgggtacagcagccacaatcaggacggtacaaatggggagactgaggcccaaagagggacagcaacccaccaagagtcagacagtcttggagagcctgctgtgccccacaaggggctggactgctacctggatagcctctttgaccctgtgctgtcctacggggatgcggacctggagaagccaacagccattgcctaccgcatgaaagggggaggccagcccggtggaggcagcagtagtggtactgaagacacccccaggagacccccagagccaaagccaatcccaggcctggatgcctccacattggctctgcagcaagccttcatccacaaacaggccgtgctgctggcccgggagatgaccctgcaggccacggcactccagcagcagcccctgagtgctgccctgagatccttgcccgcagagaaacccccagcaccagaggcacagccgacgtctgtaggcaccggtccccctgccaaacccgtgctcctgcgtgccactccaaagcccttggccccagcccctctggccaaggctccaaggctccccatcaagcctgtggctgcccctgttctagctcaggatcaggcttctccagaaaccacttcaccctccccagagctggtccggtactctacgctcaactctgagcacttcccacagcccacacagcagatcaagaatattgtcaggcagtaccagcagccgttccggggaggccggcctgaggccctcaggaaggatggcgggaaagtgttcatgaagcggccagaccctcatgaggaggccctgatgatcctgaaagggcagatgacccacctggcagctgcacctggcacccaggtgtccagagaggccgtggccctggtgaagccggtgaccagtgcaccaaggccatccatggcacccacttcagctctgccctcgcgatcgctggagccccctgaggaactcacgcagacgcggctgcaccgcctcatcaatcccaacttctacggctatcaggacgccccctggaagatcttcctgcgcaaagaggtgttttaccccaaggacagctacagccatcctgtgcagcttgacctcctgttcccacagatcctgcacgacacgctctccgaggcctgccttcgcatctctgaggatgagaggctcaggatgaaggccttgtttgcccagaaccagctggacacacagaagcctctggtaacggaaagcgtgaagcgggccgtggtcagcactgcacgagacacctgggaggtctacttctcccgcatcttccccgccacgggcagcgtgggcactggtgtgcagctcctagctgtgtcccacgtgggcatcaaactcctgaggatggtcaagggtggccaggaggccggcgggcagctgcgggtcctgcgtgcatacagctttgcagatatcctgtttgtgaccatgccctcccagaacatgctggagttcaacctggccagtgagaaggtcatcctcttctcagcccgagcgcaccaggtcaagaccctggtagatgacttcatcttggagctgaagaaggactctgactacgtggtcgctgtgaggaacttcctgcctgaggaccctgcgctgctggctttccacaagggtgacatcatacacctgcagcccctagagccacctcgagtgggctacagtgctggctgcgtggttcgcaggaaggtggtgtacctggaggagctgcgacgtagaggccccgactttggctggaggttcgggaccatccacgggcgcgtgggccgcttcccttcggagctggtgcagcccgctgctgcccccgacttcctgcagctgccaacggagccaggccgcggccgagcagccgccgtggccgctgctgtggcctctgcagccgctgcacaggaggtgggccgcaggagagagggtcccccagtcagggcccgctctgctgaccatggggaggacgccctggcgctcccaccctacacaatgctcgagtttgcccagaagtatttccgagaccctcagaggagaccccaggatggcctcaggctgaaatccaaggagcctcgggagtccagaaccttggaggacatgctttgcttcaccaagactcccctccaggaatccctcatcgaactcagcgacagcagcctcagcaagatggccaccgacatgttcctagctgtaatgaggttcatgggggatgccccactgaagggccagagtgacctggacgtgctttgtaacctcctgaagctgtgcggggaccatgaggtcatgcgggatgaatgttactgccaagttgtgaagcagatcacagacaataccagctccaagcaggacagctgccagcgaggctggaggctgctgtatatcgtgaccgcctaccacagctgctctgaggtcctccacccacacctcactcgcttcctccaagacgtgagccggaccccaggcctgccctttcaggggatcgccaaggcctgcgagcagaacctgcagaaaaccttgcgcttcggaggtcgtctggagctccccagcagcatagagcttcgggccatgttggcaggccgcagttccaagaggcaactctttcttcttcctggaggccttgaacgccatctcaaaatcaaaacatgcactgtggccctggacgtggtggaagagatatgtgctgagatggctctgacacgccctgaggccttcaatgaatatgttatcttcgttgtcaccaaccgtggccagcatgtgtgcccactcagtcgccgtgcttacatcctggatgtggcctcagagatggagcaggtggacggcggctacatgctctggttccggcgtgtgctctgggatcagccactcaagttcgagaatgagctatatgtgaccatgcactacaaccaggtcctgcctgactacctgaagggactcttcagcagtgtgccggccagccggcccagcgagcagctgctgcagcaggtgtccaagctggcttcactgcagcatcgcgccaaggaccacttctacctgccgagcgtgcgggaagtccaggagtacatcccagcccagctctaccgtacaacggcaggctcgacctggctcaacctggtcagccagcaccggcagcagacacaggcgctcagcccccaccaggcccgtgcccagtttctgggcctcctcagcgccttacctatgttcggctcctccttcttcttcatccagagctgcagcaacattgctgtgccagccccttgcatccttgccatcaaccacaatggcctcaactttctcagcacagagactcatgaattgatggtgaagttccccctgaaggagatccagtcgacgcggacccagcggcccacggccaactccagctacccctatgtggagattgcgctgggggacgtggcggcccagcgcaccttgcagctgcagctggagcagggactggaactgtgtcgtgtggtggccgtgcacgtggagaacctgctcagtgcccatgagaagcggctcacattgccccccagcgagatcaccctgctctgacccagcccccagccctccagtaccttctgccagaagactcactgtgtggcctcagagaaatcactgaacctctcaggatcaatgacccctgtaaggggccagagccttggaggacactaagaggaggcaggaggagcaactcaaatccccaagaacacaagaagacccatcctgaactgggatggaatggcagcatgcaaacttggatcagatagcaggaggaactttcaaaagtctggcccactgtgcagtggagcagaaggcaggaccatgaggcctcctgccatgtacccattgcagaccctgcccctaactcctgcctatgacacagaagccccacaccagttgcccagatgaactggcctctgcctttggtttactcagggtctgatgttggaatctgctccaactccacaccctagcccttacatgtcctcctaaggggcccctccttgtgctgccagtcagcctggatttctggtctttggttatttctgtgcaaacaaaaggtgtgcctggcagccatttctccatggagttgctaagtggccggaaaacaagcctgagggaggaggcaggagttggagttaccttaggcccctgattcactgcctatgaacagaccatcccccactccttgggtatccccaaccccagacccccatcacttgatgggccacacaagtttgagagtggtacaagggagaagtttgggaaaagccttcttggaaaatgggacattagcattgagttttgaaagatgagtaggagtttgctaagaatagatggaagacagcaggataaacattccagagaaaatcatgtttattccctgctgtatcttccagaacctaggaggatgcctaacagagagtaagcacttaaaaaatatttgtcatatgaatgaaaaaataaacgagtgaatgttgataaaaaaaaaaaaaa

SEQ ID NO: 1801 - protein, 3530 aa, Homo sapiens
MAKEEDEEKKAKKGKKGKKAPEPEKPKRSLKGTSRLFMGFRDRTPKISKKGQFRSASAFFWGLHTGPQKTKRKRKARTVLKSTSKLMTQMRMGKKKRAMKGKKPSFMVIRFPGRRGYGRLRPRARSLSKASTAINWLTKKFLLKKAEESGSEQATVDAWLQRSSSRMGSRKLPFPSGAEILRPGGRLRRFPRSRSIYASGEPLGFLPFEDEAPFHHSGSRKSLYGLEGFQDLGEYYDYHRDGDDYYDRQSLHRYEEQEPYLAGLGPYSPAWPPYGDHYYGYPPEDPYDYYHPDYYGGPFDPGYTYGYGYDDYEPPYAPPSGYSSPYSYHDGYEGEAHPYGYYLDPYAPYDAPYPPYDLPYHTPYDVPYFDPYGVHYTVPYAEGVYGGGDEAIYPPEVPYFYPEESASAFVYPWVPPPIPSPHNPYAHAMDDIAELEEPEDAGVERQGTSFRLPSAAFFEQQGMDKPARSKLSLIRKFRLFPRPQVKLFGKEKLEVPLPPSLDIPLPLGDADEEEDEEELPPVSAVPYGHPFWGFLTPRQRNLQRALSAFGAHRGLGFGPEFGRPVPRPATSLARFLKKTLSEKKPIARLRGSQKARAGGPAVREAAYKRFGYKLAGMDPEKPGTPIVLRRAQPRARSSNDARRPPAPQPAPRTLSHWSALLSPPVPPRPPSSGPPPAPPLSPALSGLPRPASPYGSLRRHPPPWAAPAHVPPAPQASWWAFVEPPAVSPEVPPDLLAFPGPRPSFRGSRRRGAAFGFPGASPRASRRRAWSPLASPQPSLRSSPGLGYCSPLAPPSPQLSLRTGPFQPPFLPPARRPRSLQESPAPRRAAGRLGPPGSPLPGSPRPPSPPLGLCHSPRRSSLNLPSRLPHTWRRLSEPPTRAVKPQVRLPFHRPPRAGAWRAPLEHRESPREPEDSETPWTVPPLAPSWDVDMPPTQRPPSPWPGGAGSRRGFSRPPPVPENPFLQLLGPVPSPTLQPEDPAADMTRVFLGRHHEPGPGQLTKSAGPTPEKPEEEATLGDPQLPAETKPPTPAPPKDVTPPKDITPPKDVLPEQKTLRPSLSYPLAACDQTRATWPPWHRWGTLPQAAAPLAPIRAPEPLPKGGERRQAAPGRFAVVMPRVQKLSSFQRVGPATLKPQVQPIQDPKPRACSLRWSCLWLRADAYGPWPRVHTHPQSCHLGPGAACLSLRGSWEEVGPPSWRNKMHSIRNLPSMRFREQHGEDGVEDMTQLEDLQETTVLSNLKIRFERNLIYTYIGSILVSVNPYQMFGIYGPEQVQQYNGRALGENPPHLFAVANLAFAKMLDAKQNQCIIISGESGSGKTEATKLILRYLAAMNQKREVMQQVKILEATPLLESFGNAKTVRNDNSSRFGKFVEIFLEGGVISGAITSQYLLEKSRIVFQAKNERNYHIFYELLAGLPAQLRQAFSLQEAETYYYLNQGGNCEIAGKSDADDFRRLLAAMEVLGFSSEDQDSIFRILASILHLGNVYFEKYETDAQEVASVVSAREIQAVAELLQISPEGLQKAITFKVTETMREKIFTPLTVESAVDARDAIAKVLYALLFSWLITRVNALVSPRQDTLSIAILDIYGFEDLSFNSFEQLCINYANENLQYLFNKIVFQEEQEEYIREQIDWQEITFADNQPCINLISLKPYGILRILDDQCCFPQATDHTFLQKCHYHHGANPLYSKPKMPLPEFTIKHYAGKVTYQVHKFLDKNHDQVRQDVLDLFVRSRTRVVAHLFSSHAPQAAPQRLGKSSSVTRLYKAHTVAAKFQQSLLDLVEKMERCNPLFMRCLKPNHKKEPGLFEPDVVMAQLRYSGVLETVRIRKEGFPVRLPFQGFIDRYCCLVALKHDLPANGDMCVSVLSRLCKVMPNMYRVGVSKLFLKEHLYQLLESMREHVLNLAALTLQRCLRGFFIKRRFRSLRHKIILLQSRARGYLARQRYQQMRRSLVKFRSLVHAYVSRRRYLKLRAEWRCQVEGALLWEQEELSKREVVAVGHLEVPAELAGLLQAVAGLGLAQVPQVAPVRTPRLQAEPRVTLPLDINNYPMAKFVQCHFKEPAFGMLTVPLRTPLTQLPAEHHAEAVSIFKLILRFMGDPHLHGARENIFGNYIVQKGLAVPELRDEILAQLANQVWHNHNAHNAERGWLLLAACLSGFAPSPCFNKYLLKFVSDYGRNGFQAVCQHRLMQAMGRAQQQGSGAARTLPPTQLEWTATYEKASMALDVGCFNGDQFSCPVHSWSTGEEVAGDILRHRGLADGWRGWTVAMKNGVQWAELAGHDYVLDLVSDLELLRDFPRQKSYFIVGTEGPAASRGGPKVVFGNSWDSDEDMSTRPQPQEHMPKVLDSDGYSSHNQDGTNGETEAQRGTATHQESDSLGEPAVPHKGLDCYLDSLFDPVLSYGDADLEKPTAIAYRMKGGGQPGGGSSSGTEDTPRRPPEPKPIPGLDASTLALQQAFIHKQAVLLAREMTLQATALQQQPLSAALRSLPAEKPPAPEAQPTSVGTGPPAKPVLLRATPKPLAPAPLAKAPRLPIKPVAAPVLAQDQASPETTSPSPELVRYSTLNSEHFPQPTQQIKNIVRQYQQPFRGGRPEALRKDGGKVFMKRPDPHEEALMILKGQMTHLAAAPGTQVSREAVALVKPVTSAPRPSMAPTSALPSRSLEPPEELTQTRLHRLINPNFYGYQDAPWKIFLRKEVFYPKDSYSHPVQLDLLFPQILHDTLSEACLRISEDERLRMKALFAQNQLDTQKPLVTESVKRAVVSTARDTWEVYFSRIFPATGSVGTGVQLLAVSHVGIKLLRMVKGGQEAGGQLRVLRAYSFADILFVTMPSQNMLEFNLASEKVILFSARAHQVKTLVDDFILELKKDSDYVVAVRNFLPEDPALLAFHKGDIIHLQPLEPPRVGYSAGCVVRRKVVYLEELRRRGPDFGWRFGTIHGRVGRFPSELVQPAAAPDFLQLPTEPGRGRAAAVAAAVASAAAAQEVGRRREGPPVRARSADHGEDALALPPYTMLEFAQKYFRDPQRRPQDGLRLKSKEPRESRTLEDMLCFTKTPLQESLIELSDSSLSKMATDMFLAVMRFMGDAPLKGQSDLDVLCNLLKLCGDHEVMRDECYCQVVKQITDNTSSKQDSCQRGWRLLYIVTAYHSCSEVLHPHLTRFLQDVSRTPGLPFQGIAKACEQNLQKTLRFGGRLELPSSIELRAMLAGRSSKRQLFLLPGGLERHLKIKTCTVALDVVEEICAEMALTRPEAFNEYVIFVVTNRGQHVCPLSRRAYILDVASEMEQVDGGYMLWFRRVLWDQPLKFENELYVTMHYNQVLPDYLKGLFSSVPASRPSEQLLQQVSKLASLQHRAKDHFYLPSVREVQEYIPAQLYRTTAGSTWLNLVSQHRQQTQALSPHQARAQFLGLLSALPMFGSSFFFIQSCSNIAVPAPCILAINHNGLNFLSTETHELMVKFPLKEIQSTRTQRPTANSSYPYVEIALGDVAAQRTLQLQLEQGLELCRVVAVHVENLLSAHEKRLTLPPSEITLL

SEQ ID NO: 1802 - DNA, 5379 bp, Homo sapiens
ggcacttggaccgataggtatttggagcatgagttaggaaggatatgtctttctccaggtgcgcagctgaaagttgctgagaaaagctgcctgtgttgctgtggtaacatgagaaggaatgaacagctctatacaaaaactggccacacattataaggcctattctatgcagttatgtttttggctatttgctcatttagtcattgtttatcaaccaaactaggtaagccaaggagttacaagacagctctagagaagctccctctgcttacaggacaataatgcattgtttgttgatacaaatgaattatttgaatccacagaagtgaaaaagggaaaaaatcctggctgacttgtgggaagagcgtactgcagagcctagggcctgagttaactcgctggcggccctgcaggcaggcttgatgggagcgcccagcacatctgcccaccctgcacagggcatgaagcaccgtgtgcagagatctgtgagcaaaagcccaggacgtgaccttaggcaagaggggtccttggagaagtggaggtgtgcatggtgtgtagccttgcgtgtctgtgagcacgccctagtggacctgcgcctggattatcgggccagtctctcggaggggtccgtgatgctgagttacgccattcacctgaactctgcagctcatcggctgtaggatttgggtgagacacttttccttgctgactcatttccccatctgcaaaatgggggtgacgatatctacctcttggggtgtgtcaagggtaaaagagcacactttaagaatcctaaagcactaagccaaggatgaaagactagaaagctgcctctatgttgctactctcaaaaatgctcagaaattttcttgtcgtactaaaaatgtgttatttttctcattttcattcttccattcaacacagaagtaatctaagtaagttctaaaaacatagatccgggggcccacagacattcaattttcttctgaattggctctggtatcacacaacacacaagcaagcaaacagcctgcctgctagggccttgggttccaggctggaggaatgcaggcagaaatctcttaggaaataactaagtgagcgccaagttttgaattgccttagagccgaaagagaatgtggcgtgctggggagagatctggacctctttctcatcagtcatttgacctgtccacgaagaacaattttgttatgcagcctgggaacctggtttccttacaccctgcgcccttaatgacacagacaaccacgggtactcctggacggaagctcatcacgcctcctcaaataccttcacccatgttcaggtcacacggaggtcaccatctcctcagcacacaacaactgctttggttcccagggttattttttctacgagttgaaaacccacggagcctaagccatctttttgtcccctaaggagagccccatagactaagagctacacttcctgtctgtctttcccacctttccatctcattctagcttaaagcttatcacgctactgagagcctgttctgtagttcaaggtggcagagaaaaatacgaaccttgagtgaaatctggagagcagtgcagggtcatccccagacgtgacgggccatatcctaggcgactcctgcagcttatagaagcagggaatttaatggacttcttccaggaaagccagcccacggggactcttaaaaagacaccaaccatttggaagatgcagcttgaggtctgggggactggactgattctgccaccatatagtgaacacgattaatcgggaggaagaagtaaggcactctgtgagttagtctaccaccctattgactttgacagagagaaaaccaacttttttcatatgatcacacagtagtactggaatatctcgactgcaatatcctctaaacaaatgcatgcaaagctttgtaaaagcagctgatgattaaaaaaattttaaaacattagggtttttctaatatatccatatgtgggacagtgatttaaatgtcattaattgtccagccacaacttgtaacagtgatgtgaaagacacaaaaaaggccccactggagtggaggagtggtctggctggtccccaagcaaaacagaatgggcttcgcataggctttagaacttattcataaatattgaccaaagtgtgaagcaaggtatccagtgaagattctctagggtctctacttctgctcaagagatttaatccagctttctctaaagcagtggtccagacttgccacatactaggttaaagataaagtgagaaaaacaaatactttggtttgcacgtctcttgaggggccctaggctgtatggaggaatatttagaggaatatttgtgagctgccatttgtgtttaaaagaacatgaaagcaagacgggccctaacccgcctgtgtctgtagctgaccaggaggccactgcttccttcccccagagcttctaggagagccccccaaaatgcaactctccaaggtcctgtggagtagtcccctcataatgcctccaccacacctgtgtctcacgatgccttaactgacgtagctcctaagtgatgttcacagagaaggaaatacttaggcaagcccatgtgtaacatgctcacagatgtgctggctttgccaatgctttcggactccaccatgctttctgattcttctggtcctagtcacgccttggcacggggcagaagcggccgagctatgctgacaggtgctgctgagagccaacagccattcagccgagaaggcgtttctaggtgagggcatgagagctggcattccaggctgctgagtgcggcatctgcaggtgcaccacattgctccacggtgtgttcagaagagaccagcatcttgaatctcaggctctgggctcattctttgcctctgccaagggaccattcaggggcttcaagccagctgctgaaaatcccccttttctggatttttccccatctatataaggatatggtggctgtgtggacaagaaattggtttcatctcagaagggtgcttccctacaaagatcttcagaaatttaattgaaaacaattttttgaactttttttgtttggccaggatgaatgaagctgaagtcacatcctgaatgtgcatgccagacaaagggtaagcaagcagtctttacaaatgccaatccctctgcactccaaaaccggagcccgtaatgaaggcccaggttccagtcatcacaggatcccccaagccagcacagtgcctgatgcctccctaggcattagcacatcccagcactctaattcacatcctcagcatccctgcctcctgcatccagggcttaggttgagtgtttccagagtgtcaagtacatttaaacacaaaccaaatactccagggttttgacctgtcacaatggcttttgaaaacaacagacgtacaatttgagagaaggactcgatggacttcttaggctgaggactaaggacatgttgctgttcctcttggtccaggacattcaataccattcacagcattcatcaccaactgacatagtatcgatcacgacattcaactgtttgaaattactgctattttggtcaaaaactaagaaatcagaaattgcacctacatagtgtgtctcctcattggagtcccatctctctgagcacagggatgggctcctgagctcacagccctgccctgcccccccagcagggcctcaccctcatggccctcagtgaatagtgactacatgaagggggcacttactagaggcctgagtaatggaatttcaattagcttctgcttcccttttctaaaaaagaaccacctttcttaagaataattaggccaaaataaacttgagtaatttgtacagtcaatattttgaagtttcggagttaccagtgaaatagcaaagctgttctccaggaaaggacatccaggttcccacccaggccttccttcctcagctcctgcagcctcatcctagtttaatatgaaggttgtgaatgggttaaaaagcagttcttaagcacctacttagatcttttcagtatctggaaatagcacccagggctgtgttagtaaagcttttcactgggtaagagtcatacaatttttacatttaatttgtttttttaaaacaaggcagtcttgttttacatattggaatgactagatattttttgacatttctggcacctctggttctgctgaattttaagggaggtgagtggtatgtacacaaagttaagattgctgcataataattcctttgcatttccaaaataaattacacaaatgtcacttttccttttctattccatagtactagttttagccagatctttgccaaacattctaggacattcagaaaagtcatccatggaattttggaatgccattctctctgtatctttgcagatcatgaggaaggaaagttgatgaactagtacgggatggctcagacttgtaaagtgtctaagtcacaacgctgcagagccagcttccgggtagcaatggcatggcctcagctgtgccaaggctacaactggagcttccttactcgcatctgaggcaaacacagcaaggctggcccaggccgcccacagtcaacagatgttcacgggagatggatcagcccctcttttgcttgttctatcaaggaaagagatctaaccatgggcaagggtggaacacacccggttcaggtcagggaatgagttgctctaagtgaacagtgaattcttacttctcagcctgtatcaattgtacccagggttcatgattactgtgacccactaagggacgatctttgaggaaacagacctggagggaggtaatttaaggagggaaagtgagtgggttttacagactgctttgtggcgacattcaggaacagaccattcaatggatgacttttcagtacataaaagcaagcagtaatggccaggagagagcaaagatgccctaagaatgacatcagactgaccaaatgtgccttttcaaataagttatgagaacgaatgaattggaattagagcaaggtattggacagaaccatgctagtctttgagagaacgtgtggattgggtggatgtttggaccgaatgaatggtaactttttaatgtgaaacagagaactgatatatgggctgtcatgtcaccctagggtactgtcgctctgtcatgtgtagcaatctttccaaatttttgttggtgggctgaacaaagataaaactaataaagtatgtgtggataccactagaaaaaaaaaaaaaaaaaaaaaaaaaaaaaaaaaaaaaaaaaaaaaaaaaaaaaaaaaaaaaaaaaaaaaaaaaaaaaaaaaaaaaaaaaaaaaaaaaaaaaaaaaagg

SEQ ID NO: 1803 - DNA, 3592 bp, Homo sapiens
ggcggggggcgcacagagccagaggggcttgcgagcggcggctgagggaccgcggggagggggcgccgagcggctccagcgcagagactctcactgcacgccggaggccccttcctcgctccgcccgcgcgaccgcgcgccccagtcccgccccgccccgctaaccgccccagacacagcgctcgccgagggtcgcttggaccctgatcttacccgtgggcaccctgcgctctgcctgccgcgaagaccggctccccgacccgcagaagtcaggagagagggtgaagcggagcagcccgaggcggggcagcctcccggagcagcgccgcgcagagcccgggacaatggggccgcggcggctgctgctggtggccgcctgcttcagtctgtgcggcccgctgttgtctgcccgcacccgggcccgcaggccagaatcaaaagcaacaaatgccaccttagatccccggtcatttcttctcaggaaccccaatgataaatatgaaccattttgggaggatgaggagaaaaatgaaagtgggttaactgaatacagattagtctccatcaataaaagcagtcctcttcaaaaacaacttcctgcattcatctcagaagatgcctccggatatttgaccagctcctggctgacactctttgtcccatctgtgtacaccggagtgtttgtagtcagcctcccactaaacatcatggccatcgttgtgttcatcctgaaaatgaaggtcaagaagccggcggtggtgtacatgctgcacctggccacggcagatgtgctgtttgtgtctgtgctcccctttaagatcagctattacttttccggcagtgattggcagtttgggtctgaattgtgtcgcttcgtcactgcagcattttactgtaacatgtacgcctctatcttgctcatgacagtcataagcattgaccggtttctggctgtggtgtatcccatgcagtccctctcctggcgtactctgggaagggcttccttcacttgtctggccatctgggctttggccatcgcaggggtagtgcctctcgtcctcaaggagcaaaccatccaggtgcccgggctcaacatcactacctgtcatgatgtgctcaatgaaaccctgctcgaaggctactatgcctactacttctcagccttctctgctgtcttcttttttgtgccgctgatcatttccacggtctgttatgtgtctatcattcgatgtcttagctcttccgcagttgccaaccgcagcaagaagtcccgggctttgttcctgtcagctgctgttttctgcatcttcatcatttgcttcggacccacaaacgtcctcctgattgcgcattactcattcctttctcacacttccaccacagaggctgcctactttgcctacctcctctgtgtctgtgtcagcagcataagctcgtgcatcgaccccctaatttactattacgcttcctctgagtgccagaggtacgtctacagtatcttatgctgcaaagaaagttccgatcccagcagttataacagcagtgggcagttgatggcaagtaaaatggatacctgctctagtaacctgaataacagcatatacaaaaagctgttaacttaggaaaagggactgctgggaggttaaaaagaaaagtttataaaagtgaataacctgaggattctattagtccccacccaaactttattgattcacctcctaaaacaacagatgtacgacttgcatacctgctttttatgggagctgtcaagcatgtatttttgtcaattaccagaaagataacaggacgagatgacggtgttattccaagggaatattgccaatgctacagtaataaatgaatgtcacttctggatatagctaggtgacatatacatacttacatgtgtgtatatgtagatgtatgcacacacatatattatttgcagtgcagtatagaataggcactttaaaacactctttccccgcaccccagcaattatgaaaataatctctgattccctgatttaatatgcaaagtctaggttggtagagtttagccctgaacatttcatggtgttcatcaacagtgagagactccatagtttgggcttgtaccacttttgcaaataagtgtattttgaaattgtttgacggcaaggtttaagttattaagaggtaagacttagtactatctgtgcgtagaagttctagtgttttcaattttaaacatatccaagtttgaattcctaaaattatggaaacagatgaaaagcctctgttttgatatgggtagtattttttacattttacacactgtacacataagccaaaactgagcataagtcctctagtgaatgtaggctggctttcagagtaggctattcctgagagctgcatgtgtccgcccccgatggaggactccaggcagcagacacatgccagggccatgtcagacacagattggccagaaaccttcctgctgagcctcacagcagtgagactggggccactacatttgctccatcctcctgggattggctgtgaactgatcatgtttatgagaaactggcaaagcagaatgtgatatcctaggaggtaatgaccatgaaagacttctctacccatcttaaaaacaacgaaagaaggcatggacttctggatgcccatccactgggtgtaaacacatctagtagttgttctgaaatgtcagttctgatatggaagcacccattatgcgctgtggccactccaataggtgctgagtgtacagagtggaataagacagagacctgccctcaagagcaaagtagatcatgcatagagtgtgatgtatgtgtaataaatatgtttcacacaaacaaggcctgtcagctaaagaagtttgaacatttgggttactatttcttgtggttataacttaatgaaaacaatgcagtacaggacatatattttttaaaataagtctgatttaattgggcactatttatttacaaatgttttgctcaatagattgctcaaatcaggttttcttttaagaatcaatcatgtcagtctgcttagaaataacagaagaaaatagaattgacattgaaatctaggaaaattattctataatttccatttacttaagacttaatgagactttaaaagcattttttaacctcctaagtatcaagtatagaaaatcttcatggaattcacaaagtaatttggaaattaggttgaaacatatctcttatcttacgaaaaaatggtagcattttaaacaaaatagaaagttgcaaggcaaatgtttatttaaaagagcaggccaggcgcggtggctcacgcctgtaatcccagcactttgggaggctgaggcgggtggatcacgaggtcaggagatcgagaccatcctggctaacacggtgaaacccgtctctactaaaaatgcaaaaaaaattagccgggcgtggtggcaggcacctgtagtcccagctactcgggaggctgaggcaggagactggcgtgaacccaggaggcggaccttgtagtgagccgagatcgcgccactgtgctccagcctgggcaacagagcaagactccatctc

SEQ ID NO: 1804 - protein, 425 aa, Homo sapiens
MGPRRLLLVAACFSLCGPLLSARTRARRPESKATNATLDPRSFLLRNPNDKYEPFWEDEEKNESGLTEYRLVSINKSSPLQKQLPAFISEDASGYLTSSWLTLFVPSVYTGVFVVSLPLNIMAIVVFILKMKVKKPAVVYMLHLATADVLFVSVLPFKISYYFSGSDWQFGSELCRFVTAAFYCNMYASILLMTVISIDRFLAVVYPMQSLSWRTLGRASFTCLAIWALAIAGVVPLVLKEQTIQVPGLNITTCHDVLNETLLEGYYAYYFSAFSAVFFFVPLIISTVCYVSIIRCLSSSAVANRSKKSRALFLSAAVFCIFIICFGPTNVLLIAHYSFLSHTSTTEAAYFAYLLCVCVSSISSCIDPLIYYYASSECQRYVYSILCCKESSDPSSYNSSGQLMASKMDTCSSNLNNSIYKKLLT

SEQ ID NO: 1805 - DNA, 292 bp, Homo sapiens
  misc_feature (88)..(88): n is a, c, g, or t
ctggacttctttgtgcgcctaggctatgaggtggtggctcctgacctggccggccacggggccagctctgcgccccaggtggccgcancctacaccttctatgcgctggctgaggacatgcgagcaatcttcaagcgctatgccaagaagcgaaatgtgctcattggccattcctacggtgtctctttctgcacattcctggcacatgagtacccagacctagtgcacaaggtgatcatgatcaatggcgggggccctacggcgctggagcccagcttctgctcaatcttca

SEQ ID NO: 1806 - DNA, 350 bp, Homo sapiens
  misc_feature (57)..(57): n is a, c, g, or t
  misc_feature (76)..(76): n is a, c, g, or t
  misc_feature (94)..(94): n is a, c, g, or t
  misc_feature (109)..(109): n is a, c, g, or t
  misc_feature (131)..(131): n is a, c, g, or t
  misc_feature (151)..(151): n is a, c, g, or t
  misc_feature (156)..(156): n is a, c, g, or t
  misc_feature (169)..(169): n is a, c, g, or t
  misc_feature (181)..(181): n is a, c, g, or t
  misc_feature (192)..(192): n is a, c, g, or t
  misc_feature (215)..(215): n is a, c, g, or t
  misc_feature (220)..(220): n is a, c, g, or t
  misc_feature (249)..(249): n is a, c, g, or t
  misc_feature (258)..(258): n is a, c, g, or t
  misc_feature (268)..(268): n is a, c, g, or t
  misc_feature (286)..(286): n is a, c, g, or t
  misc_feature (288)..(288): n is a, c, g, or t
  misc_feature (318)..(318): n is a, c, g, or t
  misc_feature (320)..(320): n is a, c, g, or t
ttttttttttctttttttttttttttttttttttttggaccaatcagatttattcgnaaagcaaatccaaaaaaancccatcataattttggancttaaaaaaaaagtntttcgtacaagatggcaaagcntttcacgtacagtgcgtttntcganaaatcccaggggnttcacttcccantttactctganccaaaaaggccagttgccaaggnaactntgacaccatgtgactggggccggggcgtntctggggtnttggggcatntctgcaggcacacacgtntnttcgcagacacgttgggtcctgcctcccantntgggctggcccagttttccatccaagggtt

SEQ ID NO: 1807 - DNA, 290 bp, Homo sapiens
aagaaacttgtttaatggagtaatatactttttttttcttattaaggaattgtattactggcacctaacacagttgtattcttagctcctattatagataatgggcatttacataaaatatcctagatggcttgatggcagaataaacctttcccctcctacctgagtcatgagaaggatggagacgtcctctgccataacatgggccataaagcaaattcgacatgggatgttctgtttcagtatgacctcaaccagttccatgaactgagttaaggaccttcattttc

SEQ ID NO: 1808 - DNA, 520 bp, Homo sapiens
gcatccttctgacaagtgtcctgggccttggagacagaactaaagagatcattttgagataatccttgggggtatgggaaagaggtggaagggcaggatctcacggactgaaaaattgcagattgttcacacaacgcagtcacgtttcaaaaagtaccaagctgatgaaaataccatgattatctctactcaatgattgcaatacttgtaaaatgcttctataaatccgaatatgattatcatgtaattccataaaaattatacgtctgtctctaacagttgttctactaggctaaaactaaagcttcatagactgtttctagaacttaacaactccactgcacagatgtaaattttatacattttttttaactggtacaaagaatttaagtttttattactttctttttttggaaaaaaagaaaaaaatagaaacagtgcttttttatcacctttttattaatggtattttttccctcccataatataaaagtcagcaatgatatcaataatttattat

SEQ ID NO: 1809 - DNA, 3631 bp, Homo sapiens
tgagtcccggccggagccccacggccgcgggcggcgcctaggacggcgatccgcgccctggaggatccgccggccgcccggctccactacagctccagccgcctgcagcggggccctcctgaggccccagaggaagagaccatgaaagtgaggtcggccggcggcgatggagatgccttgtgcgttacagaagaggacctggcgggtgacgacgaggacatgccgaccttcccatgcacccagaagggccggccagggccccgctgcagccgctgccagaagaacctatctttgcacacatcggtgcggattctttacctcttcctggccctgctcctggtggccgtggctgtgttggcctctctggttttcagaaaagtggactctctctccgaagacatctccttgacccagtctatttatgacaagaagcttgtgttaatgcagaaaaatctccagggcctggatccgaaagccctgaacaactgctctttctgccatgaagctgggcagctggggccagagatccgaaaactgcaggaggagctggagggaattcagaagctgcttctggcccaggaggtgcagctggaccagaccttacaggcccaggaggtgctctccaccaccagcagacaaatctcccaggagatgggcagttgctccttctccatccaccaggttaaccagtctctggggctcttcctggcccaggtgagaggctggcaggccaccacagctggcctggacctctctctgaaggacctcacccaggagtgctacgatgtcaaggctgcagtgcaccagatcaacttcaccgtggggcagacttccgagtggatccacgggatccagcggaagacagacgaggagaccctgaccctccagaagattgtcaccgactggcagaactacacacggctcttcagcggcctgcgcaccacctccaccaagactggagaggcggtcaagaacatccaggccaccctgggggcctcctcacagcgcatcagccagaactcagagagcatgcacgacctggtactccaggtcatgggcttgcagctgcagctggataacatctcgtccttcctggatgaccacgaagagaacatgcatgatcttcagtaccatacccactacgcccagaaccgcactgtggagaggtttgagtctctggaaggacgcatggcttctcacgagattgaaattggcaccatcttcaccaacatcaatgccaccgacaaccacgtgcacagcatgctcaagtacctggatgacgtgcggctctcctgcacgctgggcttccacacccatgccgaggagctctactacctgaacaagtctgtctccatcatgctgggcaccacagacctgctccgggagcgcttcagcctgctcagtgcccggctggacctcaacgtccggaacctctccatgatcgtggaggagatgaaggcagtggacacacagcatggagaaatccttcgcaatgtcaccatcctacgaggtgcccccggccctccaggaccaagaggattcaaaggagatatgggcgtgaaagggcctgttggcggcagaggcccgaaaggagaccccggcagcttgggccccctgggaccccagggtcctcaggggcaacctggagaggccgggcctgtgggagaaaggggccctgttggccctcgagggttcccaggcctcaaaggctcaaagggcagctttggaactggagggccgagaggacagccaggcccaaaaggggacatagggcccccagggccagaagggcccccggggtctccagggccctcagggcctcagggaaaaccgggaattgcagggaagacagggtcaccaggccagcggggggccatggggcctaagggtgaaccagggatccagggtccccctggtctcccggggcctccaggtccaccaggaagccagagcttctactgaggagggctgtggcagagccactgtcacacagaatgccggaggggcgcagagcagatccaggccccagaaagcctcacctacagacagctgtggtcctctgattccaatgagggggctccccagggctgaccctgcagctttgggctcccccatagtgactgtgccataggaaagcagcccctcctcacacatacatgtgcacatgcacacacatgcatgcacacacatgcacacatacacgcacatgcacacatacacatgcatgcacacatacacaggcatacatgcatgcacacacacatgcacgcacacacacatgcacacatacacgtgcacacatacacaggcacacatgcatgcacacatacacatgcacacacacatgcacacatatatgcacaggcacacacatgtacgcacacacacatgcactgcacacatatccatgcacacaaacacatatatacacatgcacatacacagatttttctgctggccaggtgggccaactgggtttccctggctgggcaggaggagagggcagaggaagaccccctctcctgtgactgagcctgccagggaggcagctacctcgggaggaaggtctcacatctgtctctgggcacccatgctggccagcagtttcccagggctccctggggttgaaaagccccaaggaaacctttgcgggtggggcgttactgccaaaactccagaggcaaagtggacctggcaaccacaagaccctccccataagcaggggaccagcatacccgggagctgtccctgtctgtcacagcacagtggggccacgaggctgacattctctggccttgcacacagtgccccctgagaagttcaacatttatttcttcacgtgtccagaaaattcctcaattcatccttgcctctgcccttcaggagcagcctggaaggaatccaagcaggagtttcatctgcatgggggcactctgcaggccctggaacattgggcctgagtggagatgggagacagaggcaggccagaaggttctctctgcacagctgcctcccttgctctccctgaggctggcctgccccattccccaagggggctcctctggagtggtggggaggattaggctgcagaagggccaaccccttgcaacagggcagctctcgcctcccgcacacggctctcctgatcacagctgcatgccgaccttgtcccaccgggacccacaatggcccgagccctctttgcatgggcagccagctggactaggagtgggaagggcctggacactcacagaggccccctctgtcatcactccttggcacccaccaacttcctgcacacactggcagagaggggcgctgggaaatcaccccacagggtggaggtctcctgttggctacactctaaagctgctttgccttcatgttcaaacagattcaggcaccaccccctccaccgcccgcaaggttagggcatagagttgtctccttcccaacacggacccagagagcagcccttccctgctcaaagcctttccgcaccctcctgactgtcctggatgtgcaactggtttgcactgcacaccccacggccatgtaactctcctgtccacatatgataataccattctgcatagtattactgactcagtaaagagctatttccaggagt

SEQ ID NO: 1810 - protein, 606 aa, Homo sapiens
MKVRSAGGDGDALCVTEEDLAGDDEDMPTFPCTQKGRPGPRCSRCQKNLSLHTSVRILYLFLALLLVAVAVLASLVFRKVDSLSEDISLTQSIYDKKLVLMQKNLQGLDPKALNNCSFCHEAGQLGPEIRKLQEELEGIQKLLLAQEVQLDQTLQAQEVLSTTSRQISQEMGSCSFSIHQVNQSLGLFLAQVRGWQATTAGLDLSLKDLTQECYDVKAAVHQINFTVGQTSEWIHGIQRKTDEETLTLQKIVTDWQNYTRLFSGLRTTSTKTGEAVKNIQATLGASSQRISQNSESMHDLVLQVMGLQLQLDNISSFLDDHEENMHDLQYHTHYAQNRTVERFESLEGRMASHEIEIGTIFTNINATDNHVHSMLKYLDDVRLSCTLGFHTHAEELYYLNKSVSIMLGTTDLLRERFSLLSARLDLNVRNLSMIVEEMKAVDTQHGEILRNVTILRGAPGPPGPRGFKGDMGVKGPVGGRGPKGDPGSLGPLGPQGPQGQPGEAGPVGERGPVGPRGFPGLKGSKGSFGTGGPRGQPGPKGDIGPPGPEGPPGSPGPSGPQGKPGIAGKTGSPGQRGAMGPKGEPGIQGPPGLPGPPGPPGSQSFY

SEQ ID NO: 1811 - DNA, 291 bp, Homo sapiens
  misc_feature (22)..(22): n is a, c, g, or t
  misc_feature (26)..(26): n is a, c, g, or t
  misc_feature (47)..(47): n is a, c, g, or t
  misc_feature (49)..(49): n is a, c, g, or t
  misc_feature (53)..(53): n is a, c, g, or t
  misc_feature (118)..(118): n is a, c, g, or t
  misc_feature (142)..(142): n is a, c, g, or t
  misc_feature (243)..(243): n is a, c, g, or t
ctctccgcccccaccccctgtnggcntctgggcctcgtccccttctntntgtntcccttgcctcccccatcacgtcccctgacaccgacaccccattgctcccacactctccccagtntccactttggtccccagcgctgtntgcccgaggatttgcctgaaggctgcccccaactctgcacccgccccccgagggccaccgaggaccatgactaagacagatcctgccccgatggccccgtnaccccgaggagaggaggaagaagaggaggaggaggatgaacccgttcc

SEQ ID NO: 1812 - DNA, 2813 bp, Homo sapiens
ctccaccgacagccaggcactgggcagcacgcactggagacccaggaccctgtgcaggagcagctccgggtgacacgaggggactgaagatactcccacaggggctcagcaggagcaatgggtaaccaaatgagtgttccccaaagagttgaagaccaagagaatgaaccagaagcagagacttaccaggacaacgcgtctgctctgaacggggttccagtggtggtgtcgacccacacagttcagcacttagaggaagtcgacttgggaataagtgtcaagacggataatgtggccacttcttcccccgagacaacggagataagtgctgttgcggatgccaacggaaagaatcttgggaaagaggccaaacccgaggcaccagctgctaaatctcgttttttcttgatgctctctcggcctgtaccaggacgtaccggagaccaagccgcagattcatcccttggatcagtgaagcttgatgtcagctccaataaagctccagcgaacaaagacccaagtgagagctggacacttccggtggcagctggaccggggcaggacacagataaaaccccagggcacgccccggcccaagacaaggtcctctctgccgccagggatcccacgcttctcccacctgagacagggggagcaggaggagaagctccctccaagcccaaggactccagcttttttgacaaattcttcaagctggacaagggacaggaaaaggtgccaggtgacagccaacaggaagccaagagggcagagcatcaagacaaggtggatgaggttcctggcttatcagggcagtccgatgatgtccctgcagggaaggacatagttgacggcaaggaaaaagaaggacaagaacttggaactgcggattgctctgtccctggggacccagaaggactggagactgcaaaggacgattcccaggcagcagctatagcagagaataataattccatcatgagtttctttaaaactctggtttcacctaacaaagctgaaacaaaaaaggacccagaagacacgggtgctgaaaagtcacccaccacttcagctgaccttaagtcagacaaagccaactttacatcccaggagacccaaggggctggcaagaattccaaaggatgcaacccatcggggcacacacagtccgtgacaacccctgaacctgcgaaggaaggcaccaaggagaaatcaggacccacctctctgcctctgggcaaactgttttggaaaaagtcagttaaagaggactcagtccccacaggtgcggaggagaatgtggtgtgtgagtcaccagtagagattataaagtccaaggaagtagaatcagccttacaaacagtggacctcaacgaaggagatgctgcacctgaacccacagaagcgaaactcaaaagagaagaaagcaaaccaagaacctctctgatggcgtttctcagacaaatgtcagtgaaaggggatggagggatcacccactcagaagaaataaatgggaaagactccagctgccaaacatcagactccacagaaaagactatcacaccgccagagcctgaaccaacaggagcaccacagaagggtaaagagggctcctcgaaggacaagaagtcagcagccgagatgaacaagcagaagagcaacaagcaggaagccaaagaaccagcccagtgcacagagcaggccacggtggacacgaactcactgcagaatggggacaagctccaaaagagacctgagaagcggcagcagtcccttgggggcttctttaaaggcctgggaccaaagcggatgttggatgctcaagtgcaaacagacccagtatccatcggaccagttggcaaacccaagtaaacaaatcagcacggttcccaccaggttctcctgccaccaagatgtgttctccttactccatctcctccccaaacacgctccatgtatatattcttctgatggccagcaaatgaaattctgcctagaaattaagcccgagctgttgtatattgaggtgtattatttacgtctctggtccagtcttttctggcaaataacagtaaagatggtttagcaggtcacctagttgggtcagaagagtcgatgatcaccaagcaggaaagggagggaatagaggaatgtgttcgggttaagtgatgaaaatggcagtggtggccgggcgtggtggctctcgcctgtaatctcagcactttgggaggccgaggcaggtggatcacctgaggtcaggagttcaagactagcctggccaacatcatgaaaccccgtctctactaaaaatacaaaaattagccaggcatggtggcacacacctgtagtcccagctactcgggagcccaacgcacgagaaccgcttgtacccaggaggtggaggttgcagtgagccgaagttgcaccattgcactccaccctgggcgacagagcaagattctatcaaaaaaaaaaggcagtggcaagtaagttatagaagagaaatgctgctagaaggaattaagcgttgtagtaaacgcgtgctcatcctctaagcttgaagaagggagacgaaaatccatttgtttaaattcacatctcaaggagggagaacccgggctgtgttgggtggttgccaatttcctagaacggaatgtgtggggtatagaaaaaggaatgaataagcgttgtttttcaaatagggtccttgtaagttattgatgagagggaaaagattgactggggagggcttaaaatgatttgggaaaacaattgcttttgaggctcagtgacaacggcaaagattacaactt

SEQ ID NO: 1813 - protein, 584 aa, Homo sapiens
MGNQMSVPQRVEDQENEPEAETYQDNASALNGVPVVVSTHTVQHLEEVDLGISVKTDNVATSSPETTEISAVADANGKNLGKEAKPEAPAAKSRFFLMLSRPVPGRTGDQAADSSLGSVKLDVSSNKAPANKDPSESWTLPVAAGPGQDTDKTPGHAPAQDKVLSAARDPTLLPPETGGAGGEAPSKPKDSSFFDKFFKLDKGQEKVPGDSQQEAKRAEHQDKVDEVPGLSGQSDDVPAGKDIVDGKEKEGQELGTADCSVPGDPEGLETAKDDSQAAAIAENNNSIMSFFKTLVSPNKAETKKDPEDTGAEKSPTTSADLKSDKANFTSQETQGAGKNSKGCNPSGHTQSVTTPEPAKEGTKEKSGPTSLPLGKLFWKKSVKEDSVPTGAEENVVCESPVEIIKSKEVESALQTVDLNEGDAAPEPTEAKLKREESKPRTSLMAFLRQMSVKGDGGITHSEEINGKDSSCQTSDSTEKTITPPEPEPTGAPQKGKEGSSKDKKSAAEMNKQKSNKQEAKEPAQCTEQATVDTNSLQNGDKLQKRPEKRQQSLGGFFKGLGPKRMLDAQVQTDPVSIGPVGKPK

SEQ ID NO: 1814 - DNA, 722 bp, Homo sapiens
  misc_feature (675)..(675): n is a, c, g, or t
aggctgctggaacagttgtgacaattggagtagtcgtgaccttgggtggcacattctccaatgatacggtgattttcatgtcattgaaccacccacggagctcaacacggcaacaatatacgccactgtcagacacagctgtattttctatggtcaaagagacatcccttcttgaaaggtcccccaatagcttatagcgtgtgtccttccgataggtgacgtgggttccattggtccagacaatgccattttggcatgtgaatagagaacatgagcctctattccagcacattgatgtgacagctccactgtagtggcagggtagtgtgacagatggacctgcctctccaccaacctttacagaaccagctacagaatctgccagatgtaggatgaggcttaagatgaccacttgaggatgcattatgggatcagcctgaaggaaaatgagcagacaggctggttggtaccctccaccagatggtatctgatcaagtcttaaatctcagattgcaacttatcttttcacccagttggttgattcatatgagcctgctctgctggaaatgagagaagaccacatataacggcttcagagctctgttagttccctgcagctgagagctctgtgccttccaaaggacagggaaagctgtccacagaaacagcccctgnacttccagcttcttccccacacataaccgccaaactgaactctggtc

SEQ ID NO: 1815 - DNA, 197 bp, Homo sapiens
  misc_feature (9)..(9): n is a, c, g, or t
  misc_feature (24)..(24): n is a, c, g, or t
  misc_feature (43)..(43): n is a, c, g, or t
  misc_feature (68)..(68): n is a, c, g, or t
  misc_feature (151)..(151): n is a, c, g, or t
gtccaccantgtgaagaaggtcgntgtttcccctttggccttnccgccatggagtgtaagtttcctgnaggtctcccagtacatactggctggttaagcctgcagaacggtgtacttgtttgaaatgtatctggcccaatgcagccacggnttcccgctggcgaaccaaggggcgcgggaaatctggaaaaggcgag

SEQ ID NO: 1816 - DNA, 416 bp, Homo sapiens
  misc_feature (113)..(113): n is a, c, g, or t
  misc_feature (167)..(167): n is a, c, g, or t
  misc_feature (179)..(179): n is a, c, g, or t
  misc_feature (193)..(193): n is a, c, g, or t
  misc_feature (285)..(285): n is a, c, g, or t
  misc_feature (379)..(379): n is a, c, g, or t
  misc_feature (405)..(405): n is a, c, g, or t
  misc_feature (412)..(412): n is a, c, g, or t
actgcttgcaactattttaaaagcccattaatttgaagcccactacttcagaacttcgagaaaatcacaacttaagacaattcacagtagctgtgattctggctacataaaantatttgacatattcttccctttagtcaatgttcagggtcttttgtgtaagaganatccagtttaanatgagtaccctttncaaagaaaaggctcaagatattaaggctcccttcaccgtgccttcagctttgcagttcagcacttctcgtatgtacagggtgacctcttgtnctctctccatcacagggatgttggatattgcagccttttcactctactccgttaatttatcctgtggaataacatagtttgtgaactagactgncaatttaaactaatacacatgatgtnatcttcnctaa

SEQ ID NO: 1817 - DNA, 486 bp, Homo sapiens
  misc_feature (388)..(388): n is a, c, g, or t
  misc_feature (438)..(438): n is a, c, g, or t
  misc_feature (447)..(447): n is a, c, g, or t
  misc_feature (455)..(455): n is a, c, g, or t
  misc_feature (465)..(465): n is a, c, g, or t
  misc_feature (481)..(481): n is a, c, g, or t
ccatcctatacattttgcttattcatggcatctttcaaattttattttagtttcctttatttgccaagaatacatatggatttgaatttttaaggagagaaggaaagggtaggaaaccagggccttgggtttagtaacaggcattggatgtctattaaccaactattcttacgctaatggctttgcagctcctattctcccatttgatcctcaaacaattctattagagtggtatttttatccaatttcacagattaaaatataaggcacttcaataaaatataacctttaggaagcttaaaaagctagtaaggtgatggaactgagggtttgaacccatgtttgtcaccaagggagctttccgggggcacatgttcataaattaggngccaactgcagagctgttaggggaacttttaggaggtggaacttctttcngcctccctntttttacngaggggaacnggattccccggagggnggaat

SEQ ID NO: 1818 - DNA, 2001 bp, Homo sapiens
agtctgtataaaaagcaattgctcttttgtttccaaaacaggtattacaagtggataaataatgtgcactgctctgagcccaaaggtacgcagtggacctggcctctctgatatgcatcagtatagccaatggctagccagcagacatgaagctaatttgctaccaatgaaagaagatctggccttgtggttaaccaatctattagggaaggagattacagcagaaacttttatggagaagttggacaatggtgccttgctctgtcaacttgcagaaactatgcaggagaaattcaaggagagcatggatgctaacaagcccacaaagaatctaccgttgaagaagatcccatgcaaaaccagtgcaccctcgggctccttttttgccagagacaatacagcaaatttcttatcctggtgccgagatttaggggtggatgaaacgtgtctatttgaatcggaaggtttggtcctccacaagcaacccagagaagtgtgtctctgtctgctagagcttggccggattgcagccaggtatggtgtggagcctcctggtttgataaagctggaaaaagagattgaacaagaagaaacactttctgccccttctccttcaccttctccttcatcaaagtcttctggaaaaaagagtacaggaaacttactggatgatgcagtgaaacgaatttctgaagatcctccttgcaaatgcccaaacaagttctgtgtggagcggctctcccaaggaagataccgagtgggagaaaagatcctcttcattaggatgctgcacaacaaacatgtcatggtccgtgtgggaggaggctgggaaacttttgcagggtatttgttgaaacacgacccctgccgaatgctgcagatctcccgtgtggatggcaaaacatcccctatccaaagcaaatctccaactctaaaggacatgaatccagataactacttggtggtctctgccagttataaggctaagaaggaaattaagtgaaacaaattggtcatgacaaggggaccctcataatggcctgtatccacttctccagtatagtcagtttagttcatatgttctgaaaactgttttggagaaagatagacagaaaaatgtcatcatattgaaaaatgttcaaagagtagcactatttatttttaatgcttctgtagaatatgacctattaaaagaaaatctaaactcaaatttaaattatccaaattttaggcaaattattatttctcaatatgcgaacacagtatttagaacacaatattagaaacacaattctaactaaagataaataaggagaaaacatttaggatttgcagataagtcaacagaaagtgcctgctttacactcatgagtaaaagcactccagacatttttataattgcaagatttttatgctttttttttttttttttacaaaatgatgattagtgtgataatgtgctgcaaaaaatatccaacagcactacacataagtacagagtattcacaatagtaatatgttactggaaaggccacttccgaaaagtttacattcacttggaaggctgccttaaagtatatctcttatctatgaccaaatatctggggtacttttagaagttttcagtacacccccttagagaatagcttatgagttatttcacacattcctgagcacatggctgtgtttagaatgatctagtgtaattcatacatgagctgacatacgttgatactttgacgagtaaattgtacagtcaaatgttcattgatttcatgttatttcaaagcattttcttattaaaaatatatctttagttaatcctattttgctatgctttctagtaaagtaaattcactgtagctaatgatgttacagacttacgtatacccttgtatacctgggacagggctgttttataccaataaacagcaaaatattgtccttactcattcaagaattaaaaggataaattttaaaaatgttaaaaaaaaaaaaaaa

SEQ ID NO: 1819 - protein, 313 aa, Homo sapiens
MCTALSPKVRSGPGLSDMHQYSQWLASRHEANLLPMKEDLALWLTNLLGKEITAETFMEKLDNGALLCQLAETMQEKFKESMDANKPTKNLPLKKIPCKTSAPSGSFFARDNTANFLSWCRDLGVDETCLFESEGLVLHKQPREVCLCLLELGRIAARYGVEPPGLIKLEKEIEQEETLSAPSPSPSPSSKSSGKKSTGNLLDDAVKRISEDPPCKCPNKFCVERLSQGRYRVGEKILFIRMLHNKHVMVRVGGGWETFAGYLLKHDPCRMLQISRVDGKTSPIQSKSPTLKDMNPDNYLVVSASYKAKKEIK

SEQ ID NO: 1820 - DNA, 521 bp, Homo sapiens
gaattcggcacgagtaaaattcctataattttttgctgcatattatcctcatccccaaaataacatccattttaaagtgtatagttgaggggaaggatgctgtttttcgtataagttgtcaaatatggcacatttgacctggagagggctaaaatcaatatttaatcctcagagcttcacctgtcaaaactatttaagtctgcagaaaatcaagattgamatgaaaactaccaaccagctgaacatccaaaacgtcaaattccttaacatgatgtaaavatgtaagctaaaggaattagtccattttgatagcagcaatagagagccctgtgtattcgtattcgactttcatggaaaggttcttctgtggcaagcccacctgtggactagtacctaaccacacagatttgtttattttgggagcttcacaatttgggatctcaaatacaaaacctaataggctgaacacggggtctatgaggctaagccccacattaattcaagaggttgccacagctaac

SEQ ID NO: 1821 - DNA, 344 bp, Homo sapiens
tacagatataatattatcagagcattcatgaggaagacaaatataatacaaaacaaaatgtcatcctatctgagaggaaaatgtctgcagaaataaaagtgatttacacataatagaaaagtggaagacaaaaaaataatcaacacacactcaaatctgggattgggttacatccaacacaagggctgtttactattatggcatcccatctcttgcttttccagttttcaaacttgcaaatccaattctttaattaatggtcaggaaattccaaaaaagaagtagaccatatcaaacaacttcactttggattcccgcctccttatgctgctctttaggtgaaa

SEQ ID NO: 1822 - DNA, 319 bp, Homo sapiens
  misc_feature (27)..(27): n is a, c, g, or t
  misc_feature (121)..(121): n is a, c, g, or t
  misc_feature (276)..(276): n is a, c, g, or t
  misc_feature (284)..(284): n is a, c, g, or t
ggcaatcagaagcccaaactgcctttnagtctaagatgtgatgactttgatgaaacacaactgaaaacatgagggactatatccagtcacttgtagccagtttcacaggccagctacaganttgtccaaacaaacattatttctgactgcaatttttttcccccaaatttaaagcaatccctggctttaaatgacaaggcacctaccaatgttcttgggtcactgaagaagctactaccatgagcctgtgcatagaattttagggagataaaaggntgaatttnttgtgactgccagtcagatctttaacagggtttct

SEQ ID NO: 1823 - DNA, 397 bp, Homo sapiens
gctagagttggatgtttaaggccacagagtattagagcagtggtcctcagacttgagcacacatttgaatctcctgccttggccacccaaagtgctgggaattacaagtgtgagccaccgtgcccggcctcataatttctagtaagaagatgctagtgatatgataggcattgccctcaacgacatgataaaaaattatatttcatgttttaccatagccctttatgcataacccatccacagcactcatcagatgttatcataattattggtttactatgtaattctcttgttagactcagaatttcttgaaaatgatgaacaggatttgtatggcttcagcccattagtacatatttcagtttaatatatttttggaatttgaaacactgttttt

SEQ ID NO: 1824 - DNA, 593 bp, Homo sapiens
tttttttttttggctgtttaaagaagagatttattttattatttaacttttaaagtctctaatatgccttctaagaagggttctggctcagaaaattgcagaagaaaatcgagtagagaactagaattacagaaacctaagaaatacttttactgagctttcttcacacaagaaaatgcacggaaatgaattatacatggataccaatttgtgatttttaaaaatttgtaattttttaaattaagataaaaattagtttatttttttgaatacttttttgttttgttttacctcaccctttactaagctgttagcttggtctgttgcgcttactgctatatcctcagcatctagtacagttcctgacacatatatgcacttaataagtatttgtcaaatgaatattattgagtaaataagatgaaggtcaattcagaaattcagcactatcaggctatatacataatacagactattataaaaaactagaatggagcagttccttttaacgacggagaaatgtcagtaacatactttgagcacaatatagctaatttcacaactggtctttaaatataacatacctataatca

SEQ ID NO: 1825 - DNA, 425 bp, Homo sapiens
agtgcatggcagattatagcttactgcagcctcactcctgggttcaagcgatcttcccatttcagcctcccaaagtgctgggccaaaaaaaatgtttaatggtatcatctcatctagtttaggaggtttacattttatctggtgatcttctagccaaaggacaacccagtcaaatctaacatctcaatatcttgaattcacttccatctcctttataaagacagatcatttattcatggtaactgtggctgaagcagaaatatccaaagtaatcataccactcctttacctacttactcttttaaataacatagtactacacactagaaagtgatacgacaatatagtaaatctacatgaatcatctcccaattttacttcaaactatttctggttcctttattaccaaacgaagcccattctac

SEQ ID NO: 1826 - DNA, 1445 bp, Homo sapiens
ggcacgaggcaagttcttaacatcaatgatcatgctcctgagttctctcaatactatgagacttatgtttgtgaaaatgcaggctctggtcaggtaattcagactatcagtgcagtggatagagatgaatccatagaagagcaccatttttactttaatctatctgtagaagacactaacaattcaagttttacaatcatagataatcaagataacacagctgtcattttgactaatagaactggttttaaccttcaagaagaacctgtcttctacatctccatcttaattgccgacaatggaatcccgtcacttacaagtacaaacacacttaccatccatgtctgtgactgtggtgacagtgggagcacacagacctgccagtaccaggagcttgtgctttccatgggattcaagacagaagtcatcattgctattctcatttgcattatgatcatatttgggtttatttttttgactttgggtttaaaacaacggagaaaacagattctatttcctgagaaaagtgaagatttcagagagaatatattccaatatgatgatgaagggggtggagaagaagatacagaggcctttgatatagcagagctgaggagtagtaccataatgcgggaacgcaagactcggaaaaccacaagcgctgagatcaggagcctatacaggcagtctttgcaagttggccccgacagtgccatattcaggaaattcattctggaaaagctcgaagaagctaatactgatccgtgtgcccctccttttgattccctccagacctacgcttttgagggaacagggtcattagctggatccctgagctccttagaatcagcagtctctgatcaggatgaaagctatgattaccttaatgagttgggacctcgctttaaaagattagcatgcatgtttggttctgcagtgcagtcaaataattagggctttttaccatcaaaatttttaaaagtgctaatgtgtattcgaacccaatggtagtcttaaagagttttgtgccctggctctatggcggggaaagccctagtctatggagttttctgatttcccctggagtaaatactccatggttattttaagctacctacatgctgtcattgaacagagatgtggggagaaatgtaaacaatcagctcacaggcatcaatacaaccagatttgaagtaaaataatttaggaagatattaaaagtagatgagaggacacaagatgtagtcgatccttatgcgattatatcattatttacttaggaaagagtaaaaataccaaacgagaaaatttaaaggagcaaaaatttgcaagtcaaatagaaatgtacaaatcgagataacatttacatttctatcatattgacatgaaaattgaaaatgtatagtcagagaaattttcatgaattattccatgaagtattgttt

SEQ ID NO: 1827 - protein, 317 aa, Homo sapiens
GTRQVLNINDHAPEFSQYYETYVCENAGSGQVIQTISAVDRDESIEEHHFYFNLSVEDTNNSSFTIIDNQDNTAVILTNRTGFNLQEEPVFYISILIADNGIPSLTSTNTLTIHVCDCGDSGSTQTCQYQELVLSMGFKTEVIIAILICIMIIFGFIFLTLGLKQRRKQILFPEKSEDFRENIFQYDDEGGGEEDTEAFDIAELRSSTIMRERKTRKTTSAEIRSLYRQSLQVGPDSAIFRKFILEKLEEANTDPCAPPFDSLQTYAFEGTGSLAGSLSSLESAVSDQDESYDYLNELGPRFKRLACMFGSAVQSNN

SEQ ID NO: 1828 - DNA, 356 bp, Homo sapiens
gcttctactaactagcctcgagatcttaaccgctctgtgcctcagtgttcccatctgcaaaatggggatagtgttaattgccctacctacctcacagggttgttgtgaggataaactgagacaatgaattcaaagcaagttgacaagtaagtgctatgcaaattgtaagaaatggaaacaatcatgttaaaagcaatggaatggacattggcagaagggttaatggattgtccagccctttctctgtgtggcttaaacccaggtcgccattgctttatacattttcacttagcacagatttgtaattatgcatgtaataaagcacagccttatccaaaaaaaaaaaaaaaaaaaaa

SEQ ID NO: 1829 - DNA, 358 bp, Homo sapiens
tggctcctgtgcactttggttgctgagagtggttgtgggcagcaggccggtgagcagtgggggcagggatcttgacaccagcccttgttggactccacacccttctgaccattcatccacctttgggagtggggagcagggtctgttgaaagaggcagccgtgtcatgctcctgttagtaagggaactagacttttttgagcctaaaaccatacaagagaattcaacagaaagagaatttaatgtatatattcattcttgtaaaacaataatattgtagtaaaacttacatctgtgtgtttgctggccaggctagtcatttatgactttcttcgagtaagcggaaaatccttggagtc

SEQ ID NO: 1830 - DNA, 537 bp, Homo sapiens
  misc_feature (128)..(128): n is a, c, g, or t
  misc_feature (307)..(307): n is a, c, g, or t
  misc_feature (523)..(523): n is a, c, g, or t
acggatgggtccagtggcttagaagaaaactcagaagtaacaaaaggtgttaaatttataaagagcagtagctttacagttaatctatcagataatcaaagcttaatttgctctgccccagcagaganagaaatgtgcaaataaccccaaccaagacattccctttcaattctgtctcagcccactaaaaccacccaacactagatttccaaaaatccactctgggaccgtcagattccaaagatgtcacatgttccccccaacccccacactcaatgtcccaactctgccagatacatgtctgttngggagggctcaaccagcaacagagagaaaaagatatttgctagaaagagggagaccagacccactggcgttaagaaggagacctgggaggataagattggagaggcgtgcagatatgcttgcactgggtgaaattgaggccagatgtgtgaagttccagaagcctcaccaagagggcagtcctgggagagtggagattgtaggaagagaagagatntttgaagatctcct

SEQ ID NO: 1831 - DNA, 3570 bp, Homo sapiens
ctatccgctggtggaggtgagggcgcccggcaggccgccctgcaggcggcagggcatggggccgccccgagggtccccagggggctgcgctgccccccagccaggaggaaaggccctcgaggggcgcaggcggacgggaacagggcgtcactgagggctacaatggcaccatctttgcctacggccagacaggcagcgggaagtccttcaccatgcagggcctgccggatccgccctcccagagaggcatcatccccagggccttcgagcacgtgttcgagagcgtccagtgtgcagagaacactaagttcctggtccgggcctcctacctggagatctacaatgaagatgtccgggacctccttggggctgacaccaagcagaagctggagctgaaggagcacccagagaagggcgtgtacgtgaaggggctgtccatgcacacggtgcacagcgtggcccagtgtgagcacatcatggagactggctggaagaaccgttcggtcggctacacgctgatgaacaaggattcctcacgctcgcactccatcttcaccatcagcatcgagatgtctgccgtggatgagcggggcaaggaccacctccgggcgggcaagctgaacctggtggacctggcgggcagcgagcggcagtccaagaccggggccacgggcgagcggctcaaggaggccaccaagatcaacctgtcgctctcggcactgggcaatgtcatctcggcgctggtggacgggcgctgtaagcacgtcccctaccgtgactcgaagctgacgcggctgctgcaggactcactgggcggcaacaccaagacgctcatggtggcctgcctgtcgcctgcggacaacaactacgatgagacactcagcacgctgcgctacgccaaccgggccaagaacatcaggaacaagccgcgcatcaatgaggaccccaaggatgcgctgcttcgcgagtaccaggaggagatcaagaagctcaaggccatcctgacacagcagatgagccccagcagcctgtcagccctgctgtccaggcaggtgcccccagaccctgtgcaggtggaggagaagctgttgccccaacctgtgatccagcatgacatggaggccgagaagcagctgatccgggaggagtatgaagagcgcctggcccggctgaaagccgactataaggccgagcaggagtctcgggccaggctggaggaagacatcactgccatgcgcaactcatatgacgtcaggctgtccacgctggaggagaacctgcggaaggagacagaggctgtcctgcaggtgggagtcctctacaaggctgaggtcatgtccagggctgagtttgccagcagcgctgagtacccgcctgcttttcagtatgagacagtggtgaaacccaaggtcttctccacgactgacactctgcccagtgacgatgtctccaagactcaggtttcctccaggtttgcggagctgcccaaggtggaaccctccaaatctgagatttctctgggctccagtgagtcatcctcgctcgaagaaacctctgtgtccgaggctttccctgggcctgaggagccctccaacgtggaggtctccatgcccactgaggagtccaggagcagatacttcctggatgagtgcctcgggcaggaggccgctgggcacctgctgggggaacagaactacctcccgcaagaggagccgcaggaggtgcccctgcaggggttactaggcctgcaggacccgtttgccgaggtggaagccaagctggccagactctcctccaccgtggccaggacagatgcaccccaggcagacgtccccaaggtccctgtgcaggtccctgcgccgacagacctgctggagcccagtgatgccaggcccgaagccgaggcggctgatgacttcccgcccaggcctgaggtagatctggcctcggaagtggccttagaggtggtgcggacagcagagcctggcgtgtggttggaggctcaggccccggtggccctggtggctcagcctgagcccctgccggccacagctggtgtgaagagggagagcgtgggcatggaggtggcagtgctgactgatgacccgctgcccgttgtggaccagcagcaggtgctggcccgtctgcagctgttggagcagcaggttgtgggtggagagcaggccaagaacaaggacctgaaggagaagcacaagcggcgcaagcgctacgcagacgagcgcaggaagcagctggtggctgccctgcagaactcggatgaggacagcggggactgggtgctgcttaacgtctacgactccatccaggaggaagtgcgggccaagagcaagctgctggagaagatgcagaggaagcttcgggcagcagaggtggagatcaaagatctgcagtccgagtttcagctggagaagatcgattacttggccaccatccgccggcaggagcgtgactccatgctcttgcagcagctcctggagcaggtgcagcccctgattcgcagggactgtaactacagcaacctggagaagattctgcgtgagtcctgctgggacgaagataacggcttctggaagatcccacatcccgtcatcacaaaaaccagcctcccagtagcagtttcaactgggccacagaacaaaccagcccgcaaaacctctgcagcagacaatggcgagccgaacatggaggaggaccgctacaggctcatgctcagtcggagcaacagtgaaaacattgccagcaactacttccgatctaagtgggccagccagatcctcagcacagacgccaggaagagcctcacacatcacaactcgccaccaggcctcagctgcccactcagcaacaactctgccatcccacccacccaggcccctgaaatgccccagccccggcccttccgcctcgagtccctcgacatccctttcaccaaggccaagcgtaagaaaagcaaaagcaactttggcagtgagcctctgtgagcacagctgcttgccattgcctgccttataggcatgtagagactgccaggccctcccagggcagccccaaccaggtctcctcccacctgccacacagcgctccggggcctgagggctccctcagccctgggaagacacattcccttccctgttccccagagagcccacctctgccctgggcaggagcccctcggaggctgtatagtcctccttagagaggcctgctccagctgttcataccacatcagtgtttccgtctgctcacctgccacagagcccacacccatgcccaccagtgttggtctttgcctcaaagcctgagacctgcttcacggccttcaccagccctgatggagagggcagcagctgccacgtggaggaagctcaatatcagctgggaaggaactgtgcctctgtctgactggccccacttcctaagcactgccctgccccatggggtggcacaggggtcccacagcaggtcttcctgcactgcccacccctggctggtctgtggcccaaggaaggccactccacattaagctgcccaataaactgcttttaagat

SEQ ID NO: 1832 - protein, 993 aa, Homo sapiens
GRPAGRPAGGRAWGRPEGPQGAALPPSQEERPSRGAGGREQGVTEGYNGTIFAYGQTGSGKSFTMQGLPDPPSQRGIIPRAFEHVFESVQCAENTKFLVRASYLEIYNEDVRDLLGADTKQKLELKEHPEKGVYVKGLSMHTVHSVAQCEHIMETGWKNRSVGYTLMNKDSSRSHSIFTISIEMSAVDERGKDHLRAGKLNLVDLAGSERQSKTGATGERLKEATKINLSLSALGNVISALVDGRCKHVPYRDSKLTRLLQDSLGGNTKTLMVACLSPADNNYDETLSTLRYANRAKNIRNKPRINEDPKDALLREYQEEIKKLKAILTQQMSPSSLSALLSRQVPPDPVQVEEKLLPQPVIQHDMEAEKQLIREEYEERLARLKADYKAEQESRARLEEDITAMRNSYDVRLSTLEENLRKETEAVLQVGVLYKAEVMSRAEFASSAEYPPAFQYETVVKPKVFSTTDTLPSDDVSKTQVSSRFAELPKVEPSKSEISLGSSESSSLEETSVSEAFPGPEEPSNVEVSMPTEESRSRYFLDECLGQEAAGHLLGEQNYLPQEEPQEVPLQGLLGLQDPFAEVEAKLARLSSTVARTDAPQADVPKVPVQVPAPTDLLEPSDARPEAEAADDFPPRPEVDLASEVALEVVRTAEPGVWLEAQAPVALVAQPEPLPATAGVKRESVGMEVAVLTDDPLPVVDQQQVLARLQLLEQQVVGGEQAKNKDLKEKHKRRKRYADERRKQLVAALQNSDEDSGDWVLLNVYDSIQEEVRAKSKLLEKMQRKLRAAEVEIKDLQSEFQLEKIDYLATIRRQERDSMLLQQLLEQVQPLIRRDCNYSNLEKILRESCWDEDNGFWKIPHPVITKTSLPVAVSTGPQNKPARKTSAADNGEPNMEEDRYRLMLSRSNSENIASNYFRSKWASQILSTDARKSLTHHNSPPGLSCPLSNNSAIPPTQAPEMPQPRPFRLESLDIPFTKAKRKKSKSNFGSEPL

SEQ ID NO: 1833 - DNA, 2147 bp, Homo sapiens
gtgcgcagcggccatggcttcctcaattatctgccaggagcactgccagatctcgggccaggcaaaaatagacatcttattagttggagatgtcactgtgggctacctggctgatactgtacagaaactatttgcaaacatagcagaagtcaccatcaccatcagtgacacgaaggaggcagcagcgcttttggatgattgcatattcaacatggttctcttgaaggtgccttcttcactaagtgccgaggagctggaagccatcaagttaattagatttggcaaaaagaaaaatacacattcactgtttgtttttataatccctgaaaattttaaaggttgtatttcagggcatggaatggatattgctttaactgaaccactgacaatggaaaaaatgagtaatgtggtaaaatactggacaacatgtccctcaaacactgttaagactgaaaacgcaactgggcctgaagaacttggattgcccctgcagaggtcctacagcgaacacctgggatattttcctactgatctatttgcctgctctgaatctttaaggaatggcaatgggcttgaattaaatgcttcgttgtcagagttcgagaaaaacaaaaagatctctcttcttcattcaagcaaggaaaacctaagaagggaaagaatcaaatattgctgtgagcagctgcgtactctcttgccgtatgtaaaagggagaaagaatgatgcggcttcagttcttgaggcaacagttgattatgtgaaatatatccgggagaaaatctctccagccgttatggcccagattacagaagcacttcagagcaacatgaggttttgtaagaaacaacaaacacccattgagctgtctctcccaggcactgtcatggcacagcgggaaaacagtgtgatgagcacttactcccctgagagagggctccaattcctggctaatacgtgctggaatgggtgctccactcctgatgcagagagctccttggatgaagctgtgagagttccatcaagctccgcctcagagaatgctattggtgatccatataaaactcacatttccagtgcagcgctgtctctgaattccttgcatactgtcagatattattctaaagtcaccccttcctacgatgcaactgctgtaacaaatcagaacatttcaattcatttaccttcagccatgcccccggtctcaaagcttctccctcggtactgcacttctgggttgggccagacgtgcactacacatcccaactgtctgcaacagttttgggcgtattaaaagcacatgtttgaaattcacactctcaaccacctactgggcgcagtttgacaatctaggaaaagtggaacaaagaatgattttgaaagctccacccaaagacctaatatcaaaagagttggcatggtttggcttctgataaatgcactcaaagcttctgcagatagaaagaccagcagcgaaaaagctggccacacactgtcactcatcttcatacacacttggatccccgccagccagagagctacaagaacaaatggcctcagtgacctacactctcttttctcaaaaaatattccacaatttatgaaaaaagcatgctataaggaagatccatgtagacacgataaaatgattagattgggaaggtgtgttgataccttgtgtcactgagtacagatattacaacttgattcttatttttagtatccctgtgaattactgtcactcatttctaggtggtcttttccttatttgacattttagagagtttccttcttcattcaccatccaaactaagatatgcagagagatgctgaaagaggggtttacctcctcacttgacaactaatgaataaattgatgtgtgcttttgcatttcacaatcccttgagtgaaacgatggctaataggtaaatatttctttctggaccttaagttacagactagcaggttttttgtttttcatctcttcctccctatgggtattagaaaggacagttgaaaataagggggaaaaaggtttgttttatatttcactgaattgttcttatatgtaagttttattattaaataaaatactcagttttcaccctgaaaaaaaaaaaaaaaaaaaaaaaaaaaaaaaaaaaaaaaa

SEQ ID NO: 1834 - protein, 425 aa, Homo sapiens
MASSIICQEHCQISGQAKIDILLVGDVTVGYLADTVQKLFANIAEVTITISDTKEAAALLDDCIFNMVLLKVPSSLSAEELEAIKLIRFGKKKNTHSLFVFIIPENFKGCISGHGMDIALTEPLTMEKMSNVVKYWTTCPSNTVKTENATGPEELGLPLQRSYSEHLGYFPTDLFACSESLRNGNGLELNASLSEFEKNKKISLLHSSKENLRRERIKYCCEQLRTLLPYVKGRKNDAASVLEATVDYVKYIREKISPAVMAQITEALQSNMRFCKKQQTPIELSLPGTVMAQRENSVMSTYSPERGLQFLANTCWNGCSTPDAESSLDEAVRVPSSSASENAIGDPYKTHISSAALSLNSLHTVRYYSKVTPSYDATAVTNQNISIHLPSAMPPVSKLLPRYCTSGLGQTCTTHPNCLQQFWAY

SEQ ID NO: 1835 - DNA, 2398 bp, Homo sapiens
gcatcaagctcgagaaggagttcgacctgcccccggccgcgatgcccaacacggagaacgtgtactcgcagtggctcgccggctacgcggcctccaggcagctcaaagatcccttccttagcttcggagactccagacaatcgccttttgcctcctcgtcggagcactcctcggagaacgggagcttgcgcttctccacaccgcccggggagctggacggagggatctcggggcgcagcggcacgggaagtggagggagcacgccccatattagtggtccgggcccgggcaggcccagctcaaaagagggcagacgcagcgacacttgtgagtactgtgggaaagtcttcaagaactgtagcaatctcactgtccacaggagaagccacacgggcgaaaggccttataaatgcgagctgtgcaactatgcctgtgcccagagtagcaagctcaccaggcacatgaaaacgcatggccaggtggggaaggacgtttacaaatgtgaaatttgtaagatgccttttagcgtgtacagtaccctggagaaacacatgaaaaaatggcacagtgatcgagtgttgaataatgatataaaaactgaatagaggtatattaatacccctccctcactcccacctgacaccccctttttcaccactccccttccccatcgccctccagccccactccctgtaggatttttttctagtcccatgtgatttaaacaaacaaacaaacaaacagaagtaacgaagctaagaatatgagagtgcttgtcaccagcacacctgttttttttctttttctttttcttttttctttttccttttttttttttcttttcctttatgttctcaccgtttgaatgcatgatctgtacggggcaatactattgcattttacgcaaactttgagcctttctcttgtgcaataatttacatgttgtgtatgtttttttttaaacttagacagcatgtatggtatgttatggctattttaaattgtccctaattcgttgctgagcaaacatgttgctgtttccagttccgttctgagagaaaaagagagagagagagaaaaagaccatgctgcatacattctgtaatacatatcatgtacagttttattttataacgtgaggaggaaaaacagtctttggattaaccctctatagacagaatagatagcactgaaaaaaaatctctatgagctaaatgtctgtctctaaagggttaaatgtatcaattggaaaggaagaaaaaaggccttgaattgacaaattaacagaaaaacagaacaagtttattctatcatttggttttaaaatatgagtgccttggatctattaaaaccacatcgatggttctttctacttgttataaacttgtagcttaattcagcattgggtgaggtaataaaccttaggaactagcatataattctatattgtatttctcacaacaatggctacctaaaaagatgacccattatgtcctagttaatcatcatttttcctttagtttaattttataaacaaaactgattataccagtataaaagctactttgctcctggtgagagcttaaaagaaatgggctgttttgcccaaagttttatttttttttaaacaatgattaaattgaatgtgtaatgtgcaaaagccctggaacgcaattaaatacactagtaaggagttcattttatgaagatatttgctttaataatgcctttttaaaaatactggcaccaaaagaaatagatccagatctacttggttgtcaagtggacaatcaaatgataaactttaagaccttgtataccatattgaaaggaagaggctgacaataaggtttgacagaggggaacagaagaaaataatatgatttattagcacaacgtggtactatttgccatttaaaactagaacaggtatataagctaatattgatacaatgatgattaactatgaattcttaagacttgcatttaaatgtgacattcttaaaaaaagaagagaaagaattttaagagtagcagtatatatgtctgtgctccctaaaagttgtacttcatttcttttccatacactgtgtgctatttgtgttaacatggaagaggattcattgtttttatttttatttttttaattttttcttttttattaagctagcatctgccccagttggtgttcaaatagcacttgactctgcctgtgatatctgtatcttttctctaatcagagatacagaggttgagtataaaataaacctgctcagataggacaattaagtgcactgtacaattttcccagtttacaggtctatacttaagggaaaagttgcaagaatgctgaaaaaaaattgaacacaatctcattgaggagcattttttaaaaact

SEQ ID NO: 1836 - protein, 187 aa, Homo sapiens
MPNTENVYSQWLAGYAASRQLKDPFLSFGDSRQSPFASSSEHSSENGSLRFSTPPGELDGGISGRSGTGSGGSTPHISGPGPGRPSSKEGRRSDTCEYCGKVFKNCSNLTVHRRSHTGERPYKCELCNYACAQSSKLTRHMKTHGQVGKDVYKCEICKMPFSVYSTLEKHMKKWHSDRVLNNDIKTE

SEQ ID NO: 1837 - DNA, 324 bp, Homo sapiens
atctcctaccccacgagaaaggaacacagtaaactgaattgatccgtttagaagtttacaatgaagtttcttctaatactgctcctgcaggccactgcttctggagctcttcccctgaacagctctacaagcctggaaaaaaataatgtgctatttggtgaaagatacttagaaaaattttatggccttgagataaacaaacttccagtgacaaaaatgaaatatagtggaaacttaatgaaggaaaaaatccaagaaatgcagcacttcttgggtctgaaagtgaccgggcaactggacacatctaccctggagatgatgcac

SEQ ID NO: 1838 - DNA, 440 bp, Homo sapiens
  misc_feature (7)..(7): n is a, c, g, or t
  misc_feature (13)..(13): n is a, c, g, or t
  misc_feature (359)..(359): n is a, c, g, or t
  misc_feature (380)..(380): n is a, c, g, or t
agaatcnaaattnatcttcttatattattgattatgaaactgatgctcagtaaaaagttgtttgatatttccattcatcttttttaaccttatggttcatacatttagggatgcagaatctattccattatgattgagcaataatgtctaatacataagaaatccagttcctatctaacaacttaaaactgtacaaattatgtacaggtatattctttgggttaactttttttttttaccatgattctcattgagtttttaagggcacccaaataattgaaggcctaaggatatattaaggacaaggttaaaattcccaaaacctttggaaggacttttaaggaggctattactttccnggggtgggggtcagctttccngccctggggccccgttggaatggcggtcattgtcagcttcctaacccgtggggctgatcc

SEQ ID NO: 1839 - DNA, 379 bp, Homo sapiens
  misc_feature (332)..(332): n is a, c, g, or t
  misc_feature (348)..(348): n is a, c, g, or t
  misc_feature (366)..(366): n is a, c, g, or t
aggcggcaagaggaacagccacaaacaagtactttaccccacagcttagtggccagtaaacaccctggggactaggaaaaggaaccaactgtaggcacctctccagggcctagggagacaagtgtcctctcttctgcatacatttgggctccccttacagagccctttgccctggctctctggtccttgttgctctaacagtccagatgtacacccagcctcagggggaaggcagctctctccagacagagtctcagggcccagcaaggtcaggttatctgctttcattcagggcaacaaatgatacaaatggtgccagggagtggcaaggncatggggggtaaggtngggggtgtctttttcttntcataaagtaaca

SEQ ID NO: 1840 - DNA, 2104 bp, Homo sapiens
ggaaacttctgcctcaggtggggagaggagtccatagatcagggaaacttatgtcttggtgaaatggaagaccatgtttctaaacacctgtcgccaggttacttgaatttccactagaggagcagaaatgccaccaatgccaagtgccccacctgtgcatccacctccagatggaggatggggttggattgtggttggagcagcttttatctccattggattttcctatgcattccccaaagctgtcaccgtattcttcaaagaaattcagcaaatattccacactacctacagtgaaatagcatggatttcatccattatgctggctgttatgtacgcaggaggtcctgtaagtagtgttttggtgaataaatacggcagccggccggtggtgatagcaggaggcttattatgctgtcttggaatggtgttggcctcctttagtagcagcgtggtacagctgtacctcactatgggattcattacaggtttaggtttagccttcaacctgcaacccgccttaaccataattggcaaatacttctataggaagcgacccatggcaaatggattggccatggcaggaagtcctgttttcttaagttcattggctcctttcaatcagtacctttttaatacttttggctggaaaggaagcttcctgattttgggaagtctacttttgaatgcctgtgtggctggttccctcatgagaccccttggacccaatcaaaccacttctaagtctaaaaataagactggcaaaacagaagatgattcaagcccaaagaaaatcaaaacgaagaaatcaacttgggaaaaagttaataagtatttagatttctccctttttaagcatagaggatttctgatatatctgtctggaaatgtcattatgttcctaggtttttttgcccccattatattcttggctccatatgctaaagaccaaggaattgatgagtactcggcagcttttctgctatctgttatggctttcgttgatatgtttgctaggccttctgtaggattaattgcaaactccaaatatattcgacctcgaattcagtacttcttcagttttgcaatcatgttcaatggagtgtgtcacctcttgtgcccactggcacaggactacacaagcctggtattatatgctgtattttttggccttggatttgggagtgttagcagtgttctctttgaaactctcatggacctcgtgggtgcaccaagattttccagtgccgtcggacttgtcacaattgtggagtgtggcccagttcttcttggccctcctcttgcaggtaaattggtggatttaactggagaatataaatacatgtacatgtcctgtggggctattgtggtagcagcaagcgtgtggctgctcattggcaatgctatcaactatagattgcttgcaaaggaaaggaaggaggaaaatgcaaggcagaagtccagagaatctgaacccttgagcaaatctaaacattcggaagatgttaacgtcaaagtttcaaatgcacagagtgtaacctcagaaagagaaactaacatttaacaagaatcacatctctgatttcagtgtttatgactttatctaggagtttgtttttcattttgtttttttaaagtattagaaaaggttttagctgaaatgaggagtcacaattdaaggatggaggtgatattttcctcaatggcaaattttaaattagtttttaaaaacttacttatttgggtagttaaattttgagattatgcatagaaagaatccatgctataggtttatttccatacctgactctgggtgtggtggttaaaatactaattttaaagtcttccagtgactttcggtcttggttatatggagaattctgaatcccaaacccctggtttaagtaggtagaaggaggatgcctaatcctacaaagtgaccctttatacatttcattttttatttgatattaaagtatgagatagagttgagagacaattaattatcccctcttacacacaaacacacatactcccacatacttacccacatgtacacagagtatctggagaataaaacccaaattcaaaaaaaaaaaaaaaa

SEQ ID NO: 1841 - protein, 478 aa, Homo sapiens
MPPMPSAPPVHPPPDGGWGWIVVGAAFISIGFSYAFPKAVTVFFKEIQQIFHTTYSEIAWISSIMLAVMYAGGPVSSVLVNKYGSRPVVIAGGLLCCLGMVLASFSSSVVQLYLTMGFITGLGLAFNLQPALTIIGKYFYRKRPMANGLAMAGSPVFLSSLAPFNQYLFNTFGWKGSFLILGSLLLNACVAGSLMRPLGPNQTTSKSKNKTGKTEDDSSPKKIKTKKSTWEKVNKYLDFSLFKHRGFLIYLSGNVIMFLGFFAPIIFLAPYAKDQGIDEYSAAFLLSVMAFVDMFARPSVGLIANSKYIRPRIQYFFSFAIMFNGVCHLLCPLAQDYTSLVLYAVFFGLGFGSVSSVLFETLMDLVGAPRFSSAVGLVTIVECGPVLLGPPLAGKLVDLTGEYKYMYMSCGAIVVAASVWLLIGNAINYRLLAKERKEENARQKSRESEPLSKSKHSEDVNVKVSNAQSVTSERETNI

SEQ ID NO: 1842 - DNA, 463 bp, Homo sapiens
ttttttagagattagtatttccttgttcacaagacacctaattgacttgcaacaagacaaaatattcagtgcatctggttggggccaacatggatgatgacgtgtttctcataagcccttttcattgttttctcaatttgcttcagaaaaacttgcgggattcgtccacataaagtgtgcacagtctccaaaaacttcagctgaagggggtaatacatggattgaaagagattgtcttgaaagggaaaatcccgtattgcttcatagagtgctctgaacgttggttgcttatcgtcatggtagacgcctcggtttccatgcagaacagacacaccttcatgctcagcctctctgcagttgcttccgtacatgcagtgatcgggacggtagttccactggcaggggaatacatagagacactctgggttgaaataaaaaataatatttaataaatcctggtctc

SEQ ID NO: 1843 - DNA, 571 bp, Homo sapiens
acccagcaggcggcgaggagatggcggagaacagcggtcgcgccggcaagagcagcgggacgccgcggcgctggcatccaaagcagctgagttggagatggagttgaatgagcacagcctagtgatcgatacactgaaggaggtagatgaaactcgtaagtgctaccgcatggttggaggagtgctggtggagcgaactgtcaaagaggtgctgcccgctttggagaacaacaaggagcagatacagaagatcattgagacactgacacagcagcttcaggcaaagggaaaagaactaaatgaattccgggaaaagcacaacattcgtctcatgggagaagatgagaagccagcagccaaggaaaactcagaaggggctggggctaaggccagctcagctggagtgttggtctcctagggaccaaggcctttgcatttttttctaccctgactcccacttctaatttctctttattgttattattattattttctctgctattgtaatatttttttgttaattaaatgttttggtcagaatcttaaaaaaaaaaaaaaaaaaaaaaaaaaa

SEQ ID NO: 1844 - protein, 155 aa, Homo sapiens
MAENSGRAGKSSGTPRRGRGRCPAEQVIAGFNRLRQEQRGLASKAAELEMELNEHSLVIDTLKEVDETRKCYRMVGGVLVERTVKEVLPALENNKEQIQKIIETLTQQLQAKGKELNEFREKHNIRLMGEDEKPAAKENSEGAGAKASSAGVLVS

SEQ ID NO: 1845 - DNA, 169 bp, Homo sapiens
  misc_feature (45)..(45): n is a, c, g, or t
  misc_feature (67)..(67): n is a, c, g, or t
  misc_feature (159)..(159): n is a, c, g, or t
cgactccgctgggccacccgcccctcaccctcggcctgacccagnctctccgtgcctcccctagccncctcctcccagcagtcccccaggagcgagctgcgagatgccccaaatcggacccctccccagttggaaaaaaaaaacgactcctgacctttnccagcctcct

SEQ ID NO: 1846 - DNA, 1713 bp, Homo sapiens
ccaagggagaaaactattctgtcaaagagacggtgccaaaaggcaaaaacaaaggagctgatggcaaagaaggtagctgtgattggagctggggtcagtggcctaatttctctgaagtgctgtgtggatgagggacttgagcccacttgctttgagagaactgaagatattggaggagtgtggaggttcaaagagaatgtggaagatggccgagcaagtatctatcaatctgtcgttaccaacaccagcaaagaaatgtcctgtttcagtgactttccaatgcctgaagattttccaaacttcctgcataattctaaacttctggaatatttcaggatttttgctaaaaaatttgatctgctaaaatatattcagttccagacaactgtccttagtgtgagaaaatgtccagatttctcatcctctggccaatggaaggttgtcactcagagcaacggcaaggagcagagtgctgtctttgacgcagttatggtttgcagtggccaccacattctacctcatatcccactgaagtcatttccaggtatggagaggttcaaaggccaatatttccatagccgccaatacaagcatccagatggatttgagggaaaacgcatcctggtgattggaatgggaaactcaggctcagatattgctgttgagctgagtaagaatgctgctcaggtttttatcagcaccaggcatggcacctgggtcatgagccgtatctctgaagatggctatccttgggactcagtgttccacacccggtttcgttctatgctccgcaatgtactgccacgaacagctgtaaaatggatgatagaacaacagatgaatcggtggttcaaccatgaaaattatggccttgagcctcaaaacaaatacattatgaaggaacctgtactaaatgatgatgtcccaagtcgtctactctgtggagccatcaaggtgaaatctacagtgaaagagctcacagaaacttctgccatctttgaggatggaacagtggaggagaacattgatgtcatcatttttgcaacaggatatagtttctcttttcccttccttgaagattcactcgttaaagtagagaataatatggtctcactgtataaatacatattccccgctcacctggacaagtcaaccctcgcgtgcattggtctcatccagcccctaggttccattttcccaactgctgaacttcaagctcgttgggtgacaagagttttcaaaggcttgtgtagcctgccctcagagagaactatgatgatggacattatcaaaaggaatgaaaaaagaattgacctgtttggagaaagccagagccagacgttgcagaccaattatgttgactacttggacgagctcgccttagagataggtgcgaagccagatttctgctctctcttgttcaaagatcctaaactggctgtgagactctatttcggaccctgcaactcctattagtatcgcctggttgggcctgggcaatgggaaggagccagaaatgccatcttcacccagaaacaaagaatactgaagccactcaagactcgggccctgaaggattcatctaatttctcagtttcttttctgttgaaaatcctgggccttcttgctgttgttgtggcctttttttgccaacttcaatggtcctagtcagcataatgctttgggctttattatcttgtcagtcactacctc

SEQ ID NO: 1847 - protein, 471 aa, Homo sapiens
MAKKVAVIGAGVSGLISLKCCVDEGLEPTCFERTEDIGGVWRFKENVEDGRASIYQSVVTNTSKEMSCFSDFPMPEDFPNFLHNSKLLEYFRIFAKKFDLLKYIQFQTTVLSVRKCPDFSSSGQWKVVTQSNGKEQSAVFDAVMVCSGHHILPHIPLKSFPGMERFKGQYFHSRQYKHPDGFEGKRILVIGMGNSGSDIAVELSKNAAQVFISTRHGTWVMSRISEDGYPWDSVFHTRFRSMLRNVLPRTAVKWMIEQQMNRWFNHENYGLEPQNKYIMKEPVLNDDVPSRLLCGAIKVKSTVKELTETSAIFEDGTVEENIDVIIFATGYSFSFPFLEDSLVKVENNMVSLYKYIFPAHLDKSTLACIGLIQPLGSIFPTAELQARWVTRVFKGLCSLPSERTMMMDIIKRNEKRIDLFGESQSQTLQTNYVDYLDELALEIGAKPDFCSLLFKDPKLAVRLYFGPCNSY

SEQ ID NO: 1848 - DNA, 478 bp, Homo sapiens
ttttttttttttttgtttttttttggggatttcccaatgattttattgaggtaacttttcccaattttatacatatatgcatttatatatacttaggaaagctaaacaatgttctaaggcacttggaattgtgcacagcaaagtatcctctaatattatacaactaaatagagcagaattttgctttttaaataacacaaataccagtacggaattaaaaaagggaatacatagtctttctttcaggttacaatagtggaatacaagtacatatgtgtgtatacttgtagatatttatacccacatactataatacagtacagataagaacaacaaaagagaaactgtcatgttaatcagtgtacagttccagttatttacactcacagatattacacctgtgtaatacgtagaactagatcactcactggaaatcagaaagcattcagtcagtctgataatgatcacagtttaccat

SEQ ID NO: 1849 - DNA, 578 bp, Homo sapiens
  misc_feature (477)..(477): n is a, c, g, or t
ccaacatcagaatgaacactttccgctggcgggctgcacacaggacatgaaaaccagcagaaaggccctgagctgctgcatagccccatctgatttctgcagttcccgccagcctccaacacggggactctgccgtaactggaatcttcataggtcatattgaaatcttcaaggtgaccatgccccaccggggtgctggggcagtagtcatggcagactcccggcctgggcccccaggattctaggacccccaggcagccccttggactggtcccgggtgccttccaagcacagtctccatgctcccagattctcgaccttcccccggcccgggaggtgcagcctgcgtctgcctctgtcgtgtgtgctgatttgagtggcttagcttgccacagcgcagcctcttctgtccctttcagtcatttgctgtacttccctgtggcacgttaccatggaagccgctccagggtgggtcanggtgcaagctgctggtgaggtttggaagcatcaggctcacgggtgttcatgtgtgttcgtgcgtgtgtgtgcgtacgtgtatataactgaagtgtctgtac

SEQ ID NO: 1850 - DNA, 7785 bp, Homo sapiens
ctcactgtccctggaatcttcaagggagttactgcattacatcatcagaaacaaggcatttctatattactatggaaagatttcgtctggagaagaagttacctggtcctgatgaagaagctgttgtggatcttggcaaaactagctcaactgtgaacaccaagtttgaaaaagaagaactagaaagtcatagagctgtatatattggtgttcacgtcccgtttagtaaagagagtcgtcggcgtcataggcatcgcggacacaaacatcaccaccggaggagaaaagataaagaatcagataaagaagatggacgggaatctccttcttatgatacaccatcccagagagttcagtttatccttggtactgaagatgatgatgaagaacatattccccatgatctcttcacggaaatggatgaactgtgttacagagatggagaagaatatgaatggaaagaaactgctagatggctgaaatttgaagaggatgttgaagatggcggtgaccgatggagtaaaccttatgtggcaactctctctttgcacagtctttttgaactaaggagttgcatcctcaatggaacagtcatgctggatatgagagcaagcactctagatgaaatagcagatatggtattagacaacatgatagcttctggccaattagacgagtccatacgagagaatgtcagagaagctcttctgaagagacatcatcatcagaatgagaaaagattcaccagtcggattcctcttgttcgatcttttgcagatataggcaagaaacattctgaccctcacttgcttgaaaggaatggggaaggcctttcagcctcccgccactctttgcgaacaggtctgtctgcctcaaacctttccttgagaggagaatcacctttatctcttcttctcggtcatcttcttccttcttcaagagctggaacccctgcaggctcaaggtgtacaaccccagtacccacccctcaaaacagtcctccttctagccctagcatcagccgcctgacctccagaagttcccaaaagagtcagcgtcaggccccagaactactggtttcacctgccagtgatgatattcccacagtagtaattcatccgcctgaggaagacttagaagcagcgctgaaaggcgaggagcagaagaatgaggaaaatgttgacttaactccaggtattttggcctctccccagtctgctcctggaaacttggacaatagtaaaagtggagaaattaaaggtaatggaagtggtggaagcagagaaaatagtactgttgacttcagcaaggttgatatgaatttcatgagaaaaattcctacgggtgctgaggcatccaacgtcctggtgggcgaagtagactttttggaaaggccaataattgcatttgtgagactggctcctgctgtcctccttacagggttgactgaggtccctgttccaaccaggtttttgtttttgttattgggtccagcgggcaaggcaccacagtaccatgaaattggacgatcaatagccactctcatgacagatgagattttccatgatgtagcttataaagcaaaagacagaaatgacctcttatctggaattgatgaatttttagatcaagtaactgtcctacctccaggagagtgggatccttctatacgcatagaaccaccaaaaagtgtcccttctcaggaaaagagaaagattcctgtgtttcacaatggatctacccccacactgggtgagactcctaaagaggccgctcatcatgctgggcctgagctacagaggactggacggctttttggtggtttgatacttgacatcaaaaggaaagcaccttttttcttgagtgacttcaaggatgcattaagcctgcagtgcctggcctcgattcttttcctatactgtgcctgtatgtctcctgtaatcacttttggagggctgcttggagaagctacagaaggcagaataagtgcaatagagtctctttttggagcatcattaactgggattgcctattcattgtttgctgggcaacctctaacaatattggggagcacaggtccagttctagtgtttgaaaaaattttatataaattctgcagagattatcaactttcttatctgtctttaagaaccagtattggtctgtggacttcttttttgtgcattgttttggttgcaacagatgcaagcagccttgtgtgttatattactcgatttacagaagaggcttttgcagcccttatttgcatcatattcatctacgaggctttggagaagctctttgatttaggagaaacatatgcatttaatatgcacaacaacttagataaactgaccagctactcatgtgtatgtactgaacctccaaatcccagcaatgaaactctagcacaatggaagaaagataatataacagcacacaatatttcctggagaaatcttactgtttctgaatgtaaaaaacttcgtggtgtattcttggggtcagcttgtggtcatcatggaccttatattccagatgtgctcttttggtgtgtcatcttgtttttcacaacattttttctgtcttcattcctcaagcaatttaagaccaagcgttactttcctaccaaggtgcgatcgacaatcagtgattttgctgtatttctcacaatagtaataatggttacaattgactaccttgtaggagttccatctcctaaacttcatgttcctgaaaaatttgagcctactcatccagagagagggtggatcataagcccactgggagataatccttggtggaccttattaatagctgctattcctgctttgctttgtaccattctcatctttatggatcaacaaatcacagctgtaattataaacagaaaggaacacaaattgaagaaaggagctggctatcaccttgatttgctcatggttggcgttatgttgggagtttgctctgtcatgggacttccatggtttgtggctgcaacagtgttgtcaataagtcatgtcaacagcttaaaagttgaatctgaatgttctgctccaggggaacaacccaagtttttgggaattcgtgaacagcgggttacagggctaatgatttttattctaatgggcctctctgtgttcatgacttcagtcctaaagtttattccaatgcctgttctgtatggtgttttcctttatatgggagtttcctcattaaaaggaatccagttatttgaccgtataaaattatttggaatgcctgctaagcatcagcctgatttgatatacctccgttatgtgccgctctggaaggtccatattttcacagtcattcagcttacttgtttggtccttttatgggtgataaaagtttcagctgctgcagtggtttttcccatgatggttcttgcattagtgtttgtgcgcaaactcatggacctgtgtttcacgaagagagaacttagttggcttgatgatcttatgccagaaagtaagaaaaagaaagaagatgacaaaaagaaaaaagagaaagaggaagctgaacggatgcttcaagacgatgatgatactgtgcaccttccatttgaagggggaagtctcttgcaaattccagtcaaggccctaaaatatagtcctgataaacctgtgagtgtgaaaataagttttgaagatgaaccaagaaagaaatacgtggatgctgaaacttcattatagaattgaaccaagaggcattatacatatagatatatacatatgtaatgtgtgcgtatcatgtcactatatataagaatattgtatgtcatgctgtttatgtgtgactaccgggtttttaaaagtagtgtctggagtttgtaatgagcaccgtggagactatgtatttaatgaaatgctctctttgaagtgaggtacatggttcttaactattcaaatatttattctgttagaaaaaaaaaattttctgttttgcaatagaaggatgtggagaaatgctttcagtctacttttcttaaatctctgttcatcagtggcaattcgtaaaaaccttaagtgatactttgtttatatgtttataatttttaggtgtttcctgaaattttcacatattatttcacttttgttagtgctttatgggaagaatagggagtctataccagtgctgtgggaaaaatggtaacatttcagggcttctctatttgtgtttcatttctgtagatgtccatcgtgtttcactaactggcgttttcttagccatagagatgactgtagaacaatagaaactttaataatgatagtttttaacttttatgtttaaattttttttaaatcttaaaaccttcatatctaggtatccattgtgacagacaagtaaaattgcaggtgatttgataattaagcacccataccatttataacttctgaatttaaaaagttatacaatgccagtttgcaatagttgattttgatgcctttgtagaatattttttctgaatccttatgctcttttaaagccaatgattcccactctgttctctgccttgtctctctttgtcttaaaatgctttagtttccatcaggttcaagttcttgactattattctcttataagtagtaggcgtaaataatcaggagttagaattctctcagaagggtctatgatcagtattactttattaagaattacctttcattttctctttatgttattctttcacttttgtagattacatttaatagcttgttacctgtgattttattttaaaatatttattttgatatgatgcttaaatattatataaacatttggaaaagtaacaaatagagtaaattgttaatgtaaatagttggtgcttactttcatttatgtttattatcttaaagcaattgatagattttacatctttgatataaagcactgccatatttatattttaaaaggaaattagacattttatatgtagctcagattaatgacatttttattttgtgtattagtttttgcttttctgagctttttaaagtctaacaaatctttttagtcatcttttatatacttttagttccacatgaaataaatgttgttaagcctgtaggactggatgaatggggttgtgaaactgatttgacaagagaataatttacaaaaatcaaatgagtattgagaagccacagaaatatcaaaaatggtgacatcactattaggatgaaaattttatgaaattccaatgctccctttaaccatataattaaattacaaaggtatacataattaatctaataaaggatcatgaggaatgccaaaagctgaaattttagcaagtctggtgttttaaattcattataaactatttattaactaatgtaatgtcctcctctaagaccatattgtaagagtcttgttaaaatgatggattcaacttctgcctcggatgagaggttggaaatgtagctgcttttctttagaaaatatgtagctgtcatcatttggtactgcctaaaaagagttagactctattggcaattgatagagtattacccacggtgcttattattgtttatgagcttccattgtaatgattcctttttatttgtagcagcataattatttccaaagaccccagtatttgctgctatttttaaaactcccctgatgtacctgaacaagaggatttcctcacatcatttccttgtgtctggacatcaggggtaacaactgtacttactttacaggaagaaattttaaaactgaaaactacctgggatcatagtgtttctgtgattttatttaattgtgtatagtaattatccagtgccagaaaaaccgtcacttgcaaaatactttgcactcaaaatgtttttacaatgcttctaaatgttactggtttctgctttcttttgactacttgactgacaaaatgatctgactactccatttaagagcaaaggtaactcatgtttaagtaattaactgcttgttttaagtgattatatttcttccactgtttttgaaaaataatcaaagatagcattcattgagagacagtgacagatataatttactacatatattgatttttaaataaagttgccttaaataagtgtatgtaagcagtagtagttgctatgtactgatttacctcaaggtgcaaaataattaaacctgtacatattccatttacaaaataaattcagccctgcactttctttagatgccttgatttccagaatggagcttagtgctactgaataccctggccacagagccacctcaggatattcttttctccaccctagtttatttatttatagatatctgtttacaaagtctgtagtaaatcctgatgctgaccatctgaaatgtactttttttctgaatgctgtttcaatctaaaatagcagcttttgagaaaacaatgatgtaaattccttatgataaaaggatgattctatatattctttaatgatattaaatatgccgaagccaagcacacagtctttctaaagtgtgtgtatgtttgtgtgaatgtgaatgatactgatcttatatctgttaaaagttgttttaaaaagctgtggcatcccattgttcatatttgccaagtcttctgtaaagatgtctaggacgaaatattttatgtgctaatgcatgtatttgtaaaccagatttgtttaccactcaaaattaacttgttttcttcatccaaaaaagtttatgtcttccacgtacttaaattttctgtgtgggtataatatagctttctaatttttttctttcacaaaggcaggttcaaaattctgttgaaagaaaaatgctttctgaaactgaggtataacaccagagcttgctgtttaaaggattatatgatgtacatcagttctataaatgtgctcagcagtttaacatgtgaatcctgttttaaagtgctcagatttcaactgtgtaagccattgatataacgctgtaattaaaaatgtttatatgaaataacttaatgttttaaatttatttatgtagatcacatcatttttatcagtatgcagtgcaaatatgtgaaatgtcttttggtttattccaacaattatttattttagaaagtaagtttaaagactttaaggacattcaaagtttaaaatagtgttcaaattgcaaaatttggcaatcttcatataaattggtttcttttctaacttttcaaaaactaacattaaatgtcaattataggaaaacatagttggaaatgtaatcatcccaaagatcatttttaaaatgaaatttaattagcacatattgaacatttgacttaattgttaaaccccagttttgttttgtttttttaatcagatttttgcacactgattagtttttgtgttgtggcttttgttgctttattattcaaggtttttttttttctttccccatgggggagattgtcttccaatgtttaactacgtttaaataaataaaaattgaattttattgttcatttatataaaatctgataccttgatgtaatttcacaatacagttccaatttttatggcttttataattacaatgatattttcttctataataaaatccaaagtaaacatttaaattgtagaactgatatttttcatttatatgaagtataagcctctactgggtctatattgtgaatcatcctgcctttcaaatttgtttcataattgttagatgaaaactatttttttggagatgttactgaagttgattgagcaataaaagtctacttaattaaaaaaaaaaaaaaaaaaaaaaaaaaaa

SEQ ID NO: 1851 - protein, 1214 aa, Homo sapiens
MERFRLEKKLPGPDEEAVVDLGKTSSTVNTKFEKEELESHRAVYIGVHVPFSKESRRRHRHRGHKHHHRRRKDKESDKEDGRESPSYDTPSQRVQFILGTEDDDEEHIPHDLFTEMDELCYRDGEEYEWKETARWLKFEEDVEDGGDRWSKPYVATLSLHSLFELRSCILNGTVMLDMRASTLDEIADMVLDNMIASGQLDESIRENVREALLKRHHHQNEKRFTSRIPLVRSFADIGKKHSDPHLLERNGEGLSASRHSLRTGLSASNLSLRGESPLSLLLGHLLPSSRAGTPAGSRCTTPVPTPQNSPPSSPSISRLTSRSSQKSQRQAPELLVSPASDDIPTVVIHPPEEDLEAALKGEEQKNEENVDLTPGILASPQSAPGNLDNSKSGEIKGNGSGGSRENSTVDFSKVDMNFMRKIPTGAEASNVLVGEVDFLERPIIAFVRLAPAVLLTGLTEVPVPTRFLFLLLGPAGKAPQYHEIGRSIATLMTDEIFHDVAYKAKDRNDLLSGIDEFLDQVTVLPPGEWDPSIRIEPPKSVPSQEKRKIPVFHNGSTPTLGETPKEAAHHAGPELQRTGRLFGGLILDIKRKAPFFLSDFKDALSLQCLASILFLYCACMSPVITFGGLLGEATEGRISAIESLFGASLTGIAYSLFAGQPLTILGSTGPVLVFEKILYKFCRDYQLSYLSLRTSIGLWTSFLCIVLVATDASSLVCYITRFTEEAFAALICIIFIYEALEKLFDLGETYAFNMHNNLDKLTSYSCVCTEPPNPSNETLAQWKKDNITAHNISWRNLTVSECKKLRGVFLGSACGHHGPYIPDVLFWCVILFFTTFFLSSFLKQFKTKRYFPTKVRSTISDFAVFLTIVIMVTIDYLVGVPSPKLHVPEKFEPTHPERGWIISPLGDNPWWTLLIAAIPALLCTILIFMDQQITAVIINRKEHKLKKGAGYHLDLLMVGVMLGVCSVMGLPWFVAATVLSISHVNSLKVESECSAPGEQPKFLGIREQRVTGLMIFILMGLSVFMTSVLKFIPMPVLYGVFLYMGVSSLKGIQLFDRIKLFGMPAKHQPDLIYLRYVPLWKVHIFTVIQLTCLVLLWVIKVSAAAVVFPMMVLALVFVRKLMDLCFTKRELSWLDDLMPESKKKKEDDKKKKEKEEAERMLQDDDDTVHLPFEGGSLLQIPVKALKYSPDKPVSVKISFEDEPRKKYVDAETSL

SEQ ID NO: 1852 - DNA, 2236 bp, Homo sapiens
cctggcccggtcgcggtcgcggctctttccagctcctggcagccgggcacccgaaggaacgggtcgtgcaacgacgcagctggacctggcccagccatggaccgaaaagtggcccgagaattccggcataaggtggattttctgattgaaaatgatgcagagaaggactatctctatgatgtgctgcgaatgtaccaccagaccatggacgtggccgtgctcgtgggagacctgaagctggtcatcaatgaacccagccgtctgcctctgtttgatgccattcggccgctgatcccactgaagcaccaggtggaatatgatcagctgaccccccggcgctccaggaagctgaaggaggtgcgtctggaccgtctgcaccccgaaggcctcggcctgagtgtgcgtggtggcctggagtttggctgtgggctcttcatctcccacctcatcaaaggcggtcaggcagacagcgtcgggctccaggtaggggacgagatcgtccggatcaatggatattccatctcctcctgtacccatgaggaggtcatcaacctcattcgaaccaagaaaactgtgtccatcaaagtgagacacatcggcctgatccccgtgaaaagctctcctgatgagcccctcacttggcagtatgtggatcagtttgtgtcggaatctgggggcgtgcgaggcagcctgggctcccctggaaatcgggaaaacaaggagaagaaggtcttcatcagcctggtaggctcccgaggccttggctgcagcatttccagcggccccatccagaagcctggcatctttatcagccatgtgaaacctggctccctgtctgctgaggtgggattggagataggggaccagattgtcgaagtcaatggcgtcgacttctctaacctggatcacaaggaggctgtaaatgtgctgaaaaatagccgcagcctgaccatctccattgtagctgcagctggccgggagctgttcatgacagaccgggagcggctggcagaggcgcggcagcgtgagctgcagcggcaggagcttctcatgcagaagcggctggcgatggagtccaacaagatcctccaggagcagcaggagatggagcggcaaaggagaaaagaaattgcccagaaggcagcagaggaaaatgagagataccggaaggagatggaacagattgtagaggaggaagagaagtttaagaagcaatgggaagaagactggggctcaaaggaacagctactcttgcctaaaaccatcactgctgaggtacacccagtaccccttcgcaagccaaagtatgatcagggagtggaacctgagctcgagcccgcagatgacctggatggaggcacggaggagcagggagagcaggatttccggaaatatgaggaaggctttgacccctactctatgttcaccccagagcagatcatggggaaggatgtccggctcctacgcatcaagaaggagggatccttagacctggccctggaaggcggtgtggactcccccattgggaaggtggtcgtttctgctgtgtatgagcggggagctgctgagcggcatggtggcattgtgaaaggggacgagatcatggcaatcaacggcaagattgtgacagactacaccctggctgaggctgacgctgccctgcagaaggcctggaatcagggcggggactggatcgaccttgtggttgccgtctgccccccaaaggagtatgacgatgagctgaccttcttgctgaagtccaaaaggggaaaccaaattcacgcgttaggaaacagtgagctccggccccacctcgtgaacacaaagcctcggaccagccttgagagaggccacatgacacacaccagatggcatccttgggacctgaatctatcacccaggaatctcaaactccctttggccctgaaccagggccagataaggaacagctcgggccacttttttgaaggccaatgtggaggaaagggagcagccagccgtttgggagaagatctcaaggatccagactctcattcctttcctctggcccagtgaatttggtctctcccagctttgggggactccttccttgaaccctaataagaccccactggagtctctctctctccatccctctcctctgccctctgctctaattgctgccaggattgtcactccaaaccttactctgagctcattaataaaataaacagatttattttccagcttaaaaaaa

SEQ ID NO: 1853 - protein, 652 aa, Homo sapiens
MDRKVAREFRHKVDFLIENDAEKDYLYDVLRMYHQTMDVAVLVGDLKLVINEPSRLPLFDAIRPLIPLKHQVEYDQLTPRRSRKLKEVRLDRLHPEGLGLSVRGGLEFGCGLFISHLIKGGQADSVGLQVGDEIVRINGYSISSCTHEEVINLIRTKKTVSIKVRHIGLIPVKSSPDEPLTWQYVDQFVSESGGVRGSLGSPGNRENKEKKVFISLVGSRGLGCSISSGPIQKPGIFISHVKPGSLSAEVGLEIGDQIVEVNGVDFSNLDHKEAVNVLKNSRSLTISIVAAAGRELFMTDRERLAEARQRELQRQELLMQKRLAMESNKILQEQQEMERQRRKEIAQKAAEENERYRKEMEQIVEEEEKFKKQWEEDWGSKEQLLLPKTITAEVHPVPLRKPKYDQGVEPELEPADDLDGGTEEQGEQDFRKYEEGFDPYSMFTPEQIMGKDVRLLRIKKEGSLDLALEGGVDSPIGKVVVSAVYERGAAERHGGIVKGDEIMAINGKIVTDYTLAEADAALQKAWNQGGDWIDLVVAVCPPKEYDDELTFLLKSKRGNQIHALGNSELRPHLVNTKPRTSLERGHMTHTRWHPWDLNLSPRNLKLPLALNQGQIRNSSGHFFEGQCGGKGAASRLGEDLKDPDSHSFPLAQ

SEQ ID NO: 1854 - DNA, 510 bp, Homo sapiens
taaaactaattcacatccactggtttattattgatcacggggcatttcacatcgacactaaaattctttattgcaagttttacaataatcaagtaaattcagtccaaaaacacaataaccacgataggggtggggagagattctacctatagactgcctctctgaactgaaagttcattttgattttcttttggctcctcaaactgaacagctctgagaggctctccagatgcatttagctttgtctgctgtcttcgccccctctcctcccacacccccccccaacaataatacaaaagaacttcatagctttgttctccttaaaatgacttccccctcactaacctcccctggtgcattttcaatgcaaaaggcctaaggaaagagggggggaaggaggaggaggagaaggatgagaattggctttaaaatttctttccttttttcttttcctcatttcccctgaaattcacccaagccagaccatcacaccttgcaatatataatttt

SEQ ID NO: 1855 - DNA, 7931 bp, Homo sapiens
gggagagggagacgcaggcggcgaaacggcagaggagccgagccccctccgcccaaggcgccctccctccgtccgcgcacaggcgccgtcgcttggaggagcaaggtgcctcccagcccgcaggggcgccgcgcgcaagcccgcgggctcttcggtggctctgccccgggactgcacctggaggcggccccggacggggatggtcagcggctgctgccgtctggctcgcgagcgggacgctgtgagggcaccatggcgctgactcccgggtgggggtcctcggcggggccggtccggccggagctctggctgctgctgtgggcagccgcgtggcgcctgggtgcctcggcgtgccccgccctctgcacctgcaccggaaccacggtggactgccacggcacggggctgcaggccattcccaagaatatacctcggaacaccgagcgcctggaactcaatggcaacaacatcactcggatccataagaatgactttgcggggctcaagcagctgcgggtgctgcagctgatggagaaccagattggagtagtggaacgtggtgcttttgatgacatgaaggagctggagcggctgcgactgaaccgaaaccagctgcacatgttaccggaactgctgttccagaacaaccaggctttgtcaagactggacttgagtgagaacgccatccaggccatccccaggaaagcttttcggggagctacggaccttaaaaatttacagctggacaagaaccagatcagctgcattgaggaaggggccttccgtgctctgcgggggctggaggtgctgaccctgaacaacaacaatatcaccaccatccccgtgtccagcttcaaccatatgcccaagctacggaccttccgcctgcactccaaccacctgttttgcgactgccacctggcctggctctcgcagtggctgaggcagcggccaaccatcgggctcttcacccagtgctcgggcccagccagcctgcgtggcctcaatgtggcagaggtccagaagagtgagttcagctgctcaggccagggagaagcggggcgcgtgcccacctgcaccctgtcctccggctcctgcccggccatgtgcacctgcagcaatggcatcgtggactgtcgtggaaaaggcctcactgccatcccggccaacctgcccgagaccatgacggagatacgcctggagctgaacggcatcaagtccatccctcctggagccttctcaccctacagaaagctacggaggatagacctgagcaacaatcagatcgctgagattgcacccgacgccttccagggcctccgctccctgaactcgctggtcctctatggaaacaagatcacagacctcccccgtggtgtgtttggaggcctatacaccctacagctcctgctcctgaatgccaacaagatcaactgcatccggcccgatgccttccaggacctgcagaacctctcactgctctccctgtatgacaacaagatccagagcctcgccaagggcactttcacctccctgcgggccatccagactctgcacctggcccagaaccctttcatttgcgactgtaacctcaagtggctggcagacttcctgcgcaccaatcccatcgagacgagtggtgcccgctgtgccagtccccggcgcctcgccaacaagcgcatcgggcagatcaagagcaagaagttccggtgctcagccaaagagcagtacttcattccaggcacggaggattaccagctgaacagcgagtgcaacagcgacgtggtctgtccccacaagtgccgctgtgaggccaacgtggtggagtgctccagcctgaagctcaccaagatccctgagcgcatcccccagtccacggcagaactgcgattgaataacaatgagatttccatcctggaggccactgggatgtttaaaaaacttacacatctgaagaaaatcaatctgagcaacaacaaggtgtcagaaattgaagatggggccttcgagggcgcagcctctgtgagcgagctgcacctaactgccaaccagctggagtccatccggagcggcatgttccggggtctggatggcttgaggaccctaatgctgcggaacaaccgcatcagctgcatccacaacgacagcttcacgggcctgcgcaacgtccggctcctctcgctctacgacaaccagatcaccaccgtatccccaggagccttcgacaccctccagtccctctccacactgaatctcctggccaaccctttcaactgcaactgccagctggcctggctaggaggctggctacggaagcgcaagatcgtgacggggaacccgcgatgccagaaccctgactttttgcggcagattcccctgcaggacgtggccttccctgacttcaggtgtgaggaaggccaggaggaggggggctgcctgccccgcccacagtgcccacaggagtgcgcctgcctggacaccgtggtccgatgcagcaacaagcacctgcgggccctgcccaagggcattcccaagaatgtcacagaactctatttggacgggaaccagttcacgctggttccgggacagctgtctaccttcaagtacctgcagctcgtggacctgagcaacaacaagatcagttccttaagcaattcctccttcaccaacatgagccagctgaccactctgatcctcagctacaatgccctgcagtgcatcccgcctttggccttccagggactccgctccctgcgcctgctgtctctccacggcaatgacatctccaccctccaagagggcatctttgcagacgtgacctccctgtctcacctggccattggtgccaaccccctatactgtgactgccacctccgctggctgtccagctgggtgaagactggctacaaggaaccgggcattgctcgttgtgctgggccccaggacatggagggcaagctgctcctcaccacgcctgccaagaagtttgaatgccaaggtcctccaacgctggctgtccaggccaagtgtgatctctgcttgtccagtccgtgccagaaccagggcacctgccacaacgacccccttgaggtgtacaggtgcgcctgccccagcggctataagggtcgagactgtgaggtgtccctggacagctgttccagtggcccctgtgaaaatgggggcacctgccatgcacaggagggcgaggatgccccgttcacgtgctcctgtcccaccggctttgaaggaccaacctgtggggtgaacacagatgactgtgtggatcatgcctgtgccaatgggggcgtctgtgtggatggtgtgggcaactacacctgccagtgccccctgcagtatgagggaaaggcctgtgagcagctggtggacttgtgctctccggatctgaacccatgtcaacacgaggcccagtgtgtgggcaccccggatgggcccaggtgtgagtgcatgccaggttatgcaggtgacaactgcagtgagaaccaggatgactgcagggaccaccgctgccagaatggggcccagtgtatggatgaagtcaacagctactcctgcctctgtgctgagggctacagtggacagctctgtgagatccctccccatctgcctgcccccaagagcccctgtgaggggactgagtgccagaatggggccaactgtgtggaccagggcaacaggcctgtgtgccagtgcctcccaggcttcggtggccctgagtgtgagaagttgctcagtgtcaactttgtggatcgggacacttacctgcagttcactgacctgcaaaactggccacgggccaacatcacgttgcaggtctccacggcagaggacaatgggatccttctgtacaacggggacaacgaccacattgcagttgagctgtaccagggccatgtgcgtgtcagctacgacccaggcagctaccccagctctgccatctacagtgctgagacgatcaacgatgggcaattccacaccgttgagctggttgcctttgaccagatggtgaatctctccattgatggcgggagccccatgaccatggacaactttggcaaacattacacgctcaacagcgaggcgccactctatgtgggagggatgcccgtggatgtcaactcagctgccttccgcctgtggcagatcctcaacggcaccggcttccacggttgcatccgaaacctgtacatcaacaacgagctgcaggacttcaccaagacgcagatgaagccaggcgtggtgccaggctgcgaaccctgccgcaagctctactgcctgcatggcatctgccagcccaatgccaccccagggcccatgtgccactgcgaggctggctgggtgggcctgcactgtgaccagcccgctgacggcccctgccatggccacaagtgtgtccatgggcaatgcgtgcccctcgacgctctttcctacagctgccagtgccaggatgggtactcgggggcactgtgcaaccaggccggggccctggcagagccctgcagaggcctgcagtgcctgcatggccactgccaggcctcaggcaccaagggggcacactgtgtgtgtgaccccggcttttcgggcgagctgtgtgagcaagagtccgagtgccggggggaccctgtccgggactttcaccaggtccagaggggctatgccatctgccagaccacgcgccccctgtcatgggtggagtgccggggctcgtgcccaggccagggctgctgccagggccttcggctgaagcggaggaagttcacctttgagtgcagcgatgggacctcttttgccgaggaggtggaaaagcccaccaagtgtggctgtgccctctgcgcatagcgctgggcgtggacaggccggtgagggcgggcaaggggccccagccgctgcagcagcggagacagtcgccagcagctgggctggggtgcaggtcatcacaggacggctcctgggcagctgggccctcctgggtggggtggtgccagagcagccttttaaaagcaaattgcgccatagctgggggcagcgggggtgggcgaggcctgagctgcgggctgccctctccggaagtgccttgcacaaataggcgcttaataaatatttgttgagtgaatgtgtgcgtgaggtcaggccaagaagtgcagaacgatgacacccctccttacctgctatctgaatctggagaagaaaaatgacagccttccaaaccaacccttccctttggcctgtggcccaggctggcttggaactgggtctgtggccccagaagcctcttacccctctgcgggcaaccatgaagtactgtcagcctccccgggaagccagcctggttcattctgctgctacagaatctgctggtggtaggccaggctctggagcgggggtgccgcctcctgctggccagggagggtcggacccttgccccctgggctgactggcagctctgcagccacggcttgggaacgaggctgtgggtggaggtggttcttaggaccaggcctctgaatcctaaagttctagcatgactactgtagctgcgagggcttatgtggaggaaacagtcacaggggctgctcagggtggcagaccccactaaagagggcagagggttctttgctctagataaacaaacatcatctgcctccagacactggccacagtaggagtattggtcctgggcttccccagccaccagtcagccacaagctgtcggtgacctattggtagagggactgggtgtgagggtctgggccagggtgcttgacctgggagcagctggttcagagtccttcacaccgcaggccagtagggagcagtggaagggacagtgctccaggcattgggaagtccctgctggctctatcactcggggcaaacttctccccacctgggccttgggttcttcagctataaaatggccagaggtggggggcgggatgactaaaggaacagtgcagactcccccactgtggtcttgggaggccagaggagttagaagacctatctatctatctatctatctacattgatcacatcaaaagtatttatgtgcctaacccggggctggggattgtggacgttctggcctaatggacagatgtgaactcatcccagagcatcgcaggaatgaccaggatgcccgggaagagttgagctgagtgggggctccagccacagacagcggcccaggccagggagttgctggcaacgaaggagccagtggtggaagaagaagaggccctgaatatacgattgcctgcccacgttgtcttctcttccatacacagtgaaaatgtagaaagatggtttgtgaggccaaactgtgaatgggctaaagggaggcaaagttgcactctccttccccagagggctcaccaagagggcacacccccgggggttctggtgggcaacgggggtgagcatgtccctgccctggctccctccatctgtgaccaggaggcatggctgggtgtatgttcaggtgaggctcagagtggcattgtgtccctgtcccctgcccagggcagtgaggggagcccttgatgctgattagaaggctagaactggggtagaggtgcctggcatgtctcatgccatggggactcaatctagcaactgtgagtcctggggtccctgtgatgggaagagggcagtgccctgcccaatgtggcaggtgtcctcatggcaggatctgcccctcaccagggggctgggatctacttgcttggagctctgagcaaggccacaatgcccgcccccacccccaagtagactgcagcctgggcctcatggggcttctcccaggcccacatggcatccctctctgagtttccaggccaccgtgggaccctgcagagcatctgcaccgggctggatagggcagaaaagctcaagggcagctagcttgcctcttccctggaagaaaggtgctctgggactcaccaaccctgagaaagatagctttcctggccaccaccattccccaccaccctggagaagccaattcccaggcttgaagggcactggctggcaggaggcctcttcattctgcaggaggtggaaaggacacctgtagacaggtgatgctcacccctcacctggcgccatggggctgggaagtgagcggctggcatgtttgttcctagggagcaccatgtgagcttaaggctcccctgaccggccccaccacatggcccagcctcctagcacagcagcgctgacctcagtgcagtctgaggattggaatccaccatgagatgatgtgagagctgtgtgccccaggatcaactttttctccaacttggccatcagccagcgagttgctaaggacctgagtcagcactcacgttgcctattcacactccgcttgaaagtccggaaggtggctactgcaaaatcacccctctgagaagtcctctctccacatcttgtccccctttgtgaagacccctagttcgctctgcattttaggcatgaagagatacagcagggtgcgtccggagggagctgtggccttgcaacaccactggcaacagggccggggctcccggtgaaggtgtcaggaagtggaaaaggctggactttgtctcctctttgcctgctggtagcctaaccgcaaaagtatctctttatacagaatacttacagattctaatatatatttgtatttcattttgttacagtatttttatatgttaaagtcaacatccagcgtcttgttttgcctttcagatgctatgtggtcgtggcacgttttgttgggggtttctgtagtcgtcttgtttggatcaactcctagaggctggtttagaacaggcccatgagggagctgcacctgccctggaagtattgttttagactatgtcgatattgtctgttgtcttccatgtgaacatgacattgagtcactctgc

SEQ ID NO: 1856 - protein, 1618 aa, Homo sapiens
GRGRRRRRNGRGAEPPPPKAPSLRPRTGAVAWRSKVPPSPQGRRAQARGLFGGSAPGLHLEAAPDGDGQRLLPSGSRAGRCEGTMALTPGWGSSAGPVRPELWLLLWAAAWRLGASACPALCTCTGTTVDCHGTGLQAIPKNIPRNTERLELNGNNITRIHKNDFAGLKQLRVLQLMENQIGVVERGAFDDMKELERLRLNRNQLHMLPELLFQNNQALSRLDLSENAIQAIPRKAFRGATDLKNLQLDKNQISCIEEGAFRALRGLEVLTLNNNNITTIPVSSFNHMPKLRTFRLHSNHLFCDCHLAWLSQWLRQRPTIGLFTQCSGPASLRGLNVAEVQKSEFSCSGQGEAGRVPTCTLSSGSCPAMCTCSNGIVDCRGKGLTAIPANLPETMTEIRLELNGIKSIPPGAFSPYRKLRRIDLSNNQIAEIAPDAFQGLRSLNSLVLYGNKITDLPRGVFGGLYTLQLLLLNANKINCIRPDAFQDLQNLSLLSLYDNKIQSLAKGTFTSLRAIQTLHLAQNPFICDCNLKWLADFLRTNPIETSGARCASPRRLANKRIGQIKSKKFRCSAKEQYFIPGTEDYQLNSECNSDVVCPHKCRCEANVVECSSLKLTKIPERIPQSTAELRLNNNEISILEATGMFKKLTHLKKINLSNNKVSEIEDGAFEGAASVSELHLTANQLESIRSGMFRGLDGLRTLMLRNNRISCIHNDSFTGLRNVRLLSLYDNQITTVSPGAFDTLQSLSTLNLLANPFNCNCQLAWLGGWLRKRKIVTGNPRCQNPDFLRQIPLQDVAFPDFRCEEGQEEGGCLPRPQCPQECACLDTVVRCSNKHLRALPKGIPKNVTELYLDGNQFTLVPGQLSTFKYLQLVDLSNNKISSLSNSSFTNMSQLTTLILSYNALQCIPPLAFQGLRSLRLLSLHGNDISTLQEGIFADVTSLSHLAIGANPLYCDCHLRWLSSWVKTGYKEPGIARCAGPQDMEGKLLLTTPAKKFECQGPPTLAVQAKCDLCLSSPCQNQGTCHNDPLEVYRCACPSGYKGRDCEVSLDSCSSGPCENGGTCHAQEGEDAPFTCSCPTGFEGPTCGVNTDDCVDHACANGGVCVDGVGNYTCQCPLQYEGKACEQLVDLCSPDLNPCQHEAQCVGTPDGPRCECMPGYAGDNCSENQDDCRDHRCQNGAQCMDEVNSYSCLCAEGYSGQLCEIPPHLPAPKSPCEGTECQNGANCVDQGNRPVCQCLPGFGGPECEKLLSVNFVDRDTYLQFTDLQNWPRANITLQVSTAEDNGILLYNGDNDHIAVELYQGHVRVSYDPGSYPSSAIYSAETINDGQFHTVELVAFDQMVNLSIDGGSPMTMDNFGKHYTLNSEAPLYVGGMPVDVNSAAFRLWQILNGTGFHGCIRNLYINNELQDFTKTQMKPGVVPGCEPCRKLYCLHGICQPNATPGPMCHCEAGWVGLHCDQPADGPCHGHKCVHGQCVPLDALSYSCQCQDGYSGALCNQAGALAEPCRGLQCLHGHCQASGTKGAHCVCDPGFSGELCEQESECRGDPVRDFHQVQRGYAICQTTRPLSWVECRGSCPGQGCCQGLRLKRRKFTFECSDGTSFAEEVEKPTKCGCALCA

SEQ ID NO: 1857 - DNA, 397 bp, Homo sapiens
  misc_feature (364)..(364): n is a, c, g, or t
aaatggccaaaataaattgtattgctaacttagatggccacagatgggggcaggggtggagagaggagaaattgaaaacaccacaaagaccccgcaatggctagaacttgaaatctctggatattgcaacaatagcagcctccttaagtcagcaaaaagataaagattgatccaatgttctatattacagaacagagcagattgtcaatatagcaaataaagttaccgttgagtggactgcgctgtctaagctgcttggttggccttaagtgccgacaattaagagatgaaggcaatgagaactgaaacaaacatttaagttcaagacccagttttactgacactgggactattactatatccnctttgggcctcagtttacctatccgtaacatta

SEQ ID NO: 1858 - DNA, 2285 bp, Homo sapiens
caggggcctggggctcctgggatttctgtgtgtttggaagcctctgtttttggagtggggggcgtggaaggcgggaggggctgacagtgcctggggccagagctgggcgaaggaggacatcctcactggacgagcactgcaggcctgacgagaggctccgggcagctgagggctgaagcgcctcgggatgccccacactgcccagagccacgggtcttgctgtgctgggggtggggtggccccaggcagctgccactgcccaggtgtgagtcgctgcagacctggtccctgagggtgggaggcctgcttgtgctgaagctgccatgtggtctggcccccagaagggctcctgagcgtagggagttgagccccgcagccgtggcggcatctcctcctccttcctccgccccatgcccagccttgcttccggctggtggcatgccttggggccgggcagcaggtgagaagctgcccccggagggaggggccaagggctgggtcagtctggcctgaggggtggatggctggccctgggggaaggctgggcctgggaggccctgtggacagcaggcctgaggccacgaggtcctggggccacccctctcctgctctgggtgtccttctcagagaagatggcagaaggctgcaggccctagaggggacgacgggctggggacgccctgagcttcctggctgtgtggcaggtgctggggaagctctctgggccatagggacctggctcccctctgagaggcccgcctgccctggggcacccagggctgtgctggtggcctgaggctgggaacttgggttcctgggctctgctggcgcctgggctttgtgggggccgaaggtggttgccccgccgggcagggggctgtgtgggccctcgtggggccaccttcctgtcagtgcccgagggacggtgggacagttgcccctgcgccaagggagcccactgccatcccccgtgggctggcgctgcagtcgcgcaccctgtgttgcctgctgacttgcttatgtctgtttggaagctgcttctgtttggccacaggcctgtgttcctgggctgatggccacagagctgacacttggggtttgagttccagacttgcagaccctgggatccgcttactcctccgcgccacggctgctgtgcttccagaggtggcgtgatgcctcccggggccacggtggggtgaaggatggcgagccggacataccattgttggatgtattttttttaaaacagcaataattagccattttaaaggagggatgtacctgtgtgtgtgcatgtgcacgtgtttgagcgtgtgtgtgtgtgcaagtgggttcttggatatgtgtagtgtgagcatgtgtgcatgtgtgagcctgtgcacgtgcatgttgtaggtgcataagcatgtacacgcgtgagcatgcatgtgtgtgtacacgtgtataggtgtacatgtgcatgagttgtgtacatgcgtgagcacgtgtatagatgtacgtgtgtgtgcgcatgtgtgcgtgtacatgtgtttgtgtcttgggtatgcataagcatgcacgtgtgtatgaatgtgcgtgtgtatgcatgagcacgtatgcatgtgtgatgcgcatgttcttgtgtacttctctgagggggcacatatgtatgagtgtatgagtgcatacatatgcatatggtgtacgtgtgtgtactttgtgtgtgggcatgtatgcgtatgagtacttgtgtgtggctggtgtatgggtgagcatgcacatgtgtatggatgcatatgtgagctgtacatgtagagtgtacatgtgtgttgcatgggcatgcatgcgtgcgagtgcctgtgtgtgtacttgcatatatgtggctgtgcaggtacccggcggtggtgggctggcagtgcccggggaagcaggtcctgctcacggcttccctgctgggccccaggccccgggctgagcctccctggcccctcttgcccctcagtggagcagggcctgggtggagggcctgggcagctccagggcaggtccggggaggccaggcttggggagcacagggggtggggttcacctgctgctgtttgttcccgaaactgtactgtgagcccacggcgggggcagattgttctgaggccccagatgtgccaaaacagcccccagggtgggggcgagcgagttctgaggagaggggctgcgggggccgggggtgggtgtgtgcccctcccctgaatggcccccaatgctgctgtttttcaataaaaccagagttgaaggcaaaaaaaaaa

SEQ ID NO: 1859 - DNA, 4196 bp, Homo sapiens
cggccctcccatgtgcagcccggccagccgggctctcctcctcgcggcggatgggtgaccttttcctggcacgggcaggctgtgggaggcagcggagcaggcgatgaagaagaagcagcagcatcccggcggcggcgcggatccctggccccatggggcccctatggggggcgcccctccgggcctgggcagctggaagcgtcgggtgcccctgctgcctttcctgcgcttctccctccgggactacggcttctgcatggccaccctgctggtcttctgcctgggctccctcctctatcagctcagcgggggaccccctcgcttcctgctcgacctgcggcagtacttgggaaattccacttacttggatgaccatggaccacctcctagtaaggtactacctttcccaagccaggtggtgtacaacagggtaggcaagtgtgggagccgtactgtggtcttgcttctgagaatcttgtcggagaagcacggatttaatttggtcacatcagacattcacaacaaaaccaggcttactaaaaatgaacaaatggaactgattaaaaatataagtactgccgaacaaccctatttattcactcgacatgttcatttcctcaacttctcaaggtttggaggagaccagcctgtctacatcaacatcattagagaccccgtcaaccggttcttatccaactattttttccgtcgctttggagactggagaggggaacaaaatcacatgatccgcacccccagcatgaggcaggaggagcgctacctggatatcaatgagtgtattcttgaaaactatcccgagtgctccaaccccaggttattttacatcattccgtacttttgtggacagcatcccagatgcagggagcctggtgaatgggcccttgagagagcaaagctgaacgtgaatgaaaacttcctgctcgtggggattcttgaagagttggaagatgtgctgctgttactggaaagatttttacctcattacttcaagggcgtgctcagtatctacaaagacccagagcacaggaagcttggaaacatgactgtgacggtgaagaagactgtcccctctcctgaggctgtgcagatcctctaccagcggatgagatacgagtacgagttttaccactacgtcaaagagcagttccacctgctgaagcgcaagtttggacttaagtctcacgtcagcaagccccccctgaggccacacttctttatcccaactccactggaaaccgaggagccaatcgacgatgaagaacaggatgatgaaaagtggctggaagatatttataagaggtgatgtgactgtgttgcctctatggctttatctcccttttccagaaagttctttgtttggggaagtaaaatccttaagggactaaattaatgcttgggtgcattaaaaagaacaaaacattcccacatgttggggtcattgggagatgcccggttttgcgggttttatttgtttaattttattctgtgttttctcttggctctttgggtctttcccgggtacactagatggctccatcccaaggcatcttgtcataaaacagctttcccccaccccatatcatgggaaaagggggagaaatatagcccctagcctaataacttatcatttgtaaaatgacttataaaaatattacctcaatggtaggagacatccagacttgtatatttcagtggaaatacaaaaccacttcagagaccagggtatctcctctggaaggatctaagagaaggtaagacagattaggacatcgaaaaggaggatggagccaggtgccatggcttgagcctataatccgaggctgaggtgggaggatcacttgagcccaggagtttgaggttgcagtgagctgtgatcacaccactgcactccagcctgggtgacagagtgagactctgtctcaattaattttttttttttaaaggaggaggatctccatgggtaagtggtttctacccgcatgggtagagttctgcctctggtccttctcagggggcactttcaccaagagcagtgtaattatctctgaaagagcaagtcagcttgtgccgcatccccaaccaatccacagcctggagtacctttcaaggtcaaagtgcatggccagctccattgagacattccatttcaaagcaccgtgctgacagatatcaaagtactctagcagggaaaataatttgtttgctgtgtaaggaagaatgtagacaagacagataaatctgaaggtcatgtggcatcagggaaagggcatggctgtgtcttttgcacccaatatgaaacatcttctcccaacactgctttaatggaagttctaggaaccaatttagctcaggcatttgactcctacagcagaagttctgagcctgaccacagatggtgtgtaatctatcaaacacacccctggccaagttgggtcctataggacctggtactatgtactattgtaacttctagttccctaagaggtacctgttttcagtaaaaaggggtcctgagttctgtgcaggtggaagagctacccgagaactacctgagttctgtgcaggtagagtcccatttcttatgggacctgtgtgctcctgagaactcttacttgagacatcaaaaagaagcagcaagagcttctgggacagagactgcttggccagctttgtaagtaagtggctgcctccaatgtgatgtgagtacatgttgggcagtctcactgtcctaaggtatgtcttctttccacctcccactgcccctcccctgccacctatcaatgatgccttggttcagtcattagaaatctgttgctttgagttctgaaatattttcaccttaaaaaaaatgctgaaaatacacattctcctgggaagacgataaacagctagctaagaagccgaggttcagtggtggcagcaggaaggacactgccacaaattttgtctatttcatatttgtcccctagagccagccctagcaaatgtgtgagttgggagtagttaatagtaaataagactctgactttacacaagctacacattttatacttttcataaaccacaaagtctctctagaattttttctgccttcactaaaattggactgtagccaagatataaagcaagtcatttggaacctgccgagtgagcactgaagctactttatcatgagatgtgtgttaagaaggctgcagcccacaggagtccagggaaggcggggaccacagaggcacagagtccagcacttggccgctcatgggccttctttctgcctcagaggacgggggcagagaagtgatgaagggaaatgttcttagaggaggaaatatcctttgtcctgttcagagagaccagggccctaccattaggcatactttcagaagcaacctggagaacagctatcaatcatattcaaaaccagtacaagaactgctgcctggtaccctgtgagtcatttctatgaaattccatataaagaatgatgataagtttacacactgtgcaatctcacaatctgaaaataaagttgagttggctgtgttttctctgctcttgtcagaacattgggacaattggtcgttcaaaaacattcatcctcttactgcaagtttatctgggtacttttacctgtgtgttcaaaggcatttcttttcagcagtgatcattataacttcacaaaaaaagatgctgacggatttacttacagggccttaatgttattttgtcccagccaacaccctctaggtcctaaaagtcaaggtacttcagtttatttggcaaacatgacaacatttttttggccctgggcccaacagtttgtacttcatgaaacatattgtacattttacatagtttaatttaaaaaataccttttaagctagttgatctttgactgtcttatttattataacctttcagcacattccaaggttttagttactcaggaaggagttaattaaaatgattttattttggtctgatggatgttttttaaaaggaaaattattattatgaaccttcagcctactttcttgagtgccgtaaaagtgcttgtaaatctttttttttttttaagaagaaagaaaaaaatggtgtttgacgttgatggaaattcaaaaatatatatggaactgaaacattaacttagctaaaataaaagcaatctgtgtttg

SEQ ID NO: 1860 - protein, 406 aa, Homo sapiens
MKKKQQHPGGGADPWPHGAPMGGAPPGLGSWKRRVPLLPFLRFSLRDYGFCMATLLVFCLGSLLYQLSGGPPRFLLDLRQYLGNSTYLDDHGPPPSKVLPFPSQVVYNRVGKCGSRTVVLLLRILSEKHGFNLVTSDIHNKTRLTKNEQMELIKNISTAEQPYLFTRHVHFLNFSRFGGDQPVYINIIRDPVNRFLSNYFFRRFGDWRGEQNHMIRTPSMRQEERYLDINECILENYPECSNPRLFYIIPYFCGQHPRCREPGEWALERAKLNVNENFLLVGILEELEDVLLLLERFLPHYFKGVLSIYKDPEHRKLGNMTVTVKKTVPSPEAVQILYQRMRYEYEFYHYVKEQFHLLKRKFGLKSHVSKPPLRPHFFIPTPLETEEPIDDEEQDDEKWLEDIYKR

SEQ ID NO: 1861 - DNA, 541 bp, Homo sapiens
tcgggttggtgtcatggcagctgcggggagccgcaagaaggcgcctggcggagctgacggtggacgagttcctagcttcgggctttgactccgagtccgaatccgagtcctgaaaattctccacaagcggagacacgggaagcacgcgaggctgcccggagtccggataagccgggcgggagcccctcggccagccggcgtaaatggccgtgcctctgagcacaaagaccagctctctcggctgaaggacagagaccccgagttctacaagttcctgcaggagaatgaccagagcctgctaaacttcagcgactcggacagctctgaggaggaagaggggccgttccactccctgccagatgtgctggaggaagccagtgaggaggaggatggagcggaggaaggagaagatggggacagagtccccagagggctgaaggggaagaagaattctgttcctgtgaccgtcgccatggttgagagatggaagcaggcagcaaagcaacgcctcactccaaagctgttccatgaagtggtacag

SEQ ID NO: 1862 - DNA, 361 bp, Homo sapiens
  misc_feature (301)..(302): n is a, c, g, or t
  misc_feature (331)..(331): n is a, c, g, or t
  misc_feature (355)..(355): n is a, c, g, or t
tggatttgacttattcagtatacaaaaatagagatcattaatgcaatcttcagtggcaggcctagtgaagtgggcctaggaaaactgtcccagattctcactcttgcattttctctcctataaagacactccagcaattcgagttcaaacaagtaaaactgttttgaacaccaaggctcttgttcacttcctaaattacccctaatagcactgttcttgctttgtttttgaaattaaaagcagttatttcagagtcttgcttgtgtctctgattataattatgcactatttaaaatcactnntgaggccaggggtaattcgtactggtcancttctctgggtgtgagtcaaattntagttt

SEQ ID NO: 1863 - DNA, 6627 bp, Homo sapiens
gacccatgcggcagccgccctgctcccgaaggcgccggggccggcccagagcagggccactcggccggcggaggcggctggtgccgccactgccacacgaagctggtggagctcaagcgacaggcgtggaagctggtcagcgggcccgggaccaccctccgggatccttgcctctctgccctgcttctcgacaagctaccagcacctggggccctgccagcctgtcgcccagaggccgagcgccgctgtgacgtctgcgccacacacctgcagcagctcacacgggaggccatgcacctgctgcaggcccctgccagccatgaggaccttgacgccccccatggaggccccagcctcgcaccccccagcaccacgaccagctcgagggacacgccaggaccagcgggtcctgcagggaggcagccaggacgagctgggccagacaggaccaaggggctggcctggtcccccgggcccagtgtccaggtgtctgtagcacctgcgggtcttggaggggcgctgagcacggtcaccatccaggcccagcagtgcctggagggcatgtggagtgtctcgcgggtcaacagcttcctcccgccggcgtgcctggccgaggcagcggtggcggccgtggcggtggcagacacggtccgagaatgcccccccgtggccggccctgatggcttgtcgaaggcctggggccgtggtggagtctgcacgtcagccctggtcacccccaccccgggctcggtggggggctccacaggcccctcagctgcagcctccttcttcataagggctatgcagaagctcagcctggcctccaagaggaagaagccccacccgccaccgcctccagccacccgcggcacctccacctaccccaccgacttcagcggggtcctgcagctgtggccgcccccggcgcccccctgcctgctcagggccgcctccaagaccaaggacaaccctggcagcatcgggaaggtgaaggttatgctgcggatctggcccgcacagggggcccagcgctcggccgaggccatgtccttcctgaaggtggaccctcggaagaagcaggtgatcctctacgatcccgccgccggtcccccaggcagcgcaggcccccggcgagccgccactgctgcagttcccaagatgtttgccttcgatgccgtcttcccccaggactccgagcaggccgaagtctgctcggggaccgtggccgacgtgctccagtcggtggtcagtggggctgatggctgcattttttcctttggccacatgagcctgggcaagtcgtacaccatgatcgggaaggacagctcaccccagagcctgggcatcgtgccctgcgccatctcctggctcttcaggctcatcgaggagcgcagggagaggacgggcacccgcttctccgtccgggtctcagccgtggaggtgtgcgggcgcgaccagagcctgcgggacctgctggccgaggtggcccctggcagcctccaggacacccagtctccgggagtgtacctgcgggaggaccccgtgtgtggggcgcagctccagaaccaaagcgagctgcgggcacccacggccgagaaggcggctttctacctggatgcggccctggcggcccgcagcaccagccgagcgggctgtggcgaggacgcccgacgcagctcccacatgttgttcacgctgcacgtctaccagtaccgcatggagaagtgcggccggggaggaatgtccggaggccgcagccgcctgcacctcatcgacctgggcagctgtgaggcggcggctggcagggccggggaggctgctgggggtcccctgtgtctgtccctgtcggccctgggcagcgtcatcttggccctggtcaacggagccaagcatgtgccgtatcgggaccacaggctcaccatgctgctgcgtgaatccctggccaccgctggctgccgcaccaccatgatcgcccacgtgtcggatgcgccagcccagcacgcagagacactcagcaccgtgcagctcgccgcccgcatccaccgcctgcgcaggaagaaggccaagtacgcctccagctcctctggcggggagagctcctgtgaggaaggccgggcccgtcggcccccgcacctgcggcccttccacccacgcactgtggccctggaccccgaccgcacgcctccctgcctgcccggtgaccccgattactcctccagcagcgagcagtcctgtgacacggtcatctacgtggggcccggtggggcggcgctgtcagaccgggagctcaccgacaacgaaggtccgcctgacttcgtgcccatcatccctgccctgagccgccaccggccctccaagggtccccgagacgcagaccacttccgctgcagcaccttcgcggagctgcaggagcggctggaatgcatggacggcaacgagggtccctcaggaggtccaggtggcaccgacggagctcaggccagccccgcccgagggggccggaagccctcgccaccagaggctgcatcccccaggaaggccgtgggcaccccgatggctgccagcacccctcgaggcagttctggtccagacacccaccagggtacccctgagccctgcaaggccattgtctggggtgaccagagagaggacagcagcgcttggcctgagctgctggtcccggaaaaggctgcagtgagtggaggcaggaggccactgcccagcccggctcccccacctcctcagttgctggaagcctgcagagccccagaagagcctgggggagggggcactgatggagtggcacggacccctcccgtgggcatgagtgggcaggtggctgggtccccgatgcttcctggggccacctgcccccgcctggctgctggcagtcgctgtccggagcggggcctgctcaccaccacagtgaccctgcagcggccagtggagctcaacggcgaggacgagctggtgttcacggtggtggaggagctgtccctgggggcgcttgccggagctgggcggcccaccagcctggctagcttcgacagtgactgctccctgcgggccctggcctcggggtcccggccagtcagcatcatcagcagcatcaatgatgagtttgacgcctacacctctcaggcccctgagggggggcccctggagggggcagcctgggccggcagcagtcacggctcctccatcagctcctggctcagcgaggtcagcgtctgcactgccgacagccgtgaccccacgccgcagccccgcttcagccccgactcgctggcagggcttgaccctgggggcccccctgccctggatggttccctgggggatggaagctctgggttcctggggccagacagacctgacagtcctgggccaacctggggtccgtgccctggggaagtggctgcagtggccccatcccgacccggcagggagccccaggccgggccctcgcggtgggcatccgcagcccagaccatccactccagcctcccccggaaaccgaggactgcctctgccaccacccgtgtgggctgtgctcgcctgggccagagcccacctggccgtggaggcctgtttgaggacccatggctgctccgggtaggggagtgtgatacccaggcagcttctgctggcagggcccccagccccacacttggctccccccggctgcctgaggcccaggtgatgctagcctgtgcccagagagtggtggacgggtgtgaggtggcagccagggcggcccgcaggccagaggctgtggctcggatcccaccgctgcggaggggtgccaccacgctgggtgtgacaacgccagctgtgtcctggggagatgctcccacggaggtggtggcctgctcggggagcctgaaggcctcccccaccagcaagaagggtctggctcccaaggcgggcttcctcccgaggcccagtggggcggcccccccggccccacccacgcggaagtccagcctggagcagaggagcagcccggcctcggcccctccgcatgctgtgaacccggcgcgggtcggggctgctgctgtccttcgaggggaggaggagcccagacccagcagccgggctgaccactctgtccccagggccacgtccagcctgaaggcccgggccagcaaggtagaagcagcacaccgtcttgccggacacgcgtctctggagcggtacgaaggcctggcgcacagcagcagcaagggccgggaagcccctgggcggcctccccgggctgtacccaagctgggtgtgccaccctccagccccacacacggtccagctcccgcctgtaggagcggcgcagccaaggctgtgggggcccccaagccccctgttggtggaggcaagggccgtggcctagtggctggtgggtcgcgggctctggggccttcggtgaagctgtctacggcctctgtgacgggcaggagccctggcggccctgtggccggtcccagagcagccccacgggccgggcccagtgtcggggcgaaggctggccggggtaccgtcatgggcacaaagcaggcgctccgggctgctcacagccgcgtccatgagctgtcagccagtggagccccgggccgaggtggctcctcgtggggctcggcggactcagacagcggccatgacagcggcgtgaacgtgggggaggagcggccacccacgggcccggccctgccctccccctacagcaaggtgaccgccccacggcggccccagcgctacagcagcggccatggcagcgacaacagcagcgtgctgagtggagagctgccgcccgccatgggccgcaccgcccttttccaccacagcggtggcagcagtggctatgagagcctgcggcgcgacagcgaggccaccggcagcgcctcctccgcccctgactccatgagcgagagtggggctgcctccccaggcgcccgcacccgcagcctcaagtcccccaagaagagggccacaggtctgcagcggcggcgcctgattcccgccccactgcccgacaccactgccctgggccgtaagcccagcctccccgggcagtgggtggacctgcccccgcccctggctggctccctgaaggagccgttcgagatcaaggtgtacgagatcgatgacgtggagcgccttcagcggccccgccccaccccgagggaggcccccacccagggtctggcgtgcgtcagtacaaggctgcggctggcggagcgcaggcagcagcggctgcgggaggtgcaggccaagcacaagcacctgtgtgaggagctggccgagacccagggccggctgatgctggagcctggccgctggctggagcagtttgaggtggacccggagctggagcccgagtcggccgagtacctggcggccctggagcgagccacggcggccctggagcagtgcgtgaacctgtgcaaggcgcacgtcatgatggtcacctgcttcgacatcagcgttgcagccagtgctgccatcccggggccgcaggaggtggacgtctgaggctgggcgccggacaagaggagggggcgtgcagcgggctggaggacgggacgtgggacggagcgaggatgtggtgggggctgcggggggaggatgcggaggggtttctgtgcaggacgggagtctcagagaggagacggagtgtgggggagggagggccggccacgcggtggacagagcgagggtgccagggtgaccagaagaccgtcaccacccgacagcaacgcaagtgcctttgaccttgatttggacttttctcccttttgcatttggtgctacagacttgagacaccagcagaagttgtgttcagcccggccccgctgcgcctgtccgggccggggctggcgccggttgtgtttgtgtccaccttgccttctttgcagccaagcagtttttgtggagtggagtgggacttacctgcacgccccaggggtctttcaggattcaggatgacttttcttttacaatggtttcctctcggcagagcccgggttgtgggggatctgtgtggggttctcaacgcagatccatcctggggtctcccgggcagggatggctgacctcgagtcccctcccttcccgagaacccgctctgtcccgagggcagctaacaagggctgagccccaggtacaggttgcctcttccacggcaggaatttttaccaaaaccacaagcaaaaaacaaaacagaccaccacgaccaacaacaaagatggggggtagggttttgtaaaggttctgttaggttcatatttttatatcattttgcccataaatgcggaatttgccgtgggaatttgaagacaaatgatctatgtttttatggttttctagggaaggtgttctgggggccgggctctctccagctgtgggaggcctgctccctctggggggcaccctgggcagggtgggggggccttgggaggcgcttcttgccaaatgcagacgaggggtgagcctgccagcgtttgcgacgtccccgcacgacaggctcatactttctgaggatcgtgcatagcataggacgtctgaacctttgtacaaatgtgtagatgacatcttgctacagcttttatttgtgaattaaagatgcatcgatggtt

SEQ ID NO: 1864 - protein, 1840 aa, Homo sapiens
DPCGSRPAPEGAGAGPEQGHSAGGGGWCRHCHTKLVELKRQAWKLVSGPGTTLRDPCLSALLLDKLPAPGALPACRPEAERRCDVCATHLQQLTREAMHLLQAPASHEDLDAPHGGPSLAPPSTTTSSRDTPGPAGPAGRQPGRAGPDRTKGLAWSPGPSVQVSVAPAGLGGALSTVTIQAQQCLEGMWSVSRVNSFLPPACLAEAAVAAVAVADTVRECPPVAGPDGLSKAWGRGGVCTSALVTPTPGSVGGSTGPSAAASFFIRAMQKLSLASKRKKPHPPPPPATRGTSTYPTDFSGVLQLWPPPAPPCLLRAASKTKDNPGSIGKVKVMLRIWPAQGAQRSAEAMSFLKVDPRKKQVILYDPAAGPPGSAGPRRAATAAVPKMFAFDAVFPQDSEQAEVCSGTVADVLQSVVSGADGCIFSFGHMSLGKSYTMIGKDSSPQSLGIVPCAISWLFRLIEERRERTGTRFSVRVSAVEVCGRDQSLRDLLAEVAPGSLQDTQSPGVYLREDPVCGAQLQNQSELRAPTAEKAAFYLDAALAARSTSRAGCGEDARRSSHMLFTLHVYQYRMEKCGRGGMSGGRSRLHLIDLGSCEAAAGRAGEAAGGPLCLSLSALGSVILALVNGAKHVPYRDHRLTMLLRESLATAGCRTTMIAHVSDAPAQHAETLSTVQLAARIHRLRRKKAKYASSSSGGESSCEEGRARRPPHLRPFHPRTVALDPDRTPPCLPGDPDYSSSSEQSCDTVIYVGPGGAALSDRELTDNEGPPDFVPIIPALSRHRPSKGPRDADHFRCSTFAELQERLECMDGNEGPSGGPGGTDGAQASPARGGRKPSPPEAASPRKAVGTPMAASTPRGSSGPDTHQGTPEPCKAIVWGDQREDSSAWPELLVPEKAAVSGGRRPLPSPAPPPPQLLEACRAPEEPGGGGTDGVARTPPVGMSGQVAGSPMLPGATCPRLAAGSRCPERGLLTTTVTLQRPVELNGEDELVFTVVEELSLGALAGAGRPTSLASFDSDCSLRALASGSRPVSIISSINDEFDAYTSQAPEGGPLEGAAWAGSSHGSSISSWLSEVSVCTADSRDPTPQPRFSPDSLAGLDPGGPPALDGSLGDGSSGFLGPDRPDSPGPTWGPCPGEVAAVAPSRPGREPQAGPSRWASAAQTIHSSLPRKPRTASATTRVGCARLGQSPPGRGGLFEDPWLLRVGECDTQAASAGRAPSPTLGSPRLPEAQVMLACAQRVVDGCEVAARAARRPEAVARIPPLRRGATTLGVTTPAVSWGDAPTEVVACSGSLKASPTSKKGLAPKAGFLPRPSGAAPPAPPTRKSSLEQRSSPASAPPHAVNPARVGAAAVLRGEEEPRPSSRADHSVPRATSSLKARASKVEAAHRLAGHASLERYEGLAHSSSKGREAPGRPPRAVPKLGVPPSSPTHGPAPACRSGAAKAVGAPKPPVGGGKGRGLVAGGSRALGPSVKLSTASVTGRSPGGPVAGPRAAPRAGPSVGAKAGRGTVMGTKQALRAAHSRVHELSASGAPGRGGSSWGSADSDSGHDSGVNVGEERPPTGPALPSPYSKVTAPRRPQRYSSGHGSDNSSVLSGELPPAMGRTALFHHSGGSSGYESLRRDSEATGSASSAPDSMSESGAASPGARTRSLKSPKKRATGLQRRRLIPAPLPDTTALGRKPSLPGQWVDLPPPLAGSLKEPFEIKVYEIDDVERLQRPRPTPREAPTQGLACVSTRLRLAERRQQRLREVQAKHKHLCEELAETQGRLMLEPGRWLEQFEVDPELEPESAEYLAALERATAALEQCVNLCKAHVMMVTCFDISVAASAAIPGPQEVDV

SEQ ID NO: 1865 - DNA, 1185 bp, Homo sapiens
gctcagggcacatgcctcccctccccaggccgcggcccagctgaccctcggggctcccccggcagcggacagggaagggttaaaggcccccggctccctgccccctgccctggggaacccctggccctgtggggacatgaactgtgtttgccgcctggtcctggtcgtgctgagcctgtggccagatacagctgtcgcccctgggccaccacctggcccccctcgagtttccccagaccctcgggccgagctggacagcaccgtgctcctgacccgctctctcctggcggacacgcggcagctggctgcacagctgagggacaaattcccagctgacggggaccacaacctggattccctgcccaccctggccatgagtgcgggggcactgggagctctacagctcccaggtgtgctgacaaggctgcgagcggacctactgtcctacctgcggcacgtgcagtggctgcgccgggcaggtggctcttccctgaagaccctggagcccgagctgggcaccctgcaggcccgactggaccggctgctgcgccggctgcagctcctgatgtcccgcctggccctgccccagccacccccggacccgccggcgcccccgctggcgcccccctcctcagcctgggggggcatcagggccgcccacgccatcctgggggggctgcacctgacacttgactgggccgtgaggggactgctgctgctgaagactcggctgtgacccggggcccaaagccaccaccgtccttccaaagccagatcttatttatttatttatttcagtactgggggcgaaacagccaggtgatccccccgccattatctccccctagttagagacagtccttccgtgaggcctgggggacatctgtgccttatttatacttatttatttcaggagcaggggtgggaggcaggtggactcctgggtccccgaggaggaggggactggggtcccggattcttgggtctccaagaagtctgtccacagacttctgccctggctcttccccatctaggcctgggcaggaacatatattatttatttaagcaattacttttcatgttggggtggggacggaggggaaagggaagcctgggtttttgtacaaaaatgtgagaaacctttgtgagacagagaacagggaattaaatgtgtcatacatatcc

SEQ ID NO: 1866 - protein, 199 aa, Homo sapiens
MNCVCRLVLVVLSLWPDTAVAPGPPPGPPRVSPDPRAELDSTVLLTRSLLADTRQLAAQLRDKFPADGDHNLDSLPTLAMSAGALGALQLPGVLTRLRADLLSYLRHVQWLRRAGGSSLKTLEPELGTLQARLDRLLRRLQLLMSRLALPQPPPDPPAPPLAPPSSAWGGIRAAHAILGGLHLTLDWAVRGLLLLKTRL

SEQ ID NO: 1867 - DNA, 414 bp, Homo sapiens
gtcggtcctgacttcatgaaagtcgcggtccacgcgcaagaacaaagtccaagcgccacagacctcaaacgtggccaccagtcactccacggagaaagtggatggagacacacagacaacagttgagaaagatggtttgtcaacagtgaccctggttggaatcatagttggggtcttactagccatcggcttcattggtggaatcatcgttgtggttatgcgaaaaatgtcgggaaggtactcgccctaaagagctgaagggttacgccctgctgccaacgtgcttaaaaaaagaccgtttctgactctgtcccctgtccctgagctcgtgggagaagatgacccgtggaacacttgcctggcccactcagaatccacggtgacctctccgcttgccaaaataaccgaaggaaa

SEQ ID NO: 1868 - DNA, 802 bp, Homo sapiens
aactaggctaggtacgaggctggtgttaatcggccgagggtttaagctggaagggtagtcattggttcgccgctctgtctcggcctgagcccgcccccgctcggttgccgtggttgcgggccctgcccgcccgccagctcgctgacagcacgactcagggcggagggaagtaggtccgttggtcggtcgggaacgaggctcaggcggccaggcccgcgcggagccgttgccatggcagccgccgccggggacgcggacgacgagccgcgctcaggccactcgagctcggagggcgagtgcgcggtggcgccggagccgctgactgacgctgagggcctcttctccttcgctgacttcgggtctgcgctgggcggcggcggcgcgggcctctcgggccgggcgtccggcggggcccagtcgccgctgcgctacttgcacgtcctgtggcagcaggatgcggagccgcgcgacgagctgcgctgcaagatacccgctggccggctgaggcgcgctgccaggccccaccggcggctcgggcccacgggcaaggaggtgcacgctctgaagagactgagggactcggccaatgccaatgatgtggaaacagtgcagcagctgctggaagatggcgcggatccctgtgcagctgatgacaagggccgcacagctctacactttgcctcatgcaatggcaatgaccagattgtgcagctgctcctggaccatggtgctgatctaaccagcgagatgggctgcggaaaccgccactgcacctggcggcctgcaccaacccgttctgtct

SEQ ID NO: 1869 - DNA, 1722 bp, Homo sapiens
gcggccggtcgaccggagtggctgccctgcgcggggacactcagagcccggtgggcgggaggaaggcggcatgccccagacggtgatcctcccgggccctgcgccctggggcttcaggctctcagggggcatagacttcaaccagcctttggtcatcaccaggattacaccaggaagcaaggcggcagctgccaacctgtgtcctggagatgtcatcctggctattgacggctttgggacagagtccatgactcatgctgatgcgcaggacaggattaaagcagcagctcaccagctgtgtctcaaaattgacaggggagaaactcacttatggtctccacaagtatctgaagatgggaaagcccatcctttcaaaatcaacttagaatcagaaccacaggacgggaactactttgaacacaagcataatattcggcccaaacctttcgtgatcccgggccgaagcagtggatgcagcactccctccgggattgactgtggcagtggacgcagcaccccttcttctgtcagtactgttagtaccatttgcccaggtgacttgaaagttgcggctaagctggcccctaacattcctttggaaatggaacttcctggtgtgaagattgtacatgctcagtttaatacacctatgcagttgtactcagatgacaatattatggaaacactccagggtcaggtttcaacagccctaggggaaacacctttgatgaacgagcccacagcctcggtgccccccgagtcggacgtgtaccggatgctccacgacaatcggaatgagcccacacagcctcgccagtcgggctccttcagagtgctccagggaatggtggacgatggctctgatgaccgtccggctggaacgcggagtgtgagagctccggtgacgaaagtccatggcggttcaggcggggcacagaggatgccgctctgtgacaaatgtgggagtggcatagttggtgctgtggtgaaggcgcgggataagtaccggcaccctgagtgcttcgtgtgtgccgactgcaacctcaacctcaagcaaaagggctacttcttcatagaaggggagctgtactgcgaaacccacgcaagagcccgcacaaagcccccagagggctatgacacggtcactctgtatcccaaagcttaagtctctgcaggcgtggcacgcacgcacgcacccacccacgcgcacttacacgagaagacattcatggctttgggcagaaggattgtgcagattgtcaactccaaatctaaagtcaaggctttagacctttatcctattgtttattgaggaaaaggaatgggaggcaaatgcctgctatgtgaaaaaaacatacacttagctatgttttgcaactctttttggggctagcaataatgatatttaaagcaataattttttgtatgtcatactccacaatttacatgtatattacagccatcaaacacataaacatcaagatatttgaaggactctaattgtctttccttgacaagttgattttgcaattgtggtaaatagcaaataacaatcttgtattctaacataatctgcagttgtctgtatgtgttttaactattacagtgcatgttagggagaaattccctgaatttctttagttttgtattcaaacaattatgccactcgatgcaacaaacataataaatacataaaggatttaaaaaaaaaaaaaaaaaaaa

SEQ ID NO: 1870 - protein, 364 aa, Homo sapiens
MPQTVILPGPAPWGFRLSGGIDFNQPLVITRITPGSKAAAANLCPGDVILAIDGFGTESMTHADAQDRIKAAAHQLCLKIDRGETHLWSPQVSEDGKAHPFKINLESEPQDGNYFEHKHNIRPKPFVIPGRSSGCSTPSGIDCGSGRSTPSSVSTVSTICPGDLKVAAKLAPNIPLEMELPGVKIVHAQFNTPMQLYSDDNIMETLQGQVSTALGETPLMNEPTASVPPESDVYRMLHDNRNEPTQPRQSGSFRVLQGMVDDGSDDRPAGTRSVRAPVTKVHGGSGGAQRMPLCDKCGSGIVGAVVKARDKYRHPECFVCADCNLNLKQKGYFFIEGELYCETHARARTKPPEGYDTVTLYPKA

SEQ ID NO: 1871 - DNA, 1134 bp, Homo sapiens
aatcatcttgttggccctgacctcgttggaaaacgaagctccccgcagggtcccggcctctagggctgctgtgcgggcgggggtggcctggagctatttccattcggcggcgggaacaggtgccggcgcctccgccccatccccaggggccgcctcccccggggcggcctccaggctgccgagacctataaaggcgccaggttttctcaatgaagccgggacgcactccggagcgcactgcgtggtcgcaccctacccgggctgccttggaagtcgtccccgccgcccctccgcaccggcatgaagctcatcgtgggcatcggaggcatgaccaacggcggcaagaccacgctgaccaacagcctgctcagagccctgcccaactgctgcgtgatccatcaggatgacttcttcaagccccaagaccaaatagcagttggggaagacggcttcaaacagtgggacgtgctggagtctctggacatggaggccatgctggacaccgtgcaggcctggctgagcagcccgcagaagtttgcccgtgcccacggggtcagcgtccagccagaggcctcggacacccacatcctcctcctggaaggcttcctgctctacagctacaagcccctggtggacttgtacagccgccggtacttcctgaccgtcccgtatgaagagtgcaagtggaggagaagtacccgcaactacacagtccctgatccccccggcctcttcgatggccacgtgtggcccatgtaccagaagtataggcaggagatggaggccaacggtgtggaagtggtctacctggacggcatgaagtcccgagaggagctcttccgtgaagtcctggaagacattcagaactcgctgctgaaccgctcccaggaatcagccccctccccggctcgcccagccaggacacagggacccggacgcggatgcggccacagaacggccaggcctgcagcgtcccagcaggacagcatgtgagcgtttccctatgggggtgtctgtacgtaggagagtggaggccccactcccagttgggcgtcccggagctcagggactgagccccaagacgcctctgtaacctcgctgcagcttcagtagtaaactgggtcctgttttttt

SEQ ID NO: 1872 - protein, 230 aa, Homo sapiens
MKLIVGIGGMTNGGKTTLTNSLLRALPNCCVIHQDDFFKPQDQIAVGEDGFKQWDVLESLDMEAMLDTVQAWLSSPQKFARAHGVSVQPEASDTHILLLEGFLLYSYKPLVDLYSRRYFLTVPYEECKWRRSTRNYTVPDPPGLFDGHVWPMYQKYRQEMEANGVEVVYLDGMKSREELFREVLEDIQNSLLNRSQESAPSPARPARTQGPGRGCGHRTARPAASQQDSM

SEQ ID NO: 1873 - DNA, 511 bp, Homo sapiens
ttttttttttttttttatcttgtttcagtgttaatcacagtgaaatatacttttcaggataacattttcaaatggagcaaatatcgttacagattgatggcatagcctttatttgccttgtcaacattaaggtaggaagacttctgagatacaaatgtcagactgacagtagtgactcagaagcagaaattcaaaaaatgcacttgctgtaaattctgctacactgcccagggcacttctttgtctgtatgtgtaacatggattcagctattgtaaagtttctttaacagtcctggaagtactatgacagtaacaaggaagattgatagcagattccatgcctctttgttaatcacattaagaactctgctaggtactctttgatgttgtgtctggaaacatacatccccaccacaccatattgaaaactttcatcctattacccatctgctgccagcaaatgatcagtttaaaggcaaaaaatgggtgatgggggtgtgaaagtcaaaga

SEQ ID NO: 1874 - DNA, 2818 bp, Homo sapiens
ccctactccgcctctcgggatcctttaagaggcggggcttggctgccagctccgcggcccgggcaaaaggctgggactttactccgggtggcggcgaggacgagtctgtgctccatcagctgccgcacccgccgcctcccgcccccaaaccccatccccgcggttgagccacgatgagcggcagagtcggcgatctgagccccaggcagaaggaggcattggccaagtttcgggagaatgtccaggatgtgctgccggccctgccgaatccagatgactattttctcctgcgttggctccgagccagaagcttcgacctgcagaagtcggaggccatgctccggaagcatgtggagttccgaaagcaaaaggacattgacaacatcattagctggcagcctccagaggtgatccaacagtatctgtcagggggtatgtgtggctatgacctggatggctgcccagtctggtacgacataattggacctctggatgccaagggtctgctgttctcagcctccaaacaggacctgctgaggaccaagatgcgggagtgtgagctgcttctgcaagagtgtgcccaccagaccacaaagttggggaggaaggtggagaccatcaccataatttatgactgcgaggggcttggcctcaagcatctctggaagcctgctgtggaggcctatggagagtttctctgcatgtttgaggaaaattatcccgaaacactgaagcgtctttttgttgttaaagcccccaaactgtttcctgtggcctataacctcatcaaacccttcctgagtgaggacactcgtaagaagatcatggtcctgggagcaaattggaaggaggttttactgaaacatatcagccctgaccaggtgcctgtggagtatgggggcaccatgactgaccctgatggaaaccccaagtgcaaatccaagatcaactacgggggtgacatccccaggaagtattatgtgcgagaccaggtgaaacagcagtatgaacacagcgtgcagatttcccgtggctcctcccaccaagtggagtatgagatcctcttccctggctgtgtcctcaggtggcagtttatgtcagatggagcggatgttggttttgggattttcctgaagaccaagatgggagagaggcagcgggcaggggagatgacagaggtgctgcccaaccagaggtacaactcccacctggtccctgaagatgggaccctcacctgcagtgatcctggcatctatgtcctgcggtttgacaacacctacagcttcattcatgccaagaaggtcaatttcactgtggaggtcctgcttccagacaaagcctcagaagagaagatgaaacagctgggggcaggcaccccgaaataacaccttctcctatagcaggcctggccccctcagtgtctccctgtcaatttctaccccttgtagcagtcattttcgcacaaccctgaagcccaaagaaactgggctggaggacagacctcaggagctttcatttcagttaggcagaggaagagcgactgcagtgggtctccgtgtctatcaaatacctaaggagtccccaggagctggctggccatcgtgataggatctgtctgtcctgtaaactgtgccaacttcacctgtccagggacagcgaagctgggggtggcggggggcatgtaccacagggtggcagcagggaaaaaaattagaaaagggtgaaagattgggacttaacacttcagggaagtcagctgccggggagaaacttgctcctaaatgaacacataagtttagatcgcaatgaggagtagcagggtagctggttgctagagttacggtggggatcagaaactcttccaaacattttagcactgaggctggggtagcttttggcttttcccaggtctcaggaggtggcctgagtcagcacacatcttcccactcggtagacaggctggcctctccctcactttgagactttggcaactcctgggccacacggcctgcctctttgattactaatgattgtcagtgactcagagcttcctgggacttcgggtacccacccgctgttctccatgcaaacaaagcgccagggaaatgacccacagggatcgcagctgcagggagggccagggaggttgggggtgggagtgaatgctaaaagcagatcgtccagtgcccttttcagtgctaccggcctctcaccaagcagtcctccatgtgagcaaccccgagacaaaaatgctaagtgggatcaagagagcagcactcggagagggtgtttgccagtctgagtgtcccgcggtgcccgccaacccgcttcctgactgacctgagcaaggtcttactaagcagtcccatctctgtgggaggcatgcaacgcgtgcagggagttcaggtgccggtcggcgtagccaggcctggaggccccccaggcaggaggccgcccaaaggcggggccggcgtctcgcagactaggggctgggggcggccacagacggcctcgaaaccacagcccttaccccaatcccacgagccccgccaacgaaccacaggtgctgggctttagagaacatgggaaggcggccccagacctggcgggaacgcctttccctcagagccaggccccggccccgtctgggaagctcatcttgcgaagctgagggagctcagggcaaaggccaggctagcgcggaccggaaggggccgaggctgcacgggcctctgccagaacgctcaggacatcccggcctgggtttacaacgctgttaggaaaattaaccaatgaataaagcaacgttcagtgcgca

SEQ ID NO: 1875 - protein, 403 aa, Homo sapiens
MSGRVGDLSPRQKEALAKFRENVQDVLPALPNPDDYFLLRWLRARSFDLQKSEAMLRKHVEFRKQKDIDNIISWQPPEVIQQYLSGGMCGYDLDGCPVWYDIIGPLDAKGLLFSASKQDLLRTKMRECELLLQECAHQTTKLGRKVETITIIYDCEGLGLKHLWKPAVEAYGEFLCMFEENYPETLKRLFVVKAPKLFPVAYNLIKPFLSEDTRKKIMVLGANWKEVLLKHISPDQVPVEYGGTMTDPDGNPKCKSKINYGGDIPRKYYVRDQVKQQYEHSVQISRGSSHQVEYEILFPGCVLRWQFMSDGADVGFGIFLKTKMGERQRAGEMTEVLPNQRYNSHLVPEDGTLTCSDPGIYVLRFDNTYSFIHAKKVNFTVEVLLPDKASEEKMKQLGAGTPK

SEQ ID NO: 1876 - DNA, 417 bp, Homo sapiens
  misc_feature (44)..(44): n is a, c, g, or t
  misc_feature (48)..(48): n is a, c, g, or t
  misc_feature (50)..(50): n is a, c, g, or t
  misc_feature (363)..(363): n is a, c, g, or t
  misc_feature (377)..(377): n is a, c, g, or t
  misc_feature (383)..(383): n is a, c, g, or t
  misc_feature (395)..(395): n is a, c, g, or t
  misc_feature (414)..(414): n is a, c, g, or t
caagtgggagaaaactaatcaatggcacacagggcagggtgtgnctangngcaaaggataatgtcacctcaggaccaaggtggaaacttacagctgaatccagggcttactaagtagggaagtcagtttacatatttcagttttcctctgatgtttttgaggtactgtgtatttgcagaagtttaagcagaagggttttgtttctattgtaagttaggttctaaaagtgtataatctgatactctagcccaactgaaatattatatcttgggcgttacagcctttgtctttttctttagtcaccttaatacccagtcctatggctgtatctctgatagcctatataaatggacatattagggntattattttccctntgatcntgttgtatgggngtatatggctatggtgttncat

SEQ ID NO: 1877 - DNA, 490 bp, Homo sapiens
  misc_feature (143)..(143): n is a, c, g, or t
  misc_feature (238)..(238): n is a, c, g, or t
  misc_feature (248)..(248): n is a, c, g, or t
  misc_feature (262)..(262): n is a, c, g, or t
  misc_feature (267)..(267): n is a, c, g, or t
  misc_feature (344)..(344): n is a, c, g, or t
  misc_feature (350)..(350): n is a, c, g, or t
  misc_feature (353)..(353): n is a, c, g, or t
  misc_feature (388)..(388): n is a, c, g, or t
  misc_feature (391)..(391): n is a, c, g, or t
  misc_feature (398)..(398): n is a, c, g, or t
  misc_feature (403)..(404): n is a, c, g, or t
  misc_feature (424)..(433): n is a, c, g, or t
  misc_feature (437)..(437): n is a, c, g, or t
  misc_feature (441)..(442): n is a, c, g, or t
  misc_feature (444)..(446): n is a, c, g, or t
  misc_feature (453)..(459): n is a, c, g, or t
  misc_feature (461)..(464): n is a, c, g, or t
  misc_feature (466)..(469): n is a, c, g, or t
  misc_feature (471)..(473): n is a, c, g, or t
  misc_feature (475)..(478): n is a, c, g, or t
  misc_feature (481)..(490): n is a, c, g, or t
tcttcctccagcttcttgtcgggcgccggctcctgcccccgcacatacacgctggcgatgtagttggtgacccagcccacgtagagcaggcagatgatgttagtcatgccgctcaggatcacgcaagtggacatcaaagtttnggtcttcctggtgcacaccattctgggctccttcctccatatagagctcccgggggcccttccttgtcgtgcgccccgaactcccccgcgctcgnaccccgtagnacgtccggagccgntgggnacctcagcacctgagtcccgaggttctccaaagcccggtccgttgccggtgtagccgcccgtgcccaagtttgcagntcctgncgntggccaacccggagagaccttgaaaaaggaagggnggnattcagnttggnnttaccaggttgactgtaaannnnnnnnnnttancagnntnnntgtcaannnnnnntnnnncnnnntnnntnnnnaannnnnnnnnn

SEQ ID NO: 1878 - DNA, 3213 bp, Homo sapiens
agagactcaagatgattccctttttacccatgttttctctactattgctgcttattgttaaccctataaacgccaacaatcattatgacaagatcttggctcatagtcgtatcaggggtcgggaccaaggcccaaatgtctgtgcccttcaacagattttgggcaccaaaaagaaatacttcagcacttgtaagaactggtataaaaagtccatctgtggacagaaaacgactgttttatatgaatgttgccctggttatatgagaatggaaggaatgaaaggctgcccagcagttttgcccattgaccatgtttatggcactctgggcatcgtgggagccaccacaacgcagcgctattctgacgcctcaaaactgagggaggagatcgagggaaagggatccttcacttactttgcaccgagtaatgaggcttgggacaacttggattctgatatccgtagaggtttggagagcaacgtgaatgttgaattactgaatgctttacatagtcacatgattaataagagaatgttgaccaaggacttaaaaaatggcatgattattccttcaatgtataacaatttggggcttttcattaaccattatcctaatggggttgtcactgttaattgtgctcgaatcatccatgggaaccagattgcaacaaatggtgttgtccatgtcattgaccgtgtgcttacacaaattggtacctcaattcaagacttcattgaagcagaagatgacctttcatcttttagagcagctgccatcacatcggacatattggaggcccttggaagagacggtcacttcacactctttgctcccaccaatgaggcttttgagaaacttccacgaggtgtcctagaaaggttcatgggagacaaagtggcttccgaagctcttatgaagtaccacatcttaaatactctccagtgttctgagtctattatgggaggagcagtctttgagacgctggaaggaaatacaattgagataggatgtgacggtgacagtataacagtaaatggaatcaaaatggtgaacaaaaaggatattgtgacaaataatggtgtgatccatttgattgatcaggtcctaattcctgattctgccaaacaagttattgagctggctggaaaacagcaaaccaccttcacggatcttgtggcccaattaggcttggcatctgctctgaggccagatggagaatacactttgctggcacctgtgaataatgcattttctgatgatactctcagcatggttcagcgcctccttaaattaattctgcagaatcacatattgaaagtaaaagttggccttaatgagctttacaacgggcaaatactggaaaccatcggaggcaaacagctcagagtcttcgtatatcgtacagctgtctgcattgaaaattcatgcatggagaaagggagtaagcaagggagaaacggtgcgattcacatattccgcgagatcatcaagccagcagagaaatccctccatgaaaagttaaaacaagataagcgctttagcaccttcctcagcctacttgaagctgcagacttgaaagagctcctgacacaacctggagactggacattatttgtgccaaccaatgatgcttttaagggaatgactagtgaagaaaaagaaattctgatacgggacaaaaatgctcttcaaaacatcattctttatcacctgacaccaggagttttcattggaaaaggatttgaacctggtgttactaacattttaaagaccacacaaggaagcaaaatctttctgaaagaagtaaatgatacacttctggtgaatgaattgaaatcaaaagaatctgacatcatgacaacaaatggtgtaattcatgttgtagataaactcctctatccagcagacacacctgttggaaatgatcaactgctggaaatacttaataaattaatcaaatacatccaaattaagtttgttcgtggtagcaccttcaaagaaatccccgtgactgtctatacaactaaaattataaccaaagttgtggaaccaaaaattaaagtgattgaaggcagtcttcagcctattatcaaaactgaaggacccacactaacaaaagtcaaaattgaaggtgaacctgaattcagactgattaaagaaggtgaaacaataactgaagtgatccatggagagccaattattaaaaaatacaccaaaatcattgatggagtgcctgtggaaataactgaaaaagagacacgagaagaacgaatcattacaggtcctgaaataaaatacactaggatttctactggaggtggagaaacagaagaaactctgaagaaattgttacaagaagaggtcaccaaggtcaccaaattcattgaaggtggtgatggtcatttatttgaagatgaagaaattaaaagactgcttcagggagacacacccgtgaggaagttgcaagccaacaaaaaagttcaaggttctagaagacgattaagggaaggtcgttctcagtgaaaatccaaaaaccagaaaaaaatgtttatacaaccctaagtcaataacctgaccttagaaaattgtgagagccaagttgacttcaggaactgaaacatcagcacaaagaagcaatcatcaaataattctgaacacaaatttaatatttttttttctgaatgagaaacatgagggaaattgtggagttagcctcctgtggtaaaggaattgaagaaaatataacaccttacaccctttttcatcttgacattaaaagttctggctaactttggaatccattagagaaaaatccttgtcaccagattcattacaattcaaatcgaagagttgtgaactgttatcccattgaaaagaccgagccttgtatgtatgttatggatacataaaatgcacgcaagccattatctctccatgggaagctaagttataaaaataggtgcttggtgtacaaaactttttatatcaaaaggctttgcacatttctatatgagtgggtttactggtaaattatgttattttttacaactaattttgtactctcagaatgtttgtcatatgcttcttgcaatgcatattttttaatctcaaacgtttcaataaaaccatttttcagatataaagagaattacttcaaattgagtaattcagaaaaactcaagatttaagttaaaaagtggtttggacttgggaa

SEQ ID NO: 1879 - protein, 836 aa, Homo sapiens
MIPFLPMFSLLLLLIVNPINANNHYDKILAHSRIRGRDQGPNVCALQQILGTKKKYFSTCKNWYKKSICGQKTTVLYECCPGYMRMEGMKGCPAVLPIDHVYGTLGIVGATTTQRYSDASKLREEIEGKGSFTYFAPSNEAWDNLDSDIRRGLESNVNVELLNALHSHMINKRMLTKDLKNGMIIPSMYNNLGLFINHYPNGVVTVNCARIIHGNQIATNGVVHVIDRVLTQIGTSIQDFIEAEDDLSSFRAAAITSDILEALGRDGHFTLFAPTNEAFEKLPRGVLERFMGDKVASEALMKYHILNTLQCSESIMGGAVFETLEGNTIEIGCDGDSITVNGIKMVNKKDIVTNNGVIHLIDQVLIPDSAKQVIELAGKQQTTFTDLVAQLGLASALRPDGEYTLLAPVNNAFSDDTLSMVQRLLKLILQNHILKVKVGLNELYNGQILETIGGKQLRVFVYRTAVCIENSCMEKGSKQGRNGAIHIFREIIKPAEKSLHEKLKQDKRFSTFLSLLEAADLKELLTQPGDWTLFVPTNDAFKGMTSEEKEILIRDKNALQNIILYHLTPGVFIGKGFEPGVTNILKTTQGSKIFLKEVNDTLLVNELKSKESDIMTTNGVIHVVDKLLYPADTPVGNDQLLEILNKLIKYIQIKFVRGSTFKEIPVTVYTTKIITKVVEPKIKVIEGSLQPIIKTEGPTLTKVKIEGEPEFRLIKEGETITEVIHGEPIIKKYTKIIDGVPVEITEKETREERIITGPEIKYTRISTGGGETEETLKKLLQEEVTKVTKFIEGGDGHLFEDEEIKRLLQGDTPVRKLQANKKVQGSRRRLREGRSQ

SEQ ID NO: 1880 - DNA, 3672 bp, Homo sapiens
atggaggatgaatcaatttacacctgcgatcactgtcagcaggacttcgagtctctggcagacctgacggaccaccgggcccaccgctgtcctggagatggtgatgacgacccacaactctcctgggtggcctcgtctccctccagcaaggatgttgcgtcacccacgcagatgatcggagatggttgtgacctcggcctcggcgaggaggaagggggcacgggcctgccatacccttgccagttctgcgacaagtccttcatccgcttgagctacttgaagaggcacgagcagatccacagcgacaagctgccgttcaagtgcacctactgcagccgcctcttcaagcacaagaggagccgcgaccggcacatcaagctgcatacgggcgacaagaagtatcactgccacgagtgcgaggcagccttctcccgcagcgaccacctcaagatccacctgaagacccacagctccagcaagcccttcaagtgcactgtgtgcaagcgcggcttctcctccaccagctcgctgcagagccacatgcaggcccacaaaaagaacaaggagcatctggccaagtcggagaaggaagccaagaaggacgacttcatgtgcgactactgcgaggacaccttcagccagacggaggagctggagaagcacgtgctcacccgccacccgcagctgtccgagaaggcggacctgcagtgcattcactgccctgaggtcttcgtcgacgagaacacactgctcgcccatatccaccaagcccacgccaaccagaaacacaagtgccccatgtgccctgagcagttctcctcagtggaaggtgtctactgccacctggacagccaccggcagcccgactccagcaaccacagtgtcagtcccgaccctgtactgggcagcgtggcctccatgagcagcgccacacccgactccagcgcctctgtggagcgtggctccaccccggactccaccttgaagccgctgcgggggcagaagaagatgcgggatgacgggcagggctggaccaaggtggtctatagctgcccctattgttccaagcgggactttaacagcctggccgtgctggagatccacctgaagaccatccacgcggacaagccccagcagagccacacatgtcagatctgcctggactccatgcccaccctctacaacctcaacgagcacgttcgcaagctgcacaagaaccatgcctaccctgtgatgcagtttggcaacatctctgccttccactgcaactactgccccgagatgttcgccgacatcaatagcctgcaggagcacatccgcgtctcccactgcggccccaacgccaacccctctgacggtaataatgctttcttctgcaaccagtgctccatgggtttccttactgagtcctccctcaccgagcacatccagcaggcccactgcagtgtgggcagtgccaaactagagtctccggtggtgcagcccacgcagtccttcatggaggtctattcctgcccctactgcaccaactcccccatctttggctccatcctgaaactcaccaagcacatcaaggagaaccacaagaacattccactggcccacagcaagaagtccaaggccgagcagagcccagtctcgtccgatgtggaggtgtcttccccgaagcggcagcggctctcagcaagcgccaactccatctccaatggggagtatccttgcaatcaatgcgacctcaagttctccaactttgagagcttccagacccacctgaagctgcacctggagctgctgctgcggaagcaagcgtgcccccagtgcaaagaggactttgactcccaggagtccctcctgcagcacctgacagtgcattacatgaccacgtcgacccactatgtgtgcgagagctgcgacaagcaattttcctcggtggatgacctgcagaagcacctgctggacatgcacacctttgtgttgtaccactgcaccctgtgtcaggaggtcttcgactccaaggtgtccatccaggtgcacctggcggtgaagcacagcaatgagaagaagatgtaccgctgcacggcctgcaactgggacttccgcaaggaggctgacctgcaggtgcacgtcaaacacagccacctgggcaacccggccaaggctcacaagtgcatcttctgtggggagaccttcagcaccgaggtggagctgcagtgccacatcaccacacacagcaagaagtataactgtaagttctgcagcaaggccttccacgccatcatcctgctggagaagcacctgcgggagaagcactgtgtgtttgatgctgcgaccgagaacggcacggccaatggggtacccccaatggccaccaagaaagctgagcctgctgacctgcagggcatgctgcttaagaaccctgaggcacctaacagccatgaggccagcgaggatgacgtggacgcgtcggagcccatgtacggctgtgacatctgcggggcggcctacaccatggaggtgctgctgcagaatcaccggctgcgggaccacaatatccggccgggcgaggatgatggctcacgcaagaaggctgagtttatcaagggcagtcacaagtgcaacgtttgttcacggactttcttctcggagaacgggctacgggagcacctgcagacgcaccggggccctgccaagcactacatgtgtcccatctgtggtgagcgcttcccttcgctgctgacgctcaccgaacacaaggtgacccacagcaagagcctggacacgggcacctgtcgcatctgcaagatgcccctgcagagcgaggaggagtttattgagcactgccagatgcaccctgacctgcgcaactcactcacgggcttccgctgtgtggtctgcatgcagacagtcacttccacgcttgagctcaagatccatggcaccttccacatgcagaagctggcgggcagctcagcggcgtcctcccccaatggccaggggctgcagaagctctacaagtgcgccctgtgcctcaaggagttccgcagcaagcaggacctggtgaagcttgacgtcaatgggctgccctacggcctctgcgccggctgcatggcccgcagcgccaacggacaggtgggtggcctggccccgcccgagcccgccgaccggccctgtgccggcctccgttgccccgagtgcagtgtcaagtttgagagtgccgaagacctggagagccacatgcaggtggaccaccgtgacctcacgccggagaccagtgggccccggaaaggcacccagacatcgccagtgccccggaaaaagacataccagtgcatcaagtgccagatgaccttcgagaacgagagagagatccaaatccacgttgccaaccacatgattgaggaaggcatcaaccacgagtgtaagctgtgcaaccagatgttcgactccccggccaagctcctctgtcacctcattgagcacagcttcgagggcatgggcggcaccttcaaatgccccgtgtgtttcacagtcttcgtccaggccaacaagttgcagcagcacatctttgccgtgcacgggcaggaggacaagatctacgactgctcacagtgccctcagaagttcttcttccagaccgagctgcagaaccacacgatgagccagcacgcacag

SEQ ID NO: 1881 - protein, 1224 aa, Homo sapiens
MEDESIYTCDHCQQDFESLADLTDHRAHRCPGDGDDDPQLSWVASSPSSKDVASPTQMIGDGCDLGLGEEEGGTGLPYPCQFCDKSFIRLSYLKRHEQIHSDKLPFKCTYCSRLFKHKRSRDRHIKLHTGDKKYHCHECEAAFSRSDHLKIHLKTHSSSKPFKCTVCKRGFSSTSSLQSHMQAHKKNKEHLAKSEKEAKKDDFMCDYCEDTFSQTEELEKHVLTRHPQLSEKADLQCIHCPEVFVDENTLLAHIHQAHANQKHKCPMCPEQFSSVEGVYCHLDSHRQPDSSNHSVSPDPVLGSVASMSSATPDSSASVERGSTPDSTLKPLRGQKKMRDDGQGWTKVVYSCPYCSKRDFNSLAVLEIHLKTIHADKPQQSHTCQICLDSMPTLYNLNEHVRKLHKNHAYPVMQFGNISAFHCNYCPEMFADINSLQEHIRVSHCGPNANPSDGNNAFFCNQCSMGFLTESSLTEHIQQAHCSVGSAKLESPVVQPTQSFMEVYSCPYCTNSPIFGSILKLTKHIKENHKNIPLAHSKKSKAEQSPVSSDVEVSSPKRQRLSASANSISNGEYPCNQCDLKFSNFESFQTHLKLHLELLLRKQACPQCKEDFDSQESLLQHLTVHYMTTSTHYVCESCDKQFSSVDDLQKHLLDMHTFVLYHCTLCQEVFDSKVSIQVHLAVKHSNEKKMYRCTACNWDFRKEADLQVHVKHSHLGNPAKAHKCIFCGETFSTEVELQCHITTHSKKYNCKFCSKAFHAIILLEKHLREKHCVFDAATENGTANGVPPMATKKAEPADLQGMLLKNPEAPNSHEASEDDVDASEPMYGCDICGAAYTMEVLLQNHRLRDHNIRPGEDDGSRKKAEFIKGSHKCNVCSRTFFSENGLREHLQTHRGPAKHYMCPICGERFPSLLTLTEHKVTHSKSLDTGTCRICKMPLQSEEEFIEHCQMHPDLRNSLTGFRCVVCMQTVTSTLELKIHGTFHMQKLAGSSAASSPNGQGLQKLYKCALCLKEFRSKQDLVKLDVNGLPYGLCAGCMARSANGQVGGLAPPEPADRPCAGLRCPECSVKFESAEDLESHMQVDHRDLTPETSGPRKGTQTSPVPRKKTYQCIKCQMTFENEREIQIHVANHMIEEGINHECKLCNQMFDSPAKLLCHLIEHSFEGMGGTFKCPVCFTVFVQANKLQQHIFAVHGQEDKIYDCSQCPQKFFFQTELQNHTMSQHAQ

SEQ ID NO: 1882 - DNA, 602 bp, Homo sapiens
  misc_feature (46)..(46): n is a, c, g, or t
  misc_feature (99)..(99): n is a, c, g, or t
  misc_feature (458)..(458): n is a, c, g, or t
  misc_feature (495)..(495): n is a, c, g, or t
  misc_feature (505)..(505): n is a, c, g, or t
  misc_feature (532)..(532): n is a, c, g, or t
  misc_feature (539)..(539): n is a, c, g, or t
  misc_feature (599)..(599): n is a, c, g, or t
gggaggtctcctccaccccaaccgtcaccctgggtcccgactgccnacctcctcctcctccccctccccccaacaacaacaacaacaacaactccaagnacaccggccataagagtgcgtgtgtccccaacatgaccgaacgaagaagggacgagctctctgaagagatcaacaacttaagagagaaggtcatgaagcagtcggaggagaacaacaacctgcagagccaggtgcagaagctcacagaggagaacaccacccttcgagagcaagtggaacccacccctgaggatgaggatgatgacatcgagctccgcggtgctgcagcagcttgcttgcccaccccctccaatagaggaagagtgcccagaagacctcccagagaagttcgatggcaacccagacatgctggctcttttcatggcccagtgccagatcttcatggaaaagagcaccanggatttctcagttgatcgtgtccgtgtctgcttcgtngacaagcatnatgaccgggccgtgttgcccgttgggncttcagnaaagcttggaagcgcttcccattaacctgattgcacaattacccagctttcatgattggnaat

SEQ ID NO: 1883 - DNA, 5021 bp, Homo sapiens
gcccacccgtccagcaaaatagagtccctcagggtgacagttgacttcctgaaggtgcctcttggcctaaagaagccggtgctgaaggaggtggctgtggggccccccaagaggccccagcctgcggccctggagcgctacaaggcgcggcgttcagacgccatggacaccgagtcccagtactcgggctattcctacaagtcgggccactcccgcagctcccgcaagcacagggaccgccgggaccgacaccgctctaagagtcgagatgggggccgaggggacaagtcggtgacaatccaggctcccggggagcccctgctggacaatgagtccacacgaggggatgagcgggatgacaactggggggaaacgacgacagtagtaacgggcacctcagagcacagcatctcccatgatgacctcacacgcatcgccaaggacatggaggacagtgtccctctggactgctcccgtcacctgggtgtggcagcgggggccaccctggcactgctgtctttcctcacgcctctggccttcctgctgctgcccccactgctgtggcgggaggagctggagccttgcgggacggcctgcgagggcctcttcatctctgtcgccttcaagctgctcatcctgctactgggcagctgggctctgttcttccgccggcccaaggcctcgctgccccgcgtctttgtgctgcgtgccctgcttatggtgctggttttcctgctcgtggtctcctactggctcttctatggtgtgcgcatcctggatgctcgggagcgcagctaccagggcgtggtgcagttcgccgtgtcgctggtggacgcccttcttttcgtgcactacctggccgtggtcctgctggagctgcgccagctccagcctcagttcacgctcaaggtcgtgcgctccaccgacggcgccagccgcttctacaacgttggccatctcagcatccagcgcgtggcagtgtggatcctggagaagtattaccatgacttccctgtctacaaccctgccctcctcaacctgcccaagtccgtcctggccaagaaagtgtctggcttcaaggtgtattccctcggagaggaaaacagcaccaacaactccactggccagtctcgggctgtgattgcagcggcagctcggaggcgggacaacagtcacaatgagtactactatgaggaggctgagcatgagcgaagggtgcgcaagaggagggccaggcttgtagtggcggtggaggaggccttcactcacattaagcggctgcaggaagaggagcagaaaaaccccagggaggtgatggacccccgggaggcagcccaagccatctttgcatccatggcccgtgccatgcagaagtaccttcggaccaccaagcagcagccctaccacaccatggagagcatcctgcagcaccttgaattctgcatcacgcatgacatgacgcccaaggccttcttggagcgatacttggcggctggacctaccatccagtaccacaaggaacgctggctggccaaacagtggacattggtgagcgaggagccggtgaccaacggcctcaaggatggcatcgttttcctcttaaaacgccaggacttcagcctggtggtcagcaccaagaaggtcccattcttcaaactctccgaggaatttgtggatcccaagtcacacaagtttgtcatgaggctgcagtctgagacctcagtgtgactgtgcaacagcagggggagtgggaaactctggggggtcctgagggggtgggagggggcttggttctcaggcccagccacattcctgccacccttcttcttcttgctcttttttttttacttgaattaacgcacccccaccttctctcctcgcttcttccttattttaccccatgtgaacctggagagaccatcctgctgtcaacagtacctgggaaggactcccacctcaccaacaacttttgtattactctaggccctgcaggaatcagtgcctctctccctcttctttccctagtcttttcccagattacagtctctcctgaaagggcacagggccctgctgattgtactttcccctcctgagccccgactcacaaatccaagttcttaaaacatttctcttcagtggcccaacagggtttctctggggcacatggacatgactccagagagccacagtgccaaactcctccagggcagcaactggccctcctgtccctcaccccagccacaacaaaccctgggttctagggcagggatactcctgccacacagcccgagttagaaatctccttgctaggagcatttgcttccacatatatttagagcaaagaaggatcccatccttttcccagaaatctccacctaatgtttttggtttgtatggtcacgtgaccataggcaaccacgtggaaaccctctgtgaccacttttccagggacttaggggaaggtacctttcttccaatgtgtcttcctaggcagcccctgaggaggagggctgaatagatccctgaggttttggagagacccccatcactgactcctgctccctaaccctaccctcactttcgtccccgctcttcccagtgaaggatggtatgtagactcctgtacagacatagtggcttgcagaccctgacccagcccctgtggtcttagacaaatgtttttatttttgtcaccagccacccctgtcctgccgccttctctcgactccagagacctgttgcctcatctcttttggggaagagccggcagctcctcctcatcccctgccttaagtccagttctttgcctcaggggtctcgtttccttggccttccagggtccccaccccttttctccctgcctgattctctgagctctgggctccgtctgtattgggttgaggggcaaggattactgccttttgtaggtacttcacccctcaccccattttagcttccatagtctttgcaccaaatccaaattcttgataatttagatctcattttgagcaaaatttgctggccctctaataaatattttcaatataaatctgagcctttgactcagacatttttgccaaggagagtagaattaggaagtacccatatacatccagccaggatccacatggaggacctttctgatggctgcaatgactaggccattcctctgagtaactcacagtgtccttttgtaggcccttcttttccctgaaagactggttggtacttaccttgcagagcacatcctgggataagatccccagtgtctcccctgggaggctccccctctgtgtagcaccagccctgggaatgatggagcctagtgatcggggtttctcctgctgtcctttctgcaaaagttcacttgtttacccaccgcatgctagagaggagctcattggccaatgcttaccttgtccccaaaggggtgggttgtggagctcacttaggcagggcctctggctggggccagggttatgagataggcctgtatgaaatatgtcctgttctgggggtctgtctcttttcttctcttcaaaaactttgtgtcagagagtcccttctgagtcacataaatacctcactatcctggaaaacagggcctggatggtgactggggtcattgcctttgtggacaggatggagtgtggtgtggtctgaggagcaggttggggtgggggagagggaaaggatttgggatcttagttgctgccctaggttaggggctggggagtgtttattttaagatcctgccatgtttttaatcactgtgatttttttttcattcccctttcctaaaaaaaaatttttttcctccaactctctaagcactaagggctgtgcctgagaatggtagcattttggtcttttgcttcagaactgtggtatctttgtcttttttcattattattattattattattattattattactattgttttttaaaatgtcaggatgaattgtcagacatatggccatgtgtttgtcctctgcttctcccctgtgggaagttgtctccatgctgtgaactgctgtggggtgtgcagctgactcagtccctctgagcagtttccccactgtgtctgtcccatcatgcgctggatctgctcattctcctgctgtgggggtatgcccacctcttacccccttgacaccatagggctgctgtggctgggcctcaccagcactgtcttttgtgtgactcatggcatcctcgttcatccccaccgtgcctagcaggccttccttttcaccacctcggaacgcttgcctttcctccctccacaacaggacgctgtgcctcagtccttcacctacctcgccactctgccactgtccccattggtcctttctcctaaactggtctttgtgctctctttgttttttcttatttccctcttgtctctcattttttcttcccattcccctcccatttcagcccttaacttttctctttcccatctccactcagtattccaatggcaaaccctgatgatgtaacacctgcgatgagacatcggactctccggaactttctcatctgacacgtctttttcccagggttcgtacttctcctccattggtcccaggctaactcccctgttcctctgtggtgtctgtcagtccgtctgtcttctctttcctctgcccttcccacagggcagtatctgctgatggattcagtcctggtgtgtgattgttgtgatttgttcttccgtgcgcaaaaggaagagggctttttgagtcccttccaagtgagattgtaaatgtagaattttccactgttggatctagattttttttccttttttttgggggggtggggttacagagctgagaccttgtgcatgcatgtagaaaattgtaaaatgtaaattttttttaatatataaaaagcttgtttctacagtttgcagtggatctaaacattacggcaattttaggatttttttcttaaacataggaactaaaactgtacaaattttttttatataaaataaagacatttgacttttg

SEQ ID NO: 1884 - protein, 575 aa, Homo sapiens
AHPSSKIESLRVTVDFLKVPLGLKKPVLKEVAVGPPKRPQPAALERYKARRSDAMDTESQYSGYSYKSGHSRSSRKHRDRRDRHRSKSRDGGRGDKSVTIQAPGEPLLDNESTRGDERDDNWGETTTVVTGTSEHSISHDDLTRIAKDMEDSVPLDCSRHLGVAAGATLALLSFLTPLAFLLLPPLLWREELEPCGTACEGLFISVAFKLLILLLGSWALFFRRPKASLPRVFVLRALLMVLVFLLVVSYWLFYGVRILDARERSYQGVVQFAVSLVDALLFVHYLAVVLLELRQLQPQFTLKVVRSTDGASRFYNVGHLSIQRVAVWILEKYYHDFPVYNPALLNLPKSVLAKKVSGFKVYSLGEENSTNNSTGQSRAVIAAAARRRDNSHNEYYYEEAEHERRVRKRRARLVVAVEEAFTHIKRLQEEEQKNPREVMDPREAAQAIFASMARAMQKYLRTTKQQPYHTMESILQHLEFCITHDMTPKAFLERYLAAGPTIQYHKERWLAKQWTLVSEEPVTNGLKDGIVFLLKRQDFSLVVSTKKVPFFKLSEEFVDPKSHKFVMRLQSETSV

SEQ ID NO: 1885 - DNA, 1067 bp, Homo sapiens
cggctcaagtgaactgactctgctagaacagtgccgtgcttttccacagaaggttagaccctgaaagagatggctcagcaccacctatggatcttgctcctttgcctgcaaacctggccggaagcagctggaaaagactcagaaatcttcacagtgaatgggattctgggagagtcagtcactttccctgtaaatatccaagaaccacggcaagttaaaatcattgcttggacttctaaaacatctgttgcttatgtaacaccaggagactcagaaacagcacccgtagttactgtgacccacagaaattattatgaacggatacatgccttaggtccgaactacaatctggtcattagcgatctgaggatggaagacgcaggagactacaaagcagacataaatacacaggctgatccctacaccaccaccaagcgctacaacctgcaaatctatcgtcggcttgggaaaccaaaaattacacagagtttaatggcatctgtgaacagcacctgtaatgtcacactgacatgctctgtagagaaagaagaaaagaatgtgacatacaattggagtcccctgggagaagagggtaatgtccttcaaatcttccagactcctgaggaccaagagctgacttacacgtgtacagcccagaaccctgtcagcaacaattctgactccatctctgcccggcagctctgtgcagacatcgcaatgggcttccgtactcaccacaccgggttgctgagcgtgctggctatgttctttctgcttgttctcattctgtcttcagtgtttttgttccgtttgttcaagagaagacaagatgctgcctcaaagaaaaccatatacacatatatcatggcttcaaggaacacccagccagcagagtccagaatctatgatgaaatcctgcagtccaaggtgcttccctccaaggaagagccagtgaacacagtttattccgaagtgcagtttgctgataagatggggaaagccagcacacaggacagtaaacctcctgggacttcaagctatgaaattgtgatctaggctgctgggct

SEQ ID NO: 1886 - protein, 328 aa, Homo sapiens
MAQHHLWILLLCLQTWPEAAGKDSEIFTVNGILGESVTFPVNIQEPRQVKIIAWTSKTSVAYVTPGDSETAPVVTVTHRNYYERIHALGPNYNLVISDLRMEDAGDYKADINTQADPYTTTKRYNLQIYRRLGKPKITQSLMASVNSTCNVTLTCSVEKEEKNVTYNWSPLGEEGNVLQIFQTPEDQELTYTCTAQNPVSNNSDSISARQLCADIAMGFRTHHTGLLSVLAMFFLLVLILSSVFLFRLFKRRQDAASKKTIYTYIMASRNTQPAESRIYDEILQSKVLPSKEEPVNTVYSEVQFADKMGKASTQDSKPPGTSSYEIVI

SEQ ID NO: 1887 - DNA, 622 bp, Homo sapiens
  misc_feature (373)..(373): n is a, c, g, or t
  misc_feature (380)..(380): n is a, c, g, or t
  misc_feature (426)..(426): n is a, c, g, or t
  misc_feature (493)..(493): n is a, c, g, or t
  misc_feature (512)..(513): n is a, c, g, or t
  misc_feature (515)..(516): n is a, c, g, or t
  misc_feature (568)..(568): n is a, c, g, or t
  misc_feature (570)..(570): n is a, c, g, or t
tttaaatttctactaaacctttaatcagctaagcaggccagaattttttaatgctgggcaagggctgtcatgaagaagatttatgaaagcagtgacaaaataatttcccaataaatacagtgcagatggggaaaatgatgactgggtcatcctcccacatagaaagaataataagaggccagtacattgatcccacatataattttcaataaatgaggttcagtttggtctcaatgaactcttctgagaagaaaacattgaattttattaggtgtacacagagttaacaaatatattccaaaacagtttagtatgaaacattttgaacccctttagatccaatattgaacattttgcatggaatcttcattgngtagtcnactgttcctgcctttcttgggtaagttgtctttcctaagctcaacnacccagtgttaaactaaaagggatattaagaatgcaaaataaaagaatataattgggaatggaccanattctatgatgaaaagtgnngnngggtttggcctttatttattttcatctaggataattcacacgactgtatttngnaagatcatgggcagggcacctctaacccaacccacttggcgcacatgagccc

SEQ ID NO: 1888 - DNA, 374 bp, Homo sapiens
tttttttttttttttttttgatcagtaattccttattgtttattctccttttacaaaaagacacttgggacaaataaatacaaaatggcatatatcatatttagcaatgggcaaatacacattttcttggtattctccacaagaataaactaataaaattttcagaggcatactcttctacccatctcttaccctctaaaaaaaaaaaaggcaattattttaattccctgtaatttttaacaatgaattctcaaaataagtaatctaggactattcagggaccaagacatctgaatcaacaagttaaaaaaaaaatgtctgtatacacacacacacacacacacacacacacacacacacacacacacacacac

SEQ ID NO: 1889 - DNA, 6542 bp, Homo sapiens
gaaacatgtcattaagtttcttaaatgacgaagaggccaggaagatccttcaggtgctggaaaggaatgaggagttacagagggccgagaaggacaggatcagcaaacttcagaagacaaagagggatatcagatggcttcagggagtgactggtgaatggtttgaagaaattcaaagaaaaaagttttgcaatgaaacagatgttagccaaatgttaaaacaaccacttacatacaggctaagtaaggagatggcaaaaaatgatccgatagaattacctacatcaagatctaaaaatgtaactaatcaaaaaaagccgacacctttttcttcccggatgagcttcagatcgtcatttgcttccctgttctcattcaggaaatctggaaaggagacttcaaagcttccatcactgggacagaaaggatgtgatggccatgcaggacctcctatgcctgtgaggggagctgctgtgcaggcaaaaatatacaattcacctctggaaaatcatctagttgacagtacatttgtcccaaagccagcagtcatgagggaggagagtggcatgcctccaccgtgggatgcttcactgctggagaatgagtttttccaagttttagatgacttggatagcaaattggctcaggaacagtctgcaagctcagtgaataccagaacacccctcaactatggatcaagaacacagttcggtcacttttattccagtggtaacagacatggtaatatcacagaaaggcacaaaaaacactataatgaaacttccaatatgtctatctatgacatcctaagaccaggaactcctagggaaggttttaaaaccttttctcctaggacaagcacaatttatgatatgtataggacaagggagcccagagtctttaaagaagattatgtgcaaaagaatacttttggcagtacttcgctgtgttttgacagcaggcaacggtcggccttaccagccacagggcatttcacagcaagaagcttacattttccagccacaactcagagcaagagtgggtttataccaccaaggcaccagcagagtccaaagagaactcctttatcatccatcatatggaacagatcagattcctctagagacagggagaaccaggaagagttcctgagggcaccatcaccaatggaaattgatcccgctgacaagtatgtgtatcccaggggttttcaggagaataagagatatgaatcgtaccattcacagaatgtttaccaacgtgttagtttaaatgctcccatggagaatgcaatgagtcccgacacttttgagaactcagagaacatgccattctaccatcaaagcaacacatttaccagatctttcttcagcaatacctttggacgaagcggagaacagaggagatttggacaaggtcctttttggggccaagagaaaggacattctttctggtctgactttcatcgaagcaggaaatcattcagttcttctgacagagactttgaaatgatttccatggaagcaaatagtgtatcagccattcatggccataatgtttcttctgaacactgggaatcattttcttctggttatggaacagatgtttccagaggccaagaagagccacatccttggcagtttgattttcagagatccacactggatagcatggtggtatcacatggtaatgagacccagttgactcctcattttggcacaccaaatgtttgctccatgactggttcaagctatcacgtcaaatctagtgagttggtaagtcaacaggacagttctcctgtagaagtacatataaacaaagaagcttcctcatttggaattgctcagactctagcatcctcattcaaaacttccttttcccagatttctgatgacagaaggaatcctcagagtcccaacttgcagaatcccacagtcactttgcagaaaatttttccaaataagcctgcctctcatccaatgagaagccatacagaagtcactgtgaccaacagcaattcagttgactctctgcctcttgccaaaagccagcccaatatcttggtcacagaagtaaataatgagaaagacttaaatgaatctatttcagaagaagacaaacagctaagcaagatggaccagacaaacaaggcaggtgaaataccccaacctgtttcacagacagggatctcaaactctttacctgattttcaaaatcccttatcccaggactcagccaagagcaacgggtttggttttaatgcatctaccataataagttcaaaaaagtcacccagagtcttttccaggaaagatacctccaaaatgtatataccgcacacagataaatccaatgacattaaacaagataagaggtttactgaaaacagaaaacttggctcaacagcttcccttcctttcattcaggaacacagaacaccaccatctttccccaggacagaccaaggttgtcaccaggaattaactgtaaataatgaagatatttcaagaattattacaaataaccactggagctctgcactgactgatactcaaaatgcacaatactcaaaatgcaagttaactcctggccacaagacctcgtgtgattctttagatctgtcatcagctgcactaccagattcctcaccatcaaagaattcttcccttgatgctcctgtggttccatctactacagtgttctccaggagaagtccttcagacaaagatccatcgctaggagaaagagaagaaaaagacaatgctgggaagaaccaaaagaatcagtttattgtaagccactcagaaaaccaagagagaaatgatagtcctgtgcctacacatgatgaagtggttgatgtcaaatgccattcacactctccttttaggaatgaaagaggaaaaggaaaaataaggcatcatatatcctgtattgaaaagttaagcaaaacagaaagtatatcagtacccaccagtgatcacaggagcctcattgaagcaaatcaaagcaattccaaagtttctgaacttgacacaatttattgtaccttgccaagaaaatcaagcagttttctcatacatggcaggcagtcaggaagtaaaataatggctgcttcattgaggaatgggccacctcccttccaaatcaaaaataatgtggaagatgcaatggggaactatatgttaaacaaatttagtcccagttctcctgagtcagcgaatgaatgttccaaagtcctttcagactcagccctggaagcacctgaagccacagagagaatgacaaatgtaaaaagcagtggatctacttccgttagaaaaggaccacttccattcctcatcaacagggctatgtcatgtccctcaggggagccacatgcctcaactggaagagaaggaagaaaaaagccattgacctcaggcatggatgcttctgagctaacaccaagggcttgggagagaatcattagccctgtggaaagtgactcatctgttagagattgttctttaaccaaaagacaacaccaaaaggaaaacttccaagaatacactgagaaagagggtaaaatggctgcctccaggagaagtgtatttgctctttcaaatgaagaccctttacctttttgctcagacttgtcaggaaaagaacgtgggaaaacattacataaagttaagacgactagtacgttttctgtttctggtgatgaagataatgtaaaatgtctggaggtggtctcaatatattacactctaccgaggaaacccagcaaaaaattctgtaacctccttcaacagtatacacaaaatactaatttacttatagaatcacctcaagtggagactgaaacatttcctaacgctttagaaaaagacaaacagaattattctacacgagagcagtcaggaacaccttcatgtgaaaatctaaagatgtccgtcaactctgatcagacgctcaccactgaaaatatgactgccttccgattatcaaatagggggcccctagctcctacattacaggaaatggcttctgttgaggcagctgtttctcttcctgaagaggaatctaaagctagagagattttttcagataatttagctaaaacacctctaggtgattcagaaaacaagaaggaaagaggcaaaaagttgcaaagtgaaaccctgcatacttcattgatgcttcagagaaaaaatgtatccgaagaaaaatctgaaaattgtcaacaatccattaattcaagtaacagtggtccctctagtcttccagctctttcagaagttaatattggaaattcccaaactagaagaagttcttgggagtgtacagggagtggtagagccattccatttactggaagtggcaagtgtccccagaaagatcacacatccacagctgtaggtgatggctccagtggatcacagcctagggaaggcagaggggacattggaaccaactgccaaaaaatgactaataaaacactttctcactcagagagtcaagtctttgcccttactccagcattgcataaactacagcttggtgaggagactcagtcagatgaaccaaacttagagagtctgcagtctgaaccaagagaattacctcaaagaagtcaggaggcaaatatgacagagagcaggaaggctgaagatgaaatgcagaagtcagcttgggatcaaccttcacttcctgaaggaaacaaaaataaaaccaacttggatgacctagtaaagggggaaaatagatcttcagttaaacacagattggcagccatgtctaaagccagcagaaaattcccagctaaagatgtaagccccagaagacatgtagctactatcttcccccaaagtggaagcagatctggctttgaccatttatctcttggcacagtggagtgcaacccactgttccctgagcctactccaaaatctgcagagtccattggcgaaagcaggttgagtgagaacagaaagcatgtgaagaaatccgagaaccttctccccattactgtactacccaacagagaaccttctacacacgtcagcaaccagaagtctaacagcatttcacaacgacatcagaatgagtttaaaaacgtctcagaatcaccatcaaagcatgagaattctaaagacgtcacagcagctcagaatttagtaagagaatcaggagccccatcacccatcacattcaccagcctcagggaagcagaattctctgacaatcagaggaggctgagccctccttttccactggagcctgcacagaaatctagagtaagcagtccactggccagttttctgcagcaacaaaggagtgcttcatctctggagtgggaacctgagccacacctctatcgttcaaagagtttaaaaagcattaatgttcatggcgatctactacgaaaaagccatcctccaaaagtcagggagcgccatttttctgaaagcacttctattgacaatgccctgagtcgactgacccttgggaatgaattctctgtcaacaatgggtacagtcgaagattcagatctttttctgaactcccctcctgtgatggaaatgaaagttgggcttatcgcagcgggacaaaaacaggtcccaggtctgcaatatctatatacagacctatcgactatgggatctttgggaaagaacaacagttagctttcttagaaaatgtaaagaggtcacttacacaaggaagattatggaaaccaagttttcttaagaaccctggcttcctaaaagatgatttgaggaaccctcccaacccctcagagtcattaagctcaaattctcccagtagtcaggtgccagaagatggcttatctccaagtgaaccgcttaatatctatgaggatgacccagtggactcagattgtgacacagacacaaccacagatgatgaatactacctggatgaaaatgacaaagagtcagaactgtgaggctttttcaataaaatgctttacttttttcaccaaaagcttataatggaactaaggtgtacatgtgcatgtgcatggaaggataaaagatctagtctgggcagtgtctgctctgaaatgtcccacatctccttttttttcctccacaccctatatagacacttcctgaatgctagaacaatgaattcttgttttgagagagtctctgctattttctatctctgtaaatgttcttagcctgcctttccaccactcccacttaatccctgattcactgtctgatttgggctttctgctttacttccctcctaacatttttcatctttaattgtgatttacaaccctaatatcccaggcacatacaaaacttatgaattacccagcacaactgtgaaactctgtattgcttcttccggtccacaccctatactcatgacattaaataaaaggtagggatgataacagtggggtaaatattatcatcctgtttgactcatgaacatttaggaagtttaaggtggtgatcttctctttcaaacaaagataaaggaatttattttttaacctgagaaactgattgcaaaaagg

SEQ ID NO: 1890 - protein, 1983 aa, Homo sapiens
NMSLSFLNDEEARKILQVLERNEELQRAEKDRISKLQKTKRDIRWLQGVTGEWFEEIQRKKFCNETDVSQMLKQPLTYRLSKEMAKNDPIELPTSRSKNVTNQKKPTPFSSRMSFRSSFASLFSFRKSGKETSKLPSLGQKGCDGHAGPPMPVRGAAVQAKIYNSPLENHLVDSTFVPKPAVMREESGMPPPWDASLLENEFFQVLDDLDSKLAQEQSASSVNTRTPLNYGSRTQFGHFYSSGNRHGNITERHKKHYNETSNMSIYDILRPGTPREGFKTFSPRTSTIYDMYRTREPRVFKEDYVQKNTFGSTSLCFDSRQRSALPATGHFTARSLHFPATTQSKSGFIPPRHQQSPKRTPLSSIIWNRSDSSRDRENQEEFLRAPSPMEIDPADKYVYPRGFQENKRYESYHSQNVYQRVSLNAPMENAMSPDTFENSENMPFYHQSNTFTRSFFSNTFGRSGEQRRFGQGPFWGQEKGHSFWSDFHRSRKSFSSSDRDFEMISMEANSVSAIHGHNVSSEHWESFSSGYGTDVSRGQEEPHPWQFDFQRSTLDSMVVSHGNETQLTPHFGTPNVCSMTGSSYHVKSSELVSQQDSSPVEVHINKEASSFGIAQTLASSFKTSFSQISDDRRNPQSPNLQNPTVTLQKIFPNKPASHPMRSHTEVTVTNSNSVDSLPLAKSQPNILVTEVNNEKDLNESISEEDKQLSKMDQTNKAGEIPQPVSQTGISNSLPDFQNPLSQDSAKSNGFGFNASTIISSKKSPRVFSRKDTSKMYIPHTDKSNDIKQDKRFTENRKLGSTASLPFIQEHRTPPSFPRTDQGCHQELTVNNEDISRIITNNHWSSALTDTQNAQYSKCKLTPGHKTSCDSLDLSSAALPDSSPSKNSSLDAPVVPSTTVFSRRSPSDKDPSLGEREEKDNAGKNQKNQFIVSHSENQERNDSPVPTHDEVVDVKCHSHSPFRNERGKGKIRHHISCIEKLSKTESISVPTSDHRSLIEANQSNSKVSELDTIYCTLPRKSSSFLIHGRQSGSKIMAASLRNGPPPFQIKNNVEDAMGNYMLNKFSPSSPESANECSKVLSDSALEAPEATERMTNVKSSGSTSVRKGPLPFLINRAMSCPSGEPHASTGREGRKKPLTSGMDASELTPRAWERIISPVESDSSVRDCSLTKRQHQKENFQEYTEKEGKMAASRRSVFALSNEDPLPFCSDLSGKERGKTLHKVKTTSTFSVSGDEDNVKCLEVVSIYYTLPRKPSKKFCNLLQQYTQNTNLLIESPQVETETFPNALEKDKQNYSTREQSGTPSCENLKMSVNSDQTLTTENMTAFRLSNRGPLAPTLQEMASVEAAVSLPEEESKAREIFSDNLAKTPLGDSENKKERGKKLQSETLHTSLMLQRKNVSEEKSENCQQSINSSNSGPSSLPALSEVNIGNSQTRRSSWECTGSGRAIPFTGSGKCPQKDHTSTAVGDGSSGSQPREGRGDIGTNCQKMTNKTLSHSESQVFALTPALHKLQLGEETQSDEPNLESLQSEPRELPQRSQEANMTESRKAEDEMQKSAWDQPSLPEGNKNKTNLDDLVKGENRSSVKHRLAAMSKASRKFPAKDVSPRRHVATIFPQSGSRSGFDHLSLGTVECNPLFPEPTPKSAESIGESRLSENRKHVKKSENLLPITVLPNREPSTHVSNQKSNSISQRHQNEFKNVSESPSKHENSKDVTAAQNLVRESGAPSPITFTSLREAEFSDNQRRLSPPFPLEPAQKSRVSSPLASFLQQQRSASSLEWEPEPHLYRSKSLKSINVHGDLLRKSHPPKVRERHFSESTSIDNALSRLTLGNEFSVNNGYSRRFRSFSELPSCDGNESWAYRSGTKTGPRSAISIYRPIDYGIFGKEQQLAFLENVKRSLTQGRLWKPSFLKNPGFLKDDLRNPPNPSESLSSNSPSSQVPEDGLSPSEPLNIYEDDPVDSDCDTDTTTDDEYYLDENDKESEL

SEQ ID NO: 1891 - DNA, 647 bp, Homo sapiens
ataaaatcctttttttgttgttttctgtttgtttgtttgttttggagaaggagtctcgctttgtcacccaggctggtgtgcagtggcacgatctcggctcactgcaacctccgcctcccaggttcaagcgattctcctgtctcagcctcctgagtagctgggattacagacgtgcgccatcacgcccagctaatttttgtatttttagtagatacggagttttgccttgttggccaggctgtgctggagctcctgacctcaggtgattcacctgccacagcctcccaaagtgctgggattacaggcgtgagccacagcaccctgccaaataagatcctttttaaaaaatatctgaaaaaagcttcatatctttacaaactcataaaatagctgattgggccatggaggagatgaggctgtttagaactggttttgtttcaagtttgtcaattttccctgtatgagaacttgggtaaagcacaaagaaacatacagtgctagtaacaggtctcctgcgccctggaactaggtgtttggaggaaggactaaaccccgggggaggtgagtataaaataattccactaagatcacctcctcagtccccagaaggctgatggtggatcctctggccatctcctgtggggtct

SEQ ID NO: 1892 - DNA, 1026 bp, Homo sapiens
gggggcagtttttacattgtgatgtgtgggtggatggtcatatttagttaggttattaagaaatcatgaagtgttccctaacaagaaacttgcaaagctatttggcaggaagaaaatcattaacttctagtttatttattttttttctcatgctatacgcttaattaccaagtaaattcacttgcataccattaccttaattcaaaggagaagccagaatgtttatcattggtgggagtaaaatatacacagattctttaccatggtgaaatagaataatactgaattcccaatacagaaatactaatttcataagctaatattcctatcttttagctgacttctttctctcttcaggatatatttactatttattatttacctttgaatttttgatttgggggatttttacctattgccatcctactatcttaagtatcctgtacaatgaaatatcttagcaaggaaacacttttaaaacttcacaaatatccaatttcattcttaacatatgggggaagcagtaaaagaaaaagcacttcaccacgtagaagagaaagtgatcattttaattaagataatttcaattcattatcaacatttaatcctctgcaaacaagggaacacttactagcagtacttgaagacttgtgagttggaattgcatgttacttgaaagatctaattaagctaaattttggtgcacagcaggttgtacatgatttcatgtttatgtagcaaaatgcattgaaatgtattagtgttgaaacatacatgtaaaggtagttgtggaaattgttatattttccttgtgtgtcatttatttgagcataaaggttttttttattcagcctaactgaataaggctaaatgaatactgtaattgaaaatatattttaaatctttgtcatgagtttttttaaaaaaaactattgcaaattgtatcattcctgattacacagaactttgtgggtggttttaaataaattttatacttctattttgcaaaaaaaaaaaaaaaaaaac

SEQ ID NO: 1893 - DNA, 5994 bp, Homo sapiens
gaggtttgggaggcgcgggagatgtccaccctgggctggtggcgccgccgggcgccgggcgccatgagggtgcgctaggcggctgttcgtgcccgaggctgcgcagcactgaggtgagctttgccttcttgatcttccgtccttcttggagacgactggcgagaggaagagggactaggtccaaacgctaggtggctgggtccagccggagacccgcaccaaggaggagatcatcgagctcttggtccttgagcagtacctgaccatcatccctgaaaagctcaagccttgggtgcgagcaaaaaagccggagaactgtgagaagctcgtcactctgctggagaattacaaggagatgtaccaaccagaagacgacaacaacagtgacgtgaccagcgacgacgacatgacccggaacagaagagagtcctcaccacctcactcagtccattctttcagtggtgaccgggactgggaccggaggggcagaagcagagacatggagccacgagaccgctggtcccacaccaggaacccaagaagcaggatgcctccgcgggatctttcccttcctgtggtggcgaaaacaagctttgaaatggacagagaggacgacagggactccagggcttatgagtcccgatctcaggatgctgaatcataccaaaatgtggtggacctcgctgaggacaggaaacctcacaacacaatccaggacaacatggaaaactacaggaagctgctctccctcggagtgcagcttgctgaagacgatggccactcccacatgacgcagggccactcatcaagatccaagagaagtgcctacccaagcaccagtcgaggtctaaaaactatgcctgaagccaaaaaatcaacccaccggcgggggatttgtgaagatgaatcttcccacggagtgataatggaaaaattcatcaaggatgtgtcacgcagttccaaatcgggaagagcaagggagtcaagcgaccggtcacagagattccccagaatgtcagatgataactggaaggacatttcattgaacaagagggagtcagtgatccagcagcgggtttatgaagggaatgcatttaggggaggctttaggtttaattcaacccttgtttccagaaagagagttcttgaaagaaagaggcgctatcattttgacacagatgggaagggctcgattcacgatcaaaaaggctgtcccaggaagaagccctttgaatgtggtagtgagatgagaaaagccatgagcgtgagcagcctgagcagcctcagctccccctcctttaccgagtcacagccaattgattttggggcaatgccatatgtatgtgatgagtgtgggaggtcgttcagtgtcatctcagaatttgttgagcaccagatcatgcatactagagagaacctctatgagtatggtgagtcctttatccacagtgtggctgtcagtgaagttcagaaaagtcaggttggagggaaacgttttgaatgtaaggactgtggagagaccttcaataagagtgccgccttggctgaacatcggaagattcatgctagaggttatcttgtggaatgtaagaatcaggaatgtgaggaagccttcatgcctagccccacctttagtgagcttcagaaaatatatggcaaagacaaattctacgagtgcagggtgtgtaaggaaaccttccttcatagttctgccctgattgagcaccagaaaatccactttggggatgacaaagataatgagcgtgaacatgaacgtgaacgtgaacgtgagcgcggggaaacctttaggcccagcccagcccttaatgagtttcagaaaatgtatggtaaagagaaaatgtacgaatgtaaggtgtgtggggagactttccttcatagctcatccctgaaagaacatcagaaaatccatactagagggaacccatttgaaaacaagggtaaagtgtgtgaggaaacctttattcctggtcagtcccttaaaaggcgtcagaaaacttacaataaggagaagctctgtgactttacagatggccgggatgccttcatgcaaagctcagagctcagtgagcatcagaaaattcattctcgaaagaacctctttgaaggcagagggtatgagaaatctgtcattcatagtgggccattcactgaatctcagaagagtcatactataacaagacctcttgaaagtgatgaggacgaaaaggcgttcaccattagctctaacccctatgaaaaccagaagattcccactaaggaaaatgtctacgaggcaaaatcatatgagaggtctgttattcatagcttagcctctgtggaagctcagaaaagtcacagtgtagcagggcccagtaaaccaaaagtaatggcagagtctaccattcagagcttcgatgctatcaaccatcagagagttcgtgctggagggaacacctctgaaggaagggaatacagtaggtctgttatccatagcttagtggcttccaaacctccaagaagtcacaatggaaatgaattggtggaatctaatgagaagggagaatcctccatttatatctcagaccttaatgataagcgacagaagattcctgccagagagaacccttgtgaagggggcagtaagaatcgcaactatgaagactctgtcatacagagtgtattccgtgccaaacctcagaaaagtgttcctggagagggatctggtgagtttaagaaggatggcgaattctctgttcccagctcaaatgtccgtgaataccagaaggctcgtgctaaaaagaaatacattgagcataggagcaatgagacctctgtaattcactctctgccttttggtgaacaaacatttcgccctcgagggatgctctatgaatgtcaggagtgtggggagtgctttgctcatagctctgacctcactgagcaccagaagattcatgatagggagaagccctctggaagcagaaactatgaatggtctgtcattcgcagcttggcccctactgaccctcaaacaagttacgcccaagagcagtatgctaaagagcaagcgcggaacaaatgtaaggacttcagacaattttttgctaccagcgaagacctcaacacaaaccagaaaatctatgaccaagagaagtctcatggcgaggagtctcaaggcgagaatactgatggggaggagacccacagcgaggagacccatggtcaggagacaattgaagaccctgtcattcaaggctcagacatggaagaccctcagaaggatgaccctgatgacaaaatctatgaatgtgaggactgtggcctgggctttgtggatctcacagacctcacagaccatcagaaagtccacagcaggaagtgcctggttgacagtcgggagtacacacattctgtaattcacacccattccatcagcgagtatcagagagattacactggagagcagctgtatgaatgtccaaagtgtggggaatcttttattcatagctcattccttttcgagcatcagagaatccatgaacaagaccagttgtattccatgaaggggtgtgatgatggttttattgccctcttgcccatgaagccacggaggaatcgtgctgcagagaggaatcctgctcttgctgggtcggccattcgatgccttttgtgtggacaaggcttcattcatagctctgcccttaatgagcatatgagacttcatagggaagatgatttactggagcagagccagatggctgaggaagctatcattccaggcttagccctcactgagtttcagagaagtcagaccgaagagagactctttgaatgtgcagtctgtggagaatctttcgtcaacccagcagaacttgcagatcacgtaactgttcataagaatgagccctatgagtacgggtcctcctatactcacacctcatttcttactgagcccctcaaaggagctataccattctatgaatgcaaggattgtggtaagtcctttattcatagcacagtcctcactaaacataaggagcttcatctggaagaagaagaagaagatgaagcagcagcagctgcagcagcagcagcccaggaagttgaagccaatgtccatgttccacaagtagttctgaggattcagggcttaaacgtagaggctgctgagccagaagtggaggctgccgagccagaagtggaggctgctgagccagaagtggaggctgctgagccaaacggagaggctgaagggccagatggagaggctgcagagcccattggagaggctggacagccaaatggagaggccgagcagccaaatggggatgctgatgagccagatggtgcaggtattgaagacccagaagaaagagctgaagagccagagggaaaagctgaagagccagagggagatgccgacgagcctgacggtgtgggaattgaagacccagaagaaggtgaagatcaagagattcaggtagaagaaccatactatgactgccatgaatgcacagaaaccttcacttccagcacagcattcagtgaacacctgaaaactcatgccagcatgatcatatttgagcctgcaaatgcctttggggagtgctcaggctacatcgaacgtgccagcaccagcacaggtggtgccaatcaagctgatgagaagtacttcaaatgtgacgtctgtgggcagctcttcaatgaccgcctgtccctcgccagacaccagaatacccacactggctgagggcatggggtaaaggttagaaaaccttcacctaggacttgacccttaccaaaccacagagaatccaaaccaatccatgataatgtcagtaggagacttaaccttagtgtgttacacacctgacttaacatctctaaactcagattgaaaagagaccgaatgtgcagattccacagtcttaagctttccccttcagatgtcagtgtctgcatgtgggaaagccatagcacacatcttacctttccaagtaatcagattgagaaaaccctatgagtattccagactacagagtttgcccaaatcaactgtaaatgacacttgtgtaacgtatatatagtgtttcatgaggtgtatataaaatagcaaattatgacagaacagtgatcacatatatttggatttatatgatatacagttacagtttactctgcagaggtaccttacctggtattctttgaattttttttttttttggaggaggaagagagcaacaaatttgattatatttttaagtgtcttagatcctgagaaagatttattgtgcattatttgaaccctgtcaatatctttttgagtaattgttttgtttcttacccttaaatagtcttgtgaagctgtaggcatgatagataacatggcttttactccttactgtttgaaaagataagtactttagcttctttctgcagccatttcatctgcaccaacactttggaacctaatactgtgtaaggctttacaatatacggattggctttttgtgacccagattgattggttgccacatgttatgtttgttgaagtggttctcatgcaaaaatattacacatttgtgttctgggtttttttttttttttaaccaactcaatatgtgtttgatgatagtgaattgataaaacccgaagcttttccctgtaaatcttacatctttgcctttaaagaatgggttacaaccatcactagatcacagtagtgcctaatgaaggttgagaaccgtaggagaggctctcatgctgtaaataatgttgcaggctaataacctttcatcacttcctttgtgcgcttcctgccttaagtgacaagtagcaacatggcttgggtcccctgtgcagcatcagcttatgctgccacaagtcagtttgcaccctaggtgcccaggagctagtatccttagatctttctatcgctaacttaattctcttcgttatttatctgaccctctaactccatgtctaacttgcatt

SEQ ID NO: 1894 - protein, 1523 aa, Homo sapiens
VQTLGGWVQPETRTKEEIIELLVLEQYLTIIPEKLKPWVRAKKPENCEKLVTLLENYKEMYQPEDDNNSDVTSDDDMTRNRRESSPPHSVHSFSGDRDWDRRGRSRDMEPRDRWSHTRNPRSRMPPRDLSLPVVAKTSFEMDREDDRDSRAYESRSQDAESYQNVVDLAEDRKPHNTIQDNMENYRKLLSLGVQLAEDDGHSHMTQGHSSRSKRSAYPSTSRGLKTMPEAKKSTHRRGICEDESSHGVIMEKFIKDVSRSSKSGRARESSDRSQRFPRMSDDNWKDISLNKRESVIQQRVYEGNAFRGGFRFNSTLVSRKRVLERKRRYHFDTDGKGSIHDQKGCPRKKPFECGSEMRKAMSVSSLSSLSSPSFTESQPIDFGAMPYVCDECGRSFSVISEFVEHQIMHTRENLYEYGESFIHSVAVSEVQKSQVGGKRFECKDCGETFNKSAALAEHRKIHARGYLVECKNQECEEAFMPSPTFSELQKIYGKDKFYECRVCKETFLHSSALIEHQKIHFGDDKDNEREHERERERERGETFRPSPALNEFQKMYGKEKMYECKVCGETFLHSSSLKEHQKIHTRGNPFENKGKVCEETFIPGQSLKRRQKTYNKEKLCDFTDGRDAFMQSSELSEHQKIHSRKNLFEGRGYEKSVIHSGPFTESQKSHTITRPLESDEDEKAFTISSNPYENQKIPTKENVYEAKSYERSVIHSLASVEAQKSHSVAGPSKPKVMAESTIQSFDAINHQRVRAGGNTSEGREYSRSVIHSLVASKPPRSHNGNELVESNEKGESSIYISDLNDKRQKIPARENPCEGGSKNRNYEDSVIQSVFRAKPQKSVPGEGSGEFKKDGEFSVPSSNVREYQKARAKKKYIEHRSNETSVIHSLPFGEQTFRPRGMLYECQECGECFAHSSDLTEHQKIHDREKPSGSRNYEWSVIRSLAPTDPQTSYAQEQYAKEQARNKCKDFRQFFATSEDLNTNQKIYDQEKSHGEESQGENTDGEETHSEETHGQETIEDPVIQGSDMEDPQKDDPDDKIYECEDCGLGFVDLTDLTDHQKVHSRKCLVDSREYTHSVIHTHSISEYQRDYTGEQLYECPKCGESFIHSSFLFEHQRIHEQDQLYSMKGCDDGFIALLPMKPRRNRAAERNPALAGSAIRCLLCGQGFIHSSALNEHMRLHREDDLLEQSQMAEEAIIPGLALTEFQRSQTEERLFECAVCGESFVNPAELADHVTVHKNEPYEYGSSYTHTSFLTEPLKGAIPFYECKDCGKSFIHSTVLTKHKELHLEEEEEDEAAAAAAAAAQEVEANVHVPQVVLRIQGLNVEAAEPEVEAAEPEVEAAEPEVEAAEPNGEAEGPDGEAAEPIGEAGQPNGEAEQPNGDADEPDGAGIEDPEERAEEPEGKAEEPEGDADEPDGVGIEDPEEGEDQEIQVEEPYYDCHECTETFTSSTAFSEHLKTHASMIIFEPANAFGECSGYIERASTSTGGANQADEKYFKCDVCGQLFNDRLSLARHQNTHTG

SEQ ID NO: 1895 - DNA, 543 bp, Homo sapiens
tagcggtccagaggatcccgagctgccacaaaggatgccacatgctttaaaaacatctacataatggccaaagccagggccccaaatcaaaaggtggtcccagttgaaagtccctgcttgctgccctagcttcatgggcagtgtgttgtcagcagtgcctggtgctagctgcctgggtgcccacaggtcctccctcggccctgcgaccgtggtaccttcgaggcttcagtctggctccataattatcttcatcatctgcatcagattcattgacttgagataatttgggcattctggaagtatataccattggcttctccctgtcatattccatttctgagcaagtgaaagattcatgggagtcactatcagaagaggattctggagctggaatgccatccgctggattccttgttctagacagtggccttctgcagtcctcctctgaagaagacctcccatggtctgcactgaaaattcttgggtttctagggcgaggtgtgttgagcctctccacttcttcaatagaaagtccgactggag

SEQ ID NO: 1896 - DNA, 430 bp, Homo sapiens
ttttttttttttttgacacttgaaatcatttattcaaggcatttttatataatcttgcaatcatagtatagatgtataataaaagaatatgagaatgcaaagaggaacataaagccaatgtctgagcatttaaaataagagttcttcaaaaaagttacacgtcttacaaataacattcctgaaaaatttgggagaagctaaaacttcactaaaaacctaacaccaaatgacatgttacttagtttatagcaagcagttttatattaattaaatgtttatataccacaagctaagatttaatgcattttacattcagatttaaataactcagcaccattttagcttagaggataaatgaaatgtttagtgtttaaaagtggcccaggaattttggtagctaggaatgagacttaactcactgattgaatat

SEQ ID NO: 1897 - DNA, 1326 bp, Homo sapiens
atggaaggagacttctcggtgtgcaggaactgtaaaagacatgtagtctctgccaacttcaccctccatgaggcttactgcctgcggttcctggtcctgtgtccggagtgtgaggagcctgtccccaaggaaaccatggaggagcactgcaagcttgagcaccagcaggttgggtgtacgatgtgtcagcagagcatgcagaagtcctcgctggagtttcataaggccaatgagtgccaggagcgccctgttgagtgtaagttctgcaaactggacatgcagctcagcaagctggagctccacgagtcctactgtggcagccggacagagctctgccaaggctgtggccagttcatcatgcaccgcatgctcgcccagcacagagatgtctgtcggagtgaacaggcccagctcgggaaaggggaaagaatttcagctcctgaaagggaaatctactgtcattattgcaaccaaatgattccagaaaataagtatttccaccatatgggtaaatgttgtccagactcagagtttaagaaacactttcctgttggaaatccagaaattcttccttcatctcttccaagtcaagctgctgaaaatcaaacttccacgatggagaaagatgttcgtccaaagacaagaagtataaacagatttcctcttcattctgaaagttcatcaaagaaagcaccaagaagcaaaaacaaaaccttggatccacttttgatgtcagagcccaagcccaggaccagctcccctagaggagataaagcagcctatgacattctgaggagatgttctcagtgtggcatcctgcttcccctgccgatcctaaatcaacatcaggagaaatgccggtggttagcttcatcaaaaaggaaaacaagtgagaaatttcagctagatttggaaaaggaaaggtactacaaattcaaaagatttcacttttaacactggcattcctgcctacttgctgtggtggtcttgtgaaaggtgatgggttttattcgttgggctttaaaagaaaaggtttggcagaactaaaaacaaaactcacgtatcatctcaatagatacagaaaaggcttttgataaaattcaacttgacttcatgttaaaaaccctcaacaaaccaggcgtcgaaggaacatacctcaaaataataagagccatctatgacaaaaccacagccaacatcatactgaatgagcaaaagctggagcattactcttgagaagtagaacaaggcacttcagtcctattcaacatagtactggaagtctcgccacagcaatcaggcaagagaaagaagtaaaaggcaccc

SEQ ID NO: 1898 - protein, 317 aa, Homo sapiens
MEGDFSVCRNCKRHVVSANFTLHEAYCLRFLVLCPECEEPVPKETMEEHCKLEHQQVGCTMCQQSMQKSSLEFHKANECQERPVECKFCKLDMQLSKLELHESYCGSRTELCQGCGQFIMHRMLAQHRDVCRSEQAQLGKGERISAPEREIYCHYCNQMIPENKYFHHMGKCCPDSEFKKHFPVGNPEILPSSLPSQAAENQTSTMEKDVRPKTRSINRFPLHSESSSKKAPRSKNKTLDPLLMSEPKPRTSSPRGDKAAYDILRRCSQCGILLPLPILNQHQEKCRWLASSKRKTSEKFQLDLEKERYYKFKRFHF

SEQ ID NO: 1899 - DNA, 402 bp, Homo sapiens
tttttttttttttttttggcgggtgtcactctttattgcggggtccacactgtgggtgctggggcccctcccactgagggaaggctgagcctctagccagggctggccacctggccacctatgagtccattcttctgtccccttaatctcaggctgagcatttacactggatttctgggggcctgtgagtcctccttgaccttcatcgcccactatcatgtgcttgagagcatcacaagtcagtagcaatgagccaggtgggtggtgggtcacctggcacagcaggcctggggcttgggtcccagcccagcagctgtggagtcccaggtggaggcaggggtggtggccccggccgcactgccctcaggctcaaggtccaggccctcgtaaatggtggggagt

SEQ ID NO: 1900 - DNA, 1760 bp, Homo sapiens
cdsctgcagcagagagtgtgtttcccccattgccttgtgttctccttgaattaacttggctcgcccttccccttttccgcagatggcctcgcctcctcccgggtccgcctatacttcttcatctccaacgaaggcaaccagaacctgtttgtggtccaggccagcctgtggctttacctgaaactcctgccctacgtcctggagaagggcagccggcggaaggtgcgggtcaaagtgtacttccaggagcagggccacggtgacaggtggaacatggtggagaagagggtggacctcaagcgcagcggctggcataccttcccactcacggaggccatccaggccttgtttgagcggggcgagcggcgactcaacctagacgtgcagtgtgacagctgccaggagctggccgtggtgccggtgttcgtggacccaggcgaagagtcgcaccggccctttgtggtggtgcaggctcggctgggcgacagcaggcaccgcattcgcaagcgaggcctggagtgcgatggccggaccaacctctgttgcaggcaacagttcttcattgacttccgcctcatcggctggaacgactggatcatagcacccaccggctactacgggaactactgtgagggcagctgcccagcctacctggcaggggtccccggctctgcctcctccttccacacggctgtggtgaaccagtaccgcatgcggggtctgaaccccggcacggtgaactcctgctgcattcccaccaagctgagcaccatgtccatgctgtacttcgatgatgagtacaacatcgtcaagcgggacgtgcccaacatgattgtggaggagtgcggctgcgcctgacagtgcaaggcaggggcacggtggtggggcacggagggcagtcccgggtgggcttcttccagcccccgcgggaacggggtacacggtgggctgagtacagtcattctgttgggctgtggagatagtgccagggtgcggcctgagatatttttctacagcttcatagagcaaccagtcaaaaccagagcgagaaccctcaactgacatgaaatactttaaaatgcacacgtagccacgcacagccagacgcatcctgccacccacacagcagcctccaggataccagcaaatggatgcggtgacaaatggcagcttagctacaaatgcctgtcagtcggagagaatggggtgagcagccaccattccaccagctggcccggccacgtctcgaagttgcgccttcccgagcacacataaaagcacaaagacagagacgcagagagagagagagagccacggagaggaaaagcagatgcaggggtggggagcgcagctcggcggaggctgcgtgtgccccgtggcttttaccaggcctgctctgcctggctcgatgtctgcttcttcccagcctgggatccttcgtgcttcaaggcctggggagcctgtccttccatgcccttgtcgagggaaagagacccagaaaggacacaacccgtcagagacctgggagcaggggcaatgaccgtttgactgtttgtggcttgggcctctgacatgacttatgtgtgtgtgtgtttttggggtggggagggagggagagaagagggggctaaatttgatgctttaactgatctccaacagttgacaggtcatccttgccagttgtataactgaaaaaggacttttctaccaggtatgaccttttaagtgaaaatctgaattgttctaaatgaaaagaaaaa

SEQ ID NO: 1901 - protein, 407 aa, Homo sapiens
MDGLPGRALGAACLLLLAAGWLGPEAWGSPTPPPTPAAPPPPPPPGSPGGSQDTCTSCGGFRRPEELGRVDGDFLEAVKRHILSRLQMRGRPNITHAVPKAAMVTALRKLHAGKVREDGRVEIPHLDGHASPGADGQERVSEIISFAETDGLASSRVRLYFFISNEGNQNLFVVQASLWLYLKLLPYVLEKGSRRKVRVKVYFQEQGHGDRWNMVEKRVDLKRSGWHTFPLTEAIQALFERGERRLNLDVQCDSCQELAVVPVFVDPGEESHRPFVVVQARLGDSRHRIRKRGLECDGRTNLCCRQQFFIDFRLIGWNDWIIAPTGYYGNYCEGSCPAYLAGVPGSASSFHTAVVNQYRMRGLNPGTVNSCCIPTKLSTMSMLYFDDEYNIVKRDVPNMIVEECGCA

SEQ ID NO: 1902 - DNA, 211 bp, Homo sapiens
  misc_feature (5)..(5): n is a, c, g, or t
  misc_feature (19)..(19): n is a, c, g, or t
  misc_feature (36)..(36): n is a, c, g, or t
  misc_feature (120)..(120): n is a, c, g, or t
  misc_feature (158)..(158): n is a, c, g, or t
  misc_feature (180)..(180): n is a, c, g, or t
acctnctggctgtggtctntgcccactgcttctgtncttggaaagcagggcaggaggcagcatccccaggggcctctatgtgggagggagggacacctggggtcacaacccagggagggngggtcacagcccagggaggctgggagctgctccaaggncctggaactctgcctcagtcgnggcatgctggagaggggtacggacttacttt

SEQ ID NO: 1903 - DNA, 3492 bp, Homo sapiens
cacgcgtccctcttgcaacttgctgagtttccctaagatcattattttgaattccttttctggcatttttatagatttccttttcttttgaatctgttactggagaattattgtgtctctttggaggtatcaaatttccttgctttttcatgtttcttgtgtccttacattgatatctattcagctagtggaagagttgcttcttccaattttatggattggctttcataaggaaagacttttttgtaggcatatctgtagttttggttgtgattaggatgttttggctttgattctggtgagcacaggagtgtaggctcaatgatttcttcagctgtaaccaatgtaactggtgtcatgtaaccatgtcactgtgagtcctcagtggcttaagttgccattgttagctgaggctgttgtgaggcttttctggggaaagggatgccagaggggccagtccctgggccttttggtggcatgggcaggctttagctgtggtggcgatgggctgggcatgctagtcctcaggaccccagctggtgtaagtgctggtagtggggggcccaggtgggctggtcctcaagcccccaggcagcatttatggtgctggcagtggcagtagcagcagtgggctagacactggactgtcaggtggcaatcatagctgttggcagtagctgtggcaggatgaatgggacagtttctagccccctaggtgatgcacttgggtgggcactggtggtaggtggggcaggcctgttcaggccttgggattgtgtgcgtgggcaccagtggtgttggatggggtgggccagtcgtcaggcccccctacagagcatataggcaccagtagtggcatgagggaaagatagcgctggagaacactggtgacagtgggtggagcaggcctgtctttaggttcttggatggcacatatggacatactggtcctcaggccccctgaaggtgcacacaggcatgctgttgccctgctgagaggggcaaggttctgttggtggcattggtgttgggaagatggctcccaggttctgggagcttcagctccctttttcctggggtagcctccctggtgtgctatactgcctgttccctgggatataagacacttcatgggtcagagtactggggacctggctgcactgctgggtgattgtgatactgcaaccttctggatggatgtgggaggatgttcttgggggtccagggatgtggactgcaggggcttattggaccccaagtgggcaggatataatctggtgggggctagcctcttaaaatggtgctgtgccacagcagcatgtttcttgggatgtgagtaggatccagtggaattccctttctggaagaacgcatttgcatggattccaggcagctccgtatactggactcagggcctgtgaaggctgacggcatcccctgtgggtgccagcatctgtgctgcgaatgtggaccactgcagttctttgacttttcttttcccagaaatgggattcccctcctgcttctgagccagtccaagacatgctggctgctttatttactgctccctttgtgcctcagaagttccctgttgaatagtgttctgtctttggtgctctacctgacatgtggttaactacttgcttttttggtcctttgttgtgcaggagttgagtgccaggctcacggttttttgattaccatagttttgtagtttttgaaattcagaagtgtgagacctccaactttttctttttcaagattattttggctgttgagtcaattatgattccatatgcattttagatggatttttctatttctggaattgtgccattaggagtctgatagatactgcattgaatctgtagagtgctttgggtagtattgacatcttcccactattaagtcttccagtacatgaacacatgcattttcctgatgactaatgatgttgtaccttttcatatgcttattggctatttgtagatcttcctgggagaaatgtctatgcagactttttgccaattttttaatttgtccatttaaaaatcagggttttttttgttgttgagttgtaggagttctttttgtattccttatactagtcccttatcagatatatgctttgcagatattttctcccaggtgggttgtcttcacttccttggtagtgtcttttaatacacaaagttttaaatttttatgaagtcaaatgtatctacatttttctttggttgctcatgcttttggtgttgcatctaagaatccactgccaaatccaaggtcatgaagatttactcctatgttttcttctaagaattttatagtttttgctattacataaggtctttgagccattaagatctttgacttaacttttgtatatgatgtaaagtcactgtcaaacatcattcttttgcatttggctgtcactgggttactgaggactgggtagcttagttgagtagataatcttttgttgtttcctccttgtaatatacaagccttggcttctgtgacatcatactctcctagatttccccctgtcactgtggcttcttctcagtctctgtccatccctggtgctcctgaaggttctgttctcagccttacacacattacctgggtgatctcattctctgccatgacttcacttgccatatatgtgctgattttccccaaattcctatttctcccgacctttacatctattttatttgcaggtcatatatctaataaggaattgatatccagtgtacatgtagaactcctgtaattcaatacagaaaccaaacagtccaattaataaatggagaagagatttgaatgaacatttttctaaagaacatctcaagctcaagatttcccagataacttttctttcttcaaaatctgcttctgtgtttcctcatctgtaggtggcacagcatacatctgatttcccaagccagaaacctcatagttattcttgactccaggaagaaatattattgagtttttaaaaactcagcttattgactcattgttttatataataaaatgcaacagttttaagtgtatatttcaatgagttttaatacatttatgtacttgtgtcactatcctcatagatagagacaaaacatttctatcacaccggcaatttcctatgtgtcccatcccaatcaatcctttcccctttgctggctccaaacaatgactctttcctatctttttagaaagattagaattgcttttctagagttccagtaatggaatcatacagtgtctaagtctgtttgtggtgctgtaacaaaatacctgagactgggtaatttataaattataggaatttatttctcacagttctggatgctgaaaagtttatgatcaaggcactagcaggtttggtgtctgagggcccagtttctaatttgaagatggtgctttaaacactgtcctcacatggtagaaggggcagatgggcaaacaaaaaaaaaaaaaaaaagg

SEQ ID NO: 1904 - DNA, 452 bp, Homo sapiens
  misc_feature (173)..(173): n is a, c, g, or t
  misc_feature (175)..(176): n is a, c, g, or t
gaggcccagagcaggctccccccttggtccagctggagcagccctttcagggagccccgccctcccaaaaagccgtgcaaatccagctacccccccagcaggcccaggcatcgggtccgcaagcggaggtgcccacactgccgctccagccttcctggcaggcaccgcctgangnntcttgcaggcccagcccggacccccggtagcagcggcaaattttcccctgggctccgctaaatcattgatgactccatcaggagaatgcagggcctcttctatagaccgcagggctcctctaaagagcgcaggacctcctcgaaggagcgcagggccccttcaaaagaccgcatgatctttgctgccaccttctgtgctcccaaggcagtgtcagctgcgcgagcacacctgccagctgcctggaaaaacctgcctgccacaccggagacctttgc

SEQ ID NO: 1905 - DNA, 3652 bp, Homo sapiens
tggcggacgccgcctggtgagaagcaggcagccagtacccttgccacggtagaatgggtgaggaggggccccccagcctggagtacatccaagccaaggatctgttcccccccaaggaactagtgaaggaggaagagaatcttcaggtccccttcacagtgctgcagggtgagggagtagagttcctgggccgggcagccgatgccctcattgccatctctaactaccggctgcatatcaaattcaaggactctgtcatcaacgtccccctccggatgattgacagtgtggagagccgtgatatgttccagttgcacatttcctgcaaggactccaaagtggtgaggtgccacttctccacttttaagcagtgccaagagtggctctcacggctaagccgagccacagcaagacctgccaagcctgaagacctctttgcctttgcctaccatgcctggtgcctggggctgaccgaggaggaccagcacactcacctatgtcagccaggtgagcacatacgttgtcgacaggaggcggagcttgcaaggatgggctttgacgtgcagaacgtctggagagtctcacacatcaacagcaactacaaattgtgccccagttacccccagaagctgctggttcctgtgtggatcactgacaaagagctggagaacgtggcttccttccgctcctggaagcggattcccgtggttgtgtatagacacttgcgcaatggggctgccatcgcccgctgcagccagccagagatcagctggtggggctggcgcaatgctgatgatgagtacctggtcacgtccattgctaaagcctgtgccctggacccggggacaagggccactgggggctccctcagcaccgggaataatgataccagcgaggcgtgtgatgctgactttgattcttctctgactgcgtgctctggagtggagagcacagcagctcctcaaaagctgctgatcctggatgcgcgatcctacacggcagcagtggccaaccgggccaagggtggaggctgtgaatgtgaagagtactatcccaactgtgaggtcgtgttcatgggaatggccaacatccatgccatccggaacagctttcagtacctccgggctgtgtgtagccagatgccggatcctagcaactggttgtcggcactggagagtaccaaatggctgcagcacttgtcggtgatgctaaaagcagctgtgctggtggctaatacagtagaccgggaaggccggcctgtgctggtacactgctcagatggctgggaccgcacaccgcagatcgtagccctggccaaaatattactggacccatattacaggacgttggagggcttccaagtgttagtggagtctgactggctggattttgggcacaagtttggagatcgctgtggccaccaagagaatgtggaggaccaaaacgaacaatgccctgtgttcctccagtggcttgattctgttcatcagttgcttaagcagttcccctgcctgtttgaatttaatgaagcattcctggtaaaactggtgcaacacacatactcctgcctctacggcaccttcctggccaacaacccctgtgagcgagagaagcgcaacatctacaagcggacctgctctgtgtgggcgctccttcgagctggcaataaaaactttcataacttcctctacacacccagctcagacatggtcctgcatcctgtttgtcatgtccgggccctgcacctctggacagctgtttatctgccagcatcatctccatgcacacttggggaagaaaacatggatctttacctttccccagtggcccagagccaggagttctctggccgctctctggacagattacctaaaaccagatccatggatgatcttctttctgcctgtgacacaagcagccccctgactcgtacatccagtgaccctaacctgaataaccactgtcaggaggtcagggtaggcctggagccctggcacagcaatcctgagggatcagagacaagctttgtggactctggggtaggagggcctcagcaaactgtaggagaagtgggtcttcctcctcctctgcccagcagccagaaagactacttgagcaataaacctttcaagagtcacaaaagctgttctccaagttacaaactgcttaataccgcagtgcctcgggaaatgaagagcaacacctctgatcctgagatcaaagtcctagaagagactaagggaccagctccagacccttctgcccaggatgagctgggtaggactttagatggcataggggagccacctgaacattgtcctgaaacagaagctgtcagtgcactctccaaggtcatttctaacaagtgtgatggagtttgtaattttcctgagtcttcccagaactctcctacaggtacgccccaacaggcccagccagactccatgctaggtgtgccctccaagtgtgttcttgatcacagcctcagcaccgtttgcaacccaccgagtgctgcctgccaaactcctctagacccaagcactgacttcctcaaccaagatccctcagggtctgtggcaagtatctcccaccaggaacaactgagttctgtgccggatctgacccatggggaggaagacattggtaaaagaggaaataataggaatgggcagttattggaaaatcctcgctttgggaaaatgccattggaattggtccggaagccaatttctcagagccagatcagtgagttctcttttctagggtccaactgggacagcttccaagggatggtgacttcattcccaagtggggaggccacccctcggcggctgctttcctatggctgttgtagcaagaggccaaacagtaagcagatgcgggccacagggccctgctttgggggccagtgggctcagagagaaggtgtgaagtcacctgtctgttctagtcattccaatggacattgtactggcccaggaggaaagaaccagatgtggttgtccagtcatccaaagcaagtctctagcacaaagcccgttccactgaactgcccttctccagtgcctcctctgtatttggatgatgatggactcccctttcccacggatgtgatccagcataggttacggcaaatcgaagcagggtacaaacaagaggtggagcagctacgtcgacaggtgcgtgagcttcagatgaggctggacatccgtcactgctgtgcccctccagcagagccccccatggactatgaggatgattttacatgtttgaaggagtcagatggcagtgatactgaggattttggctctgatcacagtgaagactgcctttcagaagcaagctgggaacctgttgataagaaagagactgaggtgactcgctgggttccagaccatatggcatcacactgctataactgtgactgtgaattctggttggccaaacgaagacaccattgcagaaattgtgggaatgtattttgtgctggatgctgccacctgaagctgcccattcctgatcagcaactctatgacccagttctcgtctgtaactcatgttacgaacacattcaagtctctcgtgccagggaactcatgagccaacagctgaagaaacccattgctacagcttccagttgaatgccggggag

SEQ ID NO: 1906 - protein, 1195 aa, Homo sapiens
MGEEGPPSLEYIQAKDLFPPKELVKEEENLQVPFTVLQGEGVEFLGRAADALIAISNYRLHIKFKDSVINVPLRMIDSVESRDMFQLHISCKDSKVVRCHFSTFKQCQEWLSRLSRATARPAKPEDLFAFAYHAWCLGLTEEDQHTHLCQPGEHIRCRQEAELARMGFDVQNVWRVSHINSNYKLCPSYPQKLLVPVWITDKELENVASFRSWKRIPVVVYRHLRNGAAIARCSQPEISWWGWRNADDEYLVTSIAKACALDPGTRATGGSLSTGNNDTSEACDADFDSSLTACSGVESTAAPQKLLILDARSYTAAVANRAKGGGCECEEYYPNCEVVFMGMANIHAIRNSFQYLRAVCSQMPDPSNWLSALESTKWLQHLSVMLKAAVLVANTVDREGRPVLVHCSDGWDRTPQIVALAKILLDPYYRTLEGFQVLVESDWLDFGHKFGDRCGHQENVEDQNEQCPVFLQWLDSVHQLLKQFPCLFEFNEAFLVKLVQHTYSCLYGTFLANNPCEREKRNIYKRTCSVWALLRAGNKNFHNFLYTPSSDMVLHPVCHVRALHLWTAVYLPASSPCTLGEENMDLYLSPVAQSQEFSGRSLDRLPKTRSMDDLLSACDTSSPLTRTSSDPNLNNHCQEVRVGLEPWHSNPEGSETSFVDSGVGGPQQTVGEVGLPPPLPSSQKDYLSNKPFKSHKSCSPSYKLLNTAVPREMKSNTSDPEIKVLEETKGPAPDPSAQDELGRTLDGIGEPPEHCPETEAVSALSKVISNKCDGVCNFPESSQNSPTGTPQQAQPDSMLGVPSKCVLDHSLSTVCNPPSAACQTPLDPSTDFLNQDPSGSVASISHQEQLSSVPDLTHGEEDIGKRGNNRNGQLLENPRFGKMPLELVRKPISQSQISEFSFLGSNWDSFQGMVTSFPSGEATPRRLLSYGCCSKRPNSKQMRATGPCFGGQWAQREGVKSPVCSSHSNGHCTGPGGKNQMWLSSHPKQVSSTKPVPLNCPSPVPPLYLDDDGLPFPTDVIQHRLRQIEAGYKQEVEQLRRQVRELQMRLDIRHCCAPPAEPPMDYEDDFTCLKESDGSDTEDFGSDHSEDCLSEASWEPVDKKETEVTRWVPDHMASHCYNCDCEFWLAKRRHHCRNCGNVFCAGCCHLKLPIPDQQLYDPVLVCNSCYEHIQVSRARELMSQQLKKPIATASS

SEQ ID NO: 1907 - DNA, 204 bp, Homo sapiens
  misc_feature (87)..(87): n is a, c, g, or t
  misc_feature (107)..(107): n is a, c, g, or t
  misc_feature (151)..(151): n is a, c, g, or t
  misc_feature (157)..(157): n is a, c, g, or t
taaaaacaaaaaacagtccactaaatcagccacattaattgggaatcatatgtcacaggtcatttgtggggcaaacatcactgcttntccatcaagggagcaaagantaagtgggagttttggaagagtttggatgagagacgccaaggtncccagngttcgtaaggcaacatgcagcctggcgtgaagcagtattttgaaact

SEQ ID NO: 1908 - DNA, 266 bp, Homo sapiens
aagaaatgcaggtaatctctatactagacaagttcagatagaaggtgaaaccctggctcttcaggttcaagacactccaggtattcaggtccatgagaacagcctgagctgcagtgaacagctgaataggtgcattcgctgggcagatgctgtggtgatcgttttctccatcactgactacaagagctatgaactcatcagccagctccaccagcacgtgcagcagctacacctgggcacccggctgcctgtggtggtcgtggcca

SEQ ID NO: 1909 - DNA, 3074 bp, Homo sapiens
gaagtggggatcggcgagcgggtgggtgcgcctcgggccgcgggactcgcagccgccaccgccgctgccgcctctacggccgcgtcagaactgaagagaggaaggggaggagccgagtcgagcctaagctgccgcccgatcttacccctgacccgagggcggcctggagagcttggtctgtagcggtttccttcggggcaggtggggactgctcctttgggaggaaggaggaggcccaggccgcgtcttcaggcagctgcgcgcaccacccgaaggtgaggcatttggccccaaacagaccctcgaaaagccggactgatcgaggagttaccctacagcctgatctgcacctgctccagggagagagcgccccacccttcccgtggcgtggggtgagacccagcgttggataacgtgtggtcgggccgagcaaatgtttgatgaatgaatgaatgaatgaatgcctctctcacgtggcactcgtgaagctcagaggatatggtggaagtgcaagcgctttgtaaactgcagtgcattgtaaaaatgagttgtaatacattcctcccctccccctagccatgaaaggaaacaggggtgcggcttgagtacagagtcacaacctgagtctttagtggaaaaggagacgaaatgccgagcaagggaagggacccatcctcgcgcagattgttagggcggcgggaagggaggattggaagggagccatcctctgggagattgctgaaggatttttgactgtcaggggaagaatttaatagtccctcacttttacgaatggttctttcttacggtttggagctttcgagagcttctggtcttggttcatcagtgtacgttgtcatcaagaaatgttggcctgtttcaggtctgactcaaaggttattttctttctaaaataagtgttattactattatgcagcttttcctacagatgttatcctggaaaggaaagttaagtagaaactcatgaagtttaaagtgtagttctctaggaaaacaaatttaagataaaaggaccagaatcctcagaaatctgtcttcagtgaatagtatgagaaaaagattaaagcagcagcaatgatgaaagcagattccacaattctgtccctggaccctagtacactctacctccttgggaagcagtagtaatggattttacaagtctttccacctggaggagggggtaaggtaggagcaagtgtattatagacaaatgtgggaagctctgggtttctcccactactgccactaccatctgcaaacagtaaactaaggaaacttttaactgggtaaatccaagggctcgtgttcattaaaatgctgcgggaaaggtggtgagaggggcaaaggaggatgtggcaaaaccaaggagagactcacagactagcacctgaccctactgcccttgacctgaagttccaagagccaggttaaatatcctgcttaaattaccctggatttttctgtctttacgtgaccaatcccctgctacagccttccaaataagactcacaggtaatcagaccaacaagtgatggtctcacatggctacaaaataaatattttttgtttttccccctcttcctatcttacaacaggggaatggtggaaattaaaggagtaaaacacacagatttaggggattttgtgaagctaaacacctcagagagtttaacctttgtaggctttgaaggaaaagagtgcaaacatcagagttctgcagcccagcagagaacacctccagttaagtgtgtaccacatagggtttttcagcagcgtgatcttctgttttcattgtcagtggctccaccttacaacctcagtgctgaggaacagaagggcactcaggagagcctgagccacttacttagaaagtatttaataacagcacactaagcttactgggctagatacccacctcagcacccagcttgataacaggaggaaacagctggaactggagactggagagaaggaagttcatacatttccaacttggtctgcatctctttagttccttgtattgcttattaatccagaggagaaaacagctagttaattaaaaattccaaaaaatctgaagttttagctaatagttacttccctggttcatcaatttaagataaggatctaaatactgtgttaaaatatagaaaaacggagactcttataaggtttttgacctctacacttgaaagtgagctcttacaagaaactaatcagtgtttcgttattccatatcagtggcttttactgtcaaagattgtgtaagctaaattatctggcaaaattttgctttccagaaatactatctatattaattttaacatttttattgtgaaatatagtttaaatacataaagcaattatatagtataagtgattataaaggaaaccaccatgtaaccaatcaaccaggtcaagaaatggaatatttccagcaactcagaagttcccctccctgccatgaccttcccgaacacaactctttccctccctcctaagtgtagtcattattctaacatttgtgataatcatttccctgcttttctttgtcgctttgtcgcaagcatgcatccctaaacaatatattgtttagtctcactctttcttttgaactttatgtaactggaacaatataatatgtaatctgttgttcttgctgcttttgctcaacattgtttttaattcatatgttgttcaggttgttcctatagctgtaatttgtgcattttcattgctgcatattacagtgtcccattataacaatatgtgacaatatgtttagccattctattgctgatggacatctgggttgtttccagtttaggattgttataaatgctaatgtgaacattcttcatatatgtattccatcacatctacgtcagtttctgtataacatatacctgggagtgtaatatgtatcataaacttgaataaataatgccaagttcttttctagagggttacacagtcacaaaaaaaaaaaaaaaaaaaaaaaaaaaaaaaaaaaaaaaaaaaaaaaaaaaaaaaaaaaaaaaaaaaaaaaaaaa

SEQ ID NO: 1910 - protein, 136 aa, Homo sapiens
SGDRRAGGCASGRGTRSRHRRCRLYGRVRTEERKGRSRVEPKLPPDLTPDPRAAWRAWSVAVSFGAGGDCSFGRKEEAQAASSGSCAHHPKVRHLAPNRPSKSRTDRGVTLQPDLHLLQGESAPPFPWRGVRPSVG

SEQ ID NO: 1911 - DNA, 2036 bp, Homo sapiens
tttcctctttctctaagagtctctctctccctttccctctctctccccccaatctgtctttctagcatgttgccctttttcaaccacatttgtgtttcaggtgtagagaggagagagagtgaacagggagcggggcttttgtctgttggtctccctggactgaagagagggagaatagaagcccaagactaagattctcaaaatggtttattacccagaactctttgtctgggtcagtcaagaaccatttccaaacaaggacatggagggaaggcttcctaagggaagacttcctgtcccaaaggaagtgaaccgcaagaagaacgatgagacaaacgctgcctccctgactccactgggcagcagtgaactccgctccccaagaatcagttacctccactttttttaatcgtaacacctccatttgtattacatatggtgtatgggtattgatgaggtcatggtatcatatatgggatttttttctgtgtaaatcatcaagtataagaagaaactatgggactctgagccttgctttagagaatttacagtggacaaataggtgtcatcaaaccagtttttaatcattctgactcaagtgaaaacgctcagaatttcacactgtgaatccacgtttacaacccttacaggtgggccttcaggcctggttcgctacaacaatgtcttccacaactcaaactcccaccgcgctcacacaaccggtccactcctgccttttcactcacacagctcccgactgcttcttgcagaggctgagagtccccccccccacctttttttttcatttagatgtaacaaacctagtagtttatgttcatcaattgtctgtatatctctatattttatccatgtactcttttgatgtatagaagtagtttgaaactcattgtttccttgtggtaagtgaccgagatgctgccacaggacctgagacactgatgaatggtgctattttggactttcaacatgctccttggcgaggtagctctgatggagttattttttatttccatgttctaagaaggtgttggtactctgtttccctgaatgttgttctctagactggattgacttgttttccttgtgtcttcagtgtggctttcttcctcagtgttgtaggttgagcgaatgctaccagagtgtgagagaccattgtctcgttggctggcgctcacggacatgcagtcacggtagcgggagcaatcacaaaactgtaatttacttaccaaatctcttcctttccgtagcctcgcctgcctgacttagagaaagaaaagcaataattttacaggcattttgaggtgtctctttgggttctttctgtttgaaaggatatttgtcgaaaaaaagagcaaaaccgttttaaataaactccccctggaaaaaaacccaaaacactggcatctgagtaggaatatgaaaatgacaccttttccaaatattaaattggaaaacaaggtctacaaaatcatgatacttttttaaaaggcagagcattcttttttcggcaattttgataagcaaggtgtagatttacatttttgtccttgctcccaacgaaatggataaacaaaaataaattaccatctactcatggaatgttgttgtgttagccagtctgaaagcccaccttaatttttatataactgtctttagctcttcttttgacagggcaggccttgttctgaactgtttcgcttctgactgttaaacaccgatgacgcatgcactgcacttcttcgttttcttcttgctcccccattggcctgagtttcttgtgcattactcctctccctccttcgttagaataggtatatcagctgtgtaaatagagcaagaaaacagtattctgcatctgtggcatttatgtagagttgcagttgtgtactgctgaaaatgcaggcttttgtaacagtgtgatctttactgatgcactcatgacaagtacccaatgtattttagctattttagtagtatttgttcaataaatacgcaagctgtaaggtaactgtctg

SEQ ID NO: 1912 - protein, 68 aa, Homo sapiens
MVYYPELFVWVSQEPFPNKDMEGRLPKGRLPVPKEVNRKKNDETNAASLTPLGSSELRSPRISYLHFF

SEQ ID NO: 1913 - DNA, 867 bp, Homo sapiens
ggctcagcacaggcacaaaccattgcccggcactggcccgtgctgcctgagaaggattggcacgggcacagaccactgcccccacctgccctgcgccatctacccaagaaggctcggcacgggcaccaaccactgcctccaactgccccatgctgcctgagaaggcactgcacggccacccccaactgccccgcactgtccctacccgggcagccatgcgagcggctggaactctgctggccttctgctgcctggtcttgagcaccactgggggcccttccccagatacttgttcccaggaccttaactcacgtgtgaagccaggatttcctaaaacaataaagaccaatgacccaggagtcctccaagcagccagatacagtgttgaaaagttcaacaactgcacgaacgacatgttcttgttcaaggagtcccgcatcacaagggccctagttcagatagtgaaaggcctgaaatatatgctggaggtggaaattggcagaactacctgcaagaaaaaccagcacctgcgtctggatgactgtgacttccaaaccaaccacaccttgaagcagactctgagctgctactctgaagtctgggtcgtgccctggctccagcacttcgaggtgcctgttctccgttgtcactgacccccgcctcttcagcaagaccacagccatgacaaacaccaggatgcatgctccttgtcccctcccacccgcctcatgacccagcctcacagaccctctcaggcctctgacgagtgagcgggtgaagtgccactgggtcaccgcagggcagctggaatggcagcatggtagcacctcctaacagattaaatagatcacatttgcttctaaaatt

SEQ ID NO: 1914 - protein, 145 aa, Homo sapiens
MRAAGTLLAFCCLVLSTTGGPSPDTCSQDLNSRVKPGFPKTIKTNDPGVLQAARYSVEKFNNCTNDMFLFKESRITRALVQIVKGLKYMLEVEIGRTTCKKNQHLRLDDCDFQTNHTLKQTLSCYSEVWVVPWLQHFEVPVLRCH

SEQ ID NO: 1915 - DNA, 7450 bp, Homo sapiens
  misc_feature (11)..(11): n is a, c, g, or t
ttcagtctgtnaaaggatacccccgttgtgaatttcgtacctgtatgaccagagacacctcaaattcaaaatgtccagaaatgaacacagtatcttcttcccttgagtaactcgccttctgtatataattggggtgaatgttccagcaatgccaacgggctagcatctactcaggcaggtacgccagacatctgaatcttaatacctcgtcgtcccccctcaatctgtcactatgtcctaattttatttcctacctttgcatcccttcctcataattatcagcaccactgccttaatttagatcctatcattccttgtctggattatttcaagtcttttgcccctctcaagtctgacctcgtcatagactgtttgtggatgattattttccctgcaacatctccacctcccaatagtctccatcacttattagccatgtgaattatggcaaattgcttaacctacctatgcctcacttttccttattgtaaagtggaaataagagtacctatctcatagggttgtgtgattaatcatgcgatgcaattagaacagtgcctaggatatgaaagtgccccaaaatgttacgttattattattattactactattgccttctcatgaacatgctatgtgtatgttcaagctgttatctctactggaaaatccttctccgtttccaatactctttccaaaaccccctcctgggttttactgcacctaccattgtgtactgacgtgattgaatgattggcttatgggactgatcctttctaccagacttaacttcttcagggcaggaactctgatacatagtaaatggtcaataaaagttggctcaactgaaaccctaaggataaactccatccacagcggaagagcgcggccccgcccgattcgggggcggggcggggagccgcgcgcggagggtgggtcgatgggggtggggtgggactctttttcctcgccgtggcggcggaggcgcacggcgtgggcttgcggcgagacgtcgtcgtcggaggctgaaaaagcccaaggtgctgccgttgcccgtacaactcggacttgctgttgctcgagccgcgtctgcacgggtctcggaccgagcggagctcgcagcctcggtcccggagcccaccttcgcctcgcccttgcccagcctgcggtgatggaggcggccaccacactgcacccaggcccgcgcccggcgctgcccctcgggggcccgggcccgctgggcgagttcctgcctccacccgagtgcccggtcttcgaacccagctgggaagagttcgcggaccccttcgctttcatccacaagatccggcccatagccgagcagactggcatctgtaaggtgcggccgccgccggattggcagccaccatttgcatgtgatggtgataaacttcattttacgccacgtatccagagactgaatgaattggaggcccaaactcgtgtaaaattgaatttcttggaccagattgcaaagtactgggagttacagggaagtactctgaaaattccacatgtggagaggaagatcttggacttatttcagcttaataagttagttgcagaagaaggtggatttgcagttgtttgcaaggatagaaaatggaccaaaattgctaccaagatggggtttgctcctggcaaagcagtgggctcacatatcagagggcattatgaacgaattctcaacccctacaacttattcctgtccggagacagcctaaggtgtttgcagaagccaaacctgaccacagacactaaggacaaggagtacaaaccccatgatattccccagaggcagtctgtgcagccttcggaaacgtgccccccagcccgacgagcaaaacgcatgagagcagaggccatgaatattaaaatagaacccgaggagacaacagaagccagaactcataatctgagacgtcgaatgggttgtccaactccaaaatgtgaaaatgagaaagaaatgaagagtagcatcaagcaagaacctattgagaggaaagattatattgtagaaaatgagaaggaaaagcccaagagtcgatctaaaaaagccaccaatgctgtggacctgtatgtctgtcttttatgtggcagtggcaatgatgaagaccggctactgttgtgtgatggctgtgatgacagttaccataccttttgcttgatcccacctctccatgatgttcccaagggagactggaggtgtcctaagtgtttggctcaggaatgtagtaagccacaagaagcatttggctttgaacaagcagccagggactataccctccgtacttttggggaaatggcagatgcgttcaaatctgattacttcaacatgccagtccatatggtccccacagagcttgttgagaaagaattttggagactagtaagcactattgaggaggatgtcacagtggaatatggagctgacattgcctcaaaggaatttggcagtggctttcctgtccgagatgggaaaatcaaactctcacctgaggaagaggagtatcttgatagtggctggaatttgaacaacatgccagtgatggagcagtctgtccttgcacatattactgctgatatatgtggcatgaaacttccttggttgtatgtgggaatgtgcttttcttcattctgttggcacattgaagaccactggagctattcaattaactacttgcactggggtgagccaaaaacctggtatggagtcccagggtatgctgctgagcagctagaaaatgtaatgaagaaactagctccagaactctttgtgtcccagccggatctcctccatcagcttgtgaccatcatgaaccccaataccctgatgactcatgaagtgcctgtttaccgaactaatcagtgtgctggggagtttgtgattacatttccaagagcctaccacagtggttttaaccagggttttaattttgctgaggctgttaacttctgcactgttgattggctgccattaggccgacagtgtgtggagcattatcgcttgcttcatcgatattgtgtgttttcccatgatgagatgatctgcaagatggcttccaaggctgatgtattagatgttgtagtggcttcaactgttcagaaagacatggccattatgattgaggatgagaaagctttaagagaaactgtccgtaaattgggagtgattgattcggaaagaatggattttgagctgttgccagatgatgaacgtcagtgtgtaaaatgcaaaactacatgcttcatgtctgccatctcctgttcttgtaaacctggccttcttgtttgcctgcatcatgtaaaagaattgtgttcctgtcctccttataaatataaattgcggtataggtacacgctggatgatctctaccctatgatgaatgcattgaagcttcgagcagaatcttacaacgaatgggccttgaatgtgaatgaagctttggaggcaaagatcaccaagaagaaaagccttgtcagcttcaaggctttaattgaagaatctgaaatgaagaaattcccagacaatgatcttttgcgacaccttcgcctagtcacacaggatgcagagaagtgtgcctctgttgcgcagcagttgcttaatggcaaaaggcaaactagatatcgatctggtggagggaaatcccaaaatcagttgacagtgaatgagctccggcagtttgtaacacagctgtatgctcttccatgtgtcctcagtcagacaccattactaaaggatctcttgaatcgtgtagaagattttcaacagcatagtcagaaactactctctgaggaaacgcctagtgctgcggagctgcaggacttgctagatgtcagctttgaatttgatgttgaacttccacagcttgctgagatgcgtatccgtttggaacaagcccgttggctagaagaggtgcagcaagcttgcctagaccccagctcccttactttagatgatatgagacgtctcatagacctaggggtagggctggccccgtattcagcagtggagaaagctatggcccggctgcaggaactgctcacagtgtcagagcactgggacgacaaagccaagagtctcctcaaggccaggccacgacattcattgaatagccttgctacggcagtaaaggaaatcgaagagatccctgcatatctgcccaatggtgcggctctgaaagactcagtgcagagagccagagactggcttcaggatgtagagggcctgcaggctggaggacgtgtgccagtgttagacacactcatagaacttgttacacgaggccgatctatcccggtacatctgaattctttgccaagactggaaaccctagtagctgaggttcaggcttggaaagaatgtgctgttaatacattcttgactgagaattctccatattctctcttagaggtgctgtgtcctcgatgtgatattggccttttgggattgaaaaggaagcagagaaagttaaaggagcccttgccaaatggaaagaaaaaaagcaccaaattagagagtctgagtgacctggagagagctttaactgaaagcaaggagactgcttcagctatggcaactcttggggaagctcgcctaagggaaatggaagccttgcagtctctcagactcgccaatgaagggaaattgctgtcgcctctccaagatgtggatataaaaatctgcctatgtcagaaggccccagctgcccctatgattcaatgtgaactctgcagggatgctttccacaccagttgtgtggcggtacccagtatttcacagggcctgcgaatctggctttgtccccattgtcggaggtcagagaaacctccattagagaaaattctgcccctgctcgcctcccttcagcgtatccgagttcgccttcctgagggagatgcacttcgatatatgattgaaagaaccgtgaactggcagcacagagcccagcaactgctttcgtcagggaatcttaaatttgtgcaagatcgagtgggctcaggactgttatatagcagatggcaagcctcagcaggacaggtgtcagacacaaacaaggtatctcaacctcctggcacaacatcattttctttgcctgatgactgggacaacagaacctcatatttgcactcccccttctcaactggacgaagttgtatccccctccatggtgttagtccagaagtgaatgaactattgatggaagcccagctgctccaggtatcccttcctgaaattcaggaactttaccagactttacttgcaaagccaagccctgctcagcagactgaccgaagctcaccagtgagacccagcagtgagaagaatgactgttgccgagggaagcgagatggaattaacagtcttgagagaaaactgaagagacgcctggaaagagagggcctctccagtgagcggtgggaacgagttaagaaaatgcggacccccaaaaagaagaaaatcaaactgagccaccccaaggacatgaacaatttcaagttagagagagagcgtagctatgaattagttcgttctgctgaaactcattccctgccctcagacacatcctattccgaacaggaagactctgaggatgaagatgccatctgcccagctgtgagctgcctgcagccagaaggagatgaggtggactgggtccagtgtgatggcagctgcaatcagtggtttcatcaggtctgtgttggtgtctccccagagatggcagagaaagaagactacatctgtgtgcgctgtactgtgaaggacgcaccaagccgaaagtaaaaacacaaaaacagatacccccctacttaatgtaattcaggactccaaccaagaggatttcttcaaatctcagcaaagctacaggactggtactcaagccagcctgtaaacggtgctatttctattccttatgggatcatttttccaggactctttgaagaaaagaaaaaacaactaaaaaaatttttgacactttttgtattttttccttaagagctatttgtggttgttgaggtttgaaaagctgactgttttttttgcaggggttcccaccaatttggaaggcattgaagcttgcaccttttcatgtacagcattaaaattttacctctctctgggatttaccagcttaagagtccaactcacttccagtgcccaaaagggcacccaccagaaattccagtaaatcctcatttgaggaagctctcccttgtttactctgttaccacattggggaaatttttaagtttttcactttgggagtttttgtttgtttcttcttttcctttatccacttttcttcttcctggtagactaggtttatttatctgagcaataacttctatgttggtttcagtggctggaattaaaacaaaacaaaacaaacttccaaacagtgtgttggtgctttagcgattgattgatgtacagaacacaaatgtctagtttctagtgtcactgatgaactagtgatgtagaaaagagacttctctgtaagtaattgccacagctgtattttggctttctccctgtcccttcctttctcccctattttttggtagcttgtatcaaatgttacagtttatattgtggaataaatccttcgtcctaacataacactaaatgctgattatttagagccattagagcacagcttcttctgcccctctactgttgcacagccagaaggggctgcttgcttttgcctctgcccaaccaggttgcagtagcagtggatgttagcctgcaaacaacattaggggattcttcttttgtgtcctgctctgtttggtgggccatatgcctacagccctcactaacaaagaacccctctgtcttcaaggactagaacctatctttaaagccgtgctcttttaaaataagctttctcagaatgttggcaaatcacttcaatcctcaaatcagtcttccttgtggaatgctgcctttattatatttgaattgacaggggaacttggtttagggttaagacgttggaaggaaatctaaggaaaattaatcctcacagaggtccgggtttagtatatgtcttgagaggagacttgtgaattcccagactctgcctcctggtttcctttctcatttctttctaactgtagctatcattactggctgtggatagcccatagctattttccttgcttttcttttttaaaggggtctgttctgcagtggagaagacattctggtgaccagacttttgcttaccttttcctattctgttgccaatttttgttttccccacattctatagccataaacctgaagatgagtaaaactggtgggtctttaataaaacaacaacaaaaacagcagtttgtgatatagcagaggtttaaatgtaccctccccttttatgcacttcaaataattaaatctctttaagaatgaaaaaaaaaaaaaaaa

SEQ ID NO: 1916 - protein, 1681 aa, Homo sapiens
MGLILSTRLNFFRAGTLIHSKWSIKVGSTETLRINSIHSGRARPRPIRGRGGEPRAEGGSMGVGWDSFSSPWRRRRTAWACGETSSSEAEKAQGAAVARTTRTCCCSSRVCTGLGPSGARSLGPGAHLRLALAQPAVMEAATTLHPGPRPALPLGGPGPLGEFLPPPECPVFEPSWEEFADPFAFIHKIRPIAEQTGICKVRPPPDWQPPFACDGDKLHFTPRIQRLNELEAQTRVKLNFLDQIAKYWELQGSTLKIPHVERKILDLFQLNKLVAEEGGFAVVCKDRKWTKIATKMGFAPGKAVGSHIRGHYERILNPYNLFLSGDSLRCLQKPNLTTDTKDKEYKPHDIPQRQSVQPSETCPPARRAKRMRAEAMNIKIEPEETTEARTHNLRRRMGCPTPKCENEKEMKSSIKQEPIERKDYIVENEKEKPKSRSKKATNAVDLYVCLLCGSGNDEDRLLLCDGCDDSYHTFCLIPPLHDVPKGDWRCPKCLAQECSKPQEAFGFEQAARDYTLRTFGEMADAFKSDYFNMPVHMVPTELVEKEFWRLVSTIEEDVTVEYGADIASKEFGSGFPVRDGKIKLSPEEEEYLDSGWNLNNMPVMEQSVLAHITADICGMKLPWLYVGMCFSSFCWHIEDHWSYSINYLHWGEPKTWYGVPGYAAEQLENVMKKLAPELFVSQPDLLHQLVTIMNPNTLMTHEVPVYRTNQCAGEFVITFPRAYHSGFNQGFNFAEAVNFCTVDWLPLGRQCVEHYRLLHRYCVFSHDEMICKMASKADVLDVVVASTVQKDMAIMIEDEKALRETVRKLGVIDSERMDFELLPDDERQCVKCKTTCFMSAISCSCKPGLLVCLHHVKELCSCPPYKYKLRYRYTLDDLYPMMNALKLRAESYNEWALNVNEALEAKITKKKSLVSFKALIEESEMKKFPDNDLLRHLRLVTQDAEKCASVAQQLLNGKRQTRYRSGGGKSQNQLTVNELRQFVTQLYALPCVLSQTPLLKDLLNRVEDFQQHSQKLLSEETPSAAELQDLLDVSFEFDVELPQLAEMRIRLEQARWLEEVQQACLDPSSLTLDDMRRLIDLGVGLAPYSAVEKAMARLQELLTVSEHWDDKAKSLLKARPRHSLNSLATAVKEIEEIPAYLPNGAALKDSVQRARDWLQDVEGLQAGGRVPVLDTLIELVTRGRSIPVHLNSLPRLETLVAEVQAWKECAVNTFLTENSPYSLLEVLCPRCDIGLLGLKRKQRKLKEPLPNGKKKSTKLESLSDLERALTESKETASAMATLGEARLREMEALQSLRLANEGKLLSPLQDVDIKICLCQKAPAAPMIQCELCRDAFHTSCVAVPSISQGLRIWLCPHCRRSEKPPLEKILPLLASLQRIRVRLPEGDALRYMIERTVNWQHRAQQLLSSGNLKFVQDRVGSGLLYSRWQASAGQVSDTNKVSQPPGTTSFSLPDDWDNRTSYLHSPFSTGRSCIPLHGVSPEVNELLMEAQLLQVSLPEIQELYQTLLAKPSPAQQTDRSSPVRPSSEKNDCCRGKRDGINSLERKLKRRLEREGLSSERWERVKKMRTPKKKKIKLSHPKDMNNFKLERERSYELVRSAETHSLPSDTSYSEQEDSEDEDAICPAVSCLQPEGDEVDWVQCDGSCNQWFHQVCVGVSPEMAEKEDYICVRCTVKDAPSRK

SEQ ID NO: 1917 - DNA, 5792 bp, Homo sapiens
aaagttcatccccccagaatgaaaatgaggacatttgagaaggtgatttaaggtgtggacatttgagaaggtgtcctatcaaattagtaaaccaaaggaaaagtactgaatagattaatccaaaacacttactgttttttaaacgaagaggatttcaccttgacagaaaaacaacttttattcaatatgtatttcctgaaattaaagagacaagtacagactgaaaggaaaatagattcgtaaataagctacgtcaactctatcctgctgaggatagctcagtgatgttaaatcctttacaaatccctggttgtcttcctacagacaagactgctttttgatgggactgatattaagagaaataggacctttggggcattcaactccttgataaaacttaaaagtatcggcatgagtggcttaacagaggaaataaagaagttttcaactaaatccaaaagtgcggtcattttctttactgctgttattttaaaaacctcttcataaccattgaaaaagaatcgacaactattttaaaagattaaagaaaggcagatgtctgcaaataattcccctccatcagcccagaagtctgtattacccacagctattcctgctgtgcttccagctgcttctccgtgttcaagtcctaagacgggactctctgcccgactctctaatggaagcttcagtgcaccatcactcaccaactccagaggctcagtgcatacagtttcatttctactgcaaattggcctcacacgggagagtgttaccattgaagcccaggaactgtctttatctgctgtcaaggatcttgtgtgctccatagtttatcaaaagtttccagagtgtggattctttggcatgtatgacaaaattcttctctttcgccatgacatgaactcagaaaacattttgcagctgattacctcagcagatgaaatacatgaaggagacctagtggaagtggttctttcagctttagccacagtagaagacttccagattcgtccacatactctctatgtacattcttacaaagctcctactttctgtgattactgtggtgagatgctgtggggattggtacgtcaaggactgaaatgtgaaggctgtggattaaattaccataaacgatgtgccttcaagattccaaataactgtagtggagtaagaaagagacgtctgtcaaatgtatctttaccaggacccggcctctcagttccaagacccctacagcctgaatatgtagcccttcccagtgaagagtcacatgtccaccaggaaccaagtaagagaattccttcttggagtggtcgcccaatctggatggaaaagatggtaatgtgcagagtgaaagttccacacacatttgctgttcactcttacacccgtcccacgatatgtcagtactgcaagcggttactgaaaggcctctttcgccaaggaatgcagtgtaaagattgcaaattcaactgccataaacgctgtgcatcaaaagtaccaagagactgccttggagaggttactttcaatggagaaccttccagtctgggaacagatacagatataccaatggatattgacaataatgacataaatagtgatagtagtcggggtttggatgacacagaagagccatcacccccagaagataagatgttcttcttggatccatctgatctcgatgtggaaagagatgaagaagccgttaaaacaatcagtccatcaacaagcaataatattccgctaatgagggttgtacaatccatcaagcacacaaagaggaagagcagcacaatggtgaaggaagggtggatggtccattacaccagcagggataacctgagaaagaggcattattggagacttgacagcaaatgtctaacattatttcagaatgaatctggatcaaagtattataaggaaattccactttcagaaattctccgcatatcttcaccacgagatttcacaaacatttcacaaggcagcaatccacactgttttgaaatcattactgatactatggtatacttcgttggtgagaacaatggggacagctctcataatcctgttcttgctgccactggagttggacttgatgtagcacagagctgggaaaaagcaattcgccaagccctcatgcctgttactcctcaagcaagtgtttgcacttctccagggcaagggaaagatcacaaagatttgtctacaagtatctctgtatctaattgtcagattcaggagaatgtggatatcagtactgtttaccagatctttgcagatgaggtgcttggttcaggccagtttggcatcgtttatggaggaaaacatagaaagactgggagggatgtggctattaaagtaattgataagatgagattccccacaaaacaagaaagtcaactccgtaatgaagtggctattttacagaatttgcaccatcctgggattgtaaacctggaatgtatgtttgaaaccccagaacgagtctttgtagtaatggaaaagctgcatggagatatgttggaaatgattctatccagtgagaaaagtcggcttccagaacgaattactaaattcatggtcacacagatacttgttgctttgaggaatctgcattttaagaatattgtgcactgtgatttaaagccagaaaatgtgctgcttgcatcagcagagccatttcctcaggtgaagctgtgtgactttggatttgcacgcatcattggtgaaaagtcattcaggagatctgtggtaggaactccagcatacttagcccctgaagttctccggagcaaaggttacaaccgttccctagatatgtggtcagtgggagttatcatctatgtgagcctcagtggcacatttccttttaatgaggatgaagatataaatgaccaaatccaaaatgctgcatttatgtacccaccaaatccatggagagaaatttctggtgaagcaattgatctgataaacaatctgcttcaagtgaagatgagaaaacgttacagtgttgacaaatctcttagtcatccctggctacaggactatcagacttggcttgaccttagagaatttgaaactcgcattggagaacgttacattacacatgaaagtgatgatgctcgctgggaaatacatgcatacacacataaccttgtatacccaaagcacttcattatggctcctaatccagatgatatggaagaagatccttaatcactgagctaacctaaataaggaaggatttcattttatggactgatattttgctgtgtaacttgttcttcgtagattgtcatctgcagtgctgcaaagatatgaagaaatatgataacgaataagtgacaccagtactgtagttcataatgagtaggtacaggcgggaaactgaataataagaagtcataatggaatcaaggtgaagctttttataaacttttttagcctaagcaataactggttttgtattttttcttaatccttcactttaatacaataggctcacttaatttgtcttcccatttctctttatatatatatatatatataaaaaaatataaatatatgtttgtttgtttgtttttttaaggaaaaacaagtcaagctagcatccagttactatatagcttggctaaattatacaagacttacaagattgattactcgacaggcttgtatttaagagataactgtgaggttaccattatgtgatgttactataaggacttttaacattggtttaacaaaccatagaggcattgaagggtttttcttagatgcctagaaaaagcacactgggctgttttacctttcttttttaggtcaatcaagactccaaaatagtgattcctaacctttttggagttgctctgctactctgaatatgttctatacagcataaggattgtcaccttctgtgtgttgcaacagcttctaagataattagggacaaatgatgttacaaaaggaagagtactgctggtctaagtgctgagttgtatgtctttgcatagctccactctgctgctaaatatgcatgttctgactgacaccatcttgatgccagtactggattccagcattcagcaggtgcagatctcggctttacacaatttatctttacctagggttcagtcagtaatttctgctttttagccagggccagtgcagggtcagttaatgctacagttactgtatagcaaacagtatccttttttctccttcccctagcctattgggctttgcagatatctggagtgttttaaagtcaattattttaagcagtttgaggggatgtgtaggagtggagcatgaaacagtttataaggctggggctgtattatcagcacagcaaattaaagaatgaaagaagtacttctttttacatttcagctccagcagccagctatttaaaaaatatttttaaatatcttccccaaagtttaagatgtgggaccatctacttgtaagaaacagtggcttatttcttcatttctcagtaatcattgtaaacctttttttttttcttctccactctaacaaaagtaaaagaacaaaacttttgctgaggtcttggactccactacttgttagttatgttggcctggacagatggcaggtctgtcggcagttcctcagtctgtaaaatgaagattatcattcttgcctctccctttgtcacagtgttgtcgtgaagatcagatatgtatgaatgcagtcaaataaactaaaaactaggaaagtgttaactatcgttgcccaccgaatttgaggtagcaaaaaaaaaaaagaatgttctggtacatgaacagactgagaaggcctttcgacatccctgaagctagtctcctgtctagactaaaaatatccttgaaagaatagtagcaaacagtatgcagtactcctgtgttctaagttcttttatgttttagtttaccctcacagcagccatagtgttaagtcattatgagcttcatcttaaagataagaaaactgaggcaaggggagattaacttactgccaaatttcaaacagttagtagtatttgagaccagtagtatggctctaatcttacccttagccctcccaaccattatgctgtactatctacccataaatacctccaggaaacattcccctcttggtaatttgtccttctatagaagcttcaaagattaaatcaaattaattttcaaaaaaaatttttttttagaaatgttattttccctgtgatagaggatgacttcccagtttcaccaaagtctgtttatatcaacacacacaaaatggaataattctgagtcactaggcaatcaatctactgtggttttactatgtaaggtgaaaattaactggaacgatgtttgtttgctatacttacatagtcaaactttacaagccatgaaattaattgcactctttgtatttgttgttaaatgcctaagaagttttctaaaaattttgtaaaggcactgtcagagaatctggagttgaatgattattccagatactgtataacctgcataactttttgtctttaagtcgtgtttgtaaaagaagtaattgctagaaacatttgataatgtacaaagtagtctataatgactgttcagtacatttttaatatttttttggttatatccaactttttgtaaatatactggaagcttgataataaaatgtatttcctatcaccatacttttccatgtgaaaacctgagcctatttctagtataagtatccaaagaaaagttttacctggttgtgttattttaccagac

SEQ ID NO: 1918 - protein, 890 aa, Homo sapiens
MSANNSPPSAQKSVLPTAIPAVLPAASPCSSPKTGLSARLSNGSFSAPSLTNSRGSVHTVSFLLQIGLTRESVTIEAQELSLSAVKDLVCSIVYQKFPECGFFGMYDKILLFRHDMNSENILQLITSADEIHEGDLVEVVLSALATVEDFQIRPHTLYVHSYKAPTFCDYCGEMLWGLVRQGLKCEGCGLNYHKRCAFKIPNNCSGVRKRRLSNVSLPGPGLSVPRPLQPEYVALPSEESHVHQEPSKRIPSWSGRPIWMEKMVMCRVKVPHTFAVHSYTRPTICQYCKRLLKGLFRQGMQCKDCKFNCHKRCASKVPRDCLGEVTFNGEPSSLGTDTDIPMDIDNNDINSDSSRGLDDTEEPSPPEDKMFFLDPSDLDVERDEEAVKTISPSTSNNIPLMRVVQSIKHTKRKSSTMVKEGWMVHYTSRDNLRKRHYWRLDSKCLTLFQNESGSKYYKEIPLSEILRISSPRDFTNISQGSNPHCFEIITDTMVYFVGENNGDSSHNPVLAATGVGLDVAQSWEKAIRQALMPVTPQASVCTSPGQGKDHKDLSTSISVSNCQIQENVDISTVYQIFADEVLGSGQFGIVYGGKHRKTGRDVAIKVIDKMRFPTKQESQLRNEVAILQNLHHPGIVNLECMFETPERVFVVMEKLHGDMLEMILSSEKSRLPERITKFMVTQILVALRNLHFKNIVHCDLKPENVLLASAEPFPQVKLCDFGFARIIGEKSFRRSVVGTPAYLAPEVLRSKGYNRSLDMWSVGVIIYVSLSGTFPFNEDEDINDQIQNAAFMYPPNPWREISGEAIDLINNLLQVKMRKRYSVDKSLSHPWLQDYQTWLDLREFETRIGERYITHESDDARWEIHAYTHNLVYPKHFIMAPNPDDMEEDP

SEQ ID NO: 1919 - DNA, 4797 bp, Homo sapiens
agaagccccgggctcgtcagtcaaaccggttctctgtttgcactcggcagcacgggcaggcaagtggtccctaggttcgggagcagagcagcagcgcctcagtcctggtcccccagtcccaagcctcacctgcctgcccagcgccaggatggccaccatcacctgcacccgcttcacggaagagtaccagctcttcgaggaattgggcaagggagccttctcggtggtgcgaaggtgtgtgaaggtgctggctggccaggagtatgctgccaagatcatcaacacaaagaagctgtcagccagagaccatcagaagctggagcgtgaagcccgcatctgccgcctgctgaagcaccccaacatcgtccgactacatgacagcatctcagaggagggacaccactacctgatcttcgacctggtcactggtggggaactgtttgaagatatcgtggcccgggagtattacagtgaggcggatgccagtcactgtatccagcagatcctggaggctgtgctgcactgccaccagatgggggtggtgcaccgggacctgaagcctgagaatctgttgctggcctccaagctcaagggtgccgcagtgaagctggcagactttggcctggccatagaggtggagggggagcagcaggcatggtttgggtttgcagggactcctggatatctctccccagaagtgctgcggaaggacccgtacgggaagcctgtggacctgtgggcttgtggggtcatcctgtacatcctgctggttgggtaccccccgttctgggatgaggaccagcaccgcctgtaccagcagatcaaagccggcgcctatgatttcccatcgccggaatgggacactgtcaccccggaagccaaggatctgatcaataagatgctgaccattaacccatccaaacgcatcacagctgccgaagcccttaagcacccctggatctcgcaccgctccaccgtggcatcctgcatgcacagacaggagaccgtggactgcctgaagaagttcaatgccaggaggaaactgaagggagccattctcaccacgatgctggccaccaggaacttctccggagggaagagtgggggaaacaagaagagcgatggtgtgaaggaatcctcagagagcaccaacaccaccatcgaggatgaagacaccaaagtgcggaaacaggaaattataaaagtgacagagcagctgattgaagccataagcaatggagattttgagtcctacacgaagatgtgcgaccctggcatgacagccttcgaacctgaggccctggggaacctggttgagggcctggacttccatcgattctattttgaaaacctgtggtcccggaacagcaagcccgtgcacaccaccatcctgaatccccacatccacctgatgggcgacgagtcagcctgcatcgcctacatccgcatcacgcagtacctggacgctggcggcatcccacgcaccgcccagtcggaggagacccgtgtctggcaccgccgggacggcaaatggcagatcgtccacttccacagatctggggcgccctccgtcctgccccactgagggaccaggctggggtcgctgcgttgctgtgccgcagagatccactctgtccgtggagtggagctgctggttctcccaggtggattttgctggaattctcccatgtcatcaccccaccaccgtcacttctgtacctgcatcaagaaaacctgcttgttcacaaaagtcatcgcaacttcagagcgaacggccacatcttccccacctctcacccccaccctctcccctgccaggctggggcttcctcaggcatgggtgtccacagcactggccccctctccccagcctcagctgctgtccgcctgatctgtcttgggctgtaggctagaatgcccgggctggtgcccaccaggggctggggagaaggaggggtggcatgatgaggaaggcagcatccgtccgtccctctcccagacctctcctcttccagtgtccccggggaagggcagatgacactcccttccccctaagccaaccgcactgaaggagtggggagaagagcatacgccaggagcctcctgcctcaaagtgctcccctaagtcttcttcctcctgtgctgacctcagggtggtctgacccttccctcggtgtgggggatgtggccctctcaggtgcccctacttgctttctgcttccttctggtgaagtccacctccaacattaacctgcccaccccacccccgtcatccctggagaattccagctttgtcgtatctcagagagggaatctaattgtttttggggggcaaaagaaagcaacgtttaggtatcacttctacttggaccgcatgcctttttatagccaaatttctgtgtatttcgtaaatggatttcgcgttaatggatatttatgtaataactagacttctcagattattgtgagaagggtcaggttggaaggggtgtaggaagaggggtgaggggtagtttttttctgttctagttttttttttttttttttgtcatctctgaggtggaccttgtcacctgtggttattggggccaaggcggactcagctccggggagaagggcctctctgccatttcggtcccaaggtgagctgacacaggcgttccttttgggactgtggaagcatcagatgccagcactgactcaggaacagcaagtcagggcagagaggaggagggaggctgtcaggatggaaatacctggacttttctttgcttccctcgcaaactggggtcttctctaccgaacttcccaggatttcatctcaccatatctgtgtgccgcccccagcaccccccacccacctctggggggcccgtgagcgtgtgtcttcattgcctctctccccttggcgtctgatgaccacagcaaagcactgggaatttctactcttcatgcctcatcctgcagcctcgggttcgcattctctctttcttttcctctttccctctttccctgggattgactctgagtggaataccttggcacatccactaggatctactgtctgcactgttttctttgcatgactttatacgcagtaagtatgttgaaaacaaacaaaaagaagaaaacactcaacaaaaccaatctacatgttttggactaaaaaaaaaaaatagaggttgtattctcagtgtccgactcggaattatgttgctgcctctctgtgcttttggcctctgtgtggccgtgttttgccagcatgagatactgtcccctctggaggattttaggggaggaagagccacgtccccagggattggaggaggctccggtacccttgaccctcctgggtgttggttggagcagaactggtgaggatgtttgatccgagattttctgagctctccccgatcaccagctgtctgctgggttcttttctcaagtcctgctgcccaggcccaggtgagacaggcaacgccaggtctgcaggccaggagagatgctgcccaggcctcctggtttccaagctggtccatcactggcctctgtccttggcagagaccttgctgcccaggcccaggggcaggctcttggcctgccccaggcccagagggcttcccagtaaggcccagtgatcccattatcccaggggcaaaaccacctgtccccttttgagctgccagttccctacagccatccccagtcaagggtgagggtgtggccttcaccaggggctgctgtaattaccgagcaaggtctgagctcttcttcagcctcagttccctcattggttaaaagggttctttgttcccatccagccgatgaaggagcaaacgtctggctatgtgaagcctaatttacctgcaggaactggcagggatagtcactggctggactcctgtttacttctagacctggtcaggctccatcccctcccccacctgcccctgattcccctcgtcggtgcctgtcaactgcttttcagcagtggactgcaggggaaagagcagtgatttggggtgagtaggcttcaattcccagctctgaccagacttgctgtgtgaccttgggcaagttcctttccctctttggagcttggtttccctgccagaggaaactgagctggaggagcctgaggtcctgcctttcattggctgacacacctcctgtccactgtgtcactctccaagtgccagagaagtggaggcagatcgctaccccaggctgagatggcccccactgtgaaggccacgcctgtgggtgggcagccacctggtgccaccacagggcaccagggatgatcctgatgcggcaggcaggggagactcacagaaaaatctgcccagagcctaccctcaccagacaaactctgtgctcctccaaaacatcctttagatgcaaaataataataataataataaataaataaataaaaatccaaacccaagtcaaaaccttggctccagcatgaaaacacgtttacaggaaagtgttctcctgggtttgtgcccaccatggtgcgaatcctgacccaaggcctcctgtctcccttcaaagggagacccttttgggggatgagtttgccagactccccgtgctggtttctttgttactatttgtttggggttttgttttagttcttttttttttttcttttcttttttaaaaatatgtggctgtgaacttgaatgaacactgctcaaactttctgctattggggggggggtgggatgggaagaaggggcgtttgttttattcttggtgttttcagtgcaataaatagctacaaacttc

SEQ ID NO: 1920 - protein, 527 aa, Homo sapiens
EAPGSSVKPVLCLHSAARAGKWSLGSGAEQQRLSPGPPVPSLTCLPSARMATITCTRFTEEYQLFEELGKGAFSVVRRCVKVLAGQEYAAKIINTKKLSARDHQKLEREARICRLLKHPNIVRLHDSISEEGHHYLIFDLVTGGELFEDIVAREYYSEADASHCIQQILEAVLHCHQMGVVHRDLKPENLLLASKLKGAAVKLADFGLAIEVEGEQQAWFGFAGTPGYLSPEVLRKDPYGKPVDLWACGVILYILLVGYPPFWDEDQHRLYQQIKAGAYDFPSPEWDTVTPEAKDLINKMLTINPSKRITAAEALKHPWISHRSTVASCMHRQETVDCLKKFNARRKLKGAILTTMLATRNFSGGKSGGNKKSDGVKESSESTNTTIEDEDTKVRKQEIIKVTEQLIEAISNGDFESYTKMCDPGMTAFEPEALGNLVEGLDFHRFYFENLWSRNSKPVHTTILNPHIHLMGDESACIAYIRITQYLDAGGIPRTAQSEETRVWHRRDGKWQIVHFHRSGAPSVLPH

SEQ ID NO: 1921 - DNA, 271 bp, Homo sapiens
  misc_feature (15)..(15): n is a, c, g, or t
  misc_feature (47)..(47): n is a, c, g, or t
  misc_feature (126)..(126): n is a, c, g, or t
  misc_feature (213)..(213): n is a, c, g, or t
  misc_feature (216)..(216): n is a, c, g, or t
gctaagggctgtggnctccgtgggagccgcactcattctcttccctngcctactatacggggcatatgccttcctgccgtttgatgtcccacggctgcccaccatgagttcccgcctgatctacanactgcgctgcggggtctttgccaccttccccattgtgctggggatcctggtgtacgggctgagcctgttaatgcttttttgcccttnggnccttttggggagccaaggcgggaggttgagatccaccggcgataatgtgggccca

SEQ ID NO: 1922 - DNA, 6807 bp, Homo sapiens
tctagagtaagaaactagctgagcaacgtggtgtcacactatacacccattaagacaacaggcacatgtgtcatgtccattttgtggaaaagatatgtaaaataattttaagtaaaaaagataaatataaaaaagtgaatgcatacaaaacaatttcacaaaattgaatgttactcaaaaatcacagctcattttaagctgcacaaaatagtcatttttttctttataattgctcaaattcataatcaaacagaagaaagttcctgtcttggaagtagtgctatgccccaattcttccagagccagtactttaaacaattccatttcattattttcctgtagactaattcttaggacatcagcatatctctcttcaagcattaaaaaaatctctttagagtcagtggatcaatagacagttcctgttttccacacaactgaaagggtggagcccccaaaccacaaggggaagaaggaagttaaaagatgttaaatactggggccagctcaccctggtcagcctagcactctgacctagcagtcaacatgaaggctctcattgttctggggcttgtcctcctttctgttacggtccagggcaaggtctttgaaaggtgtgagttggccagaactctgaaaagattgggaatggatggctacaggggaatcagcctagcaaactgtaagtctactctccataattccagagaattagctacgtatggaacagacactaggagagaaggaagaagaagaaggggctttgagtgaatagatgttttatttctttgtgggtttgtatacttacaatggctaaaaacatcagtttggttctttataaccagagatacccgataaaggaatacgggcatggcaggggaaaattccattctaagtaaaacaggacctgttgtactgttctagtgctaggaagtttgctgggtgcctgagattcaatggcacatgtaagctgactgaaagatacatttgaggacctggcagagctctctcaagtccttggtatgtgactccagttatttcccattttgaacttgggctctgagagcctagagtgatgcagtatttttcttgtcttcaagtcccctgccgtgatgtgggatttttatttttatttttattttattttattttatttttaaagacagtctcactgtgtggcccaggctggagtgcagtggcatgatctcagctcactgcaacctctgccttctgggctcaagtgattctcgtgcttcagccttctgagtagctgtgactacaggtgtgtaccaccacacccagctaattttttgtattttcagtagagatggggtttcaccatgttggccaagctggtcttgaactcctggcctcaaatgatctgcccacctcagcctcccaaagtggtaggattacaggtgtgaaccactgcacccagccgacatgggatttttaacagtgatgtttttaaagaatatattgaattccctacacaagagcagtaggaacctagttcccttcagtcactctttgtataggatcccagaaactcagcatgaaatgttttattatttttatctactctacttgattaactatctttcattttctcccacacaattcaagatgtgccatgaggaaaagttattttatagtttagtacatagttgtcgatgtaataatctctgtagttttcagattgaattcagacatttcccctcaatagctatttttgaatgaatgagtgaagggatgaaatcacggaatagtcttgttttcaagattctaacttgatatccaaattcacctttagatattataagaaaatttctatcagaaaatccttatgtttttctgattaaaaaaagcatttttccatcagcctatgtatctgctatgaatttacaaaatctactcaacagctctgttgatttttctgttcttggctgaatgttgcctgagggatgggagcacgggaagggtaaaagcaatggaagaaacatgtattttaatattttaaaagtatgttatattgttcgttggtgttacaagatgatttgcattacaaaaggattctcttacaagtcccttatcttaacactaaagtgctaagatattttataagtaaatctttatacttataaaacaaatcagtaaaatagaagtagctaagtagaactgattttgctatagagtataagtcacttagtgttgctgtttattactaaaaataagttcttttcagggatgtgtttggccaaatgggagagtggttacaacacacgagctacaaactacaatgctggagacagaagcactgattatgggatatttcagatcaatagccgctactggtgtaatgatggcaaaaccccaggagcagttaatgcctgtcatttatcctgcagtggtaagacaagctaatatttgaccaatctggttatacttacaagaattgagactcaatacaaatgaaaaagccttgaaaggttcatgagggacctagaaaaactacatctcaacttccagaaagtcattattattttcctcataattccctgagtaagaaatttaaagaagtggtatcataaaaggttgatgttttttaatatacagaagtttctggaatgacctattaatttactgtcaatggccttactgatgctttgtccagaacaatgccattgctcctgcttactttggggaggttttgggataatttagttgtatggtcctttttcaattgttttacttttttttttatgaaatgttctaaatgtatagaaaattagagacattagtataataaacagccatatgcccattatgcactttaaaagttgttaacattttgccatagttgcttcttctatgcctttttttttttttttttttttttttgctgagagttttttgtttggttttgttttgttttattttgagacagggtctcctgtccccaggctgtagtcagtggcaccatcacagctcactgcagctcaagtgatcatcccaccacagcctcccaagtagctgggactacaggtgtgcaccaccatgcctggcaaatttttgaaatttttagtacaggcaaattctgtgttgcccaggctggtcttgaactcctgagttcaagcaatcttcccacctcagcctccttaagctgctggaattacaggcgttagcactgtacctggctactgctgagagacttttaagtgaattaggaacatgatgatattccatttctaaattctttagtttacatcttcaaaaaatacagttcctgtagaattattattgtaaataacaaattaacttaaggatttatttatttggagtgaaacaaatattttactgaactcataaaaatagaaataccatgtggaatcctcagtgtcaaaaatattgcagaaatcttgcaaagttgatattattaaattgttaaatattaaaattcccaataaagaacattaatcttatttctaaaatccagttaattaaaaaaatttatattatataataatatttggtcattaaataaaaattagaaaatacaaataagaaaaataacacccataatcttactacccagaggtttataaccatgggtaaattctggtatatattcttccagaatgtatatcaatcatgtgtatgaatgttaaattatatcatacacatataaacccacatacaaacatgtaaatactgtgtgcttttgcaaaaattaaattgtattatacacacggctttacaatttgcttcttatcacacaaaattatttgcatgtcagcaaatacaaatcggtttttaatgatcttttgctccattttccagatgagaaaaaaatacaaatctgtatcatcattttaaaagaatgactagaattttaatatatgaatattctataatttactgatccaattgttactattgagcacttaggttgtttccatttttccctcataaattgctatgaatagctttttgtatacatctttgggtgcatttcttatttcttttggataaattttcaataatagaactgctgagtaaaatatcactaggtgtttttttacagtgtctagtgcaaagaagacctttaatcattttgttaatacttccagagcttccaatgactttggtaaatgaagaaaaaaatgcttcatttcatgctgaatgggagagaatgaagagagttttccccaacaattacacatatatggactcatagaaaataatatcttaccattctttccacagcctaacagaaaaaagctggctaaacctaaatttaaaataaaatatctattaaagtttttattccttaccacctgtctttcagctttgctgcaagataacatcgctgatgctgtagcttgtgcaaagagggttgtccgtgatccacaaggcattagagcatggtatgttttaagtgttaaaagggaaaactatcttactctactgttgatatatacaatgagagcagacttttaaagaccaaagtatgctaatgacacctcaaaattgcagcttttggcttatgctaaatgatgtattacctacatccttgaagaaacaatctactttaactgatccagaatcttactcttttactcctcaatttattttaggggatttctagagttttaagatgcttcacactctatcagttccttgtcatatcttgaaattctttttagaataagtaagtgtgggccgggcacagtgctcacgcctgtaatcccagcactttgggagaccgaggcagatggatcacctgaggtcaggagttcgagaccagcctgcctaacatggcaaaaccccatctccactaaaaatacaaaaaattagctgggtgtggtgcaggtgcctgtaatcccagccactcgggaggctgaggcaggagacttgcttgaacccgggaggtggaggttgcagaggattgcgccattgtacttcagcctgggcgacagagtgagactctgtctcaaataaatagcataaaaaataaacgtggaattcactttgcagttgctgctgtacaacgcacattactcaatctttatgttcggcattctatgctctactgagaaatttgggtaggagtgaagtattttgtatacatatcttcatttaataaatagcaatagctgggtctatcttactattttatctattgataaaatattttgtttccccaaggagtgcgaagtatgtatattacaatgaagatatgttttaacctttcaccatttgcttcatctttttctacagggtggcatggagaaatcgttgtcaaaacagagatgtccgtcagtatgttcaaggttgtggagtgtaactccagaattttccttcttcagctcattttgtctctctcacattaagggagtaggaattaagtgaaaggtcacactaccattatttccccttcaaacaaataatatttttacagaagcaggagcaaaatatggcctttcttctaagagatataatgttcactaatgtggttattttatattaagcctacaacatttttcagtttgcaaatagaactaatactggtgaaaatttacctaaaaccttggttatcaaatacatctccagtacattccgttcttttttttttttttttttttttttgagacagtctcgctctgtcgcccaggctggagtgcagtggcgcaatctcggctcactgcaacctccacctcccgggttcacgccattctcctgcctcagcctcccgagtagctgggattacgggcgcccgccaccacgcccggctaattttttgtatttttagtagagacagggtttcaccgtgttagccaggatggtctcgatctcctgaccttgtgatccacccacctcggcctcccaaagtgctgggattacaggcgtgagccactgcgcccggccacattcagttcttatcaaagaaataacccagacttaatcttgaatgatacgattatgcccaatattaagtaaaaaatataagaaaaggttatcttaaatagatcttaggcaaaataccagctgatgaaggcatctgatgccttcatctgttcagtcatctccaaaaacagtaaaaataaccactttttgttgggcaatatgaaatttttaaaggagtagaataccaaatgatagaaacagactgcctgaattgagaattttgattttttaaagtgtgtttctttctaaattgctgttccttaatttgattaatttaattcatgtattatgattaaatctgaggcagatgagcttacaagtattgaaataattactaattaatcacaaatgtgaagttatgcatgatgtaaaaaatacaaacattctaattaaaggctttgcaacacatgccttgtctgtttttatttagactcctatagtgtctctgaagaaaagaatacagatatttgaaaaaatatgatttggtgctcttaatatctcttatatcgtcacttacctcacttaaatagtcagatattgctggagaaaaattcacaagcatgctgacaggtctcactttaaattcataaccataaatctcaaatgagccctcaagtctgcctgaccattttagttacttctctacaatccttccatttttatgtccctagtctccaaaatgactgttactattttacttttcctcttctctcttcaaagcctcaagacacacattcagcctcctcctctgcccccttatcctccaccctcctctgctctcagcagataaactggcctcatattacacttctaaaacaaaagcaacttcataccaagctt

SEQ ID NO: 1923 - protein, 130 aa, Homo sapiens
KVFERCELARTLKRLGMDGYRGISLANWMCLAKWESGYNTRATNYNAGDRSTDYGIFQINSRYWCNDGKTPGAVNACHLSCSALLQDNIADAVACAKRVVRDPQGIRAWVAWRNRCQNRDVRQYVQGCGV

SEQ ID NO: 1924 - DNA, 608 bp, Homo sapiens
aggaggtagatcaccctttctgcgggggacgatttcgtcggtggtaggctgctaccatgaggttgaatcagaacaccttgctgctggggaagaaggtggtccttgtaccctacacctcggagcatgtgcccagcaggtaccacgagtggatgaaatcagaggagctgcagcgtttgacagcctcggagccgctgaccctggagcaggagtatgccatgcagtgcagctggcaggaagatgcagacaagtgtaccttcattgtgctggatgccgagaagtggcaggcccagccaggcgccaccgaagagagctgcatggtgggagatgtgaacctcttcctcacagatctagaagacctcaccttgggggagatcgaggtcatgattgcagagcccagctgcaggggtaagggccttggcactgaggccgttctcgcgatgctgtcttacggagtgaccacgctaggtctgaccaagtttgaggctaaaattgggcaaggaaatgaaccaagcatccggatgttccagaaacttcactttgagcaggtggctacgagcagtgtttttcacggaggtgaccctcagactgacagtgagtgagtccgagca

SEQ ID NO: 1925 - DNA, 4523 bp, Homo sapiens
ccgcggtgccgccgggaaagatggtcgtggcgctgcggtacgtgtggcctctcctcctctgcagcccctgcctgcttatccagatccccgaggaatatgaaggacaccatgtgatggagccacctgtcatcacggaacagtctccacggcgcctggttgtcttccccacagatgacatcagcctcaagtgtgaggccagtggcaagcccgaagtgcagttccgctggacgagggatggtgtccacttcaaacccaaggaagagctgggtgtgaccgtgtaccagtcgccccactctggctccttcaccatcacgggcaacaacagcaactttgctcagaggttccagggcatctaccgctgctttgccagcaataagctgggcaccgccatgtcccatgagatccggctcatggccgagggtgcccccaagtggccaaaggagacagtgaagcccgtggaggtggaggaaggggagtcagtggttctgccttgcaaccctcccccaagtgcagagcctctccggatctactggatgaacagcaagatcttgcacatcaagcaggacgagcgggtgacgatgggccagaacggcaacctctactttgccaatgtgctcacctccgacaaccactcagactacatctgccacgcccacttcccaggcaccaggaccatcattcagaaggaacccattgacctccgggtcaaggccaccaacagcatgattgacaggaagccgcgcctgctcttccccaccaactccagcagccacctggtggccttgcaggggcagccattggtcctggagtgcatcgccgagggctttcccacgcccaccatcaaatggctgcgccccagtggccccatgccagctgaccgtgtcacctaccagaaccacaacaagaccctgcagctgctgaaagtgggcgaggaggatgatggcgagtaccgctgcctggccgagaactcactgggcagtgcccggcatgcgtactatgtcaccgtggaggctgccccgtactggctgcacaagccccagagccatctatatgggccaggagagactgcccgcctggactgccaagtccagggcaggccccaaccagaggtcacctggagaatcaacgggatccctgtggaggagctggccaaagaccagaagtaccggattcagcgtggcgccctgatcctgagcaacgtgcagcccagtgacacaatggtgacccaatgtgaggcccgcaaccggcacgggctcttgctggccaatgcctacatctacgttgtccagctgccagccaagatcctgactgcggacaatcagacgtacatggctgtccagggcagcactgcctaccttctgtgcaaggccttcggagcgcctgtgcccagtgttcagtggctggacgaggatgggacaacagtgcttcaggacgaacgcttcttcccctatgccaatgggaccctgggcattcgagacctccaggccaatgacaccggacgctacttctgcctggctgccaatgaccaaaacaatgttaccatcatggctaacctgaaggttaaagatgcaactcagatcactcaggggccccgcagcacaatcgagaagaaaggttccagggtgaccttcacgtgccaggcctcctttgacccctccttgcagcccagcatcacctggcgtggggacggtcgagacctccaggagcttggggacagtgacaagtacttcatagaggatgggcgcctggtcatccacagcctggactacagcgaccagggcaactacagctgcgtggccagtaccgaactggatgtggtggagagtagggcacagctcttggtggtggggagccctgggccggtgccacggctggtgctgtccgacctgcacctgctgacgcagagccaggtgcgcgtgtcctggagtcctgcagaagaccacaatgcccccattgagaaatatgacattgaatttgaggacaaggaaatggcgcctgaaaaatggtacagtctgggcaaggttccagggaaccagacctctaccaccctcaagctgtcgccctatgtccactacacctttagggttactgccataaacaaatatggccccggggagcccagcccggtctctgagactgtggtcacacctgaggcagccccagagaagaaccctgtggatgtgaagggggaaggaaatgagaccaccaatatggtcatcacgtggaagccgctccggtggatggactggaacgccccccaggttcagtaccgcgtgcagtggcgccctcaggggacacgagggccctggcaggagcagattgtcagcgaccccttcctggtggtgtccaacacgtccaccttcgtgccctatgagatcaaagtccaggccgtcaacagccagggcaagggaccagagccccaggtcactatcggctactctggagaggactacccccaggcaatccctgagctggaaggcattgaaatcctcaactcaagtgccgtgctggtcaagtggcggccggtggacctggcccaggtcaagggccacctccgcggatacaatgtgacgtactggagggagggcagtcagaggaagcacagcaagagacatatccacaaagaccatgtggtggtgcccgccaacaccaccagtgtcatcctcagtggcttgcggccctatagctcctaccacctggaggtgcaggcctttaacgggcgaggatcggggcccgccagcgagttcaccttcagcaccccagagggagtgcctggccaccccgaggcgttgcacctggagtgccagtcgaacaccagcctgctgctgcgctggcagcccccactcagccacaacggcgtgctcaccggctacgtgctctcctaccaccccctggatgaggggggcaaggggcaactgtccttcaaccttcgggaccccgaacttcggacacacaacctgaccgatctcagcccccacctgcggtaccgcttccagcttcaggccaccaccaaagagggccctggtgaagccatcgtacgggaaggaggcactatggccttgtctgggatctcagattttggcaacatctcagccacagcgggtgaaaactacagtgtcgtctcctgggtccccaaggagggccagtgcaacttcaggttccatatcttgttcaaagccttgggagaagagaagggtggggcttccctttcgccacagtatgtcagctacaaccagagctcctacacgcagtgggacctgcagcctgacactgactacgagatccacttgtttaaggagaggatgttccggcaccaaatggctgtgaagaccaatggcacaggccgcgtgaggctccctcctgctggcttcgccactgagggctggttcatcggctttgtgagtgccatcatcctcctgctcctcgtcctgctcatcctctgcttcatcaagcgcagcaagggcggcaaatactcagtgaaggataaggaggacacccaggtggactctgaggcccgaccgatgaaagatgagaccttcggcgagtacaggtccctggagagtgacaacgaggagaaggcctttggcagcagccagccatcgctcaacggggacatcaagcccctgggcagtgacgacagcctggccgattatgggggcagcgtggatgttcagttcaacgaggatggttcgttcattggccagtacagtggcaagaaggagaaggaggcggcagggggcaatgacagctcaggggccacttcccccatcaaccctgccgtggccctagaatagtggagtacggacaggagatgctgtgccccctggccttgggatccaggcccctccctctccagcaggcccatgggaggctggagttggggcagaggagaacttgctgcctcggatccccttcctaccacccggtccccactttattgccaaaacccagctgcaccccttcctgggcacacgctgctctgccccagcttgggcagatctcccacatgccaggggcctttgggtgctgttttgccagcccatttgggcagagaggctgtggtttgggggagaagaagtaggggtggcccgaaaggtctccgaaatgctgtctttcttgctccctgactgggggcagacatggtggggtctcctcaggaccagggttggcaccttccccctcccccagccaccactccagcagcctggctgggactgggaacagaactcgtgtccccaccatctgctgtcttttctttgccatctctgctccaaccgggatggcagccgggcaaactggccgcgggggcaggggaggccatctggagagcccagagtccccccactcccagcatcgcactctggcagcaccgcctcttcccgccgcccagcccaccccatggccggctttcaggagctccatacacacgctgccttcggtacccaccacacaacatccaagtggcctccgtcactacctggctgcggggcgggcacacctcctcccactgcccactggccggc

SEQ ID NO: 1926 - protein, 1257 aa, Homo sapiens
MVVALRYVWPLLLCSPCLLIQIPEEYEGHHVMEPPVITEQSPRRLVVFPTDDISLKCEASGKPEVQFRWTRDGVHFKPKEELGVTVYQSPHSGSFTITGNNSNFAQRFQGIYRCFASNKLGTAMSHEIRLMAEGAPKWPKETVKPVEVEEGESVVLPCNPPPSAEPLRIYWMNSKILHIKQDERVTMGQNGNLYFANVLTSDNHSDYICHAHFPGTRTIIQKEPIDLRVKATNSMIDRKPRLLFPTNSSSHLVALQGQPLVLECIAEGFPTPTIKWLRPSGPMPADRVTYQNHNKTLQLLKVGEEDDGEYRCLAENSLGSARHAYYVTVEAAPYWLHKPQSHLYGPGETARLDCQVQGRPQPEVTWRINGIPVEELAKDQKYRIQRGALILSNVQPSDTMVTQCEARNRHGLLLANAYIYVVQLPAKILTADNQTYMAVQGSTAYLLCKAFGAPVPSVQWLDEDGTTVLQDERFFPYANGTLGIRDLQANDTGRYFCLAANDQNNVTIMANLKVKDATQITQGPRSTIEKKGSRVTFTCQASFDPSLQPSITWRGDGRDLQELGDSDKYFIEDGRLVIHSLDYSDQGNYSCVASTELDVVESRAQLLVVGSPGPVPRLVLSDLHLLTQSQVRVSWSPAEDHNAPIEKYDIEFEDKEMAPEKWYSLGKVPGNQTSTTLKLSPYVHYTFRVTAINKYGPGEPSPVSETVVTPEAAPEKNPVDVKGEGNETTNMVITWKPLRWMDWNAPQVQYRVQWRPQGTRGPWQEQIVSDPFLVVSNTSTFVPYEIKVQAVNSQGKGPEPQVTIGYSGEDYPQAIPELEGIEILNSSAVLVKWRPVDLAQVKGHLRGYNVTYWREGSQRKHSKRHIHKDHVVVPANTTSVILSGLRPYSSYHLEVQAFNGRGSGPASEFTFSTPEGVPGHPEALHLECQSNTSLLLRWQPPLSHNGVLTGYVLSYHPLDEGGKGQLSFNLRDPELRTHNLTDLSPHLRYRFQLQATTKEGPGEAIVREGGTMALSGISDFGNISATAGENYSVVSWVPKEGQCNFRFHILFKALGEEKGGASLSPQYVSYNQSSYTQWDLQPDTDYEIHLFKERMFRHQMAVKTNGTGRVRLPPAGFATEGWFIGFVSAIILLLLVLLILCFIKRSKGGKYSVKDKEDTQVDSEARPMKDETFGEYRSLESDNEEKAFGSSQPSLNGDIKPLGSDDSLADYGGSVDVQFNEDGSFIGQYSGKKEKEAAGGNDSSGATSPINPAVALE

SEQ ID NO: 1927 - DNA, 1331 bp, Homo sapiens
cggccgcgtcgacgggaaagagccgctagagcagaccgcgccgccgccggagccgcgcctgcccaggcccggggagggaggaggcgggcgtcagggtgctgcgccccgctcggcgtccgagcttccggccgggctgtgccccgcgcggtcttcgccgggatgaagcgcccctgcgaggagacgacctccgagagcgacatggacgagaccatcgacgtggggagcgagaacaattactcggggcaaagtactagctctgtgattagattgaattctccaacaacaacatctcagattatggcaagaaagaaaaggagagggattatagagaaaaggcgtcgggatcggataaataacagtttatctgagttgagaagacttgtgccaactgcttttgaaaaacaaggatctgcaaagttagaaaaagctgaaatattgcaaatgacagtggatcatttgaagatgcttcaggcaacagggggtaaaggctactttgacgcacacgctcttgccatggacttcatgagcataggattccgagagtgcctaacagaagttgcgcggtacctgagctccgtggaaggcctggactcctcggatccgctgcgggtgcggcttgtgtctcatctcagcacttgcgccacccagcgggaggcggcggccatgacatcctccatggcccaccaccatcatccgctccacccgcatcactgggccgccgccttccaccacctgcccgcagccctgctccagcccaacggcctccatgcctcagagtcaaccccttgtcgcctctccacaacttcagaagtgcctcctgcccacggctctgctctcctcacggccacgtttgcccatgcggattcagccctccgaatgccatccacgggcagcgtcgccccctgcgtgccacctctctccacctctctcttgtccctctctgccaccgtccacgccgcagccgcagcagccaccgcggctgcacacagcttccctctgtccttcgcgggggcattccccatgcttcccccaaacgcagcagcagcagtggccgcggccacagccatcagcccgcccttgtcagtatcagccacgtccagtcctcagcagaccagcagtggaacaaacaataaaccttaccgaccctgggggacagaagttggagctttttaaatttttcttgaacttcttgcaatagtaactgaatgtcctccatttcagagtcagcttaaaacctctgcaccctgaaggtagccatacagatgccgacagatccacaaaggaacaataaagctatttgagacacaaaaagtcgacgcggccgcgaattc

SEQ ID NO: 1928 - protein, 337 aa, Homo sapiens
MKRPCEETTSESDMDETIDVGSENNYSGQSTSSVIRLNSPTTTSQIMARKKRRGIIEKRRRDRINNSLSELRRLVPTAFEKQGSAKLEKAEILQMTVDHLKMLQATGGKGYFDAHALAMDFMSIGFRECLTEVARYLSSVEGLDSSDPLRVRLVSHLSTCATQREAAAMTSSMAHHHHPLHPHHWAAAFHHLPAALLQPNGLHASESTPCRLSTTSEVPPAHGSALLTATFAHADSALRMPSTGSVAPCVPPLSTSLLSLSATVHAAAAAATAAAHSFPLSFAGAFPMLPPNAAAAVAAATAISPPLSVSATSSPQQTSSGTNNKPYRPWGTEVGAF

SEQ ID NO: 1929 - DNA, 1410 bp, Homo sapiens
gagaaagccttgctgggggcatgtgactgcacccagattgtgaaacccagtggggtccacctcaagctggtgctgaggttctcggatttcgggaaggccatgttcaaacccatgagacagcagcgagatgaggagacaccagtggacttcttctacttcattgactttcagagacacaatgctgagatcgcagctttccatctggacaggattctggacttccgacgggtgccgccaacagtggggaggatagtaaatgtcaccaaggaaatcctagaggtcaccaagaatgaaatcctgcagagtgttttctttgtctctccagcgagcaacgtgtgcttcttcgccaagtgtccatacatgtgcaagacggagtatgctgtctgtggcaacccacacctgctggagggttccctctctgccttcctgccgtccctcaacctggcccccaggctgtctgtgcccaacccctggatccgctcctacacactggcaggaaaagaggagtgggaggtcaatcccctttactgtgacacagtgaaacagatctacccgtacaacaacagccagcggctcctcaatgtcatcgacatggccatcttcgacttcttgatagggaatatggaccggcaccattatgagatgttcaccaagttcggggatgatgggttccttattcaccttgacaacgccagagggttcggacgacactcccatgatgaaatctccatcctctcgcctctctcccagtgctgcatgataaaaaagaaaacacttttgcacctgcagctgctggcccaagctgactacagactcagcgatgtgatgcgagaatcactgctggaagaccagctcagccctgtcctcactgaaccccacctccttgccctggatcgaaggctccaaaccatcctaaggacagtggaggggtgcatagtggcccatggacagcagagtgtcatagtcgacggcccagtggaacagtcggccccagactctggccaggctaacttgacaagctaagggctggcagagtccagtttcagaaaatacgcctggagccagagcagtcgactcgagtgccgaccctgcgtcctcactcccacctgttactgctgggagtcaagtcagctaggaaggaagcaggacattttctcaaacagcaagtggggcccatggaactgaatctttactccttggtgcaccgcttctgtcgtgcgttgccttgctccgtttttcccaaaaagcactggcttcatcaaggccaccgacgatctcctgagtgcactgggaaatctgggtataggtcaggcttggcagccttgatcccaggagagtactaatggtaacaagtcaaataaaaggacatcaagtggaaaaaaaaaaaaaaaaaaaaaaaaaaaaaaaaaa

SEQ ID NO: 1930 - protein, 340 aa, Homo sapiens
EKALLGACDCTQIVKPSGVHLKLVLRFSDFGKAMFKPMRQQRDEETPVDFFYFIDFQRHNAEIAAFHLDRILDFRRVPPTVGRIVNVTKEILEVTKNEILQSVFFVSPASNVCFFAKCPYMCKTEYAVCGNPHLLEGSLSAFLPSLNLAPRLSVPNPWIRSYTLAGKEEWEVNPLYCDTVKQIYPYNNSQRLLNVIDMAIFDFLIGNMDRHHYEMFTKFGDDGFLIHLDNARGFGRHSHDEISILSPLSQCCMIKKKTLLHLQLLAQADYRLSDVMRESLLEDQLSPVLTEPHLLALDRRLQTILRTVEGCIVAHGQQSVIVDGPVEQSAPDSGQANLTS

SEQ ID NO: 1931 - DNA, 656 bp, Homo sapiens
ggtttgtgaggctcgcactggccgcagaccctcgggctcgatcgcccgggagccaggactcggcgacgcgaggctgccgggctacccggccgaggcttcgggggcgcaaactaatgggactggctcgctcggcagcatctccccgctcttctaagtacactgagcagggcccgcgctgaagtagaagctgtccgggggcgcgtagcccggagtcccagtgtggcccggaggaacggagcccgtgccagggcggcccagtcgggagcccggggaccgagcttgtgctgtggggaaacccccacttcttccaagggacagcgatcccgggacggtcgaggcgtcggggcggtcaccgagacctctgcgggaagaccccgtcggggagagggcgcgcagccccgaagcgtctcgggaagtcgagcggaatcgggcgggatcacccgggggcgcagagcccccgtcgcgcctcgtgcggcagcggagagcccaggagaacgagccctcgggggccgaagcccatgcccgggttgggggcggctgcccagtgagtcctcctggccggccgggcggagaagagcgacaccgaaagccggcgggaggggagcacttcaaggccgcggctgcggaggatgggcgcctgaacggcttccgagcgc

SEQ ID NO: 1932 - DNA, 378 bp, Homo sapiens
agactgagtttcgctcttgtcgcccaggctggagtgcgatggcctgatctcagctcacggcaaactctacctcccaggagaatcgcttaaacccaggcggcagaggttgcagtgagccaggatcgcgccactgcactccagcctcagcaatagagtgagactgtctcaaaaaaaaaaaaaaaaaaaaaaacctgccaattttcaaacataccgtagagattattttcaggtgccattttatagtatagcagcagggcttttactctgtgtatgcacagatgcagtctggggcatggtttgtgtgctggactttctcatggccatcatcagtttgcttatggatttgatgacaggcatagcccgggcatatcaccctat

SEQ ID NO: 1933 - DNA, 318 bp, Homo sapiens
  misc_feature (7)..(7): n is a, c, g, or t
  misc_feature (9)..(9): n is a, c, g, or t
  misc_feature (74)..(74): n is a, c, g, or t
gacggcnanagggagctgagactgtccaggcagccaggttaggccaggaggaccatgtgaatggggccagaggnctcccgggctgggcagggaccatgggctgtggctgcagctcacacccggaagatgactggatggaaaacatcgatgtgtgtgagaactgccattatcccatagtcccactggatggcaagggcacgctgctcatccgaaatggctctgaggtgcgggacccactggttacctacgaaggctccaatccgccggcttccccactgcaagacaacctggttatccgctctgcacagctatgagccc

SEQ ID NO: 1934 - DNA, 2175 bp, Homo sapiens
gagaaattggagaagataaaactggacactggggagaccacaacttcatgctgcgtgggatctcccagctacctgcagtggccaccatgtcttgggtcctgctgcctgtactttggctcattgttcaaactcaagcaatagccataaagcaaacacctgaattaacgctccatgaaatagtttgtcctaaaaaacttcacattttacacaaaagagagatcaagaacaaccagacagaaaagcatggcaaagaggaaaggtatgaacctgaagttcaatatcagatgatcttaaatggagaagaaatcattctctccctacaaaaaaccaagcacctcctggggccagactacactgaaacattgtactcacccagaggagaggaaattaccacgaaacctgagaacatggaacactgttactataaaggaaacatcctaaatgaaaagaattctgttgccagcatcagtacttgtgacgggttgagaggatacttcacacatcatcaccaaagataccagataaaacctctgaaaagcacagacgagaaagaacatgccgtctttacatctaaccaggaggaacaagacccagctaaccacacatgtggtgtgaagagcactgacgggaaacaaggcccaattcgaatctctagatcactcaaaagcccagagaaagaagactttcttcgggcacagaaatacattgatctctatttggtgctggataatgccttttataagaactataatgagaatctaactctgataagaagctttgtgtttgatgtgatgaacctactcaatgtgatatataacaccatagatgttcaagtggccttggtaggtatggaaatctggtctgatggggataagataaaggtggtgcccagcgcaagcaccacgtttgacaacttcctgagatggcacagttctaacctggggaaaaagatccacgaccatgctcagcttctcagcgggattagcttcaacaatcgacgtgtgggactggcagcttcaaattccttgtgttccccatcttcggttgctgttattgaggctaaaaaaaagaataatgtggctcttgtaggagtgatgtcacatgagctgggccatgtccttggtatgcctgatgttccattcaacaccaagtgtccctctggcagttgtgtgatgaatcagtatctgagttcaaaattcccaaaggatttcagtacatcttgccgtgcacattttgaaagataccttttatctcagaaaccaaagtgcctgctgcaagcacctattcctacaaatataatgacaacaccagtgtgtgggaaccaccttctagaagtgggagaagactgtgattgtggctctcctaaggagtgtaccaatctctgctgtgaagccctaacgtgtaaactgaagcctggaactgattgcggaggagatgctccaaaccataccacagagtgaatccaaaagtctgcttcactgagatgctaccttgccaggacaagaaccaagaactctaactgtcccaggaatcttgtgaattttcacccataatggtctttcacttgtcattctactttctatattgttatcagtccaggaaacaggtaaacagatgtaattagagacattggctctttgtttaggcctaatctttctttttacttttttttttcttttttctttttttttaaagatcatgaatttgtgacttagttctgccctttggagaacaaaagaaagcagtcttccatcaaatcaccttaaaatgcacggctaaactattcagagttaacactccagaattgttaaattacaagtactatgctttaatgcttctttcatcttactagtatggcctataaaaaaaataataccacttgatgggtgaaggctttggcaatagaaagaagaatagaattcaggttttatgttattcctctgtgttcacttcgccttgctcttgaaagtgcagtatttttctacatcatgtcgagaatgattcaatgtaaatatttttcattttatcatgtatatcctatacacacatctccttcatcatcatatatgaagtttattttgagaagtctacattgcttacattttaattgagccagcaaagaaggcttaatgatttattgaaccataatgtcaataaaaacacaacttttgaggc

SEQ ID NO: 1935 - protein, 470 aa, Homo sapiens
MLRGISQLPAVATMSWVLLPVLWLIVQTQAIAIKQTPELTLHEIVCPKKLHILHKREIKNNQTEKHGKEERYEPEVQYQMILNGEEIILSLQKTKHLLGPDYTETLYSPRGEEITTKPENMEHCYYKGNILNEKNSVASISTCDGLRGYFTHHHQRYQIKPLKSTDEKEHAVFTSNQEEQDPANHTCGVKSTDGKQGPIRISRSLKSPEKEDFLRAQKYIDLYLVLDNAFYKNYNENLTLIRSFVFDVMNLLNVIYNTIDVQVALVGMEIWSDGDKIKVVPSASTTFDNFLRWHSSNLGKKIHDHAQLLSGISFNNRRVGLAASNSLCSPSSVAVIEAKKKNNVALVGVMSHELGHVLGMPDVPFNTKCPSGSCVMNQYLSSKFPKDFSTSCRAHFERYLLSQKPKCLLQAPIPTNIMTTPVCGNHLLEVGEDCDCGSPKECTNLCCEALTCKLKPGTDCGGDAPNHTTE

SEQ ID NO: 1936 - DNA, 424 bp, Homo sapiens
tttttttttttttttttttttttttttttttttttttggcctgccccacaacaatttattagcggaactttttttttttttttttaaaaatttcataacaactgaagtatgtacaaagtcttacagcatttaccccataaaaagtttcctattagctcatgaagtctaagggggggctgctgaaaacttcaaatggggcaaagggaatgagggcaaaccacttgtagggttccctctttgctgccacatcatgggggcagctgagtgacagctaactgtcccacctggaaaacagggttttgggaaaaagggggacaatttgattggcccccctaaaaaccatgggggggaaaagccacatagcattggttttctacagtttcctagagctggaacaaagatccacagcctgggagaaaacctt

SEQ ID NO: 1937 - DNA, 221 bp, Homo sapiens
  misc_feature (2)..(2): n is a, c, g, or t
  misc_feature (25)..(25): n is a, c, g, or t
  misc_feature (42)..(42): n is a, c, g, or t
  misc_feature (118)..(118): n is a, c, g, or t
  misc_feature (137)..(137): n is a, c, g, or t
  misc_feature (208)..(208): n is a, c, g, or t
anacagtggacctcacatcacctcncagattgtttccatttnatggattgaaactctgaggcctccagacatgaagaagcagccatagattcagtcaaatgccagccaagggtttgcnttgcctcagacaacctccncagccccatttgacccagagaccagctgtcagggagcgacctcagagccagaggggtgaaagatgagaggnaagaaggtagctc

SEQ ID NO: 1938 - DNA, 578 bp, Homo sapiens
  misc_feature (551)..(551): n is a, c, g, or t
  misc_feature (570)..(570): n is a, c, g, or t
ggctttttaaccatcgtctctttatttacagctcaagagcacatgcaacatgacatcatgaaactacaagggcgtggcacttccccctccccctgccgctccccaactttaaaaaggaagtacagcaccctaggaagttgcctaagagtcagaaaaccctacactgagggtcccaggccgaggtgctccattcattgcctccaaaaataaagaccagttgcagcccaggaggcttgggcctcagagcctgggagtttgtcattgctggtaattagctacgcaaaacaggtctcggatttgccagctcacacctgaatacaaatagcccgaattatccgaatgtccctgaccaccccacatttctgttttccccgtcgtatcctagacctgtgattctcaaatttgatcgtgcccaagaatgacctggagaacttgtgaaaagccaaatggctgggccccacccccagagattctggctctgggagtggctgccaggtgagttgaacagtccgatttccagtgtggtcccgcacagatgggacatggcttangaggaaatcctggctgcangcattcct

SEQ ID NO: 1939 - DNA, 2346 bp, Homo sapiens
cacctgcctttcaaaactggcccacctcctgctgcccaataacctgatgttgtcactctcatatttaaaacccataagtgctgccgggagcggtggctcacgcctgtaatcccagcactttgggaggccgaggcgggcggatcacaaggtcaagagatcgagaccatcctggccaacgtggtgaagcccagcctctactaaaaatacaaaaattagctgggcggggtggcacacacctgtagtcccagctacttggcaggctgaggcaggagaattgcttgaacccggaggcagaggttgcagtgagccgagattgcactactgcactccagactggtgacggagcgagacgctgtcaaaaaaacaaaacaaaacaaaaaacatatcaatgctgatgaaccaagtgcaaagccctgagcttggccaggcaacatagcctggaaacctgacttttaatccttactttgctctattcccccaacatacacacacttcatacaccacacctaaaagagacttcccacagttttccaaaaatgactcacatttatatttcctgtttttccctttgcccaccctgccctctctccctctgccttcatttttttaattaacctctggaactcaggtgctcctgctccaaggtttaggtcaaaagttacctcctccatgaagctttctctcattctcccacaatgtgtgaaagccccattctcagatttgcttagttgtgcatttgtatattctaccttgcactacagtcatttgtatatttatcttatggtttctgtgccttaggaaaggtacactgtcttaatcatctttgttcaatacagtgcctagcagagtgcctcaagtataatatgtgctcaataaataatagatgcatttttccatgcatattttctactatatcgaagtggaaaatatatccatgtgatatagtggaaaatatctcatgaagagagatacagtgaggaaaatatctcatgaagaccaaaaagcagaaatccaagttttttcttttcattactatcatcagtgattattaattttatgtgtcaacttggttgggcttagggatgctcagatagctggtaaaatattatttctggatgtgtctctcagggtgtttctgggggaaattagcatttgaatcagtagactaaataaagaaaatctgccctcacaaatgtgagccagcatcatccaatttattgacagtttagatacaacaataaggcagaagaaggtgaactctctttccttgagctgggacatccatcttctcctgctctgacattggagttcctagttcttgggacttcagattctcccctgaagtttctcaggccttttggcatcagactggaagttatgccattggctcccctggttctcagacctttggactcagactgaattataccactggctttcctggttctccagcttcaagatgacatattgtgagacttttcaacctccataattgcatgagccaatttccacaatatatctcctcttatgtatctatatatttcctattggttttgtttctctacagaatcctaatagatcatctaattgtttatctaacaagtattttcctccctagacgatatgttgggcactagggacacaaaaataaaaacacagacatctgcactcaataaacttacattcaatatcagagagattggcacagaatacaaataaaatgagatacatgcaaaataatatgaattgcaaaattacggcaattcaccaccaactaggtgtgtgaccgtgggaaaatcacactgtgagctaaatattagcaagtttaaaatgcaaaatcagaggcagtctatgaattggactttgctaatggcctcctttgctgatggatggcacattggtgttagaaagtgcttatttttgcaaaggtccattattgatgctttaattctaaggaaattatgtaggcagaaactaaagaaaggttaaaaaaacagcagctaaaattgatacttagacaataaaaaactaattataagtgatttatcagcaccactagataactacattggtgaaatttaaggccatgaaatgcaggacaagcctcgtaggaagcaaggtcccagtggatgagatgctgtcctctgggctcctaaccttccaccactagtattcaccatatctgattggaaatgtgtgcatgtgagtcggcctcccctctatgatgtgagtagggacctatttttgctcatctctgtatcctctacacacgatgcttggcacacagcaagtattcaataaatgtttatgaatgaagcaatcaaaaaaaaaaaaaaaaaaaaaaaa

SEQ ID NO: 1940 - DNA, 625 bp, Homo sapiens
  misc_feature (3)..(3): n is a, c, g, or t
  misc_feature (13)..(13): n is a, c, g, or t
  misc_feature (215)..(215): n is a, c, g, or t
  misc_feature (233)..(233): n is a, c, g, or t
  misc_feature (336)..(336): n is a, c, g, or t
  misc_feature (397)..(397): n is a, c, g, or t
  misc_feature (413)..(413): n is a, c, g, or t
  misc_feature (419)..(419): n is a, c, g, or t
  misc_feature (423)..(423): n is a, c, g, or t
  misc_feature (443)..(443): n is a, c, g, or t
  misc_feature (457)..(457): n is a, c, g, or t
  misc_feature (463)..(463): n is a, c, g, or t
  misc_feature (467)..(467): n is a, c, g, or t
  misc_feature (469)..(470): n is a, c, g, or t
  misc_feature (478)..(478): n is a, c, g, or t
  misc_feature (480)..(480): n is a, c, g, or t
  misc_feature (484)..(484): n is a, c, g, or t
  misc_feature (488)..(488): n is a, c, g, or t
  misc_feature (492)..(492): n is a, c, g, or t
  misc_feature (508)..(508): n is a, c, g, or t
  misc_feature (520)..(521): n is a, c, g, or t
  misc_feature (536)..(536): n is a, c, g, or t
  misc_feature (540)..(540): n is a, c, g, or t
  misc_feature (559)..(559): n is a, c, g, or t
  misc_feature (563)..(564): n is a, c, g, or t
  misc_feature (568)..(569): n is a, c, g, or t
  misc_feature (575)..(576): n is a, c, g, or t
  misc_feature (578)..(580): n is a, c, g, or t
  misc_feature (584)..(584): n is a, c, g, or t
  misc_feature (586)..(596): n is a, c, g, or t
  misc_feature (599)..(599): n is a, c, g, or t
  misc_feature (601)..(601): n is a, c, g, or t
  misc_feature (603)..(607): n is a, c, g, or t
  misc_feature (610)..(612): n is a, c, g, or t
  misc_feature (615)..(615): n is a, c, g, or t
  misc_feature (621)..(623): n is a, c, g, or t
ttntactcaatgnggtgttatgttgcattttctcagctcctggggatggaaatggaggatcccagaacacacagccctggcccctttgattctagggcctgcacagatctctggttcaaatgcacaggccctcagaatagaggaacatgaagagagatcttagagcacacagtagaatgtgagagcctgggtgtctgagaccgggagggcccagnagtgaggggcaggctctnctggtcaccaggctgttcagtggactcagttcttcatcttgtaatgtcgatggctttgccacaccaggccaagcccatgccataccttgtcaagactgtcaangtggttgtggttaagtcaagctggttttgggttcttgatggttaggaagaaacaggtcagncctcaagatcactggnccgggncagntgaccccctagaaccctggntcttgccaattagnttaggncctncnnctctgccnanattngggncttntccttctccccattanaacatttggttnngggcttcaagaattnaaanagcgggttcccatttgggntttnncacnngtttanntnnntcanannnnnnnnnnnctntncnnnnnttnnnctngctccnnntt

SEQ ID NO: 1941 - DNA, 724 bp, Homo sapiens
tctcctttgttcgccctcgttgcgcagtagtgctagcggcttcgcggttcggtcctcgcacccggcagccgccactggtgctgagctgctaggaagcccctatcgccgagctcgttggagcttgaacccattgtcacccctccgactcaccggcccaaaaaaaaaaaaaagggttgaagcagaatcgcccaggaaagctcttcattgggtggggcttaatacgggaaacaaatggagaaagctcttgaagcagtatttgggcaaatatggacgaatagtgggaagtactcttgatgaaagaccggtgaaaccaacaaatcaagaggattggctttggtcaccttggaaagcccagcagacgctaaggatgcagccagagacatgaaagggaaagtcattagatggaaaagccatcaggggggaacaagccaccaaaccatcattggaaagtggtagacgtggaccgcctccacctccaagaagtagaggccctccaagaggtcttacgaggtggacagaggaggaccgtggacggacccagtggacctccctcacggcggaggaccctgtggatgacgggggatatcccatgaattttaccactgagcttctcccaggggcaccacttcccagttaaaaagaggaccaccaccaagaagtgggggtcctcctcctaagagatctgcccttcggaaccgttcgcaagtagctgtgcaattgggcg

SEQ ID NO: 1942 - DNA, 308 bp, Homo sapiens
  misc_feature (266)..(266): n is a, c, g, or t
  misc_feature (275)..(275): n is a, c, g, or t
caagtgtcaatcacatgagcgccttgccttctcttaggctttgaagcatttttgtctgtgctccctgatcttcatgtcaccaccatgaagttcttagcagtcctggtactcttgggagtttccatctttctggtctctgcccagaatccgacaacagctgctccagctgacacgtatccagctactggtcctgctgatgatgaagcccctgatgctgaaaccactgctgctgcaaccactgcgaccactgctgctcctaccactgnaaccaccgntgcttctaccaccgctcatgtgattgacacttg

SEQ ID NO: 1943 - DNA, 537 bp, Homo sapiens
  misc_feature (323)..(323): n is a, c, g, or t
ttttttttttttttctgcaaatataagaagtaattttattgcaatatactgtggctagagtggtctggggagaacgggacacattttgaagttcagtacaaattataacaactttgaagggaccacagaggaagaaaatgacaggagaaaaggacaaattggatgggatgagaaatgaaaacagaatcacatgacctagacgcagtccacgggggtcgcgggacagtcctcggctatggcttttcttttgaagagatgaaggtgacagtcattggcacatgctggcatcctgggctccagagactctccaagccagacttttntttggcaagagcgagacttactttccagggaaatttggaaaatccacgctggcggtgttttgttcctcctgggtggcttgtttgtggcttcctaagctggaactgcattctggtggtggtgggggtcggggacagcaccagagccccgcaggctcaccccaagggcccagcctgcatttcccatggtagaaggaaaaggcgctgcacccgggca

SEQ ID NO: 1944 - DNA, 506 bp, Homo sapiens
  misc_feature (239)..(239): n is a, c, g, or t
  misc_feature (430)..(430): n is a, c, g, or t
  misc_feature (483)..(483): n is a, c, g, or t
taaagttcctccatagaaatgtgtggcatgggaacagagcctaatactttctgaataagatattaacaggcttgtagtggatgctgggaatttagaaagctctgttttttttttttttctaaagcctcccagtagaatgtcagactaataaatggactgcatatttccacagtgtttttatgacatgtttcacacactgtcttggtgcagatatgagaaagcccttgtccacagcccangttctgactcactcattaattttaccttgtattcaagttttcttggggtggatctagactaagaatgaatagaataagccgacctttaactacagtccttaaatgaggaaatctccaccctggggccagctgtgccaggaatccccgaccgagatgggaactccgctgtggtttataaggcaggggctgantttcaggggggagtgcacccatcctggactccccgctgttcccatcaatctantccaagccctggtaaccctggac

SEQ ID NO: 1945 - DNA, 700 bp, Homo sapiens
ctcgcgtgccgcgctcacccacccgcggcatgagcagcgcccccgcgccgggcccggcgcccgccagcctcacgctctgggacgaggaggacttccagggccgtcgctgtcggctgctaagcgactgtgcgaacgtctgcgagcgcggaggcctgcccagggtgcgctcggtcaaggtggaaaacggcgtttgggtggcctttgagtaccccgacttccagggacagcagttcattctggagaagggagactatcctcgctggagcgcctggagtggcagcagcagccacaacagcaaccagctgctgtccttccggccagtgctctgcgcgaaccacaatgacagccgtgtgacactgtttgagggggacaacttccaaggctgcaagtttgacctcgttgatgactacccatccctgccctccatgggctgggccagcaaggatgtgggttccctcaaagtcagctccggagcgtgggtggcctaccagtacccaggctaccgaggctaccagtatgtgttggagcgggaccggcacagcggagagttctgtacttacggtgagctcggcacacaggcccacactgggcagctgcagtccatccggagagtccagcactaggctccacggccccagacaccttccctgaggacactcaataaaggttcctgaatcttcctgccaaaaaaaaaaaaaaa

SEQ ID NO: 1946 - protein, 197 aa, Homo sapiens
MSSAPAPGPAPASLTLWDEEDFQGRRCRLLSDCANVCERGGLPRVRSVKVENGVWVAFEYPDFQGQQFILEKGDYPRWSAWSGSSSHNSNQLLSFRPVLCANHNDSRVTLFEGDNFQGCKFDLVDDYPSLPSMGWASKDVGSLKVSSGAWVAYQYPGYRGYQYVLERDRHSGEFCTYGELGTQAHTGQLQSIRRVQH

SEQ ID NO: 1947 - DNA, 2423 bp, Homo sapiens
acccgcgctcgtacgtgcgcctccgccggcagctcctgactcatcgggggctccgggtcacatgcgcccgcgcggccctataggcgcctcctccgcccgccgcccgggagccgcagccgccgccgccactgccactcccgctctctcagcgccgccgtcgccaccgccaccgccaccgccactaccaccgtctgagtctgcagtcccgagatcccagccatcatgtccatagagaagatctgggcccgggagatcctggactcccgcgggaaccccacagtggaggtggatctctatactgccaaaggtcttttccgggctgcagtgcccagtggagcctctacgggcatctatgaggccctggagctgagggatggagacaaacagcgttacttaggcaaaggtgtcctgaaggcagtggaccacatcaactccaccatcgcgccagccctcatcagctcaggtctctctgtggtggagcaagagaaactggacaacctgatgctggagttggatgggactgagaacaaatccaagtttggggccaatgccatcctgggtgtgtctctggccgtgtgtaaggcaggggcagctgagcgggaactgcccctgtatcgccacattgctcagctggccgggaactcagacctcatcctgcctgtgccggccttcaacgtgatcaatggtggctctcatgctggcaacaagctggccatgcaggagttcatgatcctcccagtgggagctgagagctttcgggatgccatgcgactaggtgcagaggtctaccatacactcaagggagtcatcaaggacaaatacggcaaggatgccaccaatgtgggggatgaaggtggctttgcccccaatatcctggagaacagtgaagccttggagctggtgaaggaagccatcgacaaggctggctacacggaaaagatcgttattggcatggatgttgctgcctcagagttttatcgtgatggcaaatatgacttggacttcaagtctcccactgatccttcccgatacatcactggggaccagctgggggcactctaccaggactttgtcagggactatcctgtggtctccattgaggacccatttgaccaggatgattgggctgcctggtccaagttcacagccaatgtagggatccagattgtgggtgatgacctgacagtgaccaacccaaaacgtattgagcgggcagtggaagaaaaggcctgcaactgtctgctgctcaaggtcaaccagatcggctcggtcactgaagccatccaagcgtgcaagctggcccaggagaatggctggggggtcatggtgagtcatcgctcaggagagactgaggacacattcattgctgacctggtggtggggctgtgcacaggccagatcaagactggtgccccgtgccgttctgaacgtctggctaaatacaaccagctcatgagaattgaggaagagctgggggatgaagctcgctttgccggacataacttccgtaatcccagtgtgctgtgattcctctgcttgcctggagacgtggaacctctgtctcatcctcctggaaccttgctgtcctgatctgtgatagttcaccccctgagatcccctgagccccagggtgcccagaacttccctgattgacctgctccgctgctccttggcttacctgacctcttgctgtctctgctcgccctcctttctgtgccctactcattggggttccgcactttccacttcttcctttctctttctctcttccctcagaaactagaaatgtgaatgaggattattataaaagggggtccgtggaagaatgatcagcatctgtgatgggagcgtcagggttggtgtgctgaggtgttagagagggaccatgtgtcacttgtgctttgctcttgtcccacgtgtcttccactttgcatatgagccgtgaactgtgcatagtgctgggatggaggggagtgttgggcatgtgatcacgcctggctaataaggctttagtgtatttatttatttatttattttatttgtttttcattcatcccattaatcatttccccataactcaatggcctaaaactggcctgacttgggggaacgatgtgtctgtatttcatgtggctgtagatcccaagatgactggggtgggaggtcttgctagaatgggaagggtcatagaaagggccttgacatcagttcctttgtgtgtactcactgaagcctgcgttggtccagagcggaggctgtgtgcctgggggagttttcctctatacatctctccccaaccctaggttccctgttcttcctccagctgcaccagagcaacctctcactccccatgccacgttccacagttgccaccacctctgtggcattgaaatgagcacctccattaaagtctgaatcagtgc

SEQ ID NO: 1948 - protein, 434 aa, Homo sapiens
MSIEKIWAREILDSRGNPTVEVDLYTAKGLFRAAVPSGASTGIYEALELRDGDKQRYLGKGVLKAVDHINSTIAPALISSGLSVVEQEKLDNLMLELDGTENKSKFGANAILGVSLAVCKAGAAERELPLYRHIAQLAGNSDLILPVPAFNVINGGSHAGNKLAMQEFMILPVGAESFRDAMRLGAEVYHTLKGVIKDKYGKDATNVGDEGGFAPNILENSEALELVKEAIDKAGYTEKIVIGMDVAASEFYRDGKYDLDFKSPTDPSRYITGDQLGALYQDFVRDYPVVSIEDPFDQDDWAAWSKFTANVGIQIVGDDLTVTNPKRIERAVEEKACNCLLLKVNQIGSVTEAIQACKLAQENGWGVMVSHRSGETEDTFIADLVVGLCTGQIKTGAPCRSERLAKYNQLMRIEEELGDEARFAGHNFRNPSVL

SEQ ID NO: 1949 - DNA, 819 bp, Homo sapiens
gctgtgctggcagagatgctgcccacagcctggtgatgagcagccggcctcccggccttcctgctctgcagcacgctgctggtcatcaagatgtacgtggtggccatcatcacgggccaagtgaggctgcggaagaaggcctttgccaaccccgaggatgccctgagacacggaggcccccagtattgcaggagcggacccgacgtggaacgctgctcagggcccaccggaacgacatggagaccatctaccccttccttttcctgggcttcgtctactcctttctgggtcctaaccctttttgtcgcctggatgcacttcctggtcttcctcgtgggccgtgtggcacacaccgtggctacctggggaagctgcggggcacccatccgtcctgtgactacaccctgtgcccagctcccctgctgcctccatggctctgcagatcctctgggaagcgggcccgccgactgtgaccagcagctgatgcctccttggccaccagacatgggccaagagcccgcgtggtatacctggggacttgatgttccttccagattgtggtgggccctgagtcctggtttcctggcagcctgctgcgcgtgtgggtctctgggcacagtgggcctgtgttgtgtgcccgtgtgtgtgtatgtcgtatgtcgtgtgtgtatgtttcttagccccttggattctgcacggcagtggctgatgggaaccatttcaagacagatttgtcgaagattgctagaacatccttccagtaagtaccgagctcaacaacttcatccctcttcctcctaaagtgacacagaacacggc

SEQ ID NO: 1950 - DNA, 617 bp, Homo sapiens
tttttttttatccgataattatttattgaaagaaatgacgggatgaatcccagactccggagtaagccaccccctcacacacacacccctcccctgactctcaaaatccacagcctgccacagcagatttgctaaaaagcaaaggcaataataaccctggggtccgtccaactcatgccctgtacccaggccctaggaggcgaagggcttagtaggtatcttcagggtcagagcctgagtcctcgccttgttggttctgaatctgactttgcttccggtacaaacaggccacctgagcactggtggtggcctgctccggctgcttgtcttcacggactcgaataaaccgagggaagcgaagggagatgcccttgtcactatccaccaggccccgcgcagcagggtagatgggagagagggagaggtcagcgcacttcacctcccacacagcgctggggtccagccagtggtcgggaatcacagcgccatctatccgcacgtaagggctagggctgggcagcaccagggccttgaggctctggtgatgctcctccagctcctcgtcactgaagccagttccaagcttgcatatggcctgcagctcctcactgtcctcg

SEQ ID NO: 1951 - DNA, 337 bp, Homo sapiens
aaatgcatggttgttaagaactcaggatagagagtcacacagactcaaatcctggttccactactaaaagtcagcaagtgagctcgtcaccacatctgtaacacgggacaaataacagtacctggctaggacctgggaattaaaggagatgatgtataacgcactcagcaaatgcaagcataattcttcctctggatgcagatgtgggaggtgaggaccacagaggcaaagctggcagaggggtccatgctcatgccctgccccaccctgcccgcagctggaacatgatatcctcctgggtcatctcactgtgatgcagagagcacaggttcagttt

SEQ ID NO: 1952 - DNA, 1585 bp, Homo sapiens
acagcagttacactgcggcgggcgtctgttctagtgtttgagccgtcgtgcttcaccggtctacctcgctagcatgtcgggccgcggcaagactggcggcaaggcccgcgccaaggccaagtcgcgctcgtcgcgcgccggcctccagttcccagtgggccgtgtacaccggctgctgcggaagggccactacgccgagcgcgttggcgccggcgcgccagtgtacctggcggcagtgctggagtacctcaccgctgagatcctggagctggcgggcaatgcggcccgcgacaacaagaagacgcgaatcatcccccgccacctgcagctggccatccgcaacgacgaggagctcaacaagctgctgggcggcgtgacgatcgcccagggaggcgtcctgcccaacatccaggccgtgctgctgcccaagaagaccagcgccaccgtggggccgaaggcgccctcgggcggcaagaaggccacccaggcctcccaggagtactaagagggcccgcgccgcggccggccgccccagctccccatgccaccacaaaggcccttttaagggccaccaccgccctcatggaaagagctgagccgcttcagactgcggggcaagcgggccgcggctcccttcccctcccctcccctcgcccgccttcgccgcccggcctcgagtccccgcccgcccccgctcccgtcccgcaccgcctgccgcgtcggcctcgggcctgccctgtccgccgtccgccctccggtagggttcgggccttccggatgcggcttgggcgctcttcggggacctccgtggcgcggaagacccgagcctgccggggggaggccggcggcgccgcacctgcccgcctcggcgttcgtgactcagccgccccatcccgagtcgctaaggggctgcggggaggccgcagcaccttctggaagacttggccttccgctctgacgcagggccgaggtgggcagtccaggccgagagccggcggccctgaaggtgagtgaggccctcggcagctgcagccggggtgtctggtacccccccggcgtggtgcttagcccaggactttcagacggccgctggccgggaggctttggtgggagagacgcgatcgccgatttcggtctggcgccccttctgcggccgggacccaggcctttcacatcagctctccctccatcttcattcataggtctgcgctggggccgggacgaagcacttggtaacaggcacatcttcctcccgagtgactgcctcctaggaggacatttaggggagggcagaggcctgcagtttggcttcacggctggctatgtggacagcaagagtcgttttgcggaacgcgactggcagccaggcctgtcgggcccccgacgccgccccatttcccttccagcaaactcaactcggcaatccaagcacctagataccagcacaagtcggttaatccctgtctggactgagcctccgttggcttctgaactggaattctgcagctaacccttccacgactagaaccttaggcattggggagttttagatggactaattttattaaaggattgtttttttttt

SEQ ID NO: 1953 - protein, 143 aa, Homo sapiens
MSGRGKTGGKARAKAKSRSSRAGLQFPVGRVHRLLRKGHYAERVGAGAPVYLAAVLEYLTAEILELAGNAARDNKKTRIIPRHLQLAIRNDEELNKLLGGVTIAQGGVLPNIQAVLLPKKTSATVGPKAPSGGKKATQASQEY

SEQ ID NO: 1954 - DNA, 460 bp, Homo sapiens
ttttttaagctatttttttgtatatttaattgctattttaaaattttaatgcattttgctaatcactcctcaaaaataaaacatgcatgtaattgactcaaacgtgtaaataaaagcaaattttgaaaaatagtgttgtgcatatgcctttgaacagagggaacatccatgtgccacttacgcaagcaccttcagcaagacttggaaactcaaggtgagtaattctatcagagctgggaactaatactgagtgattgtgatggaagcccctgcccttcctgtggcatagtgtgcaagcgggggtggggtcagtggtgaagagtgtgtcaggccaccacagccagagaacagagaatcctggaatgcagagtacagtggagtctgaagccccctggcctccctgagctctgcaaacagctggatacagataagcagtcttccacgtgaacgccagcaccag

SEQ ID NO: 1955 - DNA, 3956 bp, Homo sapiens
ggctgaggcagccgcgcaggtcgcagggccagcgtccgcgaggacggcccggctgggcggccccgagctctgtggcgctgtggaggagcgggagcgcggccgaggaagcggggcgccgagggggtcggcggccttcgggaaatttccgccgacccttcgctcccggctctaaaagttcctgatttcctatttccttttaaatcccgagtggctgttagctcttcgcctgcactttttcttccccaggagataagggggagtgtgaggaacggagcgaataatataaaaaaggatttcctcccggaagagagcggcagttcggagagatttttcttaaggaagcagaagcggcgtttgcggccgctgcaggcgccgggccctgccggccacactatgcgcgagccggccccgggctgctgaggcgcggggacgcggaagcggaggccgagcgcgccgggctcccgcgctcgcgagcgagttttgtccgcccggcggcggtggcggggggatggagcccgcgaccgcgccccggcccgacatggcgccggagctgaccccggaggaggagcaggctaccaagcagtttctcgaagagattaacaagtggacagttcagtacaatgtttccccgctgtcttggaatgtggctgtcaagttcctcatggcaaggaagtttgatgtgctccgtgccatagaattgttccactcctacagagaaactcgaaggaaggaaggcattgtaaagctgaaacctcatgaggaacctcttcgttctgagatcctcagtggaaaattcaccatcttaaatgttcgggacccaacaggagcctccattgccctctttactgccaggttgcatcatccccacaagtcagtccaacatgtggtacttcaggctctgttttacttgctagacagagctgtggatagctttgaaactcagaggaatggactggtgtttatctatgacatgtgtggttctaattatgccaactttgagctggatcttggcaagaaagtcctaaacctgctgaagggagcatttccagctcgtttgaagaaggtgctgattgtgggggcacccatatggttccgagtgccctattccatcatcagtctcctcctgaaggacaaagtccgggagaggattcaaatattaaagacatctgaggtcacgcagcatctgcccagggagtgtcttccagaaaacctgggtgggtacgtcaaaattgatctcgccacttggaatttccagttcctaccccaggtgaacggccacccagatcccttcgatgagatcatcctgttctccctccctcctgccttagactgggactcagtacatgttccaggtccccatgctatgaccatccaagagttggtggactatgttaatgccaggcaaaagcaaggaatctatgaggaatatgaagacattcgtcgtgagaaccctgttggcactttccactgttccatgtctccaggaaacctagagaaaaaccgttatggggatgtaccctgcctggaccaaactagagtgaagctaacaaagcgaagtggccatactcagacagattacatcaatgccagtttcatggatggctacaagcagaagaatgcttacattggcacacaaggtcctttggagaatacctatcgtgatttctggctcatggtatgggagcaaaaagtcttggtgattgtcatgaccacccgctttgaggaaggcggcaggagaaagtgtggccagtactggcctttagaaaaagactctcggatccgatttggcttcctcacagtgaccaatctaggcgtggagaacatgaatcattataagaaaacaacgctagaaattcacaacacagaggaacggcagaaacgccaggtgacccacttccagttcttgagctggccagactatggtgtcccttcctcagcagcttccctcattgacttcttgagagtggtcagaaaccagcagagtctggctgtgagcaacatgggagcacgctccaaagggcagtgccctgagccacccattgtggtccattgcagtgcaggcattggcaggacaggtaccttctgctcactggacatctgcctggcacagctggaggagcttggcacccttaatgtgttccagacggtgtcacgcatgaggacccagagggccttcagcatccagacccctgagcagtactatttttgctacaaggccatcctggagttcgcagagaaggagggcatggtatcctctggccaaaacctgctggccgtggagagtcagtaactctcctacgaacctcctacctgttggccagccttccttaaactaccctggacaccgctgagcctataggttgccatcagttacgctgaagccatggatcaacttctttcttgtgtctcccagcacacgtgtgcacgcaaggcagcctttccctttggctagataaatgtggtgaaattgccactagaaagggccagtagcaatgtgttcttaattcctagcatctgctatcaaactgtgccttattaaaaccaaattgtggctattgatttttgctagggtccccgaggtaagtggggaaggaacctccctcctcctttctcccgccattctttttctgaggtctcctgtctcccactccttccctttcctaggattttatggggaggtttgatgagcatttgcctttctccccagagagcttgaccaagttacatattctagagatcgtcctgagtgccaagccagtttataagtagggcgtgtattccagtcctttctgtcattctgtgtgtgtgtgtgtgtgcacttatgtgtatgggtccatatgtacgtgtgtatataatatatattgtatgtgataatatgatcgtattctataaatacatatacacacgatactcctttccagaagttcctggggctccgtgttgcagttcaggactccttgcttcttggaccctactatttatcctggactagcttgggttggtgatcatgtctcctcttgtcaggctacagagtggtggaagaggacacacacacatctcctccatgttcctgccacagggccccttccttaagtaatgacttatctccttccagttgccacctgttggagccaagaatgtattagtttgtggtgacactgggttagctcagcatggatttcccttatccgatgatttttctacatttacttggccaatttggggaacagacctccactgtgattccatactctctctttgctttcactatcccagggatgggaggcggagggtagagatgaactcactgagcagccagagccaaatgcaatcggtacgaatcttagaaggaaggagggggagcccaggtatgagaaagaaaaaaccactaagaaaatacctccctgggaggatgagctggggccctttttcttttgctggatggttcctttatgcagcttggccctgtctaccgagatgcccatctcttcctgcctgctagcctgctagaccctcaaactgggtgggttctgtgtcaataaaaagcttcaccccctggctgagtgaggtggtcccctgcaatcactgtttgtcccctacccacccaacctgtccctgcctgctcccagcccactcatccttatgtgctagggataaatcaagagtcctcagcactccacattcccaaaaaatcccaggaactcctaaaccttcccctgtgacagaagatgaggttggcagctgatcagacctcaataattttatactgtaataagctctttgaatgtgtatattattatcttttacaatcatttcattttgtatttaatatcaatggactgagtctgattcagaaaataattgtaatgttcatattcaatatcttacagtgatacagttttgtatttacatataaatataccgacatgatcaaaaccaaaaaaaaaaaaaaaaaa

SEQ ID NO: 1956 - protein, 593 aa, Homo sapiens
MEPATAPRPDMAPELTPEEEQATKQFLEEINKWTVQYNVSPLSWNVAVKFLMARKFDVLRAIELFHSYRETRRKEGIVKLKPHEEPLRSEILSGKFTILNVRDPTGASIALFTARLHHPHKSVQHVVLQALFYLLDRAVDSFETQRNGLVFIYDMCGSNYANFELDLGKKVLNLLKGAFPARLKKVLIVGAPIWFRVPYSIISLLLKDKVRERIQILKTSEVTQHLPRECLPENLGGYVKIDLATWNFQFLPQVNGHPDPFDEIILFSLPPALDWDSVHVPGPHAMTIQELVDYVNARQKQGIYEEYEDIRRENPVGTFHCSMSPGNLEKNRYGDVPCLDQTRVKLTKRSGHTQTDYINASFMDGYKQKNAYIGTQGPLENTYRDFWLMVWEQKVLVIVMTTRFEEGGRRKCGQYWPLEKDSRIRFGFLTVTNLGVENMNHYKKTTLEIHNTEERQKRQVTHFQFLSWPDYGVPSSAASLIDFLRVVRNQQSLAVSNMGARSKGQCPEPPIVVHCSAGIGRTGTFCSLDICLAQLEELGTLNVFQTVSRMRTQRAFSIQTPEQYYFCYKAILEFAEKEGMVSSGQNLLAVESQ

SEQ ID NO: 1957 - DNA, 509 bp, Homo sapiens
gtcgccatcttcagccttggattcatcatcctgggcagcctctgtgtcctcctgtccctcgggaagaagagggactaatctgctgcgacccgcgtccatgttctatgcctttgcaggtctctgcatcctcgtctcggtggaggtcatgcggcagtcggtgaagcgcatgattgacagtgaggacaccgtctggatcgagtactattactcctggtcctttgcctgcgcctgtgccgccttcatcctcctctttctcggcggtctccccctcctgctgttctccctgcctcgaatgccccggaacccatgggagtcctgcatggatgctgagcccgagcactaaccctcctgcggccctagcgaccctcaggcttcttccccaggaagcggggtcttggcctggaaccttccagagaggaggcgggacgaattttagccccaccctgctcccatctgcccccctgcaacagtcgcaggctgcttcctctctctgagttcctctgggctgc

SEQ ID NO: 1958 - DNA, 2404 bp, Homo sapiens
  misc_feature (1875)..(1875): n is a, c, g, or t
  misc_feature (1886)..(1886): n is a, c, g, or t
  misc_feature (1908)..(1908): n is a, c, g, or t
  misc_feature (1916)..(1916): n is a, c, g, or t
  misc_feature (1931)..(1931): n is a, c, g, or t
  misc_feature (1954)..(1954): n is a, c, g, or t
  misc_feature (1969)..(1969): n is a, c, g, or t
  misc_feature (2013)..(2013): n is a, c, g, or t
  misc_feature (2386)..(2386): n is a, c, g, or t
cgcagcgcccagcagcacccggagtcgcttggacgccggttcggggctattgcggggtggcgtcgctgggcccgggaaagttcgggactggagagtggcgacgccgggcggcgggacccatggaggcgcgcggggagctgggcccggcccgggagtcggcgggaggcgacctgctgctagcactgctggcgcggagggcagacctgcgccgagagatcccgctgtgcgctggctgtgaccagcacatcctggaccgcttcatcctcaaggctctggaccgccactggcacagcaagtgtctcaagtgcagcgactgccacacgccactggccgagcgctgcttcagccgaggggagagcgtttactgcaaggacgactttttcaagcgcttcgggaccaagtgcgccgcgtgccagctgggcatcccgcccacgcaggtggtgcgccgcgcccaggacttcgtgtaccacctgcactgctttgcctgcgtcgtgtgcaagcggcagctggccacgggcgacgagttctacctcatggaggacagccggctcgtgtgcaaggcggactacgaaaccgccaagcagcgagaggccgaggccacggccaagcggccgcgcacgaccatcaccgccaagcagctggagacgctgaagagcgcttacaacacctcgcccaagccggcgcgccacgtgcgcgagcagctctcgtccgagacgggcctggacatgcgcgtggtgcaggtttggttccagaaccgccgggccaaggagaagaggctgaagaaggacgccggccggcagcgctgggggcagtatttccgcaacatgaagcgctcccgcggcggctccaagtcggacaaggacagcgttcaggaggggcaggacagcgacgctgaggtctccttccccgatgagccttccttggcggaaatgggcccggccaatggcctctacgggagcttgggggaacccacccaggccttgggccggccctcgggagccctgggcaacttctccctggagcatggaggcctggcaggcccagagcagtaccgagagctgcgtcccggcagcccctacggtgtccccccatcccccgccgccccgcagagcctccctggcccccagcccctcctctccagcctggtgtacccagacaccagcttgggccttgtgccctcgggagcccccggcgggcccccacccatgagggtgctggcagggaacggacccagttctgacctatccacggggagcagcgggggttaccccgacttccctgccagccccgcctcctggctggatgaggtagaccacgctcagttctgacccaggcccggctccaccctgcacctcacacgagggagctgcccctgggtgggcggctcggggctgctggggtttccgaggaagtggggccagggcgtcaagggagggctggtgccttcggagcctcccactgccgaccgcacagctccctctctgggggctgagggacccacctggcccctcctctgacacagggctggcccgccaggtggcctcccagcaagccagccttttttgtaagcaaatttctcccctttattgaccaattaactgagcacttgctgctatttctagacatgaaatgtcaccttgctgaggcccagcccagcccagcatagcccgagggctggaaaaacgctttcatctctaaaactgagaaatcatcataattgtgctttcacttcccaggctccatgtgtcttggagccgtcaccccgaggctccctctttaggtcggagattggccttgcctgtcgaggcaagaggctgcagaggcggggacacacctgtgtcttccgggagaggccccctcttctccccagacccncagggggcctntgtgcctccagccccacttccncgggagangctttccccaatccncaggtctctagatcattctgttntcgagtatcctgtgnaggaggcaaaaatgcctggcgccccttctctccaagctcaattntctaagcccctcagggtctcctcctcaccccaccccaggcccttggtgtccaggctgcacccacagatgtctgttgccaaacagcctgccctccctgccggagccggctctgccagccccagattgggaagtctccccgctggagaagggtggggctcctctgagcctgccctgcctcctccatcagatcctttgggaagaagtttctgggagatgcccgcagctgtgcgtgccccagacacaaaggctggcctgtgtgtaagtcaaagtcactcccgcaaacctgaatctcgagctacctattggttctgtgaatgttctgtgtcttttatttattctcgggtgatcagctctttccaagacttcaaaaaantgtcagttacctcgtgcc

SEQ ID NO: 1959 - protein, 402 aa, Homo sapiens
MEARGELGPARESAGGDLLLALLARRADLRREIPLCAGCDQHILDRFILKALDRHWHSKCLKCSDCHTPLAERCFSRGESVYCKDDFFKRFGTKCAACQLGIPPTQVVRRAQDFVYHLHCFACVVCKRQLATGDEFYLMEDSRLVCKADYETAKQREAEATAKRPRTTITAKQLETLKSAYNTSPKPARHVREQLSSETGLDMRVVQVWFQNRRAKEKRLKKDAGRQRWGQYFRNMKRSRGGSKSDKDSVQEGQDSDAEVSFPDEPSLAEMGPANGLYGSLGEPTQALGRPSGALGNFSLEHGGLAGPEQYRELRPGSPYGVPPSPAAPQSLPGPQPLLSSLVYPDTSLGLVPSGAPGGPPPMRVLAGNGPSSDLSTGSSGGYPDFPASPASWLDEVDHAQF

SEQ ID NO: 1960 - DNA, 433 bp, Homo sapiens
  misc_feature (225)..(225): n is a, c, g, or t
  misc_feature (309)..(309): n is a, c, g, or t
  misc_feature (344)..(344): n is a, c, g, or t
gaggacaaagatactcagagagaaaaagtaaaagaccgaagaaggaggctggagagaccaggatccttccagctgaacaaagtcagccacaaagcagactagccagccggctacaattggagtcagagtcccaaagacatgggcttgttagagtgctgtgcaagatgtctggtaggggccccctttgcttccctggtggccactggattgtgtttctttggggtngcactgttctgtggctgtggacatgaagccctcactggcacagaaaagctaattgagacctatttctccaaaaactaccaagantattgagtatctcatcaatgtgatcccatgccttnccagtatgtccatctattggaactgcctcttttcttttttccctttattgggggccctcctgcttggcttgagggttttttacaaccac

SEQ ID NO: 1961 - DNA, 3713 bp, Homo sapiens
attaacaggccgtggttaggaaggacggagaaggggcgttcgctcctttgggacttttcatgcctcgtttttttttcagatgtggcttggtctgggcgcaaggtcccagcagccagcttaagcttactcttctgtgaaaggggaaagtatcccctgtggaaagcggttaaacttgtggagggggtgcgggacgtgagttcttccccatgccaggcgaatggtgtggccttgagctggtccaggagccggctcgacgtgtctgagggaggcccggagggggcggggaggtggcccacagaacgcgggttctgtaaagagacgttgggaagattcgattccgagaagaggaagaaccggattgaaagagagccaggccgctgagggggagggggctgctaagatggcgtcggcctcctccgggccgtcgtcttcggtcggtttttcatcctttgatcccgcggtcccttcctgtaccttgtcctcagcatctggaatcaagagacccatggcatctgaggtgccttatgcctctggcatgcccatcaagaaaataggccatagaagtgttgattcctcaggagagacaacatataaaaagacaacctcatcagccttgaaaggtgccatccagttaggcattacccacactgtggggagcctgagtaccaaaccagagcgtgatgtcctcatgcaagatttctacgtggttgagagtatcttctttcccagtgaagggagcaacctgacccctgctcatcactacaatgactttcgtttcaagacctatgcacctgttgccttccgctacttccgggagctatttggtatccggcccgatgattacttgtattccctctgcagtgagccgctgattgaactctgtagctctggagctagtggttccctattctatgtgtccagcgacgatgagttcattattaagacagtccaacataaagaggcggaatttctgcagaagctgcttccaggatactacatgaacctcaaccagaaccctcggactttgctgcctaaattctatggactgtactgtgtgcaggcaggtggcaagaacattcggattgtggtgatgaacaatcttttaccaagatcggtaaaaatgcatatcaaatatgacctcaaaggctcaacctacaaacggcgggcttcccagaaagagcgagagaagcctcttcccacatttaaagacctagacttcttacaagacatccctgatggtctttttttggatgctgacatgtacaacgctctctgtaagaccctgcagcgtgactgtttggtgctgcagagcttcaagataatggattacagcctcttgatgtcaatccataatatagatcatgcacaacgagagcccttaagcagtgaaacacagtactcagttgatactcgaagaccggccccccaaaaggctctgtattccacagccatggaatccatccagggagaggctcgacggggtggtaccatggagactgatgaccatatgggtggcatccctgcccggaatagtaaaggggaaaggcttctgctttatattggcatcattgacattctacagtcttacaggtttgttaagaagttggagcactcttggaaagccctggtacatgacggagacactgtctcagtgcatcgcccaggcttctacgctgaacggttccagcgcttcatgtgcaacacagtatttaagaagattcccttgaagccttctccttccaaaaagtttcggtctggctcatctttctctcggcgagcaggctccagtggcaactcctgcattacttaccagccatcggtctctggggaacacaaggcacaagtgacaacaaaggcagaagtggagccaggcgttcaccttggtcgtcctgatgttttacctcagactccacctttggaggaaatcagtgagggctcgcctattcctgaccccagtttctcacctctagttggagagactttgcaaatgctaactacaagtacaaccttggaaaagcttgaagttgcagagtcagagttcacccattaagcgcaaagcctcagaagacctggaacaagattctgccatctctgtgatcccaagatgtcagcccttgccccagcaatgctgaattttcttctacttggtcatcaaaaaaggagtgtaatagaagtgaggggagctgctcctccatcttcttcctgaagaagaaccttctctccttcctcttcctcatgaatgggccttagtgcctcagagagttgaggaccgcagcatcccctccactccagagttgggtggtacggattttcaactggccaaccctttgcctccactattgaatttttttcagacccccattcttcatgctggaaatgggattgctggacttggcagctttctttcccctcgtctttgactaggaaccggactcttaatttcctcaggacagactagctggcacattatccctaccttagttctttctctctgactcctggaagaatactcctgtaatctctgtaaaggtttttgggggataagggtgtttaaccacctcccagctttcttcttcttttttttttctgaaaaaaggaaaaagcacacagcacacaatttcaagccattttcagatcagaactccagaagtgttgacaagatgcctattcgtagagttccctcagaagagccatggtgtttatgaagagaagagtagtgattgctctgccagaagcagctcctctttaaactcctcctctcttgatgaatttcttaaggctgaaggaatgaagagagtgggacatggggtaatctttatcccttttgttaaaacaggaggcagccatgggctgggagatcatagcccttcctaggcagaatcctgttcactgccaggctatagtaattattactattttgcaatttgaaatatattctggttgtttttctaaatgtgaagacttaccaaatgaattttagatcattctccagaggagattttttttgctcttctcatcttttccaacagtgttctcctgtttgtggagctaaggtaaagaggggacacttctgtctgtttaacagacagtccatatctgtgaggccagcaaatattttcttaaactcatggggagacagcagattcttgccttggtgaggtcattgctgtgccatatgtcctacccccctgtcttcatgcagggaagttggaaatgggggctacatatgccctctcctccccgtctacaagagttgtggttttccatctgatccttccactcttgtcaggggaagaagggggcctggtatctcaggcagattgttgaattcctgttctatcccttctctatcccaccctgccttgataatatgttagcccataccccaaataactgtctatattagacacccccagccagtttctggctgcctgtctttgctgccatgttttttacaagaaggaaagaattcttgctatttttttttcataatttactatttatgatgtatttaagtgttttattaaggacagagttctgttaggggtgggagggaatatttgagggagggctgggtcttagggaaaggaatggggaagcaacatttttattaagtgttactatttgcctctactttgtattgttcagaaatggcaaatacaatataaaagtgatatatggttttaatgtaataaactttaatgagttattta
